United States Patent Application Publication US 2008/0034453 A1 - sequence listing, part 2

SEQ ID NO: 7456 - DNA, 299 bp, Zea mays
ctctcccagtgtcccagctcagcttagcaatccgtctctctatctacaggcgggggaattaatagatggagggcaaggaggaggacgttcgcctgggcgccaaccgctactcggagcgccaccaatcggcacggcggcgcagggcacggaggagaaggactacaaggagcctccgccggcgccgctgttcgaggcggaggagctgacgtcgtggtccttctaccgggccgggatcgccgagttcgtggccaccttcctgttcctgtacatcagcatcctgactgtgatgggcgtgacaa

SEQ ID NO: 7457 - DNA, 303 bp, Zea mays
ctagggtttgcagatgacgaccgcggcgcgccccacctgggcgccggccaagggcggcaacgagcaggggggcacccgcatcttcggcccctcccagaagttctcctcccgcgacctcgccgcgcacacctccctcaagccaagaaaagacggtcaacagacccaagaggagttacagaagaggaatctcagggaggaacttgaggaacgtgagcgcaagcactactcttccaaggataagtcctatgccgaagaaagagaccggcggaaaagctctagccatctactcttagaaggttcaaa

SEQ ID NO: 7458 - DNA, 304 bp, Zea mays
cccacgcgtccggtggtcttggttccgtggagggagatggcgaaggcgatgtcaaggtttatgggtgggttgcccgagctgaggactacgatgcaacgactgtggtaggaagattcttgagaaagcacactgtcctgcaaacaatagacgaggtttccaagactgaattagagaaatcaggggagatggtggcgatactggcatcccagatcgaggaaaagaaccgatacttgcaggatttggagacaaagaagaatgcgacagaactctccatctcaaggcttgaggaggacaacaggaaact

SEQ ID NO: 7459 - DNA, 279 bp, Zea mays
cacatgtacaagacggaccggcacaagtacgagaacaccgcgaggacctggacccagaggtatgccatgtagtattttctctacctggcctttggggtcgctgctgcgttgtgttgccgggacctggacgtgcctccatgtattcgttctatccttcctgtataatgatgaaccgaattgggtttgcagtacagtgccgcgtgtggtgctgaatgctgctgtattgtgtcacttggaagctgtaattctcagtgtcaaaaaaaactggtacttggaacc

SEQ ID NO: 7460 - DNA, 305 bp, Zea mays
gaatccccaagcaaacaaacagggtagagggagaggagaggagaggagaggagaggttgggtctgggacaccatggctccgatgaagctgtacggggcggtgatgtcgtggaacgtgacgaggtgcgcaacggcgctggaggaggctggctccgactacgagatcgtgcccatcaacttcggcaccgccgagcacaagagccccgagcacctcgtccgcaacccgtttggtcaggtttcagctctgcaagatggtgacttgtacctcttcgaatcacgagcaatctgcaagtacgctgctcgcaa

SEQ ID NO: 7461 - DNA, 295 bp, Zea mays
agcaagttccgccaaatgaaccatatcgtgtcatacttggtgatgtcagggataaattgtactacacacgtgaacgttctcgtcacctattgacatctggaatttctgagattctagaggaggcaacttttactaatgttgaacagtttctggaacctcttgagctctgttatagatcattatgtgcttgtggtgacaaacctatagctgatggaagtcttcttgatttcttgcgtcaagtatcaacttttgggcttgcccttgtgaagctcgacatcaggcaggaatctgatcg

SEQ ID NO: 7462 - DNA, 296 bp, Zea mays
gggaatggagattccagtcgagaagattttccttgcgcagaagatgatgatctacaagtgcaacattgctggcaaacctgttgttactgctacccagatgctcgaatcgatgatcaaatctcctcggccgacacgtgctgaggccactgacgttgcaaatgccgttcttgatggaactgactgtgtcatgctcagcggagagagtgccgctggagcctaccccgaagtggctgtgaagatcatggctcgtatttgcatcgaggcagaatcttccctggaccacgaggcagttttca

SEQ ID NO: 7463 - DNA, 298 bp, Zea mays
agaaacgtgagatttatgatcagtatggtgaagatgcccttaaggaaggaatgggcggtggaggatcccatgttgatccatttgacatcttctcatcattttttggaccctcttttggaggaggtggtggaagcagcaggggaagaaggcaaaggaggggagaagatgtagttcacccacttaaagtttctctggaagatctttacaatggcacctcaaagaagctctctctttcgcgcaatgtcatctgctccaagtgcaagggcaagggctcgaagtctggtgcctcaatgaggtg

SEQ ID NO: 7464 - DNA, 296 bp, Zea mays
gggggttcagctgctgaggaaggtgtggaagatgcctttgaactgcttcatgagatcaatgaacgtgtccggactgggctacgggttggcgattgttttatctacaacaattcttcgtggcggcttaattactgcgtaggaggagaggttacaaccttatttcacttggatcggccaatgtatttactaggatatcttgcaaaccaaagccgtgtctatcttattgataagcaatttaatgttgtggggtatactttactccttagtttgatcgagtataaaacacttgtaatgcg

SEQ ID NO: 7465 - DNA, 231 bp, Zea mays
cctcgatggaatcgtcagcaagtttagcgggggagtgccctttacctaccctgtggatctgttcgagcacttatgggtagtggacaggatagagcggctgggcatagggaggcacttcacaagtgaaatcaaggagtgcctagaatacgtacacaggtacttgggtgaccaaaggcttgccggcacgaaggaccgtccggtctcaaaatgtcgatgacacggccaatgggg

SEQ ID NO: 7466 - DNA, 294 bp, Zea mays
ggcggacaaggtaagcagcaatcgcaggaaccctagcgccgccgcacccgcagaatgggtatcgacctcgtcgccggtgggaggaataagaagaccaagcgcactggcccaagtctgacgatgtctacctcaagctcctcgtcaagctctaccgtttcttggtcaggaggaccaagagcaatttcaacgctgtcattctcaagaggcttttcatgagtaaaaccaaccgaccaccaatctccatgcggcgccttgtcaagtttatggaaggaaaggagaagaacattgctgtca

SEQ ID NO: 7467 - DNA, 293 bp, Zea mays
cccacgcgtccggcaggtacgcccgggtacgtgccacctgagtactaccagagcttccggtgcaccaccaagggcgacgtgtacagctacggggtcgtgctcctggagcttctgtcagggaagaagcccatcgacccgaccgagtttggagacaacaatcttgtcggctgggcgaacatgatggtcaaggagaacaggagcggtgacatcttcgatcctacgctgacgaacaccaagtcaggggaagctgagctctaacagtatctgaagatcgctcgcgactgcttggacga

SEQ ID NO: 7468 - DNA, 296 bp, Zea mays
tccaagccaaagcaagttgctaggtcctttgaaccagcaactgaagcttcctcgtctcatcatcgagaccagtaagcaacatggcggctaatctcaagtgggctcctgttctagccctcctcgtcgtcgttgctgccatggttggcaccaccagcgccggcaacatcgcagtgtactgggagcagaacggcaacgaaggcagcctggcggacgcctgcatctccgggctctacgcctacgtcaacatcgcgttcctcaccaccttcggcaacggacagaccccagttctcaacctc

SEQ ID NO: 7469 - DNA, 301 bp, Zea mays
  unsure (1)..(301): unsure at all n locations
tgtacaggaagcagcacaagaaggatatccatgctgaagcagtaaagaagaggcgccgcgccaccaagaagccatactccaggtcaattgtgggtgcttcgcttggaagtaatccagaagaagagagctgagaagccagaggtccgcgatgctgctagagaagctgctcttcgtgagatcaaggagcgcatcaagaagaccaaggatgagaagaaagcgaagaaggcggangtgagcaagtcccagaagacgcagacaaagggtgcggtccagaagggttccaaaggccccaagttgggcg

SEQ ID NO: 7470 - DNA, 295 bp, Zea mays
ggctgcactgcagacgctgttcaagacgctggccatctccttctccacgatgacgctcttcacggggatcacgccgctgtacaggagcagcctgcagtacgcggggccggcgccgctcgtctggggctgggtcgtcgtctccttcttcacctgcttcgtcggcgtcgccatggccgagatctgctcctccttcccgaccactggttctctgtatttctgggctgcacatttggcaggtccagtctggggtccgttggcgtcttggtgctgcgcttggctggaggccatcggcctc

SEQ ID NO: 7471 - DNA, 295 bp, Zea mays
cgccttcctcttccagtccccgcgcgcgagatcgccgccccgtgtgggccctagatcccgatggcctcgcgccgccgcaccctgctcaaggtcatcatcctcggcgatagtggggttgggaagacttccttgatgaaccaatatgtgaacaagaagttcagcaatcagtacaaggctacgatcggcgcggatttcctcaccaaggaggtgcagttcgaggacaggctcttcactctgcaaatatgggacactgctggccaggaaaggtttcagagtctcggcgttgcattctacc

SEQ ID NO: 7472 - DNA, 293 bp, Zea mays
cggaccgtggcgcaagtaccagaagagcactgagctgctcatccgcaagctccccttccagcgcctggtccgcgagatcgcgcaggacttcaagacggaactgcggttccagtcgtcggcggtggcggcgctgcaggaggccgcggaggcgtacctggtggggctcttcgaggacaccaacctctgcgccatccacgccaagagggtcaccatcatgcccaaggacatccagctcgcccgccgcatcaggggcgagagggcttgagctgtcgcgctgctgttcgtcgttgtaa

SEQ ID NO: 7473 - DNA, 293 bp, Zea mays
ggaagcggaaagggcggcggcggcgctcgtggtcagtcaaagatccaacctccggactcgcgatggggcggcggatcctcaacgatgctctgcgcacgatggtcaacgcagaccggcgggggaacgcgtcggcgcttctccgacccatctccggcgtcatggtctccttcctcaacatcatgaagtaccgagggtatatcaaaaactttgaggtcattgatgagaatagagttgggaaaattagagtggagcttgatggacgtcttaaagattgcaaagctctcacctacagg

SEQ ID NO: 7474 - DNA, 293 bp, Zea mays
ggagcattcgagaagccgaagaaaattcgaagacgaggagcagctacactgcggacggacttcgggcatggagggccagttccacgttggcaaggaggaggtcatccaagcatggtacatggacgacagtcaagaggaccagaggcttcctcatcatcgcgagcccaaagaattcatccctctcgacaaactttccgaactaggaatattaagctggcgcctaaatgctgatgattgggagaatgatgagaacctcaagaaaattcgtgaagccaggggttactcttacatgg

SEQ ID NO: 7475 - DNA, 293 bp, Zea mays
cccacgcgtccggagaggcgcagagcatcgacgatggcgagcggcacatgaagagggagatcagcgagacccacgacaccctccgcttcggcctcaatgccggcgtcaaggccgacctcgcgccgccgcacccgctccagtccagcatccaatcggaggccaagttctgggcggacaagaagaagtttgggacagaggccatctacggatccgccttgaacatccgcaaggatctcgatgcccaaatcctctcaaggttccaaaggccccctggtgctttgccatcatctctg

SEQ ID NO: 7476 - DNA, 210 bp, Zea mays
ccgacgcgtgggtgggtatctgcgtcgtctggtgccctctggtgtacctctatatggatgtcgtcgtctaataaacatctgtggtttgtgtgtcatgaatcatggttgtggcttcgttggtttaatggacctgttgtgtcctctgtgttgtacccaaaactcttctgcagcagtatggcttgaatccttatgaagtttgatgtttgaact

SEQ ID NO: 7477 - DNA, 287 bp, Zea mays
atccagaagcagaagccaccgatcggcgtgccgcgtgcgtgaggcgatcggagcatcccgtcccgaggaggaagacaaccggcgacgcggggggaacatggggaagacgccggtgcggatgaaggcggtcgtgtacgcgctgtcgcccttccagcagaaggtaatgccggggctgtggaaggacatcaccaccaagatccaccacaaggtcaccgagaactggatctccgccacgctcctcctcacccccgtcgtcggcacctaccaatacgccatgtggtacaagg

SEQ ID NO: 7478 - DNA, 279 bp, Zea mays
  unsure (1)..(279): unsure at all n locations
gggggcccctccaacgcgtccccgagccttacgggcctcgcccgccgncggcagcaggtcgccgcctgccgcgccgcgcacgtcaacgccatcgaggtgcttgtcgagctcgcctcgctccagacctccttcctcacgctcgacgaggccatcaagaccaccaaccgccgcgtcaacgcgctcgagaatgtcgtcaagcccaggatcgagaacaccatcagctacatcaagggggagctcgacgaactcgagcgcgaggactttttcaggctcaagaag

SEQ ID NO: 7479 - DNA, 288 bp, Zea mays
cccacgcgtccgcagtccaagcaagcgaagagcacccctcgagatctctccctccccgcgccgccatggacgcagttgactcggtagtcgacccgctccgggagttcgccaaggacagcatccgcctcgtcaagcgctgccacaagccggaccgcaaggagttcaccaaggtcgccgcgcggactgcgatcggcttcgtcgtcatgggattcgtcggcttctttgtcaagctcatcttcatccctatcaacaacatcatcgtcggctccggctgattcgttcaactca

SEQ ID NO: 7480 - DNA, 284 bp, Zea mays
gcatcgatccgccattgctcaccgcacaagtgcacgctcacctcacacacgcagctaagtagctaacgccgtagagtaacaagaaaaggctcgacatggccgaggagaagaagcagggcctgcagctgctggacttctgggtgagcccattcgggcagcgctgccgcatcgcgctggacgagaagggcctggactacgagtacctggatcaggacctggggaaaaagagcgagctgctcctccgcgcaaactcggtgcacaagatgatccccgtgctgctgcac

SEQ ID NO: 7481 - DNA, 244 bp, Zea mays
ggttcgggttcgtgaggatctccggggttcggtgtcgtgggtgagcggatcgagatggcggcgtcggatgttgagtaccgctgcttcgtcggctgcctcgcctgggccacggacgaccactccctccacaacgccttcagcacctacggctatgtcctcgagtccaagatgagcctcgatcgggagatgcataggtcccgctgcttcggcttcgtcaccttctccacggaggaggcgatgcgga

SEQ ID NO: 7482 - DNA, 307 bp, Zea mays
ggtgcccgtggtgctccacagagtgaagcgataccaggagaggcgacgatgcgcaagtgggcgctctcctccgcgctcctccacctctttctcctcaccacactccccgacccagctaagaagctacaagtgaatgccgaggagagcagcgatgacttggctaacccaccgaaggtagaggagaagtttggtgctgtccctcatggcctgtccaccgactctgaggttgcccagagggaagccgagtctatctctaggaagactctcaggagctcagccgagaagtttgagttccaagctgaggttt

SEQ ID NO: 7483 - DNA, 303 bp, Zea mays
catccctgaaaacctcacaaaaccctcgctcgctccccaccaccccgccgcgccgccgcctgtaccagctgcgtcaagatgagtcggcaccctgaggtgaagtgggctcagaggatcgacaaggtttacatcactgtacagttacctgacgcaaaggatgctaaggtcaatttggatccagatggtgtcttcacattctctggcagtgctggtacaaacttgtatgaattgaaactagatctgaatgacaaagtaaacgttgaggctagcaaaataagtgtgggggtcaggtccatattctgt

SEQ ID NO: 7484 - DNA, 286 bp, Zea mays
cccacgcgtccggccatttacaacaccaccatgtcgtctgtccaggaggagcttaataacacacaggacatgctccaaggttacgtggagctctacaattacagtctctcctacgtgaagaccatggcgatcgggtgcgcgatccagctaggcatccctagcgccatccaccgccttggtggggcagcaacaatctcggacatcgtcaccgagaccggcgtcgacccgtcgaagctcccgtatctccgacggctcatgcgcgtgcttaccgtctccagcatcttgg

SEQ ID NO: 7485 - DNA, 301 bp, Zea mays
cccacgcgtccgtccatagcacctgttccagctagctaggagagagctttatttaggcggcggcaacaagatgaacaggaagccaggagactgggactgcagggcgtgccagcacctcaacttcagccgtcgggacgcatgccagcgctgcagtgaaccacgtggagttggtgatcgtagcggcggtggtggcgacttgggtgggcgtggtggttcctccttcggcggtggctttggtgctggctctgatgtccgccctggtgactggtactgctcctgcggcgcacacaacttcgccagc

SEQ ID NO: 7486 - DNA, 292 bp, Zea mays
agcaagcaatccgaattctctgcgatttctctagatctcgaccacccctactagttttggttcctcctttcgttcgagagagcgtttctagtggcaatggcgaagagcgagggtccggcgatcgggatcgacctcggcaccacctactcgtgcgtcggcgtgtggcagcacgaccgggtggagatcatcgccaacgaccaggggaaccgcaccacgccgtcctatgtcggcttcaccgacaccgagcggctcatcggcgacgctgccaagaaccaggtcgccatgaacccca

SEQ ID NO: 7487 - DNA, 294 bp, Zea mays
gcgccggcgatgcaccgctgggccgcggcggcgctcgcagcgttcctcgttgccttgccggctgccgccttctacctccctggcgtggcgcccaatgacttccacaaaataattttctgcagaaagatccacttttggtgaaggtgaataagctgacatcaacaaagacacaacttccctactcgtattactctcttcctttttgcaagccaaacatgatagttgacagtgcagagaatcttggagaagttctgcgtggtgatcgcattgagaactctccttatgtgtttgaga

SEQ ID NO: 7488 - DNA, 292 bp, Zea mays
ccacgcgtccgcgacaaggagggtcttcttcagctcccaagtgacaaagccctgctgagcgaccctgtcttccgccctcttgtggagaaatatgctgcagatgagaaggcattctttgatgactacaaagaggcccacctcaagctctccgaactggggtatgctgatgcttaaatgtccatatcctggagcgggacacaaactgctgcctgtatggactcgtgcgattcagggtgaaccatcagattgtctagtgtcttctttgtaataaatttatctgttcttggtactt

SEQ ID NO: 7489 - DNA, 286 bp, Zea mays
cggacgcgtggttccgggtcgagatggtagactggactggagggagggttagagacgataactctgcagacgacatcaaatccctggacctcacaatcactcactatcttagtgggcccctaagaatcgttgattccgaaggggttccggcttcaccaggcgatcttctcgcggtggaaatctgcaaccttggcccgcttcctggcgacgagtggggctacactgcgatatttgagagagagaacggaggtgggttcctaactgaccacttccctactgcgaggaa

SEQ ID NO: 7490 - DNA, 293 bp, Zea mays
atcccgtcgcatcccatcccactaccacccatctcgtcgtccgccgattcgatccggttcttccaacccaggggcagtgatggcgacgaagaggagcgtgggcaccctcggcgaggcggatctgaaggggaagaaggtgttcgtgcgcgccgacctcaacgtcccgctcgacgatgcccagaagatcaccgacgacacccgcatccgcgcctccgtccccaccatcaagttcctcctcgagaagggcgccaaggtcatcctcgccagccacctgggtcgtccaaaaggtgtca

SEQ ID NO: 7491 - DNA, 289 bp, Zea mays
atcaggcaaacgatacagcccttccctcttcaatcctctcgtcatttcctctcgcttctgctcagctgcaacccagcgcgtagatcttattcttggacgagaactctcctcaagctctccgatttctgttctcgcgccgcttagcaattcaaccccgaaattcttttgcggcgcaatcttcacctgaatcttgggtcgtagccaagaagatgaacaaagacaaagctccgatgccgggagacggcggccccagcgacggcttgccgccgcagtccacgcgccgtgtcgg

SEQ ID NO: 7492 - DNA, 286 bp, Zea mays
  unsure (1)..(286): unsure at all n locations
cccacgcgtccgcttcgacgccttccacggcgacaaggaccacggcggcgtgcgcgacggcaccaacatcgtgctctggaagtggtgcgagggcgacaaccagcgctggaagatcgtcncctggtaaatgtgctgttctgtggctgcactggtcatcaccatgatctggagctttgaaggcatagccacctgtggtcagcagctgctgccgtgttgctagaataaagttggtggcgatcgatcgatcgatctttggtgatgggtgtccctccctgtgtgtttgtgt

SEQ ID NO: 7493 - DNA, 287 bp, Zea mays
cgacatgaaggcgaactgtaccgattcgacaaagacggtaaccaatggaaggaacggggcacgggcgctgtcaagcttctcaagcacaagcagaccggcaaggtccgcctagtcatgcgccaggctaaaacgcttaagatctgcgcgaaccacctcgtggcctccaccacgaagatgcaggagcatgcgggcagcgacaagtcgtgtgtttggcacgctgctgactttgccgatggcgaacttaaggaggagatgtttgccatcaggtttggttcggtagaaaactg

SEQ ID NO: 7494 - DNA, 294 bp, Zea mays
ctacaagcttggaggcattgacaagcgtgtgatcgagaggtttgagaaggaggccgctgaaatgaacaagcgatccttcaagtatgcttgggtgcttgacaagctcaaggctgagcgtgagaggggtatcaccattgatattgctctgtggaagtttgagaccaccaagtactattgcaccgttattgatgcccctggacaccgtgactttatcaagaacatgatcactggtacctcccaggctgactgtgctgtccttatcattgactccaccactggtggttttgaggctgg

SEQ ID NO: 7495 - DNA, 291 bp, Zea mays
cctcctaaaacctcccttgcccgcgcgcacgagcacgcgcatcgacaccttcagctcgtgtgtccgtgcgagcgggcggtttcctcgccaagaactgtcgcgcgggtcgggggattgaggaagagagtgtcggcggcggcggcggcgacgacgacggatttttctggcccgagattcctggtcaaggcaatatgaagtacgtccttgtcaacggcggggtggtgagtggcctgggcaagggcgtcacggccagcagcatcggcgtcgtcctcaaggcgtgcggcttccgca

SEQ ID NO: 7496 - DNA, 294 bp, Zea mays
cccacgcgtccgcattcactaaccaggtcattgcccaacttgaactgtggaaggagaagagctctggcaagtatgagaagaaggtgtatgtgctccccaagcaccttgatgagaaggttgctgctctccacttgggcaagcttggtgccaagctgaccaagctcaccaagtctcaggccgactacatcagcgtgccgatcgagggtccctacaagcctgcccactaccggtactaggcagccagcacacggcttgcagctcactcgggccgttgtgtgctatgaagttcgctac

SEQ ID NO: 7497 - DNA, 291 bp, Zea mays
ggacgcgtggccgccactcgctccctgatggtctgatgagggccactgacgttatgatcgccggaaaggttgccgtggtctgcggatacggtgatgtcagcaagggttgtgctgctgccctcaagcaggctggtgcccgtgtcattgtgaccgagatcgaccccatctgtgccctccaggctctgatggagggtcttcaggtccttcccttggaggacgttgtctctgaagctgacatcttcgtgaccaccactggcaacaaggatatcatcatggttgaccacatgagga

SEQ ID NO: 7498 - DNA, 295 bp, Zea mays
accatcgctacgtgggagatctggagatcctgcagtcgctgggagtcaacgcctacagattctccatctcatgggcgagggttctaccaagaggccgggttggtggcgtcaatgcaggcggggtagctttctacaaccgcctgatcgatgcgctcctgcagaaaggaatacagccattcgtcactctgaaccatttcgacatgccgcgcgagctggaggtccggtacggtggctggctggacgctgggatccgggaggagtacgagcactacgcggacgtctgcttcggggcgtt

SEQ ID NO: 7499 - DNA, 296 bp, Zea mays
accaagcagcagcagcagggatggcgcctctgaagctgtacgggatgccgctgtcccccaacgtggtgcgcgtggccaccgtgctcaacgagaagggcctcgacttcgagatcgtccccgtcgacctcaccaccggcgcccacaagcagcccgacttcctcgccctcaaccctttcggccagatcccggctctcgtcgacggagacgaagtcctcttcgagtcccgtgcgatcaaccggtacatcgccagctagtacgcgtcggagggcacggacctgctccccgcgacggcgtcg

SEQ ID NO: 7500 - DNA, 293 bp, Zea mays
cccgcaagtgctaattggaactttgaccttcactggtaccggaaaataccaggtgtcattgcagcatcctcatttgatgggaaaattggcatatacaacctagagttctctggtctttatgcgactggtgatgctgttggtgccccagtgcgtccaagggctccagctccaaaatggttgaaatgccccaccggtgcatcttttggtttcggtggtaaacttgtttctttccatccggtggcacccacccaaggtgcacaaacatctacatctgaggtgcatgtgcacaattt

SEQ ID NO: 7501 - DNA, 297 bp, Zea mays
gttatcaggaagaaacttggagaggatgacgatgcatctggcaaagagggcaaactaattcgccttcgttatatcgatcagcaaataaggcaacagcgagctttccaacagtatggtatgctacagcaaaatgcttggaggccacagagggggctacctgaaaattcagtctcgattctccgggcttggctttttgaacacttccttcacccgtatccaaaagactctgaaaagctaatgttatcgagacaaactgggttaacaagaagtcagatttcaaattggttcatcaatgcc

SEQ ID NO: 7502 - DNA, 257 bp, Zea mays
gccgcctccccgtcgtgcagttcgccgcggggggtgtcgccacgcccgccgacgccgcgctcatgatgcagctcggatgcgacggcgtcttcgtcggctcgggcatcttcaagagcggcgaccccgcgcgccggcccgcgccatcgtccaggcagtcacccactacagcgacctcagcatcctggccgacgtcaacacggggctccgggaagccatggtcggcatcaacctcaacgtaccaaaggtggaacgatacg

SEQ ID NO: 7503 - DNA, 236 bp, Zea mays
gtggtctcaagagtgatccaatgtgcaatgcctgtgagatggctgtggtatggatgcagaaccaactggcccagaacaagacacaggagctcatcctgacctacattaatcagctttgtgagcgtcttccttctcccatgggagaatcagccgtggactgtgccagtcctgggtccatggccgacattgcgttcactattggaggcaagaagttccagcttgaaccggagcagtac

SEQ ID NO: 7504 - DNA, 284 bp, Zea mays
cccacgcgtccgcctttccccaactcgatctcgcacctagggtttcgtctcgccgctctcgtcctccgcgaagatgccgaagaacaagggtaagggaggcaagaaccggaagcgaggaaagaacgaggctgacgacgacaagcgcgagctcgtcttcaaggaagacgggcaggagtacgcgcaggtgacccggatgctcggcaacgggcggtgcgaggccatctgcgtcgatggcacgcgtcgcctctgccatatccggggtaagatgcacaagaaggtctgga

SEQ ID NO: 7505 - DNA, 288 bp, Zea mays
gagaagtccagaaaattgaagggtcatatacaaagaattcgtgagaattatacaaaagatttcaaaaacaaagatgtgacgaggaggcaaatagctgtggcaacataccttatcgataaactagcccttagggctggcaatgaaaaggacgacgatgaagctgatactgttggttgctgtacgctgaaggttgataatgttacatgtatgcctccaaatcagattcagtttgactttctgggtaaagattcaataagatactttaacaccgtagaggttgaagagctt

SEQ ID NO: 7506 - DNA, 289 bp, Zea mays
gagcgtgcgggctaccgtgtggcacgccgcagaggtgcaagtcccgcgtcgggattcagcacagggtgaccaaggaggactccatgaagtggttccaggtcaagtacgaaggcgtcatcctcaacaaggctcaggccaacacgttgtaaacctcacctgtgggcaaaacagctctctggtctcttctcctcctccgtgtcaacgcaagaccaccacccacctcgccaggcttttttgggtttaatttgtgttctcagccctgatgtttagtctgctagcactctgtggg

SEQ ID NO: 7507 - DNA, 291 bp, Zea mays
atcaaaggagtgattgatgcaatggcttacagcaaattgaatgttctccattggcatatcgtggacgagcagtcgtttcccattgagataccctcataccccaaactgtggaacggttcatactcttattcagagagatatacgatgtctgatgctattgacattgtacggtatgccgagaagcgaggtgtaaatgtgttggctgagattgatgttcctggccatgcccgctcatggggtatcggctacccagcattatggccatcagaaagctgcagagaaccacttgat

SEQ ID NO: 7508 - DNA, 292 bp, Zea mays
gccctcgcgccgccgccgccgtgcccagcgctcgagctcctcgcctgccgcgagctcgcgccgcaacgccaccatgaagttcaacatcgcgaacccgtctaccgggtgccagaagaagctggaaatcgatgacgaccagaaactacgtgccttttatgaccgaaggatctcccaggaggtcagtggtgatgctctgggtgaggagtttaagggttatgtcttcaagatcatgggtggatgtgacaaacaaggcttcccaatgaagcaaggagttctgacttctggtcgtgtc

SEQ ID NO: 7509 - DNA, 294 bp, Zea mays
cccacgcgtccgcccacgcgtccgctagcaaccagctagctcgggcggcagcaggcagccatcatgtcggaggagaagcaccaccacttcttcaaccaccacaagaaggacgaggagcagcccgccggcgagtacgggtactccgagaccgaggtggtcaccgccaccggcgagggcgagtacgagaggtacaagaaggaggagaaggagcacaagcacaagcagcacctcggcgaggccggcgccatcgccgccggcgccttcgcactctacgagaagcacgaggcgaagaag

SEQ ID NO: 7510 - DNA, 292 bp, Zea mays
cccacgcgtccgattgttcttgcttcccgatttccagtcctctgtcgtttgttgtcccatactcccatctgttctccgcgaggcgcaacgaaggcacaaaacccttacctccatcaaaccctagcgctcgtgtccccgtttagctcccgtcgccgctaccatgggctcagatgcggatatggaggactacgggttcgagtactcagacgaggagccggaggagcaggatgtcgatatcgagaaccagtattacaactctaaaggtttggttgagacagacccagagggtgca

SEQ ID NO: 7511 - DNA, 288 bp, Zea mays
cgctcagatctcgctgtgattgatgggtatgctaaggctaacggctatatggacgggagaacactctttgtagactgtactgtccacagatcggagtttgaaatggaatgtgtggacagaaatctggtggcctagcctaacgattcgtataggtctgagagactcgttcagttgtaggatttgtggattttttttagatccgtacaggattgtgctgtcgtgtgcccgccaagtgcttggtggttgccaaaaggtgatgcctctgatcggtttggatatgggatttgc

SEQ ID NO: 7512 - DNA, 294 bp, Zea mays
atatcccctgttcctcgtcctcgtccaccacagccgctccgcgccccgcctcccccgccgaaccgccagcgcccggccgctgcgcttcctctcctgctcgacctcagcgccgccgctgttcgcagccgtcgcatccatggactcgccgccccagggttaccgcaccaacgtcggcatctgcctcgccgacccatccctcaccaagattttctcggcttctaggatcgacattcctagcgcgtggcagatgcctcagggtggtatagatgcaggggaagaaccaagggcggctgc

SEQ ID NO: 7513 - DNA, 292 bp, Zea mays
ctccaagacgcttctcttcggcgagaagccggtcaccgtctttggcatcaggaaccccgaggagatcccgtggggtgaggctggtgctgagtatgtcgtggagtccaccggtgtcttcactgacaaggacaaggctgatgcacatctgaagggtggtgccaagaaggttgttatctctgccccaagcaaagatgcgcccatgtttgttgttggtgtcaatgaggacaagtacacctccgatgttaacattgtttccaatgctagctgcaccacaaactgccttgctcccctt

SEQ ID NO: 7514 - DNA, 283 bp, Zea mays
atggcggcggcaccggcaggcggcggccctcgggcattgtcccagcgggagcaggacatccagatgatgctcgccgccgatgtccaactcggcaccaagaactgcgacttccaggtggagcgctacgtgtacaagcgccgcactgatggtatctacattattaaccttggaaagacctgggacaagcttcagttggccgccagggtcatcgttgccattgagaatccgcaggacattatcgtgcagtctgctaggccctatggccagagggctgtcctcaagt

SEQ ID NO: 7515 - DNA, 287 bp, Zea mays
ggatttcattctcgcacatgtttgaggcacttcgatatgatggccctggggataagatcaagttgccaccatcttcgtttaaggagttgtctgatgaaggagctctcgataaaggtcccatgtacttcaggttgtcgaaggttagggacacagtcccaggtgctgctatggaacaagatgctgggacaacctgttgtggtgttcttgaattcacggcaagggaaggctctgctgaactcccgctgcatgtttggaacaacctgtttgggagtgacaccccagaggtc

SEQ ID NO: 7516 - DNA, 288 bp, Zea mays
cggagcacgacgcacgcagagccgcagagatccgtcacactgcaagttttgaaaactgaactgtaagatggcatcagcagagctttcccgtgaggaaaatgtgtacatggcgaactcgccgagcaggcagagaggtacgaggaaatggttgagttcatggagaaggtagcgaaaactgttgactcggaggagctcactgtggaggagcgcaacctcctgtctgttgcatacaagaacgtcattggagcccgccgtgcctcatggcgcatcatctcctccatcgagcag

SEQ ID NO: 7517 - DNA, 288 bp, Zea mays
cttggaggttatgatagggatgggccacagctctacatgatagaaccctcaggagtttcctacaaatacttcggtgctgcattggggaagggaagacaggctgcaaagactgagatagaaaagttgaaactttcggagcttacctgccgggaaggcattgttgaagttgcaaagataatttatggagtgcatgacgaagcgaaggacaaagcttttgagttggagttgagctggatctgtgatgaatcgaaccgtcagcatcagaaggttccaaatgaactgttggag

SEQ ID NO: 7518 - DNA, 304 bp, Zea mays
ccctgatgcttgcggctgggcatttggtatgaacgtgcttgatctggttgaatggaggaacaagaatgtgacaggcatatatcattattggcaggagcgcaatgctgatcatactctatggaagcttgggtctttaccacctggacttcttgctttctatggcttggttgaagcattggatcccaaatggcatgtcttgggacttggctacacaaatgtggatcttgctactatcaaggaaggtgcagtactgcactacaatggaaatatgaagccatggctcaaaatcgggatggagaagtac

SEQ ID NO: 7519 - DNA, 305 bp, Zea mays
gtgtgttttcagaactacaacgccaagctgtctgacttcggtttggcaaaggacgggccaaccggcgaccagagccacgtgtccaccagagtcatgggcacctacggatatgctgctccggaatatctcgcaacagggcatctcacgccgaagagcgacgtctacagcttcggcgtcgtgctgctggagatgctgtcgggccgccgcgccatggacaagaaccgcccggccaccgagcacaacctcgtcgactgggcgcgcccctacctcagcagcaagcgccgcgtctcccgcatcctggacga

SEQ ID NO: 7520 - DNA, 303 bp, Zea mays
ccttccggcgcacgagctcgcccgagatggcgaacgcgagatcgggtgtcgctgtgaacgatgagtgcatgctgaagtttggcgagctgcagtcgaagaggctgcaccgcttcataactttcaagatggacgacaagttcaaggagatagttgtggaccagatcggggatcgcgctaccagctacgatgacttcacaaacagcctccctgagaatgactgccgatacgcgatctatgatttcgactttgttactgcagaggatgtccagaagagcaggatcttctatatcctatggtccccat

SEQ ID NO: 7521 - DNA, 303 bp, Zea mays
gagaagcagccaagcaagagcctttccgagtgtgtggagcagcagcagcagcagccgtaaggtcttcggaaaggtggcgatcgtcacgggcgccgccagcaaactgggcgaggccatcgcgaggaagttcgtcgacaacggcgccaaggtcatcctcgccgacatcaaccgccactcctgcgagaacatagtagcggctctcaacaagaccaaccatggccccgcggtggctcacgcgatgcgcatcgacgtcagcgaacccgacagtatcctggccaccgtcgaggaggcgaagaaggtcta

SEQ ID NO: 7522 - DNA, 305 bp, Zea mays
cgtcggttcacttctccaggtaaggaaagggttcgtactcatggcgccgccgcagccaaagtcgggcctcttcgttggcatcaacaagggtcatgtcgtcaccaagcgcgagctgcctccccgcccgtgccaccgcaaggggaaatcaacgaagagggtgtctatggtcaggggcctgatcagagaggttgctgggtttgctccttatgagaagcgtatcactgagcttctgaaggttggcaaggacaagcgtgccctgaagcttgctaagagaaagcttggaactcacaagagggcaaagaaga

SEQ ID NO: 7523 - DNA, 307 bp, Zea mays
gacccacgcgtccgccacgcgtccgatctcgaggaggtcatgacaccgtgaagatagttgacagcatccaagatcgtgacataaatcaggtctatgtaattagtggagatggtactcaaaggggtgctggagtgattttcgaagaagttagaagacgcggtctcaaagtttctgttgctggcattccaaagactattgacaatgacatccctgtaattgacaagtcatttggtttcgacacagcagtcgaggaggctcaacgtgcaataaatgctgctcatgtggaggctgtaagtgctgagaatgg

SEQ ID NO: 7524 - DNA, 304 bp, Zea mays
gcgccccccacccacccacccactcgcttcagccgcctccgccgcgcgtacaagcaggtggagacaggatgccggctggccacggcctgcgctcgcggacgccgacctcttcgcgcgccccttccgcaagaagggctacatcccgctcaccacctacctccgcacctacaagatcggcgattacgtcgatgtaaaggtgaacggcgccgtccacaaggggatgccgcacaagttctaccacggccgcaccggtcgcgtctggaacgtcaccaagcgcgccatcggcgtcgaggtcaacaagcat

SEQ ID NO: 7525 - DNA, 307 bp, Zea mays
  unsure (1)..(307): unsure at all n locations
ctcctctccagaataccagcgccgagctgcaatggtggagcacttcaacagaagcaacaagtggaagaagcgtggcatttcttgtgtgccaattacatatgaggtcaatcttcggccaactccaggcaaggtgtctatcatgaatgatggttccatcgctgttgaggtcggaggggttgagataggccaagggttgtggacaaaagtgaagcagatgacggcattcggattgggacagctgtgccctgacggcggcgaaagcatcctggacaangtccggtcatccaggccgatacattgagcatga

SEQ ID NO: 7526 - DNA, 299 bp, Zea mays
cggacgcgtgggttggcctccagacggcggaccggttcttcaagcagatcctcaacagcatcctgcacgcgcccatgtccttcttcgacaccacgccgtccggcaggatcctcagcagggcgtcgtcagatcagacgaacgtcgatctcttcctgccgttcttcgtctggatgagcgtatccatgtacatcaccgtgatcagtgtgctgatcgtcacgtgtcaggtggcgtggccgtccgtcattgccataatccctctggtgatactgaacatctggtaccggggctattacttgtcg

SEQ ID NO: 7527 - DNA, 298 bp, Zea mays
cggacgcgtgggcggacgcgtgggcggacgcgtgggtgttggccctgatgccaccaaaacattcaacgaagcattggacaccaccaagactgttatttggaacggccccatgggcgtgtttgagttcgagaagtttgcagctggcactgaggcgattgccaagaagctagctgagcttacaaccacgaagggtgtcactaccatcatcggcggcggcgactctgttgctgctgtcgagaaggctgggctggccgacaagatgagccacatttcgaccggcggcggtgcgagcttggaa

SEQ ID NO: 7528 - DNA, 297 bp, Zea mays
ggtacgcttcgtgccgccgccgcaacctcctcctccccgtcacagattgcagatcatttaacataaatggctgactcagaggacattcagcccctagtctgtgacaatggaactggaatggtcaaggctggctttgctggagatgatgctccccgtgctgttttcccaagtatagttggtcgtccacgccacactggtgtcatggttgggatgggacagaaggatgcttatgttggtgatgaggcccaatccaagaggggtatcctgactttgaagtatcccatcgagcatggaatc

SEQ ID NO: 7529 - DNA, 300 bp, Zea mays
gccgccgtcgcagcaatcacagcagcccggagaacggccaggtccgacaagatgcagatcttcgtgaagacgctgacagggaagaccatcaccctcgaggtcgagagcagcgacaccatcgacaatgtcaaggccaagatccaggacaaggaagggatcccgccggaccagcagcggctgatctttgccgggaagcagctggaggatggccgcacccttgcggactataacatccaaaaggagtctacgctccacctcgtgctcaggctccgcggtggcatcattgagccctcgctgcag

SEQ ID NO: 7530 - DNA, 301 bp, Zea mays
cccacgcgtccggtgttcttgcgcgtacgcgtacacagccccgatccgaatcgtcctcctcgcgagcctcgccgatcccccactcccctcccctcgcttcaagatgcagatctttgtgaagaccctcaccggcaagactatcaccctcgaggtggagtcttctgacaccattgacaatgtcaaggctaagatccaggacaaggagggcatccctcctgaccagcagcgccttatcttcgccggcaagcagcttgaggacggccgcacacttgctgactacaacatccagaaggagtcaacc

SEQ ID NO: 7531 - DNA, 301 bp, Zea mays
aggtggtgggcaggaagagcgagctgctgctgaggtcgaacccggtgcacaagaagatccccgtcctgctccaccacggcaagcccatctccgagtctctgatcatcgtccagtacatcgacgaggtctggtcctccggcgcgccggccttcctccccgtcgacgctcacgcccgcgccgtccagcggttctgggcgcagtacgtcgacgacaagctgccttgggcgatccgcatactgaagggaacggacgacgggggcatggagcaggcggcggggcagctgtccgcggccctgcagct

SEQ ID NO: 7532 - DNA, 300 bp, Zea mays
accaactaggatcgatctctcgacagcaaatagctagcaatggagaagtacaccaaagccctagcgtcattgctcaccatgctggtgctggcacctctcctcgccatggccaccgacccagaccccctgcaggacttctgcgtcgccgacctcaacggcaagccatcagtgaacgggtacccatgccagccgccgtcgtcggccggcgaccagttcctcttctcgaccaagatcgccacgggaggcgaccccctggccaacccgaacggctccaacgtgacggagctggacgtttccgag

SEQ ID NO: 7533 - DNA, 166 bp, Zea mays
cccacgcgtccggcgccgagacccacatctcgatccgggacctggacgccaagcacgggcgcaacggcctgctgctcctccgcatcggcgccgtgcccaccctgttcgtgtcctcgcccagcgccgccgacgccgtcctgcgcacccaggaccacatcttcgcgtc

SEQ ID NO: 7534 - DNA, 288 bp, Zea mays
caaacacttgcgccgccactgcctcacaggtaaggccgccatggtctccggttcgggcgtgtgcgcgaacactcgtggtggacgcgcgccaccacatgctgggccgtctctcctcgatcatagccaaggagctgctcaatgggcagaaggtggtcgtcgtccgctgcgaggagatctgcatgtcgggcggcctcgtccgtcagaagatgaagtacctccgcttcctccgcaagcggatgaacaccaagccgtcccacgggcccatccacttccgcgcccccgccaaga

SEQ ID NO: 7535 - DNA, 294 bp, Zea mays
  unsure (1)..(294): unsure at all n locations
gctgcgagctgggcggcgagggcgcgcggcgcatggcgaggagcaggacgtcgggcggcggcgagtacgagagcggcagganccacgacggcgcgctgcagaagccgctgctgcccaacagcgggagctggtaccggatggggatggggtcgcgccagtccagcctcaacgccgccggcacctcctccatggccgtcctgcgcgagtcccacgtctccgccttcctctgcacgctcatcgtcgcgctcggccccatccagttcggcttcaccggcggctactcctccccgacgc

SEQ ID NO: 7536 - DNA, 298 bp, Zea mays
acggccgccagcgtccggtacgcacggcaccatggtgctctcgcacgcgagctccggccgggacgacgacgacgcggtggcctccaccttcgcgtcgcgctacgtgatcgagcgcctgccgcggtaccggatgccggagcggtcgatcccgcgggatgcggcgcacagatcatcagcgacgagctcatgctggacggcaacccgcgcctgaacctggcgtccttcgtcaccacgtggatggagcccgagttcgacaagctcatcatggactccatcaacaagaactacgtcgacatgg

SEQ ID NO: 7537 - DNA, 293 bp, Zea mays
cccacgcgtccgcctaaaccgaaacctatgccacatccagagccaaagcctgaacctcaaccaaagcccaaccctgaacctcaaccaatgcccaagcctcaaccagaatccaaaccagagccattgcctacaccgaagcctgaacctaagcccgaacctaagccagagcctaagcccgaacctaaaataaaaccagagccagaacctgaacccaaaccagagcctaagccagagcataaacctgaggcaaagccagagccttaacccaaaccgaaaccagagcccaagccaga

SEQ ID NO: 7538 - DNA, 296 bp, Zea mays
gcgaaggaggaggagcagcagcagcaggcggcgccgaggagcggcatcccactcagtgcttgcaaccatggctaggggattgaagaagcacttgaagaggctcaatgcgcccaagcattggatgctcgacaagcttggcggagcttttgctcccaagccatcttctggacctcacaagtccagggagtgccttcctctgatcctcatcatcaggaacaggctcaagtatgctctgaactaccgtgaggtcatttctatcctgatgcaacgccatgtacttgttgatggcaaggtca

SEQ ID NO: 7539 - DNA, 297 bp, Zea mays
cccacgcgtccgcccacgcgtccgccaccacctccacctcgtcgtctcccaccaccgccgagcgcgagccctagcccgatctagccggcggcaggcaccagatcacgccgcccgcgggtcccgggacgcgccccgccgaatccgccgctcctcgcactgcaacacgcccggaccacggtgcatttgatccgtcccggccgcctacacgatgtccaagtcgggagcgctggatcttgcttctggcctcggagggaagatcaacaaggtggaagtcaagtcggccgtcgatgagtatga

SEQ ID NO: 7540 - DNA, 298 bp, Zea mays
attaccactggaaaggacgacaagggtcttaagatttatgatcctggttaccttaacactgcccctgttcgctcgtccatctgctacatcgatggagatgagggaatccttcgctataggggttatccaatcgaagaattggctgaaagcagctcgtttgttgaggtggcctaccttttaatgtatgggaacttgcctactcagagtcaattggcaggctgggaatttgctatttctcagcattctgctgttccccaaggactgttggatatcatacaatcaatgccccatgatgctc

SEQ ID NO: 7541 - DNA, 281 bp, Zea mays
cccacgcgtccgcttttctcgtttagaacctctaaaatttcccccactcgccagtcgcagcagcacctgtagcagccatggacgccagcggaccggtagcaaggggaagaagggggcggccgggcgcaaggcaggcggccccaggaagaagtcggtgacgcggtccgtcaaggccgggctgcagttccccgtcggccggatcgggcgctacctcaagaagggccggtacgcgcagtcgtgtggcactggcgcccccgtctacctcgccgccgttctggagt

SEQ ID NO: 7542 - DNA, 297 bp, Zea mays
gcggtggacgttctcgacgagaagctccggaacgccacaacgctcggcgcgacgcacactgtgaacgcggcgaaagaggacgccgttgagaggataaaggagatcactggcggtaggggtgtcgacgtggctgtcgatgcgctcggtaaggcgctcacgttttcccagtgcgccaggagcgtgcgcgacggaggcaaggcggtgatgatcgggctcgcggcgacgaatgtagtgggggaggtcgacataacccgcctcgtacggcgacaggtgaagatcatcggctcgtacggcgcg

SEQ ID NO: 7543 - DNA, 293 bp, Zea mays
cgttaaccgggattttgccagcaatcagcttgataggcgacacgtcattgttgggatcttctacttcattggctttgcattgttctgcctggaggctttgctaagcgtgtgggtcattcagcgcgtctacctgtacttccgagggagcgggaaagaagcggagatgaggcgtgaagcagcacgcggtgcagcgagggcagcgttttgatgaaaaccgtatatagatgatatatataggcacgacttacatactgttcataatagtttgaagtgctttaggtcaagaggcatgt

SEQ ID NO: 7544 - DNA, 295 bp, Zea mays
agaaggccaaggctcgtgcattgaagcgcgtcgttggtgatccgttcaggaaaggtgttgaacagggcccgcagattgacgacgagcaattcaaaaagatcttgcgctacattaggtatggtgttgacggtggagctacccttgtgacgggtggtgataggttgggtgacaagggtttctacatccagccaacgattttctcagatgtccaggacggcatgaagattgctcaggaggagatatttgggcctgtgcagtcgatcctcaagttcaaagacctcaatgaggttatcaa

SEQ ID NO: 7545 - DNA, 295 bp, Zea mays
gctggaaaccggacatgcccacagactcaacaagtcctttcgaacacaattatcaccccgaaccaccttgtgagaagcatgatctcacagtggtgcacagacaacgggatcactctgccaccggttgagaaccaagatgaagatctggttacaaacaatgagcgggagacatttcgtaaactgtttgagaggatcgtatcgtcgtcgtcagacctgtctgagcagagggaagccattaaagaactcaggctgcggactaagtgcaacagttcactgagagcagcgataggagaga

SEQ ID NO: 7546 - DNA, 299 bp, Zea mays
cagagaagcttctagcccagttagttgagactgagatgaacagacgtttgaaggagggcacttacaaaggaaagaagtttaatgcaatctgtcacttctttggctaccaagctaggggagcactgccttccaagtttgactgtgattacgcccatgtcttggggcatgtgtgctaccacatcatagctgccggtttgaacggttacatggccacagtgacaaatgttaagagtccagtgaacaagtggcgatgcggtgcggctcctatttcgtctatgatgactgtgcagcgatggtcg

SEQ ID NO: 7547 - DNA, 283 bp, Zea mays
aaacaaattaccgttctaccattccttttggaaccgtacaaccaaaccctcattggatctcgcaaatgatattctcagcatgttcaccgcaagggagatgggaaaggtgatcttcacaaatagtggatcagaagcaaatgactcccaggttaaactagtgtggtattataataatgcactgggaaggccagacaagaagaaatttattgctcgctcaaaatcgtaccatgggatcaccttgaatgcagctagtcctacaggtctgccagcgcatcatcaggag

SEQ ID NO: 7548 - DNA, 298 bp, Zea mays
ctactactcaagtatccatccttattgagtacagtgttgatccatggactcggaaggagttgtagcagcaaaggtggcagatgagactactaaaccggcaatccaagaagaccgcgccgagagcaaggccgggatgactgatctgctgatgctgaccgacaagtcgcagctgcaggcgctggcgatgctgctgcggaacaacgaggagctcatgatgagccaggcgatcaagtcggagacgaagcgcattgagtacctcaagacggtgagcgactgctacacgcggacgatgaagctc

SEQ ID NO: 7549 - DNA, 288 bp, Zea mays
cagcttataagtaccttatgctgtaacaaaatacgccttgaaaacatctcaaagctctgatcattcttaggcagaggtggcagcagaagccttggcggcggcagaaagcttagacctcctctcggccaagctctcactgctttgagatgttttcaaggcctattttgttacagcttataagtaccttatgctgccctggctgtgttgcatcagtcgaccctccctacttagacttatgagtaattgttgcaattttgtatggacatggtactggcttgtcgggatttt

SEQ ID NO: 7550 - DNA, 292 bp, Zea mays
cggacgcgtggttcagatccactcgtcacacatccgcgttaccccctctcccttggtttcctctcccaccaccaacccccatcccggttatctccgccgccgcccgctttgggaaggcgcgacgaaggcaggcgagatgctccagccggacgaggaggaaagaggagcagcagggccggacgagagatgttcctgtgggactggttctacggggtgctggcctccctcggcctgtggcagaaggaggcgaagatcctcttcctcggcctcgacaacgccggcaagaccacgc

SEQ ID NO: 7551 - DNA, 293 bp, Zea mays
aggacctgcagatatcaactatgttcacgcaccatcagaagatagtagtggtagaccatgagttgccaaacgagggctcccagcagaggaggatcgtcagcttcgttggcggaattgacctttgtgatggaaggtatgatacccagtatcactccttgtttaggacacttgacactgtccatcatgatgacttccaccagccaaactttgagggtgggtcaatcaagaaaggtggtccgagagagccatggcatgatatccattcacggctggaaggcccaattgcttgggat

SEQ ID NO: 7552 - DNA, 113 bp, Zea mays
gggttggcttctcctccccctccggttcgggttcgggttcgtgatgttctccggggttcggtttcgtgggtgagcggatctacatggcggcgtccgatgttgagtaccgctgc

SEQ ID NO: 7553 - DNA, 300 bp, Zea mays
aatgggaaacctatcgatctgacaccagaacaagaggaggttgcaacaatgtttgctgttatgaaagacacagactatgcgggcaagccaacattcattgataacttttcactgattggagaaaagttcttggtaaaaatcatattattaagaacttcgagctttgtgatttcacaccaatatatgaatggccccctcagagagaggagaggaagaagcagatgacaacagaggagaaaaaaacattgcggggagaccaattgaaacaagaggagaagtacatgtgggctgctgtagatg

SEQ ID NO: 7554 - DNA, 312 bp, Zea mays
cttcgcggaggccgaggcggactgcagcctggaggacgtgcgcttcctggagcggcccctgctgctgcccaaggaggacctcgtgccttaccccggcgacgaccgctggcccgtcgagccgcacaacaccatcatgatgatgcagatcaccaagttcacctgcggcggcttcgtgatgggcctgcggttcaaccacgcgtcggcggacggcatgggcgcggcgcagttcatcaacgcggtgggggacatggcgcgggggctggcggagcgtagggtgctgcccgtgtggcaccgggagaagttcccggaccc

SEQ ID NO: 7555 - DNA, 292 bp, Zea mays
cggaccgtggtcgagacgcgtgggtgcgcctctacatttcttctctctctgctcctccgcctccgcctgatccatccaagacagggatcgccatgtcggaatcggaggagcaacacttcgaatcgaaggccgacgctggggcgtccaagacctacccgcagcaggctggcaccgtccgtaagaacggcttcatcgtcatcaagaaccgtccctgcaaggttgtggaggtttctacctccaagactggtaagcatggccacgccaaatgccactttgtcgccatagacatatt

SEQ ID NO: 7556 - DNA, 290 bp, Zea mays
cttcttgttaggcaaggcaaaagcagaagcaaaaagagaaaggtcttgttgccgatggggagctcagggttctcgtggacgcttccggaccaccccaagctccccaaggggaaaccggtggctgtcgtcgtgctggacggatggggcgaggccaaccccgaccagtacaactgcatccatgtcgctcagactcctgtcatggactcgctaaagaatggcgctcctgagaaatggagactagtgaaggctcatggaacagctgtgggcctcccatctgatgatgacatggg

SEQ ID NO: 7557 - DNA, 288 bp, Zea mays
ggcaattctccaggctccagcagtccaccaccatggcattgcgtgccatgagaccgctgctgcctgctgccaccttcgtcatggttgcaatggcctcctggggagcgcacggcggtgccagcgatgatgccagttctctacttgccttcaaggcagagctcgctggcagcggctccggtgtgctggcctcctggaacggcacagccggcgtctgcagatgggaaggcgtggcgtgcagcggcggcggccaggtggtgtcgctgagcctgccctcctacgggctcggcg

SEQ ID NO: 7558 - DNA, 290 bp, Zea mays
ctctcttgcaagtttaagcttcgcctccagccatgggtaaggagaagtctcacatcaacattccggttattggccacgtcgactctggcaagtcgacaaccaccggccacctgatctacaagcttggaggcattgacaagcgtgtgatcgagaggtttgagaaggaggccgctgaaatgaacaagcgatccttcaagtatgcttgggtgcttgacaagctcaaggctgagcgtgagaggggtatcaccattgatattgctctgtggaagtttgagaccaccaagtactat

SEQ ID NO: 7559 - DNA, 292 bp, Zea mays
gcgcacacggaccagttccgctgcctcgacaaggcggccatcgtggcgtcccaggacgagttgcgccccggcggcgccgcgcccgcagacccctggaggctctgcagcgtgcagcaggtggaggaggtcaagtgcctcatccgcatcgtgcccgtctggtccacggggatcatctactacgtcgccgtggtgcagcagtccacgtacgtggtgctctcggcgctgcagtccgaccgccacctcggcggcgccggcttccagatccccgccgcgtccttcaacgtcttcggca

SEQ ID NO: 7560 - DNA, 295 bp, Zea mays
ttcttattttgccagcaggaaaaaccttgccacgagtcgccgacactccatcccggaagagctaacgaggtgacaccccaccgcgcccatgggtgacagccagtactccttctccctcaccaccttcagtccgtcggggaagctcgtgcagattgagcacgcgctcacggctgtcggatccgggcagacctcgctcgggatcaaagctgccaatggtgtagtcattgccactgagaagaagctgccttctattttagtggatgaaacatctgtgcaaaagattcaggcactaaca

SEQ ID NO: 7561 - DNA, 296 bp, Zea mays
caccggcgtccggcggtggtatcacgatggtggcgttgctgggccggcggatcggggtggctgcggcactgccgcgttcatcgccctcgtggcgttcggatccgcctcatcctcgcccaagtccttcgtgaagtccaccgtctccgcccacgacgtcgtcatcttctccaagtcatactgcccgtactgcaaaagagcaaaggccgtgtttaaggagcttgagttgaagaaagagccatatgttgtggagcttgatcagcgagatgatggctcagagactcaggatgccttacttg

SEQ ID NO: 7562 - DNA, 322 bp, Zea mays
tctcacgcgtccgcggacgcgtgggcttcccggtggtggcgatgttcttgagggtagtgagtttgtacatgctgctgctttagtaagtcagtcagcacttttctcaaagggtctagctgaaccacatatgtcagatgctgccatggttcacccatctgaggtagctgccaaaggttcacgttggaaagatttgtttgaacctggagtgaggcgtgccctgttagtcggtgttggaattcagatccttcaacagtttgctggaataaacggtgttctgtactataccccacaaattcttgagcaagctggtgtggcagttatt

SEQ ID NO: 7563 - DNA, 92 bp, Zea mays
ccacgcgtccgcgagaactccatttcgatctcatttgaaatcaacccatcctcgtttcctccgtctagcagcctctcaccctcatggccaag

SEQ ID NO: 7564 - DNA, 137 bp, Zea mays
gacgcacggcgcaccgcacacctcactgccgctcccttctcgtatcctctcctctcctctcctcggcggatccggcaccgacccatcggccctctggtcgctccttccgccggaatcgctgctcctctctgtgctgt

SEQ ID NO: 7565 - DNA, 314 bp, Zea mays
ggttgtacccacgtatggggttttatccctatgctgctgtgacagaagaatcagccattgctgctttgaagagagcattcggttcgctgaacacccatcttgcatcaaacacattccttgttgggcattcagtgacacttgcggatattgtgctgacatgcaatctttatatgggctttagccgtatcttgactaagagttttacctcagagttccctcatattgagaggtacttctggaccatggttaaccagccaaacttcaaaaaggtcattggtgacgtgaagcaggcagaagctgtgccacttcttcca

SEQ ID NO: 7566 - DNA, 315 bp, Zea mays
ataacaccgccgaggaagcagcaagcagcaaggtcgacatgtcgtctccgccgccggtgaagctgatcggcttcttcggcagcccgtacgcgttccgcgcggaggcggcgctgtgcctgaaggcgtgccgtacgagctgatcctggaggacctgttcggcagcaagagcgagctcctgctccaccacaaccccgtgcacaagaaggtgcccgtgctcctccacggcgacggccgggccatctccgagcccctcgtcatcgccgagtacgtcgacgaggccttcgacgggccgccgctgctccccgccgaccccta

SEQ ID NO: 7567 - DNA, 199 bp, Zea mays
aacctccaaccctagccgcgatccgacaacgcctccatccctagccgactgcctagcaaatatcagagctcaagagtcagggcgccatggcgacagagacggagaccttcgcctttcaggctgagatcaaccagctgctctcagtcatcatcaacaccttctattccaacaaggagatcttcctccgggagctcatttc

SEQ ID NO: 7568 - DNA, 320 bp, Zea mays
ggcttctcatgtggcattggaatgtgctcttcaatcacacccgaacatggtcatcctaggagaggaggtggctgcttccaaacttacaatttttgatattacgaagcagatttgtgatgcggttcaggcaagggcagaaaaagacaagaaccatggggttgttcttattcctgagggtcttgtggagagtattcctgaactatatgctctgcttcaggaaatccatggcctccatggcaaaggtgtttctgttgagaatatctcttctcagctttcaccctgggcatctgcactctttgagtttttgcccccttttatca

SEQ ID NO: 7569 - DNA, 312 bp, Zea mays
  unsure (1)..(312): unsure at all n locations
cagacggtgggccggtagcagcctagcaggagcgcagcagcaagctcagccccccaggccccagccctactgccaccgcgccgaacgacatggccgagccggacgangaccgtccagctgaggaggaggaggccgcggcggccggcgaggatgaggacaccggcgcccaggtcgcgcccatcgtgaagctggaggaggtcgccgttaccaccggagaggaggacgaggacgcgctcctggacatgaaggcgagctctaccggttcgacaaggaggggaacagtggaaagagcgcggcacaggcactgtgaag

SEQ ID NO: 7570 - DNA, 315 bp, Zea mays
ctagattggatgcccagcagaagaagcttaacctccccatccttcccaccactacaatcggttcgttcccacaaaccgttgagctcaggagggtccgccgtgagtacaaggcaaaaaagatctctgaggaggaatacgtcactgccatcaaggaggaaatcaacaaggtcgttaagcttcaagaagagcttgacattgatgtgcttgtgcatggcgagcctgagagaaacgatatggttgagtacttcggtgagcagctctccggttttgcgttcactgccaatggctgggtgcagtcttatgggtcaaggtgcg

SEQ ID NO: 7571 - DNA, 304 bp, Zea mays
ccacgcgtccgagctacaatcctaaaaccatctgcttcagctagccccaagtttagtcggccgatcattcactgaagtagtaatggcctccgtcaacagctggaccctcgagatcgcgtcgccggtggctccgcagcgcctgttccgcgccgccgtgatggactggcacaccctggcgcccaatgtcgcctcacacgtcgtcgccagcgcgcagcacgtggagggcgacggcggcgttggcagcgtcaggcagttcaacttcgactcagtcatgccgttcagcttcatgaaggagcgtctcgag

SEQ ID NO: 7572 - DNA, 293 bp, Zea mays
aaggaatggcgtacatggatttcaaggacccagattccttgaataaagcatacgagttgaatggaaccgaccttggtggctacagcttgtatgtcgatgaagccaagccgagacctgataacagcggtggcttcagtggcggcttcagtggtggcagatggaggagtggcggcttcagtagtggcagatgagggaggagtgacagggggcgtggtggtagccgtgggcgtggatttggaggccgtggtggaaggggtgacagaggccgaggtggaaggggtacgcctttcaga

SEQ ID NO: 7573 - DNA, 193 bp, Zea mays
cggaccgtgggtgcttgggattgttctgcctgggtgcggacatatggtttgtatttggatgaaaggttggaatgcttcagagttctgaaatatgatgtcgacattgagcgcttgtccaaaccaggtcaaggtcctgaaaagggtcacagtagaacgagagagttggattcacaggatctgttagagcagctgc

SEQ ID NO: 7574 - DNA, 216 bp, Zea mays
gaaacaatcaaccagcaacactcctctcctataacatagtacagcgaaagtaactcacattggaacttccaatgggtgtctcggcctggtcctgccttgcttcctctcctcctcccagtgccgtccctgtggcacccatgggtggcttgttcccacagttctaagaccattcgtgccccaaagcgaaggaggatgtgcagtcaattgtggcacagg

SEQ ID NO: 7575 - DNA, 318 bp, Zea mays
acgggcttctcatgtggcaatggaatgtgctcttcaatcacacccgaacatggtcatcctaggtgatgaggtgggtggatccaaacttacaatttttgattttacgaagcagatttgtgatgcggttcaggcaagggcagacaaagacaagaaacatggggttgttcttattcctgagggtcatgtggagaatattcctgaactatatgctctgcttcagggaatccatggcctcaatggcaaaggagtttctgttgagaatatcacttctcagctttcaccctgggcatctgcactctatgagtttttgcccccttt

SEQ ID NO: 7576 - DNA, 309 bp, Zea mays
gatctctgcgactctgcccggccggtctccgaagcgggcggagggaaccagagagcaaggcgaggagcgcggaagggctgagggaaggggcggcggggcatggctcgccggccggcgtcgtgggagcagggcggcgacgagtacgactatctcttcaaagtcgtgctcatcggcgactctggcgtggggaagtccaacctgctcccccgcttcaccaagaacaccttcgccctcgactccaagtccaccatcggcgttgagttcgccacgcgcacactccaggtggagaacaagattataaaagctcaa

SEQ ID NO: 7577 - DNA, 309 bp, Zea mays
gttactctagctgacattgtaatgacatgcaacctctaccatggaattgcacggatcttgaccaagaccttcacgtctgaattccctcatgtcgagaggtatttctggaccatggttaaccagcctaacttcaagaaggtcattggtgaggtcaagcaggcagagtctgcacctcctattccgaaaaaagctgctccttctaaggagccaaaggcaaaggatgtcaagaaggaggctccaaaggaggcccccaagccaaaggtggttgaggcaccagcagaagaggaagcaccaaagccaaagccaaag

SEQ ID NO: 7578 - DNA, 307 bp, Zea mays
cagacgcgtggcggacgcgtgggcggacgcgtgggcgcaggcaagcagatcgtcctgactcctgatggcacaggcacaccaccctcttctcctactaattcttttactcttcctctactccactgccaatccttcctccaagagaacccagccgaagttctctgccgtcttctacttcggcgactcggttctcgacaccggcaacaacaaccatctccccacggtagctgtggcgaaccatgctccttacggaagggacttcccagggaagaaaccgacggggaggttttccgacggccggcttatc

SEQ ID NO: 7579 - DNA, 309 bp, Zea mays
gtcttgaaatgggagagagagagagagaagagagagagaagagagagagagagagaggagtgggagacccgcgagaagctgccgtgtagggaccgtagactcagcgactgcgaaggagggataaggggatggccgggatcggaccgatcaggcaggactgggagccggtcgttgtgcggaagaaggcacccaccgccgccgccaagaaggatgagaaggccgtcaacgccgcgcgccgcgcacggtgcggagatcgataccatgaagaagtacaacgctggtacgaacaaggcggcatccagcggtaca

SEQ ID NO: 7580 - DNA, 304 bp, Zea mays
cacacagcaggcagcagctcgatcgctagctcctccgaaccggaaagccaagcccgctttggcgatcgtgcttgcatgcttggatccttcaattcctgccggagccagcgagagctagctgctgctgtcgcgtggtagacgtcgtcttgccagcgagagcctagctcgatcggtctctctggtacaacgtagggagaaagatcgagggggagacgacgacgacgatggccggcgcgaccgtgaccgtcgaggaggtgaggaaggcccagcgcgccaccggccccgccaccgtgctggcgatcgg

SEQ ID NO: 7581 - DNA, 293 bp, Zea mays
acgggtttgggcggattggcaggttggtcctgcgaattgcaaccagcagagatgatattgaagttgtggctgtgaatgaccctttcattgatgctaagtacatggcctatatgttcaagtatgattccactcatggcccgtttaaaggttctattcgtgtcgtggatgattcaaccctcgagatcaatgggaagaaggtcacaattacaagcaaaagagatcctgcagagattccatggggtaactttggggctgaatatgttgttggatcttccggtgtcctcacgacgact

SEQ ID NO: 7582 - DNA, 340 bp, Zea mays
ctcctcgcattttccttgcaaccgattgcctatccccctcccaaccaaagaccgatggcgcccaaggccgagaagaagcccgcggcgaagaagccggcggaggaggagcccgcggccgagaagacgaccgccgggaagaagcccaaggcggagaagcgggtccccgcgggcaagtccgccggcaaggagggcggcgagggcaagcgtggcaagaagaagggcaagaagagcgtggagacgtacaagatctacatcttcaaggtgctgaagcaggtgcacccggacatcggcatctcctccaaggccatgtccatcatgaactccttcatcaacgacatct

SEQ ID NO: 7583 - DNA, 335 bp, Zea mays
caatcctaaaaccatctgcttcagctagccccaagtttagtcggccgatcattcactgaagtagtaatggcctccgtcaacagctggaccctcgagatcgcgtcgccggtggctccgcagcgcctgttccgcgccgccgtgatggactggcacaccctggcgcccaaggtcgcctcccacgtcgtcgccagcgcgcagaccgtggagggcgacggcggcgttggcagcgtcaggcagttcaacttcacctcagtcatgccgttcagcttcatgaaggagcgtctcgagttcctggacgcggacaagtgcgagtgcaagaacacgctcatcgaggg

SEQ ID NO: 7584 - DNA, 330 bp, Zea mays
ccagcatctcccgtctccgtcgtctcgtctctgctcctcacctcgccgccagccatgggcaagatcaagatcggaatcaacggtttcggaaggatcggcaggctcgtggccagggtcgccctgcagagcgaggatgtcgagctcgtcgccgtcaacgaccccttcatcaccacggattacatgacctacatgttcaagtacgacaccgtgcacggccaatggaagcacagcgacatcaccctcaaggactccaagacgcttctcttcggcgagaagcggtcaccgtctttggcatcaggaaccccgaggagatcccgtggggtgaggctg

SEQ ID NO: 7585 - DNA, 324 bp, Zea mays
cccacgcgtccgggacgcgtgggctggtgccagattggatggtggggaaatgcttgcatgtggtctggcaactcattttgtccagtcaaatagtctgctatcgcaggaagaatcacttaaaaaggtggatacttccaatggctttgcagggcggggcaacatcgatcaaattgcgcaacaacccacacggtaagaaagcagctctttgaataggttggaaatcatcaacaaatgcttttccaaaaggacagtcgaagaaattatatccgctcttgaagtagaggcctcaaattcggcagatgaatgggttgctacaacaatcca

SEQ ID NO: 7586 - DNA, 154 bp, Zea mays
cccacgcgtccgcatggagataatgaacaatgggatcttcaaaagtccggtgcacagggttgtgacgaatgcagagaaagagagactctcactcgccatgttctacggcgtggaaggccagagagtgcttgagccagcgcttggtttgctgggg

SEQ ID NO: 7587 - DNA, 337 bp, Zea mays
tccaactctaatcgcacaggaagcggacgctgagtacggccggatccgggggaacaaggccgggacggggcggacggtggggtgctcgacgcctacccgcatgtgaaggcctggtggtctggtctgatggagaggccgtctgtacagaaggtcgcactgccctgatgaagccatctgcttgaaacggttgccctgtcaatcggtgaatggaataagccaagtctgttctgggttgtttgcttgttcagtgatgtgtcttctatgacgaaagttgagtgcctatgtgtgagcatgcttgcttgtaacgagaccttgaattgttcggaaatgagcattc

SEQ ID NO: 7588 - DNA, 317 bp, Zea mays
ccgatccccaattcctccttcggatctcgcattcagcgcacgtaggtgtgaaggaagggggacgcggaggaagatggggctcgcgttcgggaagctcttcagccggctcttcgccaagaaggagatgcggatactcatggtcagcctcgacgccgccggtaaaaccaccgtcctctacaagctcaagatcggcgagatcgtcaccaccatccccagcatcggtttcaatgttgaaactgttgagtacaagaacattagcttcactgtctgggaagtcgggggtcaggacaagatcagacctctttggaggcattact

SEQ ID NO: 7589 - DNA, 323 bp, Zea mays
cccctggataacgtgactttatcaagaacatgatcactggtacctcccaggctgactgtgctgtccttatcattgactccaccactggtggtcttcaccctggtactctccaaggatcgccagacacgtgagcatgctctccttgcgttcacacttggagtgcagcagatgatttgctgctgcaacaagatggatgcaaccactcccaaatactccaaggcacgttatgatgagattgtgaaggaagtctcatcttacctcaagaaagttgggtacaaccctgataagatagcatttgttcccatctctggttttgagggtga

SEQ ID NO: 7590 - DNA, 320 bp, Zea mays
catctctggtttcgaaggtgacaacatgattgagaggtccaccaaccttgactggtacaagggcccaaccctacttgaggctttggacttgatcaatgagccgaagaggccttcagacaagcccctgcgtctccccctacaggatgtgtacaagattggtggtattggaactgttcctgttgggcgtgttgagactggtatcatcaagcctggtatggttgttacctttggtcctagtggccttactactgaggtgaagtctgttgaaatgcaccatgaggctctccaggaggcccttcctggtgacaatgttggcttca

SEQ ID NO: 7591 - DNA, 315 bp, Zea mays
gatgaggcaacagcagcagttgacgtgcggactgatgctcttattcagaaaacaatccgagaagaattcaagagttgcacaatgctcataattgcccaccgtttgaacacggtcattgactgtgacaggttgcttattctaagttctgggcaggttctggaattcgactctcctgagaatcttctaagcaacgaggggagtgctttctccaagatggtgcaaagtacaggacctagcaacgcagaatacctcaagagtcgtgtatttgcaagcggagaagagatgtaccggaggcagaaatcaaggtgcaagata

SEQ ID NO: 7592 - DNA, 315 bp, Zea mays
ccgatgcctacgagtacatggttgactactcaaccatcaacaagcaggctggaaggatgcagaatgaggttggctggtatcactcacacgctggctatggatgctggctgtcaggaatcgacgtgtcaactcagatgctcaatcaacaattcacagaaccattcttggctgttgtgatagaccccacaaggaccgtttctgctggtaaagtggagattggagcctttagaacatacccaaaagattacaagccaccagatgagcctgtatctgagtatcagactattccactcaacaagatagaagattttggtg

SEQ ID NO: 7593 - DNA, 169 bp, Zea mays
gtctccggatccgtcgccgtctggtctccgtgtgctctcgtcggcgtcggcgtcggcggcgtctgactgaacccctcggcttccgcggcgtcgggtctctggtgctgctgctactgctgctgcgtgcaaggctgttatggccaccaagaagaaccttggcaacctcggc

SEQ ID NO: 7594 - DNA, 322 bp, Zea mays
tgatgacctcgatctttttggtgatgaaactgaggaggacaagaaggcagctgatgagcgtgctgccgctgccaaggcctcttctaaaaagaaagaaagtggtaaatcctccgtccttatggatgtaaaaccatgggacgatgagactgatatgaagaagccggaggaggctgtccgcagcggcccgaaggaggggctgacctggggagcaccaaagcatgtgcctgttggatacggcatcaagaagatgactatcatgttgacaattgtcgacgatcttgtgtccatcgacactctaattgaggaccaccttacgcaagag

SEQ ID NO: 7595 - DNA, 319 bp, Zea mays
  unsure (1)..(319): unsure at all n locations
cccacgcgtccgcgaagagcagccaattcgctcgagttcagatcgagcgcgcgccaagcaagtcttccggccggccgcgaagagcgcaatcaagcaagacaagatggtgaagctcgccttcggaagcgtcggcgactccttcagcgccacctccatcaaggcccacgtggccgagttcatcgccaccctcctcttcgtcttcgccggcgtcggttccgccatcgcctacgggcaactgacgaatggcggcgcgctggacccggcgggcctggtggcgatcgcgatcgcgcacgcgntggcgctgttcgtgggcgtgtcc

SEQ ID NO: 7596 - DNA, 311 bp, Zea mays
caaactcgtcgcttccgctccacaggatcctctgcgccacccacaaccgtgcgaccgtccggtgctgccggcgaccccgatccgccgacccgtcccgtcccaccacaccctaccgccgctcgcagctatgtcgccgtcggagccgacgcgggatgagagcgtgtacatgggcaagctggcagagcaggcggagcggtacgaggagatggtcgagttcatggagcgcgtcggcgctccgccggcgggccacggaggcggacgagctatccgtggagcagctaaccttctgtccgtcacctagaagaacgtca

SEQ ID NO: 7597 - DNA, 316 bp, Zea mays
ccgatccccaattcgtccttcggatgtctcattcagcggacgtaggtgtgaaggaagggggacgcggaggaagatggggctcgcgttcgggaagctcttcagccggctcttcgccaagaaggaaatgcggatactcatagtcagactcgacgccgcaggtaaaaccacctgctctacaagctcaagaacgtcgagatcgtcaccaacatccacaccatcggcttcaatgttgatactgttgagtacgagaacattagcttcactgtctcggaagtcgggggtcaggacaagataagacctctatggaggcattact

SEQ ID NO: 7598 - DNA, 161 bp, Zea mays
ggcttctcctccccctcttatcaagtcctcctcgggttagggttccttagggttttgtggaggggcgatggcggcggctgatgtggagtaccgttggttcgtcggcggacttgcctggggcaccagcaacgagtcgctggagaatgccttcgcctcctacg

SEQ ID NO: 7599 - DNA, 286 bp, Zea mays
ggacctgggctcagaccctcaccaaccaggcaaccaaaccttctccgatggccgcgcccgtgtcgcagccgccggtgtccgccaggacttccacacggtttctcccccgcgggataggcgcgctcccggagtccgcccccacgtccctccggttatccgtcggccgccgtcgccgcgcctccagcctagaggtgaaggcatcaggaaatgtgttcgggaactacttccaggttgcaacctatggcgaatcccatggagggggtgttggttgcgttatcagtggctg

SEQ ID NO: 7600 - DNA, 285 bp, Zea mays
ctacggaggctctgtaactgctgcgaactgcaaagagctagcagcacagcctgatgtcgatggttttcttgtcggtggagcttctttgaagcctgagttcatcgacatcatcaacgcggccaccgtgaagtccgcttaagatgctacgctgaagacgaacatactttttttttgctcaactgtgctatgtaagctagtagcttttgcgcaggagcagagactgttttgcctgcccccaacttctagcttgagcttgctaataatgtttacctctggacgtatcaa

SEQ ID NO: 7601 - DNA, 284 bp, Zea mays
cccacgcgtccgcccacgcgtccggttgggcgcagagaatccccaagcaaacaaacagggtagaggtagagggagaggagaggagaggagaggagaggagaggttgggtctgggacaccatggctccgatgaagctgtacggggcggtgatgtcgtggaacgtgacgaggtgcgcaacggcgctggaggaggctggctccgactacgagatcgtgcccatcaacttcgccaccgccgagcacaagagccccgagcacctcgtccgcaacccgtttggtcaggtt

SEQ ID NO: 7602 - DNA, 283 bp, Zea mays
ctctcgttccatttccccatctcccagatccaattcgcgagttctccctcctctgcggccatggcgctctctgtggagaagacctcgtctggacgggagtacaaggtcaaggatctctcgcaggcggacttcggccgcctcgagattgagctggccgaggtcgaaatgcccggcctcatggcgtgccgcgccgagttcggcccgtccaagcccttcgccggcgctaggatctcggggtctctccacatgaccatccagaccgccgtcctcatcgagaccctca

SEQ ID NO: 7603 - DNA, 286 bp, Zea mays
gattgattcagtaggtagctagctagctgaatcacaatggatcctaccaagttccgtccgtccagtagccacgacacgacggtgacgacgacgaacgctggcgctcctgtgtggaacgacaacgaggcgctgactgtggggcctcgcggtcccatcctgctggaggactaccacctgatcgagaaggtggcgcacttcgcgcgcgacgcatcccggagcgcgtggtgcacgcgcgcggcgcctcggccaagggcttcttcgagtgcacccacgacgtgacgtcgct

SEQ ID NO: 7604 - DNA, 288 bp, Zea mays
cggacgcgtggttctccgatccgcccaggccaccatggcggaggatgctacgagcagccacccgtcacgctacgtcaagctcaccaaggctccaggacgcccccgccgaggacatccgccccggcgagctcaaccagccagttcacgtcccgcagctcgaaggccggaggtgtagcgagtgcggtcaggtcctgcccgagagctacgagccgcccgccgaagagccctggaccaccgggatcttcggatgcaccgatgacccagagacctgccgaactggattgtttt

SEQ ID NO: 7605 - DNA, 284 bp, Zea mays
ggccaggtatatcacctcggactgcgacgctgtggccatcatccatgatgcgcaaggctacgccaagacggcagaagatgcagttgcagatgtgctcaaagctggaatggacgtgaactgcggcagctacgtgcaggaccacggcgcctctgcgctgcagcaagggaagatcacggagcaggacatcaacagggcgctgcacaacctgttcgccgtcaggatgaggctggggctcttcaacggcgaccccaggcgcaacctgtacggcgacatcgggcccgacc

SEQ ID NO: 7606 - DNA, 291 bp, Zea mays
tgggagggcgatgccgaagcggacgacacacacctactcgagcgaggacgcactgccggagggccccgagtccgaccttttcgtatactactgcaagcactgcgcctcacatgtcctcatcaccgatacccaattgcagaaaatgcccaagcgaaagactgacagagcacatgttttagacaaggctaagcatctttcaaggctaaatgttaaggaggcaggaaaagtaatgttgaaacgtggtgaaggaaagcttgaaaagcagtttcgcatgagctgtgtgggatgtga

SEQ ID NO: 7607 - DNA, 290 bp, Zea mays
ctgttctacttcgccggcatggagaccacgtcggtgctgctcacgtggaccatggtcgtgctctccatgcacccggactggcagcaccgggccagggaggaggtgctccacgtcctgggtcacacgacgacggcgccggactacgatgccctgagccgcctcagaatcgtaatacaagcagtgctgcagtgcagacccatcggcacattctaataaccgctaaccgctccatttattgtggttgtaacgcaggtgacgatggttctgtacgaggtgcttcgtctgtacac

SEQ ID NO: 7608 - DNA, 293 bp, Zea mays
gggaaggctaccctgccatcgtcctcgtcaacaaagccactggagaggctctcaagcattcccttggccagtcacaccctgttcttctgacccgccataatccagactccctggacgagtctgtcctgtggacagagagcagggacgttggggatgggttccgctgcattaggatggtcaacaacatctacctgaactttgatgctttacatggagacaaggaccatggtggtgtgcgcgacgggacggcccttgtgctgtgggagtggtgcgagggagacaaccagcgctgg

SEQ ID NO: 7609 - DNA, 282 bp, Zea mays
gtggtggaccgcctggccttcgacgcctgcaacgccagcgcgccgctcgccgcgttcgccggcgggccaccgagttctgcctccaccgcccgggcttcttctgcttcatcagcggcgagccagggcactgcgaggaagaaggccagaggctcatcgtacgcttgttggtctgggtttgatgctccactgattggtttgctactactttgcttttatgtgtgcagtactgcagtgcagactcacacactagtacctagttgttgttagataatgctcagttgc

SEQ ID NO: 7610 - DNA, 277 bp, Zea mays
cctgctgagcgaccctgttttccgccctcttgtcgagaaatatgctgcggatgagaaggctttctttgatgactacaaagaggcccacctcaagctctccgaactggggtttgctgatgcttaaatagaccctatcttggagtgatacattctgctgcctgtatggaatcatgtggtcttttgcatctggagtcaatgtgaacaagcagattgtcgtattgtctttctcgtaataaatttgtcgatgttgagcccttaggctgttgttggtacattg

SEQ ID NO: 7611 - DNA, 284 bp, Zea mays
cgtacgcagggatgaagctgggcacgaaccacccgatgggccctctgcagctcgccgacttcatcggcctggacgtctgcctctcagtacttcgggtactccacagcggcctgggagatagcaagtacagcccctgccctctcctcgttcagtacgtcgatgctggccggcttgggaagaagcgtggagtaggcgtgtattcgtatgggcacaggccttcgtccgtcaggccgaagtcgtctctgtaggcgtgagagcaaactgttgggcgaataaaaccaggt

SEQ ID NO: 7612 - DNA, 284 bp, Zea mays
cgtgatctcaacccaaggcgtgcctccgctccggtcacccgtcgctccacgcaaccatgtcgaggaggaagaccagggagcccaaggaggagaacgtcacccttggacccactgtccgtgaaggagagtatgtctttggtgtcgctcacatctttgcatccttcaatgacaccttcattcatatcactgatttgtctgggagggaaactctggttcggatcaccggtggcatgaaggtgaaggctgaccgtgacgagtcgtcaccttacgctgctatgcttgct

SEQ ID NO: 7613 - DNA, 286 bp, Zea mays
cccacgcgtccgcccacgcgtccgcgaaaccctcgccagtccccaactcgaacctcagtcaggcggcgtgagggagggagagttcgaggaccgatgcggcgtcgggcgagatgaagcttaacgtcaagaccctcaagggcaccaacttcgagatcgaggcgagccccgatgcgtcggttgctgacgtgaagaggatcattgagaccactcagggtcagagtacctaccgggcggaccagcaaatgcttatataccaagggaaaattctcaaggatgagaccacttt

SEQ ID NO: 7614 - DNA, 287 bp, Zea mays
atctggtataggacggagctgagcttctagcaacgtacagtgtatccgccatgagtcctttcggggcggtgatcacgccagaaaccctcaagtacatgtccaagtaccagggacgtgagatcacgcaggtggactgcgcacgggaggcgatgaggctgatccacgcggaagacaagaacctcaaggccgaggactcagcgtgggagctgaagaagaagttcggcaacggcgtgagcaccatggtcctcgtctacaacgccaccggggccagcctgagcctggtggac

SEQ ID NO: 7615 - DNA, 280 bp, Zea mays
cacacaccccacctaccccggccggaccggcaggcagcacagcatggacctcgccctcctagagaaggccctgctgggcctgttcgccgcggctgtggtggccatcgccgtggccaagctgaccggcaagcggtaccgcctcccaccggggcccccgggcgcccccgtggtgggaaactggctgcaggtgggcgacgacctgaaccaccgcaacctgatggccatggcgaacgtgttcggcgacatcttcctgctgcgcatgggcgtgcgcaacctggtg

SEQ ID NO: 7616 - DNA, 280 bp, Zea mays
ctcgagttcagatcgagcgcgcgccaagcaagtcttccggccggccgcgaagagcgcaatcaagcaagacaagatggtgaagctcgccttcggaagcgtcggcgactccaccagcgccacctccatcaaggcctacgtggccgagttcatcgccaccctcctcttcgtcttcgccggcgtcggttccgccatcgcctacgggcaactgacgaatggcggcgcgctggacccggcgggcctggtggcgatcgcgatcgcacacgcgctggcggtgttcgtg

SEQ ID NO: 7617 - DNA, 282 bp, Zea mays
cccgtttccacaacgtcaccgcaccgccgtcatgccgaccgtaagcgtgaaatggcagaaggagctctttccaggcatagagattgacactagccagcctccgattgttttcaagactcagttgtacacactaactggtgtgccacctgaacgccaaaaaattatggtgaagggaggaatattgaaggacgatgcagattggtctactttgggagtgaaagatggccaaaagttgatgatgataggcacggctgatgagattgtgaaagctccggagaaagg

SEQ ID NO: 7618 - DNA, 281 bp, Zea mays
gtagcaatggcaggggagacgaagaagggcctggtgctgctggacttctgggtgagcccgttcgggcagcgctgccgcatcgcgctggcggagaagggcatcgcctacgagtactcggagcaggagctgctgggcggcgccaagagcgacatcctcctccgctccaacccggtgcacaagaagatccccgtgctcctccacgacggccgccccgtctgcgagtccctcgtcatcctcgagtacctcgaggaggccttcccggaggcctcccccaggctgct

SEQ ID NO: 7619 - DNA, 281 bp, Zea mays
gtatctagtttgttagtgagctagcacgcgtggcggctcctggagggacaataatcatcgtgacatggtgccataggaacctggatccatccgaaacctcgctaaagcccgatgaactgagcctcctgaggaggatatgcgacgcgtactacctcccggactggtgctcaccttcagactatgtgaacattgccaagtcactgtctctcgaggatatcaagacagctgactggtcggagaacgtggccccgttttggcccgccgtgataaaatcagcgcta

SEQ ID NO: 7620 - DNA, 282 bp, Zea mays
caactcgccgtctgccttctgcgcctccatttcggcctctgtcccttgcaagttcaatctcacctccaaccatgggtaaagagaagtcccacatcaacattgtggttattggccacgttgactctggcaagtcgaccaccacaggacacctgatctacaagcttggaggcattgacaagcgtgtgatcgagaggtttgagaaggaggctgctgaaatgaacaagcggtccttcaagtacgcatgggtgctcgacaagctcaaggctgagcgtgagagaggta

SEQ ID NO: 7621 - DNA, 283 bp, Zea mays
agagtagaagttgaggctattggtcatgttcgacacaagaacttggtccggcttcttggttattgcgtggagggtacccaaaggatgcttgtctatgagtatgtgaacaatggagatctagaacaatggcttcatggagctatgagtcaacatggctctcttacatgggaggcccgcataaagattcttcttgggactgctaaagcgcttgcttacttgcatgaggcgattgaacccaaagttgtgcaccgtgacatcaaatccagcaatattttgattgatg

SEQ ID NO: 7622 - DNA, 288 bp, Zea mays
cccacgcgtccgcccacgcgtccggcagctcttgcggtcgtccctcagccgcgtcgcaccgcatcgcattctacgattcgaagctctctgctcgcaggggaccatggcgaagaactacccaaccgtgagcgccgagtacagcgaggccgtcgagaaggccaggcgcaagctccgcgccctcatcgccgagaagagctgcgcacccctcatgctccgcctcgcgtggcactccgcggggacgttcgacgtgtcgtcgaggaccggcggtcccttcggtaccatgaagtg

SEQ ID NO: 7623 - DNA, 266 bp, Zea mays
ctcggtctcccctccctgtcttccagagacacagagcagggcgctcttcggtcggaggagaagcgcgaccacgaccatgggctttatctcgttcgtcggccgggttctcttcgcctccctcttcctcctctcggcctaccaagagttcattgaatttggaaatgacggtggacctgcagcgaagaccttgaagccaaagttcaatttgttcgtcaagctagtgtccaagaatactggactggggctgccgcatatggatataaaaa

SEQ ID NO: 7624 - DNA, 273 bp, Zea mays
gtgatgaaaactttgatgtccaccgtgctcagaaaattctcgatgaagaccattatggtttgagtgacgtgaaagagaggatactggaattcatagcagttgggaagttaagagggacttcacaaggcaagatcatatgtctttctgggccaccaggagttgggaaaactagtattggtcgttcaattgcacgtgcactgaaccgccagttctacaggttttctgttggaggtttggctgatgtggctgaaatcaagggccatcggcgcacgt

SEQ ID NO: 7625 - DNA, 277 bp, Zea mays
gctctctaccgtccgagaccccaagcaccagcgcggcggcgggggcggcggcgaccatggctgtcggaaagaacaagaggatctccaagggaaagaagggtggcaagaaaaagaccgtcgaccctttctctaagaaggattggtatgacatcaaggcaccgtcggtgttcagtgtgcgcaacatcgggaagactctcgtatccaggacacagggtaccaggattgcttctgagggtctgaagcacagagtctttgaggtttgcctagctgatcttca

SEQ ID NO: 7626 - DNA, 277 bp, Zea mays
gcacttgaaaaagggtcttcagagcacaatacagagtccttaaagggtctctctttgagtgaagttggtaacaaccgtacaagtaacaacaaagttgtttgctgtcacttctcttcagatgggaagttactcgctagtgccggccatgagaagaaggtcttcctctggaatatggacaattttaagatggataccaaaatagaagaccatacaaactttatcacagacataagattcagaactaattcaactcagttggctacatcatcttctgacg

SEQ ID NO: 7627 - DNA, 278 bp, Zea mays
ctcttgctccgcaaaccagcgcaacccttccctgacagcggcggcgacatggtgctcgaggcgacgatgatctgcatagacaactcggagtggatgcggaacggcgactacgccccgtcgcggttccaggcgcaggccgatgccgtcaacctcatatgcggtgccaagacccagtcgaacccggagaacacagtaggcgtgatgacgatggccgggaagggcgtccgcgtgcttgtcactcccaccagcgacctcgggaagattctcgcctgtatgca

SEQ ID NO: 7628 - DNA, 284 bp, Zea mays
gtcgtctaagttaggctagggttcgaccagctagcggaaatggtggccttcaggttccatcagtaccaggtggtggggcgcgcgctgccgacgcccggcgatgagcaccccaagatctaccgcatgaagctctgggccaccaacgaggtccgcgccaagagcaagttctggtacttcttgaggaagttgaagaaggttaagaagagcaacggccaggtcctggccatcaacgagatctttgagcgtaacccgacgacaatcaagaactacggcatctggctgcg

SEQ ID NO: 7629 - DNA, 266 bp, Zea mays
cggacggtgggtcacaagtgaggacgggaaaggttgaggttgaggaagagcagaggaatccattacaggagtgtttaatggcgggaggcaaggaagcgcacgggtgagcagccagggatgtctctggtcacctctccccttaccacttctcacggagggttcagagagacgacgacgtcaccatcaaggtgctcttctgcgggctttgccacactgacctccacgtcatcaagaacgagtttggcaacgccaagtaccccgtcgtt

SEQ ID NO: 7630 - DNA, 269 bp, Zea mays
cccacgcgtccgcccacgcgtccggggctgtccactctttcaggatcaccaactgcggagtccaggacaccacccagatccacacccacatgtgctactccaacttcaacgacatcatccactccatcatcgacatggatgccgatgtgatcacgatcgagaactcccgatctgacgagaagctactgtccgtcttccgtgagggtgtgaagtacggagctggcattggccctggtgtctacgacatccactctcctaggattccctcc

SEQ ID NO: 7631 - DNA, 270 bp, Zea mays
gctgctagcccttctaaccttgctcgacccttgcccgccgcctgaactcgcctcccccgcggccggtcccctgcatctgttcgccgcgccgcaacccggaggagactacgactacgagcaccaccaggtagcagcaactgttttgctgcaatctgacaaagtggagggtttaagagtcgctgcttcttttatgtctgaacaatctttgctttatttgggattgctgggagagtattcttgcgcgacgaggaaaaggcacaagtttctgct

SEQ ID NO: 7632 - DNA, 272 bp, Zea mays
gaaaactagaaaaggctcctcccgaccgcaacgcccctcatctccctcgaccccgacatccccgacccgatggcgcccaaggcggagaagaagccagcggagaagaagccggcggccgaggagaaggcggagaagacgaccgcaggaagaagcccaaggccgagaagcggctgcccgcgtccaagtcctccggcaaggagggcggcgagaagaaggggaagaagaaggccaagaagagcgtggagacctacaagatctacatcttcaaggtg

SEQ ID NO: 7633 - DNA, 269 bp, Zea mays
gtcggcttcgtttgtcgtcgtcgtaagctgcagctagtgtggactggagatccaccactccaccagtccggtccatctgctggacctcgattggtttcttcttacctaggaacatccggggatgtcgactcctgcgaggaagaggctgatgagggatttcaagcggttgatgcaggaccctccggccggcataagtggcgccccgcaggataacaacataatgctgtggaatgctgtcatatttggacctgatgataccccgtgggatg

SEQ ID NO: 7634 - DNA, 271 bp, Zea mays
actacatacatcaccaactaggatcgatctctcgacagcaaatagctagcaatggagaagtacaccaaagccctagcgtcattgctcaccatgctggtgctggcacctctcctcgccatggccaccgacccagaccccctgcaggacttctgcgtcgccgacctcaacggcaagccatcagtgaacgggtacccatgccagccgccgtcgtcggccggcgaccagttcctcttctcgaccaagatcgccacgggaggcgaccccctggcca

SEQ ID NO: 7635 - DNA, 268 bp, Zea mays
gtaccagggcctcggcaatgacttcattatggtggacaacagggattcgtcggtgccgaaggtgacgccggaggaggccgcgaactgtgcgaccgaaacttcggcattggtgccgacggcgtcatcttcgtcatgccaggggtcaatgatgccgactacaccatgaggatcttcaactctgacggcagcgagccagagatgtgtggtaatggagtccgttgctttgctcggtttataggtgaacttgaaaatctgcaggggacacata

SEQ ID NO: 7636 - DNA, 273 bp, Zea mays
ctaccctggcgtcaagcgcatcaccatcaagccccagactgaccgctgggtgttccccgagaccaacactggcatcattgtccttgctgagggtcgcctgatgaaccttgggtgtgctactggccatcctagctttgtcatgtcctgctcattcactaaccaggtcattgcccaacttgaactgtggaaggagaagagctctggcaagtatgagaagaaggtgtatgtgctccccaagcaccttgatgagaaggttgctgctctccacttggg

SEQ ID NO: 7637 - DNA, 277 bp, Zea mays
cacaactcgtaggcagcgagcgtctctcctcttcctctcccacgcaccgcgccaaggaaggcagagagagatcgccgctcctcttctctccgtcggtggtgcggttgaccgccctcctcgagcgagatctcgctgcagtccctcgagatctggtcacagatctatccgacaagatggtgaagatctgctgcatcggtgctggctatgtcggtggcccaaccatggcggtcattgccctcaagtgcccagacattgaggttgtcgttgttgacatctc

SEQ ID NO: 7638 - DNA, 112 bp, Zea mays
cgggatgacgcttcgccggacgcagaaactttaccttgttcctagaattcccaaatgagtgtcgtcgtcgtcgtacaaatggcatgcatcttattgtaagttttggagtttg

SEQ ID NO: 7639 - DNA, 321 bp, Zea mays
ggcgcccgctgtagaagccgtgaaggagacaggcaccttccagaaggttcctgccttgaacgaaaggatactgtcatccatgtccaggaggtctgttgctgcacacccttggcatgatctggagataggtcctggtgctccaaccatattcaactgcgtcattgagataccaaggggcagctaggttaaatatgaacttgacaagaaaactggactgatcaaggtggaccgtgtgctgtattcatcagttgtttaccctcacaactatggattcattcctcgcacgctttgtgaagacagtgatcctttggatgtactggt

SEQ ID NO: 7640 - DNA, 321 bp, Zea mays
ccggagcctctccttcccggtctcctccgcccgttgccttcgtcccctccatctccggctgcgtcgccggcgagcccgacaccgcgaatcggatccgccgacaaggcgagagggaaaagatggggcttacgttcaccaagctgttcagccggctgttcgccaagaaggagatgcggatcctgatggtgggactcgacgccgccggaaagaccaccatcctctacaagctgaagctaggcgagatcgtcaccaccatccccaccatcggattcaatgttgaaactgtggagtacaagaacatcagcttcactgtctgggatg

SEQ ID NO: 7641 - DNA, 322 bp, Zea mays
agctcggaaaggcaaggaaaggggtcctcctgtgcaaagacagcctttgaaacacagggactatgaagttgatcttgattctcgtcttggcaagactcaggtggtgaccccgattgcaccattgaatcagcaggctggatactactgttctgtatgtgaatgtgttgtcaaagattcagccaactatttggatcatataaatggcaagaagcatcagagagcactgggcatgtctatgcgtgttgaaagggcatcacttgaacaggtccagaaaaggtttgaggcacttaagaaaaggaaggatccaagtgcctttactgaa

SEQ ID NO: 7642 - DNA, 320 bp, Zea mays
cgaccgcctcctctcccctcccccggctctgtctgttgacttaccccgtcgagctatctagtcagctgctcccgttgccatggggaaggagaaggttcacatcaacattgtggtcattggccatgtcgactccggcaagtccaccaccaccggccacctcatctacaagcttggaggcattgacaagcgtgtcatcgagaggtttgagaaggaggctgccgagatgaacaagaggtccttcaagtacgcctgggtccttgacaagctcaaggccgagcgcgagaggggcatcaccattgacattgccctgtggaagtttg

SEQ ID NO: 7643 - DNA, 319 bp, Zea mays
cccacgcgtccgcttcgtgccggcgctccggtggctcgacccgcaggcgtggcggccaagatgaagaagctgcaccgccggttcgacgacatgatggacgagatcattgcaggttatagggaggccaggagggttgcggcagacggagaggagagcaaggatttgcttggcttgctgctgtcgatggttgacgagcggccgttcgacagcggggaagaagtcaggatcaccgaaaccgatgtcaaggcactcattttgaacctgttcgtggcagggaccgacacgacgtcgaccatagtggagtggtctctcgcagagc

SEQ ID NO: 7644 - DNA, 323 bp, Zea mays
gggctggcttcctccccttcctggtctgcttctcctcaccgttgacgaatcacgaggccggcctgcctgcctgcctgcctgctttttctgtgctccgttcgaatggacgggcagaggagtcgatgagcggccgtgggctttgattttcccctggggtctgctcttcttggtcagcaaggagacctgaacacgaattgatctctgcgccgctgcaaccccggcccgtcgaagccatggggtccggggactggttcaagacgatcatcagcaagaaaaaatcgaagcggggaaagtcaaagcacgcaaagctctctggccaagta

SEQ ID NO: 7645 - DNA, 314 bp, Zea mays
caacagtggaccacgtgaggatgccacccgtattggttccgctggtgttgtgagaaggcaggctgtggatatctcacccctgagaagggtgaaccaggccatctacctcctgaccactggttccagggagagcgccttcaggaacatcaaaaccattgctgagtgccttgcagatgagttgatcaacgctgccaagggctcttccaacagctacgccatcaagaagaaggacgagattgagcgtgttgccaaggccaaccgttgagtggagcttgtatcctggtgcacttgcactagtactacgtttctggcag

SEQ ID NO: 7646 - DNA, 313 bp, Zea mays
gacgatgaacgggaaatgtgtgcgaggactatttactgcacaaacattgacaagaaggtcactcaggcagatctgaaattgttctttgagtctatatgtggagaggtctttcggctgaggttgcttggtgactaccatcattctactcgcatcgcttttgtggaatttgtgatggcagaaagtgctaccgctgccctgaactgcagtggcgtgatactgggatccttgccaataagggtgagcccctcgaagactcccgtgcgtccccgtgcgcctcgccagctgatgcactagaggtgtcctaggtacagga

SEQ ID NO: 7647 - DNA, 315 bp, Zea mays
cccacgcgtccggagacacgcgtccaaacatacagctagctagcctctgcatgcctacgtacagcatggccaaggccgagctgctgctcctcgccctcgtggcttcgctctccgtgctgccattctcctccctcgccgtgtaccaggacttctgcatcgccgacctatccgccgccgccacgccgggcggctacccgtgcaagcccccgaaggacgtgaccgccgacgacttccactacggcggcctcgccacccccggcacggcgctgaaacccttcaagatctccctgggctcggccgtcgtcaccacgttcc

SEQ ID NO: 7648 - DNA, 315 bp, Zea mays
gtcaatggttggggctcagaccactgaacagggcgactgctcaaagttcaagagcagcccaccccattgctgcaagaaagatccaacaattgtcgatttacttccaggcactccatacaacatgcaaattgccaattgctgcaaggcaggagttgtaaatacctttaaccaggacccagcaaatgctgcttcctccttccagatcagtgttggtcttgctggaactaccaataaaactgttaaggtgcccaggaacttcactcttaagactccaggccctgggtacacatgtgggcgtgccattgttggcaggcc

SEQ ID NO: 7649 - DNA, 315 bp, Zea mays
  unsure (1)..(315): unsure at all n locations
gaagaagggcctcctgtatcctctcacttccctcagtcctcgtccgtctgctccctcctctctctacctagctctagctagccttcctgtagcgcggcagagatggctgcccctgcctccaccacggcggcggcggcggcagcgctgctgctgctgctcctcctgtcgctcgccgcggcggcggacatgtcgatcgtgtcctacggggagcgcacacngcaggaggcgcggcggatgtacgcggagtggatggcggccgacggccgggactacaacggcgtcggcgaggaggagcggcggtaccaggtgttccgg

SEQ ID NO: 7650 - DNA, 309 bp, Zea mays
gatccatccaagacagggatcgccatgtcggactcggaggagcaccacttcgaatcgaaggccgacgctggggcgtccaagacctacccgcagcaggctggcaccgtccgtaagaacggcttcatcgtcatcaagaaccgtccctgcaaggttgtggaggtttctacctccaagactggtaagcatggccacgccaaatgccactttgtcgccatagacatattcaatgggaaaaagcttgaagatattgttccttcatcacacaactgtgacattccgcatgtgaaccgtactgagtatcagctgatt

SEQ ID NO: 7651 - DNA, 309 bp, Zea mays
gggttttgctgctctccgaccccgagctccgatagccgcagcatcaggcgcgccccccctcgcgtgtgaccgagatggcgctgccgaatcaggggaccgttgattaccccagcttcaagctcgtcatcgtcggcgatggtggaactggtaaaactacatttgtgaagaggcatctcactggagagtttgagaagaaatatgaaccaaccattggtgtggaagttcatccgttggatttcaccactaactgtggtaagatcaggttctactgctgggataccgccaggcaagagaagtttggtggcctca

SEQ ID NO: 7652 - DNA, 308 bp, Zea mays
cttaaactggagagtacagaatgagattgacatcgtgttagctaaacccattctgccatctgatatatatagagttattcgggacacgttacttgttggattgacagggtactccaagcagggacaacctgtttatgcatttggtgtgggtcttagtacttttgacaaggcctcggtgaactactatgtgcaatcacacatacagatgaatgaatatcgagatcgtgttgtcctgccggctgcatcaaagaagtttgggagacagattaatacctgcttgaaggttatggatatgactggcctcaagc

SEQ ID NO: 7653 - DNA, 320 bp, Zea mays
gccgatcggatcgcgacgagacgccgcgcgatccgacctaggctgacgccaacgaccactctcgccgccggcggtcatggcgtacggcgaccgcgttaccaccttcgaggactcagagaaggagagcgagtacggctatgtccgcaaggtctctggacctgtggttgttgctgatggaatgggtggtgctgccatgtatgaacttgtccgcgtcgggcatgataacctcatcggggaaattatccgtcttgagggcgattcagctacaatccaagtttatgaggaaacagctggactgatggttaatgaccctgttttga

SEQ ID NO: 7654 - DNA, 315 bp, Zea mays
tttgtgtttgcgcgcacgacgaagaccctgaataggggcatatcggagtttgtagtgatggcggcggacacagagcctctcgagatcctgctccacctccccttgttagctgaggataagaacgtgccatatgtgtttgttccatcgaagcaagctcttggccgtgcttgtggtgtgacaagaccggttattgcttgctcagtgaccagtaatgagggtagccagctgaaactacagatacagggtctcaaggactccattgagaagcttctcatctgatctgccgaagacctttcagtgtgatgggcctcatcg

SEQ ID NO: 7655 - DNA, 315 bp, Zea mays
gcagggagtgcgctcgacggccgccgccattagtgatttagtgttgaagagggagagaatctaaagtgaccggacgctgtccttccttgctgatcggcgacacggtccatccctccctcgctcgctagggttccttttcgtccatggatcagagcttcgggaatctcggggccggagctgggagcagcagcgggggctccaactccaaggcggcggcagcgcgtcgctcctcctcgtctttcccgcagcagcagcagcagcaccaccaccaccagtacgccaggcacggcgccgagatgtcggcggcggaggccg

SEQ ID NO: 7656 - DNA, 317 bp, Zea mays
cccacgcgtccgcattgagaaagggataaacaaccttgcaaagaaggcaaattagggggcgctctcgattgatgacatggcaggaggaacattcactatctccaatggtggtgtctatggaagcctcctcagcacacctatcatcaaccccccacagtcgtcaattctggggatgcattccattgtgcaacgccctgtggttgtgaatggtgacattctcgcaaggccaatgatgttccttgcgctgacatatgaccacaggctgatcgatggcagagaggctgtattcttcctccgtcgcatcaaggatgtcgttg

SEQ ID NO: 7657 - DNA, 319 bp, Zea mays
ctcccgcacaggagttgattgcaaaagatcttcatggcaacgactggaaatttcgccatatttttcgaggtcagccaaagcggcatcttctgacaacaggttggagtgtctttgttagtgcaaagagactggttgctggcgactctgtcctttttatctggaatgacaacaaccagctgcttctgggaattcgacgggcaaacagaccacaaaccgtcatgccatcatcagtactttctagtgatagcatgcatattggcctgctcgctgctgcagctcatgctgcatcaacaaatagtcggtttactatcttctataa

SEQ ID NO: 7658 - DNA, 316 bp, Zea mays
ccttcgtctgcttcccagagacccagccatggcgatgtcccagatgtcacgcatattcctggccatccttctcctggccgccgccttcgccgccgccccagctgcgcttgcggacggcgacgacgtggtggcccttaccgaatccacgttcgagaaggaggtcggaaaggaccgcggcgccctcgtcgagttctacgccccctggtgtggtcactgcaagaagcttgctcctgagtatgaaagacttggtgcaagttttaagaaagctaaatctgtcttgattgctaaggttgattgtgatgagcacaagagtttg

SEQ ID NO: 7659 - DNA, 312 bp, Zea mays
ccacgcgtccgcgtgaaatgaaatcctttgtgaaggtgaatgtcaggaggtctgtaaaaggtagaactgaaatggatgtcagcatttctggtgaaaatgggcattcattgtccatgatggggtctttgagaccacctgttgttaggaaaagtaagcttgtagttgtcgacttggctggatcagagcgcatagacaagtcaggaagcgagggtcatacgttagaagaggcaaagtctatcaacttgtccttaagtgctctgggaaaatgcatcaatgcgcttgctgaaacagtcctcatgtacctgttcgtga

SEQ ID NO: 7660 - DNA, 311 bp, Zea mays
cggacgcgtgggcggacgcgtgggttcggttcgacaaaaaaagaaccttcgaagtccagctacgtatgcattccttttgtgtgagggaatcactagtcaggatctgctgttttattgctcgcaccatcactgtatttaccgaagaaaaaatacgtatggcgtgcgtgtcatcactgtatcggttctgttacctttgtgtttcccttccgtctaggctgttctggacaacactagaatcaatccagctgtcatcggtgacatcgtcgttgggacggtgcttggccctagttcccagcgtgcaaacgagtgca

SEQ ID NO: 7661 - DNA, 310 bp, Zea mays
gtcatgtgatgccaaacactgaccggccatttaaattgaactgggtatcgtatagcatgggtgaaaagcgatctgaagtggcttctgatcactcgatatttgttggcgatctagctgctgatgtcactgatgaaatgctgctggagcttttctccagcaagtaccgctcggtgaaaggagctaaagttattattgatgcaaacacaggccgttccaggggctatggatttgtcaggtttggagacgacaacgacaaatctcatgccatgtctgaaatgaatggtgtatattgctctacgaggccaattcg

SEQ ID NO: 7662 - DNA, 311 bp, Zea mays
gatcgatgtctcgacagcaaatagctagcaataatggagaagtacaccaaatccctagcgtcattgctcaccatgctggtgctggcacctctcctcgccatggccaccgacccagaccccctgcaggacttctgcgtcgccgacctcaacggcaagccatcagtgaacgggtacccatgccagccgccgtcgtcggccggcgaccagttcctcttctcgaccaagatcgccacgggaggcgaccccctggccaacccgaacggctccaacgtgacggagctggacgtttccgagtggcccggcgtgaacac

SEQ ID NO: 7663 - DNA, 319 bp, Zea mays
cccacgcgtccgcttccacgaactagacgagggaagagcgctgaagcctgaagctgtggaggaaaacgaaggatctccccgtgcttgtgtatgccaggtcgcctgctctccgtccgcatcccgtccctcgcgaaactcggcgctcccaggtgtgcaaaatccatggcttcagacactggcaagaagctcatccagatcgatgtgagctcggacacagtatgcccttggtgctttgtcggcaaaaagaacctcgagaaagcgatggagcaaagcagggacaagtttgacttcgaggtccgctggcatccgttctttctaa

SEQ ID NO: 7664 - DNA, 307 bp, Zea mays
cggacgcgtgggcgctcgtccagccctgaccacccgcatccccgtcagtcatggcagcggcacaggcggaggcgcggtgcgtgcgctgtcccagaaggagcaatacatacagatgatgctcgccgccgacgtccaccttggcaccaagaactgcgatttccagatggagcgctatgcctttaagcgccgcaccgacggcatctacatcatcaaccttggcaagacatgggagaaactgcagcttgcagcgagggttatcgttgccatcgagaacccgcaggacatcatcgtccagtccgcccgcccc

SEQ ID NO: 7665 - DNA, 306 bp, Zea mays
gttgggcgcagagaatccccaagcaaacaaacagggtagaggtagacggagaggagaggagaggagacgagaggagaggttgggtctgggacaccatggctccgatgaagctgtacggggcggtgatgtcgtggaacgtgacgaggtgcgcaacggcgctggaggaggctggctccgactacgagatcgtgcccatcaacttcgccaccgccgagcacaagagccccgagcacctcgtccgcaacccgtttggtcaggttccagctctgcaggatggtgacttgtacctcttcgaatcacgcgcaa

SEQ ID NO: 7666 - DNA, 305 bp, Zea mays
ctgagaatgatattgtttctgctgctgtattgtccggaaacaggaattttgaaggacgagtgcatcccttaactagagcaaattaccttgcttcccctccattagttgttgcttatgccttggctggcacggttaatattgattttgagaaagaacctattggaatctcgaaagatgggaaagaggtttacttccgggatgtttggccatcaacagaagagatagccgaggttgtcaagtcaagtgtgcttcctgacatgttcaagagcacatatgagtccatcacccaaggaaatcctatgtgg

SEQ ID NO: 7667 - DNA, 306 bp, Zea mays
agttgacgaaaacatacacagctgctagctaatcctgccgtgagtgcaatgcatgcaaagatgacgaagcccgcagccatcgttgttgctgctatcgccgtcctctccgtcagcctgctggctgggtcgtcgtgccttgcccttgcgcggcccagcggcgacttctccatcgtgggctactcagaggaggacctgtcgtcgcacgatagcctggcggagctgttcgagcgctggctgtcccgccaccgcagggcgtacgccagcctggaggagaagctccggcggttccaggtgttcaaggacaac

SEQ ID NO: 7668 - DNA, 318 bp, Zea mays
cggacctggtccaggtggagcgctacgtgtacaagcgccgcactgatggtatctacattattaaccttggaaagacctgggacaagcttcagctggccgccagggtcatcgttgccattgagaatccgcagacattatcgtgcagtctgctaggccctatggccagagggctgtcctcaagtttgcgcagtacactggtgcccatgccattgctggcaggcacactcctggtacattcaccaaccagttgcaaacctccttcagtgagccacgccttcttatcctgactgacccgaggactgatcatcagcccattaa

SEQ ID NO: 7669 - DNA, 316 bp, Zea mays
ccacgcgtccgccacgcgtccgacgagcccatcttcaaggacggcaagggttgcggctcatgctaccagatacggtgcctgaagagcaaccacccggcctgctccggcgtggcgcagacggtgatcatcacggacatgaactactacccggtggccaagtaccacttcgacctgagcggcacggcgttcgggtccatggccagctggggcctgaacgacaagctccggcacgccgggatcatcgacatgcagttcaggcgggtgccgtgcaacttccagggcctgaccatcaccttccgcgtccagcacggctcca

SEQ ID NO: 7670 - DNA, 315 bp, Zea mays
aaaattaataaaagaaaggtggcgtagaggataggaggagaaccaaggttgcgtctcgaaggttcttgcctcgttgggaagggatggcgtcggaggtggaggacgaggcggcgacgccgctggtcgccaacggtgcagccgacgtccgccggatgagggaccaggcgaaggcaattctgtccacgcaggccgtcaggatcgccaccaaggccgagcagcatgagcgcttcatctttaaggtcacacacttgctgggtgttcctggatttgggggattttgctatctcttgggtgccagaccacaggatgtgccat

SEQ ID NO: 7671 - DNA, 313 bp, Zea mays
cgttcatcggatccagtcttctcccgggatctcctccggctataaatttccggccccaattcacccaatccagatgcgcaaacatcgaatcgtctcgctcgtggctgccctactcgtgctgcttgccctcgccgccgtttcctccacgcgcaggcacaaaaggagtccgtggctgacaacgccgggatgttggcaggcggcatcaaggacgtgccggcgaacgagaacgacctccagctccaggagctcgcgcgcttcgccgtcaatgagcacaaccaaaaggccaatgctcttctggggttcgagaagcttg

SEQ ID NO: 7672 - DNA, 318 bp, Zea mays
tgcgacgaaggagggagagagcacgggggcttgatcgaagatggatgccggagcaaaggtggtgaagaaggccgcggcggggcgtcgcggcgggggcggccccaagaagaagccggtctctcgctccgtgaaggccggcctccagttccccgtaggccgtatcggccgctacctcaagcagggtcgctactcccagcgtgtcggcaccggcgcccccgtctacctcgctgccgtcctctagtacctcgccgccgagctcctcgagttggcggggaacgcagcgcgggacaacaagaagaaccggatcatcccgcgaca

SEQ ID NO: 7673 - DNA, 299 bp, Zea mays
gtgcctgccgcttgtcgtgctgcgggcgggcactgctgcaagtactagaggaggacgtgcggtgtccattagtgcgcgtgcggagggtcggaggaaccagtagcggagggttcgggtttcggcgggcgcgatgggtttcccgggatggctcggaggggcgcgtcgtcgctcgtctcccggtgcgtcctggcgagggcccctgccggcgcgccgccggtgccccctctgcggcgcgcaggacagtgcctgcagatggggtgcacaggctggtgccaggtgtccttcagaggttcagcagt

SEQ ID NO: 7674 - DNA, 316 bp, Zea mays
gcagaggaagcgaggcggagatgtcggcggggctggtgaccgacgaggccaccgtggggcggctgtaccggatccggcgcacggtgatgcagatgctgcgtgaccgtggctacctggtggtggaccacgagctcgccaccagccgccgcgacttcctccgcaagttcggcgagtccttccaccgcgaggacctcctcatcaacaagtacaagaagaacgacccatccgaccagatatatgtcttcttccccaacgatgacaaggtagggatgaagcacatcaagaagtacgtcgaaatgatgacgcacgagaacgt

SEQ ID NO: 7675 - DNA, 318 bp, Zea mays
gttgagttccgctccgccacaccaaaaagaaacaaaagcctacggcgagtcgatcgagaagctggtcatcgtcaggatgtcatcgccgcagtcagcagcgccgcccgtgaagctgatcacggcgttcggcagcccgttcgcccaccgcgtggaggtggcgctcgctctcaagggggtgccgtacgagctggtcgtggaggacctagccaacaagagcgagctgctgctcacgcacaacccagtccaccagtcggtccctgtcctcctccacggtgaccgcgctgtctgcgagtccctcgtcatcgtcgagtacgtcga

SEQ ID NO: 7676 - DNA, 316 bp, Zea mays
attcagatttttagatattttattttaaatgtcagttcatatttttttccttgcagaatgttacccctaagaaggcagaagagactgctttgatatctgatgttgttgcagattcaccatacaagattttcatagcgggcattgctggagtgatctcatctaagatgctaatggagattgttagtgcatttggcccattggctgcataccgctttctttttaacaatgagctcggtggaccctgtgcatttcttgagtacgccgaccgctccgttacttctaaggcatgtgctggcctcaatgggatgatgcttgg

SEQ ID NO: 7677 - DNA, 322 bp, Zea mays
gaccatccacggcgtggagttcaaggactacccggagccccgcaacatgtcgggcatcctcgtcgccgacatgtcctccaacttctgctccaagcccgtcgacgtctcccgcttcggcgtcatctacgccggcgcacagaagaacgtcgggccctccggcgtcaccatcgccatcgtgcgcaaggacctcattggcgccgctcagcccatcacgcccgtcatgctcgacttcaagacgcacgccgacaacgcctccctctataacaccccgccctgcttcgccatctacgtctgcggcctcgtcttcgaggacctgctcgcg

SEQ ID NO: 7678 - DNA, 313 bp, Zea mays
  unsure (1)..(313): unsure at all n locations
ctcaccagtcaccagtctccactctggagtctggaactcccctcatcctccacatctccaccgcatcggaactaggaaggcgaacgntagcgcgtgcgcggcgcggcacggatcgagcgatggcggtggcccctcctacggcggcggcgctggagcagctaagcagcagcaagatgttcgacggcttcaatctccgcttccgccaccagagcgccacccttggctgcgccatgactttctccatctacctgcccccgtccccggcgtccaaccttcccgtgctgtactggctctcgggtctcacctgcaccga

SEQ ID NO: 7679 - DNA, 309 bp, Zea mays
gctactcataggataaataaaattgaaggaacaattaaaggaataagagtcacagtcatcgagacacctggcctggtgtctcattaccatggccaaaggaggaacatgaagattctgaattctgtcaagcacttcattaagcgatccccacctgatatcatcttatactttgagcgtttggaccatattaacagcagatacagtgattacccactgctgaagcttatgactgacatattggggtctccaatgtggctcaacactgtccttgtaatgactcactgttcctcatctcctcctgaaggacca

SEQ ID NO: 7680 - DNA, 310 bp, Zea mays
gtgaattgattagaaagcgagggaaaaacaatctccaaaagttcatccatttcattgtggatatttttaggaggtatgatgaagcacctgctgatcttaagccatatcgccaaaaagatggtgctcttctcgctattgggacactctgtgataaactgaagcaaacagatccatataaaacagagcttgagagtatgctggtccgacatgtctttcctgaattcaacagtcgtgttggacacttgcgagcaaaggcagcatgggttgctgggcagtatgccatatcaacttttcagaccagaacaatttt

SEQ ID NO: 7681 - DNA, 309 bp, Zea mays
cctcggtctttattgaatcgacccttatggagaatgggggcgtccctgaatctgcaaacccatctaccctaattaaagaagccattcatgtcattagctgtggatatgaagagaaaactgaatggggaaaagagattggctggatctatggttcagttacagaggatattctgactgggtttaagatgcactgccgtggctggagatccatctactgcatgccggtgagacctgcattcaagggatcagccccaatcaatctttccgatcgtcttcaccaagttctccggtgggctcttggttctgtcg

SEQ ID NO: 7682 - DNA, 309 bp, Zea mays
gattaagggtttgaagcagaagaaggctcacctgatggagattcaggtcaatggtggtaccattgctgacaacgtggactatggctacaaattctttgagaaagaggtccctgttgatgctgtcttccagaaggatgagatgattgacatcattggtgtgaccaaggggaaaggttacgagggtgtggtcactcgttggggtgtcacccggcttccccgcaagacccacaggggtctccgcaaagttgcttgtatcggtgcatggcatccggctagggtctcctatacggttgcccgtgctggtcagaa

SEQ ID NO: 7683 - DNA, 314 bp, Zea mays
ggatgagacaagtgaagaagaggattcgtccccagaaactacagaagaagagacagaagaagatgaagagaaagagaaaaatcctaagacgaagacgataaaggagactacttctgaatgggaacttctgaatgatatgaaggctgtatggcttcgcagcccgatagaggttactgatgaggaatactcgaagttttaccactcactagccaaggacttcggtgatgacaagcctatgggttggagccacttcactgctgaaggagatgttgagttcaaagctttgctcttcattccaccgaagctccgcatga

SEQ ID NO: 7684 - DNA, 313 bp, Zea mays
gcatcaccatcaagccccagactgaccgctgggtgttccccgagaccaacactggcatcattgtccttgctgagggtcgcctgatgaaccttgggtgtgctactggccatcctagctttgtcatgtcctgctcattcactaaccaggtcattgcccaacttgaactgtggaaggagaagagctctggcaagtatgagaagaaggtgtatgtgctccccaagcaccttgatgagaaggttgctgctctccacttgggcaagcttggtgccaagctgaccaagctcaccaagtctcaggccgactacatcagcgt

SEQ ID NO: 7685 - DNA, 300 bp, Zea mays
ctcagagcctcagatcgccagcgaagtcttgcggtcgcgaagagcaacgcaacaagatggtgagactcgcattcgggagcgtcggcgagtgcttcagggtcaggtccatcgaggcctacgtggcggagttcatcgccacggtcgtgttcgtgttcggcggcgtggggttcgcgcatcgggttcaggcaagtgacgagtggcggcgcggtggaccctgcgggactggtggcgagtcgctgtgcgcacgccgtggccgtcttcgtgggcgtgtccgtggccgcgaacaggtccggcgggcag

SEQ ID NO: 7686 - DNA, 305 bp, Zea mays
agcaacatcatccgagaaaggtggaatgtctcatacagagaagaagctgggcgagttcttcatgcaccagattgccaatgacacgtcgacggcctatggtgacgggttcagaactgcgtatgctgccgtcaacaagtatggccttcgccaaacactgagccatatacgcctaacaggaggcttccctgtataataagagtgaaaaaaacacaaaatgtccatgcatgatcatatcgatatcaaaaggttatatacatattgggatgaagttggctatggaacactggatgcatagtgattcaatt

SEQ ID NO: 7687 - DNA, 318 bp, Zea mays
gagatggcaggcaagggtgatgggccggcaatcggcatcgatctcggcacgacgtactcttgcgtcggcgtctggcagcacgaccgtgtcgagatcatcgccaacgaccagggtaaccgcaccacaccctcgtacgtcgccttcaccgactccgagcgcctcatcggagatgcggccaagaaccaggtcgccatgaaccccatcaacaccgtctttgatgccaagcgtctcattggcaggaggtttagtgatgcctctgtccagagtgatattaagctgtggcccttcaaggtcattccagggcccggtgagaaccaa

SEQ ID NO: 7688 - DNA, 317 bp, Zea mays
ccgcacaccgggtgcgatgcgccgccatcggttcaagcagcgaaccctagccgccctcagcgacggattgcagatctcccagccatgacgttcaagcggaggaacggcgctaccaacaagcacgggcgcggccacgtcaagtacatacggtgctccaagtgcggcaagtgctgtccaaaggataaggctatcaagcggttcttggtgaggaacattgttcagcaggctgctgtgagggacgtgcaggaggcttgtgtgcatgatggatatgttcttcccagattgtacgcaaaggttcatcactgtgtctcatgcgc

SEQ ID NO: 7689 - DNA, 312 bp, Zea mays
ggttatttcagtgagataaaagggtcgcataaaaatgaacatttagcaaccaaacttactgaggtgtctgtgagtgacaaacttgaaggcttccgtgcaacaaaagaggactttaaaggtttgagttttcctacaatttcatctgtgggaccaaatgcagcagttattcactataaacctgaagcaagcacatgttcggaaatggatgctgataaaatatatctttgtgactctggggcacagtacctggatggtacaacagacattacaagaactgtacattttggtaaaccctcagcacatgagaagtca

SEQ ID NO: 7690 - DNA, 309 bp, Zea mays
agaaaatggttaatggtggcagagtgagcaactgggcatgtattaacttctctcggaatgtgcaagatagtgccgccaggggtttctctcatgagctggcagtcatgtgccaaatatcacgaatggattttgctcttgagcctgtgctgcctccagtgactgcaaggccagaacatgttgagagagcgttaaaggcacgttatcaagatgcaatgaacatactgaggccacagggaagggaacttgatctgctgatcgtaatactgcctgacaacaatggttctctttatggggatctcaaaagggtat

SEQ ID NO: 7691 - DNA, 310 bp, Zea mays
gtaattgtgctaaatttgctcagagcctgatttcaaaaggatatgaagtcgtctctggtgggactgacaaccatttagttctggtgaatctcaagaataaggggatagatggttcaagggtggagaaggttttagaaagtgtgcatattgcagcaaacaagaacacagttcctggtgatgtttcagctatggtgccaggaggcatcaggatgggaacccagcccttacgtcgagaggatttgttgaagaagatttcgctaaagttgctgacttcttcgatgcagcagtgaatctggccttgaagattaag

SEQ ID NO: 7692 - DNA, 301 bp, Zea mays
cccacgcgtccgcccactcgtccgcccacgcgtccgcccacgcgtccgccaatcctggggtccgctctttggaaagctgttcttctcgatctgggtgatcctccatctctagcccttcctcaagggtctcatgggaaggcagaaccgcacaccaacaatcgtcattgtctggtccatccttcttgcatctatcttctccttgctgtgggtgaagatcgatgctttcatctccccgacacagaaagctgctgccttggggcaatgtggcgtcaactgctgatcgagaccgtgactcttattt

SEQ ID NO: 7693 - DNA, 312 bp, Zea mays
cagacgcgtggggcgtggacctgacgctgccgatggagaacacgctgatccacagcagcgccacgccgctggcgtgcctggccatggccgaggcgccgcagaaactgaacgccgtcgtgaacgtggtggccaaccttcagcagcagaacgtgcgggtcgtcgtcgacgtcgccggctcgcgcgtcgggttcgcgagggagccctgcaactgaacccctgaatccgtccgtgccctatgcacgggaggagcaaggaggagacgcgctgcggctgccgcatcggtcggtgtgcagttagttgtcctgttagtct

SEQ ID NO: 7694 - DNA, 310 bp, Zea mays
ggtggatcgcgcgccaagcaagtcttccggccggccgcgaagagcgcgatcaagcaagacaaggtggtggagctcgcgcttcggaagcgtcggcgactcgttcagcggcacgtccatcaagggctacgtggccgagttcatcggcagcctgctgttcgtgttcgccggcgtcggttccggcatcggctacgggcaagtgacgaatggcggcgcgctggacccggcgggcgtggtggcgagtgctgtggcagacggtgtggcggtgttcgtgggcgtgtccgtcgcggcgaacatgtcgggcggccaggtg

SEQ ID NO: 7695 - DNA, 301 bp, Zea mays
cggacggtgggcgagacgcgtgggttccgcgccgccacccctacaggtaaggcagaggaggagggcaggatgtcgcaccgtaagttcgagcacccgacgcacgcctccctcggctctcttcccaggaagcgctcctcccgtcaccgcggcaaggtgaagtcattccctagggatgaccccaagaagccttgccatctcactgccttccttggctacaaggctggcatgactcacattgtccgtgaggttgagaagccaggatccaaactccataagaaggaaacttgtgaggctgttacca

SEQ ID NO: 7696 - DNA, 307 bp, Zea mays
caagaaccacagccaccgcgatggcgcagatcatcgatggcaaggccatcgccgccgacgtccgccgcgatgtcgccgccgatgtggccgcgctctcgtcggcccacggactcgtgccggggctggccgtggtcatcgtggggagcatgaaggactcgcagacgtacgtgaacatgaagcgcaaagcgtgcgccgaggtcggcatctgctccatcgacgtcgacctcccggaggacatctccgagaccgcgctcgtcgccgaggttcatcgcctcaacgctgaccccgccgtgcacgggatccttgt

SEQ ID NO: 7697 - DNA, 304 bp, Zea mays
aactacttccgttgtcatcatagcggcagagttactcaagagaggcaatgatcttgtgaagaataagatccatccaacctctataatcagtggctacaggcttgctatgcgtgaagcctgcagatatgttgaggaaaagttagcagtcaaggttgacaaacttggaaaagaatcccttatcaactctgcaaaaactagcatgtcttcgaaattgattaatagtgacagtgatttctttgcaactttggttgttgaggcagttcaagccgtgaagactacaaatgccaagggagacgtgaaatat

SEQ ID NO: 7698 - DNA, 308 bp, Zea mays
ctcgcaattccgcattcgttccaactcctgagcactttctcctcgtccccgacaagccaatcgaagccgagatacggccatggactccaccggcaccggagcagggggtaatgggaagaagggagcggccgggcgcaaggtcggcgggccaaggaagaagtcggtgtcgaggtccgtgaaggccgggctccagttccccgtcggccgcatcgggcgctacttgaagaagggccgctacgcgcagctgtcggcaccggcgcccccgtctacctcgccgctgtcctcgaatacctcgccgctgaggttct

SEQ ID NO: 7699 - DNA, 306 bp, Zea mays
gtcggatctgagacgagacgagacgatcccccctcgcctcaaccggaacttgttttaccccatctcatcccactgactcctcccacccacccgcccgctgcctccgccggatctcgtcggactcggatccggccgaccacgaccaccccgcgtcgccgccgcgcacagcagcagatcagagaagatggccggactcgacaccttcctcttcagctcggagtccgtgaacgagggacaccctgacatgctctgcgaccaggtctcagatgctgttctggacgcttgccttgctgaggaccctgacag

SEQ ID NO: 7700 - DNA, 303 bp, Zea mays
gatgttttgatttcttctcagagataatggaggccggcgccgccgctgctgccactgccatctaccctctgcaccgatgcaaaaccatacacctggtgaggcatgcccaaggtgtccacaacgtggaaggcgacacggatcacagcgcctacatgaaacccgacttcttcgacgcgcgcatcactcccttgggctggaaccaggttgacctcctgcgagagcatgtgaaggaatctgggcttgcggaaaagattgagctggttatttgttctcctttgtcgaggaccatgcagactgcagtgg

SEQ ID NO: 7701 - DNA, 299 bp, Zea mays
ggctcccatcgctgtcggcgacgccctccccgacggccagctcgggtggttcgacgagaacgaccagctgcagcaggtctccgtccacgcgctcgccgccggcaagaaggtcatcctcttcggcgtccccggcgccttcaccccgacctgcagcaaccagcatgtgccaggcttcatcacacaggctgagcagctcaaagccaagggtgtagacgagatcctgcttatcagcgttaacgaccccttcgtcatgaaggcgtgggcgaagacctaccccgagaacaagcacgtgaagttcc

SEQ ID NO: 7702 - DNA, 290 bp, Zea mays
ggacctggccgcgtgcgaaccaagcagaccacagcaagaagcgtagtcgtcgccggaaggaaaggcgcggacaagatgtcgtggcagacttacgtcgatgagcacctgatgtgcgagatcgaaggacaacatctcagcgccgccgccatcgtcggtcacgaggcagcgcttgggcgcagtccgagagcttccccgagttaaagcctgaggaggttgctggtatcataaaggactttgatgaacctggtactcttgcaccaactggtcttttcgttggaggtacaaagtac

SEQ ID NO: 7703 - DNA, 294 bp, Zea mays
cgacatcccctcgcctaccccagctctacccgcgacgaagcatcaccaggaaggatgacgggctcaatggatctcccggccaagggcgggttcagcttcgacctgtgccgccgcaacagtatgctggagaagaacgggctcaaactcccgggattcaggaagaccggaacaaccatcgtcggcctcgtctttcaggatggggttgttcttggggcagacacaagagcaactgaggggcctatagttgctgataagaattgtgagaagatccactttatggcgccaaacatttat

SEQ ID NO: 7704 - DNA, 295 bp, Zea mays
cggacgcgtggccagcatctcccgtctccgtcgtctcgtctctgctcctcacctcgccgccagccatgggcaagatcaagatcggaatcaaaggtttcggaaggatcggcaggctcgtggccagggtcgccctgcagagcgaggatgtcgagctcgtcgccgtcaacgaccccttcatcaccacggattacatgacctacatgttcaagtacgacaccgtgcacggccaatggaagcacagcgacatcaccctcaaggactccaagacgcttctcttcggcgagaagccggtcac

SEQ ID NO: 7705 - DNA, 295 bp, Zea mays
cgccttcgccgccgaatccgagactccgatctcgggttcaccgcagcgcacagagcagccccgactcccggcccgatccgcgctctcctctccgtcgcttcagtcatggcaggaatggcacctgagggttctcagttcgacgctaagcactatgattctaagatgcaggagctgctgagcaccggtgagactgaggagttcttcacttcatatgatgaagtttttgagagttttgatgatatgggcctccaagagaatcttctgagaggcatttatgcttatggttttgagaagc

SEQ ID NO: 7706 - DNA, 296 bp, Zea mays
cccacgcgtccgcaggaggttcttgctctttgtgatcatccatgcctcttggaaaaagaggaaaccaaatcattgttcagtgctgatgctatttctcgagcaaagcagattcttgcaactattcctggacgggcaacaggtgcatatagtcacagtcagggtatcaaaggattgcgtgatgcaattgctgctgggatcacctcacgtgacggattccctgcaaatgcagatgacattttcattacagacggagcaagtcctggggtccacatgatgatgcaattactgattaggaa

SEQ ID NO: 7707 - DNA, 169 bp, Zea mays
gtaccttttcaggctggtaccgataccgtggatctggatttgctatgttttgtactgtgctcgagtgtaaggtcagttcgtaatacaatcaatctgcgtggaacaatttgatatccttgaatatgttagtgagatcatttcgacaatgaaagttgagaacagaagttac

SEQ ID NO: 7708 - DNA, 296 bp, Zea mays
atcgaagagcaagcgcgtgagtggttttgaccaagcacctacacaataggaagtgcctgttgtgtaggtgctggtgttatccctggtcagctgcctggtgtcaccgctcctattcctggggttggggtgcttccaaacttgtataatttggctgcaggacagccacaagccatgacacaacaggctaccaagcatgctcggcgtgtctatgtgggcggacttcctccaactgctaatgagcagaccgttgccatattcttcaatggagttatggctgctattggaggaaacacagc

SEQ ID NO: 7709 - DNA, 291 bp, Zea mays
gtcaacaacatctacctcaacttcgacgccttccacggcgacaaggaccacggcggcgtgcgcgacggcaccaacatcgtgctctggaagtggtgcgagggcgacaaccagcgctggaagatcgtcccctggtaaatgtgctgttctgtggctgcactggtcatcaccatgatctggagctttgaaggcatagccacctgtggtcagcagctgctgccgtgttgctagaataaagttggtggcgatcgatcgatcgatctttggtgatgggtgtccctccctgtgtgtttg

SEQ ID NO: 7710 - DNA, 290 bp, Zea mays
ccacgcgtccgaccaagggtccctgcctcctccacgtccattggttcctctcgtgttgattggaccaggaacagggtgtgcaccattccgtgcatttgtggaggaaagggctgcacaggctgcagctgaaccaacagccccggttctgttcttcttcggctgtagaaaccaagaaaacgattttctatacaaggatttctggctaactcatgcgcaggatgagggggtgttgtcctcgaaaaggggtggtggtttcttcgtcgctttttcccgggatcagccgcaaaagg

SEQ ID NO: 7711 - DNA, 288 bp, Zea mays
ggacctggtccgccgccatcgcttcaagcagcgaaccctagccgccctcagcgacggattgcagatctcccagccatgacgttcaagcggaacaacggcggacgcaacaagcacgggcgcggccacgtcaagtacatacgctgctccaactgcgccaagtgctgtccaaaggataaggctatcaagcggttcttggtgaggaacattgttgagcaggctgctgtgagggacgtgcaggaggcttgtgtgcatgatggatatgttcttcccaaattgtacgcaaaggtt

SEQ ID NO: 7712 - DNA, 291 bp, Zea mays
gtgtcattgattttgattctgatccgtggcctgtcatatctgatagtgcaaaagatcttataagacggatgctgaatcctcgctctgccaagcgcttaacagcacatgaagttctatgccatccatggattcgtgatcatggagtagctcctgaccgtccactggatccagctgtcttatctcgcattaagcaattctctgcaatgaataagttgaagaaaatggctttgcgagtaatagctgagagcctatcagaagaggaaattgcggggttgaaggaaatgttccaga

SEQ ID NO: 7713 - DNA, 288 bp, Zea mays
ggttttgctgctctccgaccccgagctccgaagccgcagcatcaggcgcggcccccctcgcgtgtgaccgagatggcgctgccgaatcaggggaccgttgattaccccagcttcaagctcgtcatcgtcggcgatggtggaactggtaaaactacatttgtgaagaggcatctcactggagagtttgagaagaaatatgaaccaaccattggtgtggaagttcatccgttggatttcaccactaactgtggtaagatcaggttctactgctgggataccgcaggcaag

SEQ ID NO: 7714 - DNA, 287 bp, Zea mays
ttcctcccaacaccacctcgccgcgatctccgtagcctccgtcgcgtcgagcatcgatcatgtcggcctactgcggaaagtacaaggatgagctcatcaagaatgctgcctacattggcacccctggcaagggtatccttgctgctgatgagtccactggcaccattggcaagcgcctttccagcatcaatgtcgagaacgttgaggagaaccgccgtgccctccgtgagctcctattctgctgccctggtgctctccagtacatcagcggtgtgatcctcttcgag

SEQ ID NO: 7715 - DNA, 287 bp, Zea mays
cccacgcgtccgaacaaaactaggttccgtggcgtcgggtgggaccagcaagcagccgccgcagccggcccccaggcgcctctatatacggcactccgactccgatacattggcgacatcacagatcacacacactcgagaactccatttcgatcccatttgaaatcaacccatcctcgtttcctccgtctagcagcctctcaccctcatggccaagatcaagatcgggatcaatgggtttggcaggatcggaaggctggtggccagggtggccctgcagagcgacg

SEQ ID NO: 7716 - DNA, 287 bp, Zea mays
ccacgcgtccgccacgcgtccgcgccatctgcggcgtcgggctcgtcaagggcttccagagcgccttctacgtgcgctacggcggcggcgccaacgagctcagcgccggctactccaagggcaccggcctcgcctcggagatcatcggcaccttcgtgctcgtctacaccgtcttctccgccacctaccccaagcgcaacgcccgtgactctcatgtccccgtgcttgcccctctccccatcgggtttgcggtgttcatggtccatctggccacgatccccatcacc

SEQ ID NO: 7717 - DNA, 285 bp, Zea mays
cccacgcgtccgggttgcggcagacggagaggagagcaaggatttgcttggcttgctgctgtcgatggttgacgagcggccgttcgacagcggggaagaagtcaggatcaccgaaaccgatgtcaaggcactcattttgaacctgttcgtggcagggaccgacacgacgtcgaccatagtggagtggtctctcgcagagctgatccgccacccggaaatcctgaggcaagcgcaggaggagatggacgcggtggccgggcgcgggaggctggtcacggagtcgga

SEQ ID NO: 7718 - DNA, 283 bp, Zea mays
atatcaagctcagagcctcagagcgccaccaagtcttgcggtcgcgaagagcaacgcaacaagatggtgaagctcgcattcggaagcgtcggcgactccttcagcgtcacctccatcaaggcctacgtggcggagttcatcgccaccctcctcttcgtcttcgccggcgtgggttccgccatcgccttcgggcaactgacgaatggcggcgcgctggaccctgcgggactggtggcgatcgctgtggcgcacgcgctggccctcttcgtgggcgtctccgtgg

SEQ ID NO: 7719 - DNA, 287 bp, Zea mays
cccgttccatttccccatctcccagatccaattcgcgagttctccctcctctgccgccatggcgctctctgtggagaagacctcgtctggacgggagtacaaggtcaaggatctctcgcaggcggacttcggccgcctcgagattgagctggccgaggtcgaaatgcccggcctcatggcgtgccgcgccgagttcggcccgtccaagcccttcgccggcgctaggatctcggggtctctccacatgaccatccagaccgccgtcctcatcgagaccctcaccgcgc

SEQ ID NO: 7720 - DNA, 289 bp, Zea mays
cattattcgatcttgagtggaagcaagcaggcagacatggcggcggctactgcaccaaagacgatgccgtcgtccgttttcgccgccgcactgctgctcctagccgcggcggcgtgccaggccagcccttactaccctctggagctagggtactaccgttacacttgtccccaggctgaggctatcgtcaaggccagcatggagaaggccatcgcccagaaccctggcaatggcgccgccgtcatccgcatgctgttccatgactgcttcgtcgagggctgcgacgctt

SEQ ID NO: 7721 - DNA, 97 bp, Zea mays
tctgctctcccccacctcccggtccggcagcagagagcgggggtgcagagagatcgagatccggaggccgcgagtgggagcgccaccaccagcgact

SEQ ID NO: 7722 - DNA, 304 bp, Zea mays
accttttgaattttagaacactctgcttgcacttcatatgcattagtgcatatgcactacaaatttaaaatctctctctatatatttttgaattttataaaactctgcttgtatccattttaatttgagaagattgtgcatgctaattaccatttaaaatctctcactctctctctctatatatatatggtttggatacacaaccaagctttagttcatcagatgttttagaagctgcatatgttaggtcatatcagcaaaaaaatgagtttgcatagcagttgttgcccataacttttactat

SEQ ID NO: 7723 - DNA, 300 bp, Zea mays
catctcccagatccaattcgcgagttctccctcctctgcggccatggcgctctctgtggagaagacctcgtctggacgggagtacaaggtcaaggatctctcgcaggcggacttcggccgcctcgagattgagctggccgaggtcgaaatgcccggcctcatggcgtgccgcgccgagttcggcccgtccaagcccttcgccggcgctaggatctcggggtctctccacatgaccatccagaccgccgtcctcatcgagaccctcaccgcgctcggcgccgatgtccgctggtgctcctg

SEQ ID NO: 7724 - DNA, 302 bp, Zea mays
cccacgcgtccggaaacaggcacgacgatcctctccgggatcgaggccaccgtggaccccagcacgcaggtggtgtactcggagagcccggacagcggcgtgctggccgacaagtacgactacgcgatcgtggtggtcggtgagccgccatacgcggagacgttcggcgacaacctgaacctgacgatcccggcgcccgggccgagcgtgatccagtcggtgtgcggaccgccaagtgcgtggtggtcctcatctccggcaggccgctggtggtggagccgtacctgggcgacatggacgcg

SEQ ID NO: 7725 - DNA, 301 bp, Zea mays
cccacgcgtccgctcactactacatacatcaccaactaggatcgatctctcgacagcaaatagctagcaatggagaagtacaccaaagccctagcgtcattgctcagcatgctggtgctggcacctctcctcgccatggccaccgacccagaccccctgcaggacttctgcgtcgccgacctcaacggcaagctgtcagtgaacgggtacccatgccagccgccgtcgtcggccggcgaccagttcctcttctcgaccaagatcgccacgggaggcaaccccctggccaacccgaacggct

SEQ ID NO: 7726 - DNA, 302 bp, Zea mays
agcaggagagagcgcgatggggaagatgcggcactgatctgcctcgtggccgccgtcgccgccgcggccatcctcctgacagcgtcggccaagaagtccggcgacgtcaccgagcttcagatcggcgtcaagtacaagcctgagtcatgtacgctgcaagcacacaaaggagacaaaattaaggttcactatcgtgggacactcactgatggatcagttttcgattctagctatgacagaggtgacccgtttgaattcactcttggaaatggccaagtgataaaaggttgggaccaaggatt

SEQ ID NO: 7727 - DNA, 303 bp, Zea mays
  unsure (1)..(303): unsure at all n locations
cggacgcgtggnttaacattgtgtatgtccattgtactgtgctgatctttttaaatatgcgatactggtttcttaatgcaggctggtctaacggttcagcaacaagttagtgcaagatttggtaaatgccttcttgaacttagcggaaacaatgccatcattgttatggatgatgcagatatccagctagctgtgcgatctgtcttgttcgctgctgttggtacagcaggacaacgctgcactacatgtcgtaggctgattcttcatgagaacatatatcaaaccttccttgatcagcttgtt

SEQ ID NO: 7728 - DNA, 286 bp, Zea mays
caagctagctagcccggagcacgcctagacacgccagcagcaatggcggctcagctggccgtcgcgtttctcgccttgttgtcctcctctgccttcttggccgtgtctggccagaagttcaacgccatcttcagcttcggcgactccatgtccgacaccggcaacctgtgcgtgaacggtccccccgccggcctgactctcacccagccgccctacggcgagaccttctttggccgcgcaccttgcgctgctccgacggccgcttcgtcgtagacttcctggccga

SEQ ID NO: 7729 - DNA, 303 bp, Zea mays
  unsure (1)..(303): unsure at all n locations
cccacgcgtccgcccacgcgtccgcccacgcgtccgcccacgcgtccgcccacgcgtccgacaccgcgtgcgaaccaagcagaccacagcaagaagcgtagtcgtcgccggaaggaaaggcgcggacaagatgtcgtggcaggcgtacgtcgatgagcacctgatgtgcgagatcgaaggacaacatctcagcgccgccgccatcgtcggtcacgaggcagcgcttgggcgcagtccgagagcttcccgagttaaaagcctnagaaggttgttggaatcataaaggactttgatgaacctggt

SEQ ID NO: 7730 - DNA, 298 bp, Zea mays
atccccctcccgccgcgccgcctcaccgccgccggagaagatgggtcgcgtgatccgcgcgcacgtaagggtgcggggtccgtgttcaagtcccacacccaccaccgcaagggccccgcccgcttccgctccctcgacttcggcgagcgcaacgggtacctcaagggcgtcgtcaccgacgtcatccacgaccccggccgtggcgcgccgctcgccaaggtcactttccgccacccattcaggtacaagcaccagaaggagctctttgtcgcagccgagggcatgtacacgggccagt

SEQ ID NO: 7731 - DNA, 299 bp, Zea mays
cccacgcgtccgggagcaaccatacttaagatgttggaagttgagcatccagccgccaaggttcttgttgagttggctgagctccaagatcgtgaggtaggagatggaactacttccgttgtcatcatagcggcagagttactcaagagaggcaatgatcttgtgaagaataagatccatccaacctctataatcagtggctacaggcttgctatgcgtgaagcctgcaaatatgttgaggaaaagttagcagtcaaggttgacaaacttggaaaagaatcccttatcaactctgcaaa

SEQ ID NO: 7732 - DNA, 297 bp, Zea mays
ggaccgtggctttgttgagccacgtgttagcaaggaacttctaacagaggattcttactataacttcattcaaacatgggataatgaacaggagataaagatgctgcgcacaaaggttgatttaattataactcttggtggtgatggaactgttctgtgggctgcatcattgttcaaaggacctgttcctccggttgttgcatttgccctgggatcactgggcttcatgacgcctttcccaagcgagcaataccgtgagttgttggacaatgtgctgaacgggccatttagcatcac

SEQ ID NO: 7733 - DNA, 283 bp, Zea mays
cccacgcgtccgcccacgcgtccggccaaaccgagcggacgccgccatggatcgctagtggggctccaagcccggcagcggcggcgcgtctccgcgcagaatgaggccatcgaccggcgggagcgcctccgccgcctggccctcgagaccatcgacctcgccaaggacccctatttcatgcgcaaccacctcggcagctacgagtgcaagctgtgcctgacgctgcacaacaatgaggggaactacctggctcacacgcaggggaagcggcaccagaccaacc

SEQ ID NO: 7734 - DNA, 303 bp, Zea mays
cttgtttttgaggtagaagaccgtgaaatgattggtggatctgcctatggaggtcagaaggctatttgttgtagttcagatcttgcaaaattaggagcttgcaaagaaggttctgtcatctatcgcccatcccaggtaaatcctggttggccaaagttgtttgttgcatcttttgagggaagtgatctgatcgcaacgctgccgtcaaggaccattcaaattaccaaaactgggatgtacaatatgtactttatacattgtgatccttcacttgctagtttggaaatcgaggggaaaaccata

SEQ ID NO: 7735 - DNA, 289 bp, Zea mays
caccgccttccatgttgtttgttcaaaatttctgcttctgcaactctctttgcttgttctgtgaaaacataggttccatttcaacttccgtcggacaggacctgtattcgtcgagaaaaagtccctttttcatagacgaactttgcacgactgtttcttatatagagatttaagtcgatagatgatgagcccggcaagcaagtccggagcgcggtcaggatcaagaacatcagcaagtctcatgtggccttcaagttccaaacgactgcaccaaagagttgcttcatga

SEQ ID NO: 7736 - DNA, 290 bp, Zea mays
ccgtgattccctagtcctacccagatcggcgcccgacgcaaggccgagcaggcgatggccgcagcggcgtcaatggggcacccttacgcgccaccgagctggaccttccgggtttcgtgccgctgaagctgtcccaggtcgagatcctcgtgtcctacctcggcgcctccgtcttcgttttcctcgccgtctggctcgtctccggaagatgtgttagattatccaagaccgaccgtctgctcatgtgctggtgggcattcacagggttgacccacataatgatcgagggg

SEQ ID NO: 7737 - DNA, 293 bp, Zea mays
caggcacaccaccaaatccacctgcgcccttaacccatcgccgccccgctcgatcccctccgccttcttcgccgccggcccccggactgcgaactcccaggagcctagaaggacccggcgccatggggttctgggagttttttcttaactggctccgcagcctcttcttcaagcaagagatggagctttcattggtagggctccaaaatgctgggaaaacatcacttgtgaactccattgctactggaggttttagtgaggatatgatccctactgtaggattcaatatgaga

SEQ ID NO: 7738 - DNA, 279 bp, Zea mays
caccgggcacaccccccgaggtcagcttagctccactccagctccaatcacagtcgtgtccagagctcgagagctagctagagggccgtgaaaatgccgatcaataggatcgccctggggagccaccaggaggtgtaccacccgggcgccctcaaggcggcgttcgctgagttcatctccaccctcatcttcgtcttcgccggccagggctccggcatggccttcagcaagctgaccggcggcggcccgacgaccccggcgggcctgatcgctgcggcg

SEQ ID NO: 7739 - DNA, 294 bp, Zea mays
ctcccagacccatttccctttccttcccctccggctccgcctcctcgaccactccgacaacccccagcgcctcctctccggcgagctccacctctccaccggcggcggcgagaagcgggggggctaactaagtctgtaggctgcggcggaggtgatcccggagccggagccgagtctagggcgatggggcagcagtcgctgatctacgcgttcgtggcgcgtggcaccgtggtgctggccgagtacaccgagttcaccggcaacttcaccaccatcgccgcccagtgcctgcag

SEQ ID NO: 7740 - DNA, 292 bp, Zea mays
aagatgtgatgaacaatcctgccaactttgctaagcaccaagcgaatcctaaggtgggccctatcatcgcaaagatgatggccaagttcaatgggtcccagtgatggttatgtcgcagtcaggttttgtgagcagcaagcaaaggtttgttggacagtgaacaggtgttcttttcgtgcatctggtctgggagtgtgtttagcttgtgatgaagaacatgagtgtgtgtgttggtcgtggtgcatctggaggtgcgatgagcatgtgatgaaaaaaaaccaaacggctctat

SEQ ID NO: 7741 - DNA, 293 bp, Zea mays
aacacgccgccgtcttctgcggttctgccgtttactcttccactttggcctcctctcttgcaagtttaagcttcgcctccagccatgggtaaggagaagtctcacatcaacattgtggttattggccacgtcgactctggcaagtcgacaaccaccggccacctgatctacaagcttggaggcattgacaagcgtgtgatcgagaggtttgagaaggaggccgctgaaatgaacaagcgatccttcaagtatgcttgggtgcttgacaagctcaaggctgagcgtgagagggg

SEQ ID NO: 7742 - DNA, 311 bp, Zea mays
gacatccggttggctgttctcggtcttggcggtcccgagtaaagaccagcagcgcaagaagtcggtagagcgagaagaaggcagtggcggccgacaggttcgttttgaggtcggagtccgtgaacgaggcgcacccgacaagctgtgcgaccaggtgtcggacgccgtggttgacggatgcctcgcggaggaccccgacagcaacgtggcctggcacacgtgcaccgagaccaacgtggtgatggtgttcggcgaggtcacgaccaaggcgaccgttgactaggagaagatcgtgggggacacctgccgcg

SEQ ID NO: 7743 - DNA, 303 bp, Zea mays
acccacgcgtccgtgacctggctcgatgccatctaggttccaagttggtgagggctcaaggaagctcaccacaccattcggatcacaaaggaaggactcagctctggccaccgcatcatatggaatccaagatgatgaggacacaaggaaggccactacatcatatggaatccatggggaggaccccagaataggccacacgtcatatggttcccaggatgagaagggatccaggaaggtcataatgtcatatgggtctaatggtgaggatgatccaagaagggccacacatcatatgggata

SEQ ID NO: 7744 - DNA, 276 bp, Zea mays
aacatgatgaaatacaaactgtaaatatcaagacagtcggtgcaggttttgaagccacagatggagaaagattacccttggctgtaaaagagttagggagctgtgatttgtacccacagagcttgaagcataaccctaatggacggttcgttgttgtatgttgagatggcgagtacataatttatactggcctggcctggaggaatagatcatttgggtctgcactggaatttgtttggtcatcagaaggggaatatgcaattaggggaagtacat

SEQ ID NO: 7745 - DNA, 311 bp, Zea mays
tccatttcggtcccatttgaaatcaacccatcctcgtttcctccgtctagcagcctctcaccctcatggccaagatcaagatcgggatcaatgggtttggcaggatcggaaggctggtggccagggtggccctgcagagcgacgacgtcgagctcgtcgccgtgaacgaccccttcatcagcaccgattacatgacctacatgttcaagtatgacactgtgcacggacagtggaagcaccatgaggtcaaggtgaaggactccaagacccttctctttggtgagaaggaggttgctgtgtttggctgcagg

SEQ ID NO: 7746 - DNA, 312 bp, Zea mays
ccacgcgtccgatcgctagctgctgcccttttgttttttttctctcatccgaattcccaggcaggcaggtcggcgaggagggcaggaagaccgaagaccgactcgtgcggggggtcgggacgggaacgggacaggacctcaaaatctcagatccttcctgcccgcccgcccgttcccgtcgacgcgtcgttcttgccggccgggccccacctccgcgctctgctcctccagggggatcggatacgccacaggctgcgcgatggtgctgtgggtcttcggctacggctccctcatctggaaccccggcttcga

SEQ ID NO: 7747 - DNA, 308 bp, Zea mays
cacgagaacaaggacggcgacgtggtgcaggcggacatcatgcagagcaactccggccactggtagcccatgcacgagtcctggggctccatctggaggatcgaccccaaccgcccgctccgtggccccttgtccatgcgcatcaccaacgagtccggcaggcagctggtggccaagaacgtcatgccggccaagtacatccccgacgtcgactaccggtcgttcgtgcagtactaatgatcgacctcggtcattgcttgccgcttattaagcgtttaattgtttcttctttatttagttagtggctg

SEQ ID NO: 7748 - DNA, 308 bp, Zea mays
gccatgtgcttgctcatggaccctcaggtcggccggaaggtctgctacgtgcagttccctcagaggttcgacggcatcgacgtgcacgaccgatacgcgaacaggaacaccgtgttcttcgacatcaacatgaaggggctggacggcatccagggcccggtctacgtcgggacagggtgcgtgttcgggcgccaggcgctctacggctacaaccctcccaagggccccaagaggccaaagatggtgacctgcgactgctgcccgtgcttcggccgcaagaagcggaaggacgccaaggatgggctgcc

SEQ ID NO: 7749 - DNA, 306 bp, Zea mays
cccacgcgtccgcaagctgcaggatcgaggaggttgcgtcgcagttgcgacggtgttcggttttatgggttgtatgtgtacaagacgatggatgtttcggcaacattggtacggcgggctgaaagtttaggattcagggcagttgttttgacagttggcacgcctgtgcttggcaggcgtgaagctgatgtcaggagtaaggtggttggtccagctctgtcagacgcttgaggtttagtgtcgttagacgactttgacggtggtgaaggctgctccaagctggaacgattctcacgggagacgctg

SEQ ID NO: 7750 - DNA, 307 bp, Zea mays
ctggtttggaatccatgtccataaattccattgcttgggaaggacaagttaacccaaaaataagcgcattccagaaagcacaggattgtcttctgcccatgggaattacttctgaaaatgttgcccatcgatatggtgtaacaggcaagagcaagatcaggccgccgctgagtctcataggagagctgctgcagccacggcctctggaaaattcaaggatgagatcgtcccggtcccaacaaagatcgttgatcctaaaactggagaggagaaggaagttgtgatatcagttgatgatgggattagg

SEQ ID NO: 7751 - DNA, 310 bp, Zea mays
tgctcgcgcactctcacctgcccgcgccgtcttcgaccgccaccaagatgaacaaggagaggctcatgaagatggccggcgccgtccgcaccggcggcaagggcaccatgcgcaggaagaagaaggctgtacacaagacggtcaccacggacgacaagaggctgcagggcactctcaagagagtaggggtcaacaccatccctgcaatcgatgaggtgaacgtattcaaggacgatgtcgtcatccagttcttgaaccccaaagtgcaagcttccatcgcagcaaacacatgggtggtcagtggatctcc

SEQ ID NO: 7752 - DNA, 270 bp, Zea mays
caactgaggtcgaaatagcgtggtagcttggatctgcacatctatatgattgagggcctggtgtttaggattataatctgcccagattatataacctatcttattttgaactaagtgttagttcagaataagttagattatataatatggacaaattatattcccaatcaaacaggctatgattggacttactgatacccatttgagtagaactgatcttgacaggtatccgagaaaacgatgaccttgattgatagaaaaaaaataaaa

SEQ ID NO: 7753 - DNA, 306 bp, Zea mays
atggcctcttgctgtccacaaattagcccaggagtttatggatccaaatccgataaaggttgttattggatcagaagaccttgctgctaaccatgacgtgatgcaaattgttgaagtattggatgatagaacaagggattcaagattacttgccttgcttgacaaataccatcaagcacaaagcaacagggttttggtttttgtgctgtacaagaaagaagctgcacgagtggaaacaatgcttcagagacggggatggaaggctgtttcagtccatggcgacaaggctcagcatgatagaacaaa

SEQ ID NO: 7754 - DNA, 303 bp, Zea mays
ctgccggtggccttcgttctgccaccaggcctgtctgtctgctgtatccgccagagcttccatggattccaccctcttcatcatcggcgtcataggcaacatcatctcagttctcgtcttcatatcgcctatcaagacgttctggaggatcgtgcggggcgggacgacggaggagttcgagccggcgccgtacgtgttgacgctgctcaacgcgctgctgtggctctactacggcctcaccaagcctgacggcttcctcgtcgccaccgtcaatggctttggggctgtcatggaggccatcta

SEQ ID NO: 7755 - DNA, 301 bp, Zea mays
ggatcttgttgtgactgtccagtctgctagctgggaggagcagatctgcgcgctgaaggatgttggccccaagtaacttccctgccttggaatactgtatctcaaaacctaaatcgaaaaaagaagtgtatcaaggattgctacagagacatccatctggcttgagctggcttttgctatgtcaaacacaagtgcagggatcgctgggtgttgcaccgtgtctgcattatctgtggttacattctggaccctgtattttctatgcttttatgcccctactgtttagtattaattatcaata

SEQ ID NO: 7756 - DNA, 303 bp, Zea mays
gttcaatccattcaagttgctagatcaccttttcatagagtgtaagcaccatggcaaggatctggtcgctgaaggagtgataacctcaaaagatatagaaggaacaaaggcaggcaaagccagcactggggtacttaatgttgggttaccagcatatgttatccttaaggctctcctccgatctgctaaagccaattctgatggtctcgttctaagtaatggatctgagataacatccgacaataggcctacgagtaaaatctttgagtggttttttgaccctctgatggtcatcaaagatca

SEQ ID NO: 7757 - DNA, 302 bp, Zea mays
ctcttcgtccgccgccgccgcctctcttcattggtagcaccttaatccgaccccagtccagcccgccgccatggaggcgctgacggccacggacaaatgcttctccccggccagggcgatgttcccgatgccgattgtgaggccacctgcatcaccagaccatgccagtcagtatctggaggacttgttgcaggagcaacagaagctcgggccattcgtgcaggtgctcccaatctgcggcaggctgttgaatcaagagataatgagaacatcaaacctgctttctaactttggagttagag

SEQ ID NO: 7758 - DNA, 302 bp, Zea mays
ctgccggtggccttcgttctcccaccaggcctgtctgtctgctgtatccgccagagcttccatggattccagcctcttcatcatcggcgtcataggcaacatcatctcagttctcgtcttcatatcgcctatcaagacgttctggaggatcgtgcggggcgggacgacggaggagttcgagccggcgccgtacgtgttgacgctgctcaacgcgctgctgtggctctactacggcgtcaccaagcctgacggcttgctcgtcgccaccgtcaatggctttggggctgtcatggaggccatct

SEQ ID NO: 7759 - DNA, 287 bp, Zea mays
ggatcttgttgtgactgtccagtctgctagccgggaggagcagatctgcgcgctgaaggatgttggccccaagtaacttccctgccttggaatactgtatctcaaaacctaaatcgaaaaaagaagtgtatcaaggattgctacagagacatccatctggcttgagctggcttttgctatgtcaaacacaagtgcagggatcgctgggtgttgcaccgtgtctgcattatctgtggttacattctggaccctgtattttctatgcttttatgcccctactgtttagt

SEQ ID NO: 7760 - DNA, 303 bp, Zea mays; identical to SEQ ID NO: 7756

SEQ ID NO: 7761 - DNA, 303 bp, Zea mays
ctcttcgtccgccgccgccgcctctcttcattggtagcaccttaatccgaccccagtccagcccgccgccatggaggcgctgacggccacggacaaatgcttctccccggccagggcgatgttcccgatgccgattgtgaggccacctggatcaccagaccatgccagtcagtatctggaggacttgttgcaggagcaacagaagctcgggccattcgtgcaggtgctcccaatctgcggcaggctgttgaatcaagagataatgagaacatcaaacctgctttctaactttggagttagagg

SEQ ID NO: 7762 - DNA, 285 bp, Zea mays
cggacctggttgttctttatggcactaaggtgtgctcttcaaatgcttaagcatgataatgaagggaaggaatttgtaagtaagattgctacccgccttcacgctttaagttatcacatgcgaagttatttttggctcgatttccaacagctaaatgacatttatcgttacaagacagaagaatattcccacacagctgtcaacaaattcaatgttattcccgattcaattccggactggttatttgactttatgccttgtcagggtggttttttcgttggtaat

SEQ ID NO: 7763 - DNA, 284 bp, Zea mays
gtgttctgtttcattcatgttcctagtgatgacctccagcatgcgctacatgtgcagcaagcctctgagcagacagcactgagaaggctgaaggctttctcgtacatgcgacatgccatcgacaaacctctctcaggtatgctctattctagggaaacactcaagggcacaggcctggatgaagagcagatgaggcaggttcgcgtcgcggataattgccatcgccagctaaacaagatactcgccgacttagatcaagataacattactgacaagtcgagttg

SEQ ID NO: 7764 - DNA, 285 bp, Zea mays
tggccagccgctgggtccgacccgaggtgtacccgctgttcgcggcgatgggagttgccgttggcatctgcgggtttcagctcttccggaacatcaccggcaacccggaagtcagggtaaacaaggcagggagggcagccggcgtgcttgagaaccatgaggaggggaggcgttacgccatgcatggcctcagaagctttgtgcacgacaagacccccgagatcatgccagctatcaacaagttctttactgaccccaagtgaagcaaagcagctttggttggcc

SEQ ID NO: 7765 - DNA, 285 bp, Zea mays
cttttgttcggatctcacccgattacgagaaggatgacgtgctcaatggatctcccggccaagggcgggttcagcttcgacctgtgccgccgcaacagtatgctggagaagaacgggctcaaactcccgggattcaggaagaccggaacaaccatcgtcggcctcgtctttcaggatggggttgttcttggggcagacacaagagcaactgaggggcctatagttgctgataagaattgtgagaagatccactttatggcgccaaacatttattgttgtggagca

SEQ ID NO: 7766 - DNA, 286 bp, Zea mays
cggaccgtggtgggtgacaaaacccttactgtcagacgagcaaaccagggggcatctcagcccagaccagagcaggaaagtatcgtattgcaggcacaacaacaggtgcagttgcagaaacttgtgtatcaagttggagcgcttcctacaaaggttgtatgcctcacacaggtggtaactgcagatgaattgaaagatgatgaagagtatgaggacattatggaagacatgaggctagaagcaggcaaatatggtatatatatgtatcagcttcttattaccattt

SEQ ID NO: 7767 - DNA, 282 bp, Zea mays
gaacaaatcactacaaagtgctgatggataagtttcacctcgtatccactgccttcctggagcttggtcaaggctatcaaaaggcaatcgaagaaatcactaggcgaatgggagcaggaatggcaaaatttatatgcaaggaggttgaaactgttgatgactatgacgagtattgtcactatgtagccgggctagttggttatggactttccaggctcttttatgctgctgggacagaagatctggctccagattcactatcaaattcaatgggtctctttt

SEQ ID NO: 7768 - DNA, 284 bp, Zea mays
caacgtcaaggccaagatccacgacaaggagggcattcccccagaccagcagcggctcatctttgctggaaagcagcttgaggacgggcgcacgcttgccgactacaacatccagaaggagagcaccctccacttggtgctgcgcctcatgggaggcatgcagatcttcgtgaagaccctgaccggcaagactatcaccctcgaggtggagtcttcagacaccatcgacaatgtcaaggccaagatccaggacaaggagggcatcccaccggaccagcagcgtt

SEQ ID NO: 7769 - DNA, 280 bp, Zea mays
gtgcaccgaccaagaaaacctcgcttcacgatctctacgagctccagggcctctccccgtggtatgacaacctctgccgacctgtcaccgacttgctgccccttatcgccagctgtgttcgtggagtcaccagcaaccctgcagtaatcctccgtttccaccttttgtttcttcgcttgcatggttgctgcgcattcactcctgaccgtgtcctcgacgcaatgcagattttccagaaggccatctcatcctccagcgcatatgatgatcagttcaagca

SEQ ID NO: 7770 - DNA, 279 bp, Zea mays
ccacgcgtccggcattctacctggactgggctgtccactctttcagaatcaccaactgcggagtccaggacaccacccagatccacacccatatgtgctactccaacttcaacgacatcatccactccatcatcgacatggacgcagatgtgatcaccatcgagaactcccggtccgacgagaagctactgtccgtgttccgcgagggtgtgaagtacggagctggaatcggtccaggtgtctacgacatccactcgcccaggatcccctccaccgagg

SEQ ID NO: 7771 - DNA, 278 bp, Zea mays
aagatgaggccggttttcgtggggaacctagactatgatacccgccactcggttctcgaccacctcttctaccgctatggcagggtcgagcgcatcgacatgaagtcaggctttgcttttgtctactttgaggatgaacgtgatggcagtgatgccatacgtgctcttgatggttatccatttggccctggcagacgcaggctttcagtagagtggtcacggggtgatcgagctgctagacgtgatggcaacaaaccagaagtaaatactaagccaac

SEQ ID NO: 7772 - DNA, 275 bp, Zea mays
cctttctagccttcacttctcagcacggcagccttcgacccccgactgcagccgccagccgcgccatggagcaagccgccatgccgcagttccccgcgtcaagctcggcatccaggggcttgatgtgtcgaagctggggttcgggtgcatggggctcacgggcacctacaacgcgccgctcggcgacgaggccgtggccgccgtcgtcgcgcacgccttccgccgcgggatcaccttcttcgacacctccgatggctacgggccccgcaccaacg

SEQ ID NO: 7773 - DNA, 276 bp, Zea mays
gtccaatcccgagcagaggtgcgactcgagcgctcgcgccggtgtccatttcaaagaggaagccgcggtacactggtagcggcacagtaaggggaagatgtcgtcggcgttcagcggcgatgagaccgcccctttcttcggcttccttggcgcctccgctgcgctcgtcttctcatgcatgggggcggcgtacgggacagccaagagtggcgttggcgtggcgtccatgggtgtcatgcgcccagagctcgtcatgaagtccatcgtgcccgtggt

SEQ ID NO: 7774 - DNA, 279 bp, Zea mays
ccgaagaagaggagaagcgaacaagcaggcttcgagaacaacccggacgcggaggaccaagcgaaagggggaactagagcaagatgggcggcgaactgctgcttgcgctcctcctcgtctctgctgctgccgcccctcaggtacttggagttggcaatggagacaatcacatgagaatcatccaggaggacatcattgagacagtcaacaaccatcccagtgctgggtggacagcctcacgtaatccttacttttcaaactataccattgcgcaattta

SEQ ID NO: 7775 - DNA, 281 bp, Zea mays
ctcgacacctccactgcaaccatgggtatctcacgtgattcgatgcacaagcgccgggccaccggtggaaagcagaagacgtggcgcaagaagcgaaagtatgagcttggccgccagcctgctaacaccaaactgtctagcaataagacagtgaggagggtccgtgtccgtggaggcaacgtgaagtggagggctctccgattggatacaggtaactactcgtggggaagtgaggctcttacccgcaagacccgcatcctggatgtggtctataatgcatc

SEQ ID NO: 7776 - DNA, 297 bp, Zea mays
cacccgtcggcgtcgagcagcggcacggcggcggcgatgacgacgagcctgaagaagaaccggaagaagcgcgggcacgtgtcggcggggcacggccgcatcggcaagcaccggaagcacccgggaggccgcggcaacccggcggcatgcaccaccaccggatcctgttcggcaagtagcacccggggtagttcggcaaggtgggcatgcggtacttgcagaggctgcgcaacaagttgcagtggccgtcggtcaacgtggagcgggtctggtcgatggtgcccgcggcaaggccgc

SEQ ID NO: 7777 - DNA, 299 bp, Zea mays
gatgtcctcgtcgtcgcctcgctgtctcctccgccgttgcctgcgatcccggtcatggagggcgacagtaccaacctcgacgcggctatagagtcgctcctgaacgtggagaagcagatgaggctggcaggcgatgtcgccggcacgcggaaggccgtcatcgacatcgtcgagctctgctacaagaccggcgcgtggaagacgctaaacgaccagatcgttctcctctccaagaggagaggccagcttaagcaggccattactgctatggttcagaaagcaatggactacattgattt

SEQ ID NO: 7778 - DNA, 293 bp, Zea mays
gactagttctagatcccggctccgtcgtcgtcgtgccatcctagggtttctttccccgtcggcgcctccccagatttggccgccgccgccgctgacccaggttgtcttgatggcgcccggctgtagaagccgtgaaggagacaggcaccttccagaaggttcctgccttgaacgaaaggatactgtcatccatgtccaggaggtctgttgctgcacacccttggcatgatctggagataggtcctggtgctccaaccatattcaactgcgtcattgagataccaaggggcagc

SEQ ID NO: 7779 - DNA, 304 bp, Zea mays
cgcgatttactggatgtaccgatactggagaaattattctcgagttggctgcaaagagcaaccttaagacagtgacactggagttaggaggcaagtcccctttcatcataatggacgatgctgatgttgaccatgctgttgagcttgcggagtttgccctgttctttaaccagggacaatgctgctgcgctggatctcgcacgtttgtacatgagcgtgtttatgatgagtttgtggagaaggccaaggctcgtgcattgaagcgcgtcgttggtgatccgttcaggaaaggtgttgaacaggg

SEQ ID NO: 7780 - DNA, 296 bp, Zea mays
agccatgttgaggagggctttagcgatggtcctgttcatggctggcgccgcgctgctcgccggggctgccggcgccggcgcgcagcagggcgtgtggagcatcatcacccggcccatgttccagagcatgctgagccaccgctgcgacagcaggtgccagggcgccttctacacgtacgacgccttcatcgaggccgccagcaagttccccggcttcggcaccaccggcgacgagcagacgcgcaggcgggagctcgccgcgttgttcggccagacgtcccacgaaaccaccggtg

SEQ ID NO: 7781 - DNA, 301 bp, Zea mays
gtttctgcaacgccagggcgcaaccatgggtcagcagcagcaagggccggcggcaggcggatggccacgctcgcctgccacctgcgccatccctccgtctctcaccctcagatggaagatgttcccctcttgaggggatccaattgccgtgcaaaaggtgcggcgccaggcttcaaagtcgcgatgttgggtgcagcaggtgggattgggcagccagttgcgctattgatgaagatggaccctcttgtttcggtgctccatctatacgatgtcgtcaacgcacctggtgtcacagccgaca

SEQ ID NO: 7782 - DNA, 304 bp, Zea mays
cccacgcgtccggaagcagtagcaaaaggattccattctcgtgttcttggagtggtccatcgatcgagctccgtgaaagagagagagagagagcaagcaatggcgacagcagggaaggtgatcaagtgcagagccgccgtggcgtgggaagccggcaaaccgctgtccatcgaggaggtggaggtagcgccgccgcaggcaatggaggtgcgtatcgagaatctctacaccgcggtctgccacaccgacgtctagttctgggaggccaaggggcaaaccccggtgttcccgaggatcttaggac

SEQ ID NO: 7783 - DNA, 149 bp, Zea mays
agaaactccaactccattcatagattctcactcagaactgctgcacgtcgcagtgcaggcgtgttgctggcttcgcccagcttctttttttgcctgtgatttgcacgacatttatatttattgaaatcttgcagaatcgcttgacgatg

SEQ ID NO: 7784 - DNA, 296 bp, Zea mays
ggactaaagtgaagcagatgacggcctttggactgggacagctgtgtcctgatggtggcgaatgcttctggacaaggttcgggttaatcaggcagacacattaagcctgaatcaaggaggtatgactgctgggagcaccacttctgaaactagctgtgaacagttcggcaatcgtgtgttgcacttgttgagaggctgaagcctatcaaggagagtctcgaagctaagtccaacacagtggaatggagtgccttgattgctcaggcaagcatggcgagtgtgaacctatcagcaca

SEQ ID NO: 7785 - DNA, 296 bp, Zea mays
attcacaacaaaaccctagctactgcttcgtctgccgaattccccctccgctcgcttcgcacgccgcccgtcgccgcggcgggtctgcgattgtccctcccgctgcaaggagcacatgcttctcgccgcgccgttagcccgccgccgccaccaccggttcaccttcagctatgtcttgtcagcgaggtctcacgaattagtgcatgggattgcaggtcgacaggcgcagcagtccgccgggaagcgcgcccgcaccgacggcagccggcgtgaggacgactgggtttgcccagctg

SEQ ID NO: 7786 - DNA, 297 bp, Zea mays
gtgggaagacagagtcgtaccaaacctggctaccaagtcggtggtcgtcatcacggtcgaccgcacaagtgcagcaagttgggaggagacgtggaaagtggtacgtgttttgtgggtgatgtgtaggtggaggtcgggagggtgggtagggacgagccggcgcgaggtggaagagcaggtgcaggtagtgccgtcgtcgtcgtggtcgtcgccaggatgagcgtcgtcgacggcgtcgtgtggtggagcggtgccggcggccgtggtgccgccgccagcgccgtagcggcggggaac

SEQ ID NO: 7787 - DNA, 301 bp, Zea mays
gtcggaagagagagtcgtaccgaacctagctgccaagtcggtcgtcgtcatcacgctcgaccgcacaagtgcaccaagttgggaggagacgtggaaactagtacatgttttatagctacatctctagctagagatggagagggtgaataaggacgagcgggcgcgagctagaagagcagctgcaggtagtaccatcatcgtcgtcgtcgtcgccaggatgagcgtcgtcgacggcgtcgtgtgctggaccgatgccggcggccgtggtgccgccgccaccgcggtaccggcggggaacggg

SEQ ID NO: 7788 - DNA, 297 bp, Zea mays
cccacgcgtccggagccagctgcttatggaaagtttggtttggccaacctgttggaattgagagaagaatgtctgagggaatttcagttcgttgatgcatatattagcatcaagcaaagggaaaatgaagcttcactggctgttttaccggatcttctgatggaacttgatagtatgaatgaggaagctaggctgcttgcactaattgaaggtgtccttgctgcaaatatatttgattgggggtctcgagcttgtgtagaactttatcacaagggaactataatagagatctatcgc

SEQ ID NO: 7789 - DNA, 298 bp, Zea mays
gtccaccaccgcttcccgtgcagcgccctccctctacgttcccccatttcctgtgttggcggcgatggcgcggcacttcgtgctcaacaccggcgccaagatcccctccgtggggctcggcacctggcagtctgaccccggcgtcgttggcaacgctgtctacgccgccgtcaaggcggattaccgacatatcgattgtgccagagtttacggcaacgaaaaggagattggtttggcgctgaagaagctatttgaagagggtgtagtgaagcgagaagatctgtttatcacctctaag

SEQ ID NO: 7790 - DNA, 297 bp, Zea mays
gtgcaagaacatcaaccccgatgaggctgtcgcctatggtgctgctgtccaggctgccatcctgagcggtgagggcaatgagaaggtgcaggacctgcttctgctggacgtcacccctctgtccctgggtctggagactgctggaggagttatgacagtgctgatcccgaggaacaccaccatccccaccaagaaggagcaggtattctccacctactcggacaaccagcccggtgtcctgatccaggtctacgagggtgagatgacccggacacgcgacaacaacctgctgggcaa

SEQ ID NO: 7791 - DNA, 300 bp, Zea mays
gcaaattgttgcacttcttagtgctcccctagaaaaatatagcaatattgttactgcattagaactttcaaactatcctcgggtcatggattatcttgataatgctacaaccaaagtgatggctgtggtaataattcaaagcataatgaaaaacacaacctgcatatctacttctgacaagattgaggcactattcgatttaattaaggggctgataaaggatatggatggggctcaagatgatgaacttgatgaagaagattttaaggaggaacagaactctgtagcacgtctcattca

SEQ ID NO: 7792 - DNA, 287 bp, Zea mays
gttggcgtctcctcgcgctccggttcgggttcgggttcttgaggttctccggggttcggtttcgtgggtgggctgatcgagatggcggcgtcggatgttgagtaccggtggttcgtcgtcgagctcgggtgggacacggacgagcagtcactccacgacgccttgagcagctacggcgaggtcctcgactccaagatgatcctcgatcggtagatgcagaggtcccgctgcttcgggttcgtcagcttctccacggacgaggcgatgcggaagcgatcgatggcatg

SEQ ID NO: 7793 - DNA, 297 bp, Zea mays
cccacgcgtccgcagagcgccagccaagtcttgcggtcgcgaagagcaacgcaacaagatggtgaagctcgcattcggaagcgtcggcgagtccttcagcgtgacgtccatcaaggcctacgtggcggagttcatcgccaggctcgtgttcgtcttcggcggcgtgggttccgccatcggcttcgggcaactgacgagtggcggcgcggtggaccctgcgggactggtggcgatcgcggtggcgcacgcgctggccgtgttcgtgggcgtctccgtggccgcgaacacctccggcgg

SEQ ID NO: 7794 - DNA, 286 bp, Zea mays
agcagaccttgtgtttgcttacaacaccggcatgctgccagaaattcaggcaaccatcaggcctcctgtggtgaagaacatggagaaagctctatggttccagttcaccattggctccttgcctctctatgctgtagtttttgtgggttactgggcttatgggtcctcaacatcaggctacctcctcaacagtgtcacaggcccagtctgggtgaaagccgttgcaaatctgtcggcattttttcagacagtcatagcggtgcacatctttgctagccccatgtat

SEQ ID NO: 7795 - DNA, 297 bp, Zea mays
gcatcatacccagattaggaagatgaagggtttgaagcagaagaaggctcacctgatggagattcaggtcaatggtggtaccattgctgacaaggtggactatggctacaagttctttgagaaagaggtccctgttgatgctgtcttccagaaggatgagatgattgacatcattggtgtgaccaaggggaaaggttatgagggtgtggtcactcgttggggtgtcacccggcttccccgcaagacccacaggggtctccgcaaagttgcttgtatcggtgcatggcatccggctag

SEQ ID NO: 7796 - DNA, 291 bp, Zea mays
agggagagcgctgcccgcatgattgcgggtgtctccaagtctgacaagattgttgttgagaagtccactgtccctgtcaagaccgctgaggctattgagaagatcttgacccacaacagcaagggcatcaactaccagatgctttcgaacccagagttccttgcggagggcagtgccattgaggacctgttcaagcctgacagagtgcttatcggtggccgggagacccctgacggcatgaaggccgtccaggctctcaaggatgtgtacgctcactgggatcccgaggac

SEQ ID NO: 7797 - DNA, 297 bp, Zea mays
tgtcagccacgcgaccgatgctagggaccatcctggcgtgattcatgttttcttggggcacagtggagggctcgacactgatggaaatgagtcaccacgtcttgtctatgtctctcgtgaaaatagaccaggctttcagcatcacaagaaggctggtgcaatgaatgcgctggttcgtgtatgtgctgtgctgacaaatggtgcctatcttctcgatgaggattgcgaccattagttcaatagcagcaaagcacttagagaagccatgtgcttcatgatgggtccggctctaggaag

SEQ ID NO: 7798 - DNA, 295 bp, Zea mays
accattccttccttgttccttccccagctccgcagctgctcatcgccctccctccgcgcccccggtgcagatgcaggtgcaggggcttgtcatggcatccagacgtatcctcaaggaattaaaggacttgcaaaatgaccctccaacatcatgcagtgcaggtcctgctggtgaggatatgttccactagcaggcaaccatcatgggtcctcctgatagtccatatgctggaggtgttttcctggtgaacattcatttcccgccagactagcccttcaagcctccaaaggtatct

SEQ ID NO: 7799 - DNA, 283 bp, Zea mays
cggacgcgtggtcaagaaagacgttcaagggaatgaggataacgagttcgagcaggaaatggggtcacaattgccgagggcaatcgggatcgtggaggcatggaaacttcctggcgtggcaccatatgcattctgcatatttttctccaaactcgtcgcctacaccttcctctacaggatgccattctatatcaggaataatgccgtggcaggtcagttcttgtcacacaaggcttcaggaattttaacgattgtaatcggcattggaggcgtcttaggaggg

SEQ ID NO: 7800 - DNA, 293 bp, Zea mays
ccgagtcgccgtcgtctgctccgggctgctgttctgcgcctccacaaggctttggcctctgttgtaagatttaagcttaacctccaaccatgggcaaggaaaagtcccacatcaacattgtggttaatggccatgtcgactctggcaagtcaaccaccaccggccacctggtctacaagcttggaggcattgacaagcgtgtgattgataggttcgagaaggaagccgctgaaatgaacaaacggtccttcaagtacgcttgggtgcatgacaagctcaaggctgagcgtgag

SEQ ID NO: 7801 - DNA, 297 bp, Zea mays
cggacgcgtggcagctgcgcaggacctaccgcgctcatgggcgcatcaacccttacatgtcctccccgtgccacatcgaactcatcacttcagagaaggaagagcccgtgaagaaagaggctgagtctcagatcgcaaccaggaatgcttagagaatgggaacataccttctatgattggctgagtgaagattttggctgattatttgtcgtcccatattgtttacctgagtattgtttgcaagtgctttatcacatggatcacagcctggaattcactggccctgagaattgtctc

SEQ ID NO: 7802 - DNA, 274 bp, Zea mays
gaacaatgaaagctagcatgctgcgagtttctggacgattatccagtcaatctcagagtcagagcaaccactggcagaaaatcattgagagcttggataagctcttgaagatactgcaagataaccatgtgcctccggttttagctcagaaaatatttacccagatattttcatacattaatgtccagctattcaacagtctattgcttcgtcgtgagtgttgctccttcagcaacggagagtatgttaaggctggtctagctgagttggagct

SEQ ID NO: 7803 - DNA, 273 bp, Zea mays
cggacggtgggctggacgcgtgggcgagcagctgtcagcccttggagaacttatgtaccagtgccacaacagctacagcgcatgtgacctcggttctgaaaggactgacagcctagtcaacctggtacgagaagtgcaacacaggaggacatccgaaggcggaagccctagtctgtttggcgcaaagatcaccggcggaggctccggcggcacagtatgtgttgttgggaagaactgcgccaggagcagtgaagagattgcagagattcagca

SEQ ID NO: 7804 - DNA, 269 bp, Zea mays
cacaactcgtaggcagcgagcgtctctcctcttcctctcccacgcacagcgccaaggaaggcagagagaaatcgccgctcctcttctctccgtaggtggtgcggttgaacgccctcctcgagcgagatctcgctgcagtccctcgagatctggtcacagatctatccgacaagatggtgaagatctgctgcatcggtgctggctatgtcggtggcccaaccatggctgtcattgcactaaagtgcccagacattgaagttgtcgttgtt

SEQ ID NO: 7805 - DNA, 273 bp, Zea mays
gcatcttctctaatggacaaacaaggaaggaaaagccttctgataacaagcttttctggaatgggtgcttcaatgctactcctagcattgtccttcacctggaaagctctggcaccttattctggtactcttgctgttgttggcactgttctgtacgtgctgtcatttgctctaggagcgggccctgttccagcgctacttcttcctgaaatatttgcctcgagaataagggccaaggctgtcgcattatctctaggcatgcactgggtatct

SEQ ID NO: 7806 - DNA, 271 bp, Zea mays
cagaccgtggtcaccacccacatctcagttcaccccggcgtcgtcctcttcccccggcgctactctcccgctccacgttccaaaggaaagatggcgtaccatattgttggataccctcgcatgggccccaagagagagctcaagtttgccttggagtctttctgggatgggaagagcagcgccgatgatttagagaaagttgcctctgacctcaggtctagcatctggaagcaaatgtcagaagctgggatcaagtacattcccagcaaca

SEQ ID NO: 7807 - DNA, 274 bp, Zea mays
cggacgcgtgggcggcggtagcaacgacgggaactctgacgagcttgccctggaagttttctgcccggtgtttggcgcatcacagcaaccaattagcaagcagcaggagtccatctcctccgtcaccaagatcggactatggggcggacagggagggtcggcacaggacatcacggcagagcagccaccacggcgtctgcacagcatcaccgtccgcgctggcgttgccgtcgactccatcgagttcacctacaccgacgacgctgggcagagg

SEQ ID NO: 7808 - DNA, 277 bp, Zea mays
ggcgcagagaatccccaagcaaacaaacagggtgcatttcgatgtcatgtgacgagcggagacgctgggtctgggacaccatggctcctatgaagctgtacggggcggtgatgtcgtggaacgtgacgaggtgcgcaacggcgctggaggaggctggctccgactacgagatcgtgcccatcaacttcgccaccgccgagcacaagagccccgagcacctcgtccgcaacccgtttggtcaggctccagctctgcaggatggtgacttgtacctctt

SEQ ID NO: 7809 - DNA, 267 bp, Zea mays
ggtggagttcacaaagtcccagattgttgcctcaatacctggatttttcttttgcttgtggtatgcgtcaaagaagcattggcttgcaaacaatgtcctgggattggctttctgtattcaggggattgagatgctgtcattgggatcatttaaaactggagccattctcttgggtggactttttgtgtatgacattttctgggtgttcttcactccagttatggtcagtgtggctaaatctttcgatgctccaataaagcttctgtt

SEQ ID NO: 7810 - DNA, 269 bp, Zea mays
cccacgcgtccggcaacgacgccggcaggagcgtcatggagaggtatacgaagatgagcaacgctatgaagacgtatgggaagggcatcttcttctcgctgtgcgaatgggggaggcaaaaccctgctacctgggcaggcggcatggggaacagctggagaacgaccgatgatatcgccgacaactggggcagcatgacgtctcgtgcagaccagaacgacaggtgggcttcctacgccggacctggcgggtggaacgatcctgacatg

SEQ ID NO: 7811 - DNA, 269 bp, Zea mays
gttgggcgcagagaatccccaagcaaacaaacagggtagatggagaggagatgagaggagacgagaggttgggtctgggacaccatggctccgatgaagctgtacggggcggtgatgtcgtggaacgtgacgaggtgcgcaacggcgctggaggaggctggctccgactacgagatcgtgcccatcaacttcgccaccgccgagcacaagagccccgagcacctcgtccgcaacccgtttggtcaggttccagctctgcaggatggtga

SEQ ID NO: 7812 - DNA, 268 bp, Zea mays
attaagcaggaagaagcgacctcgcagatcacgagatgggcctacgtcagtggcagctgtcatccagcggtgggctgagcgcaacaagcatttggagtatgaggaatctgaggaggcaaagcgaccaagaaaagcacctgcaaagggttcaaagaagggctgtatgaagggaaaaggggggcctgacaatactcaatgtggataccgtggagtgaggcagcgtacttgggggaagtgggttgctgaaataagagagccaaatcgtgtc

SEQ ID NO: 7813 - DNA, 271 bp, Zea mays
acgagcacctccaagccaaagcaagttgctaggtcctttgaaccagcaactgaagcttcctcgtctcatcatcgagaccagtaagcaacatggcggctaatctcaagtgggctcctgttctagccctcctcgtcgtcgttgctgccatggttggcaccaccagcgccggcaacatcgcagtgtactggggccagaacggcaacgaaggcagcctggcggacgcctgcaactccgggctctacgcctacgtcaacatcgcgttcctcacaac

SEQ ID NO: 7814 - DNA, 272 bp, Zea mays
cccacgcgtccggccgcctccttcgccacccagcgctcgatctcctcgctccctgcgagcgcgcgccgcaacgccaccatgaagttcaacatcgcgaacccttccaccgggtgccaaaagaagctggaaatcgatgacgaccagaagctgcgtgccttttatgaccgaacgatatcccaggaggtcagtggtgatgctctgggtgaggagttcaagggttatgtcttcaagatcatgggtggatgtgacaagcaaggcttcccaatgaagca

SEQ ID NO: 7815 - DNA, 269 bp, Zea mays
gggttccgtggatctagttgcgcggagatggggctcacgttcacgaagctgttcaggcggctattcgccaagaaggagatgaggattctcatggtcggtctcgatgcagatggtaagaccaccatcctctacaagctcaagctcggcgagatcgtcaccaccatccccaccattggatttaacgttgaaactgtcgagtacaagaacattagtttcactgtttgggatgtcggtggtcaggacaagatccggcccctgtggaggcacta

SEQ ID NO: 7816 - DNA, 271 bp, Zea mays
gtgccttgcagcgtaagacgtgatcctgagtccatgtccaagctcaagatgtatgacaaagtcgactctgtgaattgcccgttggagcttgagaaatctcaggcgatccgtgagaatgagcggatcacatttacctatgaggttgagtatgtcaagagcaacatcaagtggccgtccaggtgggatgcgtatctgaagatggatggtgccaaggtccactggttctcgatcatgaactcgatgatggttgtcttcttcctggctggtatcg

SEQ ID NO: 7817 - DNA, 264 bp, Zea mays
cgtgagcactttctcctcgtccccgacaagccactcgaagccgagatacggccatggactccaccggcaccggagcagcggggaatggaaagaagggagcggccgggcgcaaggtcggcgggccaaggaagaagtcggtgtcgaggtccgtgaaggctgggctccagttccccgtcggccgcatcgggcgctacttgaagaagggccgctacgcgcagctgtcggcaccggcgccccgtctacctcgccgctgtcctcgaatac

SEQ ID NO: 7818 - DNA, 261 bp, Zea mays
  unsure (1)..(261): unsure at all n locations
atcccagccagattcaacccgagttcgcgacgagagcacgagatggcgatgcggacagcgctgacctccctccccgcacgcctgcagnccctgcgccccccgcggcgacgggcggccggcgcctcctcagcgacgggaaggggcgtgtgctcagcgaggaggagcgcgccaaggagagcatctacatccagaagatggagagggagcggcaggagaagctgaagaagaggctcgagcaggagaaggccgactccgacaagg

SEQ ID NO: 7819 - DNA, 261 bp, Zea mays
cccacgcgtccgaaaaggagagaagctgagatcaatgatggtagacaccactatattgggccttgatcctgaaagggccaaagaactgccttatattgctagtatgggaatctatgtttttagcaaagatgtgatgcttcggcttctcagagaaaattttcctgcagcaaatgactttggaagtgaggttattcctggtgcaacagaaattggattaagggtgcaagcttacttatatgatggttactgggaagatattgg

SEQ ID NO: 7820 - DNA, 262 bp, Zea mays
ccacgcgtccggatgaagctgtacggggcggtgatgtcgtggaacgtgacgaggtgcgcaacggcgctggaggaggctggctccgactacgagatcgtgcccatcaacttcgccaccgccgagcacaagagccccgagcacctcgtccgcaacccgtttggtcaggttccagctctgcaggatggtgacttgtacctcttcgaatcacgagcaatctgcaagtacgctgctcgcaaaaacaagccagagctgttgagggaag

SEQ ID NO: 7821 - DNA, 262 bp, Zea mays
cccaagccagccattggttggtagcaagccaagcttagctttagatacccgctcccgcacttcttccctccgaagcagctgacgatacagcaggctagcttcgcagttcgggggcactcagccatggccattgccggcgctcttctcctcctgctcggactcctcgcgcgggaggccacggccggcgggtggcagagcgcgcacgccacgttctacggcggcggggacgcgtccggcacaatgggcggcgcctgcgggtacg

SEQ ID NO: 7822 - DNA, 262 bp, Zea mays
gggcttatgggttcaggaattgcaactgcgatggtattaagtaactatcctgtgctacttaaagaagtaaatgagaagttcctaactgctggaatcaacagaatccaagccaatttgcagagtcgagtaaggaaaggaaaaatgaccgatgagcgatatgagaaggctatgtctctcgttactggtgtccttgattatgaacgtttcaaagatgtagacctcgttatagaggcagttattgagaatgtgaagttgaagcagc

SEQ ID NO: 7823 - DNA, 264 bp, Zea mays
ctctttcagaatcaccaactgcggagtccaggacaccacccagatccacacccatatgtgctactccaacttcaacgacatcatccactccatcatcgacatggacgcagatgtgatcaccatcgagaactcccggtccgacgagaagctactgtccgtgttccgcgagggtgtgaagtacggagctggaatcggtccaggtgtctacgacatccactcgcccaggatcccctccaccgaggagatcgcggaccgcgtcaacaa

SEQ ID NO: 7824 - DNA, 264 bp, Zea mays
ggccaaatacctagacagattggaagactcaagcagcttacttacctacatttggaacataacgcattggaagggccaataccacgtatgtgcagtagcatggttgacctgaatcttgcagagaattccttgactggggacattccagacacactggtctcccttgtctctctgaattcactcaatatatcccataacatgatctctggtggcattcctgaaggtctgcagtcactgaagctgagtgatatcgatttctcccag

SEQ ID NO: 7825 - DNA, 266 bp, Zea mays
cactccgctcggccaccagctttgaccgcctcccctcccccccgctcctgtcgctacataccccacccccccgcaggaccggcgcggcggcggcggcggcaaagccaaaggcaagatgttcgggcgcgcgccgaagaagagcgacaacaccaagtactacgagatcctcggggtgcccaagtcggcgtcccaggacgacctcaagaaggcctaccgcaaggcagctatcaagaaccaccccgacaagggcggtgaccccgagaagt

SEQ ID NO: 7826 - DNA, 265 bp, Zea mays
aggaagttgtgatatcagttgatgatgggattaggccagggaccacagcatctggattggcgaaactgaaaccagtttttaaaaaggatggaactacaactgcaggcaattccagtcaagtgagtgatggtgctggagctgttcttctcatgaaaagatctgtggctctgaagaaagggctgcccattcttggtattttcaggagctttgcagctgttggagtggatccagctgttatgggcgttggtcctgctgtggccattcc

SEQ ID NO: 7827 - DNA, 333 bp, Zea mays
cgacaatgtcaaggccaagatccaggacaaggagggcatccctccggaccagcagcggctcatttttgccggcaagcagctcgaggacgggcgcacgctggccgactacaacattcagaaagagagcaccctccacttggtgctgcgtctcaggggtggcatgcagatcttcgtgaagacacttactggcaagacgatcacccttgaggtggagtcctcggacaccatcgacaatgtcaaggctaagatccaggacaaggaaggcattccaccagaccagcagcggctcatctttgctggcaagcagctggaggatggccgtacccttgcgga

SEQ ID NO: 7828 - DNA, 328 bp, Zea mays
ctacatacataagtacatataaccaactaggcttgatcgatctctcgacagcaaatagctagcaataatggagaagtacaccaaagccctagcgtcattgctcaccatgctggtgctggcacctctcctcgccatggccaccgacccagaccccctgcaggacttctgcgtcgccgacctcaacggcaagccatcagtgaacgggtacccatgccagccgccgtcgtcggccggcgaccagttcctcttctcgaccaagatcgccacgggaggcgacccctggccaacccgaacggctccaacgtgacggagctggacgtttccgagt

SEQ ID NO: 7829 - DNA, 333 bp, Zea mays
agaaccagcgaggactgccaagaagatgctgaagagactgctgacgaagactaagagcaagaagaagaaggaggctgcctcctctgccataccgacgttggatcggctccatgagactctagagatgctggagaagaaggagcgtttcctccagaagaaatgttccgcggaaatcgagaaggcgaaggattacacaaaagcgaagaacaagaacgccgcaatccagtgcctaaagaagcagaaactgtacgagacacagatcgagcagctatcgaatttccagctgcgagtccatgaccagatcataatgctcgaaagcgccaaggcgaccac

SEQ ID NO: 7830 - DNA, 157 bp, Zea mays
cgaggagtagccgacgcgccgtcactgaatcctcagatcacggctagccgtaatcacgacactctgctgactcccggcgagcagtgtaacattttccttcagccataggcaaggagaagactcacatcaacattgtggtcaatggacatgtcgactc

SEQ ID NO: 7831 - DNA, 331 bp, Zea mays
agcagttaagggcggtgaacctttgcctgaaggtctcctttggcttcttttgacggggaaggtcccaaccaaagagcaagttgatgcactatcaaaggaattgcttgcgcgctcaactgttccagctcatgtctataagacaatagatgctctcccagtagatgcacatcctatgacacagtttaccacaggagtaatggctcttcaggttgagagtgaatttcaaaaggcttatgacaatggattgccaaagtcaaagttttgggagcctacttatgaagactgcttaaatttgattgctcggcttccaccagtggcttcttatgtttac

SEQ ID NO: 7832 - DNA, 245 bp, Zea mays
caactcgccgtctgccttctgcgcctccatttcggcctctgtcccttgcaagttcaatctcacctccaaccatgggtaaagagaagtcccacatcaacattgtggttattggccatgtcgactctggcaagtcgaccaccacaggacaccttatctacaagcttggaggcattgacaagcgtgtgatcgagaggtttgagaaggaggctgctgaaatgaacaagcggtccttcaagtacgcgtgg

SEQ ID NO: 7833 - DNA, 317 bp, Zea mays
tgaccttcctgtccctgtccaagggtatcaccatcggcggcagcatcttcctctactcgggcatcgccgcggtcgggtgggttttcttcttcacgtgccttccggagacccgcggtcgtacgctggaagagatgggcaagctgttcggcatgccagagccagacacggacatggctgaagcatacaacgccgctgcccaggagaaagcggttgaaattgcggcagtgctcgcaatgattgatgcagcgtcttaccagagcagcgtggcaagattggcttctgtcccttgactcgtgagtgtcgcggtattgcaggac

SEQ ID NO: 7834 - DNA, 288 bp, Zea mays
  unsure (1)..(288): unsure at all n locations
aactgaatttgtttgcagcaatgtatggttgcatatgatgagacacaaaggccatccctgaagaaagctttgcttcttggtgatgcattttcagatttaccaaaggtcgaaaaccatcaacctaacgatgtaatggagtatggtggttcncccaagacagagttccagcgctacattcgacttggtcgtaaagacatgttggattggtcgtttggtgaggaggctggtccagatgaaggcaagctcttggatcaccagccttacggcttaaccatgatgattatgagc

SEQ ID NO: 7835 - DNA, 322 bp, Zea mays
gagaactcgcggtccgacgagaagctgctctccgtgttccgtgagggtgtcaagtacggcgcgggcatcggccccggtgtctacgacatccactcccccaggatcccgtcggccgaggagatcgccgaccgcatcgacaagatgctggccgtgctggacaccaacatcctctgggtgaaccccgactgcggcctcaagacccgcaagtacacggaggtcaagcccgccctgaccaacatggtctccgctgctaagctcattcgcacccagctcgccagcgccaagtgagcacctttttttgcctttttcgtttccgaggagg

SEQ ID NO: 7836 - DNA, 321 bp, Zea mays
ctccgcagtcaagcgccactcagggtgcggacaatctacgagagcaagctgctggagcacgatcccgagcgccaccttgccgtgttctggatctcatgcgaggcaggtacctatgtccggactctgtgtgtgcaccttgggctgctccttggtgttggtgcgcatatgcagggactgcgccgtgtcaggtcggggatcctaggggagcaggacaacatggtcaccatgcacgatgtgatggacgcgatgtggtctctcgacaactacaaggatgagtcatacttgaggcgtgtcgtgatgccactagaggtactgcttact

SEQ ID NO: 7837 - DNA, 328 bp, Zea mays
gaccgacaggacgagactcgcagctagctgacacggccgagaagcagcttgcattgcaggcgtagtacgtacccagcagcagctagcactagcagtccatcggagcgacgatggtgagaaggacggtgctggcggcgctgctggtggccgccgccctcgccggcagcgcgcgggcgcactcaaggaggggttctacgactactcctgcccacaggcggagaagatcgtcaaggactacgtgaaggcgcacatcccccacgcgcccgacgtcgcctccatcctgctccgcacccacttccacgactgcttcgtcaggggctgcgacgcg

SEQ ID NO: 7838 - DNA, 279 bp, Zea mays
ccattgctcagcgcacaagtgcacgctcacctcacacacgcagctaagtagctaacgccgtagcaggaacaagataaggctcgacatggacgaggagaagaagcagggcctgcagctgctggacttctgggtgagcccattcgggcagcgctgccgcatcgcgctggacgagaagggcctggcctacgagtacctggagcaggacctggggaaaaagagcgagctgctcctccgcgccaacccggtgcacaagaagatccccgtgctgctgcacgacgg

SEQ ID NO: 7839 - DNA, 325 bp, Zea mays
acgagctcggcaagtggtccctgtaccgcgccgtgatcgccgagttcgtggccacgctgctgttcctgtacatcacggtggccacggtgatcgggtacaagcaccagacggacgcgtcggcgtcggggcccgacgcggcgtgcggcagcgtgggcatcctgggcatcgcgtgggcgttcggcggcatgatcttcatcctcgtctactgcatcgccggcatctcgggcggccacatcaacccggccgtcacgttcggcctcttcctggcgcgcaaggtctccctggtgcgcgctctgctgtacatggccgcgcagagcctcggcgc

SEQ ID NO: 7840 - DNA, 326 bp, Zea mays
ggacgcgtggtgcgtggttctcttcctgcgacggaagcaaacactgcccgagacatagacagcgggacgtcgagatggccgacggggaggacgccgcatccgcgcgccgccgggccgccatcacagactaccgcaagaagctgctcaactgcagggagctagagtcgcgcgtcggcaccgtgagagaaagccttaaaactgcaaagaaggattttaccaagactgaggacgacttaaagtctctgcagagtgtggggcaaataattggagaagtactccgacctcttgataatgaacgctttatcgtgaaggccagcagtggtccc

SEQ ID NO: 7841 - DNA, 285 bp, Zea mays
gggagaggttgaggttgaggaagagcagaggaatccattccaggagtgtttaatggcgggaggcaaggaagcgcacgggtggcgcaccagggatgtctctggtcggctctccccttaccacttctcacggagggttcagagagacgacgacgtcaccatcaaggtgctcttctgcgggctttgccacgctgacctccacgtcgatcaagacgagtttggcaacgccaagtaccccgtcgttcccgggcacgatatcgtcggcgtcgtcaccgacgtcggctccgg

SEQ ID NO: 7842 - DNA, 328 bp, Zea mays
ggagactgctggaggagttatgacagtgctgatcccgaggaacaccaccatccccaccaagaaggagcaggtattctccacctcactcggacaaccagcccggtgtcctgatccaggtctacgagggtgagaggacccggacacgcgacaacaacctgctgggcaagttcgagctctccggcatcccccctgcaccccgtggtgtgccacagatcaccgtgtgctttgacatcgacgccaacggcatcctgaacgtgtctgccgaggacaagacaacggggcagaagaacaagatcacaatcaccaacgacaagggccgtctctccaa

SEQ ID NO: 7843 - DNA, 328 bp, Zea mays
agaagatcttgacccacaacagcaagggcatcaactaccagatcctttccaacccagagttccttgcggagggcactgccattgaggacctgttcaagcctgacagagtgcttatcggtggccgggagacccctgagggcaggaaggccgtccaggctctcaaggatgtgtacgctcactgggttcccgaggacaggatcctcaccaccaacctgtggtctgctgagctctccaagctcgctgccaacgcgttcctggcacagaggatctcctctgtgaacgccatctccgccctctgcgaggccaccggcgcgaatgtgactgaggt

SEQ ID NO: 7844 - DNA, 328 bp, Zea mays
cccacgcgtccgagccgacgaatccacctacccgcattcgggctccagcgccaccccgtgccatcgggctgcgtccgctaacgaccgcccgttcgcgcaaggcccagggtgtgggagggagcaatggtcgctgggatggaggcggaggaaggggtgatggcgacggacttcttctggtcgtacacggacgagccgcacgcgtcgcgccgccgggagatcctggccaagtacccgcagatcaaggagctcttcggcccggatccgtgggccttcctcaagattggtttggtcgtgtcgcttcagctatggactgctacattcctccgtg

SEQ ID NO: 7845 - DNA, 310 bp, Zea mays
cgccgtttggctcctgcgttcgatctcgctgcgtcctggtcctgcgccctgcggtccagcctcctctccaagactccacttctccagcgcgctcgcccgcgccagccgccaggccgccaccggccaccgccattggccccaccatttgccgctcccgcctacgatgccgacgagtgaggtgtggagcttgtccgattttgaaatcagcgagtacatcgctgagggcacgttcggcaaggtctacctcgcccgcgagaagcagagcgggtacgtggtggcgctcaaggtgatatttaaggcgaaactgaag

SEQ ID NO: 7846 - DNA, 319 bp, Zea mays
ccacgcgtccgccacgcgtccgtgatgttgcttactgggcacgcagctttgaccaggatctggataaagcatgcatagagcaatacagccaaagatgttggacaactgggtttggtttaaattttagagttattgccctttcacctgggtttagaagactgtctctagaacacctagcctcgtcttataagaaggctaacaggaggatgatattcctggactacgatgggacccttgtgccgcagacatcacacgacaaatctccaagcgctgaacttatctctacccttaacagcttgtgcagtgatatgaagaacac

SEQ ID NO: 7847 - DNA, 306 bp, Zea mays
cagagacgcggcaccgacgcggaaggaccagcagcggcggcgcggcgacatcgcgaggccagggcagaggcgaccgccgagagtccctgcgaccatggacaccttcttcctatcgcacggctcgcgcacgctctccatcgacgacagtatcccggcgcggcacttcttcaagtcatgggtgccggcgaaggtcgcgggcgaccagcccccgcgcgccatcctcgtcgtctcgggacactgggagacggccacgccggctgtcaacgtcatccgcgtcacaacgacaccatctacgacttctatggc

SEQ ID NO: 7848 - DNA, 320 bp, Zea mays
accacgcgtccgcggacggtgggctccaggtaaggaaagggttcgtactcatggcgccgccgcagccaaagtcgggccttttcgttggcatcaacaagggtcatgtcgtcaccaagcgcgagctacctccccgcccgtgccaccgcatagggaaatcaacgaagagggtgtctatggtcaggggcctgatcagagaggttgctgggtttgctccttatgagaagcgtatcactgagcttctgaaggttggcaaggacaagcgtgccctgaagcctgctaagagaaagcttggaactcaccagagggccaagaagaagaga

SEQ ID NO: 7849 - DNA, 307 bp, Zea mays
tttcctcctctttccattctcccagccacaaatcgatcggaaacgcacgcccctttctcttcgccttttcgcgtcgtccagatctcagtcgttcttcgctccatgagctaggaatccgaggtgtcctctaggctaagcgaagttggccggcggcggctaggatggggttgatatccgggatgatgatgggggtcattgttggcgtcgccatcatggccggctggagccgcgtcatgcgccgacgcagcacgaagcgcatcgccaaagctgcggatatcaaggtgcttgggtctctcagcagggacga

SEQ ID NO: 7850 - DNA, 227 bp, Zea mays
cccacgcgtccgaatccccctgtcccgctaggattcccccgaaaccctcccccaaaaccccagagcggagaagagcgcaagatgttcggcttcgggcaccacggccaccacggccagaacccgccggcgcacggcggcgtgcaccagcccaccttcaagatcttctgcaaggccgacgaggggtactgcctcaccgtccgcgacggcaacgtgggtgtggccccggc

SEQ ID NO: 7851 - DNA, 287 bp, Zea mays
gacgcgcaaccagtgccgcacccagaccagatctccgcgacatatcagtcgttcgtccagctaactgcactgcactgcactgcacgcaatggccaccacggcgaccgaggcggccaaggctgcaccggcgcaggagcagcaggccaacggcaacggcaacggcgagcagaagacgcgccactccgaggtcggccacaagagcctgctcaagagcgacgacctgtaccagtacatcctggacacgagcgtgtacccgcgggagccggagagcatgaaggagctgcgcg

SEQ ID NO: 7852 - DNA, 358 bp, Zea mays
gaccaactctaatacgcacctataagcaagcagccagcatgcacggacggacatcagtgccgatcacgcgtccggtaggaaatagaatcgcagaagttagtgtaccattcacccacttcgtcagccggaccattgcatggtgttgcactgggtaatccatatcaacctttgagtgtgattgatctaaagcgctgctctgctaggagcaacagaacaacatattgctatgattttccgctggcctttgaaactgcactgcagaagtcatggcagtccaatggctctactgtttctgaaggcaatgaaaatagtaaatcctacgtgaaggcaactgagctagtgtttgctgaaaaacatg

SEQ ID NO: 7853 - DNA, 284 bp, Zea mays
atctcttcatcggcgctgccgtacaagaggactcctccgatctggctcaagacagctaccaccgaggtggaggagatgattaccaaggctgcgaagaagggccagatgccgtcgcagattggtgttctgctccgtgaccagcacggcatcccgcttgtcaagagcgtgactggtagcaagatcctccgcatcctcaaggcccatgggttggcgccggagatcccggaggatctctacttcctcattaagaaggcggtggcgattaggaagcatttggagaggaa

SEQ ID NO: 7854 - DNA, 283 bp, Zea mays
gttctgttcctccccactcactcctgcgcttcctcgccgcgcggttccttctccctgatcctcctttggcttcgcggttcatggcgatgtggagggccgccgctaggcagctggtcgaccgggcgctcggctcaagggccgcgcacacgtctacaggcagcaaaaagatagtcggggtgttctacaaggccggggagtatgccgacaagaaccccaacttcgtcggctgcgtcgagggtgcactcggcatccgcggctggctcgagtcgcagggccatcagta

SEQ ID NO: 7855 - DNA, 282 bp, Zea mays
cacagagcaggctctccctgacgacctaatcaagagaggcatggcggttgccgacccgtcgagcccgtacaaggtacggctgctggtggaggactacccgtacgcgtcggacgggctggccatctggcacgccatcgagcagtgggtgacggagtacctcgccgtctactaccccaacgacggcgtgctgcgggcggacgtggagctgcaggcgtggtggaaggaggcgcgcgatgtcgggcacgccgacctcaaggacgcgccctggtggcccaagatgca

SEQ ID NO: 7856 - DNA, 280 bp, Zea mays
gcactgaacacttgattgattcagtaggtagctagctagctgaatcacaatggatcctaccaagttccgtccgtccagtagccacgacacgacggtgacgacgacgaacgctggcgctcctgtgtggaacgacaacgaggcgctgactgtggggcctcgcggtcccatcctgctggaggactaccacctgatcgagaaggtggcgcacttcgcgcgcgagcgcatcccggagcgcgtggtgcacgcgcgcggcgcctcggccaagggcttcttcgagtgc

SEQ ID NO: 7857 - DNA, 280 bp, Zea mays
gggcgcagagaatccccaagcaaacaaacagggtagaggtagatggagaggagaggagaggagaggcgaggagaggttgggtctgggacaccatggctccgatgaagctgtacggggcggtgatgtcgtggaacgtgacgaggtgcgcaacggcgctggaggaggctggctccgactacgagatcgtgcccatcaacttcgccaccgccgagcacaagagccccgagcacctcgtccgcaacccgtttggtcaggttccagctctgcaggatggtgactt

SEQ ID NO: 7858 - DNA, 283 bp, Zea mays
caacccgcaagcgcggtaaggtatggcttcgacattcggtgccacttctactgtcggccttatggctgctcgggcagggaagaatgtgcgccttcagaggagggtgaacttcagagtaagagcagctaaggagctgtacttcaacaaggatggctcagctatcaagaagctccagactggagtcaataagcttgcagacctagtcggagttacactcggaccaaagggaaggaatgttgttttggagagcaagtatggttctcctaaaattgttaacgatgga

SEQ ID NO: 7859 - DNA, 280 bp, Zea mays
cgttacgccgcaccactcttcttcctctgctccgcctcttcacccagcgtcttccgattgctgacggatccctcttcgccgcggccgccgccgcggaccgaccgtcggagagaaggcgaggcgggagcgatggatgccgccgactacggcaagcttttcgtcggcggcatctcatgggagacgagcgaggaccgcctccgcgagtacttcggccgctttggcgaggtcaccgaggccgtcatcatgcgggatcgcagcacggggcgtgcccgctggtttg

SEQ ID NO: 7860 - DNA, 282 bp, Zea mays
gcagaagtgcagcagaacgatcggatctagcagaattctctcaacctcatcggcggcggcgaagagcgtgcggatcggagatggagacaagcgggtggaggaggagagcggcggcgcgggcctcctggagccccgccacggtgtacctgtggctcgcgctcgccgcagcagcactgacgctcgcccaggctaagaaggacctaacggaggttacccacaaggtctacttcgatgtcgagattgacggcaagcccgcaggtcggattgtcatggggctttttg

SEQ ID NO: 7861 - DNA, 277 bp, Zea mays
cccacctcccggtccggcagcagagagcgggggtgcagagagatcgagatccggaggccgcgagtgggagcgccaccaccagcgactgcggcaatggcgggcacggtgacggtcccggggtcgtcgaccccctccacgccgctgctcaaggacgagctcgacatcgtgatcccgacgatccgcaacctcgacttcctggagatgtggcggcccttcttccagccctaccacctcatcatcgtgcaggacggcgacccgaccaagaccatcaaggtgc

SEQ ID NO: 7862 - DNA, 280 bp, Zea mays
gggaggaggtgagccaccggaagcggagacgtgagcactcgaccaaccccgtcgatccggctgcggcgcggcgtgctagatcgctaccgaccatggtggtggaggagatcgccgagggggtgaagaacctaaccgtcaccggagatgcggcggcttcaggcggagaggggcagaggaggggcggcggcggcagcagcaaccgcatccaggtgtccaacaccaaaaaacccctcttcttctacgtcaacctcgccaagaggtatatgcaacagcacggcga

SEQ ID NO: 7863 - DNA, 278 bp, Zea mays
atctatgatcaagtctcctcgccctactcgggcagaagcaacggatgttgcaaacgcattcttgatggcacagactgtgttatgctcagtggtgagactgctgctggggcttatccagagttggcggtgcagactatggctaagatctgcctgcaagcagagtcttgcgtagaccatgctgctattttcaaatcaatcatggcttcagctccaattccaatgagtccattggagagccttgcatcatcagctgttcgcacagcaaactctgccagggc

SEQ ID NO: 7864 - DNA, 277 bp, Zea mays
ggaacaacgggcccatcagctttcagctgcagtggttccagcagatcgccacctccgtctgcggacagagctgcaagagctacctgggcaactccctgttcgtgttcggcgagttcggcggcaacgactacaacgccatgatcttcggcggctactccatcgagcaggccaggaaatacgtccccaagatcgtcaacaccatctcgaggggcatcgataaactgatcggcatgggcgcgaccgacatcgtcgtccccggggtgcttcccatcgggtg

SEQ ID NO: 7865 - DNA, 277 bp, Zea mays
ctagtcctctgttacttctccctccgccgccactcccctcccattcaccgccaccgccaattccataggggcctccgccacctctgctgagagcgagaagagatggcaggcaagggtgatgggccggcaatcggcatcgatctcggcacgacgtactcttgcgtcggcgtctggcagcacgaccgtgtcgagatcatcgccaacgaccagggtaaccgcaccacaccctcgtacgtcgccttcaccgactccgagcgcctcatcggagatgcggcca

SEQ ID NO: 7866 - DNA, 296 bp, Zea mays
ccattgtatgatggtatgattcctgcatttgatgtactggggaagaagtcattctttctgggagagattggaaatggggcaaagatgaagcttgtggtcaacatggtcatgggaagtatgatgaattctttgtccgagggactctgtttggccgacaaaagtgggctgagcccccaaacacttcttgatgtactggaccttggtgccatcgcaaacccaatgttcaagctgaaggggcctacaatgctgcaaggcagctacagccctgcgtttcccctgaagcatcagcagaagga

SEQ ID NO: 7867 - DNA, 229 bp, Zea mays
ccacgcgtccgctccctcactcccgttccatttccccatctcccagagccaattcgcgagttctccctcctctgccgccatggcgctctctgtggagaagacctcgtctggacgggagtacaaggtcaaggatctctcgcaggcggacttcggccgcctcgagattgagctggccgaggtcgaaatgcccggcctcatggcgtgccgcgccgagttcggcccgtccaag

SEQ ID NO: 7868 - DNA, 298 bp, Zea mays
cggacgcgtggtgcatgctcctgagaaatggagactagtgaaggctcatggaacagctgtgggtctcccatctgatgatgacatgggcaacagtgaagtcggtcacaatgcacttggtgctggtcggattttcgcccaaggtgctaagcttgttgatcaagctcttgcctcaggaaagatttatgatggagatgggttcaactacatcaaagaatcttttgaaaatggtactcttcaccttattgggttgttgagtgatggtggtgtccactcccgccttgaccaactacagttactt

SEQ ID NO: 7869 - DNA, 300 bp, Zea mays
gccgcctcccccacaccggacagaaaagcgccactaaaaccctagccatccgccatgtccacctccccagccgcctcatcctccgctccgaccgccttcgccgcctctgcggttacgatggctgccgaggccgccgacgggccggtactcagcgtagtatcgaagcgtctccgcgcgctgcggaagaagtacaatcgtatcacgcagatggaggagtcgctcgccgccggcaagtcgctcaaccgagagcaggaggaggttctccgctccaagcccgtcgtcgctgctctgatcgacgaa

SEQ ID NO: 7870 - DNA, 295 bp, Zea mays
acacgatacaggaatacgatacgccggtcgcctgagtcgagaccaccaccgctcccgctctgcgccacctcgccgcctagagtctttgccgccgcggatctcgccgtccccgccatggatacgtcgggctcctccgcgagccgccggcgacgccccgaccaccggggagcaccggatggggaccaccattgtcggggtctgctacgagggtggcgtcgtcctcggcgctgattccagaaccagcactggaatgtatgtagccaaccgtgcttcagacaagattacccaattgaca

SEQ ID NO: 7871 - DNA, 293 bp, Zea mays
attgtcttccaagaaccacgcttcgttgaatacttcagatcggctacacctgagactgaatatggtaggatgaatattggcagccgtccatcaaagaggaagcctagtgggggaatagaatcactccgtgcaattccatggatctttgcttggacacaaacaaggttccatctgcctgtctggcttggatttggtgcagcgataaagcacatcatgcagaaggacatcaggaacatccatatactgagagacatgtacaatgagtggccattcttcagggtcacccttgattt

SEQ ID NO: 7872 - DNA, 292 bp, Zea mays
gttccgcttctgcgtgggagactcggagcacgactggcgcgtcggcacgccgcagtacgacttcatcgagcactgcctctccacggtggaccgcaagcaccagccgtggctcatcttcgccacgcaccgcgtgctgggctactcctccaacgcctggtacgccggcgaggggtccttcgaggagcccgagggccgcgagaacctgcagcgcctgtggcagaagtaccgcgtcgacatcgccttcttcggccacgtacacaactacgagcggacctgccccatgtaccagagc

SEQ ID NO: 7873 - DNA, 296 bp, Zea mays
cccacgcgtccggcgtgctcggcatcgccgtgggccttcggcggcatgatcttcatcctcgtctactgcaccgcgggggtgtcgggtgggcacatcaacccggccgtcaccttcggcctcttcctggcgcgccaggtctcgctggtgcgcgcgctgctctacatcgtggcgcagtgcctcggcgccatctgcggcgtcgggctcgtcaagggcttccagagcgccttctacgtgcgctacggcggcggcgccaacgagctcagcgccggctactccaagggcaccggcctcgccgc

SEQ ID NO: 7874 - DNA, 284 bp, Zea mays
gccgacgaggagaggggagcagcgagatcgtgcgcgcctccgagatctccacgaattgtggtaacatggggctcaccttcacgaagctcttcagccggctcttctccaagagagagatgaggatccttatggttggtctcgatgcagctggtaagaccaccatcctctacaagctcaagctcggagaaatcgtgaccaccatccctacaatcgggtttaatgtggagactgttgaatacaagaacattagcttcactgtctgggatgttggaggtcaggacaag

SEQ ID NO: 7875 - DNA, 291 bp, Zea mays
cccacgcgtccgcccacgcgtccggccgcccccagtccccgatccgaagctgtgcctcgtaccatttcgatccaatggcgccgacgtcgaagctgtcgacgggcatcaagcgcgcttcgcggtcgcacacgtaccatcgccgtgggctgtgggccatcaaggccaagaccggcggcgccttccccaaggccgacaaggccgccgccgccgtggaacccaagttctaccctgccgacgacgtcaagccccgcgttcccagcacccgcaagcctaagcctaccaagctcaggt

SEQ ID NO: 7876 - DNA, 291 bp, Zea mays
agcagacttgaggttccgagcggccggaaaccagcggcaaccgtcggcatggcgctcgtattgcattctggggctggaaacaaaaatgccttcaaggcacttattgctgcagaatacagtggggtcaaggttgagttgaccaaggattttgagatgggtgtctcgaacaagacccctgagtttctaaagatgaacccccttgggaaggttcctgttctggagactcctgatggccctgtttttgagagtcatgctattgcgcgctatgttgctcgcttgaaggatgacaac

SEQ ID NO: 7877 - DNA, 303 bp, Zea mays
acgacaacgagtggggctacagcaaccgcgtcgtcgacctgatccgccacatgttcaagacccagtagagagagatatttctgcctccctatcgagggtcgtccccgatggcctttggtcgcagacatctttgctgcttgtctatgctgagaataaatgtgaacggtgcccctggacgctggatccatgctggttttggacacggttgtctttttgtgtttaacttatctgctgccgtcctgtaacgaattcgctaagttttagttcttttgtgctttgttaagaatataaacaatgaggttt

SEQ ID NO: 7878 - DNA, 301 bp, Zea mays
ggtcaaggccacagctggtgacacccatcttggtggtgaggactttgacaacaggatggtcaaccacttcgtccaggagttcaagaggaagaacaagaaggatatcactggcaaccccaggggtctccggaggctgaggaccgcttgtgagagggcgaagaggattctgtcttccactgcccagaccacgattgagattgactcgctgtatgagggcatcgacttctactccaccatcacccgtgccaggtttgaggagctcaacatggacctgttcaggaagtgcatggagcctgttgag

SEQ ID NO: 7879 - DNA, 299 bp, Zea mays
cccccctcgtccgacctcctcgccgccgcagacgaccgccgccgccgctgccgctgccgctgcgaaccctttgtgaatcttcgttgtccgggctgtgtggggcaggcatggcgctccggaggctgctgcaggggagcgtcctgccgcggataatcggcagggatttggcaccggccgtggcgccgttttcaacggagtccggggagaccattcgtgccacgctctttcccggcgatggcatcgggccagagatcgctgagtctgtcaagcaggtattcaatgttgcaggggtaccaatt

SEQ ID NO: 7880 - DNA, 302 bp, Zea mays
tgaccgtggcgttgcgtcttgaaatgtgagagagagagagagaagagagagagaagagagagagagagagaggagtgggagacccgagctgaggctgccgtgtagggaccgtagactcagcgactgcgaaggagggataaggggatggccgggatcggaccgatcaggcaggactgggagccggtcgttgtgcggaagaaggcacccaccgccgccgccaagaaggatgagaaggccgtcaacgccgcgcgcctggccggtgcggagatcgataccatgaagaagtacaacgctggtacgaa

SEQ ID NO: 7881 - DNA, 295 bp, Zea mays
caattgaagcagcggattgaagaggtgattgtgtctcaagctagcgtgcacgctgcagcgctgcgtggacttcctcagcaaggaccgtcctttcttcccgccgaccatcaacagccccgagctccacgacttcttcgtgaacgtggccggcgagatggtcggctcgaggaacgtgagggacaggcagccgctgatgggcgccgaggacttcgcgttctacgccgaggcggtcccttccacctactactacttcgtgggcatgtacaacgagacgcgcgggccgcagcgccccacc

SEQ ID NO: 7882 - DNA, 297 bp, Zea mays
ctggttggaaggtttggagaaactccccggctcgaggagatcgtgacattgagaggacgatgggagggcgcgcgctcctcctcctcctcctggtctcggcgttggtctttcagatccacgcctccgacccgctgctgtacgagccgttcgatgaggactttgaggggagatgggtcgtctccaagaaggatgaataccaaggtgtgtggaggcatgccaagagtgatggtcatgaggactatggcctccttgttagtgagaaggcaaggaaatacgccataatcaaggagcttgatg

SEQ ID NO: 7883 - DNA, 169 bp, Zea mays
ggccaagtagatgtgccatcacttcggcactggagtgaaaaagaaagtatgattgggtcctgcctaggccccatagatatagctcttttttgagaaggaagagagattaattcagcagcagcttttataaattctttgttgtcatgaagcaggtggttcttttgtaaac

SEQ ID NO: 7884 - DNA, 299 bp, Zea mays
tggggaagaagaaggccaagaagagcgtggagacctacaaaatctacatcttcaaggtcctgaagcaggtgcacccctacatcggcatctcctccaaggccatgtccatcatgaactccttcatcaacgacatcttcgagaagctcgccggcgaggccgctaagctcgcccggtacaacaagaagcccaccatcacctcccgcgagatccagacctccgtgcgcctcgtcctcccaggagagctcgccaaacacgccgtctccgagggaaccaaggccgtcaccaagttcaccagcaat

SEQ ID NO: 7885 - DNA, 290 bp, Zea mays
ggaccgtggtaatggaacgtagacgcatcgtgatggcagcagccgcaaagcatctaactccggtggctctggagcttggtggagctatcccctgttgttgtggactcaaatgttgaccttcatgttgccgtcaagaggatcgttgttggcaaatggggatgcaacaacggccaagcatgcattgccccagactacatcataacgacaaaatcatttgcgccagagctggtggcctccttgaaaagggttttggaaaggttttacggggaggatcctctgcagtcagcgga

SEQ ID NO: 7886 - DNA, 299 bp, Zea mays
tgtgcatcaagaacgtaccaataccacatgtccgtcctgaagagaggttcctcgttgggaggatcggcccgaagcagtacagaatgtaccggtgcatcgtcaggtacggctaccacgacttccacaaggacgacattgagttcgagaaggagctggtgtgcagcgtcgcggagttcatccggtcagggtcgtccaagttgaacggcatgcccgaggagttcgacgaggaggagcagcgcatggcggtagtccgctccaacagcatccgcatgctcgaggaacaggctacagtggagaag

SEQ ID NO: 7887 - DNA, 299 bp, Zea mays
gtaataaggggcgacgaaaatggctccaacgaccgccaccaaggacgacagtggctacggcgacgagcgccggcgcgagctgcaggcgttcgacgacacgaagctgggggtgaaaggcctggtggactccggcgtcaagtccatcccgtccatcttccaccacccgccggaagccctgagcgacataatttctccggcgcctctgccgccgtcgtcgtcgccctccgccgccgccatcccggtggtggacctctcggtgacgcgccgcgaggacctagtcgagcaggtgaggcacgcgg

SEQ ID NO: 7888 - DNA, 292 bp, Zea mays
gcactctccctcaggtttagtgttcgcaatggcggccttcaacaagcttggtggccttctaaggcacagtgctctggtgagcggtatcactggtggctcttctcctgcagtgttcaatgctgcacggctcatgtctaccaagctatttattggtggtcttgactggggtgttgatgacgtgaaactaagagaagcatttagcagctttggagaggttactgaagcgagggtgatcacagacagggagactgggaggtcaagaggctttggctttgtgaactactccgacagt

SEQ ID NO: 7889 - DNA, 293 bp, Zea mays
cccagtccagtcccgggaatggagtgcgtattgggcgtggttggccgcgacttcgtgctggtggcggccgacacctccgccgtgcagagtattctcgtccacaagaccgacgaggacaaggtgatggtgctcgactcgcaaaagctgatgggcgcttcaggggagcctggtgatcgggtgcaatttacggacttcatacagaagaacctccacctgtaccagttccggaacaccatcccgctctcaaccgccgccgccgccaacttcacacgcggcgaactcgccacagccct

SEQ ID NO: 7890 - DNA, 289 bp, Zea mays
tggctgtattagctcttacaacttcccttgctgacatgagagaaaggcttggaagaatggtgatagggaacagcaagtcaggtgagccgataactgctgatgatcttggtgttggaggtgcattgactgtcttaatgaaagatgctattcatcccaccctcatgcaaactcttgaaggcacaccagttttagtacatgctggaccatttgctaacattgctcatggaaactcttcaattgttgctgataagattgctttgaagttggttgggaagggtggctttgttgt

SEQ ID NO: 7891 - DNA, 291 bp, Zea mays
ctagcacgcaaaaaccccacgagagagacgaatcttccgaatctctcggtggcgatggcgctctccgaccgctcccgcgagtcgctcctcccgagcttcctctacgcctcctcggcgcgctctttcgctgccacaggagccgccgcgcgcctccctgtctcctccccagcgcctgccacggctggagcaggaggcggcgtgccgttctcgatccaggcgcccaaggagaagatcgagatgtactcgccggccttctatgccgcctgcactgccggaggaatcgccagctgc

SEQ ID NO: 7892 - DNA, 290 bp, Zea mays
caagacgttgaggcagcagctgaggaaacgaaaaagagcaaccatgtcacgaggaagcttgagaagcgcaaggagggacgtacccttgacccacacattgaggagcaatttggcagtggacggttgctggcatgcatttcttcccgccctggacagtgtggccgtgctgatgggtacatccttgagggtaaagagcttgagttctacatgaagaagctacagaggaagaagggcaagagcgctgtagcttagagcattctcatggattgtcttgcaccgaaatgtgtgtc

SEQ ID NO: 7893 - DNA, 298 bp, Zea mays
  unsure (1)..(298): unsure at all n locations
accgcgtgcgaaccaagcagaccacagcaagaagcgtagtcgtcgccggaaggaaaggcgcggacaagatgtcgtggcaggcgtacgtcgatgagcacctgatgtgcgagatcgaaggacaacatctcagcgccgccgccatcgtcggtcacgagngcagcgcttgggcgcagtccgagagcttccccgagttaaagcctgaggaggttgctggtatcataaaggactttgatgaacctggtagtcttgcaccaactggtcttttcgttggaggtacaaagtacatggtgatccaagg

SEQ ID NO: 7894 - DNA, 308 bp, Zea mays
tctagatcgcgagctgccgcccttttttttttttttttagcaagcagataaaataatgaaatactcgtcacgtatgccatggctggcatatcaagcggtgcaggtgaaacaaagtctttgtggtagcatacagcatgctacgcacgaaggtactactacataccgcataacttgagcgaatacaacaagcaaaccataggcaagccccggaatgaaaggaaacaagggtacaaatgtggcggcccaaaccacccttactcgtcttggatggcctcctcgtcctcatattccgcctgctcatcagcagt

SEQ ID NO: 7895 - DNA, 130 bp, Zea mays
caaaaggcaacccaatgtggaaccagctaactgtcccagaagcatcactctactcatgggattccaaatccacttacattcatgagcccccttagtttaaggacatgaccatgtccccagctggcccctc

SEQ ID NO: 7896 - DNA, 302 bp, Zea mays
ggttcgatggcggcggccgtgggggcggcggcggcggccgtgggtttggcggtggtagatgctggatatgggacatttgagggacaggtggcgaggagtcccagatgcggccgtgactagcgtggcaggggtggccgcggcggtggcatgaagggcgggagcaaggccgtcgtggtggcgcacaagcacgccggtgtcttcatctccaagtccaaggaggatgcgctctgcaccaagaacatggtcccgggagagtccgtgtacggagagaagcgtgtctccgttcagaatgaggatggaac

SEQ ID NO: 7897 - DNA, 193 bp, Zea mays
agcaaatcttgcctgtcctggataaatttggagctgctatggcaattgtaaagaatgatatcagcggcaatatcacaaggctggaaaacaagtattcttcaggtgcatcaaagtatggacacttgtacagcatggttcaggaagaagttcaaaacaagaccgcgaaaggttcctcaagctgcacaaatggtct

SEQ ID NO: 7898 - DNA, 304 bp, Zea mays
cgaggaagacaaggctcgactggtgcaggaaacagggctacaactgaagcagatcaataactggtttatcaaccagcgtaacggaactggcacaacaattcggcgtcatcctcgtcggacaaaagcaagagaaaaaggaacactgcaggtgatgggaacgcagaaccagcctggtagggcatggtcggggaacgaagtttatgtaaataatgcttctactgtgaagagttccatcatatttgttgctccagaaaagaccctcagaccggtgtttcctgaacccatattcatacaaagacatcag

SEQ ID NO: 7899 - DNA, 300 bp, Zea mays
gctgggcatccagagttgaatcctggcatagatttggctgttactgttttgacaacgggattctggccaagctacaaaacttttgacataaaccttcctgcggagatggtgaaatgtgtagaggttttcaaggaattctatcaaacaagaacgaagcacaggaagctgacatggatttattccttgggaacctgcaacatcaatgctaagtttgatgctaaacctattgagctcattgttacgacatatcaggctgcattactactactgttcaatggatccgaaaggcttagttattct

SEQ ID NO: 7900 - DNA, 290 bp, Zea mays
ctcccgggacgactcggagaagtacaggacggaggagaaggagcacaagcacaaggagcacctcggcgagatgggcgccctcgccgccggcggcttcgccctgtacgagatgcacgaggcgaagaaggacccggagcacgcgcagtgcacaagatcgaggagggcgtggcggcggtggcggccctgggcagcggcggcttcgcgttccacgagcaccacgacaagaaggaggccaaatacgcggcggaggacgcggtttaggaggaggagtccggccgccgcggcgaggg

SEQ ID NO: 7901 - DNA, 300 bp, Zea mays
agcgagacccgaccccgccgtcgcgatgaggccggcgctgctcaagtccacggccgagctcctccgccgcagccgcggctacgcctcctcggccaacccggagcggaaggtggccatcctgggcgctgcgggcggcatcgggcagccgctctccctcctcatgaagctcaacccgctcgtctcctccctctccctctatgatatcgccgggacccccggcgtcgcggccgacgtctcccacatcaactcccccgccctggtgaaggggttcatgggggacgaccagctcggggaggcgct

SEQ ID NO: 7902 - DNA, 114 bp, Zea mays
caatctttgcggaatatctgacaagcatgtttggatatgacatgatgttgccgatgaatactggtgctgaaggagttgaaactgctatcaagctggctaggaaatggggttatg

SEQ ID NO: 7903 - DNA, 292 bp, Zea mays
cccagcaccagccctggctgctccaccgagctcccatccatggctcctgtcttcttccttctacctctcctactcggccagatccttctctgcgcagcggcgacaccatcaactcgtccacacccttgtccggcgcgcagaagattgtgtccaagggcaacaagttcaccttgggcttctacaccccaccccaaggtaccaacacctcctccaaccagggtaactactacatcgccatatggtacagcaacataccactgcagacgacggtgtggatggccaaccccgatct

SEQ ID NO: 7904 - DNA, 290 bp, Zea mays
ctccagcagctgtagcacggctcttttcaattgactggtacatggataggattaatggcaagcaggaggtcatgattgggtattcagactctggcaaagatgccgggcgtctctctgcagcatggcaaatgtataaagcacaagaggagctcatcagagtggcaaagcattatggagtcaagttgacaatgtttcatgggaggggtggaacagttggcagaggaggtggtccaactcatctggccatattatctcagccaccagacacgatacatgggtcacttcgtgta

SEQ ID NO: 7905 - DNA, 110 bp, Zea mays
gtgcagcagcagtgaagcactacttcctgcactcactgtgctagctgctcaaaccgtagtagtaacagtccatcaccatcaccatcaccaccaatggctccctaggttgc

SEQ ID NO: 7906 - DNA, 290 bp, Zea mays
gtgaagactcctcgtggcctccgcacactcaactctgtttgggcccaacatcttagcgaagaagtgaggagaaggttctacaagaactggtgcaagagcaagaagaaggctttcacaaagtatgctctcagatatgaaaatgatgctggcaagaaggaaattcagctgcagcttgagaagatgaagaaatatgcttctgttatccgtgtcattgctcatacccagattaggaagatgaagggtttgaaacagaagaaggctcacctgatggagattcaggtcaatggtgg

SEQ ID NO: 7907 - DNA, 293 bp, Zea mays
gagtatgggagagatagagagagaagacagagataagagagagagagagagaggagtgggagacccgcgagacgctgccgtgtagggaccgtatactcagcgactgcgtaagagggataaggggatggccgggatcggaccgatcaggcaggactgggagccggtcgttgtgcggaagaaggcacccaccgccgccgccaagaaggatgagaaggccgtcaacgccgcgcgccgcgccggtgcggagatcgataccatgaagaagtacaacgctggtacgaacaaggcggcat

SEQ ID NO: 7908 - DNA, 293 bp, Zea mays
cccacgcgtccggttgagccatacaatgcaaccctgtctgtccatcagttggttgagaacgctgatgaatgcatggttcttgacaacgaagcactttatgacatttgcttccgaactctgaagctgacgacccctagctttggagacttgaaccacttgatcagtgcaacgagtgagtggtgtcacttgctgcctccgcttcccaggacagcttaactctgacctgcgcaagcttgcagtcaacctgatcccgttccctcggctccacttcttcatggttggctttgcgccac

SEQ ID NO: 7909 - DNA, 235 bp, Zea mays
  unsure (1)..(235): unsure at all n locations
gagcaatatatctcaactcactatacctgtcctcgaatggttgtgactgacacttccagcagcagatacaaccattcgnaggacagtaatatgattgagaaaaatgccgggaatgttcatcacgatgaaggttgtgatcaagtggaagaattattcacagaattctccactgatccaactactgctgatcagcttgtacagaacgacncagctatttttactgatctgaggtcgt

SEQ ID NO: 7910 - DNA, 321 bp, Zea mays
atctagtacgtctccaagcgctggccctactggaacaggacggagggggccgaccatttcttcgtcactccacatgactttggagcgtgcttctacttccaggaagagaaggccatccagcgaggtgtcctcccggtgctgcgccgcgctacgctggtccagacgtttgggcagaagaaccatgtctgcctcagggaaggctccatcaccatcccgccatacgctccgcctcacaagataagagctcatatcgtcccgccagagacgcctcggtcgatcttcgtctacttccgcggcctgttctacgacaccgcgaacgac

SEQ ID NO: 7911 - DNA, 319 bp, Zea mays
aggtctgcagcccccaactacccccagcctcggaaggaaccttccagaagcgcaagactctaaaggccgtcgccttcccattcttcctcgccgcgggggtcgcctgagatcacataaacaatggtgacggctgttgctgtgcttggtagcagcgatggtgtcaagggcaccatctttttcacccaagagggagatggccctaccgctgtcaccggaagtgtctctggcctcaagcctggcctccatgggttccatgtacatgcacttggtgacaccaccaatggatgcatgtcaactggaccacactacaatcctgcga

SEQ ID NO: 7912 - DNA, 321 bp, Zea mays
cgcccgacgcccgccacggcgccaccatgtcgcaggctacggaggtcgtcggaaacccgtacgccgccgagctcgctgcagccaagaaggccgtcgccctagcgtgccgcctctgccagagagtgcagcggagcattttgcactctgacattcaatcgaaggcagacaagactcctgttacagttgcggattatggatcacaggtactggtatgtctggtcctgaagaaggaattgccttctcactctttctcaatcatagctgaagaggattcaaaagacttgagagaagatggtgcccaagacattatagaacacatta

SEQ ID NO: 7913 - DNA, 148 bp, Zea mays
gacttcgacatctcctacaagcccaagccgggggcgttccccaccttcctgctcgtcgacaggggagattgtcacttcgcaaagaaggcatggaatgcacagaaagcacgagcagcggcaatccttgtcgctgatgacaaacacgaac

SEQ ID NO: 7914 - DNA, 320 bp, Zea mays
cccacgcgtccgggagcagagcctcgctggcaagcctgccggcatgttcttcagcactggaacccagtgtggtggccaagagactacaccgctgacggcgattacccagttgacgcaccacggcatggtgtttgtgcccgtgggctacaccttcggcgccaagctgttcggcatggaccaggtccagggtggcagcccctacggcgccggcacgttcgccgccgacgggtcgaggtggccgagcgaggtggagctggagcacgccttccaccaggggaaatacttcgcgggcatcgccaagaagctcaagggctctgctt

SEQ ID NO: 7915 - DNA, 321 bp, Zea mays
ggagcattcgagaagccgaagaaaattcgaagacgaggagcagctacactgcggacggacttcgggcatggagggccagttccaggttggcaaggaggaggtcatccaagcatggtacatggacgacagtgaagaggaccagaggcttcctcatcatcgcgagcccaaagaattcatccctctcgacaaactttccgaactaggaatattaagctggcgcctaaatgctgatgattgggagaatgatgagaacctcaagaaaattcgtgaagccaggggttactcttacatggacatttgtgatgtgtgcccagagaagtt

SEQ ID NO: 7916 - DNA, 322 bp, Zea mays
  unsure (1)..(322): unsure at all n locations
ttcattggcaagcaacaattatgggaccacctgacagtccctatgctggtggtgttttcttagtgaacattcatttcccgccagattaccccttcaaacctccanaggtttctttcaagacaaaggtcttccatcctaatatcaacagcaatggaagtatatgccttgacattctcaaagagcagtggagccctgctttgacaatttctaaggtcctgctctccatctgctccctgctgaccgaccccaacccggacgaccctcttgtcccggagattgcccacatgtacaagacggacccggcgaagtacgagtcgacggc

SEQ ID NO: 7917 - DNA, 318 bp, Zea mays
gtacttttcatcgttacctgcaccaacaagaccatcgcagcttccaaggccacgtcggaaaggagatcaagggaataacaagattcctgatctcaacctgcaggatggccctatggtgctctccccgccaagaaagttacgtagggtgacagcgcatgaagggatggaaggtatgcacaggacagataaagtggacgaacatccttctgggatgaggcacaccgatgacatgcccagtcagagttctagaattccaatgtcagttgatgttggggctgtgtttggcacacgacctgcacctaggccaacattgaacag

SEQ ID NO: 7918 - DNA, 316 bp, Zea mays
tgggagtcgaaggaagtatttagccgagatggccacttgaagctttctacacaggtgttctttgcatcgatagaccagagaagcgaacgggctgcaggggagagtgcatgcacagcacttgtggctgttgttgcagactggttccaaacaaaccaggacctgatgccaatcaggtcacagtttgacaacctgatccgagaaggatctctggaatggaggagactctgtgagaacgagacctacagagagcgctttcctgataagcactttgatcttgaaactgtccttcatgcaaagatccgtccactcacagttg

SEQ ID NO: 7919 - DNA, 316 bp, Zea mays
ggacgtaccttgagagttcttggattcaaccatgctcaacgagcaatgttcctacagacactcaatagattcggttttcagaattatgactggaaagagtatcttcctcgtcttaaaggaaaaagtgtcgaggaaatccagagatatgctgaacttgtcatggcacatcttgctgaagaaattaatgattctgactatttttcagatggcgttccaaaggaaatgatgcgtgttgatgatgtactagtcaggatagcaaacatatcccttattgaggagaagatggctgccacaggaccaggaaaaattacaaaca

SEQ ID NO: 7920 - DNA, 314 bp, Zea mays
gctgcttactccaactgcgcgaagaagccatcctgatatcccttttggcttcctcattctagtagtttaggatttcttttctgacactttgattctgaccaatctctctggcctgctgcttcctgataatcgaccagttccccagtcttgctccttgcactcctccctccatctccagcattgtgttctgattcacctgctccaatggctgttctttctgctgctgatgcttccccggtctcagctatcgggtttgagggctatgagaagcgccttgagatcacattctctgaggcacctgtctttgtggaccc

SEQ ID NO: 7921 - DNA, 315 bp, Zea mays
cagaccgtgggtccgtatggagaggaacgtcaacgccagcactgggaagtgcgggatcgcgatgatggcgtcctacccgacgaagaagggcgcgaaccaccccaggccgtctccaaccccgccgacaccgccggctgcccctgacaatgtctgcgacgagaacttctcgtgctccgcgggcagcacctgctgctgcgcgtttggcttcaggaacgtctgcttggtctggggctgctgcccggtcgagggcgccacctgctgcaaggatcacgccagctgctgcccgccgggctaccctgtctgcatcgtcagagc

SEQ ID NO: 7922 - DNA, 317 bp, Zea mays
cccacgcgtccgagagcacgctactactcatcactcgccaacgtgcagagatcagggaggcggcacactccatccactgaccgctcatggcgaaggtccacctctacgtcgccgcggcctgcgccgtcgtcctcgcgctcgccgccccggccctcgccggcgaccccgacatgctgcaggacgtctgcccggctgactacgcctccccggtgaagctgaacgggttcgcgtgcaatgcgaacttttcggcggacgacttcttcttcgacgggctgaggaaccccggcaacaccaacaacccggcgggctccgtggtg

SEQ ID NO: 7923 - DNA, 303 bp, Zea mays
gcagtgggcaattgctttgccttgagaaaagatcatgagactgctttgaagaattttcaacgttcggtacagattgactcaagatttgcatattctcataatcctccagtgcagaatactcatgaccacatagagtgtgagcatatgcaaatcttgagtcaagctgtaccggaggattatgagaatagtatcaaattctacagatgtgcactgcaggtagatgaaaggcactacaatgcttggtatggccttggggtggtgtatcttcgccaggaaaagtttgagtttgctgagcatcatttc

SEQ ID NO: 7924 - DNA, 312 bp, Zea mays
ctgctataaaaccctccgcctccaccggcggctcgccaaactccgtttcgaattctagggttttgctgctctccgaccccgagctccgacagccgcagcatcaggcgcggcccccctcgcgtgtgaccgagatggcgctgccgaatcaggggaccgttgattaccccagcttcaagctcgtcatcgtcggcgatggtggaactggtaaaactacatttgtgaagaggcatctcactggagagtttgagaagaaatatgaaccaaccattggtgtggaagttcatccgttggatttcaccactaactgtggta

SEQ ID NO: 7925 - DNA, 309 bp, Zea mays
gactagttctagagcgcaactatttcttggctggtgctgcaattactggagggactgtgactgtggaaggttgtggcaccaccagtttgcagggtgatgtgaagtttgctgaggtactggagatgatgggagcgaaggttacatggaccgagactagcgtaactgttactggcccaccgcgggagccatttgggaggaaacacctcaaggcgattgatgtcaacatgaacaagatgcctgatgtcgccatgactcttgctgtggttgccctctttgccgatggcccgacagccatcagagacgtggctt

SEQ ID NO: 7926 - DNA, 311 bp, Zea mays
caagcgtttccaggtgaagttcaagagaaggcgcgctggcaagacagactacagggccaggataaggctgattaaccaagacaaaaacaagtacaatacacccaaatacagatttgttgtgcgatttaccaacaaggacatcacagcacaaatcatatctgctagtatagcaggtgatatggttcttgcttctgcttactcgcatgagttgccacgatatggtctcgaagttggtctgaccaactatgcagctgcctactgcactggccttctgttggctcgccgtgtgctcaagacccgtggtttagata

SEQ ID NO: 7927 - DNA, 311 bp, Zea mays
cagacgcgtggagcgcacacacacgcaaccagatctcccccaaatccagccgtcggcacctccgcttcaagatgcagatctttgtgaaaaccctgactggcacgactatcaccctcgaggtggagtcgtctgacaccattgacaacgttaaggccaagatccaggacaaggagggcatccccccagaccagcagcggctcatcttcgctggcaaacagcttgaggacgggcgcacgcttgctgactacaacatccagaaggagagcaccctccaccttgtgctccgcctcaggggaggcatgcagatcttc

SEQ ID NO: 7928 - DNA, 310 bp, Zea mays
gatattgtcaactacgctaagaaaagaggtatcaatgtgatggcagaaattgacgtgcctggtcatgcagaatcatggggaaatggatacccaaagctctggccttctcccatttgtacagagccattagatgtctctagtgatttcacatttgaagtaatttttggaattttgtctgatatgaggaaaatctttccattcgggctgtttcacttgggtggtgatgaagtatacacagggtgctggaacacaacgcctcacgtgcggcagtggatggacgagcgcaaaatgaccacgaaggacgcttaca

SEQ ID NO: 7929 - DNA, 294 bp, Zea mays
ccacgcgtccggcaggtgctaatttcatcaatatatcaatgtcgagcattacgtcgacgtggtttggtgaaggggagaagtatgtaaaggctgttttctcactagcaagtaaaatagcccccagtgttatatttatcgatgaggtcgatagtatgctaggaaggagagaaaatccaggggagcatgaagcgatgcgcaagatgaagaatgaatttatggtaaattgggatggactgcgcactaaagataaggagcgtgtgcttgttcttggtgctacaaatagaccttttgacc

SEQ ID NO: 7930 - DNA, 294 bp, Zea mays
cctctctccatctccctgctcctccgcctccttcttgatccagccaagccagggatcgccatgtcggactcggaggagcaccacttcgaatcgaaggccgacgccggagcgtccaagacctacccgcagcaggctggcaccgtccgtaagaatggcttcatcgtcatcaagaaccgcccctgcaaggttgtggaggtttctacctcaaagactggtaagcatggccatgccaaatgccactttgttgccatagacatattcaacgggaaaaagcttgaagatattgttccttca

SEQ ID NO: 7931 - DNA, 291 bp, Zea mays
agaaaaggtgctgtgaagaggattgctgctcgtttgttggcaacttcaatgagcttcagaagcacacgcaacaaaagcatcctgattcacgcccttcagagatcgatcctgctaggcaagttgattgggagaatttccagcaatcttctgatatcgtagatgtcttgagcacaatacatgcacaagttccaaacgggattgttctgggagactatgtgattgagtatggggatgatgacactggtgaggactatgaagttttccgcagggtcaggacgaactggtggtcat

SEQ ID NO: 7932 - DNA, 290 bp, Zea mays
tcttcttttcccctctccctcccctcgccgtcgctgtcgtcgccgtccgtgctagccatggatctaggcgctcccgcccgacggcgcctaccgatccgcctcttgctggtgttgctcaccgtcctcgtggtcctcacagcgcgctccagtgccgaagtcatcaccctcaccgaagagaccttctccgacaagataacggagaaggacacggtgtggtttgtgcagttctgcgtcccctggtgtaaacactgcaagaaccttggaacactatgggaggacctgggaaaggt

SEQ ID NO: 7933 - DNA, 276 bp, Zea mays
caacgcggagggggaggaccaagcgaaagggggaactagagcaatatgggcggcgaactgctgcttgcgctcctcctcgtctctgctgctgccgcccctcaggtacttggagttggcaatggagacaatcacatgagaatcatccaggaggacatcattgagacagtcaacaaccatcccagtgctgggtggacagcctcacgtaatccttacttttcaaactataccattgcgcaatttaagcacatacttggagtgaaaccagcaccacagaat

SEQ ID NO: 7934 - DNA, 284 bp, Zea mays
gcgagacgggacaggacggatcttcgacggagcgttgcccgattcgtcgcagttcccggacaagggaggaaaggcgtgggaagagggaggacgcgcgttggtctccgatccaagagctttgttaacaccagagattaaaagatagcgccgtagcgcaatgaaggcaccatcgctactggttcggtgtttccctggcttgcttcccagcaaggacactagttgtgtgccaattgtgtccgagaaggatctgcagctaccatcactagccgttgaaataattccct

SEQ ID NO: 7935 - DNA, 285 bp, Zea mays
cattgagtgggttccggacaggacgcacagcgggacgttcacggacggggatctgcgcgtcaacaaggacggcctccgcatcgtctcgcggagggagggaggcgaggctcctcctatagagccgttggatagtcaactgagcttagatgatctagacgttataaaagtgatcgggaaaggtagcagcggaaatgtgcaattggtccgccacaaatttactggccagttttttgctctgaaggttattcacactaaatattgatgagagtatacgcaaacagattg

SEQ ID NO: 7936 - DNA, 284 bp, Zea mays
tgtttgagacagcgactctctttataactgtactagtggtggcattcatgctacaggaaggcacatcaaactattttaaaggccttatgctcatcttgtgctacctcatagtcgctgcaagcttcttcgtccatgttgatcctgatgcaacaggtgagaactaggtgaaaaatctgcaatacagcatacctgtgaacagaatggaggggctacgacctaactgcagagttagcaaattgcgtagatgaggttctgcaagagtcctgaatttggatgtaacttgt

SEQ ID NO: 7937 - DNA, 290 bp, Zea mays
cccacgcgtccgaccccacggacctgtacgccaaccacaaccgcatcttcttcgacggcacgctccgggcgctggacggcatgcagggccccatctacgtcggcacgggctgcctgttccgccgcatcacgctctacggcttcgacccgccgcggatcaacgtgggcgggccgtgcttcccgtcgctgggcggcatgttcgccaagaccaagtacgagaagcctgggctggagctcaccaccaaggccgccgtggccaagggcaagcacggcttcctgcccatgcccaag

SEQ ID NO: 7938 - DNA, 289 bp, Zea mays
gctggcttgaagttttacatatatgaagatctgaaatctcaagttccagacgattacaaggattctgttatactgaagctctcttgtggagctttagctggtctatttggacaaaccctcacttatccactggatgttgtccggagacaaatgcaggttcagagcaagcagtctcaaaattcgagcgatggcttccgtataagaggaacttttcagggtctcttgctcatcattcggtgccaagggtggagacaactctttgctggcttgagccttaactatgtcaagg

SEQ ID NO: 7939 - DNA, 288 bp, Zea mays
atggcatgttcttttccgaaggggttggtggaatagtggaactggcaccaggatacttgcccgtggcatacagtatggtaaggaaagccggtgggctctgcatcgctgacgaagttcaggcaggagtcgcgcgaactggaagccacttctggggattcgaagggcatggtgtcatcccggacatagtcaccatggccaagggtatcgggaatggcatacccataggagctgtcgtaacgacgccagagatcgctcaggtgttgacccgcaaaagctacttcaatagga

SEQ ID NO: 7940 - DNA, 237 bp, Zea mays
cttcaccagttttgcttgttaaaaagaaggaccaaacttggaggttttgtattgattacaggtatcttaatgccttaactgtgaaaagcaagtatcctgtgcctgtctttgatcaactcatagatgagctcagcaattctaaatggttcagtaagcttgatgtcaaagccggctatcatcagatattgttgagaccgggtgaggaatacaaaacgggctttccaaacacatgtggga

SEQ ID NO: 7941 - DNA, 283 bp, Zea mays
atccccctcagaagtgtcagttgacttgattgatggtggtagcactgttgtcaaaggcaaaaacataataattgcaactgggtctgatgtaaaatcacttccaggaataacaattgatgagaagaaagttgtttcatctactggtgcactgtgcttgtcagagatcccgaagaaactggtggtaattggagcaggttatattggccttgagatgggttcagtctggaaccgccttggttcagaggtcactgttgttgaatttgcgccagatatagtaccatca

SEQ ID NO: 7942 - DNA, 281 bp, Zea mays
gcgccgccctcctgggcggattcaacgtggaggactacttcccgaagctggcggacgtggacctgttcctccggatcatctgcgccaaggccaagggcgtcacaagcggtgggacagcctcttcaacgagctgctgtccgagtacgcgctctccggcggcaagcagggcgaccacaactctgaagacttcgtgcacctcttgctgtcgctgcagaaagactacggtctcaccacggataacatcaagggcatacttgtgaacatgttcgaagcagccatcg

SEQ ID NO: 7943 - DNA, 279 bp, Zea mays
gttgccaaagaattccatcccctagccgccgccgccgctcgtctccctgagaggtgccgggaccgaggaactggccgagttctaggtagagaatcggttttgcttgtctcagcacggggtctgctgcgtctggtggtggtgaaggggagaaattcgtgagatctgttccggatcaggcgtgcgagctcgggaatcaggggtttcacacatagcttcgtcgatttgaatttgatgtactaatggagtctaagggtggcaaaaagtctagcagtagtcgtt

SEQ ID NO: 7944 - DNA, 284 bp, Zea mays
ggggaagatataccagtctgttattgacaaggaacgtagaggagattacctaggaaaaactgttcaggtcgtgccacacatcacagatgaaatacaagattggattcaacgtgtggcaatgaatccagttgatgacaccgaagagccagctgatgtttgtgtcatagaacttggtgggactataggggacattgaatcaatgcctttcatagaagcactaggccaattttcataccgtgtagggcctggaaacttttgcttggtgcatgttagtcttgtaccag

SEQ ID NO: 7945 - DNA, 283 bp, Zea mays
tgctgactagattggtcgaacaaagcagaagaaaattcgtgtgacttcagaataacaatccctgaaatactggaggatgagtggttcaaaaagggctacaagcgcccggagtttgacgagaaatatgacacgccattggatgatgtggatgctgtcttcaatgactcagaagagcaccacgtgacagagaagaaagaagaagaacccgtagctctcaatgcatttgaactgatttcaaggtcagcaggcctaaatcttgggaacctatttgactcggagcagg

SEQ ID NO: 7946 - DNA, 280 bp, Zea mays
acgatggtggcgttgctgggccggcggatcggggtggctgcggcactgccgcgttcatcgccctcgtggcgttcggatccgcctcatcctcgcccaagtccttcgtgaagtccaccgtctccgcccacgacgtcgtcatcttctccaagtcatactgcccgtactgcaaaagagcaaaggccgtgtttaaggagcttgagttgaagaaagagccatatgttgtggagcttgatcagcgagaggatggctcagagattcaggatgccttacttgagatagt

SEQ ID NO: 7947 - DNA, 275 bp, Zea mays
cgaaagggtttcaatattaaaggcactagccagacgcatacccgtttcatcaaccgttgatttggatgtgttggcacttcgagaagagtgcagcaatttcactggcgccgacctagcatcactggtggatgaggcagccatgttagctatggcagagagatggatgtacctcgatagcgggacatcaacgagtccatcttctctgattgaggcatcacactttgaagaagccttatcaaaggtgaagccatcaatatccaaaaagcaaaagagat

SEQ ID NO: 7948 - DNA, 277 bp, Zea mays
cgcgcatcctattgccctcgcgccaccgtcgccgccgccgccgctgcagcgagccaccgccccgccgtcgcttgaggtagacaccaatccaccgccatggggcgtatgcacagccgcgggaagggtatctcttcatcggcgctgccgtacaagaggactcctccgatctggctcaagacagctaccaccgaggtggaggagatgattacccaggctgcgaagaagggccagattgcgtcgcagaatggtgttctgctccgtgtacagcacggcatcc

SEQ ID NO: 7949 - DNA, 276 bp, Zea mays
ctccgactcgactatatgtatgcaaagttctttgttatcaagtcaattggtgaggcagatgtgcacaaatcgataaaatatggtgtatggtcaagttcctccagtggaaacagcaagctagatagcgcattcagggatgctgacaggatatcgaggaggcattctactaagtgtccggttttcttgttcttctctgtcaatggtagtgggcacttctgtggcatggctgagatggtcggacctgttgattttcacaaggacatggacttctggtgt

SEQ ID NO: 7950 - DNA, 318 bp, Zea mays
ctcgagaactccatttcgatcccatttgaaatcaacccatcctcgtttcctccgtctagcagcctctcaccctcatggccaagatcaagatcgggatcaatgggtttggcacgatcggaacgctggtgggcagggtggtcctgcagagcgacgacgtcgagctcgtcgccgtgaacgaccccttcatcagcaccgattacatgacctacatgttcaagtatgacactgtgcacggacagtggaagcaccatgaggtcaaggtgaaggactccaagacccttctctttggtgagaaggaggttgctgtgtttggctgca

SEQ ID NO: 7951 - DNA, 314 bp, Zea mays
tgccgaacccgagcctgcgttccaggttctgacgaacccggcccgggtcgttccagcccaggagaagttcgtgaaattcctggaaggcagcaggtacaagccggtgaaggctgccccctcgggattcgtcctcctgcaggacctcaagcccacggaggccgaggagctcgccctaactgacgcgccgtcaaccgccgccgccacgaccaacgccctggcatccagcgccacgtagccggctgccatggctgtcgacgatgagccccagccgcccccggccttcgagtacacatcgtaagggtgatggtcctcgg

SEQ ID NO: 7952 - DNA, 313 bp, Zea mays
gttttactatggatgcatggacatctatacaaaacaaatcgtacttatgtgtcacagcacattggattgacgataattggcaatgcaatcagataccaatttaagcatgtagaagacagccatggtgggataaaattgagtgatattttttttgtaaatgggcccaattggaaccttgataagcaaatgtttgctctttctttggataatgctgcggcaaacaaggttgcagttgatatagtgatagataatgctaaagacttgctcatatgtggtggaaagttctttcatgttagatgtgcaaatcatatat

SEQ ID NO: 7953 - DNA, 313 bp, Zea mays
cccacgcgtccgcgccgctgttccccgcaacctatcgacccaatctcgtccgacccggcgcgtcgtcccctccagatttccgtcgtccttctcaagtaccagaacctgttctgctgcagtctgacaaagtggagggcttaggagcttctgcttcttttatgtctgaacaatctttgctttatttgggattgttgggagagtactctcgtgcaactaggaaaaggcacaaggttccgtcccactgcatgcgtcaagagactgtctggttttcttgttctgatttgtcatttgctggtgctcaaagccggcttgg

SEQ ID NO: 7954 - DNA, 310 bp, Zea mays
cggattcctgccgaactggatcagatgaggccatcagggagctgaggtcgctgggcatcaagtcagtgatgcttactggggatagttctgcagcagcttcatatgcacagaaccagcttgggaacatacttgatgaggttcactctgagcttcttccagaggacaaggtgaggatcgtcgacgagctcaaggcaaagcatggcccgactctgatgatcggcgacggcatgaacgatgccccagcgctggccaaggccgacgtcggagtctcgatgggggtatctgggtcagcggttgctatggagacgag

SEQ ID NO: 7955 - DNA, 317 bp, Zea mays
  unsure (1)..(317): unsure at all n locations
gaacgaaagggcaaaactagtacttgaacaagcagagaagttggactgtaagagatacttgaccccaaaggatatcactgagggatctgccaatcctaatcttgcnatttgttgcacaaatattccagcacaggaatggtctgaccagtgacaccaaacaagttaccctcacacagacagcaacacatgatgatgttctattatctagagaagaaagagcctttcgaatgtggatcaacagccttggggttgaatcatatgtgaacaatgtcttcgaagatgttcgcaacggatgggtacttcttgaagtgcttgac

SEQ ID NO: 7956 - DNA, 316 bp, Zea mays
gccaagcgcacgtccgcagccgacatactccaggcgtaccagctgtacatggccgccatctgcttcaagagagtcgtcttcgtgttctcgaataacaccatctacaatgccgctctgggcaagatgaagatacatatcgtcgattacgggatccattacggcttccagtggccgtgcttccttcgatggatagcggatagggagggcgggccaccggaggtgaggattactggcattgacctgccccagcctgggttccgccctactcagcgcattgaggagacagggcgccggctcagcaagtatgcccagcagt

SEQ ID NO: 7957 - DNA, 319 bp, Zea mays
ccatctcccaagacctcctcagacccgagaagcgcactgcggccatggacgccaccggcactggagctggagggaaggcgaagaagggagcggcccggtcgcaaaggccggcgggccgaggaagaagtcggtgacgaggtccgtgaaggccgggctccagttccccgtcggccgcatcgggcgctacctcaagaagggccgctacgcgcacgctgtaggcagcggtgcccccgtctacctcgcggccgtcctggagtacctcgccgctgaggtcctggagctcgccggcaacgctgccaaggacaacaagaagacgcgc

SEQ ID NO: 7958 - DNA, 129 bp, Zea mays
tgctgtgtaaaaaaaggtcccatggctcccagaagaccatgaaggttcggatctatcatgtaattccttgttatctgccaattatgtatggactatggacatgtgtggcgctgttcaacttactactac

SEQ ID NO: 7959 - DNA, 314 bp, Zea mays
cacaagtcgtcgtaggcagcgagcgtctctcctctcccacgcatcgcgccaaggaagagagagagatcgccgctccccttctcggcgtcggtggtgccggtgccctccctcctcgagcgagatctgtctggtcacagatctatctgacaaaatggtgaagatctgctgcatcggtgctggctatgtcggtggcccaaccatggccgtcattgccctcaagtgcccagacattgaggtcgtcgtcgttgacatctccaagccccgcattgaggcctggaacagtgacaccctgccaatctacgagcctggtctcg

SEQ ID NO: 7960 - DNA, 313 bp, Zea mays
caccaaaccaaccaattcgcttctccgtcaacttcacttcctcgtcgacgcctccgtcccaccaaccatgccggcggccatggcggctgcggcggcgcagaggctcctcgcggcgagcacgaaaatcatcggcgttgggcgcaactacatagcccacgccaaggagctcggcaatccggtccccaaggagcccgtcctgttcctgaagccgacctcgtcgtttctccacgctggtgtggccaccgccgccgtcgagatcccggagccgctcgagtcgctacaccacgaggtcgagctcgccgtcgtcatctcc

SEQ ID NO: 7961 - DNA, 312 bp, Zea mays
gagaaggcgcgctggcaagacagactacagggccaggataaggctgattaaccaagacaaaaacaagtacaatacacccaaatacagatttgttgtgcgattttacaacaaggacatcacagcacaaatcatatctgctagtatagcaggtgatatggttcttgcttctgcttactcgcatgagttgccacgatatggtctcgaagttggtctgaccaactatgcagctgcctactgcactggccttctgttggctcgccgtgtgctcaagacccgtggtttagataaggaatatgagggcaatgttgaggc

SEQ ID NO: 7962 - DNA, 310 bp, Zea mays
gaggagcagagggggggggggggcccttctgctgctgttcttgtttccccgctctccaagatgtcgtccccgagcaagcgccgcgagatggaccttatgaagctgatgatgagcgactacaaggtcgagatggtgaacgatgggatgcaggaattcttcgtcgaattcaaggggccggccgaaagtatctaccaaggcggtgtctggaaggttagggtagaactgcctgatgcatatccttacaaatccccgtccatcggcttcatcaacaagatttatcacccaaatgtcgatgagatgtctggctctg

SEQ ID NO: 7963 - DNA, 307 bp, Zea mays
cccacgcgtccgtgaatgcgatccatggctctgcattctccacaatccatgtgacgcccgaggacggtttcagctacgccagttacgaggttatgggcttggatgccactgctctgtcttatggtgaccttgtcaagagggtcctccggtgctttggcccctcagagttttccgttgccgtgaccatcttcggcgggcgtggccatgccgggacatggggaaaggcacttggtgcagaggtctatgactgcaacaacatggtggagcaggagctgcctggaggcgggctcctcgtgtaccagagctt

SEQ ID NO: 7964 - DNA, 309 bp, Zea mays
cttcattaggtgacagaatctcctggaagggtttacatcttgaagtttaagcaagacagcagaaaattcttcttctggatgcaggaaccaaatgctgatgggggatccaagacttgcatgcaagttaatgcctacataaatcgatcattagatgctgaggctgatcttcgagtacctattgaagcagaaatgtctgaagatacggctgatgatgatatctcttccaggttaatgattccattgttgttttacccccccaccctatcaacctgtctgtccatggcaatagaaactgcatgtattaataca

SEQ ID NO: 7965 - DNA, 311 bp, Zea mays
ggcgaggcaaaagcgcaaacgcgaccacagacagagcgcgcttcaaggcctttttttttgagataacaaggaggagaggaggagatggcggtcacgatcacctgggtgaaggcgaggcagatcttcgacagccgcggcaaccccaccgtcgaggtggacgtgggcctcagcgacggcagctacgcgaggggggccgtacccagcggcgcatccactggaatatatgaggccttggagttgagggatggaggatctgattatcttggcaagggtgttcttaaggctgtcagcaacgtaaacaacattattgg

SEQ ID NO: 7966 - DNA, 309 bp, Zea mays
cacaccgccgcaaggactcgcgacggacggagcaacggaggaagcaactacgcggcaccatggtgaacgttccgaaaaccaagaagacctactgtaagaacaaggaatgcaggaagcacaccctgcacaaggttacccagtacaagataggtaaggatagcctttcagctcaagggaagcgacgttatgaccgcaaacagtctggatatggtggtcagacaaagcctgttttccacaagaaggcaaaaacaacaaagaagattgtgctgaagctgcagtgccagagctgcaagcactactctcaacacc

SEQ ID NO: 7967 - DNA, 306 bp, Zea mays
ctcctatccactgcggcctggacgcgtgcgagagacttgaccaagcagcagcagcagggatggcgcctctgaagctgtacgggatgccgctgtcccccaacgtggtgcgcgtggccaccgtgctcaacgagaagggcctcgacttcgagatcgtccccgtcgacctcaccaccggcgcccacaagcagcccgacttcctcgccctcaaccctttcggccagatcccggctctcgtcgacggagacgaagtcctcttcgagtcccgtgcgatcaaccggtacatcgccagcaagtacgcgtcggagg

SEQ ID NO: 7968 - DNA, 306 bp, Zea mays
tgcctttttgcgccttcctggaaaaattggagatcaagaaataactgatgacataaagatgcaatttgtggatgaagttatggaactagtggagctcgacaatctgagggatgccttagttgggctaccaggaatcacagggctttcgacagagcaaagaaaaaggttgacaatagccgtggagctcgttgccaatccatcaatcatatttatggatgaaccaacatcagggcttgatgcaagagctgcagcaattgtcatgagaactgtgcggaacacagttgacactggacggacagttgtttg

SEQ ID NO: 7969 - DNA, 272 bp, Zea mays
tgcatgcatacaagagcaacaagatactggcgcagaggagcaatgcccggcatggatgccttcgctgctgtgtcactactcgccacactctttctggttcgtgcggcagctgcccatcctccggcggcggctgcggacgccatgacgccgacggactattggcgagcggtgcttcctgagaccccgatgccccgagccatactcgacctattgaccacatctacaggtgaggaaggctcaaggaaggtcaccacgtcaaatgggtacaaggc

SEQ ID NO: 7970 - DNA, 274 bp, Zea mays
tgcgacctggcgacgcaccaaccgaggccacaggccaccaccattccttccttgttccttccccagctccgcaggctgctcatcgccctccctcaccgcccccgatccagatccagatccaggggcttgtcatggcatccaaacgtatccgcaaggaattaaaggacttgcaaaaggaccctccaacatcacgcagcgcaggccccgccggcgaggatacgcgccaccggcaggcaaccatcacggggcctcctgatagtccatatgctggagg

SEQ ID NO: 7971 - DNA, 118 bp, Zea mays
cgctccgatcgacctgctccctccccaccaccgagcccatggcggaccagctcaccgacgaccagatcgccgagttcaaggaggccttcagcctcttcgacaaggacggggatggttg

SEQ ID NO: 7972 - DNA, 116 bp, Zea mays
agggcgacctccctccttcgctccttccgcgccgcctcccggccgtcgccgccatggtgaagtactcgcaggagccgggcaaccctaccaagtcggctaaggccatgggcagggat

SEQ ID NO: 7973 - DNA, 129 bp, Zea mays
ggacggtgcggacctaacttctacaccacagaagtcctccgcaagtttgccaggtcacagctcgactacattcttggcaagaacccattgaagatgagctacgttgtgggtttcggaaacaagtacccg

SEQ ID NO: 7974 - DNA, 279 bp, Zea mays
  unsure (1)..(279): unsure at all n locations
ccaatctagaagctcccctctccctccctccctctctctctctctcttcgccgtccgaagctccgcacccaatctaatcgacacctcaccgagatgggccgcaagttcttcgtcggtggcaactggaaatgcaatggaaccacagatcaggtcgagaagattggcaaaaccctgaacgaaggacagggtcccccgtcagaagtcgtcgagggcgntggcagcccnccctaaggcnttcctcccgnggacaagagccagcatcgccaagagttccatgtt

SEQ ID NO: 7975 - DNA, 273 bp, Zea mays
cccacgcgtccgctcaacgcagcatatgattcatggcaggtaaggaacattttggtgccaggagtagctgaccctcatggaaaatggcatagctgtaagcatgatatagaccagtgctctgcatcgcagctacgggtattgcagggattcaggggtgattttctgaaggaagtggcagaactagggaactccgactcgagagggttgttcataaactcatgcttcgtgcactgccagtctgagatacaggagctatggttctcatctgactcc

SEQ ID NO: 7976 - DNA, 120 bp, Zea mays
ctcgtagagtgctcgactgacggagggaacagcggctgcaacggcgggctcatggacgccgctttcgatttcatcataaagaacgggggcatcgataccgaagatgactacccttacaga

SEQ ID NO: 7977 - DNA, 124 bp, Zea mays
caatcctaaaaccatctgcttcagctagccccaagtttagtcggccgatcattcactgaagtagtaatggcctccgtcaacagctggaccctcgagatcgcgtcgccggtggctccgcagcgcc

SEQ ID NO: 7978 - DNA, 128 bp, Zea mays
ccttggaggacgttgtctcggaagctgacatcttcgtgaccaccactggcaacaaggatatcatcatggttgaccacatgaggaagatgaagaacaatgccattgtctgcaacattggccactttgac

SEQ ID NO: 7979 - DNA, 276 bp, Zea mays
  unsure (1)..(276): unsure at all n locations
cctccctcactctcgttccatttccccatctcccagatccaattcgcgagttctccctcctctgcggccatggcgctctctgtggagaagacctcgtctggacgggagtacaaggtcaaggatctctcgcaggcggacttcggccgcctcgagaatgagctggccgaggtcgaaaatcccggcctcatggcgngccgcgccgtagttggcccgtccaagcccttcgccggcgctaggatctcggggtctctccacatgaccatccagaccgccgtc

SEQ ID NO: 7980 - DNA, 113 bp, Zea mays
cgcagtcgcaccgcagccgccggccatggcctgcctcaccgacctcgtcaacctcaacctctcggacaccacagagaagatcatcgccgagtacatatggatcggtggatctg

SEQ ID NO: 7981 - DNA, 120 bp, Zea mays
cccacgcgtccgcccacgcgtccgggacatcactcccatgggtggcttcccccattatggtatcgtgaagggtgactacctgatgatcaagggctgctgtgtgggtccaaagaatagggg

SEQ ID NO: 7982 - DNA, 307 bp, Zea mays
ggcatttcttggaggagacatgtgtgaatccaacatttatcatcaatcatccagagataatgagtccattggcaaagtggcataggtctcgacctggattgactgagaggtttgagctatttgttaacaaacatgaggtgtgcaatgcatacacagagttaaacgatcctgttgtgcagagacaacggtttgaggagcaactaaaggatcgtcaatctggtgatgatgaagctatggccttggacgaaacattctgtgctgcccttgagtatggtctaccaccaacaggtggttggggcttgggaat

SEQ ID NO: 7983 - DNA, 275 bp, Zea mays
gaaacttgtaagagatataggagaccttttgcaaattccccagcacactgaataaagaaatgggtctgttccattccatgactgaatattacatgtccatcacacccgatggccatacggtaacaaaagaaagcaatctgatgcagtcatcttttattcgatgatgctcttaaagaaatgcatgggtcaaatctcaataagcttttgtctggacaaaatccctaggtgattaactaccacccgcttgatggccaaatgtctgttcataaacaagg

SEQ ID NO: 7984 - DNA, 303 bp, Zea mays
aggacatcattgagacagtcaacaaccatcccagtgctgggtggacagcctcacgtaatccttacttttcaaactataccattgcgcaatttaagcacatacttggagtgaaaccagcaccacagaatgcactaagcaatgttcctgtcaaaacttattcaagatcactggaacttccaaaagagtttgacgctagatctgcatggtcccgttgcagcacaattgggaacatacttgatccaggtcactgtggctcttgttgggcttttggtgctgtggagtggcttcaaggcccgtttttgc

SEQ ID NO: 7985 - DNA, 303 bp, Zea mays
cgtagaaggcgcgcgtggatgctcgccgttgcagcttttatcttcgtcgcactagtctgggcttatctgtatcctcccccgcgttacacctctcctgtgagagattggcttcctggcaggctccctgcggaaccagccagggaattgactgatgaggagagggcctcgcgtgttgttttcagacagatcctaacaacacctcctgttcgatctaagaactcaaaaatagctttcatgttcttgactccggggacactgccatttgaaaggttgtgggaaaagttctttgagggccatgaggga

SEQ ID NO: 7986 - DNA, 298 bp, Zea mays
ccacgcgtccgtgacgtggtcgcccacgcgtcgcccacgcgtccggaagcacatgtgtctatggtggtgcacctaagggtccacaaactacgggagtgtagctgaagtggaactgaaattgtcattgcaactcctgactcggttgattgatatgctggaagctggtcacacaaacctacgtagagtgacataccttgtgttggatgaggcggaccggatgctagatatggggtttgagccccaaattcggaaaatagtagcacagatccgcccagacaggcaaaccttgtactggagt

SEQ ID NO: 7987 - DNA, 299 bp, Zea mays
cccacgcgtccgatcatgaaccaccctgggcagattggcaacggctatgccccagtgctggactgccacacctcccacattgctgtcaagtttgctgagctcattaccaagatcgacaggcggtctggcaaggagcttgagaaggagccaaagttcctgaagaacggtgatgctggtatggtgaagatgataccgaccaagcccatggtggtggagacgttctcagcgtatcctccccttggtaggtttgctgtccgtgacatgaggcagacggttgctgttggagttatcaagagtgt

SEQ ID NO: 7988 - DNA, 299 bp, Zea mays
  unsure (1)..(299): unsure at all n locations
tgcagattgtcatcctgcagtttatttacatgccggacttgataaatacggtgtcaacactactcctcaggctacccttctcacgaagaatggagatagaggctgaccacatcgggctcctgctgctcgctgctgctggttacgatccgcgtgtggccccttcggtctatgagaagctaggaaagatcggaggagattcagcactgaataactacctctcgactcacccgtccagcaagaagagggcgcacttnctgtcgcaggccagtgtcatgaacgaggcgctgaaactgtacagg

SEQ ID NO: 7989 - DNA, 298 bp, Zea mays
gtgcatgcatacaagagcaacaagatactggcgcagaggagcaatgcccggcatggatgccttcgctgctgtgtcactactcgccacactctttctggttcgtgcggcagtgcccatcctccggcggcggctgcggacgccatgacgccgacggactattggcgagcggtgcttcctgagaccccgatgccccgagccatactcgacctattgaccacatctacaggtgaggaaggctcaaggaaggtcaccacgtcaaatgggtaccaaggccatgacttaaggacggtcagcacat

SEQ ID NO: 7990 - DNA, 297 bp, Zea mays
ctcagagcctcagagcgccaccaagtcttgcggtcgcgaagagcaacgcaacaagatggtgaagctcgcattcggaagcgtcggcgactccttcagcgtcacctccatcaaggcctacgtggcggagttcatcgccaccctcctcttcgtcttcgccggcgtgggttccgccatcgccttcgggcaactgacgaatggcggcgcgctggaccctgcgggactggtggcgatcgcggtggcgcacgcgctggccctcttcgtgggcgtctccgtggccgcgaacacctccggcggcca

SEQ ID NO: 7991 - DNA, 301 bp, Zea mays
gtggaggactacttcccgaagctggcggacgtggacctgttcctccggatcatctgcgccaaggccaagggcgtcacaagcggtgggacagcctcttcaacgagctgctgtccgagtacgcgctctccggcggcaagcagggcgaccacaactctgaagacttcgtgcacctcttgctgtcgctgcagaaagactacggtctcaccacggataacatcaagggcatacttgtgaacatgttcgaagcagccatcgagacatcattcctggtgctggagtactccatgagcgagctgatgaa

SEQ ID NO: 7992 - DNA, 293 bp, Zea mays
tgagaatttaacataacatcggttccagaaacaaccaaagcgcaacagggtattgcagttcctatcccgcagcagcagcagtgctactactaatgctgattaatgatagaaacgaaacaaacccacgacagatgattaccgacctactactacgacgacgacgaaaagcagcaaatgattagtttttcatgactgacggtgactgaatgtgaagcagactattctagtcctggagatctccctcctcctcgtcctcgtactcgccctcctcgtcggcggtggcgtcctggtac

SEQ ID NO: 7993 - DNA, 295 bp, Zea mays
ccaatctcgccgtcaccacccccaatccagcaaacgcaaacccgatatcgccgccgccgccgccgccgccgcgatgtctcgccgctatgacagccgcacgacgatcttctcgccggaggggcgtctctaccaggtggagtacgcgatggaagcgatcggcaacgccgggtcagccctcgggatcctagcggccgacggcgtggtcctcgtcggcgagaagaaggtgacctccaagctcctccagacctcgcgctccgccgagaagatgtacaagatcgactcccacctggcgtgc

SEQ ID NO: 7994 - DNA, 294 bp, Zea mays
ccagccccgagttctctgccagcgccctcgtctcttctccgaaacagtatcgcgagatgtatgagaggtccattaaggacccggccgggttctggtcggagattgccgagaccttttactggaaggagaagtggaaccccgccgaggtctgctcggagaacctcgatgtcaccaagggacccgtccagatcaactggttcaagggagggaaaaccaacatatgttacaacgctgttgaccgcaacatcgagtctggcaatggcgacaaggttgcaatgtactgggagggtaatg

SEQ ID NO: 7995 - DNA, 291 bp, Zea mays
gaccacacaaaattaacaacacaaacaggatcgatcgagcaacgtacaatggcagctctggccccatccattgtagttcccacagacgccgagctgctgcaggcacaggccgatctatggcgaaacagcctgtgctacctcaaatccatggctctcaagtgcgctactgagctcggcatacccactgccatctacagcctaggcggtgctgcctcgcttcccgacctgatcgcctcactgtccctcccccaggctaagctacctttccttggccgcctcatgcggctgctg

SEQ ID NO: 7996 - DNA, 290 bp, Zea mays
tcaacatctgaagtttatggtgatccacttgagcatcctcaaaccgaggcctactggggcaatgttaacccaattggagtcaggagttgttatgatgagggtaagcgtgtagcagagacgctgatgttcgactatcacaggcagcatggcattgaaatccgaattgccaggattttcaacacctatgggccaaggatgaacattgacgatggccgtgttgttagcaacttcattgctcaggctgtgcgtggcgaaccccttactgtccagaagccaggaacacagactag

SEQ ID NO: 7997 - DNA, 290 bp, Zea mays
cggacgcgtgggacttcttgagcacccagttcgggctgccgttcctgccgccgtccaagtcgagcagcgcggacttcaggcagggcgccaacaactgcgatcacgggcgccacggccatggacgcccccttcttccgctcgctcgggctctccgacaagatctggaacaacgggcccatcagctttcagctgcagtggttccagcagatcgccacctccgtctgcggacagagctgcaagagctacctgggcaactccctgttcgtgttcggcgagttcggcggcaacga

SEQ ID NO: 7998 - DNA, 292 bp, Zea mays
cacgaactagacgagggaagagcgctgaagctgtggaggaaaacgaaggatctccccgtgcttgtgtatgccaggtcgcctgctctccgtccgcatcccgtccctcgcgaaactcggcgctcccaggtgtgcaaaatccatggcttcagacactggcaagaagctcatccagatcgatgtgagctcggacacagtatgcccttggtgctttgtcggcaaaaagaacctcgagaaagcgatggagcaaagcagggacaagtttgacttcgaggtccgctggcatccgttcttt

SEQ ID NO: 7999 - DNA, 293 bp, Zea mays
ccacgcgtccgctcaaggtccaggtggagaagtttgccgactccttcgacatgcctgggttcacgcttgagagcatgaaatacaaggagtagatatgcctctttcatgcgcggcaaggtcctcctgtaccgatgtctttccttgtggtggcgcagggtgccatggcactgcattgccgccacacttacgatgatgatgatgggttatggattttgtctacaatgtcagcaggataggctcacaattgccccctgccctccggtttggtcgcctctcaggttttcatttggtag

SEQ ID NO: 8000 - DNA, 307 bp, Zea mays
acggaagaaattgttccccacccaccctagactcgccgccgtcgcaactcccacccgatccccaaattctccggcggtgatggccagcctgtggcgcgccgtgatggatagcgtcacggctcctccccctcggcgctggacgcggccccaggtagcggcgtcgagttctggcacggcgcagagcgcgctgggtggctaaataagcagggcgagtacatcaagacgtggaggcggcggtggttcgtgctgaagcaggggaggcttttctggttcaaggaccctgcggtgacacgggcctcggtgcccc

SEQ ID NO: 8001 - DNA, 305 bp, Zea mays
cccacgcgtccggaaagaattgctgacgatgatgttattctggtgaaaggcacaaagaacaccagcgcggtctctataatacttaggggcgcaaatgactacatgcttgatgagattgaacggtccttgcatgatgccctgtgcattgtgaagagaaccctggaatcaaatatggttgttgctgggggtggtgcagttgaagctgcgttgtcagtttatctggagaaccttgcaacaaccctgggttctcgggaacaattggcaattgctgaatttgctgagtctttgttaatcataccaaaggt

SEQ ID NO: 8002 - DNA, 303 bp, Zea mays
ccaagctcctgctcaccattccaagaatccttgagcttgctgaagagctgtctatgccacttgctgctgtgaagtactcccgtgggacgttcatctttcctggcgcacagccagccccccacaggagcttctctgaggaagttgctgcacttaaccgctactttggcggcctgaaatctggtggtaatgcttatgtgattggagatccagcaagacctggacagaagtggcacgtcttctacgccactgagtacccagagcaaccaatggttaaccttgagatgtgcatgactggtctggaca

SEQ ID NO: 8003 - DNA, 304 bp, Zea mays
gtagaacctccaggccccccagcccccaggtggtcaagagacagagagagcatggccgctgctcccacggtggtgccgcgcgtgaagctgggctcccaggggctggaggtctcggcgcagggcctcggctgcatgggcatgtccgcctactacggccctcccaagccggagccagacatgatcgcgctcatccaccacgccgtcgccgccggcgtcaccctcctcgacacctccaacgtgtacggcccccacaccaacgagctcctcctcggcagggcgctccgggcggcaggcggggtgcggg

SEQ ID NO: 8004 - DNA, 303 bp, Zea mays
cccacgcgtccgcccacgcgtccggagaggagtttgaacacatcagtgcacctgtgctggtacgtgtcaaaggacccttggagaaggccttggctgaagctggcttgacaactgaaaatgtgcactttgttgaggttgtcggatctggttctcgtgttccagccataatcaagataatcactgatttttttgggaaggagccgagacgaaccatgaatgcaagcgagtgtgttgcgcggggctgtgctctccagtgtgctattctcagccccactttcaaagtgcgggaattccaggttaatg

SEQ ID NO: 8005 - DNA, 305 bp, Zea mays
cccacgcgtccggcgacacccgaccccgccgtcgtgatgaggccggcgctgctcaagtccacggccgagctcctccgccgcagccgcggctacgcctcctcggccaacccggagcggaaggtggccatcctgggcgctgcgggcggcatcgggcagccgctctccctcctcatgaagctcaacccgctcgtctcctccctctccctctatgatatcgccgggacccccggcgtcgcggccgacgtctcccacatcaactcccccgccctggtgaaggggttcatgggggacgaccagctcgggga

SEQ ID NO: 8006 - DNA, 305 bp, Zea mays
  unsure (1)..(305): unsure at all n locations
atatgatggaagttgcagatcctgatgcagttcatgctgtccgtaactttattaagaaggagcttgccgtgcaacttaaagatgatcttcttgcggctgtgaaaagcaacaggagttctgaggcttacacatttaaccatgatagtatggctcgccgtgcattanaaaatacatgccttgcataccttgcgtcattgaatgagccagatttcgttgagcttgcactgcatgagtacaagtctgcgactaacatgacagagcagtttgctgcattagcagcattatcccaaaatccaggccaagtt

SEQ ID NO: 8007 - DNA, 300 bp, Zea mays
cccacgcgtccggttttgatgatgagatgagagctattgttgcaagcaaccttgagggaaggggaatcaagttgcatccagggacaaatctctctgagttgagtaaaacggctgacggaataaaagttgtaactgataaaggagaagagctcattgcagatgttgtcctatttgcgacagggcgcacaccaaactcccagagactgaacttgcaagctgcaggcgttgagattgaccgggttggagccatcaaggttgacgaatattctcgtacttctgctcctagtgtatgggctgtgg

SEQ ID NO: 8008 - DNA, 298 bp, Zea mays
tgcctttgaactgcttcatgagatcaacgaacgtgtccggactgggctatgggttggcgattgtttcatctacaataattcttcatggcgtcttaattactgtgtaggaggagaggtcacaactttgtttcacttggatcggccaatgtatttactaggatatcttgcaaaccaaagccgtgtctatcttattgataagcaatttaatgttgtggggtatactttactccttagtttgatcgaatataaaacacttgtaatgcgtggggatttcgatcgcgcgaatgatgttttatca

SEQ ID NO: 8009 - DNA, 301 bp, Zea mays
ctccgtttgctttgcgcattcatcccacatcaggaaggcgggcaggcgacaatgacgatgatggcgccgcatccgcagccactgccgctgccacagcccccggcgccggcgttcggggacaccacactcaccaaggtgttcgtgggcgggctggcgtgggagacccacaaggacgccctccgcgagcacttcgagcgctacggcgacatcctcgaggccgtcatcatctccgacaagctcaccggccgctccaagggctacggcttcgtgacgttcaaggaggcggacgcggccaagaagg

SEQ ID NO: 8010 - DNA, 299 bp, Zea mays
gaggttgttaatgtcctttgcctttattggtgcaacccatcagaaattgaggaaagatctgaagtcctatttgagaaaaatgagaagcactcaggatcttcagataagatagagagccgactttctcttgacaaaactatggatgccgttctggattcttttgataatctcttctgccgcagatgcttggtttttgattgccgccttcatggttgttcacagaatttggtatttccatgtgagaagcaaccctacagctttgaccctgatgagaacaagaagccatgtggtcatttgtg

SEQ ID NO: 8011 - DNA, 296 bp, Zea mays
  unsure (1)..(296): unsure at all n locations
cggacgcgtgggaaggtcgagaaggagatcaaggaaatggccaagaaaatcaatgacctttgtggtataaaggagtctgatacagggttggctccacctagccagtgggatttggtttcagataaacagatgatgcaagaagaacaaccgttacaagtggcaaggtgtacaaagatcataagccctaatacggatgatgctanatatgttataaatgtataacaaattgcaaagtttgttgttggactgggggataaggtgtctccaactgatatcgaggaagggatgagggtcgg

SEQ ID NO: 8012 - DNA, 297 bp, Zea mays
gcatcatgcatcgagatgtcaagccccataatgtcatgatagatcacgagcttcgcaaacttcggttgatagactggggcttagctgagttttaccatccaggcaaggaatataatgtccgcgttgcatcgaggtatttcaagggacctgaactccttgttgatttacaagactatgattattctttggacatgtggagtcttggttgcatgtttgctggaatgatatttcgcaaggacccattcttttatggccatgacaaccatgaccaacttgtgaagattgcaaaggtccttg

SEQ ID NO: 8013 - DNA, 297 bp, Zea mays
cgcgtttccaacaggccagtcccctcccactcccagtcccatctcgacgacatggccgcagccgcaggccatcaagctctgtgaaggagacgctcccgccggccctcggctccacctcccagccacctcccgtcttcgatggcaccaccaggctgtacatctgctacttctgcccgttcgctcagcgcgcctgggtcaccaggaacttgaagggtttgcaggacaagatggagctggtggccatcgatctgcaggacaaaccggcttggtacaaggacaaggtttacgcacagggca

SEQ ID NO: 8014 - DNA, 184 bp, Zea mays
ctaaagtttagtccaggttttggatgccaaatgggaggactaaacatgagctgattataaaactaattacataaacagtggctaattcgcgaaacaaatctatttggcctaattagtctactattagcacttgtttactgtagcgaaacatgagctaattatagatattatgctaataaattgc

SEQ ID NO: 8015 - DNA, 295 bp, Zea mays
cccacgcgtccgtgaatctagattaacaagagctagaaaaggttgcatgtcgttgccagatgtctcatccttctatgtgaagtctgcaaaaccatcacaagagcgagcttatggaaacagaactgtgagattcatgttatcgcgcatggaaaagcaggcacaaagaccatggccaaaggataggatatgggtgttcaagagtgatccgagattctttggtagtccaatgatggacaccgtgttgaataattccccgcttgacaaggagatggtgcactggctcaagactagacca

SEQ ID NO: 8016 - DNA, 293 bp, Zea mays
ggctgcataggctcgaggaccacatggccgccgtgaaggcactcgcgtggtgcccgttccagagcaacttgctggccaccggcggcggtggcagcgaccgctgcatcaagttctggaacacgcacaccggtgtgtgcctgaactcggttgataccggatcacaggtgtgcgctctgctgtggaacaagaacgagagggagctgctgagctcacatggattcacatagaaccaactcaccttgtggaagtacccatcgatggtgaagatggctgaacttaatggccatacctct

SEQ ID NO: 8017 - DNA, 295 bp, Zea mays
gggcactcaaagaagagaaaattgctgctcgtagtgctatactgccgatgctccaagctgaagaggatgaaagatttgtcaaagagtggaagaagtatcttgaggaggaggcgaggattatgaaagatgttccagggtggaaggttggcgagagtgtgtacaattccgggaaatggatgcccccggccaccggtgagctccgccctgaggtgtggtaagggcctgttgtaggcattgagaatgcaatcatgtcatgagggcatgaataaggctatcagacatgggcatccttctt

SEQ ID NO: 8018 - DNA, 295 bp, Zea mays
atgggagctgatccatggaaggttcttaaccaggcgcgatccaagctccgtcaccacaatgcagctgtacaagtacccataggattagaagaggagtttgagggccttgttgaccttgtagaaatgaaggcttataagttcgagggatctagtggccagaatgtaactgcttctgatgttccattgaatatggaggatttagtcactgagaagcgtcgtgaacttattgaagttgtttctgaagtagatgaccagcttgctgaagcttttctcaatgatgagccaataacagcta

SEQ ID NO: 8019 - DNA, 298 bp, Zea mays
cagcgatggcgatcaagcggaccaaggcggagaagaagatcgcgtacgacaagaagctgtgcagcctgctcgatgagtacaccaaggtgctcatcgccctcgccgacaacgtcggttccaagcagctccaggacatccgccggggcctcaggggcgactcggtggtgctcatggggaagaacacgctcatcaggcgctgcatcaaggtgtacgccgagaagaccggtaaccacacctttgacccgctcatggacctcctagtcggcaacgtaggcctcatcttcaccaagggagacct

SEQ ID NO: 8020 - DNA, 454 bp, Zea mays
gcgtccgcccacgcgtccgctcgtgctaaagtcataaggaaattggcagatgaggtgttctcaattgttggacgggatccacttattgaggtggccattgccctagaaaaggcagcgctgtcagacgaatattttatcaagaggaagctgtatccaaatgtggatttctactctgggctaatttatagggcaatgggattccctacagaattttttcctgtgctgtttgctattcctcgcatgggtggctggctagcgcattggaaagagtcactcgatgatcctgacactaagattataaggccccaacaggtatacaccggcttctggcttaggcactatacccccgtcagagaacgagtgctatcaagccagagtgaggaacttggtcaggcttgcactcagacgcaactaggcgccgcgtgctggttctgcctgtagaagctgacgtata

SEQ ID NO: 8021 - DNA, 426 bp, Zea mays
ggacgtccttgaaggtgatccttatctgaagcagcgtctgcggctgcgtgagtcctacatcaccactctgaacgtgtgccaggcctacaccctgaagcggatacgcatcccgagcttccaggtgagcccgcagccgcccctgtccaaggagttcaccgacgagagtcagccggcggactggtgcagctgaaccagcagagcgagtacgctccaggcctggaggacaccctcatcctgaccatgaagggcatcgccgccggcatgcagaacaccggctaggccaagatcttcggtgtgcaaataacctgtctcccatgagacggtggacgatatgtgtaggcctgtgagcagttagtacaccggcgccagtgtgttctggaggatttctcatgtcagagcctttctcttgtgtgcttgctgtagatg

SEQ ID NO: 8022 - DNA, 460 bp, Zea mays
gggagagattagagggagcgccctgcccaagcaaagagaaaccgcggcgcgagaagatggaggaagggcagacgggcgagcaggatgagagagatcatcagcatccacatcggccaggccgggatccaggtcggcaacgcctgctgggagctctactgcctcgagcacggcatcgagcccgatggcaccatgcccagtgataccacggttggcgtcgcacatgatgccttcaacacgttcttcagcgagaccggttctggcaagcatgtgccgagggccatcttcgtcgaccttgagcccactgtcattgatgaggttcgcactggctcgtagcgccaactcttccacccagagcagctcatctcgggcaaggaagacgcagctaacaactttgcccgtggccactagactgttgggaaggagattgtcgatctatgcctggatcgtgtgcgcaagctgc

SEQ ID NO: 8023 - DNA, 455 bp, Zea mays
gttgaattcggccaattgattcatgattttgatatctatggagatgaagataacccatctccagcctctgaggatccatctatttggtttgagataatgcggttcttcacaaatcctaggaaacctatgattctggctattgcccgtccatatgctgagaagaatatcgcaacgcttgtgaaggcatttggtgaatgccatccgttgagggaacttgctaaccttacattgataatgggtaaccgtgaggctatttccaagatgaacaaaatcagtgcagctgttttgacatcagtgcttacattgattgatgaatacgatttatatggtcaagtggcatacccaaagcatcacaagcactctgaagttcctgatatttatcgtttagcagcaagaacaaagggcgcttttataaatgttgcttactttgaacaatttggtgttaccttgataga

SEQ ID NO: 8024 - DNA, 463 bp, Zea mays
cccacgcgtccgccgacaggacgagactcgcagctagctgacacggccgagaagcagcttgcattgcaggcgtagtacgtacccagcagcagctagcactagcagtccatcggagcgacgatggtgagaaggacggtgctggcggcgctgctggtggccgccgcctcgccggcgggcgcgggcgcactcaaggaggggttctacgactactcctgcccacaggcggagaagatcgtcaaggactacgtgaaggcgcacatcccccacgcgcccgacgtcgcctccaccctgctccgcacccacttccacgactgcttcgtcaggggctgcgacgcgtcagtgctgctcaacgccacgggcggcagcgaggcggagaaggacgcggcgcccaacctgacgctgcgggcttcggcttcatcgaccgcatcaaggcgctgctcgagaaggagtgccccggcgtggt

SEQ ID NO: 8025 - DNA, 454 bp, Zea mays
cagccctccagcaagacttcagtcgcctgccccagcctggctgccgcgccctccacaagcacaaacgccggcctccgggcccgtccctaggccagaggcacccctaggccgctagcttccaccgccgacgcccacagaaaccgtaggcgccaccaggccaccacgagatccctgccgtgacggagaatggaggccgccgcggccgtcctccccacgctggtgccctccgggagcgcggtggtggtgctcctcgcctacctcgggtatctcgccgccgctggagccatcctcccagggaagctcgtcgacggagccctactcccggactcctctcggctccactatcgctgcaacggtttgctctcgctcctgctgctgctgggactctcggcgttcggtgtctacatggggtggatgtctccacggttgtagctgacatgggactcgaacttct

SEQ ID NO: 8026 - DNA, 462 bp, Zea mays
  unsure (1)..(462): unsure at all n locations
tgctgacccgcgtcatggccgctatctcacagcatctgccatgttccgtggaaagatgagcaccaaggaggtggacgagcaaatgatcaatgtccagaacaagaactcgtcctacttcgtggagtggatccccaacaatgtgaagtccagtgtttgtgatatcccgccgcgcggcctctccatggcctccaccttcattggcaattccacctccatccaggagatgttccgccgtgtgagcgagcagttcactgctatgttcaggaggaaagctttcttgcattggtacactggcgagggcatggatgagatggagttcaccgaagctgagagcaacatgaacgatctggtgtctgagtaccagcagtaccaggatgccactgccgatgaggaggagtacgangacgaggaggangtccatgacgagtaaggtgatcttggacgctgctgcatattgtaccg

SEQ ID NO: 8027 - DNA, 431 bp, Zea mays
cttccgccgcgcttcgccctctcgctccagccgcttcacagcgccgccgctcgcctctccgaccgccgcgagaatgccgttcaagaggttcgtggagatcgggcgcgtggccctggtgaactacggcaaagactatggccgcctcgtcgtcatcgtcgatgtggtcgaccagaacagggcacttgtggacgcccctgatatggtcaggtgccagattaacttcaaacggctctcacttactgacatcaagattgacatcaaacgcgttcccaagaagtcaaccctgatcaaggctatggaggaagctgatgtgaagacgaatgggaaaacagctcatggggcaagaagctgattgtccagaagaggagggctgcgctcagtgactttgacaggttcaaggtcatgctggcaaggatcaagaggggtggtgc

SEQ ID NO: 8028 - DNA, 290 bp, Zea mays
gctgcaaggatcacgccagctgctgcccgccggctaccctgtctgcaacgtcagagctggaacttgctcggtgagcaagaacagcccactgagcgtcaaggccttgaagcgcaccctcgccaagctgagcaccgcatgaggacctcgatctgggactgcccagtgcttttctgactcaccaagagcaagatttcatagattatctatatgtttgtataagtactgttaccgtcccatgaatccgctgtaaataactagtgcctcttattaaaaggataatattatttgtc

SEQ ID NO: 8029 - DNA, 444 bp, Zea mays
gcagaaacgagagggcaggagcagccgcagtcccggcgatcccgcgccggtcgccctcacacctcctcgtcactgccttcgtttctctttccaacaatcaagatgagccgtggcggtacgcgggtggtggtcaaagttctctgggttacctctttggaagcggtgagccccccaaaccagcagtggcaccaccagctgtaagtgctccacctgctgctgcagtgctccacctgctgagaaaccacctgctgcaaagcctgatggcaccagtcagattgctgctggggttacagccaaaccaataactatcacagggctgacggtcagaacaccggcaacttccttacggaccgcccttcgaccaaggtccacgctgctcctggcggtggctcttcgctgggatacctgttggtggcactgaatgcgtcacaagctatcaccccc

SEQ ID NO: 8030 - DNA, 453 bp, Zea mays
cccacgcgtccggcaaagggcctgatgaaggcggccataaggagcgagaaccccgtggtgctgtttgagcacgtcctcttgtacaacctgaaggagaaaatccccgacgaggagtacatctgctgcctggaggaggcggagatggtgcggccaggtgagcacgtgaccatcctcacgtactcccgcatgaggtaccacgtgatgcaggctgccaagacgctggtgaacaaggggtacgaccccgaggtcatcgacatcaggtcgctgaagccgttcgacctgcacacgatcgggaactcgatcaagaagacccaccgcgtgctgatcgtggaggagtgcatgcggacgggcggcatcggcgccacctgcggtcggccatcatcgacaacttctgggactaggtggatcgccccatcatgttggtgtcgtcgcaggacgtgccgaccccgtacg

SEQ ID NO: 8031 - DNA, 452 bp, Zea mays
gaaacaatcaaccagcaacactcttctcgtataacataatacagcgaaggtaactcacatggcaacttccatgggttgtctcgtcttgctctgccttgtttcttctctccttcccagtgccgtcctttgccacccatggggtgctctgttcccacagttctatgaccattcgtgccccaaggcgaaggagattgtgcagtccattgtggcacaggctgtggccaaggagaccaggatggcggcatctttggtcagactgcatttccatgactgctttgtcaagggctgcgatgcttcggtgctgttggacaacagcagcagcatagttagtgagaaagggtccaacccgaacaggaactccctcagggggtttgaggtgatcgaccagattaaggctgctcttgaggctgcctgcccaggcacagtctcctgtgcgacattgttgcccttgg

SEQ ID NO: 8032 - DNA, 442 bp, Zea mays
ggtgttcccgaatagggacaatgactgcgcgctatggtgcttgagcggcagattgctcggctgcttcgggcagatgctggggcgctcgattccccagcaaaggttatccgctgcatgcccctatttgccgagcacttcaggtgggggcgccaggaggatgcacacgagttcctccgctatgtcgtagatgcctgtcacactgctgacctccgcatgcgcaaggggttacgtgcagcagctgccagtggaaactgtggtgaggatgtccgggggcagggggtttgtctggttatgagggagacatttggcggggcattactgagtcaagtgaagtgccttgagtgcaagggagaatctaacaagactgatgagataatggatatcagtctcgatctacctgggagcagttctgttgctgatgcctttcccgttctttcatccg

SEQ ID NO: 8033 - DNA, 451 bp, Zea mays
gttcggagcgcacacacacacaaccagatctcccccaaatccacccgtcggcacctccgcttcaagatgcagatctttgtgaaaaccctgactggcaagactatcaccctcgaggtggagtcgtctgacaccattgacaacgttaaggccaagatccaggacaaggagggcatccccccagaccagcagcggctcatctttgctggcaaacagcttgaggacgggcgcacgcttgctgactacaacatccagaaggagagcaccctccaccttgtgctccgtctcaggggaggcatgcagatctttgtgaaaaccctgaccggcaagactatcaccctcgaggtggagtcctctgacaccattgacaacgtcaaggccaagatccaggacaaggagggcatccctccagaccagcagcggctcatctttgctgggaagcagcttgaggacg

SEQ ID NO: 8034 - DNA, 446 bp, Zea mays
ccccttgtttctttgagaaaattcgcccgcgagatctttagtttcagaccccgtgtggattagtcgctgtcacgatcgatgcggggcgccaattgcggtggccaccacctccaatccactccccgcggtggcctcgccgagctgttcttgctccgtcctccctccaactccaagatttgtttcgcacccgattcctgagcttccgcggcgcttcttgctgaaaagaaagctccgagttcttcagttctggatcgatagagaggcggttcctttgcgggctctgaggttcagctctcgctcttgatttgtctcatcgacgcatcagttgggctgcaggcttagagctggaaggaataatttgactagagaaatggggcagtgttgtagcagagctcccgccccggactcctggacgggaggcaccaatggttatggctattctaacc

SEQ ID NO: 8035 - DNA, 452 bp, Zea mays
ctccctacctcgccgtcgccgtcgcatctgccatgggggcgtacaagtacgtctcggagttatggagaaggaagcaatccgacgtgatgcggttcgttcaacgcgtgcgctgttgggagtacaggcagcagccggccatcgtccgcctcacaaggcccacccgccccgacaaggcccgccgcctcggcttcaaggccaagcaggggtatgttgtttaccgcgtccgtgtgaggcgtggtggcaggaagaggcctgtgccgaagggtattgtctatggcaagcccaagcaccagggtatcacccagctcaagttccagaggaacaagagatctgttgctgaggaacgggctggacgaaagcttggtggactcagggttctcaactcctactgggtgaatgaggatagcacctacaagtactttgagatcatcctggttgatgtggccacactg

SEQ ID NO: 8036 - DNA, 441 bp, Zea mays
cccacgcgtccgtgtcattccgcttgcttgattgttccagatattcgcagttgaccgggtcctcggagcacgatgaagtttgttgctgcctacttgcttgctgtcctcgctgggaacgccagcccctccgctgaggatttgactgccattctggagtcagttggctgtgaagttgacaatgaaaggatggaactcctgctgtcccaactgagcggtaaggacatcaccgagctcattgccgcgggcagggagaagtttgcttcagtcccatgtggtggcggtggtgtcgctgttgcggcagcttcacctgctgctggcggactgctcctacagctgaggcaaagaaagaagagaaggtggaagagaaggaagaaagcgatgatgatatgggcttcagcctcttcgactaggctgcacagtcatcacagtattgtttcgggc

SEQ ID NO: 8037 - DNA, 184 bp, Zea mays
gcctcagcgcatcgcccgccgcgacctcatcgatcaccttcagctttcaatcatggcggacgtcgatgtcgaaccggagttgccgccggatctcccaagaagaggacgttccgcatgtacagctaccgcgtcgtcgacctaaatgggctccccgacatgtcaacggacgactttgtcagccttt

SEQ ID NO: 8038 - DNA, 450 bp, Zea mays
gctatagcgccccagagtttgcaatgtctggcatttatactgtaaagagcgatgtatacagttttggagtggtaatgttagagctattgacagggcggaagcacgtagacagttccagagagaggtcagaacagtctcttgttagatgggctacccctcaacttcatgatattgatgcacttgctaggatggttgatccagcattaaacggaatgtacccagctaaatcactctctcgttttgcagacgtaattgcactctgcgttcagcctgagccagagttccgcccacccatgtcagaggttgtccagcaacttgtgcgcttgatgcagagggctagcatcgtgaggcggcaatcaggagaagagctagggttttcatacagagtcccagaacgagaaggagacctgagagacatttccttatgagcaagtgcgtccacgatagaag

SEQ ID NO: 8039 - DNA, 451 bp, Zea mays
cccacgcgtccgcccacgcgtccgcaactcgccgtctgccttctgcgcctccatttcggcctctgtcccttgcaagttcaatctcacctccaaccatgggtaaagagaagtcccacatcaacattgtggttattggccatgtcgactctggcaagtcgaccaccacaggacaccttatctacaagcttggaggcattgacaagcgtgtgatcgagaggtttgagaaggaggctgctgaaatgaataagcggtccttcaagtacgcgtgggtgctcgacaagctcaaggctgagcgtgagataggtatcaccattgatattgctctgtggaagtttgagaccaccaagtactactgcacggtcattgatgcccctggacaccgtgacttcatcaagaacatgatcactggtacctcccaggctgactgtgctgtccttatcattgactccac

SEQ ID NO: 8040 - DNA, 445 bp, Zea mays
acctcctctgctctcccccacctcccggtccggcagcagagagcgggggtgcagagagatcgagatccggaggccgcgagtgggagcgccaccaccagcgactgcggcaatggcgggcacggtgacggtcccggggtcgtcgacccctccacgccgctgctcaaggacgagctcgacatcgtgatcccgacgatccgcaacctcgacttcctggagatgtggcggcccttcttccagccctaccacctcatcatcgtgcaggacggcgacccgaccaagaccatcaaggtgcccgatggcttcgactacgagctctacaaccgcaacgacatcaaccgcatcctcgggcccaaggcctcctgcatctcattcaaggactccgcctgccgctgcttcggctacatggtctccaagaagaagtacatctacaccatcgacgacgact

SEQ ID NO: 8041 - DNA, 441 bp, Zea mays
atattacaccagaaaccacaataaagacgttcattgaacaattcgatactgctatgaagctcaggtctgatcgagaagcctatgatgatttccgttcatttcaacaaaggccacaagtcctgtctggtcttctgtttgaggagcaatttgcaaatgtttatacaataaatatgttccagaaattccaggatcagttgaagcagctgatgaatgtgaattgcactgaagtcagtaggaatggttcaatagtgacatacacggtgacagtaattggaaaggagaggaagtttgactacagagtgatgtataacagtgctgagaaagaagtgtggtgcatctgcaggtcattccagtttaaaggtattttatgtagccatgctcttgctgtcttgaagcaagagcttgtgatgctaatacctcccaaatatattcttgatcgat

SEQ ID NO: 8042 - DNA, 415 bp, Zea mays
gtgtcctgcatcgcggcggagatgggcgcctccaccacgccgcacgcccggggcgggctgcttctgctgctgctcgctccgctcgccgcggcgcggacagcatgtcgatggtctcctacggcgagcggagagggaggaggcgcggcggatgtacgccgagtggatggcggcgcacggccggacctacaacgccgtcggcgaggaggagcgcaggttcgaggtgttcagggacaagctccgctacgtcgacgcccacaacgccgccgccgacggcggcgtccagtggttccggctcgggctcaaccggttcgccgacctcagcaacgacgagtagcgcggcacctagctcggcgtcgagagcaggccgcagagggagaggaggtcggtgacaggtagctgtgggcgacaacgagga

SEQ ID NO: 8043 - DNA, 443 bp, Zea mays
catcttccattgttgctttgctttgctttgcttaccggcaaccatggccagcactcgtgcagcagcaactctccttttgctcctcgcgctcgccggcacctcgtcggcgcactgtccacgggcttctactcctactcgtgccccggcgtgtacggcgccgtcaagtcggtgatgcagtccgccatcgccagggagaagcgcatgggggcctccatcctccgcctcttcttccacgactgcttcgtccagggctgcgacgcgtcgctgctgctggacgacacgcccagcttccagggcgagaagatggccaaccctaacaacggctccgtcgagggattcgaggtcatcgacgccgtcaagtccgccgtcgaaaagctgtgccccggcgtcgtctcctgcgccgacatcctcgccatcgccgccaaggacagcgtcgtcatcct

SEQ ID NO: 8044 - DNA, 441 bp, Zea mays
caagcgcggcatcaacagcttcttcaactggtactacttcaccttcacggccgccatgatgatctccgccaccgtcatcatctacgtgcagagcaacgtgagctggcccatcgggctcgggcatccccacggcactcatgttcctggcatgcgtgctcttcttcatgggcacgcgcctatacgtgcgggtgacgcccgatgggagccccttcaccagcgtcgtgcaggtgctatcagccgcgctcaagaagcggtcgctgaagcagcccaaggacccgaagcaggacctcttcgacccgccgcacaccagcgccatcgtcaccaagttggcgcacacggaccagttccgctgcctcgacaaggcggccatcgtggcatccccggacgaggtgcgttccggcggcggcgcgccgcggacccctggaggctctgcagcgtgca

SEQ ID NO: 8045 - DNA, 451 bp, Zea mays
cccacgcgtccgggcggagtgcaggtcgccgtcaaaaacttgctcaacaacagggggcaggcagaacgggaattcaaggttgaggtggaagctatcgggcgagtgcgacacaagaaccttgttcggttgttaggatactgcgctgaaggcaaccaaaggatgcttgtgtatgagtacgttaataatggaaacttggagcaatggctccatggggatgttggccctgtgagccctcttacatgggatatcagaatgaagattattctgggaacagcaaaagggttaatgtatttgcacgagggacttgagccaaaggttgttcaccgtgatgtcaagtcgagcaatattcttcttgacaagcattggaatgcatagctttctgattttgggctagcgagacttttgggttcagaaaggagttatgtcacaaccagggtcatggggacgtttg

SEQ ID NO: 8046 - DNA, 237 bp, Zea mays
cccacgcgtccgaccggcaccagtccaccacctcctgccaccgcacggccccaaccaaccacaccgcagcgcgcagatggcgggcaacggcgccatcgtggagagcgacccgctgaactggagcgcagcggcggcggagctggccgggagccacctggacgaggtgaagcgcatggtggcgcgagcccgacagcccgtagtgaagatcgaaggctccaccctccggatcggccaggt

SEQ ID NO: 8047 - DNA, 300 bp, Zea mays
gcagcgagaagaagtggccgggatcgtcggaggacggccaacgacgatgccgcggtggtcaccaactccgggtacgagaacgtgcgaggaacaacgagcaggcggtgctcaaaacggtggcgcaacagcccgtcagcgtcggcatcgatgcctccggcaggaacttccagttctacagcggcggcgtcttcgatgggccctgcggcaccagctggaccacggggtagctggcgtcggctacgggacggccggcaagggccatgactacatcatcgtcaagaactcggtggggcccagctg

SEQ ID NO: 8048 - DNA, 317 bp, Zea mays
cccacgcgtccggtgcctggcaagtagcaaactcgagctgtctagtcctcggatcgcgaatcttccacagagaggcagaccgcaagactcggttccagctcctcatctcgcgcacgggggtcgcctgaggtcacagagaccatggtgaaggcagttgcatgtctcggcggcaatgatgtccagggcaccatcttcttttcacaggagggggatggtccgaccaccgtgactggaagtaatctctggctcaagcccagggtccatgggttccatgtgcacgcgcttggcgacaccaacaacggctgcatgtcgactgg

SEQ ID NO: 8049 - DNA, 320 bp, Zea mays
aggaggaagaaaatgaagaggacaaggagatgactctggaggaatttgagaaaataagataggagaagaggaaagcagtacttggaatggaggctgaggagaggaaagttgaagttgacaagggattgcagtctctgcagccactttcagacaagaaagaaaatgatggagttttcattaagctgggttctgacaaggataagaagaaggagaatgctgagcgtgatgagcgtgccaagaagtcggtgagcatcgacgagttcctgaaacctgctgaaggagcaaggtactatggcggccgtggccgtggaaggggccgt

SEQ ID NO: 8050 - DNA, 318 bp, Zea mays
gaagaagataaaggctagcttcgccaacgtgggcgcctattcaaacgaagataacttcatacgaggtgaccctgagggtgttatcgagtggatcagcggtgaagccgaagcttttgaggagattttaagtgatcgtggggatgtctgcgtgttctctggtgcgagaggagtttcagccatcttggagatggcaggttgcaatcatgttaaaaccttggcccaggccgaagctgccctctccgtggatgacacaaaagatccctcggccgaagcaagtttaatgggcggaaaatttttcactgacatctgagaaaatgg

SEQ ID NO: 8051 - DNA, 290 bp, Zea mays
gacgcgtcgcctcctcccttcacccaccccgcagccgccctcgcgtccgtccgtccgtccgttattagggttcggtcgccgccatggcgatcctctcggctctcggcaccgaagtgctcgtccccgttcgcggcgtcatcggcatcggcttcgccgtcgtgcagtgggtggtcgtgtcgcgcgttaagctctccccgggcgctgccggcggtggcggccgcaaagccgggtaaggcgagtccctcatcgaggaagaggaaggggtcaacgaccaaaacgtcgtcgtcaag

SEQ ID NO: 8052 - DNA, 320 bp, Zea mays
accaccggagcgcggaggaggcacaggcgccgatctagagacgatggccgccgcgggctcctcgccgtccttgtcctcctcgagtaagcgactggacaggaaggtggccctcgtcagtggtggcgccaccggcatcggcgaggccatcgttcggctgttcatggagcacggcgccaaggtgtgcatcgcggacatccaggatgaggccgggcagcaggtgcgcgacgccgtgggaggtgacgcgcagggcgccatgttcgtccagtgcgacgtgacgtcggaggaggacgtgagcagcgccgtggacggtgcagcggacg

SEQ ID NO: 8053 - DNA, 315 bp, Zea mays
tgctcatcgagcacgagaacaaggacggcgacgtggtgcaggcggacatcatgcagagcaactccggccactgggagcccatgcacgagtcctggggctccatctggaggatcgaccccaaccgcccgctccgtggccccttctccatgcgcatcaccaacgagtccggcaggcagctggtggccaagaacgtcatcccggccaactacatccccgacgtcgagtaccggtccttcgtccagtagtaatgatcgacgtcggtcattgcttgccggttattaagcgtttagttgtttcttgtttatttaattagtg

SEQ ID NO: 8054 - DNA, 308 bp, Zea mays
gacgagacgagttaccatctcatcccaactccggaacgaacaagttaccatctcatcccaactccgcctcgaccgggtgtcgtcggactcggatccgcccgaccaccccgcgccgccgcagatcaaagaagatggcagctgtcgacacattcctgttcacctcggagtctgtgaacgagggacaccctgacaagctctgtgaccaggtgtcagatgccgttcttgacgcttgccttgctgaggaccctgacagcaaggttgcttgtgagacctgcaccaagaccaacatggtcatggtgtttggtgag

SEQ ID NO: 8055 - DNA, 315 bp, Zea mays
cccacgcgtccgcatccgcacctctctccatctccctgctcctccgcctccttcttgatccagccaagccagggatcgccatgtcggactcggaggagcaccacttcgaatcgaaggccgacgccggagcgtccaagacctacccgcagcaggctggcaccgtccgtaagaacggcttcatcgtcatcaagaaccgcccctgcaaggttgtggaggtttctacctcaaagactggtaagcatggccatgccaaatgccactttgttgccatagacatattcaacgggaaaaagcttgaagatattgttccttcat

SEQ ID NO: 8056 - DNA, 315 bp, Zea mays
ggcactttcatgtgtgccctctgcgttcgagatcggtgtcagctggcaccgtcccagttcgccatggcggaggaccggagccccaagcccatccactgcaaagcggcggtgtgccgagccgccggcgagccagtcaccatcgaggagatcgtcgtcgacccgccgaaagcgtacgagatgcgcatccgggtcatgtgcacctcagtctgccacaccgatatcaccttctggaaagctaaggtggcaccggtgtttccaagaatactagggcatgaggcgtacggggtagtggagatcgtgggggagcacgtggag

SEQ ID NO: 8057 - DNA, 311 bp, Zea mays
gtggagtcctctgaggacgagccatgctcaggcgacacagatgcgacgacagacccagggcaggagcacagctcgcgcctggccgaccgcgagctcaaggagatgctgctgaagaagtacagcggctgcctgagccggctgcggtccgagttcctgaagaagaggaagaaagggaagctgcccaaggacgctcggtcggcgctgatggactggtggaacacgcagtaccgctggccgtaccgtacggaggaggataaggttaggctggcggacatgactgggctggacccgaagcaggtcgacaagtggtt

SEQ ID NO: 8058 - DNA, 314 bp, Zea mays
ggagcctagtgatgtgaagccagataacagtagatatgatgcacaaattagtgtctttggagctcagcttcaaaagaaactggagcagtcaagaatcttcatggatggatctggggctcttggatgtgaattcttgaagaaccttgcgttaatgggtatttcttgcagtcaaaacgggaagctgactgtgacagatgatgatgttatagagaaaagcaatctcagtcgccagtttctcttccgtgactggaacattggacagcccaagtccacagttgctgcaagtgctgctatgacaattagtcccgagcttc

SEQ ID NO: 8059 - DNA, 312 bp, Zea mays
ctgacgcgtgggcggacgcgtgggcggctccgtcgtcgcgtgccatcctagggtttctttccccgtcggcgcctccccagatttggccgccgccgccgctgacgcaggttgtcctatatggcgcccgctgtagaagccgtgaaggagacaggcaccttccagaaggttcctgccttgaacgaaaggatactgtcatccatgtccaggaggtctgttgctgcacacccttggcatggtctggagataggtcctggtgctccaaccatattcaactgcgtcattgagataccaaggggcagcaaggttaaatat

SEQ ID NO: 8060 - DNA, 318 bp, Zea mays
cccacgcgtccgctccacaccagcacccgccgccgccgcctcttcccttgcgcacctgctgctgtgcggatcggtgaggcggaggagtaggatggcgagcgcggccggaagcggagcacgcgggggaaggggagtggcttaaggtatcccagctcaggcccatggtggaagcgcaggaccccaacgccaaggcagtggacaacctgacgctgcgtcggatcctgcgcgcgcacgaccacgacgtggacaaggcctccgccgagttcctcaagttcctcaagtggcggagggatgcggcgcccggcggctccgtgccgg

SEQ ID NO: 8061 - DNA, 308 bp, Zea mays
ccacgcgtccggtagcagtagctgcattgcgttattggggtagtagtgtggcagtgttggactgctggtcatcaggtcatggcttcttcttcttttagttccttgtcagtgatggtgctcttgtgcctagcggcggcggcggtggcctcggcgcaactgtcgccgacattctactccaggtcgtgtcccagagctctggccaccatcaaggccgccgtgacggccgcggttgcgcaggaggctcgcatgggggcctccctgctcaggctccacttccatgactgctttgtccaaggttgcgatgggtc

SEQ ID NO: 8062 - DNA, 309 bp, Zea mays
cccactcgtccgcccacgcgtccgctctccttcccggtctcctccgcccgttgccttcgtcccctccatctccggctgcgtcgccggcgagcccgacaccgcgaatcggatccgccgacaaggtgagatggaagagatggggctcacgttcaccaagctgttcagccggctgttcgccaagaaggagatgcggatcctgatggtgggactcgacgccgccggaaagaccaccatcctctacaagctgaagctcggcgagatcgtcaccaccatccccaccatcggattcaatgttgaaactgtggagta

SEQ ID NO: 8063 - DNA, 308 bp, Zea mays
cgtcggcgtgtggcagcacgaccgcgtcgagatcattgccaacgaccagggtaaccgcaccacgccctcgtacgtcgccttcaccgactccgagcgcctcatcggagatgcggccaagaaccaggtcgccatgaaccccatcaacaccgtctttgatgccaagcgtctcatcggcaggaggttcagtgatgcgtctgtccagagtgatatcaagttgtggcccttcaaggtcatttctgggcctggtgagaagccaatgattgttgtccagcacaagggtgaggagaagcagtttgcagctgaagaga

SEQ ID NO: 8064 - DNA, 309 bp, Zea mays
cccacgcgtccgcccactcgtccgcccacgcgtccggacttgtacctcttcgaatcacgcgcaatctgcaagtacgctgctcgcaaaaacaagccagagctgttgatggaaggaaacctcgaggaggcagcaatggtggatgtttggatcgatgtggaggctaaccagtacaccgctgcactgaatcccatcctcttccaggtcctcatcagtccgatgcttgggggaaccaccgaccagaaagttgtggatgagaaccttgagaagctgaagaaggtgctagaggtgtacgaggcacgcctgaccaag

SEQ ID NO: 8065 - DNA, 308 bp, Zea mays
agtcggctgccgcagactggtagtagccggcgcgccgtcaccgtatcctcaggtcagcggcgagcagaaaccacaccactctactgacgcccgacgagcagtgtaacattttccttcagccatgggtaaggagaagactcacatcaacattgtggtcattggccatgtcgactctggcaagtcgaccaccactggccacctggtgtacaagcttggaggtattgacaagcgagtgattgagaggttcgagaaagaggctgccgagatgaacaagcggtcattcaagtatgcgtgggtgcttgacaagc

SEQ ID NO: 8066 - DNA, 300 bp, Zea mays
ctgcggatttctttttctgcacataaggatttaaacatcaagtttcagtcaaaccgcagcagggattataataatccatatcttccagttagttattctgccatggatggtacattgcagcctgctgttggagctgacggaaggaaagtggaggctcaaggcaatgttcttcttgcatcaattgagaatatgcaatatgctgtttctgtagacgtgcttcatactgtgttctcatcatctggtacagtccagaaaattgctatttttgagaagaatgggggaacacaagctttgattcag

SEQ ID NO: 8067 - DNA, 227 bp, Zea mays
cttgtgaccctccctcagccgcgtcggtcgcatcctacgatccaaagctctctctgctcgcagccatggcgaagaactacccgaccgtgagcgccgagtacagcgaggctgtggagaaggccaggcgcaagctccgagccctcatcgccgagaagagctgcgccccgctcatgctccgcctcgcgtggcactccgcggggacgttcgacgtgtcgtcgaggaccggc

SEQ ID NO: 8068 - DNA, 228 bp, Zea mays
atctgcttccagaaccccccgccgccgctgcgccctcctctcggtcctgccgtccgtcgaggtaaaaggacagcatggtgagggtcagcgtgctcaatgatgctctcaagtccatgtacaatgctgaaaagatagggaaacgtcaggtcatgatcaggccgtcatccaaggtgatcatcaagttcctgacggtcatgcagcgccatggttacattggcgagttcgagt

SEQ ID NO: 8069 - DNA, 226 bp, Zea mays
cccacacgtccgccaccgtccgtgatgatgggtgctttattgaaaaaatatctgattttaaagggcgatatgtcaaagaagctgacaaggatatcatcagtgctgttaaggataaaggaagacttgttagtaaagggagcattgaacactcttatccattttgttggcgatcgggtactcctcttatttatcgggctgttccaagctggtttgtcaaggttgagaa

SEQ ID NO: 8070 - DNA, 94 bp, Zea mays
gcggcctctccaccgtcatcgccaagcccaacggcgcgcagggcgacttcctatcctcctccctcggcaggtggcagaaccgcggctccaaccc

SEQ ID NO: 8071 - DNA, 183 bp, Zea mays
cggacgctggagcgaagacctacccattcgccaagccctcgcgagaagtccccgtcatcctcggtgagtggtgggatgcgaacccgatcgacgtcatccgggaggcgcagaggaccggcggcggtcccaacgtctccgacgcgttcagcagcaacgggcaaacccgggaaccgggacaaaagg

SEQ ID NO: 8072 - DNA, 228 bp, Zea mays
gataatttatggagtgcatgacgaagcgaaggacaaagcttttgagttggagttgagctggatctgtgatgaatcgaaccgtcagcatcagaaggttccaaatgaactgttggagcaggccaaatctgctgctcaggcagctcttgaggagatggatgctgactaagaaacaggacgatttgcccagacttggtgtttttggtgctgttgaaatctccgatccctttg

SEQ ID NO: 8073 - DNA, 176 bp, Zea mays
tgaagaagcatttgaagaggctcaatgcccccaagcattggatgctggacaagcttggcggagcttttgctcccaagccatcttctggacctcacaagtctagggagtgcctgccactgatcctcatcatcaggaacaggctcaagtatgctcttacatatcgcgggggggcaccc

SEQ ID NO: 8074 - DNA, 65 bp, Zea mays
acacgagacgagagaagaatgagcaaggtttttgttcgcagctatttttgtccaatgatattgat

SEQ ID NO: 8075 - DNA, 220 bp, Zea mays
cccacgcgtccgaccagatccgcaccgctcttgaagagcattttggatcatgtggagatatcactcggatttcaattccaaaggattatgacactggtgtaagcaaaggaatggcgtacatggatttcaaggacccagattccttgaataaagcatacgagttgaatggaaccgaccttggcttcatcgacatacaagctgtagccaccaaggtcggtgg

SEQ ID NO: 8076 - DNA, 217 bp, Zea mays
cgacgcgtgtgcctggatcaggcgtgccagctcgggaatcaggggtttcacacatagctccgtcgatttgaatttgatgtactaatggcgtctaagggtggcaaaaagtctagcagtagtcgttctatgatgtatgaagctccccttggctacagcattgaggacgttcgacctgccggacgctgtaagaagttccagtctgctgcttactccaact

SEQ ID NO: 8077 - DNA, 219 bp, Zea mays
cccacgcgtccgcggattcgtcggtggcacggagggactgtttgcaaacaagacgttggagatcacagacgatgttcttgcttcctataagaaccaaggtggtttcgatttgctcggtaggagtatcgatcagatccgcactactaagcaagtgaatgctgcaatgacaacatgccacagtccgaacttggatgggttggtcatcattggaggtgtgac

SEQ ID NO: 8078 - DNA, 144 bp, Zea mays
aacgaaagaagtcgaggatgtcttgcagctgcggatcaagctgcaactgcggatcaagctgcaactgcggcaagatgtaccctgacctggaggagaagagcggcgggggcgctcaggccagccccgccgccgatcgtcctcggc

SEQ ID NO: 8079 - DNA, 240 bp, Zea mays
atcctttctccatcacttcagcacctggagatgactacctcagtgtccacatccggacaaacggtgactggacacaggagctcaagcgcatatttgtggagaactacttctcgccgcatctcaacagaagagcttcgtttagcgagctaggtgcggcagaaccaagaagcttgccaaaattactcgtagatggtccctatggtgcccctgcgcaggattttagaaactacgacgttctac

SEQ ID NO: 8080 - DNA, 306 bp, Zea mays
cccacgcgtccgtccgtctcgtctcgtctcgcctctcctctccttttcccccctccctgcacagcgccgctcaccgtcaccggaccacagcagcgatcgatggctgaggtacacaacgagcggcccgtggggatggtgggcggcgtccgggacgcgccggtgggccgcgagaacgacctcgaggccatcgagctcgcgcgcttcgcggtcgccgagcacaacagcaagaccaacgcgatgctggaattcgagcgctggtggtgaaggggaggcaccaggtcgtggccgggaccctgcaccacttca

SEQ ID NO: 8081 - DNA, 299 bp, Zea mays
caatcaaccagcaacactcttctcttataacatagtacagcgaaggtaactcacatggcaacttccatgggttgtctcgtcttgctctgccttgtttcttctctccttcccagtgccgtccttggccacccatggggtggcttgttcccacagttctatgaccattcgtgccccaaggcgaaggagattgtgcagtccattgtggcacaggctgtggccaaggagaccaggatggcggcatctttacttgcggactgcattgccatgactgctttgtcaagggctgcgatgcttcggtg

SEQ ID NO: 8082 - DNA, 295 bp, Zea mays
  unsure (1)..(295): unsure at all n locations
ggaacatcgtcgggcagagcttgtaccagctggccgtgcttggagctctcatgtttggcggggaacgtctcctgaacatcgacggcgcggattccaaacccgttgtcaatacgctcattttcaactccttcgtgttctgccaggtgttcaacgagataaacagcagggagatgcagaagatcaacgtcttccgcggcatgttcggcaactggatcttcatcggaatcatagccgcgacggtaggtgtntccaggtggtgatcgtcgagttcctcggcaccttcgccagcaccgtc

SEQ ID NO: 8083 - DNA, 292 bp, Zea mays
  unsure (1)..(292): unsure at all n locations
caattgtcaacctctcctcagagttcgagtgaccatgtcggggcgcggaaaaggcgggaaggggctgggaaagggcggcgcgaagtccaccgcaaggtcctccgcgacaacatccagggcattacgaagccggcgatccggaggctggcgagaaggggcggcgtgaacgcatctcggggctcatctacgaggagacccgcggcgtgctcaagatcttcctcgagaacgtcattcgcgacgcgtgnncacctacacggagcacgcccgccgtaagaccgtcaccgccatggac

SEQ ID NO: 8084 - DNA, 290 bp, Zea mays
  unsure (1)..(290): unsure at all n locations
cggacgcgtggcggacgcgtgggctgttgagtacaagaacattagcttcactgtctgggatgtcgggggtcaggacaagatcagacctctttggaggacattacttccagcacacccagggtcttatctttgttgtggacagcaatgaccgtgaccgtgttgttgaagccagagatgagctccacaggatgctgaacgaggatgagctacgtgatgctgtgctgcttgtttttgccaccaggggnaggaccttccgaatgccatgaatgctgctgagattactgacaggc

SEQ ID NO: 8085 - DNA, 297 bp, Zea mays
gtcaccgccccaaatctagcaaacggaaatcccatctcgccgccgccgcgatgtctcgccgctatgacagtcgcacgacgatcttctcgccggaggggcgtctctaccaggtggagtacgcgatggaggcgatcggcaacgccgggtcagccctcgggatcctggcggccgacggcgtagtcctggtcggcgagaagaaggtgacctccaagctcctccagacctcccgctccgccgagaagatgtaactaagatcgactcccacctggcgtgcgctgtggcagggatcatgtccga

SEQ ID NO: 8086 - DNA, 296 bp, Zea mays
cccaccgatccatttcagccgccgccgcgcgtacaagcaggagcagcaaggatgccggctggccacgggctgcgctcgcggacgcgcgacctgttcgcgcgccccttccgcaagaagggctacatcccgctcaccacctacctccgcacctacaagatcggcgactacgtcgacgtcaaggtgaacggcgccgtccacaaggggatgccgcacaagttctaccacggccgcaccggtcgcgtccgtgggcgtcaccaagcgcgccatcggcgtcgagataaacaagcaggtgaatg

SEQ ID NO: 8087 - DNA, 293 bp, Zea mays
tttttccagaaactgatcgagcttggggcaacagacctcctggtgcctggcgttctcccaattggctgcttcccgttgtacctgacgctgtacaacaccagcagcaaagcagattacaacgcccggaccgggtgccttcggaggtacaaccgcctggccttccaccacaacagggagctgaagcagcagcttgacgagcttcagaagaagtaccccaagacgaagatcatgtatggagattgtgggtcaaggctgcgctgcagtttgtcgtcaaccctgggaaatttggtttc

SEQ ID NO: 8088 - DNA, 278 bp, Zea mays
atcacgcgaacgaaggagaaagaaaatggcgcactaggtggagacgtacgcgtgctcgccggcgacggaacgcggccgtggaatcctcctggccggggaccccaagacggacacgatcgcctactgcaccggccgcagcgtcatcattcgccgcctcgatgcgcccctcgacacttgggtctaccccgaccacgcctaccccaccaccgtcgcccgcttctcccacaacggcggagggcggtcgcctcggccgacgcctccggctgcgtccgcgtctg

SEQ ID NO: 8089 - DNA, 288 bp, Zea mays
gccaaatcgatggcggcggcggcggccggcggcgagaacagcggcgcgggcgcgggcgcgggcgagggcgagttctacctgcggtactacgtggggcacaagggcaagttcgggcacgagttcctcgagttcgagttccgccccgacggcaagctccgctacgccaacaactccaactacaagaacgacaccatgatccgcaaggaggtcttcgtatccccctccgtcctccgcgagggcggaggaggatcagccaggagtccgatatcatgaaggaggacgacagca

SEQ ID NO: 8090 - DNA, 287 bp, Zea mays
ggttgctctagatccgttcatcctggtggttttgtgaggtcgaaagcggcgagcgaattagaagatgctggacaagctgtgggacgacgtggtggccgggcctcgcccggagacgggcctcgagaagctccgcaaggccaccaccgcccgcccgctcgtcatcaacaaagacgcggacggcggcagctacaagcgggcgcagtcgacgccgtcgaccccgacgacgccggtgacgccggtgcgtcgtcgacggcgccgcgcggcgccggcaacgtgtggcgcacgtc

SEQ ID NO: 8091 - DNA, 285 bp, Zea mays
ccacgcgtccggctttagctagctagcaagagagagagagagagagaaaaaatatggctccactcgtcgctactgccacgatgaaccacgctgtggcccatctgctaggacccaatcatgagagtttctcacggcaccatctttcttcctcgctgcagcaaaacagtaagcgaaggtgtaatcttagcttcaggccacgagctgctgagagtcagaatggaagccaaacgctgaggggtcctcggaagtccctaaaagagactggttcccctctgacttcatctt

SEQ ID NO: 8092 - DNA, 287 bp, Zea mays
atgatggacaccgtgttgaataattccccgcttgacaaggagatggtgcctgcttttccatgcgcgataacatgaatctcacagttctgtttccataagctcgctcttgtgatggttttgcagacttcacatagaaggatgagacatctggcaacgacatgcaaccttttctagctcttgttaatctagattcaggttctgaattctggctataccaatagataagctgggctaaggcaactaattttctgggtatgtcttgcagtactcctgaaagcctggtccca

SEQ ID NO: 8093 - DNA, 290 bp, Zea mays
ccacgcgtccgcagcgcgcggcggcggccatggctgtcggaaagaacaagaggatctccaagggaaagaagggtggcaagaaaaagaccgtcgaccctttctctaagaaggattggtatgacatcaaggcaccgtcggtgttcagtgtgcgcaacatcgggaagactctcgtatccaggacacagggtaccaggattgcttctgagggtctgaagcacagagtctttgaggtttgcctagggctgatcttcagggcgacgaggatcaagcttacaggaaaatcaggctcc

SEQ ID NO: 8094 - DNA, 285 bp, Zea mays
cgagaatcagttgatatgcacgacaactttgaccaaataggtcttgcccagaagcttgagaagcatgaattgctggagatgaggaggattgctgcctacatttacaagaaggctggcacgtggaagcaatccattgctctatcaaagatagataacatgtacaaggattgtatggagacatgctcacaatctggtgaccgtgaactgtcagaggacttgcttgtctatttcatcgagcacattggaagaaagaaggctttgcttcttggctcctcatttgctacg

SEQ ID NO: 8095 - DNA, 281 bp, Zea mays
cccacgcgtccgcagctgccagcattgcagcagttactgtaccgacttgttggatgtcggcctgaaggagctgcaaataataactacttggtgcaatatgctcttgctttggtgctaaaagaaagctttaaaatttattgtgcaataaatgatggaatcataaacctcgttgataagttttttgagatgccaagacatgatgcacttaaagctcttgaaatctacagaagggggctggccaacaggctgggaatctatctgatttctacgagaattgccgg

SEQ ID NO: 8096 - DNA, 280 bp, Zea mays
cagtgctcccctcacttctcgccgccgcccactgccgcacccccaccaatccactgcgagacacgcccgagcgagtgatccccgacccagccgccgccatgaggccgtcgctgctgaagtccacggccgagctcctccgccgcagccgcggctacgcgtccacggccaatccggagcggaaggtggccatcctgggcgcggcgggcggcatcgggcagccgctctcgctgcgcgcgtgaagctcgacccgctcgtttcctccctctccctctacgatatc

SEQ ID NO: 8097 - DNA, 279 bp, Zea mays
cccacgcgtccgcaaggctccaaccctagccgcgatccgacaacgcctccatccctagccgactgctgcaacttcagagctcaagagtcagggcgccatggcgacagagacggagaccttcgcctttcaggctgagatcaaccagctgctctcactcatcatcaacaccttctattccaacaaggagatcttcctccgggagctcatttccaactcttccgatgcgttggagcaaaatcaggttcgagagcctcactgacaagagcaagctcgatgcgc

SEQ ID NO: 8098 - DNA, 283 bp, Zea mays
acacacactcgagaactccatttcgatctcatttgaaatcaacccatcctcgtttcctccgtctagcagcctctcaccctcatggccaagatcaagatcgggatcaatgggtttggcaggatcggaaggctggtggccagggtagccctgcagagcgacgacgtcgagctcgtcgccgtgaacgaccccttcatcagcaccgattacatgacctacatgttcaagtatgacagcctgtgcacggacagtggaagcaccatgaggtcaaggtgaaggactccaa

SEQ ID NO: 8099 - DNA, 280 bp, Zea mays
ccaaacgatacaggaatacgatacgccgctcgcctgaatcgagaccaccaccgctcccgctctgcctcacctcgccgactagagtttttgccgccgcggatctcgccgtccccgccatggatacgtcgggctcctccgcagccgccggcgtcgccccgaccaccggggagcaccggatggggaccaccattgtcggggtctgctacgagggtggcgtcgtcctcggcgctgatttcgaagaaccagcactggaatgtatgtagccaaccgtgcttcagac

SEQ ID NO: 8100 - DNA, 322 bp, Zea mays
cgcctcgggccaaaccctacgcagggagttgattgatcgattgcagccatgagtaagttgcattccgagcttctcaaggattgcatctcccagatagttcaggatgccaagaagaataggaagttcactgagactgttgagcttcagattagtctgaagaattatgatccacaaaaggacaagcgtttcagtggctctgttaagttgcctcacatccctcgtccaaagatgaaggtgtgcatgcttggtgatgcccagcacgttgaggaagctgagaagatgggacttgactacatggatgttgaaggccctcaagaaaatg

SEQ ID NO: 8101 - DNA, 299 bp, Zea mays
ccaaccttgactggtacaaaggcccgaccctgcttgaggctcttgaccagatcaccgagcccaagagaccttcggacaagcccctgcgtctccccctgcaggatgtgtacaagattggtggtattggaactgtaccggttggtcgtgtggagactggtgtcatcaagcctggtaaggttgtcaacttcggtccaactggcctgactactgaggtgaagtctgttgagatgcaccacgaagctcttcaggaaggccttcctggtgacaatgttggcttcaacgtgaagaacgttgctgtg

SEQ ID NO: 8102 - DNA, 316 bp, Zea mays
cccacgcgtccgaaatgttgtcacttacaactgccggatacagcggttctccaagaaaggcgagacagtcaaaggggaggagctgcttgatgtgatggcatcaaaggggatagcgccaaattacgttacctacaatgctctcgtgcaggggtactgcaaggagggaaatgttggggcagctatgcgtgtgttcaagaggatgaaagtgatgaagaagctggagggaaggagtgatttgggtgtttctgcacattcacaggtatatgtggtgctgtttaggagtttggtggagaaagagaagcttgatgacgcgctg

SEQ ID NO: 8103 - DNA, 317 bp, Zea mays
gcaaggccgagcgctcctcgatccagatccaaggtaggagatggctctcacgagaattggcctcgccggcctcgcggtcatgggacagaaccttgccctcaacatcgcggagaaagggttccccatctcggtctacaacaggacaacctccaaggttgatgagaccgtgcagcgtgccaaggtcgaaggaaacctcccagtgtttggtttccacgaccccgcgtccttcgtgagctccatccagaagccccgtgtcgtcatcatgctcgtcaaagctggggcgccggtggaccagaccattgccacgctcgcggcgc

SEQ ID NO: 8104 - DNA, 328 bp, Zea mays
gagctcctccgagtcaacagtcttggctaccttctccatgaactcactgtggaggagcgaaacctcttgtctgatgcatacaagaacgtcattggagcccgccgcgcctcatggcgcatcatctcctccatcgagcagaaggaggagggccgaggccatgaggagcggggaacacccatccagggataacgtggccagattgagactgagccgaccaagatctgtgatggcatcctcaagccgcttgagacccatcctgtgccgtcttccactgcccccgagtccaaggtcttctatctcaagatgaagggtgattactacagatacc

SEQ ID NO: 8105 - DNA, 321 bp, Zea mays
gtactacctttcgattgtctcagagaggttgggcagcaccatcagcttctcagagtgtggagggattgagatcgaggagaactgggacaaggttaagactattttccttcctactgagaagccaatgacgtctgattcatgtgctcctttgattgcataccttccattggaggcacgcggaaaaattggtgacttcattaaaggagtgtttgccgtcttcctagacttggatttctcatttcttgagatgaatccgttcaccatggtcaatggggagccatatcctctggacatgagaggagaactagatgacacagcagc

SEQ ID NO: 8106 - DNA, 316 bp, Zea mays
gcgagcacgagcaaccatcgtttccccttcttccccatcgcgtgccctcgccgcagccatcttccatggcggaccagctcacggacgagcagatcgcggagttcaaggaggccttcagcctcttcgataaggatggcgacggctgcatcactaccaaggagcttggaactgtgatgcgctcccttggccagaaccccactgaagcagagctgcaggacatgatcaacgaggttgatgctgatggcaatgggaccattgacttcccagagttcctgaacctgatggcaaggaagatgaaggacaccgactccgagga

SEQ ID NO: 8107 - DNA, 322 bp, Zea mays
cggacgcgtgggtgcagcagtccacgtacgtggtgctctcggcgctgcagtccgaccgccacctcggccgcgccggcttccagatccccgccgcgtccttcaccgtcttcgccatgctcgcgcagacgctgtggatacccttctacgaccgcctcctgctgtccaagctccggaagataaccggcaaggaggagggggtcacgctgctccagcgccagggcatcggcatcgcgctctccactgtcgccatggtcatctcggccatcgtcgaggaccggcgccgtgccatcgggctcagccagccgacgctcggcaccaccat

SEQ ID NO: 8108 - DNA, 313 bp, Zea mays
cagctattgtggtcgtccctcagccgcgtcgcaccgcatcgcattctacgattcgaagctctctctgctcgcagccatggcgaagaattacccaaccgtgagcgccgagtacagcgaggccgtcgagaaggccaggcgcaactccgcgccctcatcgccgagaagagctgcgcgcccctcatgctccgcctcgcgtggcactccgcggggacgttcgacgtgtcgtcgaggaccggcggtcccttcggtactatgaagtgcccggcggaactggctcacggcgccaacgcggggctggacatcgcggtgcggc

SEQ ID NO: 8109 - DNA, 310 bp, Zea mays
tgctgagctgaaggcagctggtgcctcatggattcaacttgatgagctaccctgttaaagaccctgatgctcacgaattggccgcattctcttcagcatatgctgaactggagtcatcgttctctggattgaatgtgcttatcgagacatacttcgctgacattcctggtgagtcctacaagaccctcacatcattgagtgggtgtgactgcttacgggttcgatcttatccgtggagccaagacccttgatcttatcaggagcagcttcccctctgggaagtacctcctcgctggtgttgtagatggac

SEQ ID NO: 8110 - DNA, 315 bp, Zea mays
agcgtgccgcgccgtgatgggcaagtccttccggagcgagggtcgcaacaagctgttccgggagcttgtcctcgacaccaccaagctgctggtcggcatcaacgtcgaggacttcttccccttcctggctcgcttcggcgtgctcagcaagctggtccgcgccaagtccgagagactgaggaggaggtgggacgagctactcgataggctgatcgaggatcgtgagagcaagtatgaggcggcggcggcgggggcgagtgatctcaaggacgatgatgacgataacttcatacatgtcttgctctccgttcgaca

SEQ ID NO: 8111 - DNA, 315 bp, Zea mays
ctcatcttttctcgtttagaacctctaaaatttcccccactcgccagtcgcagcagcacctgtagcagccatggacgccagcggaccggtagcaaggggaagaagggggcggccgggcgcaaggcaggcggccccaggaagaagtcggtgacgcggtccgtcaaggccgggctgcagttccccgtcggccggatcgggcgctacctcaagaagggccggtacgcgcagacgtgggcactggcgcccccgtctacctcgccgccgttctggagtacctcgccgccgaggttctggagttggcagggaacgcggcga

SEQ ID NO: 8112 - DNA, 317 bp, Zea mays
ccacgcgtccgctcgacgcctctctctctttacccgagctctcgaaaccctaggtgcgtgccgaccggcggcggcggcgacgtgatggcgatggacccggacgcggtggcgaaagcattcgtggagcactactaccggacgttcgacaccaaccgcgcggcgctggtggggctgtatcaggagacctccatgctcaccttcgagggccagaagttccagggcccatccgccattgccggcaagctcggatctcttcccttccaggcctgcgagcaccagatcgtcaccgtcgactgccagccgtcggggccccaggg

SEQ ID NO: 8113 - DNA, 304 bp, Zea mays
ggcgaggcaaaagcgcaaacgcgaccacagacagagcgcgcttcaaggccttttttttttgagataacaaagaggagaagaggagatggcggtcacgatcaccttgggtaaggcgaggcagatcttccgcagccgcggcaaccccaccgtccaagttgacgtggggcccaaggacggcagctacgccaaggggggcgtacccaacggggcatccactgggatatatgagggcttggagttgaaggattgaagatctggataacctggcaaaggtggtcctaaagcctgcaacaacggtaaccac

SEQ ID NO: 8114 - DNA, 311 bp, Zea mays
ctcacggcatcacgcgaacgaaggagaaagaaaatggcgcacgtggtggagacgtacgcgtgctcgccggcgacggaacgcggccgtggaatcctcctggccggggaccccaagacggacacgatcgcctactgcaccggccgcagcgtcatcattcgccgcctcgatgcgcccctcgacacttgggtctacccgaccacgcctaccccaccaccgtcgcccgcttctccaccaacggcgagtatggtcgctccgccgacgcctccggctgcgtccgcgtctggtgccgtacggcgacgcgcgctcaaggt

SEQ ID NO: 8115 - DNA, 303 bp, Zea mays
cattttcatctttcatgacaagaaggggatgccagtggcaagtcaaagcaaagcaggagtgagaagaagagccgcaaggccatgctgaagcttggcatgaagcccatcactggtgtcagccgcgtcactgtaaagaaaagcaagaatatactctttgtcatctccaaaccagatgtgttcaagagtccgaattccgacacgtatgtcatattcggcgaggctaagatcgaggacctcagctcccagctgcagacccaggcagcagagcagttcaaggctcgtgacttgagccagatgatctcg

SEQ ID NO: 8116 - DNA, 183 bp, Zea mays
ccgcaacgtgccgtacccgctcacctggatcgtcgtcgaggcaggcggcaccaccaacgccaccgcgtcaatgcttgcgcgctctggcctcactgtcgtccacatccccttccctgaccgcatgcccaccgagtgggccgaccgccacgctactgagaaccggatgcgcctccacgccctacg

SEQ ID NO: 8117 - DNA, 293 bp, Zea mays
agtaaagcttacatgtcctacgtagcagaaggtctgggggacctactggactgggatcaggccgccatggcttaccagaggaagaacgggtccttcttcaactcgccggccacaacggccgcagctgccatccacaacggctacaacaagagagccatcggttacttggatgctctcatcagcgagtctggcagcagctcgtcagtaccggctgtgtatccacggaaggtgcacagccagctccgcatggtggacaccttggagaggatggggatctctcgcagcttttccta

SEQ ID NO: 8118 - DNA, 292 bp, Zea mays
cataagtacatataaccaactaggcttgatcgatctctcgacagcaaatagctagcaataatggagaagtacaccaaagccctagcgtcattgctcaccatgctggtgctggcacgtctcgtcggcatggccaccgacccagaccccctgcaggacttctgcgtcgccgacctcaacggcaagccatcagtgaacgggtacccatgccagccgccgtcgtcggccggcgaccagttcgtcttctcgaccaagatcgccacgggaggcgaccccctggccaacccgaacggct

SEQ ID NO: 8119 - DNA, 120 bp, Zea mays
gtcccacattgttggataccctcgcatgggccccaagagggagctcaagtttgcacttgagtctttctgggatgggaagagcaccgctgaggatctggagaaggttgctagcgacctcag

SEQ ID NO: 8120 - DNA, 249 bp, Zea mays
cgaagaacacccttctctggtcgtcgcagggcagctaacatccgccatggcgcgcgggggagacggcctgcaggtgctgagcgcgctggacgcggcgaagagcagtggtaccacttcacggccatcatcgtcgccggcatgggcttcttcacggacgcctacgacctcttctgcatctccctcgtcaccaagctgctaggccgcatctactacacggacaccagcaaggacagccccgggtcgctgccg

SEQ ID NO: 8121 - DNA, 288 bp, Zea mays
ccacgcgtccgcctccctctccgaaatcaaggtagcatacaccgctgcagtttctagagccctctctgccactcgtgatcccactagtcacgatgcctgccctcgctaagcccgcctcccgcaccgccaagcccgccgcggctccgaagccgaagcctgccgccgccaagccgaagcggccaccgctggtgcctcccacccgccttacttcgagatgatcaaggaggctatcacggcgctaaaggagaggaccggctccagctcgcaagcgatcgccaagtatgtggg

SEQ ID NO: 8122 - DNA, 108 bp, Zea mays
cggacggtgggcggctgcggcggacacggaggcgaaggaggaggagcagcagcagcaggcggcgccgaggagcggcatcccactcagtgcttgcacccatggctaggg

SEQ ID NO: 8123 - DNA, 281 bp, Zea mays
gcgttcttcgtcttcatggaggagttcaggaaggactacaaggagaagcaccccaatgtgaagcaagtctccctgattggcaaggctggtggtgacaagtggaagtccctgtctgatgccgagaaggctccctacgtgtctaaggcagagaagctcaaggctgagtacaccaagaagatcgacgcttacaacaacaagcagtctggagaccccacggcgtctggtgattccgacaagtccaagtccgaggtgaacgacgaggacgaggagggtgacgagtg

SEQ ID NO: 8124 - DNA, 277 bp, Zea mays
gaagaacaaccgttacaagtggcaaggtgtacaaagatcataagccctaatacggatgatgctaaatatgttataaatgtaaaacaaattgcaaagtttgttgttggactgggggataaggtgtctccaactgatatcgaggaagggatgagggtcggtgttgatcgcaataagtaccagattcaaatccctcttccaccaaaaattgacccaagtgttaccatgatgactgtggaggaaaagccagatgtgacgtacaatgatgttggtggctgca

SEQ ID NO: 8125 - DNA, 283 bp, Zea mays
gcttccagctgcatctctctccgccgagaccgagaggaggaggaggcaagggaggcatccctgacgtacggacggcggccatggggacgcaggcgccggagaactaccccgccgagaaggacgcgaggagcgcgcgggagaaggccatcgacgactggctcccgatcacctcgtcgcggaacgctaagtggtggtactctgccttccacaatgtcaccgccatggtcggcgccggcgtgctcagcctgccctacgccatgtccgagctcggctggggccctgg

SEQ ID NO: 8126 - DNA, 137 bp, Zea mays
ggcggcgcacatcgctaccaccgtccaaagatggtgaagttcctcaagcccggcaaggccgttatcctcctccagggccggttcgccggccggaaggcgtggatcgtgcgcgttttcgaggagggcacccgtgatcg

SEQ ID NO: 8127 - DNA, 119 bp, Zea mays
agacagagcgcgcttcaaggccttttttttttgagataacaaggaggagaggaggagatggcggtcacgatcacctgggtgaaggcgaggcagatcttcgacagccgcggcaaccccac

SEQ ID NO: 8128 - DNA, 286 bp, Zea mays
ttctaaaaaagttccgcaggaaacgcggcccgcagcacgccctttccccacctcgatctcgcgctaggttttcgccacaccgctctcgtcctccgcgaagatgccgaagaacaagggtaagggaggcaagaaccggaagcgtggaaagaacgaggctgacgacgacaagcgcgagctcgtcttcaaggaagacgggcaggagtatgcgcaggtgacccggatgctcggcaacgggcggtgcgaggccacctgcgtggacggcacgcgtcgcctctgccatatccgg

SEQ ID NO: 8129 - DNA, 312 bp, Zea mays
cggacgcgtgggcgtgacgcgtgggtgtcggcctactgcggaaagtacaaggatgagctcatcaagaatgctgcctacattggcacccctggcaaggttatccttgctgttgatgagtccactggcaccattggcaagcgcctttccagcatcaatgtcgagaacgttgaggagaaccgccgtgccctccgtgagctcctattctgctgccctggtgctctccagtacatcagcggtgtgatcctcttcgaggagaccctgtaccagaagaccaaggatggcaagccttttgttgatgtcctcaaggaggga

SEQ ID NO: 8130 - DNA, 306 bp, Zea mays
cacaactgaggaaacagctatttcttcattgaagaggtcgcttggtgctctgaacacacaccttgcttcaaacacataccttgttgggcatgctgttactctagctgacattgtaatgacatgcaacctctaccatggaattgcacggatcttgaccaagaccttcacgtctgatttccctcatgtcgagaggtatttctggaccatggttaaccagcctaacttcaagaaggtcattggtgaggtcaagcaggcagagtctgcacctcctattccgaaaaaggctgctccttctaaggagccaaa

SEQ ID NO: 8131 - DNA, 311 bp, Zea mays
cattctcatccccgacccccgcaccgcagcgtaaaccctagtccccggcggcgaccttgcggcctccgctgcgctctgactggtgcgcgtttagacgaggagctgcggcggccaagaccaatcgaccatggctacccgtatccagtttgagaacaactgtgaaattggtgttttctccaagctgacaaatgcttactgtctggtagcgattggagggtcagagaacttctacagtgcctttgaggctgagcttgcagatgccatccctgtggtcaagacctctattggtggcactagaataataggccgac

SEQ ID NO: 8132 - DNA, 310 bp, Zea mays
cggaccgtggccgaaccccgtcatcgatctcgtttcaaatccatccatcctcgtttcctccgtcccgcagcatctcaaccccatggccaagatcacagatcgggatcaatgggttcggcaggatcggaaggctggtggccagggtggccctgcagagtgacgatgtcgagctcgtcgccgtgaacgaccccttcatcagcaccgactacatgacctacatgttcaagtacgacactgtgcacggacagtggaagcaccatgaagtcaaggtgaaggactccaaaacccttctctttggtgagaaggaggt

SEQ ID NO: 8133 - DNA, 307 bp, Zea mays
ctggaaaccctagccgccatatctcacgatccactcgagcaccaagccgagggaaggtgaggagcgatggcgcgcggcgtggtgtcggcgaagggcggcgcggtcgcgggcaagaagaaggggtcggtttccttcacgatcgactgcaccaagccagtggaggacaagatcatggaggtcgcctcgctcgagaagttcctgcaggagcgcatcaaggtcgccggcggcaaggctggcaacctcggcgactccgtcaccatctctcgcgagaagaccaaggtcaccgtcacctctgacggacccttct

SEQ ID NO: 8134 - DNA, 304 bp, Zea mays
gttgtgatcttcctcttccttggttcggttgagggattcagcacgaagagccagccctgcacatatagcaaggacaagtactgcaagcctgcgctgttcactgcactctttagcactgtgtccttcttgcttggagccatcacctctctggtctctggtttccttggcatgaagattgccacatatgcgaatgccagaactaccctggaagctaggaagggtgttggcaaggcttttatcactgctttccgctctggcgctgttatgggtttcctgcttgcatcaagtgggcttgtggttctgt

SEQ ID NO: 8135 - DNA, 305 bp, Zea mays
ctggaacccaagtatgatgttgagaaggaaaaggagaaggctgaggaggctgctgctggtgcagatggtctttctgacttccagaagaagatttttgacgtcctgtacaagattgctgatattccgttcttggcaccctacaagaccaagattattgatgttatcgagaagggagagaaacagcccaacatcactattggcattttggtctccgttgtcatcgtgttcgttaccgttctctgcaagctcctgtttggtggcaagaaaccagtggcacctgtgaaacctgcagctgaggcgaagaa

SEQ ID NO: 8136 - DNA, 304 bp, Zea mays
cggacgcgtggaaaacctccgaaggttcgacagtggctgttttcggtttaggagccgttggtcttgccgctgcagaaggtgcaaggattgctggagcttcaaggatcattggtgtcgacctgaaccccagcagattcgaagaagctaggaagttcggttgcactgaatttgtgaacccaaaagaccacaacaagccagtgcaggaggtacttgctgagatgaccaacggaggggtcgaccgcagtgtggaatgcactggcaacattaatgctatgatccaagctttcgaatgtgttcatgatgg

SEQ ID NO: 8137 - DNA, 297 bp, Zea mays
  unsure (1)..(297): unsure at all n locations
cccgggcgtccgctactactcaagtatccatccttattgagtgcagtgttgatccatggactcggaaggagttgtagcagcaaaggtggcagatgggactgctagaccggcaatccaagaagacggcgccgagagcaangccgggatgactgatctgctgatgctgagcgacaagtcgcagctgcaggcgctggcgatgctgctgcggaacaacgaggagctcatgatgagcgaggcgatcaagtcggagacggagcgcattgagtacctcaagacggtgagcgactgctacacgcg

SEQ ID NO: 8138 - DNA, 302 bp, Zea mays
cagaaaacccagccgccgccgcatcggcctcccaggtaagcagtagcgtccaccccagccgccgccatgaagcgcaacccccgcgtcacgagctcccgccggaagtgccgcaagcgcacttcacggccccgtcctccgtccgccgcgtgctcatgtccgcggcgctatcgacggagctccgccacaagtacaatgtgcgttccatcccgatccgcaaggacgacgaggtgcaggtcgtgcgcggcacctacaagggccgtgatggcaaagtggtgcaggtgtaccgccgtcgctgggtcatc

SEQ ID NO: 8139 - DNA, 301 bp, Zea mays
aacgaagccagccagccagccgggtcctcccgcgtactagcgtaggcgtaggcgtacgtagcagcgtgtgcgagaggggaagaaatgctggaggggagggcgcgggtggaggacacggacatgccggcgcggatgcaggacgcggcgacctccgcggcctcgcgcgctctcgacctcttcgacgtcgccgacttccgcgccatcgccggccacatcaagacggagttcgacaagcggtacggcgtcgggtggcagtgcgtggtgggcgccaacttcgggtgcttcttcacccacagcagcg

SEQ ID NO: 8140 - DNA, 299 bp, Zea mays
accgcttctcgtggttcaaagacgaggagttcgcgaggcagacgatcgcggggctcaacccgctgtgcatccagctcctgacggagttccccatcaggagcaagctggacccggaggtgtacggcccggcggagtccgccatcaccaaggagatcctggagaagcacatgagcggatgcgccgcatgaccgtggagcaggcgctcgcggcgaacgatctgttcatcctggactaccacgacgtgttcctgccctacgtgcacagggtgcgcgagctgccggacacgacgctctacggct

SEQ ID NO: 8141 - DNA, 298 bp, Zea mays
ccgcttcaacctgtccccagcgccccccgcgcacacactgtctttctctgcctttctttccctagcgccgcgccggcgccgccattcgatcagggcgcttcggcggcgacagcatattccaggtcggttggttttggcacttcggaccggcggccatggcttccgacggcatcggccccagagatgtatgtgttgttggggttgcacgcaccccaatgggcggtttccttggtgccttgtctcccttgcctgctacgaaacttggctctatagtaattcaagctgctctggaaagagc

SEQ ID NO: 8142 - DNA, 327 bp, Zea mays
gtcgcgacgactgggcgagaccgccgccgccgccgccgcctgagttctttagaaatggctgatggtgaggacatccagcctcttgtctgcgacaatggcactggaatggtcaaggctggttttgctggcgacgatgcaccaagggctgttttccctagtattgttggccgtcctcgccacactggtgttatggtagggatgggacagaaggatgcgtatgttggcgacgaggcacagtccaagagaggtattctcacgctcaagtatccgatcgagcatggtattgtgagcaactgggatgacatggagaaaatctggcatcacact

SEQ ID NO: 8143 - DNA, 327 bp, Zea mays
cggacggtgggtcctcgcattttccttgcaaccgattgcctatccccctcccaaccaaagaccgatggcgcccaaggccgagaagaagcccgcggcgaagaaaccggcggaggaggagcccgcggccgagaagacgaccgccgggaagaagcccaaggcggagaagcgggtccccgcgggcaagtccgccggcaaggagggcggcgagggcaagcgtggcaagaagaagggcaagaagagcgtggagacgtacaagatctacatcttcaaggtgctgaagcaggtgcacccggacatcggcatctcctccaaggccatgtccatcat

SEQ ID NO: 8144 - DNA, 315 bp, Zea mays
ccctccggttagcagccttaatgttcagggcaaagagatcaatggtgctggtatcaatgctagctttgctgttcaccaggatgttgatggaagggcaacagatgtagctctagggtggtcagtagctttaggttctcctttcacatttgctactactctagagcaggagtaccggagtgacatttttggcgagcgaggtattttgcttggtgctgtccatggcatggtggatgctcttttcaggagatacacagaacaaggaatggacgaggactcagcatataagaatactgtagagagcatcactggaattat

SEQ ID NO: 8145 - DNA, 318 bp, Zea mays
ccacgcgtccgagatggtgaagaaacttcccatggaacggcagcacaaattacttatttgcttgcaatcttgttctgcgttttgtgctctatgcaatgatgcgccagaagatcctgttgtcactctatgtggtcatgttttttgcaaccagtgcatactggagcaactcactggtgacgacagtgtatgcccagtgtctaattgcagagtccgactaaacacatcctcactcttctccagaggcactcttgaatgctctctgagtaaattagcctctgatttcaagtctgatgatacatgtatggaaatgatacatgc

SEQ ID NO: 8146 - DNA, 312 bp, Zea mays
  unsure (1)..(312): unsure at all n locations
ctctgagtggaacaagggtgagctcctcagtttcttgattgagatcacggccgacatctttggtatcaaggatgacaagggtgaaggctacctggtcgacaaggtcctggacaagaccgggatgaagggaactgggnaatggacagtccagcaagctgctgaacttcctgtagctgctcctacaatcaaggcgtccttggactccaggtccctcagcggtctgaatgacgaccgcgttgaggcttccaaaatcttccaaggtgactactccactggcctaccggtggacaaggcacagctgatggaggacgt

SEQ ID NO: 8147 - DNA, 314 bp, Zea mays
cgcccgtggcggacgcgtccgccacgcgtccctactctcttcgtctgcttccccaccaaaccctagacgccaccctcccccgccgcgcgccgccgcccgccgacatggatcctcttcgctctcatctccacaagttccggatccccgagcccaccaaccgcatcacaaggacgagtgctgcgtctccttcgacactccgatgtcagagggaggcctgtacgtggacatggtctcgttcctggggctcgggagggagtacgtggagtggaacttcgagaagacggggaacccgtgtacctccacatcgttcagcg

SEQ ID NO: 8148 - DNA, 319 bp, Zea mays
ctttcacccgccgccgccgccaccaccagcactgccactccgccaccaccgtcccgaagccccctcccagcgccatcgacttcatctcggattgaagcaatgtcgtcggacgatgaggtcagggaggagaaggagctcgacctctcctccaacgacgttgtcaccaagtacaaggctgccgccgaaatcctcaacaacgctctgaagactgaagtgtctcagtgcaagcctaaagtcaagattgttgacctttgcgagaagggcgactctttcataagagagcaaactgggaatgtttacaagaacgcaaagaggaaga

SEQ ID NO: 8149 - DNA, 320 bp, Zea mays
cttgcgcgtacggtacacagccccgatccgaatcgtcctcctcgcgagcctcgccgatcccccactcccctcccctcgcttcaagatgcagatctttgtgaagaccctcatcggcaagactatcaccctcgaggtggagtcttctgacaccattgacaatgtcaaggctaagatccaggacaaggagggcatccctcctgaccagcagcgccttatcttcgccggcaagcagcttgaggacggccgcacacttgctgactacaacatccagaaggagtcaacccttcatttggtgctgcgccttaggggaggcatgcaga

SEQ ID NO: 8150 - DNA, 315 bp, Zea mays
gaccgacaggacgagactcgcagctagctgacacggccgagaagcagcttgcattgcaggcgtagtacgtacccagcagcagctagcactagcagtccatcggagcgacgatggtgagaaggacggtactggcggcgctgctggtggccgccgccctcgccggcggcgcgcgggcgcactcaaggaggggttctacgactactcctgcccacaggcggagaagatcgtcaaggactacgtgaaggcgcacatcccccacgcgcccgacgtcgcctccaccctgctccgcacccacttccacgactgcttcgtcag

SEQ ID NO: 8151 - DNA, 315 bp, Zea mays
catattttccctcatctcccgccgcctgcacccaacaagcctctcgacgctagtcatggccgcttccaacggcgccgccgcggtcgacgagaccgtcgccgccaccgactccgtgcaggagcctccccagaagatctccaagatctctcccctgctcaaggtgaagaagctctccgagaaggccgtgctgccgtcccgcggctccgctctcgccgccggctacgacctctcgagtgccgaggagatggtggtgccggcgcgtggcaaggcgctcgtgccgaccgacctcagcgtcgccatcccgcacggaaccta

SEQ ID NO: 8152 - DNA, 313 bp, Zea mays
caggatccacatcttcccgagcgagttcttggttgacctcttcctcttcggaccacctccaaggctcttggtgtagcttgccactctcaccaatcaagttttcatgtctgatctcgacattcagatcccaactgccttcgatcccttcgctgaggccaatgctggggactctggtgcggcacagggtcaaaggactacgtacacgtgcgcatccagcagcgtaatggtcgcaagagcctgactaccgtccagggattgaagaaggagttcagctacagcaagatcctcaaagatctcaagaaagagttctgct

SEQ ID NO: 8153 - DNA, 313 bp, Zea mays
gtcacagtggaggctgcagaggctactctcaagtacaacgtggctattaagtgtgcgaccattactccagatgaaactcgggttaaggagttcaatctgaaacacatgtggaagagcccaaatggcacaattaggaacattataaatggcactgtgttcagagagcctattatatgcaaaaacgttccaagacttgttccaggatggactaagcccatctgcattggaaggcatgccttcggtgatcaataccgagctaccgatgcagttctgaaggggcctgggaagctgaagctagtttttgagggaaaag

SEQ ID NO: 8154 - DNA, 305 bp, Zea mays
cagtgccattgttggggtggtcatggcggcatttgttgcagctgccattctttcatccctcgttactatcatcatattgcggagacgctcaagacagtcttcttcaaataaacgcaccgcgaaaagaatttcaatgaaaattgctggtgtaaaagacttcacttttgacgaattgtcacattgtacacatgactttaatgattcaacactaattggccaaggagggtatggcaaggtatacagaggtgtgttggctgatggaatagtagtagcaataaagcgagcacagcaagggtctcttcaag

SEQ ID NO: 8155 - DNA, 305 bp, Zea mays
gttctagatcgcgagccgcccggacgcgtgggcgcgcgaccgatctaccgccgccgccaccatgtcgctgatcgccggcgaggacttccaacatattctgcgtctgctgaacaccaacgtggatggtaagcagaagatcatgttcgccatgacctccataaagggtgttgggcgccgcttctccaacatcgtctgcaagaaggccgacatcgacatgaacaagagggccggtgagctgacgcctgaagagctggagcgcctgatgacggtcgtggccaaccctaggcagttcaaggtgccggact

SEQ ID NO: 8156 - DNA, 314 bp, Zea mays
gaggcgacgaaaccctcgccagtccccaactcgaacctcagtcaggcagcgtgaggagggagagttcaaggaccgaggcggcgtcgggcgagatgaagcttaacgtcaagaccctcaagggcaccaacttcgagatcgaggcgagccccgatgcatcggttgctgatgtgaagaggatcattgagaccactcaaggtcagagtacctaccgggcggaccagcaaatgctcatataccaagggaaaattctcaaggatgaaaccactttggaaagcaacggagttgctgagaacagcttccttgttataatgttg

SEQ ID NO: 8157 - DNA, 312 bp, Zea mays
ctcgactctggtgatggtgtgagccacactgtgcccatttacgaaggatatgcccttcctcatgccattcttcgtttggatcttgctggtcgggacctcacagactccctcatgaaaattctcactgagaggggttactccttcacaacctcagccgagcgagaaattgtaagggacatcaaggagaagctagcatatatagcccttgactatgagcaagagttggaaactgccaagaacagctcttcagttgaaaagagctatgagctacctgatggacaagtaatcaccattggtgcagagagattcagg

SEQ ID NO: 8158 - DNA, 288 bp, Zea mays
cacaaatcgccactaaaaccctagccttccgccatggccacctcccctgccgcctcgtcctcctccgctccgaccgcctccgcggtggctgcggctacgatggctgttgaggccaccgacgggccggtgctcagcgtagtatcgaagcgtctccgcgcactgcggaagaagtacaaccgaatcacgcagatggaggagtcgctcgccgccggcaagacgctcaaccgagagcaggaggaggttctccgctccaagcccgtcgtcgtcgctctgatcgacgagctcgag

SEQ ID NO: 8159 - DNA, 312 bp, Zea mays
cccacgcgtccgcgccaacctcatgtaccatttcgactgggaggtccccaatgagaaggaagacggtggcgggaaggtgagcatggacgagacgttcgggctgatgcttcgcaggaacgagccgctctaccttgttcctagggccgtctagctagctagttactgtgccgccgccgcctcctatccaagaatgcatgagtcttagacgtgtggcagtaataattgcgtggggtgtagtaaaataataagcacgtttgttgagttgtaatggattcacattatgtgcattcgagacaggtccaaggaattgta

SEQ ID NO: 8160 - DNA, 97 bp, Zea mays
atctcccagcaggccattctgctcgccttactccctcacagaacccagtaaaatattgccagttccgccgtcgagatggccccacgccgcgtggtcg

SEQ ID NO: 8161 - DNA, 310 bp, Zea mays
acacaacacaactcgtaggcagcgagcgtctctcctcttcctctcccacgcaccgcgccaaggaaggcagagagagatcgccgctcctcttctctccgtcggtggtgcggttgaccgccctcctcgagcgagatctcgctgcagtccctcgagatctggtcacagatctatccgacaagatggtgaagatctgctgcatcggtgctggctatgtcggtggcccaaccatggcggtcattgccctcaagtgcccagacattgaggttgtcgttgttgacatctccaagccccgcattgaggcatggaacag

SEQ ID NO: 8162 - DNA, 303 bp, Zea mays
caattgtcaaccgactctatctagctctcttcgcaagccagtaggtcaccactcaccactcaaaagcttgtgaagcaggtgagatgggcaaggaggtggatgtgtccactctagaggtcggcggcgtccgtgaccgtgactacgcggaccctccgccggcaccgctgatcgacatcgacgagctcggcaagtggtccctgtaccgcgccgtgatcgccgagttcgtggccacgctgctgttcctgtacatcacggtggccacggtgatcgggtacaagcaccagacggacgcgtcggcgtcgg

SEQ ID NO: 8163 - DNA, 308 bp, Zea mays
gctttggatcctcacaggcaaaggagatgcttgatcacctggaaagtgtactagcaaatgaaccagtctctgtcaagagtggccagttcattgttgaagtcaaaccacagggaataagcaagggaatagttgccgagaggatacttgcatcagtgaaggagagaggaaagcaggctgatttcttattgtgcatcggcgatgataggtctgatgaggacatgtttgaaaatattgctgatatcattgggaggaatttggttgctccaagaacagcactgtttgcgtgcactgtgggacaaaaaccaagc

SEQ ID NO: 8164 - DNA, 307 bp, Zea mays
cagaacttctcctgtcggcctactaatacaactagctgccctcttaggtatactgtgatggccaccttgtcctccacagtagtagttgcacttggtgcacctctcttcttgctccttgtaacgtgtggctcgtgcgcgagaccggtgagctttaacgcctccgacctcaccgccgatcccggctgggatgctgccagggccacctggtacggtgcgcccaccggcgccggtcctgatgacgacggtggtgcctgtggattcaagaacgtgaacctgccgccgttctcggcgatgacgtcgtgcggca

SEQ ID NO: 8165 - DNA, 306 bp, Zea mays
ggtggagtggtgttggcattgatgaatggtggaggaacgagcagttctgggtcattggtggtatttctgcgcatttatttgccgtcttccagggtctcctgaaggtgcttgctggtatcgacacgagcttcactgtcacctctaaggccactgacgaagaaggtgattttgccgagctctacatgttcaagtggacaacgcttctgatcccaccaaccactattttgatcatcaacctggtcggcgtggtcgctggcatttcctacgcaatcaatagcggttaccagtcatggggacctcttttcg

SEQ ID NO: 8166 - DNA, 303 bp, Zea mays
cgcacggtccgcgacgtgacgatcaaggtgctcttctgcggcatctgccacaccgacctccacatcatcaagaacgagtggggcaatgccatgtacactgtcatccccgggcacgaggtcgtcggcgtcgtcacggacgtcggccatggcgtcacaagttcaaggccggggacacggtgggcgtgggctacttcgtcgactcctgccgctcctgcgagagctgcagcacggggcacgagaactactgccccgacctcgtactctcctccaacggcgtggaccaccaccaccacgacggcggcg

SEQ ID NO: 8167 - DNA, 306 bp, Zea mays
cttccagatttcctctattcgcggtttgcctctctgccttcctgcctgcttccctccctccgtgagatccccgctcgggttgccatggcggaccagctcaccgacgaacagatcgccgagttcaaggaggccttcagcctcttcgacaaggacggcgacggctgcatcaccaccaaggaacttggcactgtgatgcgctcattggggcagaaccctactgaggctgagcttcaggacatgatcaatgaggttgatgctgatggcaatggaaccatcgactttcctgagtttctcaacctgatggcg

SEQ ID NO: 8168 - DNA, 309 bp, Zea mays
cccacgcgtccgggctcgtcacccgcggcgagctcctcgtgggcatcgtcggcagcctcgactccgggaacaggtactactccaaggtggtccgcgccggggagacgttcgtcatcccgcgcggcctcgtgcacttccagttcaacgtcggcaaggaggacgccaccatggtggtgtcgttcaacagccagaaaccgggcatcatcttcgtgcccctcacgctgttcggctcctctccgccgatccccacgccggtgctctccaaggcgctccgggtggacgccagtgtcgtggatctcatcaagtcca

SEQ ID NO: 8169 - DNA, 295 bp, Zea mays
gcagctagtacgccgccgcacctccgcccgccaccttcttcccggctccagcgatgtcgggggcgatcggtggcgccgaggtccacggcttccggtgcgcacggcgcagctcccgctgtcgcgggtgctcggtaggccgatccgggtagcgccagccgctgctgcccggccggtctgcgcgtccgctggtagcatacgctgcgtctccacgcctggtgagaaggatgcttctggagttaagctaacaagtgttgatataatcgaggaaaagagcaacttcctccggtaccctttg

SEQ ID NO: 8170 - DNA, 298 bp, Zea mays
ctgagattctagaggaggcaacttttactaatgttgaacagtttctggaacctcttgagctctgttatagatcattatgtgcttgtggtgacaaacctatagctgatggaagtcttcttgatttcttgcgtcaagtatcaacttttgggcttgcccttgtgaagctcgacatcaggcaggaatctgatcgacacactgatgtccttgattcgataacgacacatcttggaattggctcctatgctgaatggtctgaggagaaacgccaggattggctgttgtctgaactgaggggcaa

SEQ ID NO: 8171 - DNA, 297 bp, Zea mays
cggaccgtggccgttgctcgcctcgggtcaaaccctaagcagggagttgatttatccgctgcagccatgagtaagttgcagtctgagtctgtcaaggatatccatctcccagattgttggggatgccaaggagaagaataggaagttcactgagactgtggaacttcagattggtctgaagaattatgatccacagaaggacaagcgtttcagtggctctgttaagttgccccatatccctcgtcccaagatgaaggtgtgcatgcttggtgatgcccagcatgttgaggaggccga

SEQ ID NO: 8172 - DNA, 298 bp, Zea mays
cctagccctcgcgccgccgcctcctccgccacccagcgctcgagctcctcgcgtcctgcgagcgcgctccgcaacgtcaccatgaagttcaacatcgcgaacccttccaccgggtgccaaaagaagctggaaatcgatgacgaccagaagctgcgtgccttttatgaccgaagatatcccaggaggtcagtggtgatgctctgggtgaggagttcaagggttatgtcttcaagatcatgggtggatgtgataagcaaggcttcccaatgaagcaaggagttttgacttctggtcgtgt

SEQ ID NO: 8173 - DNA, 299 bp, Zea mays
agaagatggcggaggacatcatcttagattttacaaaatcaaagaagcaatcaaatatggctgtcatgatcttaagatacttcaacgtgattggatcagacccagagggacggctaggagaagctccaaggccagagctacgcgagcatggacggatatccggtgcttgctttgatgcagctttgggaatcattccagggctaaaggttcgtggaaccgattactccactgcagatggaacttgcgttagagactacatcgatgtcacagatcttgtagatgctcacgtaaaagctctt

SEQ ID NO: 8174 - DNA, 298 bp, Zea mays
ggaccgtgggcccgcatcgccgcatggttcgcaaagatggcagtgccgctgctgacgcagaagatcgtgaagaagcgggtcaagcagttcaagaggccactacctcgaccgctacaagtgcctcaagccaagctggcgtaggcccaagggtattgactcccgcgtcaggcggaagttcaagggatgcaccttgatgcccaacattggatacggctctgacaagaagacgaggcactaccttcccaacaagttcaagaagtttgtcgttcacaacgtctctgagctggagctgctgttg

SEQ ID NO: 8175 - DNA, 278 bp, Zea mays
cccacgcgtccgcccacgcgtccggaactcgaatccctcatccagcctgtcgctggcgtcgccggtcgccgccgctcgattgcctccgcctgaatatcccttgccccataaggcctgaccttgaaagcctcgccacttgatcccggcggcggcggaggggagggcgatgccgaagcggacgacacacacctactcgagcgaggacgcactgccggagggccccgagtccgaccttttcgtatactactgcaagcactgcgcctcacatgtcctcatca

SEQ ID NO: 8176 - DNA, 275 bp, Zea mays
gtcaaagttgatgacaagaagcttgccattggaacgctctctatcgacaaatacccacagatacaattcgatttggttttcaataaagagtttgagctgtcacacacatcgaaaactaccagtgtatttttctctggttacaaggttgagcagccaattgagggagatgaaatggatcttgattctgaggatgaagaggaggagctaaacattccagtaatcaaggaaaatggcaaagctgatgggaaggaggagcagaaaaatcaagagaaggc

SEQ ID NO: 8177 - DNA, 276 bp, Zea mays
cggaggccggaggaaggagatcgcgagcagccggagccggaggccgagaggatgaagacgttcgacccgtggccggtcttcttccgccgggagtggaagcgcaactggcccttcctcacggggttcgccatcaccggcttcatcatcaccaagatgacggccaacttcaccgaggaggacctcaagaactccaagttcgtccaggaacacaagaagcgctgaccaaccgggagtcgtccgaatcgcctgcggatgaaaaattagccccctatttat

SEQ ID NO: 8178 - DNA, 274 bp, Zea mays
ggtggccggacggtggtggcatcgccaattcaactccgcatctgaatcggcactcggcagcgcgccactccatagtgtaggaggagatggcgctcacaagaatcggtcttgctggccttgcggtcatggggcagaaccttgccctcaacattgcagagaaagggttccccatctctgtgtacaacaggacaacctccaaggtggacgagaccgtgcagcgtgccaaggcagaaggaaaccttcccgtctacggcttccatgaccccgcgtcctt

SEQ ID NO: 8179 - DNA, 274 bp, Zea mays
gatttatccgctgcagccatgagtaagttgcagtctgagtctgtcaaggatgccatctcccagattgttggggatgccaaggagaagaataggaagttcactgagactgtggaacttcagattggtctgaagaattatgatccacagaaggacaagcgtttcagtggctctgttaagttgccccatatccctcgtcccaagatgaaggtgtgcatgcttggtgatgcccagcatgttgaggaggccgagaagatgggacttgactacatggatg

SEQ ID NO: 8180 - DNA, 122 bp, Zea mays
aatccttcaagcgcaactgcctcctcctcgtcgtccggtcgtgagaagggatggcgggccgtggcaaggctatcggcgctggcgccgcgaagaaggcaacgtcgaggagctccaaggccgga

SEQ ID NO: 8181 - DNA, 271 bp, Zea mays
atttgttcctgaggatgctactatagttggaaacacttgtctgtatggagctacaggtggtcaggtatttgtgagaggcaaggcaggagaaagatttgctgttagaaactctctatgtcaggcagtggttgagggcaccggagatcattgctgtgagtacatgactggtggctgcgtagtcgtacttggcaaagctgggaggaatgttgcagctggaatgactggtggtcttgcctacattctagatgaggatgatacacttgtcccaaag

SEQ ID NO: 8182 - DNA, 271 bp, Zea mays
gaggcaagctctatatgcctccaagatctgcagttacgcgcagggcatgaacatcatcaaggccaagagctcagagaaaggatggggcctcaaccttggtgagctagcgaggatctggaagggagggtgcatcatccgtgccatcttcctcgaccgcatcaagaaggcgtacgataggaaccctaaccttgccaacctcctcgttgaccccgagttcgcccaggagatcatagacaggcaagctgcctggcgcagggttgtctgccttgcc

SEQ ID NO: 8183 - DNA, 271 bp, Zea mays
ctccattctcagccgccgccaatcccttcccgtgctccgcaaccgctgagtgagaagaagagatggccggcaagggcgatggcccggctatcggcatcgatctcggcacgacgtactcttgcgtcggcgtgtggcagcacgaccgcgtcgagatcattgccaacgaccagggtaaccgcaccacgccctcgtacgtcgccttcaccgactccgagcgcctcatcggagatgcggccaagaaccaggtcgccatgaaccccatcaacaccgt

SEQ ID NO: 8184 - DNA, 269 bp, Zea mays
cccacgcgtccgcgcgccccgaatttcccgagccaactccgccccgccctgtcgctttcccttccacacgcgccgttcgctttgatcgatcaggcaggcatggccgacgagacgaagcaagaagccgccgccccggcgccgaggtggtcgtgacggaggaggagaagaaggcagaagagaccgccccggtggcggaggaaaaggccgtggaggcggctgtagagaaggccgcggaggcggaggcgggggccgaggaaaaggccgcggaa

SEQ ID NO: 8185 - DNA, 271 bp, Zea mays
attcctcccaacaccacctcgcctgcgatcttcgtagcctccgtcgcgtcgagcatcgatcatgtcggcctactgcggaaagtacaaggatgagctcatcaagaatgctgcctacattggcacccccggcaagggtatccttgctgctgatgagtccactggcaccattggcaagcgcctttccagcatcaatgtcgagaacgttgaggagaaccgccgtgccctccgtgagctcctattctgctgccctggtgctctccagtacatcagc

SEQ ID NO: 8186 - DNA, 270 bp, Zea mays
cacacatccgtttgcctcttctccctcttgccggtcccgaataaagagcagcagcgcaagaggtcggtagagcgagaagaaggcaatggcggccgagagcttccttttcacctcggagtccgtgaacgaggggcaccccgacaagctgtgcgaccaggtgtcggacgccgtgcttgacgcatgcctcgcgcaggaccccgacagcaacgtggcctgcgagacctgcaccaagaccaacatggtgatggtgttcggcgagatcacgaccaa

SEQ ID NO: 8187 - DNA, 270 bp, Zea mays
cccacgcgtccgcagccatcctactgtcacacacacacacacacacagacaagtggtttccaaagccaagtgtgtgtactagcaaccagctagctcgggcggcagcaggcagccatcatgtcggaggagaagcaccaccacttcttcaaccaccacaagaaggacgaggagcagcccgccggcgagtacgggtactccgagaccgaggtggtcaccgccaccggcgagggcgagtacgagaggtacaagaaggaggagaaggagcacaag

SEQ ID NO: 8188 - DNA, 190 bp, Zea mays
ctcatcaccgatggccacggctaacacaagcaagcaagcaagtcactgagtagctagcagtatataccaccataaaaacaacacacacacacgtgcgctaataagctaagcttaaggtagctcctctctatctccggctagctcggacggacgacgttgccatggctgctcaactgcatcacgcactata

SEQ ID NO: 8189 - DNA, 265 bp, Zea mays
cccacgcgtccggattcttatgagattgaaggcggcgagacaaaatcagagattttgcagaatctagctgagttccagttttcttgtgtcctgtacaatggtgccctagagaatgcatgcagtgagcttggagcccgtatgtctgccatggacagctctagcagaaatgctggcgatatgcttgatcgtctcactctcacttacaacaggacacgccaagcatccatcaccacagagcttactgagattatatctggtgcatcgg

SEQ ID NO: 8190 - DNA, 264 bp, Zea mays
gtattagaaaggctgactggacagtctactgttcctaacgttttcatcggtggaaaacacgttggaggctgcacagataccgtgaagctgtatcgcaagggggagctagctagcatgctgtcggacctggatatcaacattgacaactcatgacaagctatgttctgcaaggattgggcgagacttgggcagcactgtattgagtttctttttttaacatgtgcgatgacaaaaactggtgtcatttacacattttcgtttggt

SEQ ID NO: 8191 - DNA, 264 bp, Zea mays
cttcgaaccttgtggtctaacacagcttattgctatgcgctatggatccatcccagttgttcggaaaactggaggcctgtacgacaccgtttttgatgtcgacaatgataaggatcgggctcaagcacaaggtctcgagccaaatggattcagtttcgaaggagctgatagcagtggtgtggattatgctctcgacagagccataaccacattttatgatgcacgcgactggttcaattccctttgcaagagggtaatggagca

SEQ ID NO: 8192 - DNA, 265 bp, Zea mays
ggagaatggggatggggtcgtccctccttcgggccgtcttcctcctgctggcctgttgttgctccttcgccagcggcggcgtgaacaactacaacaccagcgatgccgccgccagcagctgcagtggggcaacgccagggccacatggtacggccagcccaacggtgccgggccctacgacaacggcggcgcttgcgggttcaagaacgtcaaccagtacccgttcatggccatgacctcctgcggcaaccagcctctctaccgc

SEQ ID NO: 8193 - DNA, 265 bp, Zea mays
cacgacttccgtccgagtctgagctcatctccacgcgccgccgccgccgctcgacgcccaccgcgcaccatggcggaacagactgagaaggctttcctcaagcagcctaaggtgttcctcagctcaaagaaatctggcaagggtaagaagccaggcaagggtggcaatcgattttggaagagcattggccttggtttcaagactcccagggaagcaattgaagggacctacattgacaagaaatgtccattcactggaaccgttt

SEQ ID NO: 8194 - DNA, 326 bp, Zea mays
cctcccaacaccacctcgcctgcgatcttcgtagcctccgtcgcgtcgagcatcgatcatgtcggcctactgcggaaagtacaaggatgagctcatcaagaatgctgcctacattggcacccccggcaagggtatccttgctgctgatgagtccactggcaccattggcaagcgcctttccagcatcaatgtcgagaacgttgaggagaaccgccgtgccctccgtgagctcctattctgctgccctggtgctctccagtacatcagcggtgtgatcctcttcgaggagaccctgtaccagaagaccaaggatggcaagccttttg

SEQ ID NO: 8195 - DNA, 316 bp, Zea mays
tggtgttgttaatgtcaatattactgacagccagatacctcttgctggaccccactcgatcattggccgagctgttgttgtccatgctgatccggatgaccttggcaaaggtggacatgagcttagcaagagcaccggaaatgctggcggacgtgttgcctgtggtatcattgggctccaaggctaaagcggttaacctccgaggcaaacaccatagaaggtcgaagcgagcacctcaggaagttgctgttccatttcccctgtattggcaacacaatttgagtactccaaataagcgcctgatccatgatcagag

SEQ ID NO: 8196 - DNA, 308 bp, Zea mays
cagaccgtgggccctagccgccgccgccgctcgtctccctgagaggtgccgggaccgaggaactggccgagttctaggtagagaatcggttttgcttgcttcagcacggggtctgctgcgtctggtggtggtgaaggggagaaattcgtgagatctgttccggatcaggcgtgcgagctcgggaatcaggggtttcacacatagcttcgtcgatttgaatttgatgtactaatggagtctaagggtggcaaaaagtctagcagtagtcgttccatgatgtatgaagctccccttggctacagcattga

SEQ ID NO: 8197 - DNA, 313 bp, Zea mays
gcagaagcagctgggtatggttcacagttggttttgtttccggaagtctttgttggtggctacccacatggatctacctttggactggttgtcggcaatcgcactgccaagggaaaggaagactttcagaagtatcacgcatctgccatagatgtgcctggtccagaagtgtcccgcttatctgcattagctggaaaatataaggtgtttctggtgataggggtggttgagagggcaggatatacactttacaacacggtgctctccttcgatccactgggaaaatacctagggaagcaccgcaaggtcatgc

SEQ ID NO: 8198 - DNA, 197 bp, Zea mays
cgaacaagccacgcgccccgcctgccccggccgggccggcaggcggcgcggcgtgggcctcgccctcctggaggaggccctgctgggcctgttcgccgcggctgtggtggccatcgccgtggccaagctgagcggcaagcggtagcgcctcccaccggggcccccgggcgcccccgtggttggagactgggctgcag

SEQ ID NO: 8199 - DNA, 314 bp, Zea mays
catccagccgccaccaggtgcagagtctttcgtcatctcttctccggcgaagaacccccagtcgcccaccagatcacttgttaaactttgttgaggggtgatggcggtttctttcgcaaacctcaactccgaggcagggcttaaaaagcttgatgagtaccttctcactcgcagctacatcactggctaccaagcttccaaggatgacttggctgtctacacttcgttttcggctgctccctcgtccaagtatatcaacgtagcaaggtggtttaaccacattgatgcgctcgtgaggctgagcggaattactg

SEQ ID NO: 8200 - DNA, 307 bp, Zea mays
ggctcgcgaatccgtctttgcctgatgacatcttgaaggaagctgttcctggaaacataaggagggctgaacattttcttgctgtcttgcggaggcttgtgagattccttgatggccggcttgaaacagaaaatgttgagaatgaaatgccagtttcctttgttgcctcaatccattcccaggctggaatcgaccaaaaaatgctgaggttttgttatgaccggctacactccctaatgatgacattagagataactgatacagatgagttcatgcacatacagaccatatgtgactttgccacact

SEQ ID NO: 8201 - DNA, 305 bp, Zea mays
gttggaagaagcgcatgatgaggctgaagaggaagcgccgaaagatgaggcagagatccaagtaggctgatggggattgtggatggtggtgtcggcatagttgtgttacgtttcttcgatgcgtgagttcatggagagatgtcacatcctagttcgtcgtcaccgtttgccatgggtccaatggctcgtcttggaaacctgcacttcagtaggccatctatcgtggtttctagctatatccagagttttgtgctaagacaaatcagtcagtcgttttgtgaacctattatgatggagctttattt

SEQ ID NO: 8202 - DNA, 245 bp, Zea mays
gtcacagctcacagcaaacaccgcgaaccgcccccgctcccaaacccgaccgagcaaagcgcaaagccccccaaccgcggatcaatccgcagcatcgatggcgcccaaggcggagaaaaatccggcggcgaagaagcccgcggaggaggagcccgcgaccgagaaggcggagaaggctccggcagggaagaagccgaacgggagaaacgcctccccgcgggcaagtccggcgccggcgagggcaa

SEQ ID NO: 8203 - DNA, 298 bp, Zea mays
ggtcaactacctgcaagttagcctcgcaatctttaggaagctatgcattctaaagggtgtctttccacgtcagccaaagaagaaggtggaagggaaccacaagacctactaccacacaaaggatattgcattcctcgctcatgaccctttgatcgagaagttcagggagattaaggtccatcgaaggaaggttaaaaaggctgttgctaagaaaaacagggatcttgcagacaggctgttgaatcggcaccaacttacaagcttgataggcttgtccttgaaaggtatccaacattcg

SEQ ID NO: 8204 - DNA, 304 bp, Zea mays
cccacgcgtccgcgccacggaagttcttggtggtgggaagttttatgttcagacagtgggtgaccagagggtggcttcaattcaacagcagcttgcatctttgaaactttaagatgcaccagtcattggtgcctttaatcctgtgaagggagagatagtcctctcacaatttagccttgacaactcctggaacagagctatggtatgtcgcatgtgtacggttactaaatgtttatgatgaaatcaactaatctttatgggccatagtcaatagttgaattgtgtcttgcactcttgctatctt

SEQ ID NO: 8205 - DNA, 307 bp, Zea mays
acatcccgtcgcatcccatcccactaccacccatctcgtcgtccgccgattcgatccggttcttccaacccaggggcagtgatggcgacgaagaggagcgtgggcaccctcggcgaggcggatctgaaggggaagaaggtgttcgtgcgcgccgacctcaacgtcccgctcgacgatgcccagaagatcaccgacgacacccgcatccgcgcctccgtccccaccatcaagttcctcctcgagaagggcgccaaggtcatcctcgccagccacctgggtcgtccaaaaggtgtcaccccaaagtaca

SEQ ID NO: 8206 - DNA, 311 bp, Zea mays
cggacgcgtggcgagaagaagaagaaacaagccataccatagcacacaccaaaggttactcagtcacatggcaacatccagcacgggctgtctcgtcttgctcctccttgcgtctcccctcctcctccttcccagtgcggtggtccttggccacccatggggtgtcggcggcggcggcttgtccccacagttctacgaccactcgtgtcccatggcggagaagattgtgcagtccgttgtggcgcaggctgtggccaaggagaccaggatggcggcgtccttggtcaggctgcatttccatgactgctttg

SEQ ID NO: 8207 - DNA, 305 bp, Zea mays
gatttgaagtgtgataacttgcttgtaaatcttaaagatcaatcacgtcccatatgcaaagttggtgactttggtttgtccaaaataaaaagaaataccctggtttcagggggtgtgagagggacactcccatggatggctccagaattactcaatggaagcagcaataaggtgtcagagaaggttgatgtattttcttttggtattgttatgtgggaaatcctcactggcgaagaaccatatgccaatatgcactatggcgcaattatagggggcatcgtaaacaacacactgaggccacatgt

SEQ ID NO: 8208 - DNA, 305 bp, Zea mays
ataaaatgggtgcagagtatcttgccaagcttctgtcacagcatttagaggctgtgatcagggcaaaaattccaagtattatagctatgattaacaaaacaattgatgaaatagaagcccagttggatcgacttggtaggccaattggaggtgacgctggggctcagttgtacacaatcttggatatgtgtcgggcatttgaccgtgtctttaaagagcacttagatggcgggcggccaggtggagatcggatttatggtgtctttgacaaccagttacctgcagcactgaaaaagcttccattt

SEQ ID NO: 8209 - DNA, 263 bp, Zea mays
cccacgcgtccgaccaaaggagccttacacggccacgatcgtctctgtcgagaggcttgtaggacccagagctcctggcgaaacatgccacgttgtcattgatcatggcggcaatgttccgtactgggaaggacagagttacggcgtcattcctcctggagagaatccaaaaaaacctggatctcccaatactgttaggctctattcaattgcttctactaggtattgtgattcttttgatggaaagccagcaagcttatgtg

SEQ ID NO: 8210 - DNA, 299 bp, Zea mays
cgggacgtaaggcgaaggagtagcagcagcaggcggcgccgagtagcggctccccatctcgagcttgccaccatggctagaggattgaagaagcatttgaagaggctcaatgcccccaagcattggatgctggacaagcttggcggagttttgctcccaagccatcttctggacctcacaagtctagggagtgcctgccactgatcctcatcatcaggaacaggctcaagtatgctcctagataccgtgaggtcatttccatcctggatgcacgccatgtacttgttgatggcaaggtc

SEQ ID NO: 8211 - DNA, 317 bp, Zea mays
tctggctcggacgacgagaagaagaaggggtcttcttcggcgtcggcgacggaggccatgaaagccaagatctgccgtctcttcggccgcgagaagcccgtccactctgtcctcggcggcggcaagcccgccgatcttgtcctatggaggaacaagaagatctcaggcggggtactcgctggtgccacggccatctggctcctgttcgaggttatggagtaccatctcctcaccttggtgtgccagtgtctcatcgtctcgctggccatcctgttcgtgtggtccaacgcctccagtttcatcaacgagtccccacc

SEQ ID NO: 8212 - DNA, 313 bp, Zea mays
aatttgctttccgtgttgaagaagatgctgtttggagtcaggttgccaaagcccagttgcgtgtaggtcttgtcagtgaagcaattgagtccttcattcgtgcagatgatgctgcacacttccttgatgtcatccgtgctgcggaggaagctaatgtgtacaatgatttagtgaagtaccttctgatggtaaggcaaaaggcacgggaacccaaagtcgatggagaactcatctttgcatatgctaagattgacaggctcagtgatattgaggaattcattcttatgccagatgttgccaaccttcaaaatgt

SEQ ID NO: 8213 - DNA, 323 bp, Zea mays
cccactcgtccgcccacgcgtccgcggaaaaccacggccggcgttcctgcttctctacccggtccgaattgctgaccggatcaacccgagaccttgcaggattatcgatctgattgcggcatgatccgcttcatcctgctgcagaaccggcaggggaagactcgactggccaagtattacgtcccgctcgaggactcggaaaagcacaaggttgaatacgaggtacaccggctcgtggtcaatcgggaccctaagttcaccaacttcgtcgagtttcgcacacacaaagttatctataggagatatgctggactgtttttttt

SEQ ID NO: 8214 - DNA, 272 bp, Zea mays
  unsure (1)..(272): unsure at all n locations
aagtggtgcgtgtcttggtgctgcagcangaacaagaatgagaagaagactacaagaccaaagacggagaagaagaagaggttgtttttcgagaaagcagaaaacccgtgtgctgcatatgctttgggtgaaattgatgaaggtgctccaggtgctgatatcgagaaggccggaatcgtaaatcgacagaaactagagaagaaatttgggcagtcttgtgtttttgtcgcatcgagagttcttgagaacggagggaccctgaagagcgcaag

SEQ ID NO: 8215 - DNA, 296 bp, Zea mays
ccacgcgtccggatgaatgttgggcacaagaatcgtgctgttggtgccactgcactaaatgacaggagtagtcgttcgcacagttgtttaactgttcatgttaagggaagggatctgacatcagggacaatccttcgcggttgcatgcatttagttgatcttgctggcagtgaacgggttgataaatcagaggtcactggagaaaggttaaaagaagcacagcatataaacggatcattgtcagccttgagggatgtaattgcttcgcttgcccaaaggattcacatgtaccttac

SEQ ID NO: 8216 - DNA, 276 bp, Zea mays
cggagccgtggtgctgagcgacgcgcttcgagctggtctcggcggctctacgaggcggtgggcagggaccacgtggtcggtagcagcgctggcggcagtcgggttcgctgccagagagtgcacggaccctcccccggcgccgctggtcgacgcggcggagctgggggtcctggtcgctgtgccgcgccgtggtcgccgggttcatcgccaggctggtgttcctgtagatcacggtggccagcgtgatcgggtacaagcaccagaccgacgcgtcgg

SEQ ID NO: 8217 - DNA, 312 bp, Zea mays
cggacgcgtgggcaaaccacacaccccacctaccccggccggaccggcacgcagcacagcgtggacctcggcctcctagagaaggccctgctgggcctgcacgccgcgggtgtggtgaccatcgccgtggccaagctgaccggcaagctgtaccgcctgccaccgggggccccggtcgcccccgtggtgggaaactggctgcaggtgggcgacgacctgaaccaccgcaacctgatggccatggccaacggtctcggcgacatcttcgtgctgcgatggtggctgggaacctggtggtggtgtcgaccccgg

SEQ ID NO: 8218 - DNA, 313 bp, Zea mays
ggttgtgaggtcattgtgagtggaaagctcagggctcaaagagccaagtccatgaagttcaaggatggctacatgatctcatctggtcagccagtgaatgagtacatcgactcagctgtgagacacgtcctcctcagacagggtgttctgggtatcaaggtgaagatcatgcttgactgggacccgaaggcaaggttggcccgatcacccctcttccggacctggtgaccatccataccccgaattaggaggacgagctgcgccctcctgtcttggcagctgaggtctaaggtcccaacagcgtcctcgaaat

SEQ ID NO: 8219 - DNA, 311 bp, Zea mays
tgatgtgcgaggtcgaaggacaacatctcagcgccgccgccatcgtcggtcacgaggcagcgcttgggcgcagtccgagagcttccccgagttaaagcctgaggaggttgctggtatcataaaggactttgatgaacctggtactcttgcaccaactggtcttttcgttggaggtacaaagtacatggtgatccaaggtgaacctggagttgtcatccgaggaaagaagggcactgggggcattactatcaagaaaaccggcatgtccttgattattggtgtctacgacgagccaatgactccagggcaat

SEQ ID NO: 8220 - DNA, 310 bp, Zea mays
gcctagcgccgcacccgccgccgcatcagccatcagccatggcgatggccgctcgcctcgtctcgcgctcccgtcagctacattcggttcaagcagcttttgcgaatggaggtgccactcaagttcgctcctttgccaaggatgcagctccagctgaccgtcctcctgttggtggggatgatctcctgaagggcatattctttgaggtaaagaagaagtttgagacagctctcggcgtccttaaaaaggaaaagatcactattggtccagatgacccagcggcagtttctcaatatgctcaagtcatgga

SEQ ID NO: 8221 - DNA, 320 bp, Zea mays
tgacaaactggactttctagcatgcatgggagcattttttggagtcatattttcatcggtggagtatggcttgctcattgcggttgcaatatctcttgctaagattcttctccaagtaacacggccaagaacagttttacttggaaaccttccacgaacaactatatacaggaatgtagaacagtatcctgatgctaccaaggttccaggggtgctgattgttagagtgggctcagctatatacttcgcaagctctaactatgttaaagagagaatcctgaggtggctaagagatgaggaggagcaacaacaggaccaga

SEQ ID NO: 8222 - DNA, 309 bp, Zea mays
tttgatcagctctctcggtgcttatctcctgctgctgtaccttgctttgatcactcctatcatccatgacttctacaactacgatatggagaaggcagaatttgcaggcctctttgcgaagttcacccaggatttggcgctgatcggagctctgctcttctttctgggcatgaagaactccatcccgaagcggcagggcggcaagaagaaggcccccaaggcgaagacgaactagggctgcttagatagctgcacgcctcaggcggggtgtatcaggccacaggtctatttcgaagcaggcccagcgcg

SEQ ID NO: 8223 - DNA, 307 bp, Zea mays
cgcacgctccaaagccactcccaaacccccgcttccagaaccttctcgaagctccccgccgcctcctccactcgcaccgatggcgaaggaaccaatgcgcgtgctcgtcactggcgccgcgagacaaattggatatgccctggttcccatgattgctaggggtgttatgcttggtgcagaccagcctgttattctgcacatgcttgacattccgccagcagctgaagcccttaatggtgttaagatggagttggttgatgctgcgtttcctcttctgaagggagttgttgctagaactgatgttgtg

SEQ ID NO: 8224 - DNA, 308 bp, Zea mays
catccaccttccaccacaagcaccgccgcagccggtgcctgctccttcccgatccccgaggcaaagctgcgactccgcaaccgccgccatggcgttcgagaagatcaaggtctccaacccgatcgtcgagatggacggtgatgagatgaccagggtattctggcagtctatcaaggacaagcttatcctcccatttctggacctggacatcaagtactatgatttggggatactgcaacgtgaagcaactgatgacaaggtcacagtggaggctgcagaggctactctcaagtacaacgtggctatta

SEQ ID NO: 8225 - DNA, 304 bp, Zea mays
ctgacgcgtggtgagcattactatctcctggacttctgctactatgccaacacatttctccttgtgatgattctcttctatccgaaagatgaaaaacttttattggtttgcttctcgtttgcagagggtccacttgcttgggcattaattgtgtggcgttgcagcttagtttttggttcatttgacaaacttgttagtgtcctgatacatctcttacctgggattgttctattcactatccggtggtgggatccacaaacatttgctgccatgcacccggaaggaagagatgccagagtgacat

SEQ ID NO: 8226 - DNA, 305 bp, Zea mays
gcgccccctggaggagggtcttgctgaggcaattgatgatggccgcattggcccacgtgatgatcctaaggtgcgctcccagatcctctctcaagagtttgggtgggacaaggatcttgccaagaagatttggtgcttcggacctgagaccaccggcccaaacatggttgttgatatgtgcaagggagtgcagtatctcaatgaaatcaaggattctgttgtggctggtttccagtgggcatcgaaggagggtgcactggctgaagaggacatgcgcgggatttgcttcgaggtctgtgatgtcg

SEQ ID NO: 8227 - DNA, 310 bp, Zea mays
cctcccaacaccacctcgcctgcgatgttcgtagcctccgtcgcgtcgagcatcgatcatgtcggcctactgcggaaagtacaaggatgagctcatcaagaatgctgcctacattggcacccccggcaagggtatccttgctgctgatgagtccactggcaccattggcaagcgcctttccagcatcaatgtcgagaacgttgaggagaaccgccgtgccctccgtgagctcctattctgctgccctggtgctctccagtacatcagcggtgtgatcctcttcgaggagaccctgtaccagaagaccaag

SEQ ID NO: 8228 - DNA, 310 bp, Zea mays
gaccggcgccctcctcttccctgccattaacgtcaacgattccgtcaccaagagcaagtttgacaacctgtatggtttccgccactcgctccctgatggtctgatgagggccactgacgttatgatcgccggaaacgttgccgtggtctgcggatacggtgatgtcggcaagggttgtgctgctgccctcaagcaggctggtgcccgtgtcattgtgaccgagatcgaccccatctgtatcctccaggctctgatggagggtcttcaggtccttcccttggaggacgttgtctctgaagctgacatcttc

SEQ ID NO: 8229 - DNA, 116 bp, Zea mays
aagtcatttctgggccctgtgagaagccaatgaatggtgtccagcacaaaggtgaggagaagcagtttgcagctggagagatctcctctatggttcttatcaagatgcgtgagatt

SEQ ID NO: 8230 - DNA, 139 bp, Zea mays
gtccgcctacagggcatccttgtttacgagttcatgcctctaggaagtgtggagtctcatttgttttcaagggttatggtgccacttacgtggtcgatcagaatgaaaattgcgctcggtgctgcgaaaggacttgctt

SEQ ID NO: 8231 - DNA, 292 bp, Zea mays
cgacccgcacgccttcaacccctggaggtggaaggagaggcccgacgtcgtggccatgagcggcttcaccccgttcggcggcggccagatgctgtgccctgggctcgacctggcaaggctcgaggcctccatctttctgcaccatctcgtcaccaatttcaggtgggtggcggaggaggacaccgtcgtcaacttccccacggtgcggctcaagcgagggatgccaatcgcagtgacgcccagaacctgctgaacgcaacgcaagttgccaggcaaaaccatagtatagatt

SEQ ID NO: 8232 - DNA, 111 bp, Zea mays
aggtgaggagcctgatagagagaagggagttataaggacgcaagaggagactggtagacatgttaggatgcttacacatgaaatcagaagtagtcttgatagacatgcaat

SEQ ID NO: 8233 - DNA, 293 bp, Zea mays
cgcggttcaagcgtttcccattcggagccctaatcctgtgtttccatactcgcggaagccaccaccaccggcaggggaagcggaaggggagcacctcgggccaggcaagatggtgcttgcgcagctgggcgggagcatctcccgcgccctggcgcagatgagcaacgccacggtgatcgatgagaaggtgctcaacgactgcctcaacgaggtgtcgcgcgctctcctacaggccgatgtccagttcaagatggtccgcgacatgcaggccaacatcgagcgcatcgtcaacc

SEQ ID NO: 8234 - DNA, 292 bp, Zea mays
gccaagcgtccgagtaatgttaacaaaaatgagaaatgcatcattaagatgctcaagcctgtgaagaaaaagaagatcaaaagagaagttgagattcttcaggatctttatggagggcctaacaatgtgaaagcgcctgagagtgttagagagcagcaatcaaaaacaccaagcgtgagctttgagtaggtcaacaacacagatttcaaagtgttgtacccgacactaacagattatgacattcggtattacatctatgagttactcaaggcattagattactggcattcac

SEQ ID NO: 8235 - DNA, 292 bp, Zea mays
caaaaataactggcaaagagggactatacttctcaggtcctgcattagtttttgagggtgaagagtccatgattacagctatctcagaaaacccagcaaatttcaagggaaaggtagtagtgatccgaggagaaggaccaaaaggcgggccagggatgcccgaaatgttgactccaacaagcgcaataatgggtgctggtcttggaaaggagtgcgccctgctgacagatggtagattttctggagggtcacatggatttgttgtcggtcacatatgccctgaagcacagga

SEQ ID NO: 8236 - DNA, 292 bp, Zea mays
aagagcacgcactgcagcaccacttcctgcgctgctgctcatcacacaccgtagtactaacactccatcgccacaatggctcccaaggttgcgctcttccttgccctcagcctcctcttcgctgccgccgcgcatggctgcgaaccctactgtcccggcccagtcgtcccaacgccgcccgtcgtgccgtcgcacagccacgggcgctgcccgatcgacgcactaaagctcaaggtgtgcgccaacgtgctggacctcgtcaaggtcggcctaccccagcacgagcaatgtt

SEQ ID NO: 8237 - DNA, 114 bp, Zea mays
cccacgcgtccgccgaaccccaaaccctagcttcgctcgttgcagcggcgagccggcgatggcgaagtctctgcgatccaaacgcgagaagcggcttcggacgttgcgccggga

SEQ ID NO: 8238 - DNA, 105 bp, Zea mays
  unsure (1)..(105): unsure at all n locations
nccaaacgaccgctcaagttgagggattctccggtatccagccctggtcagatcagttcttgatggggttaatgtgtgcatttttgcctatggtcaaactggttc

SEQ ID NO: 8239 - DNA, 285 bp, Zea mays
cccacgcgtccgcaagctgcaggatcgaggaggttgcctccagttgcgacgctgttcggttttgtcagttatatgtgtacaagagaagggatgtttcggcaacattggtacggcgggctgaaagtttaggattcagggcaattgttttgacagttgacacgcctgtgcttggcaggcgtgaagctgatatcagaagtaaggtgattgctccacctctgtcaaaccttgaaggtttagtgtcgttagacgactttgacgatgctgaaggcggctccaagctggaac

SEQ ID NO: 8240 - DNA, 288 bp, Zea mays
ctcgcagctagctgacacggccgagaagcagcttgcattgcaggcgtagtacgtacccagcagcagctagcactagcagtccatcggagcgacgatggtgagaaggacggtgctggcggcgctgctggtggccgccgccctcgccggcggcgcgcgggcgcagctcaaggaggggttctacgactactcctgcccacaggcggagaagatcgtcaaggactacgtgaaggcgcacatcccccacgcgcccgacgtcgcctccaccctgctccgcacccagttccacga

SEQ ID NO: 8241 - DNA, 286 bp, Zea mays
agcagatccgtcgttgccggacaccacgctcgccggctgcgaatgcatctgtagcctgctcttcgtccacacggacaattggacgagctagactctgcgtcgccggcgatggggtgctccttctcagggctgaacgcactgtacgacaccgtcggcggtcggggtggtgacgtctgggttaacgactaccacttccgcgtgcatccgcaggtcggcgatgccggccctgcgggctcgtcggtcttcctcatcaaggaggtcgtcgccgccgcaaccgcctccgacg

SEQ ID NO: 8242 - DNA, 285 bp, Zea mays
ccacgcgtccgggtattgcagccacctaagcttaaagccgggaatggtgaagacatttttacacgcaatggtagatggaagttcgacaatgagatgctcattagagcttgtagtgtcgagaaatgggcggtggtgaacttttctgcacgatgcaatgtcagggatcttgtccgggatctcatcaagtgtggaggcatgaagggcattatggttgatgctgcttttgctgtatttgatgagaatccttcaatgagacggtcacctgctataagaagggttgaagac

SEQ ID NO: 8243 - DNA, 300 bp, Zea mays
cacaaggcggtactacatatgttcattgtaaagctggaagaggacgaagcaccactattgtattgtgctacttgattaaatacaggaacatgacccctgaagcagctttggatcatgtacgatccattaggcctcgagtgcttttggcaccctcgcagtggcatgtatgcagtcttttgtgattgctttataagttattagtacaatactactggcgttaagacactatgacaatccacacaattttgcaggctgttaattcatttggagctctcaccggtggacaacttccagtacgga

SEQ ID NO: 8244 - DNA, 297 bp, Zea mays
cccacgcgtccggtcctaactacctccacccccgcacgcacaactggccgcaccaaggcaaagctagaagaagacaacgcaaagggagaggacagaggaggagcagaggacgatgggcagcggcggcgctaacactgcccccctcatcaccccctacaagatgggaaaattcgatgtttcccacagggtagtcctcgcaccactgacgagacagcggtcctacggcaacgttcctcagcctcatgccatactgtactatcagcagagggcgactaaaggaggtcttctgatagctga

SEQ ID NO: 8245 - DNA, 299 bp, Zea mays
cggacgcgtgggcggacgcgtgggcggacgcgtgggcggacgcgtgggaaagagctgttctacagagagttgccagtaatggatgactcacttgctgtaaagcctcttccaggatctcctacaatagccgaggtacgagagcgtattttgaacagatgtaaagaagtggagaagacggccatagaacaagcaacagacaacgcgatccttgaccagctcgggaagttggtcgaggtcgacgtccctcgtgccttgtttcaagagcaaggccagcagctttatggagccaagcttctgca

SEQ ID NO: 8246 - DNA, 297 bp, Zea mays
gccgctgcagtacgtcgtcgccaactccttcatcgctgcgctctacgccgactacatggaggccgtcaacgtccccggctggtactgcggtccaaacttcatgaccaccaacgacctccgtgagttcgccaggtctcagatcaactacattctcggtgacaaccccaagaagatgagctacgtggttgggttcggcagcaagtacccacggcacgtgcaccaccgtggcgcgtccacgccgcacaacggcgtcaagtactcgtgcaccggcggctacaattggcgcgacacaagaaa

SEQ ID NO: 8247 - DNA, 296 bp, Zea mays
cggacgcgtgggtggtgatgttcgcatgactgatactcgtgcagatgaagcagagcgtggcattacaatcaaatctactggtatctctctttactatgagatctctgacgagtcactgaagaactacaagggtgagagagatggtaaccaatacttgatcaaccttattgactcgcctggacacgttgatttttcttcggaagtcacagctgctcttcgcatcaccgatggtgctctggttgtggttgactgtattgaaggtgtctgtgtgcaaactgaaactgtgcttcgccaag

SEQ ID NO: 8248 - DNA, 297 bp, Zea mays
cccgatccgaagctgtgcctcgtaccatttcgatccaatggcgccgacgtcgaagctgtcgacgggcatcaagcgcgcttcgcggtcgcacgcgtaccatcgccgtgggctgtgggccatcaaggccaagatcggcggcgccttccccaaggccgacaaggccgccgccgccgtggaacccaagttctaccctgccgacgacgtcaagccccgcgttcccagcacccgcaagcctaagcctaccaagctcaggtcgagcatcacgcctgggacggtgctgatcctcctcgcagggcg

SEQ ID NO: 8249 - DNA, 289 bp, Zea mays
caccagctagcacctcctttcccacgactcccgagctagcgctctgcgtgtggcgcgcggcacatggcgactgcgaacgggagcagcaaggggtcgttcgaggtgcccaatgtggaggtcaggttcaccaagctcttcatcgacggcaagttcgtcgacgccgtctccggcaagacgttcgagacccgcgaccctcgcaccggcgaggtgatcgccagcatcgcggagggagacaaggccgacgtcgacctcgccgtcaaggccggccgggaggccttccacaacgggc

SEQ ID NO: 8250 - DNA, 296 bp, Zea mays
gacgccactgccgtggctggttccggtgccggcgctttgctcagtgctgtgcacgggtttaacacagggatcccttttgtccagaagcatgtcaaggggccgaagtggctgcagttgctcgttgggcgtgccaccactgctgatattctcaggtgccagtgctgtatttggtgcatatgcacttccaaggtttgttcagctcacagtgacgtcttactacgcggcatcaactggctcgcagtatgctgtttcacagatcacacggcagatcgaaagagctcattttccagaatcag

SEQ ID NO: 8251 - DNA, 294 bp, Zea mays
cccacgcgtccgaccgcatgctccgcctgctcgcctcctacgacgtcgtccggtgccagatggaggaccgggacggccggtacgagcgccgctactccgccgcgcccgtctgcaagtggctcacccccaacgaggacggcgtgtccatggccgccctcgcgctcatgaaccaggacaaggtcctcatggagagctggtactatctcaaggacgcggtgctggacggcggcatcccgttcaacaaggcgtacgggatgacggcgttcgagtaccacggcacggactcgcgcttca

SEQ ID NO: 8252 - DNA, 293 bp, Zea mays
cccacgcgtccgcgactccgccaccgccgccgctctacgcgagacgcccaggtcttcgccaacgacgagcatccgggttagagaggaagaaattgcaaccgaaacaatggcggcagattccggcgctcgcagacaaccaagcttcaccaaggtcgaccagctgcgccctggaacccacggccacaacctcatcctcaaggttgttgactccaagatggtcgtccagagaggccgcgagggagggccccagggaagacagatgaggattgcggagtgcttggttggtgatgaaa

SEQ ID NO: 8253 - DNA, 290 bp, Zea mays
ggcaaacgcggctgctagcacggcgcccctctcccactccgactccccagccgccgccagcccgcacacccctccctcgcgcgctcagggtttcggaatggaagcctgaggcgcggctaagaggacgcgggatagcggggaggacgccgccgcggcggggatctccgccgtcatcccgggatggttctccgagatcagccccatgtggcccggtgaggcgcactctttgaaggtcgagaaggtgctgttccaagggaagtcagactagcaaaacgttatggtctttcagt

SEQ ID NO: 8254 - DNA, 294 bp, Zea mays
ctctgcttccgagatctctccccacctcccggtccgctagcagatagcgggggccagagagatcgagatccggaggcgctacgccacccatcagcgtctgcggcaatggcgggcacggtgacggtcccggggtcgtcgaaaccctccacgccgctgctcaaggacgagctcgacatcgtgatcccgacgatccgcaacctcgacttcctcgagatgtggaggcccttcttccagccctaccacctcatcatcgtgcaggacggcgacccgaccaagaccatcaaggtccccgag

SEQ ID NO: 8255 - DNA, 292 bp, Zea mays
ggatagaaaaaaatatgcacgatttctcttacgcgcatatgttgaaggtagcaagaagactaaatggtgtccagctcctgactgcacatgtgctgtggagttccttggtgatgaaaactatgatgtttcatgcaattgcatgttcagcttttgttggaattgcactgaggaagctcatcgaccagtgaactgtgagactgtttctaagtggatattaaaaaacagtgcagaatctgaaaacatgaactggatactggctaattctaagccctgtccaaagtgcaaacggcca

SEQ ID NO: 8256 - DNA, 291 bp, Zea mays
cggacgcgtggggcacaaatcatatctgctagtatagcgggtgatatggttcttgcttctgcctactctcatgagttgccacgatatggtcttgaagttggtctcaccaactatgcagctgcctactgcactggacttctgttggctcgccgtgtgctaaagatccgtggtttggataaggagtatgagggcaatgttgaggccactggtgaggacttctctgttgagccagctgatgagaggaggccattccgtgctctcttggatgttggccttatcaggactacaaca

SEQ ID NO: 8257 - DNA, 293 bp, Zea mays
ctccagcttcatcgaggtgctgcagaacatcccgtccccgaccttcaagctccccgacctcgtcagcaacttcgccaagaagggactcgacgtggacgacctcgtcacgctctccgccgcgcactccttcggccaggcgcactgctccttcgtcaacggccgcctctaccccaccgtcgaccccaccatgaacgccacctacgccgccgggctcaagacggtgtgcccgccgcctggcagcggcggcggcgacccggtcatcagcaacaaccgggtcacggaccccaacgcgc

SEQ ID NO: 8258 - DNA, 290 bp, Zea mays
ggacgacgtggtgctgtgcctgctgccgctgttccacatctactcgctgaactcggtgctgctggccggcctgcgcgcgggctccaccatcgtgatcatgcgcaagttcgacctgggcgcgctggtggacctggtgcgcaggtacgtgatcaccatcgcgcccttcgtgccgcccatcgtggtggagatcgccaagagcccccgcgagaccgccggcgacctcgcgtccatccgcatggtcatgtccggcgccgcgcccatgggcaaggagctccaggacgccttcatgg

SEQ ID NO: 8259 - DNA, 290 bp, Zea mays
gtccctcagccgcgtcgcaccgcatcgcattctacgattcgaagctctctctgctcgcagccatggcgaagaattacccaaccgtgagcgccgagtacagcgaggccgtcgagaaggccaggcgcaagctccgcgccctcatcgccgagaagagctgcgcgcccctcatgctccgcctcgcgtggcactccgcggggacgttcgacgtgtcgtcgaggaccggcggtcccttcggtactatgaagtgcccggcggaactggctcacggcgccaacgcggggctggacatc

SEQ ID NO: 8260 - DNA, 285 bp, Zea mays
cccacgcgtccgcccacgcgtccgaacgacaggtgggcttcctacgccggacctggcgggtggaacgatcctgacatgcttgaggtgggcaacggcggcatgtccgacgcggagtaccgctctcacttcagcatctgggcactcgccaaggctccgcttctgatcgggtgcgacgtgcgggcgatgagccagcagacgatgggcatactcagcaactcggaagtcatcgccgtgaaccaagatagccaaggtgcgcagggaaagaaagtgcagtccagcaatggc

SEQ ID NO: 8261 - DNA, 282 bp, Zea mays
atttttatcaacaagaaaagtggggctcagcgcggagatcttctcaagcacaagctacattttcttttgaatccggtgcaggtttttgaattaagttcttcacaagggccagaaacaggattatttttgttcagaaagctggcactggcaatgatctttcgagagttttatcatggggaggtggcctaggtgctgttgagaagcaaggtggcctttgcacaattttacatgacatagagcatgcagcagtcactatccttgatagatggaaggtgacagtag

SEQ ID NO: 8262 - DNA, 283 bp, Zea mays
caacgacggcggccttgacgacgacgacgagcagctgtgcggcatctgcctggagcaggcgtgcaccatggaggtgcaggactgcgggcaccagatgtgcgccgcgtgcacgctggcgctgtgctgccacagcaagcccaacccgacgaccctggcactgcagccacccgcctgccccttctgccgcgccaccatcacccggctgctggtggccaacagcaagactactgctacctccaacagcttcaggggactcacctcggccatcaggtccttgtccttg

SEQ ID NO: 8263 - DNA, 282 bp, Zea mays
cagattcgtcctggaaccctacaacggcaccctgccgcgcctgcgatacaaccacaactcgtggtcaaaggtgtcacatatcctcttcgtcgattcaccggttggagctggattttccttctcgagagatcccaaaggctacgatgtcggagacatctcggcctcactgcagctacaggaattcctcatcaagtggttcagtgatcatcccgagtacctcgcgaatcctttctacattggcggggactcctatgtcggaaaaatcgtgccgttcctcgggca

SEQ ID NO: 8264 - DNA, 280 bp, Zea mays
ctcctctgggtctggggccgagacaccgagcacgtactaccagcaagatggtggcgtctcccagattcaagcccatcgaggagtgctgctcggaggggcggtcggagcagacggtggccgccgacctggacggcacgctgctcatctccaggagcgcgttcccctactacctcctcgtggctctcgaggccggcagcgtcctccgcgccgcgctgctgctcctgtccgtgccgttcgtctacgtcacctacgccttcttctccgagtcgctggccatcag

SEQ ID NO: 8265 - DNA, 278 bp, Zea mays
agggcgtgctgtctgctctgagttcctcagtcgtcgtccgtctctgctcggatgcctgctctctctgcctagctagctagccagccttcctgtagcgcggcagatatggctggctgcagcacggcggcggctgcggcgtcgctgctgctgctgctgctcgtgtcgctcgccgcggcggcggacatgtcgatcgtgtcgtacggggagcgcacacggaggaggcgcggcggatgtacgcggagtggatggcggcgcacggccggacctacaacgccgtc

SEQ ID NO: 8266 - DNA, 276 bp, Zea mays
gacacatcttggaattggctcctatgctgaatggtctgaggagaaacgccaggattggctgttgtctgaactgaggggcaaacgtccattgtttggttcagatcttcctcagactgaagagactgctgatgttttaggcacatttcatgtccttgcagagcttcctgcagattgctttggcgcgtatatcatctctatggcaactgccccatccgatgtgcttgcggtcgagcttttgcagcgtgagtgccatgtaaaacatccactgagagttgt

SEQ ID NO: 8267 - DNA, 320 bp, Zea mays
cacagctctcgccttctctctcccatcggcacacccgagctcgctccctccttccacgtcgaggtccgagtcctgctttgatggcgaccgacgtggctgagactcccgcgccgttggtggatgcggccccataagcgcccgccgacgccccggcggcgcgctgctgccgacgcgaacacggccaaggccaagaacgccaccgcgccgaagaagcgcgccacgtcgacccacccgccgtacgccgacatggtctcggaggcgatcacgtcgctcaaggagaggacggggtccagcagctatgcgattgccaagttcgtgga

SEQ ID NO: 8268 - DNA, 318 bp, Zea mays
cccacgcgtccgttctcaactgctgctgacaatcagacccaagtgggtatccgtgtgttgcaaggtgagcgtgaaatggcagcagacaacaagcttcttggtgaatttgaccttgtgggcattccacctgccccaagaggcttgcctcagattgaggttgcattcgacatcgatgccaatggaatcgtgactgttgctgccaaagacaaggctaccgggaaggagcagaacatcaccatccgatcctcgggtgggctgtctgaggctgacatccagaagatggtgcaagaatccgagctgcatgcccagaaggatcag

SEQ ID NO: 8269 - DNA, 304 bp, Zea mays
ggaagaagggcctcctgtctcctctcagttcctgagtcctcgtccgtctctgctccctcctctctctacgtagcaagctggatagccttcctgtagcgcggcagagatgggtgccgctggctccagcacggctgccgcagcggcggcggtgctggtggtggtgctcgtgtcgctcgccgcggcggcggacatgtcggtcgtgtcctacggggagcgcacgacgaggaggcgcggcggatgtacgccgagtggatggcggcgacggccggacctacaacgccgtcggctaggaggagcgccggta

SEQ ID NO: 8270 - DNA, 310 bp, Zea mays
cgcatccatactccactgcatctgccatcttggggaactctttggcctctggaaccggcctgcccagccgctcgatcgacgttcggcgaggaggctgattcggtctggtggatcggaggcgcggcgatgggggcgctgtcgcggccggaggaggtgctggcgctggtaaagctgccggttgcggcggggcagatcaagcgccagatcccgcccgaggagcactgggccttcgcctactccatgctccagaaggtgtcccgtagcttcgctctcgtcatccagcagctcggacccgaactccgcaatgccg

SEQ ID NO: 8271 - DNA, 312 bp, Zea mays
caccgctcctgagacctgtccaccctgccaccgccgacgccgcgccgccgcagcaattgtcaccgtcgctatggcccgtatcaaggtgcacgagctccgggggaagagcaagacggacctgcaggcgcactcaaggagctgaagtctgagctctccctcctccgcgtaccaaggtcaccggcggcgcacccaacaagctctccaagatcaaggtggtgcgcacctcgatcgcgtcggtgctcacagtgatctcgcagaagcagaagtcggcgttgcgggatgcgtacaagaagaagaacctgctccccctcg

SEQ ID NO: 8272 - DNA, 307 bp, Zea mays
ggagtctgctctggggaacatcccgaccattgccttctgcgacactgactctcccatgcggtatgtcgatatcggcatcccatccaacaacaaggggaggaacagcattggatgcctgttctggcttttggccaggatggttctgcagatgaggggcactatcctccctgggcacaagtgggaagtcatggttgatctgttcttctacagagacccagaggaagcaaaggagcaggatgaggaagctgctgcggcccctgagtttgctgcagtcactgattaccaaggagctgatcagtggggctgt

SEQ ID NO: 8273 - DNA, 292 bp, Zea mays
gggttccaaagttgtgagggctcgaggaaggtcaccacatcatatccgtaccgaggccaggacttaaggatggtcagcacatcatatgtatctcaagatgaggacaactcatggaaggtctcgatgccatctaggttccaagttggtgagggctcaaggaagctcaccacgtcaaatgggtaccaaggccatgacttaaggacggtcagcacatcatatgcatctcaagatggggacaactcatggaaggccaccatgtcatatgggttcaaagtggtgagggctcgaggaa

SEQ ID NO: 8274 - DNA, 313 bp, Zea mays
cccacgcgtccgcccactcgtccgcccacgcgtccgcgtcctcctccattgatattggcagcaagctaggatcatcagcatgtgagcttatatgttactacatcgatcggttgccaaatggcggggatgacagtcggcagtaagctggcgctggctgcggtgctgctgtgcgcggcggcggccatggccacggcgcacaggcctccggcgtgcgcgccacgtacaacttctacaacccgcagcagaacaactgggacctcaacgccgtgagcgcgtactgcgcgacgtgggacgccagcaagccgctgtcgtg

SEQ ID NO: 8275 - DNA, 309 bp, Zea mays
cccacgcgtccggtcaccaccattagagcgcgcgcgccaagctcgtggtgaggttttcgagatgaaggttatcgagaagatcctggaagcggccggggattgccggacggcgttctcgttcgagtacttccctcccaagacggatgagggggtcgagaacctgttcgagcggatggaccgcatggtggcgcacggcccctccttctgcgacatcacctggggcgccgggggattcaccgctgaccttaccctcgaaatcgccaaccgtatgcagaacatggtgtgtgtggaaacatgatgccctgacat

SEQ ID NO: 8276 - DNA, 312 bp, Zea mays
tgctggcactgcagcctgctgaagtctttacttgctgcattctgtgctcacttttgaaagctgctctcttctgctctgcgttgttgatttctgcactcaagcttctcttgcctgtgcactcaagcttctctcttcctgggcaactagtgatctccttgaagcatttcagcttttacctagagatctttctgttgttgaaggcaagagaggctttagggtgatggcgcaaactagcctgcctcctggttttcgtttccacccaaccgatgttgagctcgtttcctattacttgaagaggaagatcatgggaaa

SEQ ID NO: 8277 - DNA, 312 bp, Zea mays
gaggataagccgaagcaggtccttgatgtctacgacgagatactctcgaggaacgagtacctggctggcgacgagttcaccctggccgacctctcccacctcccgaactcgcactacatcgtgaacaccgagagaggaaggaagctcttcactaacaagaagaacgtggccaagtggtacgagaagctctcgaagcgcgagacgtggaagcaggtcgctaagatgcagaaggaacatcctggtgcgttcgagtgattgcttgtcttggggggagctgcgagtgcaccatcatgaatggcttcatcgtctgtg

SEQ ID NO: 8278 - DNA, 306 bp, Zea mays
cctccaatgagtggggctggtgcaaacagaagcttggagcaaatgccatccttgcggtttcacttgctgtgtgcaaagctggagctatggtgaagaagattcctctttaccagcacatcgcaaatcttgctgggaacaaaactctggtgctccctgtacctgcctttaatgtgattaatggagggtcacatgctggaaacaagcttgccatgcaggagttcatgatcctcccaactggtgcctcctcgttcaaggaggccatgaagatgggagttgaggtgtaccacaacctgaagagcataatca

SEQ ID NO: 8279 - DNA, 306 bp, Zea mays
agcaaatcaaggacgctctgcacgtactattcatcttccattgttgctttgctttgctttgcttaccggcaaccatggccagcactcgtgcagcagcaactctccttttgctcctcgcgctcgccggcacctcgtcggcgcactgtccacgggcttctactcctactcgtgccccggcgtgtacggcgccgtcaagtcggtgatgcagtccgccatcgccagggagaagcgcatgggggcctccatcctccgcctcttcttccacgactgcttcgtccagggctgcgacgcgtcgctgctgctgga

SEQ ID NO: 8280 - DNA, 307 bp, Zea mays
aatcattgccttaaacatggaggatggaactcttcaccgtttccgtgcttctaatacaattctagccacaggaggttatggcagggcatatttctcagcaacctcagcacacacttgtactggagatggcaatgctatggttgcacgtggctggtttacctctccaggatcttgagtttgtacaattccatcctacaggcatttatggtgctggatgcctgattactgaaggttcccgtggtgaaggtggtatccttagaaatagtgaaggtgaacggttcatggaacgatatgctcctactgcaaa

SEQ ID NO: 8281 - DNA, 307 bp, Zea mays
  unsure (1)..(307): unsure at all n locations
gcaggcggcagagaattgtctgtgccgccgggtgggaatttgattcggtcggattcgctgcgccgcgatgccgnggcggcaccagtccatcgacgcgcagtgcggctgctggcccccgggaaggtctccgaggacgacaagctcgtcgagtacgacgccctcctcgtcgaccgcttcctcgacatcctccaggacctgcacggcgcccagctgcgcgaattcgtgcaggagtgctacgagctctcggcggagtacgagaacgaccgggatgaggctcggcttggcgagctcgggagcaactcaccac

SEQ ID NO: 8282 - DNA, 315 bp, Zea mays
caagcgaccgcgcctcggggcaaaccctaagcagggagatgaattatccgccggagccatgagtaagttgcagtctgagtctgtcaaggatgccatctcccagattgttggggatgccaaggagaagaataggaagttcactgagactgtggaacttcagattggtctgaagaattatgatccacagaaggacaagcgtttcagtggctctgttaagttgccccatatccctcgtcccaagatgaaggtgtgcatgcttggtgatgcccagcatgttgaggaggccgagaagatgggacttgactacatggatgt

SEQ ID NO: 8283 - DNA, 306 bp, Zea mays
gcagcagggagcagccatgccaggggaccacggctccaagggcgacatctccttcgccggacgcttcacggccagcgccatcgcagcatgcttcgcagagatatgtaccatcccgctcgacacggccaaggtcaggctccagctgcagaagaacgtcgtcgccgccgccacctccggggacgccgcgccacgcttcccaagtaccgcggcctgctcggaactgccgccaccatcgctatggaggaaggggccgcagcgctctggaagggcatcgtcccgggcctccaccgacagtgcatctacggg

SEQ ID NO: 8284 - DNA, 302 bp, Zea mays
caaataattggagaagtactccgacctcttgataatgaacgctttatcgtgaaggccagcagtggtccccgatacgtggtcggttgccgaagtaaagtggacaaggagaagttgacatctggtactcgtgttgtacttgacatgacgaccttgacaataatgcgcactcttccacgggaggtggatcctgtggtatataacatgcttcatgaagatccaggaaatgtcagttactctgctgtaggtggtctgtctgatcagattagagagctcagggagtccattgagttaccacttatgaa

SEQ ID NO: 8285 - DNA, 302 bp, Zea mays
cccacgcgtccggcgattactgtgaggcggtcgacgatggtgcgcccggcgcgggatacaccgcggcacgctggtggaactccaacctcgacctcgtggtgccgcgcttccacacgcccagtgtctacttctaccgccgcgacggccccgtgccggcggcggaggggttcttcgacggcgagcgtatgcggcgcgcgctggcagatgcgctcgtgccgttctatccaatggcgggccgcctcgcgcggtacgaggacggtagggtcgagatcgactgcaatggcgagggagtgctcttcgtc

SEQ ID NO: 8286 - DNA, 299 bp, Zea mays
cccacgcgtccgcccacgcgtccgcaagcacaagcgcactctagcaatggcttctgaggttgtccgccctagcgacgccgagctactaaaggcacaagccgacatatggcggctcagcctctcctacctcacgcccctgtcactgaggtgcgccgtggagcttggcatccctacggcgatctaccgccatggcggggctgcctcagccgctgagctggtcacggcgctgtctctcccctccactaagctgccgttcctccgccgcctgctgcggctcctcgccgcgtcgggcgtgttca

SEQ ID NO: 8287 - DNA, 298 bp, Zea mays
gcgagagacagacgcgtatacccaggcggcggttgatgaggaggagaagaagaagaagaagatggcttcctccgcgtacgcctcatggtccaaccggtggatccgtcccgaggtgtacccgctgttcgtgccgatggccgtggccctgggtatctgctcgtaccagcttgtgcgcaacatcacgggcaaccccgaggtgcgggtgaccaaggagaagagggcggccggcgtcctggacaaccacgacgagggcgagatgtacgccatgcacggcctcaggaagttcgtccgcgggaag

SEQ ID NO: 8288 - DNA, 304 bp, Zea mays
gaagagctagcagcaatggcgcaggagatcgagcacacccacatccccatccgcggcctcaacctccacgtcgcacaagtaggcacaggtgaactgggcactgtggtgttcctgcacggcttcccggagatatggtactcgtggcgccaccagatgcgggccgtggcctcggctgggtaccgcgccatcgcgccggactgccgcgggtacggcctgtcggatcagccgccggatcacgaggaggtgtcccttgacgacgctcatcgccgacgtgctcggcatcctcgacgccctcagcgtcccg

SEQ ID NO: 8289 - DNA, 301 bp, Zea mays
cacaaagcctcagatgtcagtcgcctgcaccgccgcttcgttcgtgtggaggggagaagacaggaaatggcggcgactgagggcgtgctcttggggatgggcaaccccctcctcgacatctccgccgtcgtcgatgacgccttcctgacaaagtatgacatcaagctgaacaatgctattctcgctgaggagaagcacttgcctatgtatgacgagttggctagcaagagcaatgttgaatatattgccggaggagccacccagaactctatcagggttgcccaatggatgcttcaaactc

SEQ ID NO: 8290 - DNA, 300 bp, Zea mays
aacgtcgcagcgatcgagacgacactgtggtcgatcgagtggggcatcgccgagctggtgaaccacccggccatccagcacaagctccgggaggactcgcctccgtgctgggcgccggcgtgcctgtgacggagccggacctcgagcgcctcccctaccttcaggccatcgtcaaggagacgctccgcctgcgcatggccatcccgctgctggtcccccacatgaacctcaacgacggcaagctcgccggctacgacatccccgccgagtccaagatactcgtcaatgcctggttcctcg

SEQ ID NO: 8291 - DNA, 305 bp, Zea mays
acctcctctgcttccgagatctctccccacctcccggtccgctagcagatagcgggggccagacagatcgagatccggaggcgctacgccacccatcagcgtctgcggcaatggcgggcacggtgacggtcccggggtcgtcgaaaccctccacgccgctgctcaaggacgagctcgacatcgtgatcccgacgatccgcaacctcgacttcctcgagatgtggaggcccttcttccagccctaccacctcatcatcgtgcaggacggcgacccgaccaagaccatcaaggtgcccgatggcttc

SEQ ID NO: 8292 - DNA, 175 bp, Zea mays
cagactcctctccgcacataccctccctacctcgccgtcgccgtcgcatctgccatgggggcgtacaagtacgtctcggagttatggagaaggaagcaatccgacgtgatgcggttcgttcaacgcgtgcgctgttgggagtacaggcagcagccggccatcgtccgcctcacaa

SEQ ID NO: 8293 - DNA, 175 bp, Zea mays
cccacgcgtccggggcacatcaacccggccgtcaccttcggcctcttcctggcgcgcaaggtctcgctggtgcgcgcgctgctatacatcgtcgcgcatgcctcggcgccatctgcggcgtcgggctcgtcaagggcttccagagcgccttctacgtgcgctacggcggcggcgc

SEQ ID NO: 8294 - DNA, 150 bp, Zea mays
cttttgttgatgtcctcaaggagggaggcgtcctccctggcatcaaggttgacaagggcaccattgaggttgttggcactgataaggagaccaccacccaaggccatgacgaccttggcaagcgctgcgccaagtactacgaggcaggtg

SEQ ID NO: 8295 - DNA, 177 bp, Zea mays
aaaacctggtggtgatgttactcttggggagttgctcaagaggaaggccagtgaaggtgtccgggtgcttatgctggtgtgggatgacaggacttctgtcggcctgcttaagaaggatggcttgatggctacccatgatgaggagactgcaaattacttccatggcacggatgtcaa

SEQ ID NO: 8296 - DNA, 175 bp, Zea mays
cccacgcgtccgctacctactactcaagtatccatccttattgagtacagtgttgatccatggactcggaaggagttgtagcagcaaaggtggcagatgagactactaaaccggcaatccaagaagacggcgccgagagcaaggccgggatgactgatctgctgatgctgaccga

SEQ ID NO: 8297 - DNA, 174 bp, Zea mays
ggtgagatcaccaccaaggccaatgtcgactacgagaagattgtcagggagacatgccgcaacattggtttcgtgtcgaacgatgtcgggcttgacgctgaccactgcaaggtgcttgtgaacattgagcagcagtcccctgatattgctcagggtgtgcacggccacttcacc

SEQ ID NO: 8298 - DNA, 172 bp, Zea mays
acggcgcagagcagtgacgtctcgcccaatgaaggggatgctgactggcccagtcacaatcctcaactggtccttcgtccggaatgaccagccgaggtttgagacttgctaccagatcgctcttgcgataagaaggaagtcgaggatctcgaggctggtggtattcaggtta

SEQ ID NO: 8299 - DNA, 174 bp, Zea mays
ccacggtccgatttaaaggcgatggctacagcaattgtgaacctgctggaccaggaaaatgcttgataaaccatggaggatgttggcatgaaactcgcaacggaaaaacattctctgcttgccaggaatctggagatgggaaatgcctgtgcccagctggtttccgaggggacg

SEQ ID NO: 8300 - DNA, 176 bp, Zea mays
cttgtgaccctccctcagccgcgtcggtcgcatcctacgatccaaagctctctctgctcgcaccatggcgaagaactacccgaccgtgagcgccgagtacagcgaggctgtgggagaaggccaggcgcaacgtccgagccctcatcgccgagaagagctgcgccccgaccttgcaa

SEQ ID NO: 8301 - DNA, 177 bp, Zea mays
catggtttctgagcaaccgccgggtccatagcaaaccaaccctgcatgcaggccagcttattatatataatatctgaggtggagcatatctatctggctgtgtactgcaagcaggcctagtacgccgcctgcgcgttcctcctattacacatataggcccctccctgcgtgtatgct

SEQ ID NO: 8302 - DNA, 165 bp, Zea mays
ccgcaacttcacagcgtatcatcgttttccatcgctcctactcctatcatccagaagatctgagcggtattgatggcgcccaaggcggagaagaagccggcggaggagaaagtggcggatgaggagccctcggagaaggcggctccggcggagaaggcccccgcg

SEQ ID NO: 8303 - DNA, 166 bp, Zea mays
cagacaagacctaccctgctgggttcatggatgtcatttccatccccaagaccaatgagaactacaggctgctgtacgataccaagggccgcttccgccttcacccaatcagggatgaggatgctaagttcaagctttgcaaggttaggtctgttcagtttgggca

SEQ ID NO: 8304 - DNA, 170 bp, Zea mays
acaaggcagacaatgcggtcctaggaactgctgctaaggttgtagttaccaaggattcaacaacaatagtgggagatggcactacacaggaggaagtgaacaaaagggtgacacaaatcaagaaccagattgaggctactgaacaagaatatgagagagaaaaactaaac

SEQ ID NO: 8305 - DNA, 168 bp, Zea mays
aaaatgatgatagtggacgacgagtacatcatcattgggtccgccaacatcaaccagaggtccatggacggtgccagggactccgagatcgccatgggcgcgtaccagccgtaccacttggcgactaggcagcctgcccggggccagatccatggcttccggatgtct

SEQ ID NO: 8306 - DNA, 174 bp, Zea mays
cttgtgaccctccctcagccgcgtcggtcgcatcctacgatccaaagctctctctgctcgcagccatggcgaagaactacccgaccgtgagcgccgagtacagcaggctgtggagaaggccaggcgcaactccgagccctcatcgccgagaagagctgcgccccgctcatgctc

SEQ ID NO: 8307 - DNA, 320 bp, Zea mays
gcgcactctagcaatggcttctgaggttgtccgccctagcgacgccgagctactaaaggcacaagccgacatatggcggctcagcctctcctacctcacgcccctgtcactgaggtgcggcgtggagcttggcatccctacggcgatctaccgccatggacgggctgcctcagccgctgagctggtcacggcgctgtctctcccctccactaagctgccgttcctccgccgcatgcatgggctcctcgccgcgtcgggcgtgttcaccgtcgacaagcagagctcggaggaggagcggtaccgcatcagccccgtgtcct

SEQ ID NO: 8308 - DNA, 315 bp, Zea mays
ctccgttgctcgcctcgggtcaaaccctaagcagggagttgatttatccgctgcagccatgagtaagttgcagtctgagtctgtcaaggatgccatctcccagattgttggggatgccaaggagaagaataggaagttcactgagactgtggaacttcagattggtctgaagaattatgatccacagaaggacaagcgtttcagtggctctgttaagttgccccatatccctcgtcccaagatgaaggtgtgcatgcttggtgatgcccagcatgttgaggaggccgagaagatgggacttgactacatggatgt

SEQ ID NO: 8309 - DNA, 312 bp, Zea mays
gagaccgtggggtgcgctatggatacaatgataaagtggaagacccaagagaatttgagggcttagttattgaacatctgaaacaatttatccatcatgaatcattttacagccaaggagataattcaacagaagaagtagaagatgcaaatgagccttccgtcagagttcaaggggcaacattgtccgatagttcttcagatagaagcactgctgctccatcaaatggatgcatctatgagatccaaacaatacaaagagagatggaggatggtgttgtccatatgctaggagaagctaatgtggtggcag

SEQ ID NO: 8310 - DNA, 315 bp, Zea mays
cctaacgacccacacgagcaccaagccgaggggaggggcgatggcgagaggtgtggtgtcgacgaagggcggcacggccgcgggcaagaagaaggggtcggtagccttcacgatcgactgcaccaagcccgtggaggacaagatcatggagatcgcctcgctcgagaagttcctgcaggagcgcatcaaggtcgccggcggcaaggccggcaacctcggcgactccgtcaccatctcccgcgagaagaccaaggtcaccgtaacctgcgacgggcccttctccaagaggtatctgaagtacttgaccaagaagta

SEQ ID NO: 8311 - DNA, 313 bp, Zea mays
gttctttgtcattaaatcgtacagcgaggatgacatccacaagagcgtaaagtacaatgtgtgggcaagcacaaccaacggaaacaagaagcttgatgctgcttaccaagaagctcagtcaaagggatctgcatgccctatattcttgttcttctcagtgaatacaagtgggcagtttgttggtgttgctgaaatgactggcgccgttgattttgagaaaaccctagagtattggcaacaggacaagtggaacggctccttctctgttaagtggcacattgtcaaggacgtgcccaacaatattctccagcac

SEQ ID NO: 8312 - DNA, 312 bp, Zea mays
ggctcttgccttggtagccgtacttgggttcctatggatctgcttgctgtccaggaagaagagcattggtggaaactatgtaaagatggacaaacagactgttcctgatggtgcaaagcttgtgacataccagtggaaccttccatattcatcaagcgagattattagaaggttggagctgcttgatgaagaggacgtggtcggttgtgggggctttggcacggtgtacaggatggtgatggatgatggcacgtcgtttgccgtcaagaggattgacctcagccgcgaaagtcgcgacaggaccttcgagaa

SEQ ID NO: 8313 - DNA, 311 bp, Zea mays
gctcctcatctcaagtgtgtagacgagacagagagacactgagagagcgccatggccagcctccaagtcactcctacttcggcgttcactgagtggaacgagctgaagttcgaaggcctgtacctgttccacacgcccctgggctcaggcgccaaccaagctcgggtcatagacaacaaggcgccgattggcatcggtgccaccgtagttaacaactggacagtgtatgacgggccagggccgaacgcaaagctggttgcccgtgcacagggcttgcatatccaagccggcaactgggtcaactccttcag

SEQ ID NO: 8314 - DNA, 312 bp, Zea mays
cccacgcgtccgatggggagcgcggtggagacgctgtgcgggcaggcgtacggggcgcacaagtacgacatgctgggcatctacctgcagcgctccaccgtcctgctgatggccacgggggtgccgctggcggcgctgtacgccttctcccgccccgtcctggtcctgctgggggagtccccgagatcgcgtcggccgccgccgtcttcgtgtacggcctggtcccgcagatcttcgcgtacgccgccaacttccccatccagaagttcatgcaggcgcagagcatcatggggcccagcgcctacatctccg

SEQ ID NO: 8315 - DNA, 314 bp, Zea mays
gactacgactacctcttcaaggtggtgctcatcggcgactccggcgtcggcaagtccaacctcctctcccgcttcaccaagaacgagttcagcctcgagtccaagtccaccatcggcgtcgagttcgccacccgcagtctccaggtcgacggcaaggtcatcaaggcccagatttgggacaccgccggccaggagaggtaccgtgcaatcacaagtggctattaccgaggagccgtaggggcactgctcgtctacgatgtcacccgtcgggccacgttcgacaacgtgggccgttggctgagggagctcagaga

SEQ ID NO: 8316 - DNA, 301 bp, Zea mays
agccgccgccgctgctcatctcacatccctcgagaagacgcctgctcctcgccgatcgatacgatggccgtcttctccgacctccacaccgccgacggcctcaagtccctcgaggctcacctcgccggcaaaacctatgtgtctggtgactccattactaaggatgacattaaggtcttcgccgcggtgccgtcgaagcctggcgctgagtttcctaatgccgcccgctggtacgagaccgtctctgcggctgtagcctcaagattccctggtaaggctgttggtgtaaatctgcctgcgg

SEQ ID NO: 8317 - DNA, 311 bp, Zea mays
ccaccaccagggcatgttcctgctgacgatgacggccggcgcgaacagcctgcacccgccggagtgcagcgtgggcgagacctgcgagaaggcgacgtcgtaccagttcgcggtgctcttcgtggccttcgcgttcctggtgctgggctcggcggggatccgcccctgcagcatgcccttcggcgccgaccagttcgaccccaacacggagtctggcaagcgcggcatcaacagcttcttcaactggtactacttcaccttcacggccgccatgatgatctccgccaccgtcatcatctacgtgcagagca

SEQ ID NO: 8318 - DNA, 307 bp, Zea mays
tcatcgccgctgcgccgtctcctccgctcccgtcgtccggaaagatggcgtcccacattgttggataccctcgcatgggccccaagagggagctcaagtttgcacttgagtctttctgggatgggaagagcaccgctgaggatctggagaaggttgctaccgacctcagggccagtatctggaagcagatggctgatgctgggatcaagtacatccccagcaacaccttctcgtactatgaccaggtccttgacaccactgccatgctcggcgctgtccccgaacgctactcatggactggaggaga

SEQ ID NO: 8319 - DNA, 309 bp, Zea mays
aaaccccaattccacaatgaggccgtcgctgatgagatccacctcccagctcctccgccgccggagctactcctccgcatccgggcagcccgagcggaaggtggccatcctcggggcggcggggggcatcgggcagccgctgtcgctgctcatgaagctcaacccactcgtctcctccctctcgctctacgatatcgccggcaccccaggtgtcgcggccgacgtctcccacatcaactcccccgccctggtgaagggtttcatgggtgatgagcagcttggggaagcactaaccggctcggacgtggt

SEQ ID NO: 8320 - DNA, 313 bp, Zea mays
cccacgcgtccgacgccgccgccgccgccgccgccgccgtcgccgccaccacatccgtagcgcccagccgccggagaagaggagggagccagcaccagccaccatgggtcgcgtgcgcaccaagaccgtgaagaagacctccaggcaggtgatcgagaagtactactcccgcatgaccctcgacttccacaccaacaagaaggtgctcgaagaggtctcgatcctcccctcgaagcggctccgcaacaaggttgccggcttcaccgaccacctgatgcgccgcatcgagcggggcgccgtccgtggcatctcg

SEQ ID NO: 8321 - DNA, 306 bp, Zea mays
ctgacgcgtgggcggatgtgcgcttccagagccatgccgtgcttgctctgcaggaggcagcagaggcctacctggttggtctcttcgaagataccaatctgtacgcgatccatgccaagcgcgtgaccatcatgcccaaggacattcagctggcaagaaggatccgtggcgagagggcgtaagtctgtcgacgggaggaagaactctgcgctcgttttgtgtgttcgcctctctcaccctgtaagttttgtgagaagatgatctagtaaactgtacttggcctgtttgactgtagccgcagtagca

SEQ ID NO: 8322 - DNA, 303 bp, Zea mays
gtgacggtgggtcgcagttccccgaccacaccgttcctccgagcccaggagcagccccgcgccaggaggaagtttgttcttttaacaatatgtcgagggagcagaatgtttacatggccaagttggctgagcaggctgaaaggtatgaggagatggttgagtatatggagaaggtggctaagactgtagatgtggaagagctcactgttgaggagcgtaaccttctgtctgttgcatacaagaatgtgattggggctcgccgcgcttcatggcgcattgtttcttccattgaacaaaaggagg

SEQ ID NO: 8323 - DNA, 303 bp, Zea mays
cccacgcgtccgcccacgcgtccgctccaccgtcgtccgccgccgccgaagacggaaggagaagagggtacggccgtctcctcgcccccatggcccacgagaagaagctgtccaacccgatgcgggagatcaaggtgcagaagctcgtcctcaatatctccgtcggggagagcggcgaccgtctcacccgcgccgcaaaggtgctcgagcagctcagcggccagacccccgtcttctccaaggcgaggtacacggtgcggtcgttcggcatccggcgtaacgagaagatcgcctgctacgtca

SEQ ID NO: 8324 - DNA, 300 bp, Zea mays
cggacgcgtggctcgccgtcgtcttctgcggttctgccgtctacggctccaatttggcctctctcccttgcaagtttaagcttcaccttcaaccatgggtaaccagaagtcccacatcaacattgtggtcattggccacgtcgactctggcaagtcgaccaccaccggccacctgatctacaagcttggaggcattgacaagcgtgtaatagagaggtttgagaaggaggctgctgagatgaacaagcggtccttcaagtatgcttgggtgctcgacaagctcaaggctgagcgtgagag

SEQ ID NO: 8325 - DNA, 301 bp, Zea mays
ctcggattggtccgccctccttgtgctccgccggcaatggcgtccaccgccgtcaagctcatcgacatcgcagtcaacttcacagatggcatgttcaagggcatctaccacggcaagcagtgccacgtcgccgacatcccggccgtactcgcgcgcgcgtgggctgcaggcgtcgaccgcatcattgtcaccggaggctccctgaaagagtccagagaggcattgcagatcgccgacaccgacgggagactgttctgcactgtgggagtgcacccaacgagatgcggggagttcgaggaga

SEQ ID NO: 8326 - DNA, 301 bp, Zea mays
ggatggtcctgtactcgtacttctgcactagagagactcagcagaagccggcagaggcctccccgcaagccatccaggcaaaggagggtgaatcgagccctctgatcttggattccctgagcggcgctgaaaacgggggcagtgccaccgacgacgagcctctgaaggtgccaatgtggagctcgaagtactccaaggcgtgaaaggctgttctgttactggtgtactacggcgctatacagaatccagcttggtaggcagataccatactactactagggttggaaggcaatcctgttcc

SEQ ID NO: 8327 - DNA, 299 bp, Zea mays
gccaggaccctcggccccaagggatctgactgccacaaggctgctgtgataggtgacaccattggtgaccccctgaaggacacctcgggcccgtccctcaacatcctgatcaagctcatggcggtggagtcccttgtgtttgcccccttcttcgccacccacggtggcctgctgttcaagtacctgtaagggccacaccaatcatcacagcagaaatatacgaccgaccgaccgtggacatctcgaataactcctgccaaatcgccagttcatgtgtattgtgcgctagcgcctagctg

SEQ ID NO: 8328 - DNA, 304 bp, Zea mays
ccacgcgtccgtagctacctactactcaagtatccatccttattgagtacagtgttgatccatggactcggaaggagttgtagcagcaaaggtggcagatgagactactaaaccggcaatccaagaagacggcgccgagagcaaggccgggatgactgatctgctgatgctgaccgacaagtcgcagctgcaggcgctggcgatgctgctgcggaacaacgaggagctcatgatgagccaggcgatcaagtcggagacggagcgcattgagtacctcaagacggtgagcgactgctacacgcgg

SEQ ID NO: 8329 - DNA, 322 bp, Zea mays
aaagaacggcctagtgcagaagaggctctagctgatcgatactttgcatcccttgctaatgtggaacgtgagccatcaagacacccgatttcctaaagttgagtttgaatttgaaagaaagaagctggccaaagatgatgctagagaactgatctatcgagagattttggagtatcatccacagatgctggaggagtacatgaaaggcggagaacagattagcttccctctatcaagcggagtcgaccggcttcaactgcagttcgctcatcttgaggagcattacagccaagggagaagaggttcccactgcaaagaagca

SEQ ID NO: 8330 - DNA, 319 bp, Zea mays
cggacgcgtggaggctagcagaagtgcaggattaataagctaagctagtagaaattaagcaaagcataggcacagccatggctacctcctctggttcttaccttattattagcctgttggtggtggtggtggcggcggcgctgtcggcctcaacggcgtcggcacagctgtcgtcgacgttctacgacacgtcgtgccccagcgcgatgtccaccatcagcagcggcgtgaactccgccgtggcgcacaggctcgtgtgggggcgtcgtgctccggctccagttccacgactgcttcgtccaaggctgcgacgcgtcca

SEQ ID NO: 8331 - DNA, 317 bp, Zea mays
tgatcacagagatgttccttgtgctgttttctccattccaccactatctgtagtgggcctcagcgaagaacaggccttggaggaagccaatggtgatattcttgttttcatctcatcattcaacccaatgaagaacagcatatccaagcgccaggagaagactatcatgaaactggtagttgatgctgaaactgacaaagtacttggtgcatccatgtgtggaccagacgcacctgaaattatccagggcatcgctattgcggttaaatgtggagccaccaaagcagacttcgacagcactgtcggaatccaccctt

SEQ ID NO: 8332 - DNA, 322 bp, Zea mays
cccgcccaccaccatcctgatcatcaacctggtcggcgttgttgccggcatctcctacgccatcaacagcgggtaccagtcgtggggtccgctcttcggcaagctcttcttcgccttctgggtgatcgttcacctgtacccgttcctcaagggtctcatgggtcggcagaaccgcaccccgaccatcgtggttgtctgggcgatcctgctggcgtcgatcttctccttgctgtgggttcgcatcgatccgttcaccacccgcgtcactggcccggatactcgaacgtgtggcatcaactgctagggaggtggaaggtttgta

SEQ ID NO: 8333 - DNA, 324 bp, Zea mays
  unsure (1)..(324): unsure at all n locations
gcagaatctgaagacatgataaaaattgcagtagatggcctaggaaagaatggatttatcaactactatggtttgcagcggtttggaagtggttcaataccaacacatcttgttggggctgctttgcttagaggagagtggaaggttgctgtaaacttgattcttgatcccagggaaggagagcgtgatgacatcaatgaggtgcgcaaacgttaccaagaacatggtgacattgatatggcactgagaaacttccctcgacacctcgtagctgagnagggcatacttcaatgtctgaagaaatgccctggtaaccatctacaa

SEQ ID NO: 8334 - DNA, 321 bp, Zea mays
cccacgcgtccggtgggaagcatgtacttgttatcttgacagatatgagctcttatgcagatgcacttcgtgaggtttctgcagcccgagaagaggtgccaggtaggcgtggttatcctggatatatgtatactgatttggcaacaatatatgagcgtgctgggcgtattgaaggaagaacaggctccattacccagattcctattctaacaatgcctaacgatgatatcacacacccaactcctgaccttactggatacattactgagggacagatatacattgataggcagctccataacagacagatttatccaccta

SEQ ID NO: 8335 - DNA, 323 bp, Zea mays
cgctgccaacgcgttcctggcacagaggatctcctctgtgaacgccatctccgccctctgcgatgccaccggcgcgaatgtgactgaggtggcttacgccgtgggcaaggacacgaggattggcgtcaagttcctgaacgccagtgttgggttcggtgggtcttgcttccagaaggacatcctgaacctggtgtacatctgcgagtgcaatggcctgcccgaggtggccaactactggaagcaggtgatcaagatcaacgactaccagaagagccggttcgtgaaccgcgtcgtgtcgtccatgttcaacaccgttgccggca

SEQ ID NO: 8336 - DNA, 326 bp, Zea mays
cacttctccaggtaaggaaagggttcgtactcatggcgccgccgcagccaaagtcgggccttttcgttggcatcaacaagggtcatgtcgtcaccaagcgcgagctgcctccccgcccgtgccaccgcatagtgaaatcaacgaagagggtgtctatggtcaggggcctgatcagagaggttgctgggtttgctccttatgagaagcgtatcactgagcttctgaaggttggcaaggacaagcgtgccctgaagcttgctaagagaaagcttggaactcacaagacggcaaagaagaagagagaggagatggcgggcgtcctcagg

SEQ ID NO: 8337 - DNA, 322 bp, Zea mays
accgtgcagtttacaggcgaggttttgaaaactcctgtctcactcgatatgcttgggcgcatttttaatggttctggaaaacctattgacaatggccccccgatattacctgaagcctacttggatatctctggaagttctattaatcccagtgagagaacctatccagaggagatgatccaaactgggatatcccacattgatgtgatgaactccattgctcgttgggaaaaaatccccctattttctgctgctggactcgctcacaatgaaattgctgctcagatctgtcgtcaggctggccttgtgaagacattggaga

SEQ ID NO: 8338 - DNA, 322 bp, Zea mays
gtgaaaaagaaattgaaggaacggatggatgattttcagaccttgagagaagcaatcaggcaagagtatcgagaggttgtcgaaagaagggtttttactgtaactggtaatcgtcctgatgaagagacaattgatgacttgatagagaccggaaaaagtgagcaaatattcaaagatgctatccaacatcagggaagaggccagatactggacacagttgctgaaatacaggagcgacatgatgctgtaagggatctagagaggaagcttttggagttgcaacagatatttatggacatggcagttcttgtcgaggctcaag

SEQ ID NO: 8339 - DNA, 319 bp, Zea mays
gagataacagaagaattcatgaatactctcttcaacaagtacagcattgattacattattcatggagatgatccttgtcttctacctgatggcactgatgcatatgcgctacgaagaaggtcgggcgttacaagcaaatcaagcgaacagaaggtgtctcgagcactgacatagttgggaggatattgctaacattcaggcagaaagatgctgacactgatttaagtgttgtcgttgctgagaagtctggagagaaatcaaatgatgaagtgaaaagtcagctatctcatttccttccaacttctcgccggatcatgca

SEQ ID NO: 8340 - DNA, 190 bp, Zea mays
gctcaggaacgcgctgcacaccgagggcgtcgtcatccactggcacggcatccgacaggtcgggacgccgtgggcggacggcacggcggcgatgtcccagtgcgcgcatcaaccccgaggaaaccttcagctagcgcttcgtcgtcgacaagccggggacgtacttctgccacgggcactacgggatgca

SEQ ID NO: 8341 - DNA, 319 bp, Zea mays
cctccggcgtcggcaactcgacggccaaccgcgccaccctgccgcggcaccatggtgcatgttaacttctaccgcaactatgggaagactttcaagaagccaaggcggccgtatgagaaggagcgcctagatgctgagctgaagctggttggtgagtatggcctgcggtgcaagcgcgagctgtggcgcgtgcagtatgccctgagccgtatcaggaatgcagccagggagctgctcaccctggatgagaagaacccacgccgtatctttgagggcgaggcgctcctccgccgcatgaacagatatggtcttcttggtg

SEQ ID NO: 8342 - DNA, 307 bp, Zea mays
gacagggctgaggagtttgccttccgtgttgaagaagacgctgtttggagccaggttgctaaagcccagttacgtgaaggtctggtcagtgaagcaattgagtccttcattcgtgcagatgatgcagcacacttccttgatgtcatccgtgcggctgaggaagccaatgtgtacaatgatttagtgaagtaccttctgatggtaaggcaaaaggcacgggaacctaaagtcgacggagaactcatctttgcatacgctaagattgacagactcagtgacattggagaattcatacttatgccaaatg

SEQ ID NO: 8343 - DNA, 281 bp, Zea mays
taacctccccctccgctccttccagctcgctctgtaatctgcatcagcctcgcccgccgccgtcgccgccatggggaggggaaagttcaaggggaagcccacaggccgccgcaacttctccacacccgaggagatcgctgctggtacttcaggtcggccacgcacctttaagaagaaggaggaagaggaagatgaggaagaggtagaaagagaagagtctgaggaagaatctgaagaagattctgatgaagagactaaacataaaggcactgagggtatta

SEQ ID NO: 8344 - DNA, 322 bp, Zea mays
cccagacattgacaagaaaaagtaccttgttcctgccgacctcacagtcggacagtttgtgtatgtggtacggaagcggatcaagctaagcgctgagaaggcaatcttcatcttcgtaaagaacaccctcccaccaacagctgctctgatgtctgccatctacgaggagaacaaggacgaggacggcttcctctacatgacgtacagcggcgagaacaccttcgggctgttctgagtgggcgccgctatggatccacattgggcaatgcctcctgtaaatactaaacatgcatcacaagaatctgtgtccataacgtaatct

SEQ ID NO: 8345 - DNA, 295 bp, Zea mays
caaataccccacaaggccactccaaagagctagtagtggaaccgaagatgttcgggaacatcggaaagatccccatcatcggcgacctgacgggcagcaacaagaatgcgcacctcaagggcaacgtggtgctcgtgcgcaagaccgtgctcggcttggacgtcaccagcatcgccggctccctcctcgacggcgtcggcgagttcctcggccgcggcgtcacctgccagcttatcagctccaccgtcgtcgagcctaacaacggcaaccgcgggaagttgggcgcggaggcgag

SEQ ID NO: 8346 - DNA, 320 bp, Zea mays
ccacgcgtccgatttattctagagcatctgctgcaggcaagcgtgttcagtgcaatatgggagcaaagaatcatgcaattatccttcccgatgctgatagagatgctacattgaatgcccttattgctgctggatttggtgcagcagggcaaaggtgcatggcattgagcactgctgtttttgttggcggttcagaatcatgggaggatgaattagtcaaacgtgcaagtggccttgttgttagttcaggaatggttaatgatgcagaccttggtccagtgatcagccgacaggcaaaggatcgtatctgtaaattagtt

SEQ ID NO: 8347 - DNA, 125 bp, Zea mays
gcgaattggggaggcaaaaccctgctacctgggcaggcggcatggggaacagctggagaacgaccgatgatatcgccgacaactggggcagcatgacgtatcgtgcagaccagaacgacaggtgg

SEQ ID NO: 8348 - DNA, 313 bp, Zea mays
cttctcagtgttctactacgagatcctgaactcccctgatcgcgcctgcaaccttgcaaaacaggccttcgatgaggcgatctctgagctagacagcctgggagaggagtcctacaaggacagcactctgatcatgcagctcctgcgcgacaacttgaccctatggacttccgacaccaacgaggatggcggcgacgagatcaaggatgctgctgccccgaaagaatccgcggagggtcagtaagatggattcagtctcacgacctgctgctgctgatgttgaggagtgaccagaaccagaaccgccgtcctc

SEQ ID NO: 8349 - DNA, 314 bp, Zea mays
ctgacgcgtgggtgcaatttggagcgcatcatattggcaaagcaatgagatattgtgataaagccacaactgtctctaatacatattcaaaggaagtgtcaggtcatggtgccatcgttcctcatcttgggaaattctatggcattctgaatggaattgatccagatatatgggatccgtacaatgacaactttatcccggtccactacacttgtgagaatgtggttgaaggcaagagggctgctaagagggcactgcagcagaagtttgggttacagcaaatcgatgtccccgtcgtaggaatcgtcactcgc

SEQ ID NO: 8350 - DNA, 315 bp, Zea mays
gttcagacctcagaccagtgccgacgacgagctgtgaggagagggcaaggaagcaagcctgtgaggaaggcggcgatggagaggtacgaggtgatcaaggacataggatcgggcaacttcggggtggccaagctggtccgggacgtcaggaccaaggagctcttcgccgtcaagttcatcgagcgggggatgaagattgatgagaatgtctagagggagatcatgaaccacaggtcactgaggcatccagacatagttagatttaaggaggttgtgctaactcccacacatttggtgatagttatggaatatgct

SEQ ID NO: 8351 - DNA, 313 bp, Zea mays
aagagattgtgcagtccattgtggcacaggctgtggccaaggagaccaggatggcggcatctttggtcagactgcatttccatgactgctttgtcaagggctgcgatgcttcggtgctgttggacaacagcagcagcatagttagtgagaaagggtccaacccgaacaggaactccctcagggggtttgaggtgatcgaccagattaaggctgctcttgaggctgcctgcccaggcacagtctcctgtgccgacattgttgcccttgcggctcgtgattccaccgccctggttggtggaccatactgggacgt

SEQ ID NO: 8352 - DNA, 111 bp, Zea mays
ctcacgcgtccgggcttctcctcgccctccggttcgggttcgggttcgtgaggttctccggggttcggtttcgtgggtggtctgatcgagatggctgcggacggatgttga

SEQ ID NO: 8353 - DNA, 335 bp, Zea mays
cggacgcgtggggatcgtgcggggcgggacgacggaggagttcgagccggcgccgtacgtgttgacgctgctcaacgcgctgctgtggctctactacgagctcaccaagcccgacggcttcctcgtcgccaccgtcaatggctttggggctgtcatggaggccatctacgtcgtcctcttcatcgtctacgccgccaaccatgccacaaaggttaagaccgcaaagctggcagcagcgttggacatcggtggcttcggagtcgtgtttgcgggcaccacattcgccatcagtgaatttgaattgagaattcatgtgataggaatgatatgtgcct

SEQ ID NO: 8354 - DNA, 331 bp, Zea mays
gttcgttcggagcgcacacacacgcaaccagatctcccccaaatccagccgtcggcacctccgcttcaagatgcagatctttgtgaaaaccctgactggcaagactatcaccctcgaggtggagtcgtctgacaccattgacaacgttaaggccaagatccaggacaaggagggcatccccccagaccagcagcggctcatcttcgctggcaaacagcttgaggacgggcgcacgcttgctgactacaacatccagaaggagagcacctccaccttgtgctccgcctcaggggaggcatgcagatcttcgtgaagaccctgaccggcaaga

SEQ ID NO: 8355 - DNA, 153 bp, Zea mays
ggatgctcgaactggcactgccccagctgttaaggttgagaaagctcacagtggagatgttcattgtgttgattggaatccccattgatgttaactatatcttaactgggtctgccgataactctgtccgaatgtgggatcgtcggaatctgg

SEQ ID NO: 8356 - DNA, 315 bp, Zea mays
ccacgcgtccggaggcgaacagcctcgcaggcgatgttttggcgacccagaaacgacctcagcttggtgctagccttcgagagcactcgagaacgcaacgcagccatcatgctcgctcggcgtttcgctgtagattgcaacatcatccttgctgggccaggcgacaaaactccctggtgaacgaagatggcacctgtgctctgccgataccagataccacccagcacccaccactcctgactgtcctgctcttcctcgcgtcgtaggttcctgaaagaaggcgccgtccgcaccattttaaccgcctgggcgccg

SEQ ID NO: 8357 - DNA, 314 bp, Zea mays
cacctccctgctcgaatccagcgctcacccgcgccgcgtcgagacatgtcgaagaaaatcgtggtgaagctggacctgcacgacaacaaggacaagcagaaggcgctgaaggccatctccgtgctcgtcggtacgtatcgtatcacagttaattaacagcggacgactgagcttccgtttcccgcgcccaccatccatcatccatcctcccccacccaggcatcgacgccgtgtcggtggacatggcggcgcacaagatgacggtgatcgggacggtggacccggtgcaggtggtgagcaagctgcgcacaagt

SEQ ID NO: 8358 - DNA, 305 bp, Zea mays
ctagttctagatcgcgagcggccgccctttttttttttttttgacaaatataatattttacatacatcgctacaccactttttacatagaaatatcaccaataatactagttgcaacaaatcacgacatcccattattcatcatcaggactcctacaatatatagttactgacgaagaacagagtcactttattccttgcattatttaatcttgttcccggtacagctagcaagacacaagttttacagatgtaggattatcaggaagcaatccttggaacaacgagaagcttctccttccggcg

SEQ ID NO: 8359 - DNA, 310 bp, Zea mays
tgtccgactcccagccgtcgtctgctgcgtactccgcctccagtttggtctgtttcttgcaagttgctcttgcggtagttcccccaactgtcaccatgcagaacgaggagggtaagactgtggacctctatgttcccaggaagtgctcggccacaaacaggatcatcactgccaaggaccatgcctctgtccagatcaacattggccacttggatgcgaatggcctgtatgatggtcacttcacaacatttgctctctctgggtttgtccgtgctcagggcgatgcagacagctccttggacaggctgtg

SEQ ID NO: 8360 - DNA, 309 bp, Zea mays
cccacgcgtccgagattatatgcgatcgcaagcgagcagaatggcgaggtccagtggtagtagaccagtggccctcgtgctgctggcgctgtgcgcgccgccctctcgtcggccacggtgaccgtgaatgagcccatcgccaatggcctctcctggagcttctacgacgtttcctgcccgtcggtggagggcatcgtgcgctggcacgtcgccgaggccctccgccgcgacatcggcatcgccgcggggctcatccgcatcttcttccacgagtgcttcccgcaggcttgcgacgcgtccgtcctcctg

SEQ ID NO: 8361 - DNA, 313 bp, Zea mays
  unsure (1)..(313): unsure at all n locations
cggaccgtggncgtggcgaccgtgaagcagcttcaatcgtcggcatggcgctcgtattgcatagtggggctggaaacaagaatgccttcaaagcacttatatctgcagaatacagtgggatcaaggttgagttgaccaaggattttgagatgggtgtctccaacaagacccctgagtttcttaagatgaacccccttgggaaggttcctgttctggagactcctgatggccctgtttttgagagtaatgctatcgcacgctatgttgctcgcttgaaggatgacaaccctctttttgggtcttcccgtattga

SEQ ID NO: 8362 - DNA, 318 bp, Zea mays
caagcacaagcgcactctagcaatggcttctgaggttgtccgccctagcgacgccgagctactaaaggcacaagccgacatatggcggctcagcctctcctacctcacgcccctgtcactgaggtgcgccgtggagcttggcatccctacggcgatctaccgccatggcggggctgcctcagccgctgagctggtcacggcgctgtctctcccctccactaagctgccgttcctccgccgcctgctgcggctcctcgccgcgtcgggcgtgttcaccgtcgacaagcagagctcggaggaggagcggtaccgcatcag

SEQ ID NO: 8363 - DNA, 310 bp, Zea mays
  unsure (1)..(310): unsure at all n locations
tggccacacggtcaggactttctggttcaccacgccgcccaagccgggccctgatgtgccattcaagttcggcctcatcggcgaccttgggcagacgttcgactccaacatcacgctgtcgcactacgagtccaacggcggcgacgccgtgctgtacgtgggcgacctctcgtacgccgacaaccacccgctccacgacaacaaccggtgggacacgtgggcgcggttcgtggagcgcacttgngcgtaccagccgtgggtctggacggcgggcaaccacgagctggacttcgcgccggatctgggcgag

SEQ ID NO: 8364 - DNA, 313 bp, Zea mays
cccacgcgtccgatggagtagataaagagggaagacctgtctacatagaattagtaggaaaagttgatgcaaacaagctaatacaagtgacaaccctagatcggtatgtaaaataccatgtcaaagaatttgagaagtgcttccagatgaaatttccagcttgcaccattgctgctaaaaagcacatagattcgtccactactattttggatgtgcaaggcgtgggtttcaagaacttctcgaaatctgccagagaattaatcacacgattacagaagatcgacagtgataactacccagagacactgtgccg

SEQ ID NO: 8365 - DNA, 307 bp, Zea mays
tgctcgcccgcatctctctaaccgccggcaccggcgccgggccggccatcgttcacatggctgcgatgccaccggccttcacgggcaacctgaagaaagcacttgcaggtctgagaagaatcaatttagatgggcttcgatggcgcgtatttgatgctaaggatcaggtgctgggacgattggcttcccaaatagccgttgtgcttcaaggcaaggataaaccgacctatgcgccacatgtggaaaatggagacatgtgcattgtacttaatgcacaggatatcagtgttacaggaaggaaaatgac

SEQ ID NO: 8366 - DNA, 305 bp, Zea mays
gtctcgcccaatgaaggggatgctgactggcccagtcacaatcctcaactggtccttcgtccggaatgaccagccgaggtttgagacttgctaccagatcgctcttgcgatcaagaaggaagtcgaggatcttgaggctggtggtattcaggttatccaaatcgacgaggctgcactgagagaagggctgccgctccgcaaggctgagcatgcattctacttggactgggctgtccactccttcagaattaccaactgcgagatccaggacaccacccagatccacacccacatgtgctactcca

SEQ ID NO: 8367 - DNA, 303 bp, Zea mays
gcaacatccgcagcttcaacctgtcggggatgggatgcagcgccgggctcatctccatcgacctcgcgcgggacatgctccaggttcacccgaactcgaacgcgctggtggtttcgaccgagatcatcacccccaacttctaccaggggagccggcgcgacatgcttcttcccaactgcctgttccggatgggcgcggctgcgatcctgctgtcgaaccggcggcgcgaggcccggcgcgccaagtaccggctggtgcacgtggtgaggacgcacaagggctcggacgaccgcgcgtaccggt

SEQ ID NO: 8368 - DNA, 302 bp, Zea mays
cttgaatatatttcaatctagacttgtgttggcatcaccggagactgccactgatggtgattatgctgctattttgggtgttgttggacatgagtatttccacaactggactgggaatagagtaacttgccgtgattggttccagctaaccctgaaagaaggactgaccgttttcagggatcaggagttctcttcagatcttggctgtcgtacggtaaaacgtattgctgatgtctccaaacttagaatctatcaattcccacaggacgccgggcctatggcacatcctatccgtccccatt

SEQ ID NO: 8369 - DNA, 269 bp, Zea mays
ggcggcatggccgctgccacgcttcctcgtcctcccccagcctggattcctccgctcggtctgccacggcctctgctcccgctgtctcttctgcttcctgctgctcctcgccttcgcctgcagctccagctccgggcgggtggtggtcactagcttgcctggcttcgacggcgacctccccttccacctcgaaacagggtacgtggaggtggaggaggacgccggcgtggagctcttctactacttcgtccaggccgagtccggcgccg

SEQ ID NO: 8370 - DNA, 314 bp, Zea mays
cgcttcaaaagcacttagccacagcttcactgtgttcgcgaaagatatggttgaggcgatatcattctcaaatctgtatgcccctgagcatttgatcatcaacgtaaaggatgctgagcagtgggaggagttcatcgaaaacgcagggtcagttttcttgggccaatggaccccagagagcgtgggcgattatgcgagcgggacgaaccatgtccttccgacctatggttacgcaaggatgtacagcggtgtatcgctgaactctttcctcaaatacatcactgtccaatccctaacagaggaagggctgagaa

SEQ ID NO: 8371 - DNA, 304 bp, Zea mays
ccggaacctggtccagttcgtcactggcacttcaaaggtaccgttggaaggttttagtgcacttcaagggatctctgggccacaaaggtttcagatacataagacctacggcagcacgaaccatctgccttcagctcatacttgctttaaccaactagacttgcctgagtacacatccaaagagcagctccaggagcggttactattggcaatccacgaagcaaatgaaggtttcggatttggctaatcagttatactcgtttgtccgtgccctgagaactgcaataggcgagcagcacgtgtg

SEQ ID NO: 8372 - DNA, 294 bp, Zea mays
gagtcgtgctggagcgacctcgagttctgcgagaaaaccaggaactggtactgctacggcaaggcggtggcggacaggcggcgtgggagacggcccggcggcggggcgtggacctggtggtggtgatccccgtgctggtggtgggcgccctgctgcaggcgacggtgaacgccagcatcgcgcacatcctcaagtacctgcacggctcggcccgcaccttcgccaacgccgtgcaggcgtacgtggacgtgcgcgacgtggccgacgcgcagctcctggtcttcgagagccccc

SEQ ID NO: 8373 - DNA, 301 bp, Zea mays
aaggaaccaatgctgccctcagtgcaagactagatacaagagacagaaaggtagccctcgagttcatggtgatgatgaggaggaagatgttgatgacctggacaatgaattcaactataagcaaggcaatgggaagggcccagagtggcagcttcaaggagatgacgctgatctgtcttcatctgctcgccatgacccacaccatcggattccacgccttacaagtggacaacagatatctggagagatccctgatgcatcccctgaccgtcattctatccgcagtccaacatcgagctat

SEQ ID NO: 8374 - DNA, 299 bp, Zea mays
ccacgcgtccggtggaatctgcccaatttgccggaaggaacggaagtgtggatcaagcgagacgatttatcaggcatgcagttgagtggaaacaaggtccgaaagctggagttcttgatggcagatgccgtagcacaaggcgcagactgcgttattactgttgggggtatacagagtaaccactgccgtgccacagccgtggctgctaagtatctcaatcttgattgctacctgatactacgtacctccaagcttcttgtggataaggaccctggtttggttggcaatcttcttgtcga

SEQ ID NO: 8375 - DNA, 296 bp, Zea mays
aatcgatcagggctgcgacgcgtccgtcctcctgtctggttccaacagcgagcagatcgaggtacccaaccagacgctgcgtcccgaggcgctcaagctcatcgacgacatccgcgccgccgtccacgccgtctgctggcccacggtgtcctgcgccgacatcaccacgctcgccaccagggacgccgtcgtcgcggtaagtcgatcaccttgcatcgagtagactgtctcgtacttgggagtctactagctagtgtgtacgtcgtcgtccgatcacaccctatatatatatatat

SEQ ID NO: 8376 - DNA, 284 bp, Zea mays
aaagatgaccctgtacctcaaggatgatcagttggagtatcttgaggagcgccgcctgaaggatctgatcaagaagcactcagagttcattagctacccaatctctctctggactgagaagaccactgagaaggaaatttctgatgatgaggatgaggaagataagaaggacgaggagggcaaggttgaggatgttgatgagaaggaagaaaaggaaaagaagaagaagaagatcaaggaggtttctcatgagtggcaattggttaacaagcagaagcctatct

SEQ ID NO: 8377 - DNA, 327 bp, Zea mays
gcaagttttatggtttggaaggacgaagcatttgaaatctggactcgggggtggggttgcatgttccctgagggtgattcatcgagggagctactagagaaggttcagaagacctactacctggtcagcctcgttgacaacgactacgtccagggggacctgtttgctgccttcaagatctgattatgctctcatggtcggtattgttgtatggttggacccaacaatattcttgcatccccgactacaggtctgatcgccatgaaagcttctgttcatttgagctcgggggagtccgctagtcttatttttcttgatttctcttgg

SEQ ID NO: 8378 - DNA, 331 bp, Zea mays
ctgacgcgtgggcgacgccctcggcttcgtcgacgtcgcgctcgtgcccttcacgtcgtggttcctcgcctacgaccgcttcggcggcgtcagcgttggagaactgagtgcccgatgctggccgcctgggccaagcgctgcgccgagcgccccagcgtcgccaagaacctctacccgcccgataaggtctacgacttcgtctgcgggatgaagaagaggctgggcatcgagtagagagcatccatcggtcggccggtggctggccgggagtaataatgacgaaccaattatctagttttggtttgagtgtgctcagcagagcagttcgtcg

SEQ ID NO: 8379 - DNA, 200 bp, Zea mays
ctcaccggcctcttctactgggtggcccagctgctgggcgcgtccgtggcgtgcctgctcctcatgttcgtgacccacggcaaggccatcccgacgcacggcgtctccggcggcaccaccgatctggagggcgtggtgttcgatatcgtcatcacgttcgcggtcgtctacaccgtctacgccaccgccgccgaccccaa

SEQ ID NO: 8380 - DNA, 308 bp, Zea mays
cacaacatggccctctcccgccgcctcctcccgctcttcctccgccgcggcgcctccatccccacccgcgctctctccacggctgtcgcacctgcggcggtggcctcggaggaggacgaggcggccgtcaccgtcaagggcgtgcgcatctcgggccgcccgctctacatggacatgcaggcgacgacccccgtcgacccgcgtgtcctcgacgccatgctccccttctagctctctcgctacgggaatcctcagtcccgtacccacctctacggctgggagtccgacgccgccgtagaggacgctcg

SEQ ID NO: 8381 - DNA, 323 bp, Zea mays
ccggccttgttccccgttggacccagcctaataaaattccccattccaactcacacagatctcgtacccggcagtggcgacgaatctcgcggggcggaggtggtggcgcgactgaggcggtgtcgactccgacgaactcgcagccaccgggggatacgcagcagcagcaccggcgtactccatcgacgttcatatttaaggacttggtttggataattctactcgtcaacaaaagtgattacaaatggtggttcttgcagcttcaatcgtttcaaagtcgggaaaagcacttgtttcaagacagtttgttgacatgtctcgca

SEQ ID NO: 8382 - DNA, 322 bp, Zea mays
ctcgagaactccatttcgatcccatttgaaatcaacccatcctcgtttcctccgtctagcagcctctcaccctcatggccaagatcaagatcgggatcaatgggtttggcaggatcggaaggctggtggccagggtggccctgcagagcgacgacgtcgagctcgtcgccgtgaacgaccccttcatcagcaccgattacatgacctacatgttcaagtatgacactgtgcacggacagtggaagcaccatgaggtcaaggtgaaggactccaagacccttctctttggtgagaaggaggttgctgtgtttggctgcaggaa

SEQ ID NO: 8383 - DNA, 324 bp, Zea mays
caccacatcatatgggtcccatggtgagtatgaatcaaataaggccacaatgtcatatgggttccaaggcatggaagatttaaggaaggccaccacatcatatggaatacaagatgaagagtatccaaggaaggccaccacatcatatggagttcaaggtgaggaggacccaaagaaagataccatgtcatatgggtcacaagatgacgaggaatctagaaaaatcagcatctcatatgggtctaatggtgagaacgactcaagaacgtccaccacatcatatgggtccaaggtaaggagatctaagaaaggtcccacgtcatg

SEQ ID NO: 8384 - DNA, 324 bp, Zea mays
ggagcttgggaagtatggcagtatagaaaatcaacttttatgccgtcagcgcatcgacgaagtggagcctatgattgatttctgttcacataaactaggtggatcatatttacaagcacatgaactcctggatactgctaatgatcttctcaaggcgaagatggaggctgtattgtctgagacaagatcacagcaggcagcttccatgactgagtttaactggcttggtcgcacttttcctattacaaatgcaaagacccgtgtctctattttgaaagcccagcagcttgagagagacttgagtgctgcagccacagaatcagt

SEQ ID NO: 8385 - DNA, 322 bp, Zea mays
ttcaggtctgcagcccccaactacccccagcctcggaaggaaccttccagaagcgcaagactctaaggccgtcgccttcccattcttcctcgccgcgggggtcgcctgagatcacataaacaatggtgaaggctgttgctgtgcttggtagcagcgatggtgtcaagggcaccatctttttcacccaagagggagatggccctaccgctgtcaccggaagtgtctctggcctcaagcctggcctccatgggttccatgtacatgcacttggtgacaccaccaatggatgcatgtcaactggaccacactacaatcctgcgag

SEQ ID NO: 8386 - DNA, 322 bp, Zea mays
atgaaatcgagtggtatcctgggaacaacctaacacagaagattctaaaaaagcaaccttcaaaaggatcaaagaatacgaagcctatcactaaaaccgaggactgtgagagtttcttcaactttttcaatggcccgcaggtccctgaagatgatgatgacatcgatgaagacactgctgatgagctgcagagtcaaatggagcatgattatgacattgggaccaccatgagggataagattatccctcatgcagtttcctggtttactggtgaggctgtgcaaggtgaggattttggtgagttgggcgatgatgatgaaga

SEQ ID NO: 8387 - DNA, 321 bp, Zea mays
gggaccctgaagagcgcaagtccagcttctcttctgaaggaagctatacatgttatcagctgcggctacgaagacaagaccgactcgggaaaagagattggctggatttacggatcgatcacagaggatatcttgactggatttaagatgcactgccatggctggcggtctatttactgcatcccgaagcggcctgcattcaaaggttctgcgcctctgaacctttccgaccgtcttcaccaggtccttcgctgggcccttgggtccgtcgaaattttcttcagcaagcactgcccactttggtacggatacggcggcggg

SEQ ID NO: 8388 - DNA, 318 bp, Zea mays
cgggcttatgatgacaatgatccccggttacaggaagaagttctgcgtcgaacagtaccactgtctcgtcaacttgacaccaagctagtcaataaagctgtgcttcctcgtgtacatggattagctctaaagacaacagttgctgcggtgcgtgtgaatgcgttgcgctgtttaggagatcttgtgccatccttggacaaagaaggaataatgggtatcttggagactgttcggcgttgcacagctgttgaccatactgcgccaactcttatgtgcacacttggtgttgctaatgcaatctataaacaatgcggtgtt

SEQ ID NO: 8389 - DNA, 317 bp, Zea mays
ccactaaacaccgcttgggctttcccgaaccctaaccccgaccgccgcgccagctactcccgtttcgtcctcgcggtattcgcggcgttttctcccactgctcgaaccgcgacgacgagcgacgacaagagctgctctattcttcaaaacaaatggcgaccgttccagttaacccaaaaccttttctgaacaacctgacaggaaagcctgttattgtcaaactcaagtggggtatggagtacaagggttatcttgcttctgtggactcatatatgaatctccagcttgccaacactgaggagtacattgatggtcaa

SEQ ID NO: 8390 - DNA, 319 bp, Zea mays
ggaaagtgccgtcagctctgactctcgggcacttggctgacgacccgttctctctttgcaactgcaactgcaacgcaccaagaaactgccggcgatcgatcggggcaaggagataaacatggtgcacgggaagctggaggtcctcctcgtctccgccaagggactcgaggacaccgatttcctcaataacatggaccccttcgtgatccttacctgccgcacccaagagcagaaaagcagcgtcgcaaatggagcaggaagcgagcccgagtggaacgagaccttcgtcttcaccgtctccgacgacaccccgcagctc

SEQ ID NO: 8391 - DNA, 318 bp, Zea mays
cggacggtgggcacagatccatcggagtgacagcgagcgagcgagagcgagagcgagatatacagagagattatccgcgcgtcaccgactcccggcgaagacgatggggaaggggttcgcatcctacctggcgatgaagacggggccggatggcggcgacgcggcggcggcgcagcaggctctgatcgacgcggacctgcgggagctcggcgtcgccgcgcggaagctcgccaaccacgcattcgtcctcggcggcgggctggggttcggtagctcgttcgtcaaatggctggccttcgtcggcgcagtgtatctctt

SEQ ID NO: 8392 - DNA, 319 bp, Zea mays
cccacgcgtccgcggacgcgtgggtgaggactttgaccagaggatcatggagtacttcatcaagttgatcaagaagaagtacagcaaggacatcagcaaggacaaccgtgctcttggaaagctgagatgggaagccgagcgcgccaagagagccctcagcaaccagcaccaggtccgtgttgagatcgagtccctctttgacgggaccgatttctcggagccactgacccgtgccaggtttgaggagctgaacaacgacctcttccgcaagaccatgggccctgtcaagaaggccatggaggatgctggccttgagaag

SEQ ID NO: 8393 - DNA, 317 bp, Zea mays
cccacgcgtccgcccacgcgtccgcccacgcgtccgggagccaccacagtttgttgcacttttccagcccatgattatcttgaagggtggaattggatctggatacaagaagctcatagaagaaaagggtgcgacgggtgagacttatactactgaaggcatagctctaattcgagtatctgggacatctatccacaacaacaagactcttcaagtcgatacggtggcaacatctttaagctcaatggagtgtttcatactgcaatctggaaatgctatgtttacatggtttggcaattctagcacatatgagcaac

SEQ ID NO: 8394 - DNA, 313 bp, Zea mays
cggacgcgtgggctcttgccggtcccgaataaagagcagcagcgcaagaggtcggtagagcgagaagaaggcaatggcggccgagagcttccttttgagctcggagtccgtgaacgaggggcaccccgacaagctgtgcgaccaggtgtcggacgccgtgcttgacgcatgcctcgcgcaggaccccgacagcaaggtggcctgcgagacctgcaccaagaccaacatggtgatggtgttcggcgagatcacgaccaaggcgaccgtggactacgagaagatcgtgcgcgacacctgccgcgagatcgggttc

SEQ ID NO: 8395 - DNA, 316 bp, Zea mays
aatgaaatgagcttgggtgtttgttcaagaactaacgatgtagtggaacctatgataaaaccacagtggtttgttaattgcagcaccatggccaaggcaggccttgacgctgtaaggtcaaaaaagattgatattatcccccagcagtatgagcaagactggtacagatggcttgaaaatatacgtgattggtgtgtctcaaggcaactttggtggggtcatcgtatacctgcatggtatgtgacactagaagatgacctggataaaaaccttggttctaacaatgaccgctggatagtcgcaagaaatgaaagcg

SEQ ID NO: 8396 - DNA, 312 bp, Zea mays
cggaccgtgggtcccatcccactaccacccatctcgtcgtccgccgattcgatccggttcatccaacccaggggcagtgatggcgacgaagaggagcgtgggcatcctcggcgaggcggatctgaaggggaagaaggtgttcgtgcgcgccgacctcaacgtcccgctcgacgatgcccagaagatcaccgacgacacccgcatccgcgcctccgtccccaccatcaagttcctcctcgagaagggcgccaaggtcatcctcgccagccacctgggtcgtccaaaaggtgtcaccccaaagtacagcttgaa

SEQ ID NO: 8397 - DNA, 315 bp, Zea mays
agaaaaacagcaagccttagtggtccactttcactgccaactcgtgcttctgcaaatagtctgtcagctcctattcgatcttcaggaggttttgtagattcatcaggtgacaagtccaaacgaagtgtagtagagattaaaggccgcttttcagttacatctgagaatgtcgatcttgcaaaggttcaggaaggtccacttagtagcctctcacggaaatcaccagagggttcactgctaagaaaatctgccagcactggtgattgtttgattaatactaagctgatgcgtaacgctaatcagctgaaggaattc

SEQ ID NO: 8398 - DNA, 313 bp, Zea mays
agcacagaagattgctgaatgcattcatccatcaaaaccctggattactggagaagtcattctcgctgatgttaaaaattcctcgcctgattgattttgacaacaaacgtgcatatttccggtctaaaatcaagcatcagtatgatcatcatcatcataatcctgttagaatttctgtgcgtcgttcatatattcttgaggactcctacaatcagcttaggatgcgctctcctcaggacttgaagggtagactcactgttcattttcaaggagaagaaggaattgatgctggtgggctgacaagggaatggta

SEQ ID NO: 8399 - DNA, 314 bp, Zea mays
caagaagggaaatactgctttgcacatagctacatggaaatgggagaattttgggattatgaaacaccgcagacgtggcttcgacgaaacggaggcgtaggcgagggattcgacattatgaaaaaccagagaagatactacactctaaaatggacatgaatcctctattaccagggaaggatgatgtttattacactgaaacagacgctgtctcacatccgttacccgcactagacgcacccagtctttctacagagagaatcgcgccgttcttgaatctgccattcgctgaatctgccattcgctgctgttgt

SEQ ID NO: 8400 - DNA, 314 bp, Zea mays
acggtgcacaattgtgtccgagctctccaacaaggatttcgactcatatgtcctctctgagtcaagcttgtttatctatcctctgaagattgtcatcaagacctgtggcactaccaagctcctgctcaccattccaagaatccttgagcttgctgaagagctgtctatgccacttgctgctgtgaagtactcccgtgggacgttcatctttcctggtgcacagccagccccccacaggagcttctctgaggaagttgctgcacttaaccgctactttggcggcctgaaatctggtggtaatgcttatgtgattg

SEQ ID NO: 8401 - DNA, 291 bp, Zea mays
ccgacggcaagacccacgtgacggtggagtacgtgaacgaaggcggcccatggtgcccgtccgcgtgcacaccgtggtcatctccacccagcacgacgagaccgtcaccaacgacgaggtcgccgccgacctcagggagcacgtcatcaagcccgtgatcccggacaggtacgtggacgagaagaccatgttgcagctgaacccgtcggggcggttcgtcgtcggcgggccccacggggacgccggcctgaccggccgcagggtgatcgtgggcacctactgcgggtgggg

SEQ ID NO: 8402 - DNA, 295 bp, Zea mays
gtctgggacaccatggctccgatgaagctgtacggggcggtgatgtcgtggaacgtgacgaggtgcgcaacggcgctggaggaggctggctccgactacgagatcgtgcccatcaacttcgccaccgccgagcacaagagccccgagcacctcgtccgcaacccgtttggtcaggttccagctctgcaggatggtgacttgtacctcttcgaatcacgcgcaatctgcaagtacgctgctcgcaaaaacaagccagagctgttgagggaaggaaacctcgaggaggcagcaatgg

SEQ ID NO: 8403 - DNA, 293 bp, Zea mays
agctcccaactgcaagttctggtggttgccaacccagcaaacaccaatgctcttatcttgaaagaatttgctccatctattccagagaagaacgttacttgcctgacccgtctggaccacaacagggctcttggccagatttctgagagacttaatgtccaagttagtgatgtgaagaatgttatcatctggggtaaccactcgtcctctcagtaccctgatgttaaccatgccacagtgaagacttccactggggagaagcctgttcgtgagcttgtctctgatgacgagtg

SEQ ID NO: 8404 - DNA, 295 bp, Zea mays
gagactggtatcatcacgcccaacacgaacagttccagtaccaccaatcttgtacacatcctgaagggggagacgcaggggcttgtctgaaggcctcttcggctcattgatcaagtccaaagcctcaagtagggttgggcccttgtaccagtcaaggttggtggacctctcaatcatgttgtcaccttcgaaaccagagatgggaacgaagtgcagtcttgtcagggttgtatccaaccttcttcaggtaggaagagacttccttcacaatctcatcataacgggccttggagta

SEQ ID NO: 8405 - DNA, 292 bp, Zea mays
gttcgaccttgggggccaccagatcgcccgccgcgtctggaaggactactacgccaaggttgatgctgttgtgtacttggtggatgctgttgacaaggaacgttttgccgagtcgaagaaggagcttgatgcgcttcttgcagatgactcccttgcaaacgttcctttcctcatactgggcaacaagattgacatcccatacgcggcttcagaggaggagctgaggtactacctcggcctgagcaacttcacaaccgggaagggcaacgtgaacttggccgactccaatgtc

SEQ ID NO: 8406 - DNA, 294 bp, Zea mays
gcaagtaggcaatgaaagattcaacatatttagtggctgcccttctggccagacagcgactattgttctccgtggtggtgcagaccagttcattgaggaagctgaacgaatctccatgatgccatcatgattgtgaggagagcacttaagaactcgacagttgtgccgggtggtggtgctattgatatggaaataagcaagtatctcaggcagcatgcacgaacaattgctgggaagtctcagttctttgtaaattcatttgctaaagcccttgaggttattccacgccaactt

SEQ ID NO: 8407 - DNA, 288 bp, Zea mays
agaccgggcatcctccacccaatcgaaggacctagcgagcagcacggcggcggcgatcggagaagatggtgcgcaaagctaaggttgagttcgacgagcagccgccggataacttcgacccgaagaacccgtatgccgacccggtggcgatgctcgagtaccgggaacacctggtgcgagagaagtggatccagatcgagaccgccaagatcatccgggagcgcctccgctggtgctaccgcatcgagggcatcaaccaccaccagaagtgccgccacctcgtcgacc

SEQ ID NO: 8408 - DNA, 292 bp, Zea mays
agcttagctccactccagctccaatcacagtcgtgaccagagcgcgagagctagctagagggccgtgaaaatgccgatcaataggatcgccctggggagccaccaggaggtgtaccacccgggcgccctcaaggcggcgttcgctgagttcatctccaccctcatcttcgtcttcgccggccagggctccggcatggccttcagcaagctgaccggcggcggcccgacgaccccggcgggcctgatcgcggcggcggtggcgcacgcgttcgcgctgttcgtggcggtgtct

SEQ ID NO: 8409 - DNA, 289 bp, Zea mays
ggaccgtggcgataacattctgcgcggggtgctttcctcgcagcaaatattcctgccttttgcattccggctttgcaagctccttgctttgggcatatatattgtgaggtctctatatatataggtggttcgaggtgatcggcagaaccacacaggcaaagatggcgagcgtgcacaaggccaccacccttgttctcatgttctgcctgctagcgctggggagagcggagtacctcaagtacaaggacccaaagcagcccgtcgctgttcgcatcaaggacctgctggg

SEQ ID NO: 8410 - DNA, 291 bp, Zea mays
cccaaccagaagagcggcggcgcgggcggacaaggagcaggcggaggaggagttgtgccaagccacaatgggtatctcgcgtgactcgatgcacaagcaccgagccaacggtggaaagcagaaggcctggaggaagaagcgaaagtatgagcttggtcgccagccagccaacaccaagttgtcaagcaataagacagtgaggagggtccgtgttcgtggaggtaatgtgaaatggagggctcttcgccttgatactggtaactactcatggggaagtgaagctgttacccg

SEQ ID NO: 8411 - DNA, 290 bp, Zea mays
aacgaacccagattttcaaaacagaccgctcccggcggccatgcccatgccgatggtgcggcacggcagcggcggcgctgagcccgactgccagaaaccggccacgggatcaggtccgtcagaccgatgcctgcgcccgtcgcacctgtaacctccaggctgaagcgggaagactgcccccgcaccaagcacgactccctcttttccccatggaaggtccttgtcgggccgtcggactggagggaccacgccgccggcaaggaaggggtccagaggtaccgcatccgcaa

SEQ ID NO: 8412 - DNA, 286 bp, Zea mays
ggacctggggattcaactacatcaaagaatcttttgaaaatggtactcttcaccttattgggttgttgagtgatggtgacttccactcccgccttgaccaactacagttacttctgaaaggtgtcagtgagagaggagcaaaaaaaattcgtgtgcacatccttaccgatgggcgtgacgttttggatggaagcagcgttggtttcgtggagaccctagagaatgatcttttggagcttcgaggcaagggtattgatgcacagattgcatctggtggtggaaggat

SEQ ID NO: 8413 - DNA, 289 bp, Zea mays
cttttccccactcccgggtctccagcattcctatcctccccccgcccgcccgtcccgccgccgcggcttcccttcctctcccgagccaagatgaatgttgaaaagctcaagaagatggcaggtgctgtgcgcaccggggggaagggtagcgtgcgcaggaagaagaaggcagtccacaacactacaaccacacatgacaaacggcttcaaagcaccttgaaaagaataggagtgaacagcattcctggtattgaagaggtcaacatctttaaggatgatgttgttattc

SEQ ID NO: 8414 - DNA, 290 bp, Zea mays
ggttagggaagttgccctctctgtagttagtggcattaactcaagtgtttttgcatatggacaaacgagtagtggaaagacttataccatgaatggagtaacagaatatacagtagcagacatatatgattacattaataagcatgaagagagagcatttgttctgaaattctcagcaattgaaatatacgatgaagctgtaagggatcttctgagtgcagaaaacactcctcttagactctgggacgatgcagagaagggcacctatgtggagaaccttacagaggttg

SEQ ID NO: 8415 - DNA, 287 bp, Zea mays
cgagaaatatgctgtggatgagaaggctttctttgatgactacaaagaggcccacctcaagctctccgaactggggtttgctgatgcttaaatagaccctatcttggagtgatacattctgctgcctgtatggaatcatgtggtcttttgcatctggagtcaatgtgaacaagcagattgtcgtattgtctttctcgtaataaatttgtcgatgttgagcccttaggctgttgttggtacattggtacttcgtcgatgcttgaattgggacccttagtccgttttcc

SEQ ID NO: 8416 - DNA, 284 bp, Zea mays
ggaccgggccgagtacccgacgcgctactagttctattgccgcaccccagatctccaggagggactcgttcgttcagctagctacactgcacgcaatggccaccacggcgaccgaggcggcgccggcgcaggagcagcaggccaacggcaacggcgagcagaagacgcggcactccgaggtcggccacaagagcctgctcaagagcgacgacctctaccagtacatcctggacacgagcgtgtacccgcgggagccggagagcatgaaggagctccgcgagatc

SEQ ID NO: 8417 - DNA, 287 bp, Zea mays
gcagctcctccgggggcggcgaactactcctcgtcgccaaaaccctagccctgcttctttgccatggcgagcagcgctaccaggcgagcctcctgctccagaagcagctcaaggatcttgcgaagaaccccgtggatgggttctccgccgggcttgtagacgacagcaacatcttcgagtggcaggtcaccatcatcggaccgcctgacaccctatatgatggaggctacttcaatgcaatgatgaccttcccccagaactatcccaacagcccgccatcagtaaga

SEQ ID NO: 8418 - DNA, 286 bp, Zea mays
acttgaatgaactggaggcacaggtagcacaattaagagtcgaaaactcttcgctgctaaggcggcttgctgatgttaaccagaagttcaatgaagctgctgttgacaatagggtgctaaaggcagacgtcgaaaccttaagagcaaaggtgaagatggcagaggactcggtgaagcgggtaacaggcatgaacgcattgtaccctgccgtgtcggatatgtcttccctcagcatgccattcaatggctccccttctgactccgcctctgatagcaccgtcccggt

SEQ ID NO: 8419 - DNA, 285 bp, Zea mays
ctccgctgggccaccagctttgaccgccgcctccccccccctccgctactgcgacctccccaccccactcccccgcaggagcggcggcggcggcggcggcgaggtcgtaccccacatcggcgagcggcggcggcaccgccggaggcaaacggcaagatgttcgggcgcgcgccgaagaagagcgacaacaccaagcaccaccagatcctcggggtgcccaagtcggcgtcccaggacgacctcaacaaggcctaccgcatagctgctatcaagaaccaccccgac

SEQ ID NO: 8420 - DNA, 281 bp, Zea mays
gagagagagagagatcagcaacttaacaacaataatggccaccgccatagttcccacggacgccgagctgctgcaggcgcaggccgacctgtggcgccacagcctctactacctgacatccatggcgctcaagtgcgcggtggagctccacatcccgaccgccatccacaacctaggcggtgctgccacgctgccggacctcgtggccgcgctgtccctgccagcgtgcaagctcccgttcctcgggcgcgtgatgcggctgctggtcacgtcgggcgtct

SEQ ID NO: 8421 - DNA, 307 bp, Zea mays
caagcaagcaattgtcaaccgactctatcttagctctctttgcaagccagtaggtcaccactcaaaagcttgtgaagcaggtgagatgggcaaggaggtggatgtgtccactctagatgccggcggcgtccgtgaccgtgactacgcggaccctccgccggcaccgctgatcgacatcgacgagctcggcaagtggtccctgtaccgcgccgtgatcgccgagttcgtggccacgctgctgttcctgtacatcacggttgccacggtgatcgggtacaagcaccagacggacgcgtcggcgtcgggg

SEQ ID NO: 8422 - DNA, 310 bp, Zea mays
cggacgcgtgggcgcgctccccgtcctggacgacctcgtggcggacaaggagcagcacgggtcgttcgacttcgccttcgtggacgccgacaaggacaactacctcagctaccacgagcggctcctgaagctggtgaggcccggcggcctcatcggctacgacaacacgctgtggaacggctccgtagtgctccccgacgacgcgcccatgcgcaagtacatccgcttctaccgcgacttcgtcctcgccctcaacagcgcgctcgccgccgacgaccgcgtcgagatctgccagctccccgtcggcgac

SEQ ID NO: 8423 - DNA, 300 bp, Zea mays
tgattacatcagatgtgttgcggtccatccaactctaccatatgtgctgtcaacatctgatgacatgctaataaaactgttggactgggatatagggtaggtgtacactcaaatatttgagggacattcacactatgtgattcagggtactttcaatccaaaggatattaacacctttgcaagtgcatcccttgaccgcactacaaagactatggagttatggttctccagatccaaacttcacacttgatgggcatctaaatggtgtcaactgtgttgactacttcactggtggtgaca

SEQ ID NO: 8424 - DNA, 307 bp, Zea mays
gacgccggcctcgtcttcaccgccacgtccttcttcaagatcctacaggagcccatgcggaacttcccgcaggcgatgatccaggcgtcgcaggcgatgatctcgctgcagcgcctcgactcgtacatgactagcgcggacttgacgagggctccgtggagagggaccccgccgcggcgtcgggcggcatggccgtgcaggtcaaggacggcgtgttcgcgtgggacgacgaggtggacgccggccaggaggtgctgcgcgggatcgacctggacatccgtacgggtgcgctggcggcagtggtggg

SEQ ID NO: 8425 - DNA, 308 bp, Zea mays
ctggtttgcatccccatatacccaaccaggaccagccaaaagcccactctcctcctcgcctccgcctgcgacatcgagcacctcttcaatggcgacggcccccgcacccctctcgctctccgcctccaccctgcccgcccggctccgtgccggagtggtaccggcgggcacacggtggaggcagccgcggcgcgggcggatggtggtgcgcgccaagatccgggagatcttcatgccggcgctgagctccaccatgacggagggaaagatcgtatcctggtccgcgggcgagggagaccgcgtctcca

SEQ ID NO: 8426 - DNA, 307 bp, Zea mays
ctagccgtctcgcgcgcttcaccttccccaccccgccgccgccatcgcacgcccgcatccgcatccgctatgggtgcgtacaagtacgtctcggagctatggcggaggaagcagtccgatgtgatgcggttcgtgcagcgcgtgcgctagctgggagtacaggcagcagccggccatcgtccgcctcacaaggcccactcgtcctgacaaggcgcgccgcctcggctacaaggccaagcagggttatgttgtttaccgtgtccgtgttaggcgtggtggcaggaagaggcctgtgcctaaaggtatt

SEQ ID NO: 8427 - DNA, 305 bp, Zea mays
ccgacatcgtcccttcgtccccacgagcaaccgataatccgccggcgttgagatgttggtttatcaggatctcctatctggcgacgagctcctgtcggattcattcacctacaaggagctcgagaacggcgtcctgtgggaggtcgagggaaagtgggtcacccaaggtcctgttgatgtggacattggtgccaatccatccgccgagggtggtgaggacgaaagcgttgatgacacagctgtgaaggtggttgatattgttgacacattccgtctacaggagcaacctccttttgacaagaaat

SEQ ID NO: 8428 - DNA, 306 bp, Zea mays
attccctcgtgacagcagctgcctgcctgctccgaggcgccacccagctcttcctcgccccagcagccgcttcccgagatccttttcactttcaccaccagggtacatagaccgcatctgcggtgctctgcgctcctcggactcgatttgttggttcatccatccagctgccgccggacgtcgatcagctacctatcttgaaaccacaggaccgagcgtggaaactcccggaccggacattccattttccattccgaatggggggtgagaaggcggggaatgagtacaaccaaggtgaagagacgt

SEQ ID NO: 8429 - DNA, 298 bp, Zea mays
cggacgcgtgggcggacgcgtgggtgctgcgtttcctcttctgaagggagttgttgctacaactgatgttgtggaagcctgcactggggtcaatgtggccgtcatggttggtggtttccccaggaaggagggaatggaaaggaaagatgttatgtcgaaaaatgtttcaatctacaaatcccaagcatctgcccttgaagcccatgcagctcccaactgcaaggttctggtggttgccaacccagcaaacaccaatgctcttatcttgaaagaatttgctccatctattccagagaag

SEQ ID NO: 8430 - DNA, 266 bp, Zea mays
cctgcaggtgcccatctgcaagtcgtacgtcgcaccgctggctctgtcggcgtggatgtgcgtcctgtccacgctccagtccgcgctgctcgtctccttcctcctgccggaccccagcgcctgcaggatccactcgctcttcgagctctcctgctgcgtcttctcgggcgtgttcgggtccggcgtcacgttctacctgcagtcgtggtgcatctccgacaggggcccgctctactccgtcatgttcaacccgctctgcaccgtga

SEQ ID NO: 8431 - DNA, 298 bp, Zea mays
cggacggtgggtgcaagcattttgagattggtggagacaagaagggcaagggaacatctctcttctaagtttctcatcgcccatctcgatgttggatcgaaactgtgggtctactactgttctaaaaactcgtcaaatttcaatgttactagtagttctgaaagcaggtcatgctgtgtatcaaattccaatgcctgacatttgcgctgagtgtgggttgtcttttggctaaatgaagttttgcaccctgaatcttcattgaatgtgttgtgtgtttgtttgattttgttctgcgatt

SEQ ID NO: 8432 - DNA, 300 bp, Zea mays
aagacagaggccagtcacaaggcgatacagcaggtggtggcaagatgacggtgctccactctccggttggagttaggagcatcgtgacctccttggtggctttcttcatcctagccagctccatcgtgttcctcctcgacagaggccaggaagagcaagtgcaagtggcagtcgagcatggacgccaagaagtgcaggtgaagctggaatccgggctgcaagaaccggcgataagagggacaacccaagagggggacgccagcaacgaggagtgcaactggtccaggggaaggtgggtct

SEQ ID NO: 8433 - DNA, 300 bp, Zea mays
cccacgcgtccggcggacggaaggcgaaagagtagcagcagcaggcggcgccgagtagcggctccccacctcgagcttgccaccatggctagaggattgaagaagcatttgaagaggctcaatgcgcccaagcattggatgctggacaagcttggcggagcttttgctcccaagccatcttctggacctcacaagtctagggagtgcctgccactgatcctcatcatcaggaacaggctcaagtatgctcttacataccgtgaggtcatttccatcctgatgcaacgccatgtacttgtt

SEQ ID NO: 8434 - DNA, 285 bp, Zea mays
ctcgatctaagggcatcactgtcagggcgcttgtggtcataaatccaggacatccaacagggacatgttcttgttgaggaaaaccagaagaaaattgtcgaattctgcaagcaatgaaggacttgttacttctcgcagatgaaggtttacaaggaaaatatatatgttgaaagataagccattcacctcatcagaaaaaattgcagggtcactgggatacactgatgatgatcttcctttggtaacattccagtcagttcctaaagggcactacggagaatgtgg

SEQ ID NO: 8435 - DNA, 297 bp, Zea mays
atcagctgagcaatggcctgtatgtttctggtcgacctgagcaacctaaggagaaggccccaaccatttgttccactgcgatgccatatactgggggtgacatcaagaagtctggagagcttgggaagatgtttgatctccatgttgagaaatcaagaaaatctggtcctctaggaaacgctccttcaaggaatacttcatttggaggcactgcttccaattctgggcctgtctccaatgctggtggtcggtccaactactctggttccctttcatcttcagttcctggtgctggtg

SEQ ID NO: 8436 - DNA, 296 bp, Zea mays
ggttcttgggtttcaactgaacccaactccaatgcacatgcctgggcttataataccatcatctgatgactcaaaggtatttctcacttactacaatgactccctagtgagagatgggacatcaggtcaagttgttagctttgccggagttgctaaaatattagggggtctaaatccaaattatgggaattctgctccgaaagtaatgttctattctgctaggggtcctgaccctgaggacaatacactgtcaaatgctgatatcttgaaaccaaatctagtagcaccgggaagtt

SEQ ID NO: 8437 - DNA, 293 bp, Zea mays
ataaagagccctgcacagctagatgctgccctctcatttcttactaatactggtcctgattctctagatgtggacaagtttgaagaagcatgtggtgtaggcgtggttgtttctattgaggaaattaaatctactgttactgacattcttgaggagaatatggaagctataaaggagcagcggtatcacataaatgttggtatgctatgtggacaggttaggaagagacacccctggggtgatgctaaggcagtaaaggaggaaattgacaagaggcttgcagaaatcctagg

SEQ ID NO: 8438 - DNA, 291 bp, Zea mays
gttatgtgctcatatctgcctctattcaattcattcaacttcactaaaggaggactaatacaactcaaccatggaaggcctcagccacttcagtatgctgtcaacgcagctttccttgcttctctatacagcgactatcttgaagctgcagacacgcctgggtggtactgcggacctaatttctacaccacagaagtcctccgcaagtttgccaggtcacagctcgactacattcttggcaagaacccattgaagatgagctacgttgtgggtttcggaaacaagtacccg

SEQ ID NO: 8439 - DNA, 295 bp, Zea mays
cacgccgcgatctccgtagcctccgtcgcgtcgagcatcgatcatgtcggcctactgcggaaagtacaaggatgagctcatcaagaatgctgcctacatttggcacccctggcaagggtatccttgctgctgatgagtccactggcaccattggcaagcgcctttccagcatcaatgtcgagaacgttgaggagaaccgccgtgccctccgtgagctcctattctgctgccctggtgctctccagtacatcagcggtgtgatcctcttcgaggagaccctgtaccagaagaccaa

SEQ ID NO: 8440 - DNA, 294 bp, Zea mays
gctacctactactcaagtatccatccttattgagtacagtgttgatccatggactcggaaggagttgtagcagcaaaggtggcagatgagactactaaaccggcaatccaagaagacggcgccgagagcaaggccgggatgactgatctgctgatgctgaccgacaagtcgcagctgcaggcgctggcgatgctgctgcggaacaacgaggagctcatgatgagccaggcgatcaagtcggagacggagcgcattgagtacctcaagacggtgagcgactgctacacgcggacg

SEQ ID NO: 8441 - DNA, 298 bp, Zea mays
aggacaatcacttcaccggcgaggtgccgtcagctcttggcggtctcccgaggctcagggaggtctatcttggtgggaacactttctccggcgagattccggcgagcttggggaatctgtcgtggctagaggcattgtccataccgaggaacagactcactggtggcctttctggtgagctcttccagctggggaacctgacgttcctggacctatcagagaacaacctcgccggtgagatacctctggccatcggtaacctgttggctctccagagcttaaatttgagcggcaatgc

SEQ ID NO: 8442 - DNA, 301 bp, Zea mays
cacaagaaggatctgattggatacctactctggttattctaaagttaaatcgtgcagctttatgtgttcagtggagcccaaaagaaaacaagtttgccgtgggaagtggtgccaaatctgtgtgtatttgttattatgaacaagaaaacaattggtggattagcaaggttatcaggaaaaggcatgaatcttctgtcactagtcttgcatggcatccaaacaatatatatcttgcaacaacgtctacagatggtaaatgcagagtgttctctacttttatcaagggtgtagacacaagggg

SEQ ID NO: 8443 - DNA, 290 bp, Zea mays
gtagccgatagctgcgacgtgccggcaccgcagcagcggctgatctacaagggccggatcttgaaggacgagcaaaccctagccagctacggtgtggagacagaccatacaatccacatggtacgtggtgctgcgccaacaccagcatccactgcacctgcagccaaccaagaacctaccactgctgctcctgccagttccccagcagcaggattgggtggcttgttgcaaaatctgggtgctacaggggctgctgctaacagtgggggtttgggtttgtttggatctgg

SEQ ID NO: 8444 - DNA, 287 bp, Zea mays
ccacgcgtccgggcgctgcccagggagatggaggccgcccgcgtggccttcgagaccggcgccgcgccgatcgccaacaggatcaaggagagccggtcgtacccgctgtaccgcttcatccgccaggacctcggcgccgtgtacctgaccggcgagaagctcaagtcccccggcgaggagtgcaacaaggtgttcctggccctcagcgagggcaagctcatcgaccccatgctcgactgcctcaaggagtgggacggcaagcccctgcccatctgctgaggacgcca

SEQ ID NO: 8445 - DNA, 282 bp, Zea mays
ggacgcgtggctcggctgctacgtagctatatatagctgcagaacagttttagttaccggactgtaggcacaccaagctagatatccaaggggccatcccggaaactagctagctaggatgccaacagcagaggcgacgacgcccgtgccgccggagctgtcctccgggcaagggcggacggtttgcgtgaccggagctggagggttcattgcctcctggctcgtcaagcgcctcctggagaagggctacacagtccgcggcacggtcaggaaccctgtgga

SEQ ID NO: 8446 - DNA, 289 bp, Zea mays
caatgccaaacaggagcatgccagcgactccacttcctacccctggcgcacttctgatgggggatgccttcaatatgagacaccctttaactggtggaggaatgaccgttgcattatccgacatcgttgtcctacgtaatcttctcaagcctctccgcaatctccacgacgcatcttccctgtgcaagtacctcgaatcgttctacacgctgcggaagccggttgcctccaccataaacacgttggccggtgctctgtacaaggtcttcagcgcctcgcctgatgaagc

SEQ ID NO: 8447 - DNA, 287 bp, Zea mays
ctggaatgcaggagaacttgccacggcaagagctgcagcttccgcagaacaataatggtttgaaagatcacactgcctgtggtacctcaagtcatgacccaaacactaatccattgtgctgatcttatggtttttccagacattgtcctcatggtctacttccagcgttgaagaggtcaactcagttgggccgggcatacgtttcttccagctctatgtctacaaggacaggaatatcgtacggcaactcgtgaaaagggctgagatggctggcttcaaggccattg

SEQ ID NO: 8448 - DNA, 294 bp, Zea mays
aagtcgtcgacgtcttcatcccgagggacacgaggaccggggactcgaggggtttcgcgttcgtgcggtacaagtacgccgacgaggcgcagaaggctatagatcggctcgatggccgtgatgtggatgggagaaacatcatggtgcagtttgcaaagtacggccccaatgctgagccaatccgcaaaggaagggttaaagagggggttgagaaatcacaagacagatcaagaagccgcagtccaaggccaaggcacagagacagagatcatagaagccaaagtcgcagcagga

SEQ ID NO: 8449 - DNA, 295 bp, Zea mays
caccacaccacacctcctcgcttgcactccgctcgtctgacatctcgtcccgtcctttcgtttcgaagcctcgcgagccccgacgattgccaccaccgcggtgtcggtcgacgagaagctcgatgagcttcgcgccgaggtcgccaagctcgaccagatcagcgagaacgagaagtccgggttcatcagcctcgtgtcacggtacctcagtggggaggcggacagatcgagtggagcaagatccagacccctacggatgaggtggtggtgcgctacgataccgtcgcgtcgcctc

SEQ ID NO: 8450 - DNA, 284 bp, Zea mays
gccgtctggatattcctaagcttattcgagcttgtgatgaacaacagcactggaaagaacttacctacctgtacatacagtatgatgaatttgacaatgctgccaccacaattatgaaccactctccagatgcatgggatcatatgcagttcaaggatgtctgcgttaaagttgcaaatgtcgagctatattataaggcagttcacttctatttgcaagagcatcctgatctcatcaatgatatgctaaatgtgcttgcacttcgtttagatcataccagagtt

SEQ ID NO: 8451 - DNA, 285 bp, Zea mays
agcgctcgcccgctcagtcacaaatcctcaggtctcagtcgccttcatcgccgcttcgttcgtgtggaggggagaagacaggaaatggcggcgactgagggcgtgctcttggggatgggcaacacccctcctcgacatctccgccgtcgtcggtgacgccttcctgacaaagtatgacatcaagctgaacaatgctattctcgctgaggaggagcacttgcctatgtatgacgagttggctagctagagcaatgttgaatatattgccggaggagccgcccagaa

SEQ ID NO: 8452 - DNA, 284 bp, Zea mays
gcagcacacacgaggccggcgacgccatggccatgaagctggacatgtccgcgctcgagaccaacttcgccaacctgaccgcatccgccggcgacgacacgtacttctccgccgaggcccccgacgtgccgtccatggtgctccccatctgcgacgacttcgacggcatccaggcggccaccaaggatatggtgaagaataagaaggggacgaccacgcttgccttcatcttcgacaagggcgtcatcgtcgccgctgattccagggccagcatgggcggttat

SEQ ID NO: 8453 - DNA, 281 bp, Zea mays
aagaaccttccagaagcgcaagactctaaggccgtcgccttcccattcttcctcgccgcgggggtcgcctgagatcacataaacaatggtgaaggctgttgctgtgcttggtagcagcgatggtgtcaagggcaccatctttttcacccaagagggagatggccctaccgctgtcaccggaagtgtctctggcctcaagcctggcctccatgggttccatgtacatgcacttggtgacaccaccaatggatgcatgtcaactggaccacactacaatcctg

SEQ ID NO: 8454 - DNA, 281 bp, Zea mays
caaggacttcggcgcccgttcaggatccacatcttcccgagcgagttcttggttgacctcttcccccttcggaccacctccaaggctcttggtgtagcttgccactctcaccaatcaagttttcatgtctgatctcgacattcagatcccaactgccttcgatcccttcgctgaggccaatgctggggactctggtgcggcacagggtcaaaggactacgttcacgtgcgcatccagcagcgtaatggtcgcaagagcctgactaccgtccagggattgaa

SEQ ID NO: 8455 - DNA, 286 bp, Zea mays
cccacgcgtccgtgccgccctaaagatggtggaggaggtccgcagacagttcaacaccattcctgggttgatggagggaactgccaagcctgactatgcaacctgtgtgaagatctccactgatgcttccatcaaggagatgattcctcctggtgctctggtcatgctcactcccctcattgttggaaccctcttcggtgttgagactctctctggtgttcttgctggtgccctggtttctggagtgcagattgccatctctgcttccaacaccggtggtgcatgg

SEQ ID NO: 8456 - DNA, 303 bp, Zea mays
gagagctaagctaagccgagctaagaagcacagcaagtctcaccagactagcggctagcgcgagaatggccaaggacatcgaggccgcggcgcacgagggcaaggactactcggacccgcctccgggccgctggtggacgcggaggagctgaccaagtggtcgctgtaccgcgcggtgatcgccgagttcgtggccacgctgctcttcctctacatcacggtggccacggtgatcgggtacaagcaccagacggacgcggcggcgtcgggccccgacgcggcgtgcgggggcgtcggcgtgct

SEQ ID NO: 8457 - DNA, 299 bp, Zea mays
gacttggtacttccagatcatcgtgctcatcgccggcctgctcaagaacccggagctctccctcgactccctctccatatgcatgaacgtgaacgcatgggtgttcatgatctccgtcgggttcaacgccgcggcgagcgtgcgggtcgggaacgagctcggcgcaggcaacccgagggcggcggcgttctcggtgttcatggtgacgtcgctgtcgttcatcgcggcgacggtgtgtgccgtcgtcgtgctgtgcctccgcgaccagctgagctacttcttcactggcggcgaggccg

SEQ ID NO: 8458 - DNA, 303 bp, Zea mays
gagcgtcagagcccgatcccgatccagcgaggcggcgaccctccctcctccccttgcttcgctcgtccagccctgaccacccgcatccccgtcagtcatggcagcggcagcaggcggaggcgcggtgcgtgcgctgtcccagaaggagcaggacatacagatgatgctcgccgccgacgtccaccttggcaccaagaactgcgatttccagatggagcgctatgcctttaagcgccgcaccgacggcatctacatcatcaaccttggcaagacatgggagaaactgcagcttgcagcgagggt

SEQ ID NO: 8459 - DNA, 303 bp, Zea mays
  unsure (1)..(303): unsure at all n locations
cggacgcgtggcggnacgcgtgggcgtgacgcgtgggcactccagcactgaacacttgattgattcagtaggtagctagctagactaatcacaaaggatcctaccaagttccgtccgtccagtagccacgacacgacggtgacgacgacgaacgctggcgctcctgtgtggaacgacaacgaggcgctgactgtagggcctcgcggtcccatcctgctggaggactaccacctgatcgagaaggtggcgcacttcgcgcgcgagcggatcccggagcgcgtggtgcacggcgcggcgcctcgg

SEQ ID NO: 8460 - DNA, 303 bp, Zea mays
gagcgcttgaagatcaccgggacagaagtcagcaaaaagatgactgccggaatgagctccatgagtttcaagatgaaggagttgttccaggggcagactccagctgacaagattgttgagggtgccacctcagaggatctggacgggcctgactggaactcaaacttggagatttgcgacatgatcaacacagagaaggttgacagtgtggaactcatccgtgggatcaagaagaggatcatgctgaaggatgcgagggtccagtacctctccttggtcctgcttgagaccattgtcaagaac

SEQ ID NO: 8461 - DNA, 304 bp, Zea mays
cccacgcgtccgcccacgcgtccgcccacgcgtccgcccagatctttcaccaaatctaccaccaccacgccggccaccagaacggtcaccaaatctcccaccagaacggccaccagatctaccaccaccacgctggccatcgcctcttggtttggcttcatcaacataaagctcatagccaccaccaatgtcagagccactgagctcaagggctttagacacagagtcctgatccttggagtctatgtaagccattccttttattgcaccagattcatgatcagtcgggatagagacccttgtc

SEQ ID NO: 8462 - DNA, 302 bp, Zea mays
gtgttttgagaagctggtcggcgctcctagatcccttcgcctctctcgcgttcgaggctaggtacccgccaccatgagccgctcggggcagcctccggatctcaagaagtacatggacaagaagcttcagattaagctgaatgcaaaccgtgttgttattggcacacttcggggattcgaccagttcatgaatctggtgatcgacaacactgtggaggtcaatggaaatgacaagacagatattggaatggtggttatcaggggaaacagtgttgtcatgatcgaggcactggagccagttg

SEQ ID NO: 8463 - DNA, 298 bp, Zea mays
ggaccgtggctcgtgctctggtacactcgccggacgcctggagcgaggtcgcagtcgtacgaggacaacatcaagaagatcaactctttcagcacagtcgaatcgttctgggtttgctactgccaccttgcgcgcccttcttccctgccgagccccactgaccttcatctcttcaaggatggcatccgtcccctctgggaggatcctgcaaaccagaatggtggcaagtggataattagattcaaaaaggcagtttcaggtcgattttgggaggatttggtgctagtggtagtaggcg

SEQ ID NO: 8464 - DNA, 297 bp, Zea mays
ggaccgtggtgggtcttgacaagtacgagaacgaggacctcatcaaatacggcttccccgaggacatctggttccatgtagaactgatgtcctctgcacatgtgtatgtgagattgaataaaggtcaatcaatggatgacatgagtgagggtttgctggaagactgtgcgcagtatgtcaaagctaattccattcaaggtaataaagtcaataacattgatgtagtttatactccatggtacaatttgaagaagacgccttcaatggatgtgggccaagttggttttcacaacccta

SEQ ID NO: 8465 - DNA, 298 bp, Zea mays
ggaccgtgctctcttactctccgccgtcgccctgctcgcccgaagcagctgccggcaaaatggccccgaagagaggcggtagggcgccggtccccgccaagaagaaggcggtggtgacgaacccgctcttcgagaagaggccgaagcagtttgggatcggcggcgcccttccgcccaagaaggacctccaccgcttcgtcaagtggcccaaggtcgtgcgcatccagcgccaggtccgcatcctcaagcagcgcctcaaggtgcccccggcgctcaaccagttcacacgtaccctcga

SEQ ID NO: 8466 - DNA, 297 bp, Zea mays
gtaccttgctgtccctgtgctcttgtatgtaagtcagcgcattcttcggctatttaggagccatgacgctgttaggattcagaaggttgcagtgtatccggggaatgttttggctctctatatgtctaagccacctggattcaggtaccggagtgggcagtatatcttcataaactgccgtgctgtctctccatacgaatggcacccattttccattacatcagcaccaggagatgattatcttagtgtccacattcgcacaaggggtgattggacttcacgtcttaggactatctt

SEQ ID NO: 8467 - DNA, 299 bp, Zea mays
ccaccacatcatatgggtcccaaggtaaggagaccctaagaaaggtcaccacgtcatgtgataggtaccacggttgtgaagatgatgcgcggaaggccaccgcatcatatagagctgaaggtgagcaggacatgaagaagatcagcatatcatatggatctcatcgaagtggggagcactcattgagaaccaccagtacaagagagaaaggtgacacaagtaaaggggacatccatcaccatgtccatcacatccacagcagcggcaacaagctagtagcagatgttttcttcttccac

SEQ ID NO: 8468 - DNA, 299 bp, Zea mays
ccgcagccgccgcccgctcgctcgcctccgctccggcagcgagctctatctcccgcgacgagcagcagctgccaccgacgcacgcagaccggggaataaatattggtattggtagtgtgatatctataagaagtcaagatggtgaagttcacagctgaagagctccgcgctatcatggacaaaaagaacaacattcgtaacatgtctgtcattgctcatgtggaccatggcaagtctacgcttacagattcccttgtggcagctgctgggattattgcccaggaagttgctggtgatgt

SEQ ID NO: 8469 - DNA, 297 bp, Zea mays
cccacgcgtccgactcgacacaggcccgcgatcccctccccctcttccttctccggattcgcggcgatctagccggcggggggcggcgcacgatggcggggcaaaaccagcggctcaacgtcgtgccgaggtgacgatgctcggcgtcatgaaggcgcggctcgtcggcgccacccgcggccacgcgccattgaagaagaagtcagacgcgctcacggtccagttccgcgccatcctcaagaagatcgtcgccgccaaggagtccatgggcgagacgatgcgcgcctcctccttctc

SEQ ID NO: 8470 - DNA, 299 bp, Zea mays
cccacgcgtccgtcggcgtcgtctcctgtcctctccacgccaagcaacctccccaccccgccccaccctccatgctcgcctcgagatcttagcgggcagctccggagagcgccgacgagccccctgatccctcctcgccgccgccgccaaccgaccggtggaggagaggaggggaggggagcgatggagaccgccgactactccgggaagctcttcgtcggcggcatctcatgggagacggacgaggaccgcctccgcgagtacttcggccgcttcggtgaggtcactgaggccgtcat

SEQ ID NO: 8471 - DNA, 292 bp, Zea mays
tggcggtgtaccctgtcgtgtgcgatgagctcctcgccgttgatcaccgccgcggcgtcggctgccgtggtggcgctggctgtcgccaaccgcgtgctctacaagctcgcgcttgtgcctctcaaggcgtaccctttcttcctcgcccagctcaccaccttcgggtacgttgccgtgtacttctcgatgctctacacgaggtaccgcactgggttggtgactagagacatgctggcgctccccaagcaccggttcgtcgctatcggtttgctggaggcacttggagtctttg

SEQ ID NO: 8472 - DNA, 292 bp, Zea mays
cccacgcgtccggtttgctgatatggctgacaggggcgtggcaccatgtgcagacgtacaacacacttctggatgggctgctcaaggctggccacgtgacaaatgcattcaggatgttcaggtacctgcagagggcggggcttcccgtaggcattgtgacttacaacacaatgatcaacgggctgtgcaagtcaggcaaagtgggctatgccgcatggtccttaaggagctggggaggacagagcatgccccgaacgctgtcacgtacacaacagttatggagtgctgcttt

SEQ ID NO: 8473 - DNA, 295 bp, Zea mays
tgaggaggctgttagacaatatggaatccaccttggaactgagatgtgcaagaaaattcttgctactggcattaagactttgcacctttacacactaaacatggacaagtctgctataggaattttgatgaatcttggattaattgaggagtccaaggtttcaaggccattaccttggaggccagcgactaatgttttccgtgttaaagaggatgttcgacctatattctgggccaacagaccaaagagctatcttaaaaggacattaggttgggatcagtatccccatggacgg

SEQ ID NO: 8474 - DNA, 293 bp, Zea mays
cccacgcgtccgcacttgccgactacaacatccagaaggagagcaccctccaccttgttctccgcctcaggggaggcatgcagatcttcgtcaagaccctcactggaaagactatcaccctcgaggtggagtcttctgacaccatcgacaacgtcaaggccaagatccaggacaaggagggcatccctccagaccagcagcggctcatttttgccggcaagcagctcgaggacgggcgcacgctggccgactacaacattcagaaggagagcaccctccacttggtgctgcgt

SEQ ID NO: 8475 - DNA, 283 bp, Zea mays
atcgatccgccattgctcaccgcacaagtgcacgctcacctcacacacgcagctaagtagctaacgccgtagagtaacaagaaaaggctcgacatggccgaggagaagaagcagggcctgcagctgctggacttctgggtgagcccattcgggcagcgctgccgcatcgcgctggacgagaagggcctggcctacgagtacctggagcaggacctggggaaaaagagcgagctgctcctccgctccaacccggtgcacaataagatccccgtgctgctgcacg

SEQ ID NO: 8476 - DNA, 294 bp, Zea mays
atagccggggaggatggtgcttgtgcttgcgctgggggatctgcacatcccgcaccgggcgcccgacctccccgccaaattcaagtccatgctcgtgcccggcaagatccaacacatcatctgcactggcaatctctgcatcaaggaagtccatgactacctgaaaagcctttgccctgatctccatattaccagaggtgaacatgatgaggatgctcgatacccagagactaagacacttacaattggtcagtttaagcttgggctgtgccatggccatcaggttgttccatg

SEQ ID NO: 8477 - DNA, 295 bp, Zea mays
cccacgcgtccggcctgatccatccaagacagggatcgccatgtcggactcggaggagcaccacttcgaatcgaaggccgacgctggggcgtccaagacctacccgcagcaggctggcaccgtccgtaagaacggcttcatcgtcatcaagaaccgtccctgcaaggttgtggaggtttctacctccaagactggtaagcatggccacgccaaatgccactttgtcgccatagacatattcaatgggaaaaagcttgaagatattgttccttcatcacacaactgtgacattccg

SEQ ID NO: 8478 - DNA, 309 bp, Zea mays
ggagattactggcttcagtgctccggtaagagagcagatctacaaggtagcttcagtgaacctgtgctccaatatcactggtcaaatccttgcgagcctcgtcatgaatccaccaaaggttggggacgaatcatatgcttcctacaaggcagagaaagatggaatccttcagtctttagctcgccgtgcaaaggcactggaagatgcattcaacacgcttgagggattttcatgtaacaaggctgaaggagcaatgtaccttttccctcagatccatctgccacataaggcaattgaggctgctaaagc

SEQ ID NO: 8479 - DNA, 332 bp, Zea mays
gccacagcaaggctgagtttgacgcccacatgaccaaggcccaggaagccggcaagctggtggtcatcgacttcactgccgcctggtgcggtccatgccgcgccatcgccccactgttcgtcgaacacgccaagaagttcactcaggtcgtcttcctgaaggtggacgtggacgaagtgaaggaagtcaccgcggcctacgaggtcgaggcgatgccgaccttccacttcgtcaagaacggcaagacggtcgcgaccatcgtgggtgccaggaaggacgagctcctggccctgatcgagaagcatgccgcgcctgcgcctgcgactgcgtct

SEQ ID NO: 8480 - DNA, 323 bp, Zea mays
cgggttcagctcggtgttccaggcgtgctgcggctcggggggcggcaagtacaactaccagaacagcgcgcggtgcggcatgtcgggcgcgtccgcgtgctccagcccggcgtcggcactcagctgggacggcatccacctcaccgaggccgcctacaagcagatcaccgacggctggctcaacgggccctactgccgccccgccatcctccacagctaagctaagcgaggggagggcgattaattttttattgttgccatgttatttatacctgtgtttacgttgccgggaaaaaagtgtcccggcagctgcatgcatgtgt

SEQ ID NO: 8481 - DNA, 326 bp, Zea mays
gcctgacagagtgcttatcggtggccgggagacccctgacggcaggaaggccgtccaggctctcaaggatgtgtacgctcactgggttcccgaggacaggatgctcacaacaacctgtggtctgctgagctctccaagctcgctgccaacgcgttcctggcacagaggatctcctctgtgaacgccatctccgccctctgctaggccaccggcgcgaatgtgactgaagtggcttacgccgtgggcaaggacacgaggattggccccaagttcctgaacgccagtgttgggttcggtgggtcttgcttccagaaggacatcctgaa

SEQ ID NO: 8482 - DNA, 296 bp, Zea mays
ggccgccctttttttttttttttgtttatttgcaaccccagtcactacttcaaatatcgtgggcaagttatttatcatgttgaagagccgccgtctggcctctttgtcgaaccaaaccgggctgcaaagtagaatgcaactgctagtaaccaggaatcgctgtggacagcaactagcgctaaccaatccttctcattcatgccatccctagcaaagtttatacccaaagctggttcagggatctctggaggaacttcctctgctggcaaagttacttcccatgtttcgttggggta

SEQ ID NO: 8483 - DNA, 327 bp, Zea mays
cccacgcgtccaggagacggagacgttcgccttccaggcggagatcaaccagctgctctcgctcatcatcaacaccttctactccaacaaggagatcttcctcagggagctcatctccaactcctccgatgccttggacaagatgaggtttgagagtttgacggacaagaccaagctggatgcacagccagagctgttcatccacattgtccccgacaaggccaacaacacgctgacaatcatcgacagcggcattggtatgaccaagtcagaccttgtgaacaaccttggtaccattgcgcggtcaggcacgaaggaattcatgga

SEQ ID NO: 8484 - DNA, 313 bp, Zea mays
gggagcttcccggagtggacgctgtacgtgcaggtgatggacccggacacggaggagcagtacgacttcgacccgctggacgacaccaagacgtggccggacgacctgctgccgctccgccccgtggggaggctggtgctggacaggaacgtggacaacttcttcaacgagaacgagcagctggcgttcgggccggggctggtggtgccagggatctactactcggacgacaagatgctgcagtgccgggtgttcgcctacgccgacacgcagcgctacaggctgggaccaaactacctgatgctgcccgtca

SEQ ID NO: 8485 - DNA, 250 bp, Zea mays
cgagaagagcggcggcgcgggcggacaaggagcaggcggaggaggagctgtgccaagccacaatgggtatctcacgcgactcgatgcacaagcgccgtgccacaggtggaaagcacaaggactggaggaagaagcgaaagtatgagcttggtcgccagccggccaacaccaagttgtcaagcaataagacagtgaggagggtccgtgttcgtggaagtaacgtgaagtggagggctctttcgcttgatac

SEQ ID NO: 8486 - DNA, 331 bp, Zea mays
aggaggaggtgagccaccggaagcggagacgtgagcactcgaccaaccccgtcgatccggctgcagcgcggcgtgctagatcgctaccgaccatggtggtggaggagatgccgagggggataagaacctaaccgtcaccggagatgcggcggcttcaggcggagaggggcagaagaggggcggcggcggcagcagcaaccgcatccaggtgtccaacaccaagaaacccctcttcttctacgtcaacctcgccaagaggtatatgcaacagcacggcgatgtagagctatccgctcttgggatggccatagcaacagttgtgaccgtggca

SEQ ID NO: 8487 - DNA, 306 bp, Zea mays
  unsure (1)..(306): unsure at all n locations
cgatcagatccctcgacaatggcactccaggcagcctacgagtacctgcagcaggccgtcggcatggcgcgtggtcgtccacgcagacgctgacgctgctgctcatcgccgtactcagcgtactactgctgctagcgtccctcgccaagagcacgtcgtcgtccggtaggggcaagccgccgctccctccgtcggcgccgggcancctctccatcgtggggcacctacaccacatcgggccccagacccacatctcgctccaggagctggtggccaagtacgggcacaactggttcctgttcctcc

SEQ ID NO: 8488 - DNA, 319 bp, Zea mays
ccacgcgtccgggagcagatcgagtggagcaagatccagacccctacggatgaggtggtggtgccctacgataccgtcgcgtcgcctcccgaagatctcgaggagacgaagaagctgctggataagctcgttgtgctcaagcttaacggagggctcgggacgaccatgggctgcactgggcccaagtctgtcattgaagtccgcaatgggttcacattccttgaccttattgtgattcaaattgagtccctgaacaagaagtatggatgcaatgtccctttacttctgatgaactctttcaacacccatgatgacacac

SEQ ID NO: 8489 - DNA, 319 bp, Zea mays
gctgccactaatgtcatttttggtcttgctcttggatacaagtcagttatcatcccgattttcgctatcgctgttagcatctatgtcagtttctccattgctgcaatgtacggcatcgcagttgccgctcttggtatgctgagcacaatcgcaactggtcttgctattgatgcttatggtcccatcagtgacaatgctggtggtattgctgagatggctggaatgagtcacagaatccgtgagagaactgatgctcttgatgctgctggcaacaccactgccgctattggaaagggatttgccattggttcagctgctc

SEQ ID NO: 8490 - DNA, 321 bp, Zea mays
agtgaatccaagtggaagcaattaggggagttagctatgtcaaatggaaagcttgaaatggcagaggagtgtcttctacatgcaatggacctcagtggtttgttgcttttgtattcttcccttggggatgccgaagcattaacaaattggcatctgtagccaaagaacaaggaaagaacaatgtttctttcctttgtttcttcatgctaggaaagctggaagagtgtcttcaattgctaatagaaagcaatcgtattccggaagcagcattgatggccagatcttatcttcctagcaaagtcgctgaggttgtagcattgt

SEQ ID NO: 8491 - DNA, 324 bp, Zea mays
aaagaaacgaccgccgccgcatcggaccgtgcccgaaccccccttctcctcgctgactcggctcccctcctccgccgtcgccggaggcgaagcaagtggggaccacagaagcattagctgggtgaacccactcaaagggggcagggaattgtgtgctagtttgaatggctgctacaaagcttcaggccctttggaaccacccggctggccccaaaaccattcatttctgggcgccaacattcaaatggggcatcagcattgccaacatagccgactttgctaaaccacctgaaaagatatcttaccctcagcaagttgctgttg

SEQ ID NO: 8492 - DNA, 319 bp, Zea mays
aattcttcacagagatagagttgctatcgaggctgcatcaccgtaatctagtctctttgctcggttattgtgatgaagatgatgaacagatgctggtttacgagtatatgcccaatggaaatctgcgtgatcatctttcagctagagctaaggtgcctctagatttccccatgaggctacggatcgcgctgggatcgtcacgtggtatcctgtatttgcacacggaagcagatcctccaatataccatcgtgacatcaaagccagcaatattctactggactcgaagtttgtcgcaaaggttgctgatttcggtctctc

SEQ ID NO: 8493 - DNA, 327 bp, Zea mays
aaggtaacatccaatctgctgtattactatggcatgtgtgggttagtgaaggagtgcctacttcagccgtacttcagcaaggaagtgcgaggattctctgaagtacccgaatcagacatagtgcaggcttgtaaaagcctgctagaccagcggcagagcatgaacgtgtggcgcttcgtacagacaatgaacgagagatacgacttgtctgagcatataaagcggctgcagtgcagaaccctgatttttgtgggcgacaattctcagttccacacggaggccgttcacttgacgtcgaagctcgacaggagatactgcgctctagtt

SEQ ID NO: 8494 - DNA, 319 bp, Zea mays
cacaagtccctcagagggccaagggctggcatgatcttctacaggaaaggccctaagccccccaagaagggccagcctgagggtgctgtttatgattacgaagacaagatcaactttgcagtgttcccatctctccaaggtggccctcacaaccaccagattgctgcacttgctgttgctctacagcaaactatgtcgcctggcttcaaggcctatgcaaagcaagtgaaggccaatgctgttgcaattggaaactatctcatgagcaagggctacaagatggtgactgatggaactgagaaccaccttgttctctggg

SEQ ID NO: 8495 - DNA, 294 bp, Zea mays
gtgaagacactcactggcaagacaatcacccttgaggtggagtcttcggataccattgacaatgtcaaggccaagatccaggacaaggagggcatcccaccggaccagcagcgcctcatcttcgccggcaagcagctggaggatggccgcaccctggcggattacaacatccagaaggagagcactctccacctggtgctccgcctcaggggtggcatgcagatttttgtgaagacattgactggcaagactatcaccttggaggtggagagctctgacaccattgacaatgtg

SEQ ID NO: 8496 - DNA, 296 bp, Zea mays
cccacgcgtccggcgcgcagacgcagagatcgctgcagaactttgacattcgcggggagcgtgagacgatgcccgttcccatcatccgtgcctttggcgtgctaaaaaagtgcgccgctaaggtgaatatggactatggccttgatccaacaatagggaaggccataatacaggcagctgaggaggtcgcagagggaaagttggatgatcacttcccacttgttatctggcaaactggcagtggcacacaaagcaacatgaatgccaatgaggtaattgcaaatagggcatctgag

SEQ ID NO: 8497 - DNA, 296 bp, Zea mays
ccacgcgtccgcccacgcgtccggagggttctggtgacgacggcgatctggacagtgatgtcatcggcagccaccgtacttgcgccacgtcggtgccagaggtggatcgcttctacgccgcgttggaaggccccgagctggaccaactcaagccgtcggaggacctggtgctgcctgcggaccggacgtggccgttcctgctgcggttcccggtgtcggcgttcggcatctgcatgggcgtgacagccaggccatcctgtggaaggtgatggcgctgtcggtgccgaccacgttcc

SEQ ID NO: 8498 - DNA, 298 bp, Zea mays
cccacgcgtccgtggaccctgcctggcgcaggaccccgacagcaaggtggcctgcgagacctgcaccaagacgaacatggtgatggtgttcggcgagatcaccaccaaggcgagcgtggactacgagaagatcgtgcgcgacacctgccgcgagatcgggactacctccgacgacgtggggctcgacgccgaccgctgcaaggtgctggtgaacatcgagcagcagtcccccgacatcgcgcagggcgtgcacgggcacttcacgaagcggcccgaggagatcggcgccggcgaccag

SEQ ID NO: 8499 - DNA, 298 bp, Zea mays
cggacgcgtgcggagcgtaaggcgaaggagtagcagcagcaggcggcgccgaggtagcggctccccatctcgagcttgccaccatggctagaggattgaagaagcatttgaagaggctcaatgcccccaagcattggatgctggacaagcttggcggagcttttgctcccaagccatcttctggacctcacaagtctagggagtgcctgccactgatcctcatcatcaggaacaggctcaagtatgctcttacataccgtgaggtcatttccatcctgatgcaacgccatgtacttgt

SEQ ID NO: 8500 - DNA, 298 bp, Zea mays
gagaatcctaccaaacctagctaccaactcggtcgtcgtcatcacgctcgaccgcacaactgcaccaaggggggatgagacctaggagctactacgtcttttatagctacatctctagctagagatcgagagggtagataaggacgagcgggcgcgagctagaagagcagctgcaggtactaccatcatcgtcgtcgtcgtcgccaggatgaccgtcgtcgacgccgtcgtctcctccaccgatgccggcgcccctgctgccgccgccaccgcggtaccggctgggaacgggcagacc

SEQ ID NO: 8501 - DNA, 299 bp, Zea mays
cccattccccagtcgccgcccaagtcaaaaggagggaagcttcttccactacagtccttgaggccgcccatcaacgactagacgctggtcaagctgcaccaaccctagccccataaccctaggtccctcctccacgcccccttccagagaggcgaggaaggaggcgaaaggaaccatggattcctccggcggcggcggtggagcgcagatcaagggtatggcgacgcacgggggccgctacgtgctgtacaacgtgtacggaaacctcttcgaggtctcctccaagtacgccccaccca

SEQ ID NO: 8502 - DNA, 296 bp, Zea mays
gacgccttccacggcgacaaggcccacggcggcgtccatgacggtaccgagatcgtgctctggaagtggtgcgagggcgacaaccagcgctggaagatcctcccttggtgaacgaacgaaagaaactactagctggtaccctaataataattctgctggctgcggcgatcccaaaataaaagaggccgggtgcgatgcatctcggacttctcgagtggtgtttgcgtcagacagccagccactgtggggctagtgttccaacatttgtcagcctgcttgcgcgacgaaggggggtc

SEQ ID NO: 8503 - DNA, 295 bp, Zea mays
gttcgtgctctacgacacccgcgacaggacctacgtggcggcgcgcgacgcatcgggtcaacccgctctacatcggctggggcagtgacggttccgtctggatcgcgtccgagatgaaggcgctgaacgaggattgcgtgcgcttcgagatcttcccgccgggccacctctactccagcgccggcggcgggttccggcggtggtacacccgcactggttccaggagcaggtgccccggacgccgtaccagccgctcgtcctcagagaggccttcgagaaggcggtcatcaagagg

SEQ ID NO: 8504 - DNA, 300 bp, Zea mays
atcgacgtgagtctcatcatcactgactactgcatgcccggcatgacaggatacgatctgctcaagcgagtgaaggggtcctcatcgctcaaggacattccggtggtgatcatgtcgtctgagaacgtgcctgcccggatcagcaggtgcttgcaggatggcgcggaggagttcttcctgaagcccgtgaagccggccgacatgaagaagctcaagtcacacctgctgaagcggaagcagcccaaccagaagaacaagcctcaggcgcaggcggtggagtctcctgagcagcagctggac

SEQ ID NO: 8505 - DNA, 293 bp, Zea mays
gaaaaacgcctcctatgatgatgtgaaagcagccatcaaggcggcatcagagggtgcactcaaaggaattcttggctacacagacgaggacgttgtttccaatgattttgttggtgattctaggtcaagcatctttgatgccaaggctggtatcggactgagctcttctttcatgaagctcgtgtcttggtatgacaacgagtggggctacagcaaccgggttctggatctgatcgcccacatggccctcgtcagcgccgccgccaagctctgacgtccgtgctcgttcctcc

SEQ ID NO: 8506 - DNA, 293 bp, Zea mays
cgccatcttcagcttcggcgactccatgtccgacaccggcaacctgtgcgtgaacggtccccccgccggcctgacgctcacccagccgccctacggcgagaccttctttggccgcgccacctgccgctgctccgacggccgcctcgtcgtcgacttcctggccgagaagttcgggctgccgctgctgaagccgttgaagcagggcggctcagacttcaagcagggcgccaacatggcgatcattggcgcgaccaccatggactcgggcttcttccagtcgctgggcatcgccg

SEQ ID NO: 8507 - DNA, 292 bp, Zea mays
cagaccctctgttattagttgtatacacgtactcgacgtcctgtgttggcgcacgtgcaatggagtgcgagaccggcctggtcgaccgccccctcaacagctcagcgccgcgcaccggcgaccccttgaagtggggcaaggcggcggagggtcttactgggagccacctggacgaggtgaagaggatggtggaggagtaccgcgtgccgctggtgaagatcgacggcgccgtgctcagcgtcgctaaggtggcagccgtcgccggccgggtacaggtggcgctggacgaatc

SEQ ID NO: 8508 - DNA, 295 bp, Zea mays
caatggcgctctccgaccgctcccgcgagtcgctcctcccgagcttcctctacgcctcctcggcgcgctctttcgctgccacaggagccgccgcgcgcctccctgtctcctccccagcgcctgccacggctggagcaggaggcggcgtgccgttctcgatccaggcgcccaaggagaagatcgagatgtactcgccggccttctatgccgcctgcactgccggaggaatcgccagctgcgggctcacccacatggccgtcacgcctctcgacctcgtcaagtgcgatatgcagat

SEQ ID NO: 8509 - DNA, 256 bp, Zea mays
aagttcggcaggctgcagcgtgggcgatacagccccaacggatctgaccaggccatcttctacaactccaccagctactgggacgagttcgtgtggggcggtgcgtggatgtacttcgccacggggaacaactcgtacctcaccgtcgccacagccccgggaatggcgaacacgctggagcatactggtttggaagtccaaactacggagtgtttacctgggatgacaaacttccaggagctcaggttcctctcag

SEQ ID NO: 8510 - DNA, 291 bp, Zea mays
cggacgcgtggcgcacgcagcacgtgaagcaccacttcctgcactcactgtgctagctgctcaaaccgtagtagtaacagtccatcaccaccaaagctctcccaaggttgcgctcttccttgccctgagcctcctgtttgctgccaccgcgcatggctgcgaacccaactgttctggcccagtcgtcccaacgccgccagtcgtgccgactccgtcgtcgcacagccacgggcgctgcccgatcgacgcgctcaagctcaaggtgtgcgccaacgtgctaggcctcgtcaa

SEQ ID NO: 8511 - DNA, 288 bp, Zea mays
cggacgcgtggcggcgaactgctgcttgcgctcctcctcgtctctgctgctgccgcccctcaggtacttggagttggcaatggagacaatcaactgagaatcatccaggaggacatcattgagacagtcaacaaccatcccagtgctgggtggacagcctcacgtaatccttacttttcaaactataccattgcgcaatttaagcacatacttggagtgaaaccagcaccacagaatgcactaagcaatgttcctgtcaaaacttattcaagatcactggaacttcca

SEQ ID NO: 8512 - DNA, 291 bp, Zea mays
ctgctcctcacgccgccgccgccgccgccgccgccgtcgccgccaccacatccgtagcgcccagccgccggagaagaggagggagccagcaccagccaccatgggtcgcgtccgcaccaagaccgtgaagaagacctccaggcaggtgatcgagaagtactactcccgcatgaccctcgacttccacaccaacaagaaggtgctggaagaggtctcgatcctcccctcgaagcgcctccgcaacaaggttgccggcttcaccacccacctgatgcgccgcatccagcgggg

SEQ ID NO: 8513 - DNA, 290 bp, Zea mays
tgaaattcaccgtcaacctgcatcactttcactttccatggtctctgttcaggctcctgaatctgtagttgattcgttgccatgtaagagctacaaaaagcttgagacaccccaatgcagtgatgatatggaacagtgccatatctgcctaaccgaatatgaggacggagaccagataagaacccttccgtgcaagcacgagttccacctgcaatgcgttgacaagtggctgaaagaaatacacagggtgtgccctctgtgccgtggagacgtctgcgaagtcgcctcgt

SEQ ID NO: 8514 - DNA, 293 bp, Zea mays
ctctcttcgctgttcagtaagcccaacggtgatcaaatctgcaaatcctggcctagatgcaatgcagaggaacaatgcagcatactgtgcccagcctgcttgcattgaaccatcctgcattcagccctcttgtgtagctccaactacttgctttggcccccggttcttctccaaatctaaatcaaagtccaagtccaagtccaagaaggacaaatcaaagcctgatgctccaaaccaagagaacctcttcccagagctcattgctgagccaactgacgctcgctcgatgtcct

SEQ ID NO: 8515 - DNA, 237 bp, Zea mays
cccactcgtccgcccacgcgtccgcccaagtcgtggtgttcatcctgctgtcgtgctcgatcgcagtgtgcgtaaacttcagcacgttcctggtgatcggcacaacgtcgcccgtgacgtaccaggtgctggggcacctcaagacgtgtttggtgctctccttcggctacatcatcctcaaagaccccttcagcgcgcgcaacgtggtgggcatcctcatcgccatcttcggcatgg

SEQ ID NO: 8516 - DNA, 289 bp, Zea mays
gtggtagaggttgtaagtggggattgcattattgtggctgatgattctgctccatatggcagtccttcagccgaacgtcgggttaatctgtcaagcattagggcccctaagttgggcaatgctcgtacagatgtgaagcctgaccattttgctcgtgaagctaaggagttcttgcgcatgaggttgattggcaagcaagtggctgttgaaatggaatattctcgaaggatcagcaccgtggatggacagagtgttgctccaacagcaaacattgctgatacgagagtat

SEQ ID NO: 8517 - DNA, 290 bp, Zea mays
tgctgttgagggtgtggagaggttcaagaaagaaaactgtgatgtcatcattgtggacacaagtggaaggcacaaacaagaagcggcactctttgaagaaatgcggcaagtttcggaagcaacaaaaccagacctggtgatttttgtgatggacagtagtattggtcaggctgcatttgatcaagcacaggcatttaaacaaagtgtttctgttggtgctgtgattattacaaaaatggatggtcacgcaaaatgcggtggtgccgttagcgcggtcgcagcaacaaaaa

SEQ ID NO: 8518 - DNA, 293 bp, Zea mays
cggacgcgtggggtctgcagcccccaactacccccagcctcggaaggaaccttccagaagcgcaagactctaaaggccgtcgcgttcccattcttcctcgccgcgaaggtcgcctgagatcacataaacaatggtgaaggctgttgctgtgcttggtagcagcgatggtgtcaagggcaccatctttttcacccaagagggagatggccctaccgctgtcaccggaagtgtctctggcctcaagcctggcctccatgggttccatgtacatgcacttggtgacaccaccaatg

SEQ ID NO: 8519 - DNA, 290 bp, Zea mays
tgatgatattccaccttccttccccagcaaaggctcaaaagtatcgtgtggagaacttgtacgagggaccccttgatgatgtgtatgcaactgctatcagaaactgtgatccagagggtcctcttatgctgtatgtttcaaagatgattcctgcatctgacaagggcaggttctttgccttcggtcgtgtcttctcagggaaggttgctactggtatgaaggttcggatcatgggtcccaactatgtccccgggcagaagaaggatctgtatgtcaagagtgtccagcgt

SEQ ID NO: 8520 - DNA, 137 bp, Zea mays
agctcgagaacctgctcctctactaggtaggcaacctcaaagtggcggactttgggctcagcgcgctcgtcggggcacgcacgctccgacgtgctgctccataccgcctgtagcacgccgtcatacgtcgcccccga

SEQ ID NO: 8521 - DNA, 293 bp, Zea mays
cctgaatcagatgcaaagcagctaattagttatgcacgcgctaataataaggtcatcattggacctgcaacagttggaggaattcaagctggtgctttcaagattggtgatactgctggaaccattgacaacataattcagtgcaagctttacaggcctggatctgttggttttgtgtctaaatcgggtggcatgtcaaatgagatgtacagcaccattgccagagtgacagatggtatttatgaaggaattgcaattggaggggatgttttccctggatcaactctgtcaga

SEQ ID NO: 8522 - DNA, 284 bp, Zea mays
cccacgcgtccggtaacatacacgagtgattatttcttttcagctaccttaggtttgacgacacaaatccggaagctgaaaagaaagaatacatagatcacattcaagaaattgtccattggatgggatgggaaccctacaaagtaacatacacgagtgattatttccaacctttgtatgagcatgctgttgagttaattcggaaagggctagcctatgtggatcatcagaccgcagaagaaattaaggagtacagggaaaagaagatgaatagtccatggagg

SEQ ID NO: 8523 - DNA, 287 bp, Zea mays
catcaaagcccaaatatgggatactgctgggcaagagaggtaccgtgcaatcacaagtgcgtactacagaggagctgtgggtgcacttctagtctacgacatcacgaagaagcagacattcgaaaacatacagaggtggcttcgtgagctccgcgaccacgccgactccaacattgtgatcatgatggttggtaacaagtccgacctgaaccacctgaggtcggttgcagaggaagacgggcaggcattggcagagaaggaaggcctatccttcctcgagacatccg

SEQ ID NO: 8524 - DNA, 287 bp, Zea mays
acccacgcgtccgggcgtcccacattgttggataccctcgcatgggccccaagatggagctcaagtttgcagttgagtctttctgggatgggaagagcaccgctgaggatgtggagaaggttgctaccgacctcagggccagtatctggaagcagatggctgatgctgggatcaagtacatccccagcaacactttctcgtagtatgaccaggtccttgacaccagtgccatgctcagcgctgtccccgaacgttactcatggactggaggagagattggatttgac

SEQ ID NO: 8525 - DNA, 289 bp, Zea mays
catcaccaactaggatcgatctctcgacagcaaatagctagcaatggagaagtacaccaaagccctagcgtcattgctcaccatgctggtgctggcacctctcctcgccatggccaccgacccagaccccctgcaggacttctgcgtcgccgacctcaacggcaagccatcagtgaacgggtacccatgccagccgccgtcgtcggccggcgaccagttcctcttctcgaccaagatcgccacgggaggcgaccccctggccaacccgaacggctccaacgtgacggag

SEQ ID NO: 8526 - DNA, 131 bp, Zea mays
gaggactttgacaacaggatggttaaccactttgtccaggagttcaagagaaagaacaagaaggatatcactggcaacccgagggctctccggaggctgaggacctcttgtgagagggccaagagaactct

SEQ ID NO: 8527 - DNA, 71 bp, Zea mays
cactttggcctcctcacttgcaagtttaatcttcgcctccagccatgggtaaggagaagtctcacatcaac

SEQ ID NO: 8528 - DNA, 136 bp, Zea mays
gggagatcaaggtgcagaagctggtgctcaacatctccgtcggagagagtggggatcgcctcacccgcgccgccaaggtcctggagcaactgagtggccagtcaccagtgttctctaaggctaggtacactgtccg

SEQ ID NO: 8529 - DNA, 138 bp, Zea mays
ggagccagcaccagccaccatgggtcgcgtccgcaccaagaccgtgaagaagacctccaggcaggtgatcgagaagtactactcccgcatgaccctcgacttccacaccaacaagaaggtgctggaagaggtctcgat

SEQ ID NO: 8530 - DNA, 291 bp, Zea mays
cccacgcgtccgtgatacttcaaggggagaaacacttcgcataaattttgatgtcacctttccagcccttcaatgttctataattagcctggatgcaatggacatcagtggacaggagcacctagatgtgaaacatgatgtattcaagcagcgaattgatgcccatggcaatgttattgcgactaggcaagatgtagttggtgggatgaagatggaggcacctctacaacatcatggtggaaggcttgaacacaatgaaacctattgtggctcttgttatggtgcacaaga

SEQ ID NO: 8531 - DNA, 187 bp, Zea mays
cccacgcgtccggctggacggcaacccgcgcctgaacctggcgtccttcgtcaccacgtggatggagcccgagtgcgacaagctcatcatggactccatcaacaagaactacgtcgacatggacgagtaccccgtcaccactgagctccagaaccgctgcgtaaacatgatagctcacctgttcaac

SEQ ID NO: 8532 - DNA, 241 bp, Zea mays
ctccttttgctcggaacgcacacaccgcccgtccccgatctccgatcccctcgtcgatccaaagatgcagatcttcgtcaagaccctcactggaaagactatcaccctcgaggtggagtcttctgacaccattgacaacgtcaaggccaagatccaggacaaggagggcatccccccggaccagcagcggctcatctttgctggcaagcagctcgaggacgggcgcacacttgccgactac

SEQ ID NO: 8533 - DNA, 230 bp, Zea mays
gggcttgatcgaagatggatgccggagcaaaggtggtgaagaaggccgcggcggggcgtcgcggcgggggcggccccaagaagaagccggtctctcgctccgtgaaggccggcctccagttccccgtaggccgtatcggccgctacctcaagcagggtcgctactcccagcgtgtcggcaccggcgcccccgtctacctcgctgccgtactcgagtacctcgccgccgag

SEQ ID NO: 8534 - DNA, 288 bp, Zea mays
caccgtctctctcccccgtctatctcttcttggagcctggagaagaggaaggatcagggaacgggggaagaggttgctgcgacagcttaagtctcaagtttggattcagacaagtagacaaacaccagttggttaagatggcagctggtttccagatcggtgtgatcggagtcacttgcactctctgttgcatcttcagtttccattgtcctctgcaacaaagctctcatcagcacacttggttttccattcgctacaacattaacaagctggcatctgatggtgacc

SEQ ID NO: 8535 - DNA, 229 bp, Zea mays
ctgacacaagagagcacgctactactcatcactcgccaacgtgcagagatcagggaggcggcacactccatccactgaccgctcatggcgaaggtccacctctacgtcgccgcggtctgcgccgtcgtcctcgcgctcgccgccccggccctcgccggcgaccccgacatgctgcaggacgtctgcccggctgactacgcctccccggtgaagctgaacgggttcgcgt

SEQ ID NO: 8536 - DNA, 296 bp, Zea mays
atccgggaaggtcccggcagaagaacttggcgggcgaaaggcgaaaccgacgtgctcccgggcgggcggcgacacggcatggagcgagatcggcaggcagtggcgaggaacaggaaggtggtgctgcgcgggtacatcgaccgcgcgcccagggaggaagacatggagctcgtcgacggcggcgccgtgtgagctgcgcgtccccgagggcggcggcggccccgcggtgctggtgaagaacctctacctatcctgcgacccttacatgcgcggcaggatgcgggacttccgcaact

SEQ ID NO: 8537 - DNA, 115 bp, Zea mays
ctgaaggatgctgttggtctggttcgcccagttagcgttgccttcgaggtgatcactggtttcaggctgtacaagagcggagtttacactagcgaccattgtggaactacaccga

SEQ ID NO: 8538 - DNA, 303 bp, Zea mays
gttacttctccctccgccgccactcccctcccattcaccgccaccgccaattccataccgtcctccgccacctctgctgagagcgagaagagatggcaggcaagggtgatgggccggcaatcggcatcgatctcggcacgacgtactcttgcgtcggcgtctggcagcacgaccgtgtcgagatcatcgccaacgaccagggtaaccgcaccacaccctcgtacgtcgccttcaccgactccgagcgcctcatcggagatgcggccaagaaccaggtcgccatgaaccccatcaacaccgtct

SEQ ID NO: 8539 - DNA, 292 bp, Zea mays
cccacgcgtccgcgcaagggagacaaggacgacgaagatcttgcgagggccatacaggacagcctcaacatgaacccttacacgccttacaacccctatgctccctctcacgcccaacctagagggcacaggctgtgcgcaggctgcaagcatgagatagggcatggccattacttgagctgcatggggatttactggcaccctcagtgcttccgctgcaactcctgcggccaccctatccgtgagaccgagttcacattgctgagtacagatccataccacaagctgtgct

SEQ ID NO: 8540 - DNA, 281 bp, Zea mays
actagggcttcatctacacggcgttccaggagcgcgccaccgccgtctcgcacggcaacacggcgcggccgcatggcgctgggcgacgcagcctggccaggatctgcggcgccatcgcgagcgacgagaagcggcacgaggcggcctacacccgggtggtggaccagctgttcgcgctcacgcccgacgccgccgtgcgcgcgctcgagtacatgatgagggagaggatcctcatgccggcctactacatgttcgacggccgggacccggacctgttccgc

SEQ ID NO: 8541 - DNA, 283 bp, Zea mays
ctgcgcctccatttcggcctctgtcccttgcaagttcaatctcacctccaaccatgggtaaagagaagtcccacatcaacattgtggttattggccatgtcgactctggcaagtcgaccaccacaggacaccttatctacaagcttggaggcattgacaagcgtgtgatcgagaggttcgagaaggaggctgctgaaatgaacaagcggtccttcaagtacgcgtgggtgctcgacaagctcaaggctgagcgtgagagaggtatcaccattgatatcgctct

SEQ ID NO: 8542 - DNA, 281 bp, Zea mays
gcacctctaagccaaagcaagttgctaggtcctttgaaccagcaactgaagcttcctcgtctcatcatcgagaccagtaagcaacatggcggctaatctcaagtgggctcctgttctagccctcgtcgtcgtcgttgctgccatggttggcaccacgagcgccggcaacatcgcagtgtactggggccagaacggcaacgaaggcagcctggcggacgcctgcaagtccgggctctacgcctacgtcaacatcgcgttcctcacaaccttcggcaacggac

SEQ ID NO: 8543 - DNA, 285 bp, Zea mays
cggacgcgtggccgctcctgagtcctgtccaccctgccaccgccgacgccgcgccgccgcagcaattgtcaccgtcgctatggcccgtatcaaggtgcacgagactccgggggaagagcaagacggacctgcaggcgcactcaaggagctgaagtctgagctctccctcctccgcgtagcaaggtcaccggcggcgcacccaacaagctctccaagatcaaggtggtgcgcacctcgatcgcgcgcgtgctcacagtgatctcgcagaagcagaagtcggcgttg

SEQ ID NO: 8544 - DNA, 283 bp, Zea mays
ggacgcgtggttgtgacacttggttttgatttgaatgtgaaccatccttacaagcccttggttgaagcaataaaaatattcaaggttgctcaaaatgcacatgctcaagttgcctggaattttgtcaatgatgggctccgcacttcactttgcctgcaatttaaaccgcaccatattgcggctggtgcaatcttcctcgctgcgaagtttctcaaagtcaagcttccatcagatggcgagaaggtctggtggcaagagtttgatgtaactccgtggcagctgg

SEQ ID NO: 8545 - DNA, 297 bp, Zea mays
cccacgcgtccggcagaactggtactgctacgccaagacggtggcggacagggcgcgtgggaggtggcgcggaacgagggctggacctggtggtggtgaacacggtgctggtgctgggcccgctgctgcagccgacggtgaacgccagcacggaccacgtgatgaagtacctgaaggggtcggccacgacctacgtgaacgcggcgcaggcgtacgtgcacgtcagggacgtggccgaagcgcacgtccgggtgtacgatgcgccccacgcgcacggtcgctacatctgcgccgaga

SEQ ID NO: 8546 - DNA, 284 bp, Zea mays
gccgggaaagagcttacgctgctggggttatgggcgagcccgttcgtgctccgggcgcgcatcggctcagcctcaaaggcctcacctacgcttactccgaggagaacctcgacgacaagagcgagtttctcctcagctccaaccccgtgctcaagaaggtgcccgtgctcatccaccacggcaagcccgtctgcgagtcccagatcatcgtgcagtacgtcgacgaggctttccccgccgccgcacctaatttccttccatccgacccctacgaccgcgccatt

SEQ ID NO: 8547 - DNA, 294 bp, Zea mays
cggacgcgtgggcacaaaccagcagcaggcagagcaacgactagctgccaggggtgctagcaagagtgcaacaatggccaccgcgctgtccttcaaggccttggcactggccgcgctcgtctccgtggtcgtcgtcacctctggcgctcgcgccgagcaacagctcaagcgcaacgccaccaccgcctcgcaggacagatccttgttgtcctacagcagtggctggctgccggccaaggccacctggtacggcggccccaccggcggcggccccgtcgacaacggtggtgcgtg

SEQ ID NO: 8548 - DNA, 301 bp, Zea mays
gctcaaaccaagaccggcgtgcgcggacgaagcacagatccatcggagtgacagcgagcgagcgagagcgagagcgagagatacagagagattatccgcgcgtcaccgactcccggcgaagacgatggggaaggggttcgcatcctacctggcgatgaagacggggccggagggcggcgacgcggcggcggcgcagcaggctctgatcgacgcggacctgcgggaggtcggcgtcgccgcgcggaagctcgccaaccacgcattcgtcctcggcggcgggctggggttcggcacctccttc

SEQ ID NO: 8549 - DNA, 294 bp, Zea mays
cccacacgtccgcccacgcgtccgcccacgcgtccgcccacgcgtccgagcgaacaagcaggcttcgagaacaagactgcaggcggacggggaggaccaagcgaaaggggaactagagcaagatgggcggcgcagtggtggttgcggtgctcctcgtctctgctgctgccgcccctcaggtacttggagttggcaatggagacaatcacatgagaatcatccaggaggacatcatcgagacagtcaacaaccatcccagtgctgggtggacaggctcacgtaatccttagtttt

SEQ ID NO: 8550 - DNA, 305 bp, Zea mays
ccctggaccataccaggagcatgaccgcgtctaccgttacgactactacaacgaccttggtgatcccgacaagggcgaagagcacgctcggccggtccttggtggcagccaagaacacccgtatccccgtcgctgcagaactggccggcacccaacaaagaaagacccaaattcggagagcaggcttttcctggtgaacctgaacatctacgtcccgcgtgacgaacgctttgggcatctcaagatgtcggacttccttgggtactcgctgaagacgatcatcgaggctgttcttccaacactgg

SEQ ID NO: 8551 - DNA, 301 bp, Zea mays
cgcgtcagcgcgcgctggggtcaccaggaacttgaagggtttgcaggacaagatggagctggtggccatcgatctgcaggacaaaccggcttggtacaaggacaaggtttacgcacagggcacggtgccttccctggagcacgacagcgaggtcaggggcgagagcttggacctgatcaggtacatcgacagcaactttgacggccccgcgctgctcccagaggatgctgcgaagaggcagtttgctgacgaactgttcgcgtctgccaacgcgttcaccaaagccctctactcgccgttg

SEQ ID NO: 8552 - DNA, 292 bp, Zea mays
ctttccccttccctccctccctctccccgcggaccgccagacgcaatttcgccctcgatccgaccccgattcgtccgcccgcgaccgggattccctccgccaagcgcggatctgaacgctgcgctccgtgtcgccgctcgaatccgccatgaagggggccaaatccaagggcgccgccaaggccgatgccaagctggcggtgaagagcaagggggctgagaagcccgccaagggcaggaaagggaaggccggcaaggaccccaacaagcctaagagggctcccagcgctttc

SEQ ID NO: 8553 - DNA, 294 bp, Zea mays
cggaccgtggcaggacgcgtgggctgtggactccgacaagaagcagcagcttcttgccgtcattggagtttacactgggtttggctcccgtctcaagaggaacgtcttccgtggatcctggatgccaagaggtgatgctctgaagaagcttgaggaaaagggtgtagctattcgttttgttattggtcggagtgcaaatcgaggtgatagcttggaccgtaatattgatgatgaaaatcggcagacaaaggacttcttgattcttgaaagtcatgaagaggctgcagaagaatt

SEQ ID NO: 8554 - DNA, 293 bp, Zea mays
ctcgaagaaacaaggggtcagaacagggatggttggaggcctcggtttcggcttctcgttcttgatgctgtaccttacatatggactttgtttctatgttggagcgcagttcgttcgtcacaacaagtctacttttggggacgttttcaaggtgttttttgcactgatgctggcgacaattggggtgtctcagacaagcgcgttggcttctgattctacgaaggccaaggattcagccgtctccatatttgcgttgctggacaggaagtcccagatcgactcgagcatcgacg

SEQ ID NO: 8555 - DNA, 297 bp, Zea mays
gcggctctcacttactgacatcaagattgacatcaaacgtgtccccaagaagacagccctgatcaaggcgatggaggaagctgatgtgaagaccaagtgggagaacagctcatggggcaagaagctgattgtccagaagaggagagcatcgctcaatgactttgataggttcaaagtcatgctggcgaagattaagaggggcggtgctatcaggcaagagctcgccaagctgaagaaggcgtccacggcttaaggagtctctttccgtgaatgtcatgttagagtttttggttatga

SEQ ID NO: 8556 - DNA, 298 bp, Zea mays
ctccaagaaagagatgaggatccttatggttggtctcgatgcagctggtaagaccaccatcctctacaagctcaagctcggagaaatcgtgaccaccatccctacaatcgggtttaatgtggagactgttgaatacaagaacattagcttcactgtctgggatgttggaggtcaggacaagatcaggccattgtggaggcactatttccagaacacccaaggccttatctttgttgttgatagcaatgacagagatcgtgttgttgaagcaaaggatgagctccacaggatgctgaac

SEQ ID NO: 8557 - DNA, 286 bp, Zea mays
ccacgcgtccggggcgcagagaatccccaagcaaacaaacagggtagaggtaggcccaggcgcgacgcggcgcgccgggccgaggggctgggtctggcacaccatggctcccatgaagctgtacggagcggtgatgtcgtggaacgtgacgaggtgcgcaacggcgctggaggaggctggctccgactacgagatcgtgcccatcaacttcgccaccgccgagcacaagaaccccgagcacctcgtccgcaacccgtttggtcaggttccagctctgcaggatggt

SEQ ID NO: 8558 - DNA, 284 bp, Zea mays
gacttcagagacctttgactcaattgtccttgatgaaaccaaagatgtccttgttgagttttatgccccatggtgtggtcactgcaagcatcttgctccgatttatgagaagctggcttcagttttcaagcaggacgacggtgttgtgattgccaatattgatgctgacaagcacactgacttggctgaaaaatatggtgtttctggtttccctacattgaagttcttccctaagggaaacaaagccggtgaagattatgatggtggccgggacttggatgact

SEQ ID NO: 8559 - DNA, 286 bp, Zea mays
cacgacaattctggatgtccacggagtgggggttgaaaaatttcagcaaaactgcacgcgaattaattcaacgactgcagaaaattgacaatgataactacccagagactctataccaaatgtttatcgtcaatgctggtccgggcttccggttactatggaacaccgtgaagtccttccttgatcccaaaacgaccgccaagatacatgttcttgggaacaaataccaaagtaagctgcttgaaacaattgacgctagtgaattgccagaattccttggtggcac

SEQ ID NO: 8560 - DNA, 270 bp, Zea mays
cccacgcgtccgaacgttacttgcctgacacgtctggaccacaacagggctcttggccagatttctgagagacttaatgtccaagttagtgatgtgaagaatgttatcatctggggtaaccactcgtcctctcagtaccctgatgttaaccatgccacagtgaagacttccactggggagaagcctgttcgtgagcttgtctctgatgacgagtggcttaatggtgaattcatcacaactgtccaacagcgtagtgctgcaatcattaaa

SEQ ID NO: 8561 - DNA, 289 bp, Zea mays
gttcggagcgcacacacacgcaaccagatgtcccccaaatccagccgtcggcacctccgcttcaagatgcagatctttgtgaaaaccctgactggcaagactatcaccctcgaggtggagtcgtctgacaccattgacaacgttaaggccaagatccaggacaaggagggcatccccccagaccagcagcggctcatcttcgctggcaaacagcttgaggacgggcgcacgcttgctgactacaacatccagaaggagagcaccctccaccttgtgctccgcctcaggg

SEQ ID NO: 8562 - DNA, 285 bp, Zea mays
gcttggtcttgtgctcgtccgatgagcatcgccctcgctgccgtcctcctgctgtgcggcggcgcgtggctgcagcaggcggcggaggcgcgcccccaccacatggacgacgacagcagcatcgacatggaccgcggcagcgacgacttcttctccatcgtggggtactcgccggaggacctgacgcagcacgaccggctcgtcaggctgttcgaggagtgggtggccaagtaccgcacagcgtacggcagcttcgaggagaagctgcgccggttcgaggtgttc

SEQ ID NO: 8563 - DNA, 237 bp, Zea mays
ccacgcgtccgccggatttatatagcttttatctatgtttaattaagacttgtgtttacaattttttatatttgttgttaagttttgaatatatggttttatggtgtgattttaccgaacaaaataccggtttccgtccgattccagccagcgtcatctgattgcatgcaggcgtttaggacctggccggccgtagttactgtaatctccgctgaaatgtcgtatagtaaactttgt

SEQ ID NO: 8564 - DNA, 288 bp, Zea mays
atcgtgtggagaacttgtacgagggaccccttgatgatgtgtatgcaactgctatcagaaactgtgatccagagggtcctcttatgctgtatgtttcaaagatgattcctgcatctgacaagggcaggttctttgccttcggtcgtgtcttctcagggaaggttgctactggtatgaaggttcggatcatgggtcccaactatgtccccgggcagaagaaggatctgtatgtcaagagtgtccagcgtactgttatctggatgggaaagaagcaagagtcggttgagg

SEQ ID NO: 8565 - DNA, 290 bp, Zea mays
ggcataaacacgacagcaagaggatgctccatgcggtttaccgtgttggggatctggaccgcacaatcaagtactacacggaatgctttgggatgaaactgctgaggaaaagggatgttcctgatgagaagtacaccaatgccttccttggctttgggccagagaacaccaactttgcagttgaattgacatacaactatggcgttgacaagtatgacattggaacgggctttgggcatttcgcaattgctaatgatgatgtgtacaagttagctgagaatatcaaatcc

SEQ ID NO: 8566 - DNA, 287 bp, Zea mays
cgcctcgtcatcgacaagcccaggttcacgctggagcggaacgctccttcgacgagcagtcgtggagcgagctctcccaccgccagaacgacggcttcgacagcgtgctgcagtcgccggcattcccgtccggcggcttcgactcggccttctccgtcggcacgcacttcggcggcccgcacccgctcgtcaacgaggcctgggaggcgctcaggaaatcggtcgtctagttccgggaacagcccgtcggcaccattgctgccgtcgatcatgcgtcggaggaagtg

SEQ ID NO: 8567 - DNA, 315 bp, Zea mays
cggacgcgtgggcggacgcgtggggtccggtcagaccaatcaacaaagtgacgcgagcacgagcatccatcgtttccccttcttccccatcgcgtgccctcgccgcagacatcttccatggcggaccatctcacggacgagcagatcgcggagttcaaggaggccttgagcctcttcgataaggatgacgacggctgcatcactagcaaggagcttggaactgtgatgcgctcccttggccagaaccccagtgaagcagatctgcaggacatgatcgacgaggttgatgctgatggcagtgggaccattgacttc

SEQ ID NO: 8568 - DNA, 300 bp, Zea mays
ctacaggctacagctcccgtctctccgccgcttgcttggaaaacgaagaaaccctcctccaccaacccaatccagctacatccgtctgggtgaactccagggccaggagcagttcgccgccttcgttcgcatcacctacgcggttcgatccaactggcaggaaggaacgtgatggccaagacgagctcgttcaagctggagcacccccttgagaagaggcagtctgaggctaatcggatcagagagaagtaccctgacagaattccagtgattgttgagaaggctgagaggagtgacatt

SEQ ID NO: 8569 - DNA, 189 bp, Zea mays
ccgactccgccgccgcccgccgctccgcctcagcgcatagcccgccgcgacctcatcgatcaccttcaactttcaatcatggcggacgtcgatgtcgaaccggagttgccgccggagctcccaagaagaggacgttccgcaagtacagctaccgcggcgtcgacctagatgcgcttctcgacatgtcca

SEQ ID NO: 8570 - DNA, 287 bp, Zea mays
cttcactgggaaacgaagaaagaacataggactgatccggtcggtgggacttcctctcgaatcgccccgatcgagaccctagttgccccacgaaccgaggatccaagatgagtttcctgttcgggaagcggaagacgcccgccgagctgttaagagaaaacaagagaatgctggatcgatccatcagggaaattgagcgagagaggcaaggattgcaggcccaggagaaaaatctcatcactgagatcaagaaaacagctaaagaaggccagatgggagctgtcaaa

SEQ ID NO: 8571 - DNA, 282 bp, Zea mays
gacagaccgagagcaagatcgagttatactgttctggttttgcagtggttcagtaaggcagaaagttgttaaaccgtagttctgagatgtattaccagtggcgccatgctgtacttttagggtgtataatgcggatacaaataaacaatttagcggttcattaaagtttgaactcaaataacatgttctttgtaagcatatgtaccgtacctctacgtgaaataaagttgttgaattagcattcgacaaaaaaaaaaaaaaaaaaagaaagaaaaaaaaaga

SEQ ID NO: 8572 - DNA, 306 bp, Zea mays
tgcactggcaatctctgcatcaaggaagtccatgactacctgaaaagcctttgccctgatctccatattaccagaggtgaacatgatgaggatgctcgatacccagagactaagacacttacaattggtcagtttaagcttgggctgtgccatggccatcaggttgttccatggggcgacctggactccctggcgatgctccagcggcagctgacgtggacatcctggtgaccgggcacacgcaccagttcaaggcatataagcacgatggaggcgtggtgatcaaccctggctctgccacgggcg

SEQ ID NO: 8573 - DNA, 234 bp, Zea mays
cccacgcgtccgcgcgtgatcggagaagtgttcagcgcgtctaagtccaggatccccgtgggggttgtgaacatcacccagctctccgagtacaggaaggacgcgcacacccagatatacaagaagctgtggaacccgctgaccccggagcaggtcgcggaccctaagagctacgcggactgcacgcactggtgcctgccaggggtccaggacacgtggaacgagctgctctac

SEQ ID NO: 8574 - DNA, 286 bp, Zea mays
ggaagtctcttcctacctgaagaaggttggatacaaccctgacaagatccactttgttcccatctctggtttcgaaggtgacaacatgattgataggtccaccaaccttgactggtacaagggcccaaccctacttgaggctttggacttgatcaatgagccgaagaggccttcagacaagcccctgcgtctccccctacaggatgtgtacaagattggtggtattggaactgttcctgttgggcgtgttgagactggtatcatcaagcctggtatggttgttacc

SEQ ID NO: 8575 - DNA, 280 bp, Zea mays
  unsure (1)..(280): unsure at all n locations
cagacgcgtgggacgacgccttccacggcgacaaggaccacggcggcgtgcgcgacggcaccatcatcgtgctctggaagtggtgcgagggcgacaaccagcgctggtaantcgtcccctggtaaatgtgctgttctgtggctgcactggtcatcaccatgatctggagctttgaaggcatagccacctgtggtcagcagctgctgccgtgttgctagaataaagttggtggcgatcgatcgatcgatctttggtgatgggtgtccctccctgtgtgttt

SEQ ID NO: 8576 - DNA, 274 bp, Zea mays
gtctgagaagcacattgacttttcactgtcaaacccattcggtggaggccccgcagaagggtgaagagaaagaatcagaagaaggcaagcagtggcggcgatgctggcgatgaggatgaggagtgaggatggacaagtagcgttacccaatataataatattatctagttttcttgaacttgttcgaatgatgagtgcttagctgtgtgatctgacgcagagttccctgtgctgactctgtgtcatggatggtccattttatcttgtggtatta

SEQ ID NO: 8577 - DNA, 274 bp, Zea mays
gtgctgccgatcgacacgagccggtcgccgtacctgcggtcgccgggcccggcggggacgctccacaacctcgagtgctacctgcacggcgtggccggcgagcaggaccacgccgccggatggttcaggctggaggtggaccgcgacgtggcgcaggtgaacaagggcgccgacgcgctcagggacgagtacccggtgcccgcgaactggtgggtgccagagaacaggtggatggtcaggggctccgacgaccactgggtgctcaaggacttcg

SEQ ID NO: 8578 - DNA, 117 bp, Zea mays
gaaagtcatgggtcgtttaaacagccgatgtgcctgcatcgtctggtgccctctctccatatggaggttgtcaaagtatctgctgttcgtgtcatgagtcgtgttactgttggttta

SEQ ID NO: 8579 - DNA, 284 bp, Zea mays
cacacgcgtccgcaaaagcccaaaccaaatccaagcgcaagaaggggcaaagccgcaaagggggatgcaccaggcaccggcagccattacttactggtcctcactcccacaccaaccagccaacctcctctgcctgccgcttctcctgctgcgggcggtcacggctgcaagtactagaggaggacatccgcttccattactagggcatgcgagggtcggaggaaccagtagcggaggcttcgattttcggcgggcgcaataaatttcccggatggctcggaggg

SEQ ID NO: 8580 - DNA, 277 bp, Zea mays
cccacgcgtccgcccacgcgtccgcccacgcgtccgaaccactccaggtctccagcgaacaggctcaggcgcaacgcaacaacacaaggcggcggttatggcctctgctgctgcgacggctacgatggggactgggaaggtggtttgcgtcaccggcgcatcagggtacatcgcgtcctggattgtcaggctcctactcgaccgcggctacaccgtccgcgccaccgtgcgagacaccgctgacccaaagaaaacattgcacctgactgcgttggat

SEQ ID NO: 8581 - DNA, 124 bp, Zea mays
cacactcactatacactgctctgctgcagcaagaaggaagaagctagcgcctccctagctctcgttgtcagcaatggccaccaccgccgcgtccagcctcctcaagtcctccttcgcgggctcc

SEQ ID NO: 8582 - DNA, 268 bp, Zea mays
ggaaggtttcgaggactcccgggctcgaggagatcgggacgatggttggaggacgcgctctgctgctgctcctggtctcggcgctgctcattcagatccgcgcctctgacccgctgctgtacgagccgcttgatgaggacttcgagggtagatggatcgtctccaagaaggatgaataccaaggtgtatggaagcatgccaagagtgatgggcatgaggactatggcctccttgttagtgacaaggcaaggaaatacgccataatcaa

SEQ ID NO: 8583 - DNA, 272 bp, Zea mays
cgccaagctcagggccgtcgccgacaaggtcggggccctgctgctctgcgacatggcgcacatcagcaggctcgtcgccgcgcaggaagctgcaaatccttttgaataatgtgatgtggttaccacaaccacgcacaagtccctcagagggccaagggctggcatgatcttctacaggaaaggccctaagccccccaagaagggccagcctgagggtgctgtttatgattacgaagacaagatcaactttgcagtgttcccatctctccaag

SEQ ID NO: 8584 - DNA, 321 bp, Zea mays
gtaggctggcgctgcagatcaaaaggctctcgcctcggcttggcagtcggcactccctctccaccgcgctgcaggggcgacgcaaggccgagcggtcctcgatccaggtccaaggtaggagatggctctcacgaggaatggcctcgccggcctcgcggtcatgggacagaaccttgccctcaacatcgcggagaaagggttccccatctcggtctacaacaggacaacctccaaggttgatgagaccgtgcagcgtgccaaggtcgaaagaaacctcccagtgtttggtttccacgaccccgcgtccttcgtgagctccat

SEQ ID NO: 8585 - DNA, 316 bp, Zea mays
gggtatggctgatgctattgtggatctcgtgagtagcggaacgaccttgcgtgagaataacctaaaggaagttggtggtggagtagttctggaaagccaggtaaactttctcgaacacacatgcatgtgtcgggcacacactcttcagtaggcaatattttacagttggtggttcctttgacaaagagaaaagtttacccctttcctgtttcctaagatatgaaattctatgcaggccactcttgtagcaagtaggaaatctctgcacaagcgtaaaggtgtgctggaggttactcatgagttgcttgaaagatta

SEQ ID NO: 8586 - DNA, 313 bp, Zea mays
caggcctgccgaaccggctggtggagagctccgacgactgggagacggcgagtgtcaccgggcagtacgtcgggccggtccaccggatcgggtcgtcggctacggtgaaggacggggacgtgtacgtcaaccatattgtcgggttcgggctcggcaggaagaagacgcacgtccttgcaagggcggtgttctcgccgttggcagtgacgagttgacgggccggcgcctccgcgcgcgctccgtcgtgggatcaacagttgctttttgctaagcggcagttcgtagttatggactagaactagtagttagttgc

SEQ ID NO: 8587 - DNA, 121 bp, Zea mays
caacaagatactggcgcagaggagcaatgcccggcatggatgccttcgctgctgtgtcactactcgccacactctttctggttcgttcggcacgtgcccatcctccggcggcggctgcgga

SEQ ID NO: 8588 - DNA, 311 bp, Zea mays
ccacgcgtccgcccacgcgtccgagagggcaagctcatttctttgggtacgaaggaagatgcggccttcctactagttttggttctaactattgctatgcattaggctatggcgcaggtgcccttctccaaagtgggaagacaggacttatttcctcggttggcaaccttgcggctccagttgaagaatggactgttggtggaacagcattaacatcactgatggatgttgagaggaggcacggcaagttcaagccagtgatcaagaaggctatggtcgaacttggtgctgcacctttcaagaaatatgca

SEQ ID NO: 8589 - DNA, 309 bp, Zea mays
ccagaagttcaacgccatcttcagcttcggcgactccatgtccgacaccggcaacctgtgcgtgaacggtccccccgccggcctgactctcacccagccgccctacggcgagacgttctttggccgcgccacctgccgctgctccgacggccgcctcgtcgtcgacttcctggccgagaagttcgggctgccgctgctgaagcagtcgaagcagggcggctcagacttcaagcagggcgccaacatggcgatcattggcgcgaccaccatggagtcgggcttcttccagtctctgggcatcgccgagaa

SEQ ID NO: 8590 - DNA, 306 bp, Zea mays
cagacgcgtggacaatctttgcttagaagtggttcttttgttcagtgtcagtaatgtccaagaggtagttgaagcacgaaaaggaagcatggcattagcattagccatgatccttccttttattgtactgttagctggagttgctgtctggtgttatctttctccttcaagtatgatgaggaaccagccacgtttgctcgtgattggaactggctttaattttggatatttggtgggaagaatgatacttgctcatttgtgtgatgaacccaaaggtctaaaatctgggatgttcatgtctctggt

SEQ ID NO: 8591 - DNA, 298 bp, Zea mays
cacacgcgtccggcagagaatgcccaagcaaacaaacagggtagatttagatgtgatgtgaagagaagagaggttgggtctgggacactatggctccgatgaagctgtacggggcggtgatgtcgtggaacgtgacgaggtgcgcaacggcgctggaggaggctggctccgactacgaggtggtgcccatcaacttcgccaccgccgagcacaagagccccgagcacctcgtccgcaacccgtttggtcaggttccagctctgcaggatggtgacttgtacgtgttcgaatcacgagc

SEQ ID NO: 8592 - DNA, 307 bp, Zea mays
cagacggaggtgaggacgacgatgcgctcgccggacggcaagaagctggacatgctagcggaggaggacctcggcagcatgccctacctcaaggcgaccatcaaggagacgctgcgcctgcacccgccggcgccgttcctcctcccgcactactccaccgccgactccgagatcgacggctacttcgtcccagccgggacgcgcgtcctcgtcaacgcctgggcgctcgggagggaccgcacgacgtgggagaagccggaggagttcatgccagagcggttcgtgcaggaaccgggcgccgtggacg

SEQ ID NO: 8593 - DNA, 306 bp, Zea mays
cagaagatccatgtcagactcgtcaggtagctggagaagaaattcagcggcaaggatgtggtaattgttgctacacggaggattgtgaggccacccaagaagggttcagctgttctgcgccctcgcaccaggactctgactgctgttcacgatggcatcttggaggatgttgtctacccagctgagattgtagggaagcgtgtcagataccgtctggatggttccaagattatcaagattttcttggacccaaaggagaggaacaacactgaatacaagctggagacctgcactgcggtctaccgc

SEQ ID NO: 8594 - DNA, 305 bp, Zea mays
catcgaggaaaaccatgtcgctactggatttggaaatcatatggcaatcccgatactccgtgctgaatggcgcgatgatatgacttttgaagaagctgttaagctggttgagaagtgcttggaggtcttgctgtaccgagacagatcatctatcaacaaattccagattgccaagatcacaagtgaaggatcaaccatctacccaccatattccttgaagacctactggggcttcactcacttcgaaaacccagcccagggcgctgtgggatcatggtagatttatgctctgcatgccgcgtatc

SEQ ID NO: 8595 - DNA, 306 bp, Zea mays
aaaaaggagagagatataaaacggaagagcaatttggcaagtggtgactatggcgagtcagtaaaaccttcccaaactaatggttctactctgaaacatcaatcagatatgccaccaccaccggctccaccccctcggaacaataatttcaatgggaaggagaaacaaccagtccctgtttctagagaagatgatgatgacatttttgttggagatggagttgactatttagttcctaacaaggaaatgagtcagagccctgtctctgatatggatgaatccccacataaccatcagaagcagtcc

SEQ ID NO: 8596 - DNA, 302 bp, Zea mays
acacagccctcggacaagcccctgcagcttcctctgcaggacgtgtacaagaacggcggcatcggcaccgtcccggtcggccgcgtggaaactgggctcctggagcccggcgtggtggtcacctttgcacccacgggcctgacgacggaggtcaggtcggtggaggtgcaccacgaggcgatgcaggaagcgctgcccggcgacaacgtcggcttcaacgtcaagaacgtggcggtcgaggacctgaagcgcggctacgtggcctccagctccgaggacgaccccgccgaggaggctgccag

SEQ ID NO: 8597 - DNA, 300 bp, Zea mays
ccaagaaccacagccaccgcgatggcgcagatcatcgatggcaaggccatcgccgccgacgtccgccgcgaagacgccgccgatgtggccgcgctctcgtcagcacacggactcgtgccggggctggccgtggtcatcgtggggagcaggaaggactcgcagacgtacgtgaacatgaagcgcaaggcgtgcgccgaggtcggcatctgctccatcgacgtcgacctcccggaggacatctccgagaccgcgctcgtcgccgaggttcgtcgcctcaacgctgaccccgcagtgcacggg

SEQ ID NO: 8598 - DNA, 300 bp, Zea mays
ctcgagttctcctcaaccaaattcaaggtcacagctgcgaacctctcggctatcatgtctggccgcggcaagggcgggaagggtctgggcaaggacggcgccaagcgccaccgcaaggtggtgcgcgacaacatccagggcatcaccaagccggcgattcgcaggttggcgaggaggggcggcgtcaagcgcatctccgggctcatctacgaggagacccgcggcgtgctcaagatgttcctcgagaacgtcatccgcgacgccgtcacctacaccgagcacgcccgccgcaagactgtc

SEQ ID NO: 8599 - DNA, 277 bp, Zea mays
cccgtttccacaacgtcaccgcaccgccgtcatgccgaccgtaagcgtgaaatggcagaaggagctctttccaggcatagagattgacactagccagcctccgattgttttcaagactcagttgtacacactaactggtgtgccacctgaacgccaaaaaattatggtgaagggaggaatattgaaggacgatgcagattggtctactttgggagtgaaagatggccaaaagttgatgatgataggcacggctgatgagattgtgaaagctccggag

SEQ ID NO: 8600 - DNA, 130 bp, Zea mays
gttcagcgtactgttatctggatgggaaagaaacaagagtcagttgaggatgttccttgtggtaacactgttgctatggttggtctggatcagttcatcacgaagaacgctacactcactaatgagaagg

SEQ ID NO: 8601 - DNA, 324 bp, Zea mays
ccaactcgtcgacggtagagagagcaagctcttcggcgatttgagaagaatcgaggagcgagcgagcgagcgagcgagacatgaggaggaggagctggggcttgagcctgcgcccgggggccccgggtcacggaatcctaccattaccaaccctagccttcgttgatcgccgtctcaggtcatggcagggccggcgccggatcgggccgccctgactgtggggccgggcatggacatgccaatcatgcacgacagcgaccggtacgagctcgtgcgcgatatcggctccggcaacttcggcgttgcacgcctcatgcgcgaccg

SEQ ID NO: 8602 - DNA, 320 bp, Zea mays
agtgaccattataagaaaaatcattgattattacttggttcatctttatgactttatccaacttattataggttttcacgtatttttgttatgagtgcaaggtgcagtttctgtatctaactacccctttcttaacatcatgtggctattctattactttgttttgtgtatataattaccaaacacatgtttgctactagatttatcggcatgaataattgatgagacaaactcaatgttaaacgtctttctttgagttttcttcattgatagagtcaaaggcataaagataggtgtgtgtttcatttcttcattgatta

SEQ ID NO: 8603 - DNA, 326 bp, Zea mays
atagcacaagcgcactctagcaatggcttctgaggttgtccgccctagcgacgccgagctactaaaggcacaagccgacatatggcggctcagcctctcctacctcacgcccctgtcactgaggtgcgccgtggagcttggcatccctacggcgatctaccgccatggcggggctgcctcagccgctgagctggtcacggcgctgtctctcccctccactaagctgccgttcctccgccgcctgctgcggctcctcgccgcgtcgggcgtgttcaccgtcgacaagcagagctcggaggaggagcggtaccgcatcagccccgtgt

SEQ ID NO: 8604 - DNA, 328 bp, Zea mays
cgttgttggagaatggggatggggtcgtccctccttcgggccgtcttcctcctgctggcctgttgttgctccttcgccagcagggcgtgaacaactacaacaccagctgtgccgcggcagcagctgcagtggggcaacgccagggccacatggtacggccagcccaacggtgccgggccctacgacaacggcggcgcttgcgggttcaagaacgtcaaccagtacccgttcatggccatgacctcctgcggcaaccagcctctctaccgcgacggcaagggatgcggctcctgctacaagatcaggtgctccaagcacgccgcctgct

SEQ ID NO: 8605 - DNA, 318 bp, Zea mays
gtgccacatgaccaagagtactacctttcgattgtatctgaaaggcttggcaacaccattagtttctcagaatgtggaggtattgagatcgaggagaactgggacaaggttaagactatctttcttcccacagagaagcaaatgacacctgacgcatgtgctccattgattgccaccctgccattggaggtccgcacaaagataggtggtttcattagagctgtattttctgttttccaagacttggatttctcatttcttgagatgaacccattcaccttggtaaatggtgaaccgtatcctctggatatgagagga

SEQ ID NO: 8606 - DNA, 318 bp, Zea mays
acaccacctcgccgcgatctccgtagcctccgtcgcgtcgagcatcgatcatgtcggcctactgcggaaagtacaaggatgagctcatcaagaatgctgcctacattggcacccctggcaagggtatccttgctgctgatgagtccactggcaccattggcaagcgcctttccagcatcaatgtcgagaacgttgaggagaaccgccgtgccctccgtgagctcctattctgctgccctggtgctctccagtacatcagcggtgtgatcctcttcgaggagaccctgtaccagaagaccaaggatggcaagccttttg

SEQ ID NO: 8607 - DNA, 318 bp, Zea mays
gcgccccgaggcctacctcgaggagctcggagcggactcgcagcatgggaaggggaagagggtcgaggccgcggagagcttcgaggagctcggtctcggggaggaggtgatgtccgcgctgggggagatgggcatctccaagcccacggagatccagtgcgttggcgtgccggcggtgctggccggaaccatcgtcgtgctcggctcccacaccgtatccgggaagacgctcgcctacttactccctcttgttcagctacttcggcgtgatgaggcaatgcttgggatgtcaatgaagccaaggcgtccaagagcagt

SEQ ID NO: 8608 - DNA, 318 bp, Zea mays
ggccgcggactcacgctcattatcgttggggtcgtcgaggcttgccactcgctcggggtaatgcacagggatctcaagccagagaacttcctgctctcgaacaaggatgacgatatgtcgctcaaggccatcgacttcggcctctccgtgttcttcaagcctggtcaaatttttaccgatgttgtgggaagcccttactatgtagctccagaagtgctgcgcaaacgatatggaccagaagctgatgtgtggacagctggagttattctttacatacttctatgtggtgtaccgccattttgggcagagacacagcaa

SEQ ID NO: 8609 - DNA, 319 bp, Zea mays
cccacgcgtccgatacctcgatgttagagttgatgagttctttaagatgcttgaaagcaaaatctatgaactctccgacaaggatttcaagagaaatgtgaaatcattaattgattctagactggagaagtttaaaaacttatgggaggaatctcatttctactggggagagattgaggcaggaactctgaagtttgatagggtcgagtctgaggtcgctatgctaagagagctcaagaaagaagaattcatcgagtacttcaaccagtatataaaagtggacgcgcctcaaaggaggacactaagcgtgcaagtcttc

SEQ ID NO: 8610 - DNA, 321 bp, Zea mays
tgcaaaaccccccaccccacctgcagaaggagctgcatcgggcaccctgatcacgagaaggtttcaggcagaggctggccctgcaggaacgccctgaagagaacgagcgagcgcccgggctgcgagacgggcgcctcgtgggaggcgcccctgatggtggcgaaggacagcgcgccgcctccgtacacctgcgtccatcctccgacctgctgcccttcgaaccacacccggtacggggtggtggtcttgaggcccatgtcgcgcgccaggttctgcaccagcgtccggctgcccgtcagagggatcaccgagtcctggtcg

SEQ ID NO: 8611 - DNA, 326 bp, Zea mays
gctcttcgcccagatcaaaatcgaatcgatcccccaacccgatcgcctcgtcgtcaaaaaatccccattcgttccccttctcgcctccacgagccttcacaaattgccctctcagatcttctcctaatcttactcaagccctagccaaatcccagacccatcccagccctagcgacaccaaccagctcgccagcgaccatggggaacccggagaagctgatgaatcagatcttcgacctcaagttcacctccaagtcgctgcagcggcaggcgcgcaagtgcgagaaggaggagaaggagcagaagctcaaggtcaagaaggcgat

SEQ ID NO: 8612 - DNA, 314 bp, Zea mays
tgtaccatcacagctggctcccattgatgtctttgtcagtacagtggatccattgaaggaacctccactgatcacagccagtactgttttgtccattcttgctgtggattaccctgttgacaaagtgtcatgctatgtttctgatgatggctcagctatgctgacttttgagtctctctctgaaactgccgaatttgctagaaagtgggttcccttttgtaagaagcacaatattgaaccaagagctccagaattttactttgctcaaaaaatagattacctgaaggacaaaattcaaccttcatttgttaagg

SEQ ID NO: 8613 - DNA, 315 bp, Zea mays
caccacctcaacgacccaaacttcgagatgatccgccacgatgtcgtcgagcccatcctgctcgaggtcgaccagatctaccacctcgcctgcccggcgtcccccgtccactacaaatacaaccccatcaagacaatcaagaccaatgtggttgggactctgaacatgctcggattagcaaagaggatcaacgccaggttcctcctcaccagtaccagtgaggtctatggtgatcctctccagcacccgcatgtggagacttactggggcaatgtcaatcccatcggtgtcaggagctgttacgatgagggcaag

SEQ ID NO: 8614 - DNA, 314 bp, Zea mays
gatatcacattgctggcacaaaaggtgtcttttactcaagggaaccatatgtcaatgattctgctgctcatgttacccgctttattggacttgctaatgttggaaacaaagagaagcagaaatttattcatgcgatttctcctactccagcatctgtcatgtccagtgctgatatcaatgccaagcctccaaacgccactttgtcaccatatgttggttcagcaaaatcagttcctatcgaagaagctccaaaacgtgcagcggagaacatagattcacaatattggcgtcatgatgtcaagcggcaaaggcat

SEQ ID NO: 8615 - DNA, 313 bp, Zea mays
aacaaacacactcgaaggcagcgaagcccgagccttcccttgcctccaatcgatcacccgcttcgatccgctagctagctagcagcgcgatggcttccctcaccgtgtccacgaagaccgcggcggccggcggcaacaagcagcgcgagggcgcggaggtcatcacgggcgcggaggcctgcttcgcgcactccaagcagatgctccaggcgctgggcttcccgggcggcgtgatgccgctgcgggggctggaggagtgcggctgggtgcgcgagaccgggttcgtgtggatgcggcagaaggccccctacga

SEQ ID NO: 8616 - DNA, 281 bp, Zea mays
cccacgcgtccgcagccctctctctccctctccacccggccgccaccatgtcaggcctctacagccagggcttctcccctgcaagaaccctctccccacagattaggagcaaccccgacgctgacagccagtacttggccgagcttctcgcggagcatcagaagctggggcccttcatgcaggtgctgccgatatgcagccggctgctcaatcaagaaatcatgcgggtatcaagcatggttcatgaccatggatttagtgatcttgacaggcgccggttt

SEQ ID NO: 8617 - DNA, 272 bp, Zea mays
ctcactaatttttaatttcatgcaggtactaccttcgctaagggagaaacatgatgagtttatgctgagggagctagtgcaaaggtggtcaaaccataaagtcatggttcgttggctctcgcgtttctttcattaccttgaccggtacttcatatcaaggaggtcacttaccccacttaaagaagttggtcttacttgcttccgagagttgatatatcaagagattaaagggcaagttaaagatgcggtgatagctctgatagacaaagaac

SEQ ID NO: 8618 - DNA, 271 bp, Zea mays
cggacgcgtgggcgcagcgctctgagaatgatcgaagacgcagaggagagggggctgatctcgcccggcaccacgacgctcgtggagccgacgagcgccaacctggggctgggcctggtcctcgtcgccctccgcataggctacaggttcgtcgatgtcatgccaggccagtactcgctcgacaagcagatcctgctgacatacatgggcgcagagctgtacgtaacaggtatcacactctgtgctgccacagtggcaaggcaagtaatga

SEQ ID NO: 8619 - DNA, 271 bp, Zea mays
aacacaactcgtaggcagcgagcgtctctcctcttcctctcccacgcaccgcgccaaggaaggcagagagagatcgccgctcctcttctctccgtcggtggtgcggttgaccgccctcctcgagcgagatctcgctgcagtccctcgagatctggtcacagatctatccgacaagatggtgaagatctgctgcatcggtgctggctatgtcggtggcccaaccatggcggtcattgccctcaagtgcccagacattgaggttgtcgttgtt

SEQ ID NO: 8620 - DNA, 275 bp, Zea mays
cacgcactgcagcaccacttcctgcgctgctgctcatcacacaccgtagtactaacactccagcgccacaatggctcccaaggttgcgctcttccttgccctcagcctcctcttcgctgccgccgcgcatggctgcgaaccctacgttcccggcccagtcgtcccaacgccgcccgtcgtgccgtcgcacagccacgggcgctgcccgatcgacgcactaaagctcaaggtgtgcgccaacgtgctggacctcgtcaaggtcggtctaccccagc

SEQ ID NO: 8621 - DNA, 272 bp, Zea mays
cccacgcgtccgagccgcactgtgagatatggacgcggcctgttgtcccggcttttagacgcaacttccatcgctgcgaactatccattcgtgttcgtcatggccgccagcgtcaccgtggaaaacctcaaccccaaggtcttaaaatgtgagtatgcagtccgtggggagattgtcatccatgctcagcgcctgcagcaacaactacaaacacaaccagggtctcttccttttgatgagatcctctattgcaatattgggaatccccaatc

SEQ ID NO: 8622 - DNA, 269 bp, Zea mays
gtcgctgccgacgtctcccacatcaactcccccgccctggtgaaggggttcatgggggacgaccagctcggggaggcgctcgagggctccgacgtcgtcatcatccccgccggggtgcccaggaagcccggcatgactagggacgacctcttcaacatcaacgccggcatcgttaaggggctctgcactgccatcgccaagcactgccccaacgctcttgtcaatatgatcagcaaccctgttaactccactgtcccgattgcggcgga

SEQ ID NO: 8623 - DNA, 267 bp, Zea mays
caactcgttccgtgacctggagccaatggaagcggattacctggagtcgacgtggcgcgcgaagaccgtcggcccgacactgccgtcgttctacctcgacgacggccgcttgccatgcgacaagacatacggcgtggacctcttctcgagcaccgactccgaggcggcgccgtgcatgacgtggcttgacaagcaggagccctgctccgtcgtcctcgcgtcgtacgggaccgtcgccaacctcaacaaggagcagctggacgagct

SEQ ID NO: 8624 - DNA, 265 bp, Zea mays
cccacgcgtccgggcgccggccatggcgggagggtgatgctggcgaggaagtaccagcaggctctggaagcgtctgtcgccaggaacttccccgacaatggcatcatatcgtgcatgagccacagcacggacaacttgtacagctcgaaacggagcgcggtgattagagcctctgacgatttctggccgagagaccccgcttcccataccatacacgtcgcgtccgtcgcttataacaccgtctttcttggggagttcatgcagc

SEQ ID NO: 8625 - DNA, 266 bp, Zea mays
caccgatccatttcagccgccgccgcgcgtacaagcaggagcagcaaggatgccggctggccacgggctgcgctcgcggacgcgcgacctgttcgcgcgccccttccgcaagaagggctacatcccgctcaccacctacctccgcacctacaagatcggcgactacgtcgacgtcaaggtgaacggcgccgtccacaaggggatgccgcacaagttctaccacggccgcaccggtcgcgtctggaacgtcaccaagcgcgccatcg

SEQ ID NO: 8626 - DNA, 272 bp, Zea mays
gctttagctagctagcaagatagagagagagagagaaaaaatatggctccactcgtcgctactgccacgatgaaccacgctgtggcccatctgctaggacccaatcatgagagtttctcacggcaccatctttcttcctcgctgcagcaaaacagtaagcgaaggtgtaatcttagcttcaggccacgagctgctgagagtcagaatggaagccaaacgctgagcccctcggaagtccctaaaagagactggttcccctctgacttcatctt

SEQ ID NO: 8627 - DNA, 272 bp, Zea mays
ggaccgtgggcggacgcgtgggtggctactaccactgtctcttgctcacacagctcgtctgtgcagcacatagctagtgaacgagaacgaccatggcgtcccaggcccctcgagagccaccgtgccggcgctgaggtcgtcaccggaggagacgccatctgcaggaagaagtcaatcgaactgctggaggagctcggcctccccaaagggttccctgccctcgtggacatccaggagttcgggtacaaccgcgagacagggttcatgtggct

SEQ ID NO: 8628 - DNA, 242 bp, Zea mays
gcaaatgccatccttgcggtttcacttgctgtgtgcaaagctggagctatggtgaagaagattcctctttaccagcacatcgcaaatcttgctgggaacaaaactctggtgctccctgtacctgcctttaatgtgattaatggagggtcacatgctggaaacaagcttgccatgcaggagttcatgatcctcccaactggtgcctcctcgttcaaggaggccatgaagatgggagttgaggt

SEQ ID NO: 8629 - DNA, 263 bp, Zea mays
cggacgcgtgggcggcaggcggcggccctcgggcattgtcccagcgggagcaggacatccagatgatgctcgccgccgatgtccacctcggcaccaagaactgcgacttccaggtggagcgctacgtgtacaagcgccgcactgatggtatctacattattaaccttggaaagacctgggacaagcttcagttggccgccagggtcatcgttgccattgagaatccgcaggacattatcgtgcagtctgctaggccctatggc

SEQ ID NO: 8630 - DNA, 263 bp, Zea mays
cgttgtaatagtaggaatccgtcactttctagatcctgagccctataaacaactttatcttcctccacacgtaatcgtaatgatactcagattcttcccacagccagattttcagaaaagctggtcagaaaaaagccgaaacaaacagggccaactgtcttgtcttgctgccctaccaaaccttctgcaaaattttttttcaagatgtttgtcaggtgtatgtgtggatgtgttttttctgattcaactcttgtgattgattc

SEQ ID NO: 8631 - DNA, 264 bp, Zea mays
cccacgcgtccgtcctgataaagtttctgaatttcttgagaagcatgatttggaccttatctgccgagcacatcaggttgtcgaagatggatacgagtttttcgctagccgtcaactcgtaacaatattttcagcccctaactactgtggagaattcgacaacgctggtgccatgatgagtgtagatgatacattgatgtgctcgttccaaatattgaagcctgcaaggaagatgatgggtggttcaactaataacaaatctgg

SEQ ID NO: 8632 - DNA, 225 bp, Zea mays
gcgcggtgacggaggaccccaagaacctgacgcggagctggtgcaggccggacgtgtgcggctagttgggcgtgtactgctcggcggcgccggacgagccgcgggagcagacggtggccggggtggacctgaaccacggcgacgtggcggggacgctgccggaggagctgggcctggtggcggacctagcgctggtgcaggtcgagtcgaagcggttcgcgggga

SEQ ID NO: 8633 - DNA, 265 bp, Zea mays
cgatgtcacgatgaaggtgctctactgcggggtgtgccacaccgacctgcacgtcatcaagaacgactggcgaaacgccatgtacccagtcgtcccggggcacgagatggtgggcgtggtgaccggcgtcggcggcggcgtcacgcggttcaaggccggcgacacggtcggcgtgggctagttcgtggggtcctgccgctcctgcgacaggtgcggcaagggggacgacaactagtgctcggggatcgtgctcacctccaacggc

SEQ ID NO: 8634 - DNA, 271 bp, Zea mays
cggacgcgtgggcaagtagtgaccaggagcgagcagccgaggaaaggagtcaagcaatggagaaggccgtcgacaggcagcgggtcctgctgcgacacctgcaccccgccgcggcgtcgagccccgccccgcccgccatctccgcaagcacgtgcgcggctgggggacagcgcggcgtaccaccggatgccggccttcgccgacgacgtcgtcatcgtcgctgcttacaggacggcaatttgcaaggccaagagagggggtttcaaggata

SEQ ID NO: 8635 - DNA, 319 bp, Zea mays
cccttgccaagctctctctttgctgcgggaggtcgaggccggagaggtcttctgggatgggatcaagaaaggggtggttccccgtggccctcctgctgttggccgactctgccctctggccgccggtcgccgccgccgccgccggaggccgaggccgaacacgccgttcagcagcatagcgagcgcatctcagggagtgctggtgatgtgttagaagataatcctgtgggtaggttgaaggtcttcatttatgacttaccaaggaagtacaacaagaagatggtcaccaaggattcacggtgcctcaatcacatgtttg

SEQ ID NO: 8636 - DNA, 316 bp, Zea mays
cggacgcgtggggaagatgataaccctcaaaagctccgatggcgaggagttcgaagtggaagaggcggtggcgatggagtcgcagaccatccgccacatgattgaggatgactgcgccgacaacggcatccctcttcctaacgtcaactccaagatcctatccaaggtaatcgagtactgcaacaagcacgtacatgccgccgcagccgcagccgccgcctcgaaggccggttccgacgacgtgggtgccgcctccgccaacagcaccgccgcctccggtgaggacctcaagaactgggatgcggacttcgtcaag

SEQ ID NO: 8637 - DNA, 299 bp, Zea mays
gattccttgccccctttccgcttcaccatcgtcgaaaccctagccccgcctcgccgccggcacgccggatcggtcggtgccatgtccaaggccagggtctacgccgacgtcaacgtgctgcgccccaaggagtactgggattacgaggcgctcaccgttcaatggggtgagcaggatgactatgaagttgtcaggaaggtcgggagaggaaaatacagtgaagtatttgagggtattaatgttaacaataatgaggaatgcatcattaagatcctcaagcctgtgaagaaaaagaaggt

SEQ ID NO: 8638 - DNA, 306 bp, Zea mays
ggagtcggagggaaccgaaaactcagggtctcgaatttcctaggagcggaggcgatggctggcaagggaggaaaaggattgctcaccgcgaagacgacggcggccaagtcggcggagaaggacaaggggaagaaggcccccatctcacggtcctcccgcgcgggcctccagtttcctgttggacgaatccaccgtcagcagaagcaaaggactcaggcaaatggccgcgttggtgccactgcagccgtctactctgccgccatcctggagtacttgactgccgaggttctggagctggctgggaac

SEQ ID NO: 8639 - DNA, 108 bp, Zea mays
ggaatcgggttaagatttcccgatccgtgacgtggcggcatacggcgacgttaggaagtccggagacaccggcagaggcctcgggaagagttatcatttctgcttaac

SEQ ID NO: 8640 - DNA, 311 bp, Zea mays
ggagaagtacgagttcaagccgaagcagcttttgaaacagattgccaccatctatgtccatatctcaaggggcgacaaggaatctgtcttctcagctgcaatctcgaaagatggcagagcatacaatgatcagttgttttctagtgcagctaatattctgtggaagattgggggtgatcccaaaatcatacaggagtttgtgcaacttgctggtagggcaaaagctgctgcttctgaagctatggatgctgaggcaatccttggggacataccagatgaattcctcgatccaattcagtatactctaatga

SEQ ID NO: 8641 - DNA, 307 bp, Zea mays
catatcctcactcgccgcctccgccgctcgtcggtcgccccatcgcgatggcccggatcaaggtgcacgagctgcgggggaagagcaaggcggatctgcaagcgcagttaaggagtttaagtcggagctctccctgctacgcgtaccaaggtcaccggcggggctcccaacaagctctccaagatcaaggttgtgcgcacctccatcgcgcgcgtgctgaccgtcatctcgcagaagcagaagtcggcgctgcgtgaggcgtacaagaagaagaagctgctcccgctcgacctccgccccaagaaga

SEQ ID NO: 8642 - DNA, 298 bp, Zea mays
ctcactcccgttccatttgcccatctcccagatgcaattcgcgagttctcgctggtctgccgccatggcgctgtctgtggagaagacgtcgtctggacgggagtacaaggtcaaggatctctcgcaggcggagttcggccgcctcgagattgagctggccgaggtcgaaatgcccggcctcatggcgtgccgcgccgagttcggcccgtccaagcccttcgccggcgctaggatgtcggggtgtctccacatgaccatccagaccgccgtcctcatcgagaccctcaccgcgctcggc

SEQ ID NO: 8643 - DNA, 279 bp, Zea mays
gaaaaaaattgtgaagaaatttgacttgtttgagatttaaacccaatcaatcccactcaatccacatggattgagagctaaccgaacaagcccttacattgacatctctacgagtgaccctctagccaacaacaatttaggtaattcccatgttgccagctaagagtgaccaatccaaacaagatgcaccaagattacattagggcaaaataattcacggaagctgaataaccaatttattggatcaaacagaaagtagatgttatcacaggatggcta

SEQ ID NO: 8644 - DNA, 302 bp, Zea mays
cccaaccagaagagcggcggcgcgggcggacaaggagcaggcggaggaggagttgtgccaagccacaatgggtatctcgcgtgactcgatgcacaagcgccgagccaccggtggaaagcagaaggcctggaggaagaagcgaaagtatgagcttggtcgccagccagccaacaccaagttgtcaagcaataagacagtgaggagggtccgtgttcgtggaggtaatgtgaaatggagggctcttcgccttgatactggtaactactcatggggaagtgaagctgttacccgcaagacccgta

SEQ ID NO: 8645 - DNA, 300 bp, Zea mays
cccacgcgtccgcccaacaccacctcgccgcgatctccgtagcctccgtcgcgtcgagcatcgatcatgtcggcctactgcggaaagtacaaggatgagctcatcaagaatgctgcctacattggcacccctggcaagggtatccttgctgctgatgagtccactggcaccattggcaagcgcctttccagcatcaatgtcgagaacgttgaggagaaccgccgtgccctccgtgagctcctattctgctgccctggtgctctccagtacatcagcggtgtgatcctcttcgaggagacc

SEQ ID NO: 8646 - DNA, 299 bp, Zea mays
tgataacatcaagatgtttgttctagatgaagctgatgaaatgctttctcgtggtttcaaggatcagatttacgacatcttccagcttctcccagccaagattcaggttggagtcttctctgctaccatgccccctgaggcccttgagattacccgcaagttcatgaacaagccagtgagaatcctcgtgaagagagatgagctgactcttgagggtatcaagcagttctatgtgaatgtggataaggaagactggaagctggacacactgtgtgacctgtacgagacccttgccatca

SEQ ID NO: 8647 - DNA, 305 bp, Zea mays
gtcgattggaacccagatccgcaggccgcagcacaagatggtgggatcggaccggatcggatcggagcagagggggacaaccgaccagaatccgccggcgaccaccatgggctccgcgagccgtgccgtctcgtgcctgtgctgcccctgcaagtgcctggcgtgcgggctcctgagctgcctgtgcagcatcctcctctcgctcgccgtcgtcctgggcgtcgtcgccctcatcctctacttcatcttcaagccgcacatgatcgcagccaccgtggactcggcctcgctctcccagttcgcgc

SEQ ID NO: 8648 - DNA, 305 bp, Zea mays
cccacgcgtccgcccacgcgtccgcccacgcgtccgtagcaatcagctcatctgtcagcgccacaggtgaccggaaaaccacggccggcgttcctgcttctctacccggtccgaattgctgaccggatcaacccgagaccttgcaggattatcgatctgattgctgcatgatccgcttcatcctgctgcagaaccggcaggggaagactcgactggccaagtattacgtcccgctcgaggactcggaaaagcacaaggttgaatacgaggtacaccggctcgtggtcaatcgggaccctaagttc

SEQ ID NO: 8649 - DNA, 300 bp, Zea mays
atcaaatcaaaccccggcgaagttgttaaacctgaccaattcaaggcaataaacgacgaggggatgccgatttaccagaggcccttcatgaaggggaagctctacattcatttcacggtggagttccccgactcgctggcaccagagcagtgcaaggctctcgagtcggtacttccgccaaagccttcgtccaagctgacagacatggagatcgatgaatgcgaggagacaaccatgcatgatgtgaacaacatcgaggaagagatgcgcaggaagcaggctcatgctgctcaggaggcg

SEQ ID NO: 8650 - DNA, 280 bp, Zea mays
cccacgcgtccgtggagccgcctacttcgccatggcgtacctgaacgtcaccaacgtgccggtgatggtgacggagaccgggtggccgcacaagggcgactcctcctccgagcccgacgccacctccgacaacgccgacacgtacaacagcaacctcatccggcacgtgatgaacagcactggcacgccgaagcaccccggggtggccgtgccgacctacgtctacgagctgtacgacgaggacacccgcccgggctccacgtcggagaagtactggggc

SEQ ID NO: 8651 - DNA, 278 bp, Zea mays
cccacgcgtccggagagagctaagctaagccgagctaagaagcacagcaagtctcaccagactagcggctagcgcgagaatggccaaggacatcgaggccgcggcgcacgagggcaaggactactcggacccgcctccgggccgctggtggacgcggaggagctgaccaagtggtcgctgtaccgcgcggtgatcgccgagttcgtggccacgctgctcttcctctacatcacggtggccacggtgatcgggtacaagcaccagacggacgcggcggc

SEQ ID NO: 8652 - DNA, 279 bp, Zea mays
cccacgcgtccggccgataccctaaccctcgcccttctcgatgtcggccgccaccaccggcccagccccttcagtagccactccgatggcgccccctccgtcctacccggcctcctccacggcctcttcctccatctccgcgtccgccgaggaggaggaggacctctatggccgcctcaaatcgctccaacgccacatggagttcgtcgaaatccaggaggagtacgttaaagacgagcagaagaacctgaagcgcgaactccttcgtgcgcaggagga

SEQ ID NO: 8653 - DNA, 278 bp, Zea mays
cccacgcgtccgtgacacaattgtgaactgcccaacatgctcatgtggctgccagaacccaagtgggtcaaactgtgtgaatgaggattcacctaatctacaagctgcaattgatggtcctggcaaatggactggtcagccccttgtacaatgcacttcccacatgtgcccgataagaatccactggcatgtgaagctcaactacaaggattactggagagtgaaaatcactatcacaaacttcaacttccgcatgaattacacgcagtggaacttag

SEQ ID NO: 8654 - DNA, 279 bp, Zea mays
ctaagctaagccgagctaagaagcacagcaagtctcaccagactagcggctagcgcgagaatggccaaggacatcgaggccgcggcggcgcacgagggcaaggactactcggacccgcccccggcgccgctggtggacgcggaggagctgaccaagtggtcgctgtaccgcgcggtgatcgccgagttcgtggccacgctgctcttcctctacatcacggtggccacggtgatcgggtacaagcaccagacggacgccgcggcgtcgggccccgacgcg

SEQ ID NO: 8655 - DNA, 280 bp, Zea mays
acttgacttccgccccaagctcatcatctgcggtggcagtgcgtacccgagggactgggattacgccaggctcagggccgtcgccgacaaggtcggggccctgctgctctgcgacatggcgcacatcagcgggctcgtcgccgcgcaggaagctgcaaatccttttgaatattgtgatgtggttaccacaaccacgcacaagtccctcagagggccaagggctggcatgatcttctacaggaaaggccctaagccccccaagaagggccagcctgagggt

SEQ ID NO: 8656 - DNA, 281 bp, Zea mays
gccatggacgcctccctcctcctctccgtcggcctcgcgctggtgctgatcccgctctccctctcgctcctcaaccggctgcgcgtcggccgcctgccgcccggcccgcggccgtggcccgtcctgggcaacctgcgccagatcaagcccgtccggtgccggtgcttccaggagtgggcggacggtacgggcccatcatctccgtctggttcgggtccggcctcaccgtcgtcgtctccacctcggagctggccaaggaggtgctcaaggagaacgaccag

SEQ ID NO: 8657 - DNA, 280 bp, Zea mays
cacagcacaggcagctcgagagagagagagagagaaagatgtcgtggttcgggcaccaccaccacaaccagccggctcccccggcgtcgggccccaaccaggtgttcaagatcttctgccgcgccaacgagaactactgcctggccgtccgcgacggcgccgtcgtgctggccccggtcaaccccaaggacgaccaccagcactggtacaaggacatgcgcttcagcacccgggtcaaggacgaggaaggcatgccggcgttcgcgctcgtcaacaaggc

SEQ ID NO: 8658 - DNA, 276 bp, Zea mays
ggctccaggaccgtctcctcgccagctcatctaccgctgctccccttctctgggctcggagaatcggagagaagcgcgcgcggctatggcgtccagcgcctctcggttcatcaagtgcgtcacggtcggcgacggtgccgtgggcaagacatgtatgctcatctgctacaccagcaacaagttccccactgactacatacctacggtgttcgacaatttcagtgcaaatgtagttgtggatggcaccactgtgaatttgggcctttgggataccgc

SEQ ID NO: 8659 - DNA, 276 bp, Zea mays
gtgcaaaagaaggtctttagtttcaccaagatcggcagatcgccaacatccgtctgcctctcctctccggtgccggcgactgacacaccacagggtcatctgcacaccaatagggtctgcgacaatgtctggacattcattctaacagatgcaaccttcaagagcgctgagattcaagaaacaccgagcaagatgggtctcaatgcggtggtagccgcctgctacgtctttccagtacttgtctctgtgctcgcagtccgcttcttctacgtactg

SEQ ID NO: 8660 - DNA, 275 bp, Zea mays
ctggcgaggcaaaagcgcaaacgcgaccacagacagagcgcgcttcaaggccttttttttttgagataacaaggaggagaggaggagatggcggtcacgatcacctgggtgaaggcgaggcagatcttcgacagccgcggcaaccccaccgtcgaggtggacgtgggcctcagcgacggcagctacgcgaagggggccgtacccagcggcgcatccactggaatatatgaggccttggagttgagggatggaggatctgattatcttggcaaggg

SEQ ID NO: 8661 - DNA, 280 bp, Zea mays
taccacgcgtccgcatcccgtcgcatcccatcccactaccacccatctcgtcgtccgccgattcgatccggttcttccaacccaggggctgtgatggcgacgaagaggagcgtgggcaccctcggcgaggcggatctgaaggggaagaaggtgttcgtgcgcgccgacctcaacgtccctctcgacgacgcccagaagatcaccgacgacacccgcatccgcgcctccgtccccaccatcaagttcctcctcgagaagggcgccaaggtcatcctcgcca

SEQ ID NO: 8662 - DNA, 274 bp, Zea mays
caagccttttgtcgatgtcctcaaggagggaggcgtcctccctggcatcaaggtcgacaagggcaccattgaggttgttggcaccgacaaggagaccaccacccagggccacgatgacctcggcaagcgctgcgctaagtactacgaggccggtgcccgctttgccaagtggcgtgctgttctcaagattggccccaacgagccgtcacagcttgccattgacctgaatgctcagggtctggctcgctacgccatcatctgccaggagaacggt

SEQ ID NO: 8663 - DNA, 270 bp, Zea mays
cggacgcgtggcaaacccagatctaggatcttctaagttcaggaaaaattttgaagctcgggccttttgctttcttcctctaccaatcaataatagcataccagtgcatgtaaatgcttattttgaactctcttcaaatcgaagggatatctggatcggaaatgacatggctggtggaggaagagtacggtcagaatggaatttagcgctgcttgaagatgtcgttgctcctgcttatgggcacctgcttgcagctgttgctgaagagct

SEQ ID NO: 8664 - DNA, 271 bp, Zea mays
cccacgcgtccgatttcatgctttcctcatatgcccctgtaatctctgctgagaaggcttaccatgagcagctctctgttcctgaaatcaccaatgccgtctttgagccctcaagcatgatggccaagtgtgacccaaggcatgggaagtacatggcttgctgcttgatgtaccgtggtgatgttgttcccaaggatgtcaatgctgcagtcgcaaccatcaagaccaagagaactgtccagtttgtggactggtgccccaccggattcaa

SEQ ID NO: 8665 - DNA, 270 bp, Zea mays
cccacgcgtccgcttacattgctgtgaacaaggatggagaaacattctccaatatttcaccgaacgccgtgaatgctgtcacgtggggtgttttccctggcaaggagattatccagcctacggttgtggatcatgcaagttttatggtttggaaggacgaagcatttgaaatctggactcgggggtggggttgcatgttccctgagggtgattcatcgagggagctactagagaaggttcagaagacctactacctggtcagcctcgttg

SEQ ID NO: 8666 - DNA, 274 bp, Zea mays
cccacgcgtccgggagcaatggagccctgcactgacagtttctaaggtcctcctctcaatttgttcccttctgacggacccaaaccctgacgatgcgttggtcccagagattgctcacttgtacaagactgatcgcgtgaagtacgaatctactgctaggagctggactcagaaatatgcaatgggctgacaagctattggtctctcatagacccttctgtaactgaaaccagatgtctaaattaatttgtccattcgtgcatcggacttttga

SEQ ID NO: 8667 - DNA, 278 bp, Zea mays
gagatgaccagggtattctggcagtctatcaaggacaagcttatcctcccatttctggacctggacatcaagtactatgatttggggatactgcaccgtgaagcaactgatgacaaggtcacagtggaggctgcagaggctactctcaagtacaacgtggctattaagtgtgcgaccattactccagatgaaactcgggttaaggagttcaatctgaaacacatgtggaagagcccaaatggcacaattaggaacattataaatggcactgtgttcag

SEQ ID NO: 8668 - DNA, 315 bp, Zea mays
ccttttcgcctgaaaccctcgttggctattccagcaaggaaaggttactcaagcagaattagctgtaaaaagactgtatggaaaagaaatggttaccgaaattatgtttgatctgagagctagtggccaaagttcttcggagtccgaagccggctggtttgatcttttcagcaagcgttactggaaagttgtgagtgtgggggcagcactgtttttgttccagcagcttgctggtataaacgctgttgtatattactctacatcggtgttccgtagtgcaggcattgcatctgatgttgctgctagtgctcttgt

SEQ ID NO: 8669 - DNA, 316 bp, Zea mays
cccacgcgtccgcctcacctatcatcgccgctgcgccgtctcctccgctcccgtcgtccggaaagatggcgtcccacattgttggataccctcgcatgggccccaagagggagctccagtttgcacttgagtctttctgggatgggaagagcaccgctgaggatctggagaaggttgctaccgacctcagggccagtatctggaagcagatggctgatgctgggatcaagtacatccccagcaacactttctcgtactatgaccaggtccttgacaccactgccatgctcggcgctgtccccgaacgttactcatg

SEQ ID NO: 8670 - DNA, 316 bp, Zea mays
acaaaagttaattacgattgttgataagcaattgaagtcctcgtattcctgcaaaaggccatcaggagaggatgcctgcagcaccagttcatatgggtgcaccgcgaaaaagtcttcctctgctgtggactatgcgaagtttggatttgattttatacaacagagcaaccaaattggcccactcttccataacattgccctgcaacaatacatcctactttgttctcaggtactagagggaggcttgagggataagcctggaaagaacagagatcactatcattcatgctactgcctcagtggcctcgcagttagc

SEQ ID NO: 8671 - DNA, 317 bp, Zea mays
aagtggtgcctctcttgctgctgcagcaggaacaagaataaaaagaagactacaaaaccaaagacggcgaagaccccaagattatttttcaagaaagcagaaaacccatctcctgcatatgctttgggtgaaattgatgaaggtgctccaggtgctgatatcgagaaggccggaatcgtaaatcaacagaaactagagaagaaatttgggcagtcttctgtttttgtcgcatcaacacttcttgagaacggagggaccctgaagagcgcaagtccagcttctcttctgaaggaagctatacatgttatcagctgcgg

SEQ ID NO: 8672 - DNA, 216 bp, Zea mays
ctccattctcagccgccgccaatcccttcccgtgctccgcaaccgctgagtgagaagaagagatggccggcaagggcgatggcccggctatcggcatcgatctcggcacgacgtactcttgcgtcggcgtgtggcagcacgaccgcgtcgagatcattgccaacgaccagggtaaccgcaacacgccctcgtaacgtcgctttaacgacttcgagc

SEQ ID NO: 8673 - DNA, 293 bp, Zea mays
cccacgcgtccgcccacgcgtccggagacggccggccggccagagaagggagccattcgctgcagctgcaagcaggatagtcaggagtagcgtgcaacggagatggaggaggactacgtgttcaagatcgtggtggtcggcgactcggcggtggggaagacgcagctgctggggcggttcacccgcgacgagttcttgctggactccaagtcgaccatcggcatcgagttccagacacgcaccgtcgacatcgcgcggcaacgcgtcaaggcccagatctgggacaccgccgg

SEQ ID NO: 8674 - DNA, 304 bp, Zea mays
cagcaatatcagctgtgatgggcaccaagagacttccgtaccccagcagagtctttgatgtcattcattgcgctcgctgcagggtcccttggcacatcgaaggtggcatgcttttgctggaattgaaccgcttgttacgccctggtggttactttgtctggtctgccactcctgtttaccaaaagctcccagaggatgttgagatttggaatgccatgtctactttgacaaagtccatgtgctggaagatggtcaacaagactaaggataagttaaaccaagttggtatggtcatatatcagaa

SEQ ID NO: 8675 - DNA, 299 bp, Zea mays
atagcagagcaggcgcacggcgcaccgcacacctcactgccgctcccttctcgtctcgtctcctctcctctcctcggcggatccggcaccgacccaccgcccctctgctcgctccttccgccggaatcgctgctcctctctgtgtgctgtcgatttgtgcggcgactgttagtttggttcggtcccatccttctgttgatcaatggctgacggtgaggatatccagccacttgtgtgtgacaatggcactggaatggtcaaggctggctttgatggcgatgatgcgcccagagcagtgt

SEQ ID NO: 8676 - DNA, 304 bp, Zea mays
gacccaagatttaataaagtcaaggtacccaaaaacaaacccatgggatataatgcttggcatgaacctctgggggaccatatataatgctgtaattatgtttgttgcgccattactattcagtaactggccatatgcaaatggttttgaggcattgagattttgccaggagaacccagaggtggcctgggacattttcctattctgcctatgtggcgccgtggggcagaacttcatcttcttaaccatcagccggtttggctctcttactaacacaacaatcactaccacccgtaaattcatg

SEQ ID NO: 8677 - DNA, 306 bp, Zea mays
ccagccccttaaccctcgttcctctagccgtctcgcgcaccacagcctccatttctcctccgacggcggtgcggctagctcaaccatggcggactccaaggccacctcggcggtcaccctccgcactcgcaagttcatgaccaaccgcctgctggcccgcaaacaatttgtgcttgaggttatccaccccggccgcgccaacgtctccaaggcggagttgaaggagaggcttgccaagatgtacgaggtgaaggaccccaacaccatcttcgtcttcaagttccgcacccacttcggtggaggcaa

SEQ ID NO: 8678 - DNA, 307 bp, Zea mays
cagacaatggcatggatacttgacgaatactcaaagttccatggttactcacctgctgttgtgacaggaaagcctgtggacctcggaggatcattgggaagagacgccgctactggaaggggagttctgtttgctactgaagctttgcttgcagagcatggcaaaggcattgcaggccagcgtttcgtcatacagggattcggtaacgttggttcctgggcagctcagctgataagtgaagccggtggcaaggtgattgctatcagtgacgtcacaggcgccgtcaaaaacgtcgatggcctcgaca

SEQ ID NO: 8679 - DNA, 303 bp, Zea mays
cgccgaggaaggtcgacatgtcgtctccgccgccgccggtgaagctgatcggcttcttcggcagcccgtacgcgttccgcgcggaggcggcgctgtgcctgaaagcgtgccgtacgagctgatcctggaggacctgttcggcagcaagagcgagctcctgctccaccacaaccccgtgcacaagaaggtgcccgtgctcctccacggcgacggcagggccatctccgagtccctcgtcatcgccgagtacgtcgacgaggccttcgacgggccgccgctgctccccgccgacccctacgcgcg

SEQ ID NO: 8680 - DNA, 301 bp, Zea mays
cccacgcgtccgctgtcgtcatctaatctgcagacccaggaacatgctgtgactgcacttctgaacctctctatacacgaagataacaagacgagcatcatatcatccggtgccgtcccgggcatagttcatgtcttgaagaatggaagcatggaggcacgggagaatgccgcagccacccttttcagcctgtctgtggtcgatgaatacaaggtaacaatcggaggaacaggagccatccccgctcttgtagttttgctgagtgagggcagccaacgcgggaagaaggatgcagcagccg

SEQ ID NO: 8681 - DNA, 298 bp, Zea mays
cccacgcgtccgctcccgaatcggacaagccagcctgtggctactcaattaccatccgtgaaaccatcactgcgacatcggtggatttcacaggtgctaaagcttttgagatatcaggcacgccggttgactgtgtctcgttggccttatctgggaggttgtttccttggtcgtctcctgctttggtgatcagcggtatcaacacaggaccaaactgtgggtatgagatgtttcactcttctgccattgctgctgcaagggaggccttagtgtatggggtgccttcaattgcaatctc

SEQ ID NO: 8682 - DNA, 301 bp, Zea mays
tccccaattcctccttcggatctcgcattcagcgcacgcaggtgtgaaggaagggggcacgcggaggaagatggggctcgcgttcgggaagctcttcagccggctcttcgccaagaaggagatgcggatcctcatggtcggcctcgacgccgccggtaaaaccaccatcctctacaagctcaagctcggcgagatcgtcaccaccatccccaccatcggtttcaatgttgaaactgttgagtacaagaacattagcttcactgtctgggatgtcgggggtcaggacaagatcagacctctt

SEQ ID NO: 8683 - DNA, 302 bp, Zea mays
caaaagcgaggctgcgatatgtgagagagagagagagagaccccgccccaccgacagagagagtgagggaggcgccgacgccgagtcctttctccatcctgcatctgccgctgtttccgacaggatgtttctcacgaggacggagtacgaccgtggggtgaacaccttctctccggaggggcggctgttccaggtcgagtacgccatcgaggccatcaagttgggatccactgcgatcggtttgaagacaaaggatggtgttgtcctcgccgttgagaaacgtgtgacctcaccactgctgg

SEQ ID NO: 8684 - DNA, 302 bp, Zea mays
ggttctacaagaactggtgcaagagcaagaagaaggctttcacaaagtatgctctcaaatatgaaaatgatgctggcaagaaggaaattcagctgcagcttgagaagatgaagaaatatgcttctgttatccgtgtcattgctcatacccagattaggaagatgaagggtttgaagcagaagaaggctcacctgatggagattcaggtcaatggtggtaccattgctgacaaggtggactatggctacaaattctttgagaaagaggtccctgttgatgctgtcttccagaaggatgagatg

SEQ ID NO: 8685 - DNA, 302 bp, Zea mays
cacgcaggaccacgccgccgccgccatcgcgcgcgactcggccgccgtgttcgcctggaagggggagacccttgaggagtactggtggtgcaccgagcgctgccttgactggggcgaggcgggcggccccgacctcatcgtcgacgacggcggcgacgcacgctgctcatccacgagggtgtcaaggccgaggaggagtacgagaagaccggcaagatccccgacccggagtccaccgacaacgctgagttcaagatcgtgctcaccatcatccgcgacgggctcaaggctgaccccaagaa

SEQ ID NO: 8686 - DNA, 304 bp, Zea mays
cgccggatcgggccgccctgactgtgggtccgggcatggacatgccgatcatgcacgacagcgaccggtacgagctcgtgcgcgacatcggctccggcaacttcggcgttgcccgcctcatgcgcgaccgccgcaccaccgaactcgtcgccgtcaagtacatcgagcgtggcgagaagatagatgagaatgtccagcgcgaaataattaaccatagatcattgaaacaccctaacattattaggtttaaagaggttattttaacaccgacccatcttgctattgtcatggaatatgcctctgg

SEQ ID NO: 8687 - DNA, 306 bp, Zea mays
ctcgaattccgattcccaatccagcaaaccctaccagccttttgcaaactcagagagggacccgatggcacccaaggcggagaagaagccggcggcgaagaagcccgcagaggaggagcccgcggccccggcggagaaggcccccgctgggaagaagccgaagcgggagaagcggctcccggcgggaaaatccgccggcaaggaaggcggtgttgacaagaaggggcggaagaaggccaagaagagcgtggagacgtacaagatctacatcttcaaggtgctgaagcaggtgcacccggacatcgg

SEQ ID NO: 8688 - DNA, 300 bp, Zea mays
cccacgcgtccgcgtgcaatacaaaacaagtgggatattacgttatgagcgtgtctttggtgaaggttttgtgagcactggtggaatcgagactacaaaggaatttgtgggcatgctcgatcttaaaccgggccagaaagtacttgatgtcggatgtggaattggaggcggcgacttttacatggctgcaaactatgatgtccatgttcttggtattgatctttcggtgaacatggtttcatttgcaattgaacgtgccattggacgcaagtgctctgttgaattcgaagttgctgattg

SEQ ID NO: 8689 - DNA, 107 bp, Zea mays
gctgaagagctgtctatgccacttgctgctgtgaagtactcccgtgggacgttcatctttcctggtgcacagccagccccccacaggagcttctctgaggaagttgc

SEQ ID NO: 8690 - DNA, 105 bp, Zea mays
gttgatccatggactcggaaggagttgtagcagcaaaggtggcagatgagactactaaaccggcaatccaagaagacggcgccgagagcaaggccgggatgactg

SEQ ID NO: 8691 - DNA, 248 bp, Zea mays
ctgaccgtggtgtatcggtggccgggagacccctgatggcaggaaggccgtccaggctctcaaggatgtgtacgctcactgggttcccgaggacaggatcttcaccaccaacctgtggtctgctgagctctccaagctcgctgccaacgcgttcctggcacagaggatctcctctgtgaacgccatctccgccctctgcgaggccaccggcgcgaatgtgactgatgtggcttacgccgtgggcaagg

SEQ ID NO: 8692 - DNA, 249 bp, Zea mays
cccacgcgtccgccacgcgtccgggctcatcctgatggagagcttgccacggcaagatctgcagcttccgcagaacaataatgacattgtcctcatggtctacttccagcgttgaagaggtcaactcagttgggccgggcatacgtttcttccagctctatgtctacaaggacaggaatatcgtacggcaactcgtgaaaagggctgagatggctggcttcaaggccattgcactcacggtagacactc

SEQ ID NO: 8693 - DNA, 242 bp, Zea mays
tcagcaatcagtacaaggctacgatcggcgcggatttcctcaccaaggaggtgcagttcgaggacaggctcttcactctgcaaatatgggacactgctggccaggaaaggtttcagagtctcggcgttgcattctaccggggagcagattgttgtgtcctagtctatgatgttaattctatgaaatcatttgacaacctgaacaactggcgagaagagtttctaattcaggctagcccatca

SEQ ID NO: 8694 - DNA, 248 bp, Zea mays
attcgttccaactcctgagcactttctcctcgtccccgacaagccaatcgaagccgagatacggccatggactccaccggcaccggagcagggggtgctgcgaagaagggagctgccgggcgcaaggtcggcgggccaaggaagaagtcggtgtcgaggtccgtgaaggccgggctccagttccccgtcggccgcatcgggcgctacttgaagaagggtcgctacgcgcagctgtcggcaccggcgcc

SEQ ID NO: 8695 - DNA, 246 bp, Zea mays
cccacgcgtccgaattgatattgccctgtggaagttcgagaccaccaagtactactgcactgttattgatgccccgggacaccgtgacttcatcaagaatatgatcactggcacttcccaagctgactgtgctgttcttatcattgactcaaccactggtggttttgaggctggtatctccaaggatggccagacccgtgagcatgctctccttgctttcacacttggtgtgaagcagatgatttg

SEQ ID NO: 8696 - DNA, 244 bp, Zea mays
ccagtgcttcagctgtctacaataagtgatgatgatcatctggcagtttataagctcccaaagttggaaaagagggtgaattacattcagtttgtgcatcgtcatgaagatctggaccatggaaacaataacagcttgacatcttggaaaccgtacggtgttcctcttcttgcacaaatttcttgcaatgaaattgtcacgggttttgatatccatgagttggtccataaaatgcttgtgcccg

SEQ ID NO: 8697 - DNA, 244 bp, Zea mays
gcctcgtgtggccgtcgtctcccgttcggaacgccaagccccccctccggcgaaatggcccccaagcgaggtggcagggcgccggtgccggccaagaagaagacggataaagtgacgaaccctctattcgagaagaggccgaagcagttcggcatcggcggcgcgttgccgcccaagaaggacctgcaccggttcgtcaagtggcccaaggtcgtgcgtatccagcggcacgccgcatcctcaa

SEQ ID NO: 8698 - DNA, 241 bp, Zea mays
gaagtcattccctagggatgaccccaagaagccttgccatctcactgccttccttggctacaaggctggcatgactcacattgtccgtgaggttgagaagccaggatccaaactccataagaaggaaacttgtgaggctgttaccatcattgaaacccctcctcttgtcattgttgggctcgtggcatatgtgaagactcctcgtggcctccgcacactcaactctgtttgggcccaacat

SEQ ID NO: 8699 - DNA, 243 bp, Zea mays
atttttggatgcctttttatacagggaggaatttcgcaaggagttcaaggagaagaaccctaagaacaagtctgtcgctgcggtggggaaagctgctggcgacaggtggaaatccctgagcgagtcggacaaggctccctatgtagccaaggctaacaagctcaagctcgagtacaacaaggccatcgctgcctacaacaagggcgagagcactgcagctaagaaggctcctgccaaggagga

SEQ ID NO: 8700 - DNA, 235 bp, Zea mays
cccactcgtccgcccacgcgtccggagagagagagacggaaagggggagatgagccggagcctggggatcccggtgaagttgctccatgaggcagcgggtcatgtcgtgacggtggagctcaagaccggcgaagtgtaccgggggtccatggtcgagtgcgaggataactggaattgccagctcgagaacattaccttcaccgccaaggatgggaaggtttcgcagctggagcac

SEQ ID NO: 8701 - DNA, 238 bp, Zea mays
gcttgatccttgagatgagagaggaagacgagagctagaagcgaaggagaaaagcagttcttcagctaggcaggagggcacaggaaggaggagatggcgtcaaagaggattcagaaggagctcaaggatctgcagaaggaccctcccacctcgtgcagtgcaggtcctgttggtgaagacatgttccactggcaggcaacaataatgggtccatctgatagcccatattctggtggag

SEQ ID NO: 8702 - DNA, 95 bp, Zea mays
gcgagttccgcgaactcggaaatagctgcggcatctccgggttcaaggccacctacatctacggcaacgcctgggccatcgagttcatgaagtta

SEQ ID NO: 8703 - DNA, 237 bp, Zea mays
gtcgcatcccatcccactaccacccatctcgtcgtccgccgattcgatccggttcttccaacccaggggctgtgatggcgacgaagaggagcgtgggcaccctcggcgaggcggatctgaaggggaagaaggtgttcgtgcgcgccgacctcaacgtccctctcgacgacgcccagaagatcaccgacgacacccgcatccgcgcctccgtccccaccatcaagttcctcctcgaga

SEQ ID NO: 8704 - DNA, 236 bp, Zea mays
gccctcgcgccgccgccgccgtgcccagcgctcgagctcctcgcctgccgcgagctcgcgccgcaacgccaccatgaagttcaacatcgcgaacccgtctaccgggtgccagaagaagctggaaatcgatgacgaccagaaactacgtgccttttatgaccgaagatgtcccaggaggtcagtggtgatgctctgggtgaggagtttaagggttatgtcttcaagatcatgggtgg

SEQ ID NO: 8705 - DNA, 236 bp, Zea mays
cccacgcgtccgcccacgcgtccgcccaagcgtccgggagggcaggatgtcgcaccgtaagttcgagcacccgatgcacggctccctcggcttccttcccaggaatcgctcctcccgtcaccgcggcaaggtgaagtcattccctagggatgaccccaagaagccttgccatctcactgccttccttggctacaaggctggcatgactcacattgtccgtgaggttgagaagccag

SEQ ID NO: 8706 - DNA, 278 bp, Zea mays
cacacgttcacggtagcgagacttatcgtcgtcggcggtgaagatggtgtcgctgaagctgcagaagcggctcgccgctagcgtcctcaagtgtgggaaaggcaaagtctggcttgaccccaatgaagtcagcgagatctccatggctaactcccgccagaacatccggaagttggttaaggatgggtttatcatcaggaagcctcagaaggttcactctaggtcccgtgcaagaagggcacatgaggccaagcagaagggaaggcactctggatacg

SEQ ID NO: 8707 - DNA, 279 bp, Zea mays
caaaattcgatatgctgggatgcttcagtatgatggtgagttgaagcttccaagtcgctaccttgtttccccaccagagatagatagaacatctggggagtacttggtgaagaatggcatccgcacctttgcttgcagtgagacagtgaaatttggccatgtcacatttttctggaacggcaaccgctcgggatactttgatgaaactaaggaagagtatgtagaagttcctagtgacagtggtattacattcaatgttgcacccaagatgaaggcgct

SEQ ID NO: 8708 - DNA, 280 bp, Zea mays
cggggagccggaggtagaaagaccagagaagatggcgaccaccgagccggcggcggtgaggctggtgggctccttcgccagcccgttcgtccaccgcgccgaggtggccctgcgcctcaaaggggtgccctacgagctcatcctggaggacctggccaacaagagcgagctgctgctggcacacaaccccgtgcacaaactcgtgcccgtgctcctccacggcgacagggccatctccgagtcgctcgtcatcctcgagtacgtcgacgaggccttcgac

SEQ ID NO: 8709 - DNA, 115 bp, Zea mays
cccacgcgtccgcgctctacgatatcgccggcaccccaggtgtcgcggccgacgtctcccacatcaactcccccgccctggtgaagggtttcaacggtgatgagcagctttggga

SEQ ID NO: 8710 - DNA, 280 bp, Zea mays
gccgcctcgctttctcctcttccgccccaccccggtgaggcgctgatccatcgcctcggacagcggctccagaacctccgcgttgcagaaacacagtagcgagaactattcggtggggccgaagatggtgtcgctgaaggtgccaaagcgcctcgccgcaagcgttctcaagtgtgggaaaagcaaagtgtggcttgaccccaatgaagttagtgagatctccatggcgaactcccggcataacatccggaagttggttaaagatgggtttatcatcaag

SEQ ID NO: 8711 - DNA, 279 bp, Zea mays
ggattcaatatgtcgaccagcacattcgctacttcctgcacgctgttgggcaatgttagaacaacgcaggcctcccagacagcggtgaagagcccttcgtctctaagcttcttcagccaagttacgaaggttccaagcctgaagacctccaagaaactggatgtctccgccatggctgtatacaaggtgaagcttgtcgggcctgaaggtgaagagcacgagtttgatgctccagacgacgcctacatccttgacgcagccgagactgccggtgtggag

SEQ ID NO: 8712 - DNA, 278 bp, Zea mays
ccccgctccgcctccactcctcgcgccgctgccgcatctcctctacaggtaagaaggagagaaagagggcgaaatggtgaagcacaacaacgtcatccccaacgggcacttcaagaagcactggcagaactatgtcaagacatggttcaaccagcccgcccgcaagcagaggcgccgcatcgcacgtcaaaagaaggctgtgaagatattcccacgaccaactgctggccctcttcgtcccattgttcaatgccagactctcaagtacaacatgaagt

SEQ ID NO: 8713 - DNA, 276 bp, Zea mays
cccacgcgtccgcccacgcgtccgcccacgcgtccgaaagcctcagatctcagtcgcctgcgccgccgcttcgttcgtgtggaggggagaagacaggaaatggcggcgactgagggcgtgctcttggggatgggcaaccccctcctcgacatctccgccgtcgtcgatgacgccttcctgacaaagtatgacatcaagctgaacaatgctattctcgctgaggagaagcacttgcctatgtatgacgagttggctagcaagagcaatgttgaatat

SEQ ID NO: 8714 - DNA, 106 bp, Zea mays
ggaaacagcgcactgctaagagcagcacaagcgtctttctgtgcgtgatctcaaggagaaatttgagaagggtctatctggcgcttccaagctttctgaagaaggc

SEQ ID NO: 8715 - DNA, 274 bp, Zea mays
caaaaatcttcgccaaagttcgaggatgggagactgagaatgtcgaggagattgctttgaagatctctcagcttcctttggcttcaggcaagcaaaagaggattgctgtgattactcaaggtgctgatccagtggttgttgctgaggacgggaaggtgaaaacgttccctgtgatcctattgcccaaggagaagcttgttgacaccaacggcgcaggtgacgctttcgtcggaggctttctctctcggctggtccagggcaagagcatcgagga

SEQ ID NO: 8716 - DNA, 272 bp, Zea mays
cccacgcgtccgagctgaagaagctagggtggagctagataggttgagggcagaaagagaggaagagaagaatattctggtcaggggcagagctgctgttgagtctgaaatggaagttctgttgaagttgaggagtgaggtagaggaacagctgcagaacgtactgagcaagaaggtggaggtgtcgttcgagaagagtaggattgagaaactccaaaaggaaattgagagcgataactcggctgttgtgcaacttcagtatgagcttgaag

SEQ ID NO: 8717 - DNA, 270 bp, Zea mays
gagatcgaccccatctgcaccctccaggctctgatggagggtcttcaggtccttcccttggaggacgttgtctcggaagctgacatcttcgtgaccaccactggcaacaaggatatcatcatggttgaccacatgaggaagatgaagaacaatgccattgtctgcaacattggccactttgacaatgaaattgatatgctcggccttgagacctaccctggcgtcaagcgcatcaccatcaagccccagactgaccgctgggtgttcccc

SEQ ID NO: 8718 - DNA, 269 bp, Zea mays
cagccggccaatctagcatccgctcgctgggtctgatagcagagcggcagggcgccatggcggatggagaaggcggacatccgctgcctcatccacacagcgctccgcgtcggctaccgccacctggactgcgccgctgactaccagaacgaagctgaagttggtgacgcgctcgcagaggcattccagaccggactcgtcaagcgggaggacctgttcatcacaaccaagctgtggaactcagaccatgggcatgtgcttgaagcctg

SEQ ID NO: 8719 - DNA, 273 bp, Zea mays
ggtgaagtcatttcccagggatgaccccaagaagccttgccatctcactgccttccttggctacaaggctggcatgactcacattgtccgtgaggttgagaagccaggatccaaactccataagaaggaaacttgtgaggctgttaccatcattgaaacccctcctcttgtcattgttgggctcgtggcatatgtgaagactcctcgtggcctccgcacactcaactctgtttgggcccaacatcttagcgaagaagtgaggagaaggttcta

SEQ ID NO: 8720 - DNA, 201 bp, Zea mays
caccaacagcaagcgaaaatctcccgatcccctctagtctccgcggcgaagatgtcggggcgcggcaagggcgggaagggcctgggcaagggcggacgaaccgcaccggaaggtgctccgcgacaacatccaggggatcacgaagccggcgatccggcggctggcgcgcacgggcggcttgaagcgcatctccgggctcat

SEQ ID NO: 8721 - DNA, 149 bp, Zea mays
gctaatccgagctaagaagcacagcaagtctcaccagactagcggctagctcgagaatggccaaggacatctatgccgctgcgcacgagggcaaggactactcggacccgcctcctgcgccgctggtttacgcggaggagctgaccaag

SEQ ID NO: 8722 - DNA, 319 bp, Zea mays
catggattctatgtatgagattccagatgcaaaatctggggagaagcgaattgatgcagtggttgtagatgaagatgcagtaggatcagtggaccaaccctggctatggagccaagattctttatggtgacggtgctttggatcaatatctatcccatataaaggtggcgggagatggagtcgcaagcgaaatggatggagaagctgagctttcaccatcccgagccattggcatgtgattcctggctctgaccgcactagtgtaacctgtaaaatctaatcccagttgtatccatgtaagtagcagccttgtaaatga

SEQ ID NO: 8723 - DNA, 319 bp, Zea mays
ccgcctcgggccaaaccctacgcagggagttgattgatcgattgcagccatgagtaagttgcattccgagcttctcaaggattgcatctcccagatagttcaggatgccaagaagaataggaagttcactgagactgttgagcttcagattagtctgaagaattatgatccacaaaaggacaagcgtttcagtggctctgttaagttgcctcacatccctcgtccaaagatgaaggtgtgcatgcttggtgatgcccagcacgttgaggaggctgagaagatgggacttgactacatggatgttgaggccctcaagaaa

SEQ ID NO: 8724 - DNA, 317 bp, Zea mays
gcaggagcggcgatccattccacacaaccaccactgctcttgccccagcccgccgcaggagttgccagatctgctccggtcacaggagctccgactccgagccctctccaatggcggttaaggtctacgtcgtgtactattccatgtatggacatgttggcaaactagctgaagagatccagaaaggtgcctcgtctgttgaaggtgttgaagctaaaacatggcaggtccctgaaaccctccctgaggaagtgcttggaaagatgggcgcaccccctaagcctgacgtgccagtcatcacgccgcaagaactcgca

SEQ ID NO: 8725 - DNA, 316 bp, Zea mays
aacaccgggagcgtcgacaaggtcgcgaggtggccaaggtgaagagcaagatgctttatgcaagctcaaaccaaaaattcagagagtgaggctcaaatggcgatccaggtggaactgcagattactgatgcaagtgaaatcagccttgatgagatcaaggatcgggctcgctaggcatcatcatgatcatgcatcatggacttggcctactactgtggatttgtatgccattatagacttggtgctgtgaaagactgcttgatgatttgcgggtttgttgctgtgtaaaaaaaggtcccatggctcccagaagacc

SEQ ID NO: 8726 - DNA, 314 bp, Zea mays
cttgaaagagctggtagaacaaaaaagattaatcctaaagtagaaatgaattctgctgcaacaatggcatcaacgatactcacggaggacggatgatctcacgggcggcatcaatcattgtagtcggtgatgaaattttgtttggtacaactgaggataacttaggagcagccttgtgcaagaagcttcatgcaattggctggcgggtttctcatgtagcagttgttcgcaatgagattgattctgtcgctgaagaagttgaacgttgtaaatctactgatgacatggtgtttatttttggtggactcgggcca

SEQ ID NO: 8727 - DNA, 316 bp, Zea mays
cccacgcgtccgagaaggtcatcctcttcggcgtccccggcgccttcaccccgacctgcagcaaccagcatgtgccaggcttcatcacacaggctgagcagctcaaagccaagggtgtagacgagatcctgcttatcagcgttaacgaccccttcgtcatgaaggcgtgggcgaagacctaccccgagaacaagcacgtgaagttcctcgccgacggatctggagcgtacaccaaggcgctcgacctcgagctcgatctcacggacaaagggctgggcgtgcgctcgaagaggttcgctctcctggccgacgacct

SEQ ID NO: 8728 - DNA, 313 bp, Zea mays
ctctattatcattacctcctatcattaatggcgcacattcagctatcacccttgcaacaaggaatgtctttattgaatgtacagctactgaccttagccaaagcagatatagttctgaatacaatggttaccatgttctctgaatattgtgagactaaatttgaagtggaacctgttgaagtgatacatcatgatggaaggaaaacagtttaccctgatctttcatgttacaaaatggatgttttgttatctgacattcttgggcctattggcatctcccaggacgagaaacaggttgtctgtcttttgaata

SEQ ID NO: 8729 - DNA, 312 bp, Zea mays
ctcgcccaatgaaggggatgctgactggcccagtcacaatcctcaactggtccttcgtccggaatgaccagccgaggtttgagacttgctaccagatcgctcttgcgatcaagaaggaagtcgaggatctcgaggctggtggtattcaggttatccaaatcgacgaggctgcactgagagaagggctgccgctccgcaaggctgagcatgcattctacttggactgggctgtccactccttcagaatcaccaactgcgagatccaggacaccacccagatccacacccacatgtgctactccaacttcaacg

SEQ ID NO: 8730 - DNA, 308 bp, Zea mays
cttccaaagcattggtccagtagaagggtgcaagctcatcagaaaagaaaagtcatcctttggtttcattgactactatgaccgcagatatgctgcactggcaattttatctctcaatggcagacaactgtatggtcagccgattaaagtcaattgggcatatacaagtactccgagggaggacacatcaggtcattttaatatttttgttggggatctttgcccggaagtcactgatgctactttgtttgcatttttctctggatactctacttgctcagatgctagggttatgtgggaccagaaaa

SEQ ID NO: 8731 - DNA, 304 bp, Zea mays
cccacgcgtccgtctagcaggtcgatcaccttcgcacatagctgttggtgcaaataaaaaagcttcaaatgtgggacatattaaagatgggtctaatgtatccaaagttgaagatggtcatgtcgatagaagtgttggtgtgaagaagcccagatattctgcagatgaaggcccttcgttgactgaactgagtggatacaatgcaaagagacacgagtttgacccagagtatgataatgatgccgaacaagcgcttgctgagatggaatttaaagaaactgattcagaaactgatcgtgaactg

SEQ ID NO: 8732 - DNA, 306 bp, Zea mays
cggacgcgtgggtagcagttcccactcgagctcgtcaaggatgtcctcccggtcggcggcgactacctcctcaagctccccatgccgcagatcatcaaagaggacaagacaggttggatgacagatgaggagtttggacgggagattctcgccggcgtgaaccccatgctcgtcaagcgtctcacggagttccctccgagaagcagtcttgacccgagcaagtacggcgaccacaccagcaccatcagggaggcggacctcgagaacaagctcgagggcctgaccgtgcagcaggcgctgcacggc

SEQ ID NO: 8733 - DNA, 305 bp, Zea mays
gcttggtggaaaagatgagtattcactagtggaagcattgaaacaaggaaaggttgagaaaccagttgttgcatgggtcagtgggacatgtgcacgtctattcagatcagaagtgcagtttggtcatgctggtgccaagagtggtggtgagttggaatcagcacaagctaagaatcaggcactaagggaagctggtgcagttgtgcctacatcatatgaagctctagagagtgcaattaaggaggtatttgacaaactggttgaggaaggaaaaatttctcctgtgactgaaattacacctcctc

SEQ ID NO: 8734 - DNA, 306 bp, Zea mays
aaattcactgctccctgcccgtcgaaccagccgagcaagccaacgcaaacccagcgagccgcggcacctcgtcgcgcgcgccttgcctgtccgcttcttcgtccgatcgtccgccggtccgatccgagccccccgaagtatggcggacccgctgcggcggggaggaagacgcgggtggggccgtacgaggtcggcaagaccatcggggagggcagcttcgccaaggtgaagcacgcccacgactcccgcacgggcgccgtccgctctatcaaggtgctcgaccgcagccacgttctccgccacaag

SEQ ID NO: 8735 - DNA, 303 bp, Zea mays
agccgagttcgcagcggcactccaggtccagcagtctcttcggctcttcgttggtggtgcgtggacaccggaaattacctcggggattgcgttctgatctaagccggcatgaagtgctgctcagagcgtttgctgctcctgctcctgctgctgctggcatcgtcgtcgttactgtccgtcgtggttgccgcgcacagacttgccctgccgacctcgacagcaaatgcgacggtggtgcgcctgatgactgggagggggaattcttccccggcgtcccgaaaatcaagtatgagggtccaacaa

SEQ ID NO: 8736 - DNA, 278 bp, Zea mays
cccacgcgtccgcccacgcgtccgcccacgcgtccgtctgctctcccccacctcccggtccggcagcagagagcgggggtgcagagagatcgagatccggaggccgcgagtgggagcgccaccaccagcgactgcggcaatggcgggcacggtgacggtcccggggtcgtcgacccctccacgccgctgctcaaggacgagctcgacatcgtgatcccgacgatccgcaacctcgacttcctggagatgtggcggcccttcttccagccctaccacct

SEQ ID NO: 8737 - DNA, 279 bp, Zea mays
gatgaggcttacttcgcagcaaatgctgcagctcaggcctcgaggaaatcctcaccccgtgtgaccaatgaagaagtccagaaggctgctgctgctctcaagggctctgaccaccgccgtgcgaccaacgttagtgctagattggatgcccagcagaagaagcttaacctccccatccttcccaccactacaatcggttcgttcccacaaaccgttgagctcaggagggtccgccgtgagtacaaggcaaaaaagatctctgaggaggaatacgtcact

SEQ ID NO: 8738 - DNA, 277 bp, Zea mays
gtctcggctacaaggccaagcagggatatgttgtctaccgtgtccgtgtgaagcgtggtggcaggaagaggcctgtgcccaagggtattgtctatggcaagcccaagcaccagggtatcacccagctcaagttccagaggaacaagaggtctgtcgctgaggagagagctggacgtaagcttggtggactgagggttcttaactcctactgggtgaatgaggatagtacctacaagtacttcgagatcatccttgtggacgttgcccacaaagccat

SEQ ID NO: 8739 - DNA, 276 bp, Zea mays
cccacgcgtccgcgggtagacgcgctccccagtccccacccccctctcgtgtcgtggcgacgactggggggctgtcgctgccgccctacgtcaggtggacaggtcgtactagggcacttcgccggcgacgagtaccacaaggcagtggacactttctctggtatcagaggatcaatgtccaattattatgatgactacgatgacattgacgggatggaggatgattatgatatggatgatcccattgatgacatggtagacgagcagcaagggatt

SEQ ID NO: 8740 - DNA, 279 bp, Zea mays
gggacgggttatgaacctctctcatggaccagtagagtgcaaattgcccttgattcagcaaggggtctagagtatatacatgagcacactgttccagtgtatgtgcatcgagatatcaagtctgcaaatatcctgatagacagagacttacgagcaaaggttgcagattttggactgacaaaactttcagaaattggaactacatcacagtcactcccatcactacgagttgttggtacatttggttacatgcctccagagtatgctcgatatggtgag

SEQ ID NO: 8741 - DNA, 274 bp, Zea mays
cgcgccgccgttcgccgaagccccgcgtcgcgtcgcgtagagtgcttgatggctgccgcaaggggcattaaccagcttctgaagagaattctccacaaccagtccgctggtccatggctgctttcttcatttcggggaaatcatgaagagtcctctgctggattgagagcattggcgcttcttggagttggtgcctccggtcttttgagttttgctacaatagcatctgctgatgaagctgagcatggtttggcagccccagattatccgtggc

SEQ ID NO: 8742 - DNA, 274 bp, Zea mays
cccaagggtcctcagcctgtgaaaatgcaaccaatcgcagtccctgctattcctgtggatgagattagggaggtgaccaagggttttggtgatgaagctttgattggtgagggatcctttggcagagtatacttgggtgttctaagaaatggtaggagtgccgcggtcaaaaagttggattctaacaagcagccagaccaagagttcttggcccaggtgtctatggtgtcaaggctgaagcatgaaaatgttgtcgagttgcttggttactgtg

SEQ ID NO: 8743 - DNA, 273 bp, Zea mays
ctcctttccagcgaaaatgccgaacctcgagtgccggatgtatgagcagcggttcccggaggtggacgccgcggtgatgatccaggtgaagcacatcgctgacatgggcgcgtacgtctcgttgctcgagtacaacaacatcgagggcatgatcctcttctccgagctctcccgccgtcgtatccgctccatctcctccctcatcaaggttggccgccaggagcccgccatcgtgctccgtgtcgaccgcgacaagggctacatcgacctttc

SEQ ID NO: 8744 - DNA, 270 bp, Zea mays
gccgccgaaatcccgttgcgtctctcgcgcgttaccaagctctcaagttttctcgcgccgacggcaatggatgaggtcaccgaggccgtgaacaacctcaacatctcgggcgtaggggccgcgggcgttgccggggcggaagggcacaagaagaatcgcatccaggtctccaacactaagaagcccctcttcttctatgtcaacctcgccaagaggtacatgcagctgcacaacgaagtagagctgtcggccctcggcatggccattgcg

SEQ ID NO: 8745 - DNA, 268 bp, Zea mays
ctactacaagagctctagcattcaattctagacacaccaaagagatcaaatcctctccaaattccacacaacacaatagtgactagagagagtgatttgcttgtgttctttcgagctcttgcgcttggattgctttctccgttcttgattctttcattgcgatcaaactcacttgtaattgagacaagagacaccaaacttgtggtggtccttgtgggaactttgtgttccaagtgattgagaagagaaagctcactcggtccgtggg

SEQ ID NO: 8746 - DNA, 170 bp, Zea mays
ccacgcgtccggcgagaaggagctgatcagcgccatcgaccgctaggccgtgttcacgtacgcggaggacgcggccagcgccagcctgccgctgatgcagaagctgcgcgccgtgctggtggaccacgccctcagcagcggcgacgcggagcgggagccctccgtgttct

SEQ ID NO: 8747 - DNA, 269 bp, Zea mays
ctcgaatcgttccccaccatggcgtcgcagggatcctccgtcttcgccgcactcgagcaggccccggaggaccccatcctcggagtgaccgttgcctacaacaaggatcccagccccgtgaaggtcaacctcggggtcggcgcctaccggaccgaggaagggaagcccctagtgctgaacgtggtcaggcgcgccgagcaaatgttgatcaataatccgtcacgtgtcaaggagtacctaccaatcaccggtctggctgaattcaataa

SEQ ID NO: 8748 - DNA, 106 bp, Zea mays
gagattggctggatttacggatcgatcacagaggatatcttgactggatttaacatgcactgccatggctcgcggtctatctactgcatcacgaagcggcctgcat

SEQ ID NO: 8749 - DNA, 270 bp, Zea mays
cgtatatgcccttgtcccggttcctttccccatccccaactccattatttgcttgatccttgagaagagagaggaagacgagagctagaagcgaaggagaaaagcagttcttcagctaggcaggagggcacaggaaggaggagatggcgtcaaagaggattcagaaggagctcaaggatctgcagaaggaccctcccacctcgtgcagtgcaggtcctgttggtgaagacatgttccactggcaggcaacaataatgggtccatctgata

SEQ ID NO: 8750 - DNA, 269 bp, Zea mays
cgccgctgcgccgtctcctccgctcccgtcgtccggaaagatggcgtcccacattgttggataccctcgcatgggccccaagagggagctcaagtttgcacttgagtctttctgggatgggaagagcaccgctgaggatctggagaaggttgctaccgacctcagggccagtatctggaagcagatggctgatgctgggatcaagtacatccccagcaacaccttctcgtactatgaccaggtccttgacaccactgccatgctcggcg

SEQ ID NO: 8751 - DNA, 268 bp, Zea mays
gtcgcttggggtgtctgtaatcatgcttttcacttccactgcatcagcaggtggcttaagactcgccaagtgtgcccattagataacagtgagtgggagttccagaaatatggccactagttcctgggcaccgtcatgtgatgttggggctttgctgccactcaagtgtttttgtctgccaaacagctccatctcttactgctttcgatgcttgcatctatcacccgtcaattataactagctagcagtacgtccacctgggactgta

SEQ ID NO: 8752 - DNA, 96 bp, Zea mays
cccacgcgtccgggcggcggcaccggcaggcggcggccctcgggcattgtcccagcgggagcaggacatccagatgatgctcgcccgcgatgtcca

SEQ ID NO: 8753 - DNA, 279 bp, Zea mays
agcaaacggaaatcccatctcgccgccgccgcgatgtctcgccgctatgacagtcgcacgacgatcttctcgccggaggggcgtctctaccaggtggagtacgcgatggaggcgatcggcaacgccgggtcagccctcgggatcctggcggccgacggcgtagtcctggtcggcgagaagaaggtgacctccaagctcctccagacctcccgctccgccgagaagatgtacaagatcgactcccacctggcgtgcgctgtggcagggatcatgtccgac

SEQ ID NO: 8754 - DNA, 120 bp, Zea mays
gttcgacagggcaagacagagaaggaagatcaaatgcaagagcaacaactgttaagtgatgaaaaacagtgtgccgagcacataatgcttgaagacttggggaagaatgatgttggcaag

SEQ ID NO: 8755 - DNA, 118 bp, Zea mays
cgccattcttgggaggtcttggtcgggaccggtgctgatggaggagaggtacgaggcgctgaaggagctgggggccggcaagttcggccgtgccaggctggtcaaggacaagcggacc

SEQ ID NO: 8756 - DNA, 119 bp, Zea mays
ccttttgctcggaacgcacacaccgcccgtccccgatctccgatcccctcgtcgatccaaagatgcagatcttcgtcaagaccctcactgggaagactaatcacctcgaaggtgagtct

SEQ ID NO: 8757 - DNA, 128 bp, Zea mays
ccgaccgtgggccgccgccgacttcgccggcaactgggtctactgggtcggcccgctcatcggcggcggcctcgctgggctcgtctacggcgacgtctacatcggggggctctacccagcaggtcgcc

SEQ ID NO: 8758 - DNA, 282 bp, Zea mays
gcatcctggatgcgaacctgcttatcctacaccaaagtgtgaaaagaaatgcaaggagcagaaccaagtttggcaggaaaagaagcatttcagcattgatgcgtacacgataaaattcagatccacatgacataatggcagaggtctacaaaaatggtcctgtagaagttgctttcacagtttacgaggatttcgcacactacaaatctggagtgtacaagcacatcaccggtggcattatgggtggccatgccgtcaagttgattggatggggaaccagtg

SEQ ID NO: 8759 - DNA, 99 bp, Zea mays
gcaacttcaagcacctcaacctcgacttccagctgcaggacggcggtcgcaagctcaaggtcgacgcctggtttggcacccggcgaaccatggccgcca

SEQ ID NO: 8760 - DNA, 131 bp, Zea mays
gcagacggttgctgttggagtcatcaagagtgtggagaagaaggacccaaccggcgccaaggtgaccaaggcggctgccaagaagaaatgatgcgataccgtgtctgcttttgcagtgcctggataacttg

SEQ ID NO: 8761 - DNA, 277 bp, Zea mays
ggcggaccaggtaagcagcagcaggaaccctagcaccgccgcatccgcagccatgggtatcgacctcgttgccggtgggaggaacaagaagaccaagcggcacagcgccgaagtccgacgatgtttatctcaagctccttgtcaagctctaccgtttcttggtcaggaggaccaagagcaacttcaatgctgtcattctcaagaggctcttcatgagcaaaaccaatcgcccaccaatctccatgcgccgccttgtcaagttcatggaaggaaagga

SEQ ID NO: 8762 - DNA, 281 bp, Zea mays
  unsure (1)..(281): unsure at all n locations
ggaagttctattaaccccagtgagagaacctatccagaggagatgatccaaactgggatatccaccattgatgtcatgaattcacattgcttcgtgngacaaaaagatttccactggttttctgctgctgggctccctcacaatgaaattgctgctcagatttgtcgtcaggctggtcttgtgaagacattggagaaaggaaagcatgctgagggtggtgaagatgacaactttgctattgtgtttgctgctatgggagtgaacatggaaacagctcaatt

SEQ ID NO: 8763 - DNA, 92 bp, Zea mays
cttgcaagttcaatctcacctccaaccatgggtaaagagaagtcccacatcaacattgtggttattggccatgtcgactctggcaagtcgac

SEQ ID NO: 8764 - DNA, 134 bp, Zea mays
gtgacatctttatcaagctggacgggcagccatacctcgcccaggtgtggcctggccccgtctacttcccggacttcctcaacccgaacggtgtgtcgtgggtggatcgatgaggtgcggaggtttcatgatct

SEQ ID NO: 8765 - DNA, 91 bp, Zea mays
agagaatcctaccaaacctagctaccaactcgatcgtcgtcatcacgctcgaccgcacaactgcaccaagaggggatgagacctaaaaact

SEQ ID NO: 8766 - DNA, 123 bp, Zea mays
acagggagaagcttttcctagcaaaccaggaaaagttccatgctggtgcagataagcaatactggaaggcgatatctgaacttatcccacatgagattgctaacattgatgaagagaggggca

SEQ ID NO: 8767 - DNA, 116 bp, Zea mays
gtggtgccctacgataccgtcgcgtcgcctcccgaagatctcgaggagacgaagaagctgctggataagctcgttgtgctcaagcttaacggagggctccggaacgaccatgggct

SEQ ID NO: 8768 - DNA, 118 bp, Zea mays
aagagagcacccttcaccttgttctccgcctcagaggtggtatgcagatctttgtaaagaccctgactggaaaaaccataaccctggaggttgagagctcggacaccatcgacaatgt

SEQ ID NO: 8769 - DNA, 309 bp, Zea mays
cccactcgtccgccacgcgtccggttgatacttcctttctattctttcacattattttgtgtcattcttccattaaccatgtttgttcccgaggccgagttgcctgtgtgggtcatctgttatgtgccgatttgcatgtccttcttgaatattctgccatccccaagatcatttcccttcattgtaccatacctcctcttcgagaacaccatgtctgttaccaaattcaacgcaatggtgtccgggctgttcaaactcgggagctcctacgaatgggttgtcaccaagaagtctggccgatcatctgaa

SEQ ID NO: 8770 - DNA, 308 bp, Zea mays
cacgcgtccggtggagagctagtccgtgtccttcgtccaaatctcgagacaacctcagttgattttaagccatacattggtccaatctataatgcaatactgggacgtttggccaatcaagatcaggatcaggaggtaaaagaatgcgccatatcttgcatgagtttggtggtctctacttttggtgatggtcttgaaagagaattaccagcatgccttcccatactcgttgacaggatgggtaatgaaattacaagacttacagctgtcaaggcattttcagttattgcgaattcacctctacgtat

SEQ ID NO: 8771 - DNA, 236 bp, Zea mays
cagccaaagaaccagcatcctggttgtgaaaatggggggtgtgcgtactacttcttcatcatcgccgccgcggtcgttgccgtcgtcctcgcgcttctcccggccggcgccacaggtgccgcctcaaggtcggcttctacagcaagacatgcccgtcggcggagtccctggtgcagcaggcggtggctgccgccttcaagaacaacagcggcatcgccgccggcctcatccgcctg

SEQ ID NO: 8772 - DNA, 308 bp, Zea mays
ctcgcatcgtgtgctcagtcagatccccgtcccgcatttcctaaggccaggttagttggcattgaagacgatgactgcttctgcagctgctggtgtgcagatggtggctgcacgcccttgcatttcggcctcgccaggaattcttaccgcacgggtttctaggactgattgcatgctcagtaccactgctacattccccaaaatcagctgctcctggcctctaaggtttaagcgcaatgatgttgttgtaagagcaatatcggaagagtgtggcccgcacgggcttcccattgatctcagaggtaaaa

SEQ ID NO: 8773 - DNA, 310 bp, Zea mays
cccacgcgtccggagcatctctgagcttgagaggcttacccgagtttttactcagaaaatccatgacttgattggcatccatactgacgttccagctccagatatgggcaccaactcacagacaatggcatggatacttgacgaatactcaaagttccatggttactcacctgctgttgtgacaggaaagcctgtggacctcggaggatcattgggaagagacgccgctactggaaggggagttctgtttgctactgaagctttgcttgcagagcatggcaaaggcattgcaggccagcgtttcgtcata

SEQ ID NO: 8774 - DNA, 313 bp, Zea mays
cggacgcgtggcgcaccagcgcctgcacccaaagcttccggagaattcctcccttgccccgccgtcgcatcctcttcgaagttcgaaactaatcgcgccgcgatcacccacctcatggcggacaaggagcctgtcgtggagcggccagacgcgggtgaggaggaggaggacgcctcagccgccgccgccgcgggggaggaggaggacacgggcgcccaggtggctcccatcgtgcggcttgaggaggtagccgtcaccaccggcgaggaggacgaggacgtcctgctcgacatgaaggcgaactgtaccgatt

SEQ ID NO: 8775 - DNA, 313 bp, Zea mays
gatgacaaaggcttagtattaccaccaaaggtagcgccaatccaggtaattgtgattccagtgccttataaggatgctgacacaactgccataaagggagcctgcgaatcaactgtttacacactcgatcaatctggaattagagcggatcaggacacccgtgaaaattactctccaggttggaagtattcccactgggaaatgaaaggtgttccattgagaattgagattggtccaaaagatctggcaaacaaacaggtgcgtgttgtccgccgggacaacggtgcaaaggttgacatccctgtgaccaatt

SEQ ID NO: 8776 - DNA, 307 bp, Zea mays
gagaatcaaatgagtttgttggagacaaggttgcttttgctctgtctcagggactaaaggtcattgcatgtgttggtgagacccttgaggagagggaggctggttcaaccatggatgttgttgctgcacaaacaaaagcaattgctgagaagatcaaggactggagcaacgttgttcttgcctatgaaccagtctgggctattggaactggcaaagtcgccaccccagctcaggctcaggaagtgcacgcctccctgagggattgggtaaagatcaatgtcagccctgaggtctctgaatctacaag

SEQ ID NO: 8777 - DNA, 302 bp, Zea mays
cccacgcgtccgcgccacttggcaaagcgggcaccggcctcgtagtacttagcgcacgccttgccgaggtcatcgtggccctgggtggtggtctccttgtcggtgccaacaacctcaatggtgcccttgtcgaccttgatgccagggaggacgcctccctccttgaggacatcgatcgctgcgcttacgtcactgagacagtccttgctgcctgctacaaggctctcaacgagcaccatgtcctcctggagggtaccctcctgaagcccaacatggtgactcctggctccgactctaagaag

SEQ ID NO: 8778 - DNA, 305 bp, Zea mays
ggcgaccaccggagcgcggaggaggcacaggcgccgatctagagacgatggccgccgcgggctcctcgccgtccttctcctcctcgagtaagcgactggaagggaaggtggccctcgtcactggtggcgccaccggcatcggcgaggccatcgttcgcctcttcatggagcacggcgccaaggtctgcatcgcggacatccaggatgaggccgggcagcagctgcgcgacgccctgggaggtgacgcgcagggcgccatgttcgtccactgcgacgtgacgtcggaggaggacgtgagccgcgcc

SEQ ID NO: 8779 - DNA, 305 bp, Zea mays
ggcttgatcatggctctaaggacaagaaacctcctgaattgttacccatagttcttcaggtcctgcttagtcaaccacacagatctagagtgcttgttctgcttggaagatttcttgatatgggaccatgggcagttgatttggccctgtctgttggaatatttccttgtgtgctcaaactgcttcaatcaagtgctatggatatacgtcaaaatctagtgtttatatggagaaaaattctctcccttgataagtcatgtcaggttgaattggttaaagatggaggacatgcatattttattaag

SEQ ID NO: 8780 - DNA, 306 bp, Zea mays
ggacctggcgcgcctctacatttcttctctctctgctcctccgcctccgcctccgcctgatccatccaagacagggatcgccatgtcagcactcggaggagcaccacttcgaatcgaaggccgacgctggggcgtccaagacctacccgcagcaggctggcaccgtccgtaagaacggcttcatcgtcatcaagaaccgtccctgcagagttgtggaggtttctacctccaagactggtaagcatggccacgccaaatgccactttgtcgccatagacatattcaatgggaaaaagcttgaagata

SEQ ID NO: 8781 - DNA, 310 bp, Zea mays
  unsure (1)..(310): unsure at all n locations
cccacgcgtccgcccacgcgtccgaaaccatctcgactcgtggggaagtttcgctctcgcccgcgtcgacttcctagggttcgaggaacgtccgtccgtccgtccggggaaggagcaggagggaggcggagatgatcgaggtggtgctcaacgaccgcctggggaagaaggtgcgggtcaagtgcaacanggacgacaccatcggcgacctcaagaagctggtggcggcgcagacggggacgcgccccgagaagatccgcatccagaagtggtacaacatctacaaggaccacatcaccctcaaggacta

SEQ ID NO: 8782 - DNA, 300 bp, Zea mays
ctgggtaagaatgcttgtggctctggttatgattttgatgtgcatattcattttggtgctggtgcgtacatctgtggtgaagagaccgccctactagagagccttgaagggaagcagggcaaacctaggctgaagccacctttcccagccaatgctgggctctacggctgccccacaactgtgactaatgtagaaactgtggctgtatccccaacaattcttaggcgcggtccagaatggtttgcaagctttgggcgcaagaacaactctggaaccaagctctattgcatctcagggcat

SEQ ID NO: 8783 - DNA, 300 bp, Zea mays
gctaagctaagccgagctaagaagcacagcaagtctcaccagactagcggctagcgcgagaatggccaaggacatcgaggccgcggcgcacgagggcaaggactactcggacccgcctccggcgccgctggtggacgcggaggagctgaccaagtggtcgctgtaccgcgcggtgatcgccgagttcgtggccacgctgctcttcctctacatcacggtggccacggtgatcgggtacaagcaccagacggacgcggcggcgtcgggccccgacgcggcgtgcgggggcgtcggcgtgct

SEQ ID NO: 8784 - DNA, 295 bp, Zea mays
cccacgcgtccggcttctcctccccctccggttcgggttcgggttcgtgaggttctccggggttcggtttcgtgggtgggcggatcgagatggcggcgtcggatgttgagtaccgctgcttcgtcggcggcctcgcctgggccacggacgaccactccctccacaacgccttcagcacctacggcgaggtcctcgagtccaagatcatcctcgatcgggagacgcagaggtcccgcggcttcggcttcgtcaccttctccacggaggaggcgatgcggaacgcatcgagggcatg

SEQ ID NO: 8785 - DNA, 302 bp, Zea mays
gagagagagagagagagatcagcaacttaacaacaataatggccaccgccatagttcccacggacgccgagctgctgcaggcgcaggccgacctgtggcgccacagcctctactacctgacatccatggcgctcaagtgcgcggtggagctccacatcccgaccgccatccacaacctaggcggtgctgccacgctgccggacctcgtggccgcgctgtccctgccagcggccaagctcccgttcctcgggcgcgtgatgcggctgctggtcacgtcgggcgtcttcgcgtcgtcgtccgag

SEQ ID NO: 8786 - DNA, 298 bp, Zea mays
ggaactacttcctgtttttgagttcgatgagctggagttgaagaggttccctaacccaagggaccacatggtaaatacatacggatattctacaatcaacttttttgcgcccatgagtcgttatgctagtgctggtggtggacctgtggctgcttccaaagagctcaaacagatggtcaaggcatttcataattctggaattgaggttattttggatgtagtttacaaccatacaaatgaagctgatgatgttaacccttacatgacttcctttcgtggtattgataacaaggtctat

SEQ ID NO: 8787 - DNA, 301 bp, Zea mays
atcctgaagctcatgtcgtccacctacatcgtggcgctgtgccaggccgtggacctgcgccacctcgaggagaacatcaaggcgtcggtgaagaacaccgtgacccaggtggccaagaaggtgctgaccatgaacccctcgggcgagctctccagcgcccgcttcagcgagaaggagctgatcagcgccatcgaccgcgaggccgtgttcacgtacgcggaggacgcggccagcggcagcctgccgctgatgcagaagctgcgcgccgtgctggtggaccacgccctcagcagcggcgacg

SEQ ID NO: 8788 - DNA, 302 bp, Zea mays
gagcctcagagcgccaccaagtcttgcggtcgcgaagagcaacgcaacaagatggtgaagctcgcattcggaagcgtcggcgactccttcagcgtcacctccatcaaggcctacgtggcggagttcatcgccaccctcctcttcgtcttcgccggcgtgggttccgccatcgccttcgggcaactgacgaatggcggcgcgctggaccctgcgggactggtggcgatcgcggtggcgcacgcgctggccctcttcgtgggcgtctccgtggccgcgaacacctccggcggccacctgaaccc

SEQ ID NO: 8789 - DNA, 304 bp, Zea mays
actccacctacctcccggctcccggatccggcgatggagaagatgctccactcagccccggcccacggcaggctcccggagtgcttcatcttcccggccgacaagctcccgcagccaaggccacctcagcgacggtctccctgcccatcgtggacctctccctcggccgcgacgaggtgcggcgcgccatcctcgaggccggcaaggagatcggcttcttccaggtggtgaaccacggcgtctccctggaggcgatgcaggacatggagacggtgtgccaggagttcttccggctgccggcgga

SEQ ID NO: 8790 - DNA, 292 bp, Zea mays
cccatatccgctcccctacctctccagcatcctcccgtctccgtcgtctcgtctccgctcctcacctcgccagccatgggcaagatcaagatcggaatcaacggtttcggaaggatcggcaggctcgtggccagggtcgccctgcagagcgaggatgtcgagctcgtcgccgtcaacgaccccttcatcaccacggattacatgacgtacatgttcaagtacgacaccgtgcacggccaatggaagcacagcgacatcggcctcaaggactccaagacgcttctcttcggcg

SEQ ID NO: 8791 - DNA, 305 bp, Zea mays
agcagatcctcgtgcaagcaaagcgctaccttcctactgtcccgatggcccgcacgaagcagacggcgaggaagtccactggcggcaaggcgccaaggaagcagctggccaccaaggcggcgcgcaagtctgccccggcgaccggcggagtgaagaagccccaccgtttccgccccggcaccgtcgcgctccgggagatccgcaagtaccagaagagcacggagctgctgatccgcaagctgccgttccagcgcctggtgcgtgagatcgcccaggacttcaagaccgaccttcgcttccagagc

SEQ ID NO: 8792 - DNA, 288 bp, Zea mays
atcaatacctgttgatgagcttttcccctcaggagaatttccagagggcgaaatccaacaatacaaggatgacaatctgtggagaacaactagtgaggaaaagagggacctggaacgactgcaaaagccaatatacaactctgttcgccaagcagcagaagttcatagacaggtgcggaaatatatgaggagcatcataaaacctggaatgttaatggttgatctatgtgagacattggaaaacatggtccggaaacttatcaaggagaatggactgcaagctggcat

SEQ ID NO: 8793 - DNA, 279 bp, Zea mays
gggggagcaagcagcagccgtcggtggaagatgtcgtacctgctgccgcatctgcactcggggactgcggtggaccaggccatcctcgccgaggaggagcgcctcgtcatcatccgcttcggccatgactgggacgagacctgcatgcagatggatgaagtgctagcagcagtagctgagaccataaagaactttgcggtcatctaccttgttgacatcacagaggtccctgatttcaacaccatgtatgagctgtacgacccttcgacagtgatgttc

SEQ ID NO: 8794 - DNA, 281 bp, Zea mays
gccatcttcttctcttctctgaattccagtccaagggccggaataccgtcagagcagagggagtgggaggaagaaaaagaaaaaagatggtgaagctcgcatttggaagctttcgcgactctttgagcgccgcgtcgctcaaggcctatgtggccgagttcatcgccacgctgctcttcgtgttcgccggcgtcgggtccgccattgcctactcgcaattgacgaagggcggcgctctggaccccgccggcctggtggccatcgccatcgcccatgcgttc

SEQ ID NO: 8795 - DNA, 285 bp, Zea mays
  unsure (1)..(285): unsure at all n locations
gtgaccgtggcggaacgcngtgggcattcctcccccaagtccatagagtgatagagaatggaggataatctaccagttaatgtccagtaatatcaagaacttgctaagaaagcactaccaaagatgcactatgattatatcaacggaggagcagaagatgaatatacactgagggagaatattgcagcatatagaagaattctgttacggccacgagtccttatagatgtgagcaagatagacatgtcaacaagcttattaggatataatatgccatcgccaata

SEQ ID NO: 8796 - DNA, 288 bp, Zea mays
gatgaacaactacatcgtcgagttgtttctgcgttacattgctcagccgtcggtggccactcgggcttccctgttacttatagccgagtcaagcatctgttcgcttggaccaagctcaagtcatttgttcaacgctttgtccagcagtgtcagatctgtttacaagctaaactgggcagatcttcatatccaggcaagttacagcccttggaggtccctaaatcagcttggcatacagtatcccttgacttcgtggaaggtcttcctcgtttaggaacagctaactgc

SEQ ID NO: 8797 - DNA, 278 bp, Zea mays
aggggcccaaccaggacgccgtcatactctgccagggattcggcatggaggacggcgtgttctgcggggtgttcgacgggcacgggcggtgcgggcagttcatcagcaagctggtgagggactacctcccgttcatgatcctgagccaccggaacgcgctcctcatgggctccgacgacgacgacgacgacccggccttcagcgacgcgtcggcgtccgcgtcgtccacggacggcagcgggcagtcgtcgccggcgccggcgcactgcctggaggag

SEQ ID NO: 8798 - DNA, 279 bp, Zea mays
cggcaccggcgacggcgcctggttcgtggaggccaacgccgcgtgctcgctcgaggaggcccgccacctcgaccaccccatgctcatccccaaggagcagctgctgccggagccctcgccggacgtcaacccgctggacatgccgctcatgacgcaggtgacggagttctcgtgcggcggcttcgtggtggggctcatctccgtgcacacgatcgcggacggcctgggcgcggggcagctcatcaacacggtggcgacgtacgcgcggggcgccacgtc

SEQ ID NO: 8799 - DNA, 280 bp, Zea mays
agcagaggtcgcagatccgtccggttagacgaagccgcccgcacccatggcctccggtgagctcgcctgcacctacgccgccctcatcctcagcgacgacggcatcgccatcaccgtgcgttctctcacgctgcagtgttcttttaatctcagagttttcttttttttgagcggtcgcgtggttatgtggggggtgtttcttgtttgcaggccgagaagatcgccaccatcgtgaaggcggccaacatcaaggtcgagtcctactggccggcgctcttcg

SEQ ID NO: 8800 - DNA, 277 bp, Zea mays
ctagcactagcagtccatcggagcgacgatggtgagaaggacggtgctggcggcgctgctggtggccgccgccctcgccggcgggcgcgggccactcaaggaggggttctacgactactcctgcccacaggcggagaagatcgtcaaggactacgtgaaggcgcacatcccccacgcgcccgacgtcgcctccaccctgctccgcacccacttccacgactgcttcgtcaggggctgcgacgcgtcagtgctgctcaacgcgacgggcggcacgagg

SEQ ID NO: 8801 - DNA, 283 bp, Zea mays
atcaacaggtaggtgtcccagcgtgaaactcaagaagaagcacaagaggaaacaggctggaagcttgttcatggggatgtgttccgtcctccaacctactctgacttgctctgtgtttatgttggcactggcgtccaattctttggcatgctcgtagttacaatgatctttgctgtgttgggtttcctttctccatcaaaccggggaggactcatgactgcaatgcttctagtctgggttttgatgggtctgcttgctggctactcttcttcccgcctctaca

SEQ ID NO: 8802 - DNA, 278 bp, Zea mays
cccactcgtccgcccacgcgtccgctacaaggaaggaagatgtaactgctgatagtaggaagaccaagaatatcagactatatgttaagcgtgtattcatatcagatgactttgatggagaattgttcccaagatatttgagctttgtgaagggtgttgttgactcaaatgaccttccattgaatgtttctcgtgagattcttcaagaaagtcgaattgttcgtataatgagaaaaaggctggtgcggaaagcctttgatatgatacttggcatttct

SEQ ID NO: 8803 - DNA, 276 bp, Zea mays
gctgacatcttcgtgaccaccactggcaacaaggatatcatcatggttgaccacatgaggaagatgaagaacaatgccattgtctgcaacattggccactttgacaatgaaattgatatgctcggccttgagacctaccctggcgtcaagcgcatcaccatcaagccccagactgaccgctgggtgttccccgagaccaacactggcatcattgtccttgctgagggtcgcctgatgaaccttgggtgtgctactggccatcctagctttgtcatg

SEQ ID NO: 8804 - DNA, 273 bp, Zea mays
gcagcggcaacaagctagtagcagatgttttcttcttccacgacgtcctacgcccagggtccgtaatcacgccgatcatcccaccgaccatcaccctaccacctctgctgcctctccgcgaggccgacgcgctcccgttctccaccgggcgcttcgccgacatcctcgccatgttcgcgaagccacggtggagaaggaccctgggcgtaggacgtcgtggaagaagagatacggtcgacgctcgacacctgcgagaacacgcgcccgctccct

SEQ ID NO: 8805 - DNA, 276 bp, Zea mays
gagagggtgggccatgcggagatcccgaccagtttcggtcccgagctgcgcgcctgcctccgatgactcctcgtcaagacctacgaccagttcagggagaacggctgcgaaaactgcccgtttctagagatggacagagagcacgacaacgtcgtcaactgcaccacccccaacttcactggaattatctctctgatggaccccagtaggagctgggcagcccgttggttgagaattggcaggttcattcctgggtgctatacacttgctgtctcg

SEQ ID NO: 8806 - DNA, 84 bp, Zea mays
tccacgtgtccgtccacgcgtccgctcctccacctccggttcgggttcgggttcgtgaggttctccggggttcggtttcgaggg

SEQ ID NO: 8807 - DNA, 274 bp, Zea mays
gggattcagcacgaatagccagccctgcacatatagcaaggacaagtactgcaagcctgcgctgttcactgcactctttagcagtgtgtccttcttgcttggagccatcagctctctggtctctggtttcgttggcatgaagattgccacatatgcgagtgccagaactaccctggaagctacgaagggtgttggcaaggcttttatcactgctttccgctctggcgctgttatgggtttcctgcttgcatcaagtgggcatgtggttctgtac

SEQ ID NO: 8808 - DNA, 279 bp, Zea mays
ctctcttctcctcgcctcgccttggtgttcacgccgtcgctagcgcctgccgcggcgaacttctgtcctccccggcgccgggctcgggtcgtcgtcggccaggaagatggctggcggcttcagggtactgcatctggtcaggccttttctggctttcttgccagaggtgcagagcgcggataggaagataccgttcagagaaaaagttatatacactgttatttccctcttcattttcctggtctgcagccagctcccactctatggcattcattcaac

SEQ ID NO: 8809 - DNA, 282 bp, Zea mays
gtcatcactatgtggtggtaggaagaaggcaagcaaatcaaagaagaagggctcggacaagaagaagtcgcagaagcatgtggacagttctgtgccagtattcaaccttgaagatatagaggagggagttgaaggcgctggatttgacgacgagaaatcacttcttatgtctcaaatgagcctggagaagagatttggccagtctgcagcgtttgttgcctccactctgatggagtatggtggtgttcctcagtccgcaactccggagtctcttctgaaaga

SEQ ID NO: 8810 - DNA, 130 bp, Zea mays
caggcaccactcgcatcgtgtgctcagtcagatccccgtcccgcatttcctaaggccagttggcattgaagacgatgactgcttctgcagctgctggtgtgcagatggtggctgcacgcccttgcatttc

SEQ ID NO: 8811 - DNA, 93 bp, Zea mays
gttggcttctcctccccctccggttcgggttcgggttcgtgaagttctccggggttcggtttcgtgggtagtcggatctatatggcggcgtcg

SEQ ID NO: 8812 - DNA, 291 bp, Zea mays
gcactacggccatcgcactcccctcgctagcccttttcctctgtccccaccttgcccgcgcatcctccgtgcggccgtcgcggtttcttcgctggatctgcgcccgatcaccggcgggttcgcgctattcagcatggctgctgcctcctccgccacctccgtccacgacttcaccgtcaaggatgctagcgggaaagatgtggaccttagcacctataaggggaaggttctgctcatagtcaatgttgcatctcagtgtggcttaaccaattccaactacacagagctgag

SEQ ID NO: 8813 - DNA, 279 bp, Zea mays
ccctccgcgcgcctccgccgacgagaagcatgtcgccactattattgccgggggtagtgatgcagtgacaggccacataatatcgactacgattgggggaaagaatggtgaaccaaagaggaccatcagctatatggctgagcgagttgttggaactggatcgtttggggttgtcttccaggcaaaatgcattgagactggtgaaactgttgcaattaagaaggttctacaggacaaaagatacaagaatagggagttaccaataatgcgatcaattga

SEQ ID NO: 8814 - DNA, 290 bp, Zea mays
ctcagggttctcgtggacgcttccggaccaccccaagctccccaaggggaaaccggtggctgtcgtcgtgctggacggatggggcgaggccaaccccgaccagtacaactgcatccatgtcgctcagactcctgtcatggactcgctaaagaatggcgctcctgagaaatggagactagtgaaggctcatggaacagctgtgggcctcccatctgatgatgacatgggcaacagtgaagttggtcacaatgcacttggtgctggtcgaattttcgcccaaggtgctaagc

SEQ ID NO: 8815 - DNA, 291 bp, Zea mays
cccacgcgtccggaaaaagcttcttcctggatccagccatttggttggtttttggcttttaggggggcaaaagccaaagccaaaattcaaaccaaacacacccagtcattttggcttttctatatacaatgctttaactatgtatttagatatagtgtatatttaagtgcactataaaagatgccccctccatcacctaataaaatgtgttttacctttttagttgatacatgcaataatgaatatatttgtcttacatatgtgtctagattcatcatcatccatttgaac

SEQ ID NO: 8816 - DNA, 286 bp, Zea mays
gatctaaccaaaccccgcgccctcctcaccgtccggcgagctacggactcagcagatcaccgtcgctcgagttgtacctgaaggcgcgcccgtggaaccggccgcgagataagggcggcgggaaggcgggcgacgatgccggtggaaggtcggccatctacttcctcaaccttcgcggggacgtcctcatcaaccgcctctaccgtgatgatgttgggggaaatatggttgatgcgttcagaatgcatatcatgcaaacaaaagaacttggcacatgccctgttcg

SEQ ID NO: 8817 - DNA, 285 bp, Zea mays
cccacgcgtccgactgtttccaagatacttgagctttgtgaaaggtgtggtggattcaaatgaccttcccctcaatgtttctcgggagattcttcaagaaagtcgaattgtaagaattatgcgcaacgcacttgtcagaaagacctttgatatgattgaagagattgcggaaaaggaagataaggaggactataagaagttttgggagagctttggcaagtttgtcaagcttggttgcatcgaggacacagggaatcacaagcgccttgctccattgttgcgctt

SEQ ID NO: 8818 - DNA, 283 bp, Zea mays
tgaaacagggcacactgtacaagtcactaacctctcgagcagagtatctgaaagtgatctttatgagttcttttcgttctctggccctattgaacatgttgaacttatcagatcaggagaatacggtgctactgcttatgtgacattcaaggagcgctttgccttggaaactgcggtattgctcagtggggctactattgtggatcagccggtatgcataacttattggggacaacctgaggagacttttaatttctgggacaggccaacttgggaggttgaa

SEQ ID NO: 8819 - DNA, 279 bp, Zea mays
atcggcgggccccacggtgacgccggcctcaccggccgcaagatggtcatcggcacgtacggcggctggggagcccacggcggtggcgcgttctccggcaaggaccccaccaaggtggaccgcagcggcgcctacgtggccaggcgggccgccaagagcatcgtggccagcagctcgcgcgccgctgcgtcgtgcaggtgtcgtacgccatcggctgccggagggcctgtccgtgttcgtcaactcgtacggcaggggcacggtccccgacgaggaggt

SEQ ID NO: 8820 - DNA, 285 bp, Zea mays
cccacgcgtccgggaagacttactattgtgttacaaagggtgttccatatccatcattgcccaagaaagaaaaaccaaggcgtgtggagttgtacttctcaagttggcgtattagagctgttcaatcgcctaaacatgtgggtcagcaatctgcgtgcgaagtaactttggttcactatgaggacatgggcataccaaaagatgtagccagggttgctgttcgccacggcatgtggggtgctgtgaagaaacttcagtctgggttcagagcgtaccagcaaatga

SEQ ID NO: 8821 - DNA, 275 bp, Zea mays
gctgaagagtctgcacatgcacaagactataattttgatcaccctgatgcatttgatacagagcaacttctagaatgcatggggcagctgaaatgtgctcaacctgtaaatgttcctatatatgatttcaagaagcatcgacggtgttctgaaagctttagaaaggtcaatgcatcagatgtcattattttggaaggcattttagtgttccattgacagagagttcgcaatccgatggacatgaaaatttttgtagacacagatgctgacattag

SEQ ID NO: 8822 - DNA, 285 bp, Zea mays
ggtggacgagaccgtgcagcgtgccaaggcagaaggaaaccttcccgtctacggcttccatgaccccgcgtcctttgtgaagtccattcagaagccacgggtggtgatcatgctcgtcaaggccggcgcgccagttgaccagaccatcgcgacgctcgcagctcacttggagcagggcgactgcatcatcgatggggggaacgagtggtacgagaacacggagatgagggagaaggccatggaggatcgcggcctcctgtatcttggcatgggtgtctctggagg

SEQ ID NO: 8823 - DNA, 85 bp, Zea mays
cccacgcgtccgcccacgcgtccgtgacgagatcgcgctgcagctgccggaactgcggaggctcgtggacgtgctgatggcgtcc

SEQ ID NO: 8824 - DNA, 281 bp, Zea mays
ccagaaaggagggatatttttctgtcagatttggcacgtagggagagtctccaattccacttttcagcctaatgggcaggctccaatttcaagcaccgataagccactaaagcctcaagtgagagccaatggtatagacgtggctactttcgcagttcctagacgcttagagactgatgaaatccctttggtcgtcaatgatttcagggtagctgctcgaaatgcgattgaagctggatttgatggtgtcgaaatccatggagctcacggttacctgattg

SEQ ID NO: 8825 - DNA, 282 bp, Zea mays
gttgtagctgccccgcttcagccacctacactgtcatggaacctgtacttaccattattaaaagtattcgagtatctacctcgtggaagtccatctgaagcatgcttgatgaggatatttgtggcaacagttgaagctatacttaggagagcttttccttctgaaacaccagagcaatccagaaagccaagaagtcaatctaagaatcttgctgttgctgaacttcacacaatgatacattcactctttgttgaatcctgtgcctcaatggaccttgcctcc

SEQ ID NO: 8826 - DNA, 300 bp, Zea mays
gccaaggaaggaagcggtgcaccgaccaagaggactgcgcttcatgatctctacgagctccagggcctgtccccgtggtacgacaacctatgccgccctgtcacagacttgctgcccattatcgccagcgggtccgtggagtcaccagcaacccaacgattttccaaaaggccatttcatcgtccagcgcatatgatgatcagttcaagcagctcatttcggcaggaaaggatgcggagagcgcttactgggaactcgttataaaggatatccaagatgcgtgcaaactttttgagccca

SEQ ID NO: 8827 - DNA, 302 bp, Zea mays
catgcacgccgacaaggctctccaaaccagttacaaggactacgaaccctcaggtgaaactccggtgaggtctgagccgaacgtgccaagcaaaggctcgattgaatcgctgcgagccatgcccgtggagaccatgatgaatgagttccgtgagaaccatccgtatgaacatgaatcgagcaaagaatctaagttatctcagatacctcgcttgccgctcgcgacaatcaactgagacattcacttccctatgtgcagtgtacttttattagtagggcgtcaatttgccggttttggtgtcc

SEQ ID NO: 8828 - DNA, 302 bp, Zea mays
tgtggaagaggagagaagactgaagagaagggaagacatggccgtgacggcggaacggcggcagagatggtgttggagcggcgggcgtacgcgcgggtggggctcctcggcaaccccagcgacgtgtacggcggcagggccctgtccttcgccatcgccgacttttccgccaccgtccacctccgcccttcgcccgagctgctcatccagccgcatccgcaccacgacctcgtcgccttcccctctctccctcaactcgtgagccgtttgcaaagtgaaggatattatggaggcgtccggct

SEQ ID NO: 8829 - DNA, 301 bp, Zea mays
gtcaacgagaaggagtacaagtctgacattaacattgtctccaatgctagctgcacaaccaactgccttgctcctcttgctaaggtcatcaatgacaagttcggtatcgttgagggtctgatgaccactgtccatgccatcactgctacccagaagactgttgatgggccctcatctaaggactggaggggtggaagggctgctagtttcaacatcattcccagcagcactggagctgctaaggctgttggcaaagtgcttcctgtccttaacggaaagttgactggaatgtctttccgtg

SEQ ID NO: 8830 - DNA, 300 bp, Zea mays
gagacacgcgtccaaacatacagctagctagcctctgcatgcctacgtacagcatggccaaggccgagctgctgctcctcgccctcgtggcttcgctctccgtgctgccattctcctccctcgccgtgtaccaggacttctgcatcgccgacctatccgccgccgccacgccgggcggctacccgtgcaagcccccgaaggacgtgaccgccgacgacttccactacggcggcctcgccacccccggcacggcgctgaaacccttcaagatctccctgggctcggccgtcgtcaccacgt

SEQ ID NO: 8831 - DNA, 294 bp, Zea mays
gggtgtgacaaaagccatggggcagatgaaccgacagatgaatctgcctgccctgcagaagatcatgcgggagtttgagatgcaaaacgagaagatggagatggttagtgaagtgatgaacgacgccatcgatgatgccttggagggcgatgaggaggaggaagagacagaggagctggttagtcaagtccttgacgaaattggcatcgatatcaactcagagcttgtcaaggctcctgcaactgcagttgcgaacctcgtcgcagcggggaaagttcctgctcaggctgaagc

SEQ ID NO: 8832 - DNA, 298 bp, Zea mays
atggaacaggcacgacgatcctctccgggatcgaggccaccgtggaccccagcacgcaggtggtgtactcggagagcccggacagcggcgtgctggccgacaagtacgactacgcgatcgtggtggtcggtgagccgccatacgcggagacgttcggcgacaacctgaacctgacgatcccggcgcccgggccgagcgtgatccagtcggtgtgcggggccgccaagtgcgtagtggtcctcatctccggcaggccgctggtggtggagccgtacctgggcgacatggacgcgctggt

SEQ ID NO: 8833 - DNA, 299 bp, Zea mays
ggcaacagcccagccgctgtcgccctcgttccgtagtacggcgccgccagatcgtcagtcaccatgatcatctccaagaagaaccgccgcgagatctgcaaatacctcttccatgagggggtcttgtacgccaagaaggactacaacctggccaagcaccccaagcttgatgtgcccaacttggaggtgattaagctcatgcagagcttcaagtcgaaggagtatgtgagggaaaccttctcatggcagtactactactggtacctcaccaacgatggcattgagcacctccgcagctt

SEQ ID NO: 8834 - DNA, 298 bp, Zea mays
ctctcgccagccaaagacgaccacgccctccgtgctccagccattccccatgatttcgccgacgaatctcctcccggcgcggaagatcacccctgtctcaaatggcggcgcacgacggcgagcccctcttctccctcggtggccgcacggcacggtctactcccttcaggcctccaatctgtgactggtagagggaaggtttccttggcagccatcactctagatgattaccttccaatgcgaacgactgaagtgaagaaccggacatcaacagatgacatcacaaggctgagactaa

SEQ ID NO: 8835 - DNA, 297 bp, Zea mays
gcaaggctaagatgggcgagaaggagtggtacttcttctgccacaaggaccgcaagtacccgacggggatgcgcaccaaccgcgccaccgccagcgggtactggaaggccacgggcaaggacaaggagatcttccgcggcagtagtccccgccgcgtgctcgtcggcatgaagaagacgctcgtcttctacacgggccgcgcgccgccgtaggcaagacgccgtgggtcatgcacgagtaccgcctcgagggcagcctgccgcccaacctccaccgcggggccaaggtgaggtcacc

SEQ ID NO: 8836 - DNA, 298 bp, Zea mays
cttgttgccaaagaattccctcccctagccgccgccgccgccgctcgtctccctgagaggtgccgggaccgaggaactggccgagtactaggtagagaatcggtttttcttgtctcagcccggggtctgctgcgtctggtggtggtgaaggggagaaattcgtgagatctgttccggatcaggcgtgcgagctcgggaatcaggggtttcacacatagcttcgtcgatttgaatttgatgtactaatggagtctaagggtggcaaaaagtctagcagtagtcgttctatgatgtatga

SEQ ID NO: 8837 - DNA, 293 bp, Zea mays
cccacgcgtccgagcgaggccgtcgagaaggccaggcgcaactccgcgccctcatcgccgagaagagctgcgcacccctcatgctccgcctcgcgtggcactccgcggggacgttcgacgtgtcgtcgaggaccggcggtcccttcggtaccatgaagtgcccggcggaactggctcacggcgccaacgcggggctggacatcgcggtgcggctgctcgagcccatcaaggaggagttccccaccctctcctatgccgacttctaccagcttgccggagttgtggccgtcgag

SEQ ID NO: 8838 - DNA, 291 bp, Zea mays
atggtttgaaagctactatccagattgtggatctacaagtctttgcatcacctcgcattactctgaagccattggtgcctacatttccttgctttgcaaaaatccttgtctcactcatggagaagccacatgttgactttgggctaaaacttcttggagcagatgtaatggctattcctggtctttacagatttgttcaggagaccatcaagaaacaagtagcaagcatgtatttgtggccgaagacgctagaagtacctataatggatccctcaaaagcatcaaaaaggc

SEQ ID NO: 8839 - DNA, 292 bp, Zea mays
cacacgcgtccgcaaaagagctcgtgaatggagacctgatataacatgcaatgacccagaagatatatctcaggacggtagcaggctttgggctattgacaaacccaatattgcacaaccccctcatggatgggaaaggcagattaggataagaggtgaagggggtaccaaatttgctgatgtatactatacctctcctactggaaggaaacttaggtctctggttgaagtcgataggttcctccaagagaatccagagcatgttgcacagggtgtaactttagctcagttt

SEQ ID NO: 8840 - DNA, 288 bp, Zea mays
ccctttgcaagtatagtctctctgctaagcgacggagctcaagctagtctcggcggctctagaagacgatgggcaaggacgacgtgatcgagagctgcgctggcggcggcgagttcgctgccaaggactacacggaccctcccccggcgccgctgatcgacgcggcggactggggtcctggtcgctgtaccgcgccgtgatcgccgagttcatcgccacgctgctgttcctgtacatcacggtggccaccgtgatcgggtacaagcaccagacggacgcgtcggcgtc

SEQ ID NO: 8841 - DNA, 293 bp, Zea mays
ggctcctatctggtataggacggagctgagcttctagcaacgtacagtgtatccgccatgagtcctttcggggcggtgatcacgccagaaaccctcaagtacatgtccaagtaccagggacgtgagatcacgcaggtggactgcgcacgggaggcgatgaggctgatccacgcggaagacaagaacctcaaggccgaggactcagcgtgggagctgaagaagaagttcggcaacggcgtgagcaccatggtcctcgtctacaacgccaccggggccagcctgagcctggtgga

SEQ ID NO: 8842 - DNA, 293 bp, Zea mays
gaagcgagatgagcggtgaggcggcggccgtaggcggaggcgaaggagaggcgaatggcatcccgccgaacgtcaccatctatatcaacaacctcaacgagaagatcaagctagaagaacttaagaagtccctaacagccgttttttcccagtttgggaaaattcttgatgtgcttgctttcaagactttgaagcataaaggtcaagcttgggttgtcttcgaagatgtcgcatcagctactgaggctctgaagaggatgcagggctttcccttctatgacaaaactatgaga

SEQ ID NO: 8843 - DNA, 294 bp, Zea mays
caaacacactcgaaggcagcgaacccgtagccttcccttccctccaatcgatcacccgcttcgatccgctagctagctagcagcgcgatggcttccctcaccgtgtccacgaagaccgctgcggccggcggcaacaagcagcgcgagggtccgtaggtcatcacgggcgcggaggcctgcttcgcgcactccaagcagatgctccaggcgctgggcttcccgggcggcgtgatgccgctgcgggggctggaggagtgcggctgggtgcgcgagaccgggttcgtgtggatgcgg

SEQ ID NO: 8844 - DNA, 311 bp, Zea mays
gttgcatcctgttaattcaacatccgatgttattgagttaatgagaataggacatgcaaacagagcagtgggttcaacaatgttgaatgaaagaagcagcagatctcacagtattgttaccatacacattcgaggtgtagatttgaaaacaggagctactctgtgtggtgcactacatcttgttgatcttgctgggagtgagagagtgaaccgatcttctgttacagaagaatgctcatgtaccctaccggaacagcaaacttacacaagtcctacagagttctttgggcggccatgcaaaaaccttgatg

SEQ ID NO: 8845 - DNA, 310 bp, Zea mays
cgtctccacgcaaccatgtcgagaaggaagaccagggagcccaaggaggagaacgtcactcttggacccactgtccgtgaaggagagtatgtctttggtgtcgctcacatctttgcatccttcaatgacaccttcattcatatcactgatttgtctgggagggaaactctggttcggatcaccggtggcatgaaggtgaaggctgaccgtgacgagtcgtcaccttacgctgctatgcttgctgctcaagacgtcgcacagcgctgcaaggagcttggcattactgcactgcacattaagcttcgtgcca

SEQ ID NO: 8846 - DNA, 312 bp, Zea mays
cagacgctggtgttcaagtgacgcgatgggtgctcgacaagctcaaggctgagcgtgagacaggtatcaccattgatattgctctagctgaagtttgagaccaccaagtactactgcacggtcattgatgcccctggacaccgtgacttcatcaagaacatgatcactggtacctcccaggctgactgtgctgtccttatcattgactccaccactggtggttttgaggctggtatctccaaggatggccagacccgtgaacatgctctccttgcgttcacccttggagtgaagcagatgatttgctgctgc

SEQ ID NO: 8847 - DNA, 310 bp, Zea mays
ctgcctcctcgtctcctcggtctcccctccctgtcttccagagacacagagcagggcgctcttcggtcggaggagaagcgcgaccacgaccatgggctttatctcgttcgtcggccgggttctcttcgcctccctcttcctcctctcggcctaccaagagttcattgaatttggaaatgacggtggacctgcagcgaagaccttgaagccaaagttcaatttgttcgtcaagctagtgtccaagaatactggactggggctgccgcatatggatataaaaactgtcattgcagctaccatgtttcttaaa

SEQ ID NO: 8848 - DNA, 309 bp, Zea mays
actacatacatcaccaactaggatggatgtctcgacagcaaatagctagcaatggagaagtacaccagagccctagcgtcattgctcaccatgctggtgctggcacctctcctcgccatggccaccgacccagaccccctgcaggagttctgcgtcgccgacctcaacggcaagccatcagtgaacgggtacccatgccagccgccgtcgtcggccggcgaccagttcctcttgtcgagcaagatcgccacgggaggcgaccccctggccaacccgaacggctccaacgtgacggagctggacgtttcc

SEQ ID NO: 8849 - DNA, 253 bp, Zea mays
aaactagatacgaatgctcctactgtcagctgggcagatcctaagaatgccaatgaagctacatctactgcacaggttcctttgagcactacatgacacaatgctaccttttatgtttcttgtattatgttactttatatggatgtgcgtatttgtctttaggttaaatctctatatgtcaaaaacctccccaagactgttactcaagagcagctgaaaaagctgtttgagcatgttggagaaattaccaaag

SEQ ID NO: 8850 - DNA, 305 bp, Zea mays
cgcggggcatcgacctcaccatcctctccgcccagatcacgcaatcaacggacttcgcagagcttgtgagccagcagccatggctgtcaaccatgaagctagtggtgaagcccgatatgctgttcgggaagcgtgggaagagcggcctcgtggctctcaacttggatttcgatcaagtcaaggagtttgtcaaggagcggctgggggttgaggttgagatgggtggctgcaaggctccaatcacgaccttcatcgtcgagccatttgtgccacatgatcaagagtactacctttcgattgtctca

SEQ ID NO: 8851 - DNA, 305 bp, Zea mays
gggacaccatggctccgatgaagctgtacggggcggtgatgtcgtggaacgtgacgaggtgcgcaacggcgctggaggaggctggctccgactacgagatcgtgcccatcaacttcgccaccgccgagcacaagagccccgagcacctcgtccgcaacccgtttggtcaggttccagctctgcaggatggtgacttgtacctcttcgaatcacgcgcaatctgcaagtacgctgctcgcaaaaacaagccagagctgttgagggaaggaaacctcgaggaggcagcaatggtggatgtttggatc

SEQ ID NO: 8852 - DNA, 305 bp, Zea mays
agatcacacacactcgagaactccatttcgatctcatttgaaatcaacccatcctcgtttcctccgtctagcagcctctcaccctcatggccaagatcaagatcgggatcaatgggtttggcaggatcggaaggctggtggccagggtggccctgcagagcgacgacgtcgagctcgtcgccgtgaacgaccccttcatcagcaccgattacatgacctacatgttcaagtatgacactgtgcacggacagtggaagcaccatgaggtcaaggtgaaggactccaagacccttctctttggtgag

SEQ ID NO: 8853 - DNA, 306 bp, Zea mays
cccacgcgtccgcccacgcgtccggttttaagacctacggcgatcgcgtaaagcactggtttacattcaatgagccaaggatagtagcgctacttggctatgacacagggtcaaatcctcctcaaaggtgcaccagatgcgctgctggtgggaattcagcaaccgaaccttacatagttgctcataattttctcttggcacatgctactgcagttgcaagataccgtacgaaatatcaggctgctcagaagggtaaggtcggaatagtcctggacttcaactggtacgaggctcttacaaactcac

SEQ ID NO: 8854 - DNA, 304 bp, Zea mays
ttgctgagaatgtgaaggagttgattaacccagatataacagtgacgatgaccgagaacactcctgatgatccccgccagaggaagccggacatcaccaaggcaaaggaagttctagggtgggagcccaagatcgtcctgaaggacggcttggtgctcatggaggatgatttccgggagcgcctggccgtgcccaagaaaaccaaggcctaaactgccctgcggtgggcgaagaatatccacgggggagcatactcatagttggcttgtcattattcgtggccacatttcattacggaatttga

SEQ ID NO: 8855 - DNA, 304 bp, Zea mays
gggtatgcgaccgatgagacccctgagttgatgcccctcagccatgtccttgccaccaagctaggtgctcgtctcaccgaggtccgcaagaacggaacctgcccctggctcaggcctgatgggaagacccaggtgacagtcgagtaccgcaatgagggtggtgccatggtccccatccgtgtccacaccgtcctcatctccacccagcacgacgagacagtgaccaatgatgagatcgctgctgacctgaaggagcatgtcatcaagcctgtcatccctgagcagtaccttgacgagaagacca

SEQ ID NO: 8856 - DNA, 326 bp, Zea mays
agccacgcgtccgcggacgcgtggggttttggctgacttcttgctaagcatggtgcggtctgctccatccgagaatggttgggtagaaatacaagtcagaccaaatgtaaaacagaattctgatggaacaaatacagaacttttcatattcaggtttgcctgccctggtgagggcctccctgctgacgtcgttcaggatatgttcagcaattcccaatggtcgacaccagaaggcgtatgacttcgcacatgcatgtacgttctaacacgtatgggtggcgaggtccaatacatcagagagtcagagcggagtttcttcctcatcg

SEQ ID NO: 8857 - DNA, 318 bp, Zea mays
cgtccctcgccttcgccgccgaatccgagactccgatctcgggttcaccgcagcgcacagagcagccccgactcccggcccgatccgcgctctcctctccgtcgcttcagtcatggcaggaatggcacctgagggttctcagttcgatgctaagcactatgattctaagatgcaggagctgctgagcaccggtgagactgaggagttcttcacttcatatgatgaagtttttgagagttttgatgatatgggcctccaagagaatcttctgagaggcatttatgcttatggttttgagaagccatctgcaattcagca

SEQ ID NO: 8858 - DNA, 324 bp, Zea mays
acgagaagccgccgcaccagcaatcacagcagcccggagaacgccctggtccaacaagatgcagatcttcgtgaagacgctgacagggaagaccatcaccctcgaggtcgagagcagcgacaccatcgacaatgtcaaggccaagatccaggacaaggaagggatcccgccggaccagcagcggctgatctttgccgggaagcagctggaggatggccgcacccttgcggactataacatccaaaaggagtctacgctccacctcgtgcttaggctccgcggtggaatcattgagccctctctgcaggcgctcgctcgcaagta

SEQ ID NO: 8859 - DNA, 320 bp, Zea mays
cgctcaccctctcaccaaatccttctcctccgcgccgccacagccgggcgcgcctctcgatcgaggtccaggagatatgcctcgttatgatgatcgccatgggaatacacgcttgtatgttggaagattggcccctcgcacccgttcccgcgacctagaatatcttttcagcaaatatggaagaatacgtgaagtggagttgaagcgtgactatgcattcattgaattcagtgacccccgtgatgctgatgatgcgcagtacaacctagatggcagggaagtcgatggaagccgtattattgttgaatttgctaaaggag

SEQ ID NO: 8860 - DNA, 301 bp, Zea mays
gtcttcctgtgatgtcttcttgtctgcccacgcctagtttctctgtcgattcctattcgtcgtctcttcagggctggtgctcactgctgcgccgttctgttaaccgaaacaagaactctgtgtattcctgtaccgagctgtgcatgttttttttttctttccatcgtggagaatttaagttattatccgtttgctgcaaggtttgccgtctcattttatgcgttgggatgttggcaagaaagggcagatgtcatgtgagaatttaagttaagtgaaatcgattcagggttttcttggtttc

SEQ ID NO: 8861 - DNA, 317 bp, Zea mays
gagccatcttgtcaaccaatcacaaagatggagtttgagtttgaaaggagaagagtgacaaaagaagacattagggagctgatattccgtgagatattggaatatcatccacaactgctcaaagactatatcaatggcacggagaggacaacctttctgtacccaagtgctgtcgaccaatttaggaagcaatttgctcatcttgaagaaaatagtggaaacggacctgtgattccaatggaaagaaaacatacttctcttcctaggtctactattgttcactcatctccaattcctgtcaaggaacaaccccgtat

SEQ ID NO: 8862 - DNA, 311 bp, Zea mays
cagacggtgggcgcgcagaacaccgtcggcgtccaggggatccatgctgtgccggagaagttcgtgggagagcagctcaggtcggttctctcggacatgtcggcggacgtggtgaaaacagggatgctcccttcagctggagtagtcaaagttctgtgtgagagtcttaggaagtttccagtcaaagctctagtggtggatccggtcatggtgtccaccagcggtgatactctttcaggaccatctactctcgctacatatagggatgaactattttctatggctgatatagtcactccaaatgtgaaaga

SEQ ID NO: 8863 - DNA, 315 bp, Zea mays
gcactacggccatcgcactcccctcgctagcccttttcctctgtccccaccttgcccgcgcatcctccgtgcggccgtcgcggtttcttcgctggatctgcgcccgatcaccggcgggttcgcgctattcagcatggctgctgcctcctccgccacctccgtccacgacttcaccgtcaaggatgctagcgggaaagatgtggaccttagcacctataaggggaaggttctgctcatagtcaatgttgcatctcagtgtggcttaaccaattccaactacacagagctgagccagttgtatgagaagtacaagga

SEQ ID NO: 8864 - DNA, 318 bp, Zea mays
caagtatccatccttattgagtacagtgttgatccatggactcggaaggagttgtagcagcaaaggtggcagatgagagtactaaaccggcaatccaagaagacggcgccgagagcaaggccgggatgactgatctgctgatgctgaccgacaagtcgcagctgcaggcgctggcgatgctgctgcggaacaacgaggagctcatgatgagccaggcgatcaagtcggagacggagcgcattgagtacctcaagacggtgagcgactgctacacgcggacgatgaagctcctcgacgattccatggcggccaggacca

SEQ ID NO: 8865 - DNA, 324 bp, Zea mays
ggacccctccccgacccgaaggactagcaggcacctccgccggcgccgctgttcgaggcggaggagctgacgtcgtggtccttctaccgggccgggatcggcgagttcgtgggcaccttcctgttcctgtagatcaggatcctgactgtgatgggcgtgagcaagtcgtccagcaagtgcgccaccgtaggcatccagggcatcgcgtggtccttcggcggcatgatcttcgcgctggtgtagtgcacggcgggcatctccggcggcgagatcaacccggccgtcacgttcggcctcttcctggcgcggaagctgtcggtcacg

SEQ ID NO: 8866 - DNA, 313 bp, Zea mays
gcctgcgccgccgcttcgttcgtgtggaggggagaagacaggaaatggcggcgactgaaggcgtgctcttggggatgggcaaccccctcctcgacatctccgccgtcgtcgatgacgccttcctgacaaagtatgacatcaagctgaacaatgctattctcgctgaggagaagcacttgcctatgtatgacgagttggctagcaagagcaatgttgaatatattgccggaggagccacccagaactctatcagggttgcccaatggatgcttcaaactcctggtgcaacaagttacatgggatgcattggaaa

SEQ ID NO: 8867 - DNA, 314 bp, Zea mays
caattctaagccagacggggcacaggaagaggagagcctaaaaccctaaccccccgaatcggatccggccgccggagcgcggaaccccaccccggccgccatggagatgggagggatgagcgacgctgagcggctgttcttcttcgagatggcctgcaagaactccgaggtcgcgtacgagcagaaccccaacgacgccgacaacctgacgcggtggggcggcgcgctgctggagctgtcgcaggtccgaaccggccccgacagcctcaagcttcttgaagatgcggaagccaaactggaggaggcacttcaaa

SEQ ID NO: 8868 - DNA, 312 bp, Zea mays
ctcttccgtggccaggatgttcccaagtttgtaatggacgaggtctatgacatggagctctacgagtggaccaaggtggacatctctgatgaggcccagaaggagcgtgtcaatgcgatgattgaggaccaggagccctttgagggcgaggccttgcttgacgcgaaatgcttcaagtgagtgtccttgcctggagacagaactcttccataggcaaattcaagggctaaacagttctgtctccaggcaagcacactcacttgaatttgcctatggaagagtttgcccttttactagtgtcgatgttgatct

SEQ ID NO: 8869 - DNA, 307 bp, Zea mays
cccacgcgtccgaacggagttgctaagtactctgcgaacgtggagatgtgtaggctcacggagcaagttgtgttctcggacccataccgtgtttccaaatttaatcggtggacctcgccttatctcgacaaagatgctgaggcagttcgcgaggatgatgagctcaagttggaagtagctgggctgaaatcgatgtttatcgagagagctcaagctctgattcatggagatctccacactggttctatcatggtgaccgaagttcaactcaagtcattgatccagaatttgggttctatgggccaat

SEQ ID NO: 8870 - DNA, 310 bp, Zea mays
cggaccgtgggcccagcacaaatcaaccgcccgccgcctccgctcccctcccgtcccgaatcagccgccgcggtgcccaatccggccgatcccccctcctatccaccgcagaggcggcgcctctggggcctaccccgatgtatagcaacttcaaggagcaggcgatcgagtacgtcaagcaggcggtccaggaggacaatgccggcaactacgtcaaggcgttccctctctacatgaacgcgctcgagtacttcaagacccatctcaagtacgagaagaaccccaagatcaaggaggccatcaccgccaa

SEQ ID NO: 8871 - DNA, 314 bp, Zea mays
cgatcagctagctagctgctgccaagagctagccaggggacagagcagcagcttgaagttggtcaccaatgctaaggatgggccgcgccacccacagcaggtgtgttgcgcttcgtcagggcgttcgccctctgcgttggctacggcatgcctcctcctggcggccggcatgccctcgcctgtggcggcgcaggacccgtcgaagctgagcctgcagtactactccaagacgtgccccaacgtggagcacgtcgtccggacggagatggagtgcgcggtgcgcgcgacacgcgcaacgccgcgctcatgctccg

SEQ ID NO: 8872 - DNA, 313 bp, Zea mays
gagattggctggatttacggatcgatcacagaggatatcttgactggatttaagatgcactgccatggctggcggtctatttactgcatcccgaagcggcctgcattcaaaggttctgcgcctctgaacctttccgaccgtcttcaccaggtccttcgctgggcccttgggtccgtcgaaattttcttcagcaagcactgcccactttggtacggatacggcggcgggctaaaattcctggaaaggttttcttatatcaactccatcgtttatccctggacgtccattcctctcctggcttactgtaccttgc

SEQ ID NO: 8873 - DNA, 313 bp, Zea mays
gcacaagaagagctcatcaaagtggcaaagcattatggagtcaagttgacaatgtttcatgggaggggtggaacagttggcagaggaggtggtccaactcatctggccatattatctcagccaccagacacgatacatggatcacttcgtgtaacagttcaaggcgaagttattgagcactcctttggagaggagctcttgtgcttcagaactttgcaacgctacactgcagctactcttgagcatggcatgcatcctccgatttcccctaagccagaatggcgtgctctgatggatgacatggctgttgtag

SEQ ID NO: 8874 - DNA, 316 bp, Zea mays
atccccgtcagtcatggcagcggcacaggcggaggcgcggtgcgtgcgctgtcccagaaggagcaggacatacagatgatgctcgccgccgacgtccaccttggcaccaagaactgcgatttccagatggagcgctatgcctttaagcgccgcaccgacggcatctacatcatcaaccttggcaagacatgggagacactgcagcttgcagcgagggttatcgttgccatcgagaacccgcaggacatcatcgtccagtccgcccgcccctatggccagcgtgctgtcctcaagttcgctcagtacactggcgctc

SEQ ID NO: 8875 - DNA, 310 bp, Zea mays
gctgcgccaagagttccatgttgctgctcagaactgccgggtgaagaagggaggtgctttcactggtgaagtcagtgctgagatgctcgtcaaccttggtgttccctgggtcattcttggacactctgaaaggagagctctgctgggagaatcaaatgaatttgttggagacaaggttgcgtatgccctgtctcagggactaaaggtcattgcatgtgttggtgagacccttgagcagagggaggctgggtctaccatggatgttgttgctgcacaaacaaaagcaattgctgagaagatcaaggactgg

SEQ ID NO: 8876 - DNA, 309 bp, Zea mays
cccacgcgtccgctcgttccatttccccatctcccagatccaattcgcgagttctccctcctctgcggccatggcgctctctgtggagaagacctcgtctggacgggagtacaaggtcaaggatctctcgcaggcggacttcggccgcctcgagattgagctggccgaggtcgaaatgcccggcctcatggcgtgccgcgccgagttcggcccgtccaagcccttcgccggcgctaggatctcggggtctctccacatgaccatccagaccgccgtcctcatcgagaccctcaccgcgctcggcgccga

SEQ ID NO: 8877 - DNA, 313 bp, Zea mays
cgtcgccgtcctctcccgttcgcaacgccacgctccccaccgccgaaatggccccgaagcgaggtggcagggcaccggtgccggccaagaagaagacggataaagtgacgaaccctctgttcgagaaaaggccgaagcagttcggcatcggcggcgcgttgcctcccaagaaggacctgcaccgattcgtcaagtggcccaaggtcgtgcgcatccagcgccaccgtcgcatcctcaagcagcgcctcaaggtgcctccggcgctcaaccagttcacccgcaccctcgacaagaacctcgctaccaacctgtt

SEQ ID NO: 8878 - DNA, 310 bp, Zea mays
gcgcgcgcggctgcagagtgcagacgacgacgtacaccatggcgcggcggtccctggccctgctgctcgcgtcgtcgctcgccctcatgtcggccgccgtcgcatcggcggactcgtggctctacgacaagttcaacacggacggcaccgtccgcacccagtacgacgcgtcggggcaggaggtggcgatgctcagcctggaccgcagctccggcgccggcttcaactccaaggagcagtacctgtacggcgagttcagcgtccagatgaagctcatccccggcaactccgccggcaccgtctcgtgctt

SEQ ID NO: 8879 - DNA, 311 bp, Zea mays
aggaaatggttgagttcatggagaaggtagcgaaaactgttgactcggaggagctcactgtggaggagcgcaacctcctgtctgttgcatacaagaacgtcattggagcccgccgtgcctcatggcgcatcatctcctccatcgagcagaaggaggagggtcgaggcaatgaggaccgtgtaacactcatcaaggactaccgtggcaagattgaaactgagctcaccaagatctgtgatggcatcctcaagcttctcgaatctcaccttgtgccgtcttccaccgctcccgagtccaaggtcttctatctc

SEQ ID NO: 8880 - DNA, 305 bp, Zea mays
aggaccgtggtgaccacgcgtccgcccacgcgtccgagaagatcaaggactccaacccaatcgtcgagatggacggtgatgagatgaccaatgtattctggcagtctatcaaggaacagcttatctttccatttctggacctggacatcaagtactatgacttggggatactgcaccgtgacgcaactgatgacaaggtcacagtggaggctgcagaggctactctcaagtacaatgtggccattaagtgtgcgaccattactccagatgaaactagggttaaggagttcaatttgaagcacatg

SEQ ID NO: 8881 - DNA, 310 bp, Zea mays
gacgcgccgtcactgaatcctcagatcacggctagccgtaatcacgccactctgctgactcccggcgagcagtgtaacattttccttcagccatgggcaaggagaagactcacatcaacattgtggtcattggacatgtcgactctggcaagtcgaccaccactggccacctgatctacaagctcggcggtattgacaagcgtgtgattgagaggttcgagaaagaggccgcggagatgaacaagcggtcattcaagtatgcctgggtgcttgacaagctcaaggccgagcgtgagagaggtatcacaat

SEQ ID NO: 8882 - DNA, 303 bp, Zea mays
gcagcacgagcgctcaccgtctctgtctcctcctcccacaaaaagcagctgaattgctccgtcggcgtcatgtgtggcatcttagccgtgctcggatgctccgactgctcccaggccaggagggctcgcatcctcgcctgctccagaaggctgaagcacaggggccccgactggtcgggcctctaccagcacgagggcaacttcctggcgcacagcggctcgccatcgtctccccgctgtccggcgaccagccgctgttcaacgaggaccgcaccgtcgtggtggtggccaatggagagatct

SEQ ID NO: 8883 - DNA, 304 bp, Zea mays
cggaccgtggggcgaggtggaaggtcatcagccagagaaaccattggcagggtggctgcaggagctcttgcaaagaaaattctaaagctcaaatcatcagtggagatcttggcatttgtttctaaagtgcaccaagtcgtacttccagaagatgcagttgattatgagactgtaaccttggaacatatagagagcaacatcgttagatgtcctgatccagaatatgcagagaagatgattgctgccattgatacggtacgagttagaggagattcaattggtggggtcgtcacatgcattgcaa

SEQ ID NO: 8884 - DNA, 306 bp, Zea mays
cctaagaaaggtcaccacgtcatgtgataggtaccacagttgtgaagatgatgcgcggaaggccaccgcatcacatagagctgaaggtaagcaggacatgaagaagatcagcatatcatatggatctcatcgaagtggggagcactcattgagaaccaccagtacaagagagaaaggtgacacaagtaaaggggacatccatcaccatgaccatgctgccgttcacatccacagcagcggcaacaagctagtagcagatgttttcttcttccacgacgtcctacgcccagggtccgtaatcacgcc

SEQ ID NO: 8885 - DNA, 302 bp, Zea mays
gcagaaggcgctgaaggccatctccgtgctcgtcggcatcgacgccgtgtcggtggacatggcggcgcacaagatgacggtgatcgggacggtggacccggtgcaggtggtgagcaagctgcgcacgaagtcgtgggcggcgcacatcgactccgtcgggccggccaaggagcccgagacgatggaggagaggacggacagcggcggcgagaagaaggacggcggcggtggcgagggcaagagggaggaaggggacgggaagactgacggcggcggcggtggcgacggcaagagagacggcg

SEQ ID NO: 8886 - DNA, 300 bp, Zea mays
gttccctcctctgcaccccccatcctcggacatcctcgcctgcagcagaccctcctctggtgcgcgttcgccaccggcgagatgtcgaagaaaatcgtggtgaagctgcacctgcaggacaacaaggacaagcagaatgccatgatggctgtctcggcgctcaccggcatcgacgagatatccgctgacatggcgtcgcacaatatgacggtggtcggcatggtggaccccgtgagcgtggtgagcaagctgcgcaaggcgtcgtggtcggcgaccatcgagtccgtcggcccggccaag

SEQ ID NO: 8887 - DNA, 308 bp, Zea mays
gaagcaccacttcgacgggcacagccaggtcaaggacttcatccagacgctgctcctctacggcggctacaacgagctcgccgacatcctcgtcaacctcacctccctcgccaccgagatgggccgcctcgtctccgagggctacgtcctcaccgtgctcgcccccaacgacgaggccatggcgcgcctcaccacggaccagctcagcgagcccggctcgcccgagaacatcctctactaccacatgatccccgagtaccagaccgaggagtccatgtacaacgccgtgcgccgcttcggcaaggtgc

SEQ ID NO: 8888 - DNA, 310 bp, Zea mays
ctcaagcgactacagcaaacttgctgagactgcagctgatcatggggtcgacgacatggttggcggccgtgctggcggcactcgtggtcgccgcctcctcaacggtggcatcacacgcctcgctgccggggaaacttgaggtcggtttctacgagcactcgtgcccacaggcggaggacatcgtgcgcaacgccgtccgccgcggcatagcccgcgagcccggcgtcggcgcggggctcatccgcatgcacttccacgactgcttcgtccggggctgcgacggctccatcctcatcaactccacgccggg

SEQ ID NO: 8889 - DNA, 304 bp, Zea mays
caactgctcttctgccgtctagtcctttgtactgatcggcgctccggtcggctcctcgcgcttgcgggttccccgtccccaccccacgccgggggcaagagatggagaacgcggtggtgctccgggagtggtttgaccgcgtcgacgccggccgcaccggcaacatcaccgctgcccagctccagggcgcgctcgctgtcggcaacctcaacttcaccatctccgtcgtgcagcagatgattaggatgtatgacttcgatcggaatggcaccatgaacttcgaagagtttctggctcttaacaa

SEQ ID NO: 8890 - DNA, 192 bp, Zea mays
gatgatatcaaaaccatctacagtgagactggtgctggggtgacagtgccccgtgctgtttttgttgacctagaacccactgtcatcgatgaggtgaggactggcaactaccagccaactcttccgcccagagcagctaatcagtgggaaggaggatgccgccaacgactttgcccatggtcactacgccgt

SEQ ID NO: 8891 - DNA, 306 bp, Zea mays
cgaacaaaccacacaccccacctaccccggccggaccggcaggcagcacaacatggacctcgccctcctggagaaggccctgctgggcctgttcgccgcggctgtggtggccatcgccgtggccaagctgagcggcaagcggtaccgcctcccaccggggcccccgggcgcccccgtggttggaaactggctgcaggtgggcgacgacctgaaccaccgcaacctgatggccatggcgaacgtgttcggcgacatcttcctgctgcgcatgggcgtgcgcaacctggtggtggtgtcgaccccgga

SEQ ID NO: 8892 - DNA, 305 bp, Zea mays
cccacgcgtccgcccacgcgtccgaccacgcgtccgcgtcgcatcccatcccactaccacccatctcgtcgtccgccgattcgatccggttcttccaacccagcggctgtgatggcgacgaagaggagcgtgggcaccctcggcgaggcggatctgaaggggaagaaggtgttcgtgcgcgccgacctcaacgtccctctcgacgacgcccagaagatcaccgacgacacccgcatccgcgcctccgtccccaccatcaagttcctcctcgagaagggcgccaaggtcatcctcgccagccacct

SEQ ID NO: 8893 - DNA, 301 bp, Zea mays
gcgatggagtgctcaaggtggcaagagtaatgtctactttgccaaaacactagatgacagatttgtgataaagcaagtgacccggacagaattagattcatttgaggattatgctgctgattatttcaaatatttgatagactctgtatcatctggaagcccaacttgcctcactaaagtccttggtctttatcagatcattgccaagaatttgagagatgggaaagagctgaagatggatgtaatggtcatggaaaacctatctttcaagagaaaggtatcaagaatatatgacctaaag

SEQ ID NO: 8894 - DNA, 300 bp, Zea mays
cggacgcgtggggacacacaccgctgcttcaagaaaccaccgagagcccaaccgcacaggcaggagagagagcagggagccagggacagtagcgtggggccgacgagcaacgatggatgggaaggaggaggacgtgcgcctgggcgccaacaagttctcggagcgtcacccatcggcacggcggcgcagggcgcggcgccggggacgacgacaaggactacaaggagcccccgccggcgccgctgttcgagcccggggagctcaagtcctggtccttctaccgcgcgggcatcgccgagt

SEQ ID NO: 8895 - DNA, 300 bp, Zea mays
gcccagcagcgcggcgatccgcctcgatccggaatggagcgcgtcttctccatggaggagatccccaacccctactgggccccgccgcaccctcaaccggcggccggcggcgctgttgctgcaccaggtggagtacgaggagcgggggacgcggcgggcgcgatgaaccggtgcccatctgagtggtacttccagaagttcctcgaggaggccgtgctcgacagtccgggtcccgtcgccggcgtgggtagaagcagcggacaagctggagttgaggcggcggagagcaagccgctgggc

SEQ ID NO: 8896 - DNA, 299 bp, Zea mays
ccacgcgtccgacaagatatgcaatgtcatcggtagtccagatgagcaatcttggcctcaaggattgtctcttgcagaagcaatgaagtatcagttcccacagaccaaaggcagtcaattgtctgaggtgatgacaacagctagtagcgaggcaattgatctcatctcatcactatgctcatgggatcctagcaagagaccaaaggccacagaagtcctccagcataccttcttccagggttgtacatgtgttccgcttcctgtccgtcggaaatcttcatcgcttcctaaaacacctc

SEQ ID NO: 8897 - DNA, 303 bp, Zea mays
cccacgcgtccgggcagggtcgttggacggcggcaaattagatacattagaggaagctcttgtctatctactgatgaatataatgcttttatgaatatatttgagagaggctctcttctctactgcaatatgtcctttgatgcactgctaagtgttcgaaagcaactcgaagaatttggattcccttgtaaagctgtcaatgatagtctatggctacagatgcttctgtgtcacagggtgcaagcgattgttgctgatacttgcaggaattgttgccttatgaatagttcttgtgcttgcaag

SEQ ID NO: 8898 - DNA, 297 bp, Zea mays
ctacaatcctaaaaccatctgcttcagccttcagctagccccaagtttagtcggccgatcgatcactgaagtagtaatggcctccgccaacagctggaccctcgagatcgcgtcgccggtggccccgcagcgcctgttccgcgccgccgtgatggactggcacaccctggcgcccaaggtcgcctcccacgtcgtcgccagcgcgcaccctgtggagggcgacggcggcgttggcagcgtcaggcagttcaacttcacctcagtcatgccgttcagcttcatgaaggagcgtctcga

SEQ ID NO: 8899 - DNA, 295 bp, Zea mays
ccacgcgtccgacaagatatgcaatgtcatcggtagtccagatgagcaatcttggcctcaaggattgtctcttgcagaagcaatgaagtatcagttcccacagaccaaaggcagtcaattgtctgaggtgatgacaacagctagtagcgaggcaattgatctcatctcatcactatgctcatgggatcctagcaagagaccaaaggccacagaagtcctccagcataccttcttccagggttgtacatgtgttccgcttcctgtccgtcggaaatcttcatcgcttcctaaaaca

SEQ ID NO: 8900 - DNA, 293 bp, Zea mays
cccacgcgtccggattttactccaacacatgcccagtacgactctgaagacacgttgtccactgggacccatacacccgaagtgacagagtcgaggcaccgcaaccacaaccacaaccctgaagctaaagtttcagcaggaaactcggataggcgagtaaacgctgtgaaccacttagcgaaggagtttgaagacagacggcaggtgttcgaagacgacgcgggcttccttgtcgcagtcaggtctggccaggttggttcaaatacgaacccagacgaggaactccggaagct

SEQ ID NO: 8901 - DNA, 295 bp, Zea mays
acactcacacagcaaataccccacaaggccactccaaagacctagtagtggaaccgaagatgttcgggaacatcggaaagatccccatcatcggcgacctgacgggcagcaacaagaatgcgcacctcaagggcaacgtggtgctcgtgcgcaagaccgtgctcggcttggacgtcaccagcatcgccggctccctcctcgacggcatcggcgagttcctcggccgcggcgtcacctgccagcttatcagctccaccgtcgtcgaccctaacaacggcaaccgcgggaagttggg

SEQ ID NO: 8902 - DNA, 294 bp, Zea mays
cggacacctcactcacgggtactacacggccggcggtaagaagatctccgccacctcgatctactttgagagcctgccgtacaaggtgagcgccgcaacggggtacatcgactacgagaagctcgaggagaaggcacttgacttccgccccaagctcatcatctgcggtggcagtgcgtacccgagggactgggattacgccaagctcagggccgtcgccgacaaggtcggggccctgctgctctgcgacatggcgcacatcagcgggctcgtcgccgcgcaggaagctgcaaa

SEQ ID NO: 8903 - DNA, 294 bp, Zea mays
gtcgcttccagccgccgccgcgtccgcctcgccaagcgcacagccgccgcagcacatcgctctcttgatctcagccatggcggaggtggagcagcaacaggacacgccgaagctcttcaaccgctggaccttcgatgatgtccaggtgaacgacatctcgctgaacgactacctcgctgtgaacgcgacgaagcacgcgatgtacctgccgcacaccgcggggcgctactccaagaagcggttccgcaaggcgcagtgcccgatcgttgagcgccttacaaactccctcatgat

SEQ ID NO: 8904 - DNA, 318 bp, Zea mays
cccacgcgtccgcgactccgccaccgccgccgctctacgcgagacgcccaggtcttcgccaacgacgagcatccgggttagagaggaagaaattgcaaccgaaacaatggcggcagattccggcgctcgcagacaaccaagcttcaccaaggtcgaccagctgcgccctggaacccacggccacaacctcatcctcaaggttgttgactccaagatggtcgtccagagaggccgcgagggagggccccagggaagacagatgaggattgcggagtgcttggttggtgatgaaaccggcatcattgtcttcactgcaag

SEQ ID NO: 8905 - DNA, 318 bp, Zea mays
gacgacttgaaatctctgcagagcgtggggcaaataattggagaggttctccgacctcttgataatgaacgctttattgtgaaggccagcagtggtccccgatatgtggtcggttgccgaagtaaagtagacaaggagaagttgacatctggaactcgtgttgtacttgacatgacgaccttgacaataatgcgcactcttccacgggaggtggatccagtggtatataacatgcttcatgaagatccaggaaatgtcagttactctgctgtaggcggtttgtctgatcagattagggagctcagggagtccattgag

SEQ ID NO: 8906 - DNA, 316 bp, Zea mays
cccacgcgtccgcccacgcgtccggggttttgctgctctccgaccccgagctccgaagccgcagcatcaggcgaggcccccctcgcgtgtgaccgagatggcgctgccgaatcaggggaccgttgattaccccagcttcaagctcgtcatcgtcggcgatggtggaactggtaaaactacatttgtgaagaggcatctcactggagagtttgagaagaaatatgaaccaaccattggtgtggaagttcatccgttggatttcaccactaactgtggtaagatcaggttctactgctgggataccgcaggcaagaga

SEQ ID NO: 8907 - DNA, 311 bp, Zea mays
cccacgcgtccgggaagttctgtgggtagaggactagagactgcagatcgagggtctggcagcgggccgtggcagttgggtgattacgacgaagagagatgggcctcctcgacaagctgtgggacgacaccgtcgcaggcccgcacccggacaccgggctcggccgcctccgcaagcaggctgtacgtcccgccgccgtcaagatcagtgatccggccggggacactgcggcgttcgtgccggcctcgccggcttcgggtagcgaggagacgccggtgaaggtgacacgcacatcgtgatcaatcgccccg

SEQ ID NO: 8908 - DNA, 318 bp, Zea mays
atcgacgtgagtctcatcatcactgactactgcatgcccggcatgacaggatacgatctgctcaagcgagtgaaggggtcctcatcgctcaaggacattccggtggtgatcatgtcgtctgagaacgtgcctgcccggatcagcaggtgcttgcaggatggcgcggaggagttcttcctgaagcccgtgaagccggccgacatgaagaagctcaagtcacacctgctgaagcggaagcagcccaaccagaagaacaagcctcaggcgcaggcggtggagtctcctgagcagcagctggacccgcatccgcagccggtg

SEQ ID NO: 8909 - DNA, 305 bp, Zea mays
cccacaccacatcctcccctcattcctccttgggttcccagcccgtgcgccccgcctgtcgcagtcgcaccgcagccgccggccatggcctgcctcaccgacctcgtcaacctcaacctctcggacaccacagagaagattatcgccgagtacatatggatcggtggatctggcatggatctcaggagcaaagccaggaccctcccgggcccggtaaacgattccagcaagctgcccaagtggaactacgacggctccagcaccggccaaggccccggcgaggacagcgacgtcatcctgtaccc

SEQ ID NO: 8910 - DNA, 318 bp, Zea mays
cccacgcgtccgcccacgcgtccgcagcagcatctgtctcttgcttcatcagctaggcgcccggccgcgcggaccaggctccaggagaccaaaaatgaagctctcggtggcagtcctctgcgcgcttctggctgtccaggcggcggtgctcctcgccaccgtgccgacgtcgcaggccagcgagctggaggtcgggtactacagcaagaaatgcaagggcgtggagaacgtggtgaagtggcacgtgatcaaggcgctcaaggccagccgccgcaccggcgccgctctcgtccggcttctcttccatgactgcttcgt

SEQ ID NO: 8911 - DNA, 319 bp, Zea mays
cttgacagcgagattaagtcttggcttgcttttgctgcccagaaggttgttgaggttgatgctcttgctaaggcattggctggtcaaaaggatgaggcttacttcgcagcaaatgctgcagctcaggcctcgaggaaatcctcaccccgtgtgaccaatgaagaagtccagaaggctgctgctgctctcaagggctctgaccaccgccgtgcgaccaacgttagtgctagattggatgcccagcagaagaagcttaacctccccatccttcccaccactacaatcggttcgttccacaaaccgttgagctcaggagggt

SEQ ID NO: 8912 - DNA, 114 bp, Zea mays
cacaattgttggagctgtgtctcctgatggtggtgatttttcagaccctgttacgtccgaaaccatcagtattgttcacgtcttcaggggtttaaatacaaagctcgctaaaag

SEQ ID NO: 8913 - DNA, 313 bp, Zea mays
gcgctcctctctcggatccgcaggctgtcgagctgtagtccatcccctcggtctcgaagcgcacagcagcagtcaggcggccatggacgccagcgcacagggagccggctggaaggcgaagaagggcgcggccgggcgcaaggccggcgggccgaggaagaagtcggtgacgaggtccgtcaaggccgggctgcagttccccgtcggccgcgtcgggcggtgtctgaagaagggccggtacgcgcaggcgtcggcacgggcgcccgggtctacctggccgccgtcctcgagtagctggccgccgaggtgctgg

SEQ ID NO: 8914 - DNA, 314 bp, Zea mays
cgccgaagcaagcaggcgagctcgggaccagatccactgcgggcagctggagcggaagggccatggggacgccgccgcctttccaggagtccggccactgcgacgtctgccgctgcaccttcaacaccttccgccgccgtcatcactgccgcagctgcggacggacgctctgtcacgagcattcttcgtactacatggctctcccgcagtatgggatatatacagacgtcagagtctgctacggttgcttcaacaaatcctccagccaaggacacgctgataatccggtgtcagctggtagcatttctggagca

SEQ ID NO: 8915 - DNA, 315 bp, Zea mays
ctgcattctcgaattacgattcccaatccagcaaaccctaccagccttttgcaaactcagagagggacccgatggcacccaaggcggagaagaagccggcggcgaagaagcccgcagaggaggagcccgcggccccggcggagaaggcccccgctgggaagaagccgaaggggagaagcggctcccggcgggaaaatccgccggcaaggaaggcggtgttgacaagaaggggcggaagaaggccaagaagagcgtggagacgtacaagatctacatcttcaaggtgctgaagcaggtgcacccggacatcggcat

SEQ ID NO: 8916 - DNA, 313 bp, Zea mays
acttcctccattcgcggtttgcctctctgcctgcctccctcagatcctccctaagattgccatggcggaccagctcaccgacgaccagatcgccgagttcaaggaagcattcagcctcttcgacaaggacggcgacggctgcatcaccaccaaggaacttggaactgtgatgcgctcgttggggcagaaccctactgaggctgagcttcaggacatgatcaacgaggttgatgctgatggcaatggaaccatcgacttccctgagtttctcaacctgatggcacgcaagatgaaggacaccgactctgaggag

SEQ ID NO: 8917 - DNA, 314 bp, Zea mays
gcgctcggcgcgaggtccgctggtgctcctgcaacatcttctccacgcaggaccacgccgccgccgccatcgcgcgcgactcggccgccgtgttcgcctggataggggagacccttgacgagtactggtggtgcaccgagcgctgccttgactggggcgaggcgggcggccccgacctcatcgtcgacgacggcggcgacgccacgctgctcatccacgagggtgtcaaggccgaggaggagtacgagaagaccggcaagatccccgacccggagtccaccgacaacgctgagttcaagatcgtgctcaccatc

SEQ ID NO: 8918 - DNA, 310 bp, Zea mays
aaccccacctaggtccgggaccgtgggcgacgtggtgcagcagcggcaacgtcccctcctcgacggtcgacgccgcggcttctcctcatcctcgtccactccgtccgcacactggaagtattctacacagaaggttaccatattgttaagttaaagttggatcattggaacaatgccgccccataagattgagactgggcatcaagatgtggtccatgatattgccatggattactacgggaagcgcctagctacagcctcctctgataacacaataaagatcattggcgtaagtggaacctcacaccag

SEQ ID NO: 8919 - DNA, 316 bp, Zea mays
cggacgcgtgggcttccagtgtccgccgtcgtgcgctcgctacccctctccctcgaggcctttgccggcgaagagcgcccagtcgcccaccaggatgaaatttgttgctgcctacctgcttgctgtcctcgctgggaactccagcccctctgccgaggacttgacagccattctggagtcagttggctgtgaagttgacaatgaaaagatggaactccttctgtcccaactgagcggtaaggacattaccgagctcattgctgctggcagggagaagtttgcttcagtcccatgtggcggtggcggtgtggctgtt

SEQ ID NO: 8920 - DNA, 309 bp, Zea mays
gagaaaatggaggactatttcatattttggattggacaagatagctcagcatttgccaacatagtgcttaccttcaataaatgtgaaatagttagatatgatgcaatagaaaatcaactcacagcggacgtctctcatctgatgaaaattcttaggcgaagatattacctcgtggagaaggcgaaggatgcaaatattattggcattttggtgggaagtctgggtgtagctggttatcttcatataatcgaacaaatgaaagatctgatcaaggccgctggaaagaaatcctatacattggtcatgggt

SEQ ID NO: 8921 - DNA, 311 bp, Zea mays
ccgctgttaggttctaccaggagaccttcggcgtccctccggccacgcgagctcgccgaaatggtcgcccacaggttccatcagtaccaggtggtgggtcgcgcgctgccgaccccaaccgatgagcaccccaagatctaccgcatgaagctctgggccaccaacgaggttcgcgccaagtccaagttctggtacttcctgagaaagctcaagaaggtgaagaagagcaatggccagatgcttgccatcaacgagatctttgagcgcaacccgaccaccatcaagaactatggcatctggctgcgctacca

SEQ ID NO: 8922 - DNA, 309 bp, Zea mays
gcgagcgaaggacccggggcggaagaagagagagaagacgtctctctcctctcggcgtccccgttccccaacctctcgtctgctgcctgcctgcctgcctacctgcaaaaaggagtttgtcatggcgtctaagcgcatcctcaaggagctgaaggacctgcagaaagacccacccacatcatgcagtgcaggtcctgctggtgaggacatgtttcattggcaagcaacaattatgggaccacctgacagtccctatgctggtggtgttttcttagtgaacattcatttcccgccagattaccccttcaa

SEQ ID NO: 8923 - DNA, 307 bp, Zea mays
atcgtatcatatggagctcagccccaacaacagcacggaccagagcttgctcgatgcgcactcgagctctggcacaccaccttcgcgttcatgaagtccatggcgctcaagtccgcaatacacctccgaattgccgatgccatccacctccatggcggtgccgccagcctatcccagatactaagctaggtccatctccacccgtccagattttccagcctccgttgcctgatgcgcgtgctaacaaccaccaatgtcttctgcacccagcagccggctggtggcagttacgacgacagttagcccg

SEQ ID NO: 8924 - DNA, 311 bp, Zea mays
gggctgctagtttcaacatcattcccagcagcactggagctgctaaggctgttggcaaagtgcttcctgtccttaacggaaagttgactggaatgtctttccgtgtcccaaccgtcgatgtttctgttgttgatttgactgttaggcttgaaaagtcagcaacctatgatgagatcaaggctgcggtcaaggccgaggcagaaggtagcctcaagggcatcctgggttacgttgaggaggaccttgtttccaccgatttccagggtgacagcaggtctagcatctttgatgctaaggctggcattgccttg

SEQ ID NO: 8925 - DNA, 314 bp, Zea mays
gttgtcccaactcaggttaattatgttggaaaagctggaaacctttaccaaagtggataccagctcaatggaagcgcctatgtcatctcaaagcacataagcaatacatggttatgggatcgtgttcgagttagcggtggtgcatatggaggattttgtgattttgacacccattcaggagtgttctcatatttatcatatcgtgatccaaacttactgaaaacactagaggtctatgatgagacagcaagattcctcagagagctagaattggatgatgatgcactcacaaaagctattattggaaccatagg

SEQ ID NO: 8926 - DNA, 308 bp, Zea mays
gagctctccaagcttgccgccaatgcgttcttggcacagaggatctcctctgtcaatgccatctccgctctctgcgaggcaaccggagccaatgtctctgaggtggcttacgccgtgggcaaggacacgagaattggccccaagttcctgaacgccagtgttgggttcggtggctcatgcttccagaaggacatcctgaacctggtgtacatctgcgagtgcaacggcctgcccgaggtggccaactactggaagcaggtgatcaagatcaacgactaccagaagagccggttcgtgaaccgcgtcgt

SEQ ID NO: 8927 - DNA, 304 bp, Zea mays
cgaagttagtgagtcaaacaaacatggatttttggatccgttttaccaagatttcagacaaagattcaggcggcttttgggaacttctttccggcatcttaattttaagcttgcaatgagtgtcttggcttcgaagattgattactcaaaccatgagccttcagaatacgataataatagcacttcaaagttattggaagacatgctatcaccacatgacatgaaacgactagaggcgtattcaaacaatttagtcgattatcatctgattctggatcttgtacccatccttgcacatcagtat

SEQ ID NO: 8928 - DNA, 309 bp, Zea mays
tgggacgccatggcgcccggcccctccatcgcccccgcgccggcgcctggcccgggctccgggaagcaccacttcgacgggcacagccaggtcaaggacttcatccagacgctgctcctctacggcggctacaacgagctcgccgacatcctcgtcaacctcacctccctcgccaccgagatgggccgcctcgtctccgagggctacgtcctcaccgtgctcgcccccaacgacgaggccatggcgcgcctcaccacggaccagctcagcgagcccggctcgcccgagaacatcctctactaccacatg

SEQ ID NO: 8929 - DNA, 309 bp, Zea mays
cccgaacaacgagaccgccggcacgttcgtgcggcagatcctgtacgacgcgttccacgggcggtacaacagctcggccggcgccatcgtgctgctgttcgtcatctggggctccttcttcttcggcgggctgtccatcacgacgagcgcggcgcgggtggtgtacgcgctgtcgcgggaccagggcgtcccgctgtcgtcggtgtggcgccgtatccacccgcggcacaaggtgccggcgaacgcggtgtggctgtgcgcggcggtgtgcacgctgctgggcctgcccatcctgcgcatcaacgtggt

SEQ ID NO: 8930 - DNA, 280 bp, Zea mays
gaactgcagcataaaatatagcaacaatcagtcaagctacctcgcctcatggtaatataacatcttgaacaaccataatacaaaatgaaatgcagttctgtcacgacaacatcgcattcataagcaataccacccatctagtacctagcaagcatcaccacacgaacctcaaactgacgagtactaacagcgatacaaggaatatcatatctgtaccaagcactgcggagaatgacttaggtctcttcctcttcttcctcctcctcctcgtactcctcat

SEQ ID NO: 8931 - DNA, 305 bp, Zea mays
cccacaccccccgagctcagcttagctccactccagctccaatcacagtcgtgaccagagcgcgagagctagctagagggccgtgaaaatgccgatcaataggatcgccctggggagccaccaggaggtgtaccacccgggcgccctcaaggcggcgttcgctgagttcatctccaccctcatcttcgtcttcgccggccagggctccggcatggccttcagcaagctgaccggcggcggcccgacgaccccggcgggcctgatcgcggcggcggtggcgcacgcgttcgcgctgttcgtggcgg

SEQ ID NO: 8932 - DNA, 108 bp, Zea mays
gcgcaccgtggcggacgcgtggggcccgccgcgcagaactgcggctgccagccaaacgtatgctgccacaagtttggctactgcggcacgaccgacgactactgcggc

SEQ ID NO: 8933 - DNA, 303 bp, Zea mays
gggggattccatcaaggacataagggacgttaaagagcttcaagatgttgagacattccgacaatgcttaattgatgaggatctgctgccaccacagcacgatgattatcacatgatgttaaggttcctaaaagcacggaaatttgaagttgagaaagctaagagtatgtggtcagacatgatcaattggaggaaggaattcggggtcgacaaaatagaggaatttgactacaccgagttagatgaagtgacagagtattacccacaattttatcatggagtagataaagagggaagacctgt

SEQ ID NO: 8934 - DNA, 305 bp, Zea mays
cccacgcgtccgcccacgcgtccgctcgctctcgtcgcctcgttcgcttcgcctccgccccgccccgccccgagcagagcgcacgcctatccggagctgggatggcggacgcgaacagcagcagcagcagcagcagcagccacagcaggcggcacggcagccaccggcgtgtggaagacggtcaagcccttcgttaacggcggggcctctgggatgctcgcgacctgcgtcatccagcctatcgacatggtcaaggtgaggatccagttgggtgagggctctgctggtcaggtcacaaggaacat

SEQ ID NO: 8935 - DNA, 308 bp, Zea mays
gctgattaccaagatcgacaggcgttctggcaaggagcttgagaaagagcccaagttcttgaagaacggcgatgctggtatggtgaagatgattcccaccaagcccatggtggtggagacattctcgcagtatcctccccttggtaggtttgctgtccgcgacatgaggcagacagttgctgttggagtcatcaagagtgtggagaagaaggacccgaccggcgccaaggttaccaaggcagctgccaaacagaaatgatgcaacctgtcgttaatcctgtatctgcttttgcaatacctgacttgtc

SEQ ID NO: 8936 - DNA, 307 bp, Zea mays
cggattgcttgccactggccttacagctgatgctaggtcattggtttcccaagcaaggaacgaagcagctgagtttcgtttcaaatggggctacgagatgccagttgatgtgttagcaaaatggattgctgacaaagctcaagtttacacgcagcatgcatacatgagaccccttggagtagttgctatggtcttgggctacgatgaagagaaaaatgcccaactattcaagtgcgaccctgctggtcacttctttggacataaggcaactagtgccgggctcaaggagcaggaagcaataaatttt

SEQ ID NO: 8937 - DNA, 290 bp, Zea mays
gtgaaaaaagggatcattagtgggcatttggaatgttctactcagctactacacatcaaattcaagttgtcagctaatttttggtgccacattaacaatggctttagacaactactgtctaccttttgctataagctccaaattttcagtttatgacaaatcattttttctttgaaaataggttaccgtgcaactgaactcacaatgactgagagagttgactccagttcatcattgtatttgattgctgatgcctgtccaaataactcctaccggaaatgtcagcctcg

SEQ ID NO: 8938 - DNA, 305 bp, Zea mays
ctacgtagctatatatagctgcagaacagttttagttaccggactgtaggcacaccaagctagatatccaaggggcccccccggaaactagctagctaggatgccaacagcagaggcgacgacgcccgtgccgccggagctgtcctccgggcaagggcggacggtttgcgtgaccggagctggagggttcattgcctcctggctcgtcaagcgcctcctggagaagggctacacagtccgcggcacggtcaggaaccctgtggatccaaagaacgaccacctgagggcccttgacggcgccgtcg

SEQ ID NO: 8939 - DNA, 298 bp, Zea mays
gtctgcttccattctgttcaagttagcgccgctaatccgctccctattcaccatccaatccaatcggcttcccccaggcacccatggcgacggcggtggaggttcccgtggaggcgccggtgaggacagtgaaggtcaccaatgtctctcttagtgcaactgtgcaagacattaaggagttcttttccttttcaggagatattgatcatgtggagatgcagagtggtgatgagtggtcccaagttgcatatgtcactttcaaagatgcacaaggcgcagaaacagcacttcttctttc

SEQ ID NO: 8940 - DNA, 297 bp, Zea mays
ggggaagatgcagtacctgtatgacgagcatggaaagagatatctcgattgctttgggggcatcgtgacagtgtcgtgtggccactgccatccggatattgtgaatgctgtggtggagcagaccaagttgctccagcacacaaccaccatttacttgcaccacactattgtagagtttgcagaggcactcacctccaaaatgcctggcaatctcaaggttgcgtattttgtgaattctgggaccgaagcgaatgagttggcaatgttgatggcccggctgtatagtgggaatctcag

SEQ ID NO: 8941 - DNA, 299 bp, Zea mays
cacgaattcaccaaccaaactccactgtctccaactctccatcgcgtctgctacgcctctcctgcaggacgaccaatggcttccaggaagttcttcgtgggtggcaactggaaatgcaacggtactggcgaggacgtgaagaagatcgtcaccgtgctcaaccaagccgaggtgccctctgaagacgtcgtcgaggtggtggtgagtccgcctttcgtttttctgcagcaggtcaaggggctgctgcggctggacttcgccgtcgcagcgcagaactgctgggtgcgcaagggcggcgc

SEQ ID NO: 8942 - DNA, 301 bp, Zea mays
agcgcagatcgagtcatcaagctagctagcccggagcacgcctagacacgccagcagcaatggcggctcagctggccgtcgcgtttctcgccttgttgtcctcctctgccttcttggccgtgtctggccagaagttcaacgccatcttcagcttcggcgactccatgtccgacaccggcaacctgtgcgtgaacggtccccccgccggcctgacgctcacccagccgccctacggcgagaccttctttggctgcgccacctgccgctgctccgacggccgcctcgtcgtcgacttcctggc

SEQ ID NO: 8943 - DNA, 300 bp, Zea mays
cggacgcgtggttgacaacctgtatggttgccgccactcgctccctgatggtctgatgagggccactgacgttatgatcgccggaaaggttgccgtggtctgcggatacggtgatgtcggcaagggttgtgctgctgccctcaagcaggctggtgcccgtgtcattgtgaccgagatcgaccccatctgtgccctccaggctctgatggagggtcttcaggtccttcccttggaggacgttgtctctgaagctgacatcttcgtgaccaccactggcaacaaggatatcatcatggttga

SEQ ID NO: 8944 - DNA, 303 bp, Zea mays
ctccgctgggccaccagctttgaccgccgcctccctgcccctccgctactgcgacgtccccaccccactcccccgccagagcggcggcggcggcggcggcgaggtcgtacgccacatcggcgagcggcggcggcaccgcggaggcaaaggcgagatgttcgggcgcgcgccgaataagagcgacaacaccaagtactacgagatcctcggggtgcccaagtcggcgtcccaggacgacctcaagaaggcctaccgcaaggctgctatcaaggaccaccccgacaagggcggtgccccgagaag

SEQ ID NO: 8945 - DNA, 291 bp, Zea mays
cccaaccttcacgcaccgcatttcccaagggaaccataccagagcggcagagccttcccctccgctccccagtcccacccgcaccctagccctcagcaaaccctaaccgctcgtcgccatgaaggacacctcgttcaaggccaccggcgccaagcgcaagaaggtcggcggcgccaagcgcgggctcacccccttcttcgcgtttttggctgagtttaggccgcagtacctggagaagcaccctgagctcaagggcgtaaaggaggtgagcaaggcggctggggagaagtg

SEQ ID NO: 8946 - DNA, 291 bp, Zea mays
gatgaacacggtgagaaaatatctgcttccgcagaggccagtggtagaaacccaaaggagcattgtgatgcaatttcaagttcatataggacgctctgggctgacttagacatagaatatgacaagtttattcgcacaacggatcgtaagcatgaggctgttgtgaacgaattctattccagagtgttaaacaatggcgacatatatagagctgattatgaaggactttattgtgtgagctgtgaagagtacaaggatgaaaaagagctattggagaacaattgttgccct

SEQ ID NO: 8947 - DNA, 290 bp, Zea mays
atcaaagggagggtgcttcatcattccttccctgtttctcttttcctgccccgcaatgtccgattggagcacaaaacattgaagcttctgaagtattggacctggcaatttgttattgttaggccagtatgttccattctgattattgcactccagcttcttgggctgtaccccagctgggtcagctggacgtttagtattatactgaacttttcagtctccatggccttatatgcattggttctcttctaccacttgtttgctaaagagctggcacctcacaagcctct

SEQ ID NO: 8948 - DNA, 294 bp, Zea mays
gtgactctgaagagatcactgtttatgattacttcgtaaagcagcgtggcatagtgctgcaatactctggtgatcttccttgcatcaatgtgggaaaactaaagcggccaacatattttccaattgagttatgcagtcttgtgcctttacaaagatacactaaagctttgaacacacttcagaggtcatcactcgtggagaaatctaggcagaaaccgcagaacaggatgtctgtcttatctgatgtgctgcaaagaagcaactatgatgcagagcccatgttgaaggcatgcg

SEQ ID NO: 8949 - DNA, 292 bp, Zea mays
actcgcattgcattgcattccttcagttcagtagtgtgctctgacagtgagatggcgagcgtgaaggttttcgggtcacccacctcggcggaggtcgcccgcgtgctcatgtgcctcttcgagaaggaggtggagttccagctgatccgcgtcgacgcctaccgcggcaccaagcgcatgccccagtacctcaagctgcagccgcaagcgtaggcgctcaccttcgaggacgagagcctcaccctctccgactccagggggatcctccgccacatctcccacaagtacgcga

SEQ ID NO: 8950 - DNA, 292 bp, Zea mays
caaggattttgagatgggtgtctccaacaagacccctgagtttcttaagatgaacccccttgggaaggttcctgttctggagactcctgatggccctgtttttgagagtaatgctatcgcacgctatgttgctcgcttgaaggatgacaaccctctttttgggtcttcccgtattgaacaagcccacgttgagcaatggatggattttgccgcaacagaagttgatcctggtgttgcatggtacttgtatccaaggcttgggtacctcccttatgttagcacaactgaggaa

SEQ ID NO: 8951 - DNA, 295 bp, Zea mays
cccacgcgtccgtgggatcaacattagtgagaagctaacctatgttgaagcccgagtccttcctgcaccttggctgaagtatcatgacactggaaaagagaaagagtgcttaccacaggttggtcagtggaacatggtaaacaagaaagtgataaacggatgcaaggtgagccactgggcatgtataaacttctcaaggagtgttccagaagccacagctcggggattttgccaggaattggcacaaatgtgtcaaatttcgggcatggaatttaacagtgagcccgtgatgcca

SEQ ID NO: 8952 - DNA, 296 bp, Zea mays
agggtttgcaaggaaccttcaaccacatgagattgttgaacaggtgttggccatcgaggagacgttcaaacacagggtgacaaatgttgtgttcatggggatgggtgagcccatgatgaacctcaagtcagttctagaagcacaccaatgcttcaataaggaactaaaaattgggcaaaggatgatgacaatatctacagttggtgttccaaatacaataaaaatgctagcatctcacaagcttcagtcaacgctggcagtcagtctgcatgccccaaatcagaagctgcgggaga

SEQ ID NO: 8953 - DNA, 295 bp, Zea mays
attgctctgtctggtcaaccgctgcttggacaagcagtgatggttaaaccatctgaggctgaaaagaacttagttcagtcaaatgcgacatcaggtggtgcggcttcaggtggagcaagaaagttgtacgttggcaatcttcactcaaatattactgaagaccaattgagacaggtatttgaaccatttgggcaagtagagcttgtacagcttcctgtagatccaatgactggattgtgcaaaggttatggttttattcagtttgcacggcttgaagatgcaagctgcacagagc

SEQ ID NO: 8954 - DNA, 287 bp, Zea mays
gtgagcttcatcttgagatttgcctgaaggatctgcaagaggacttcatgggaggtgctgaaattattgtttctcctcctgttgtgtccttccgtgaaaccgttcttgagaagtcctgccgcactgtcatgagcaagtcacctaacaagcacaaccgtctgtacatggaagcgcgccccctggaggagggtcttgctgaggcaattgatgatggccgcattggcccacgtgatgatcctaaggtgcgctcccagatcctctctcaagagtttgggtgggacaaggat

SEQ ID NO: 8955 - DNA, 290 bp, Zea mays
ctcgcgccgctgccgcatctcctctacaggtaagaaggagagaaagagggcgaaatggtgaagcacaacaacgtcatccccaacgggcacttcaagaagcactggcagaactatgtcaagacatggttcaaccagcccgcccgcaagcagaggcgccgcatcgcacgtcaaaagaaggctgtgaagatattcccacgaccaactgctggccctcttcgtcccattgttcaatgccagactctcaagtacaacatgaagtcaagggctgggagaggctttacccttgagga

SEQ ID NO: 8956 - DNA, 287 bp, Zea mays
cggacctgggcgaatccgtgcgacgcggggctggatctcagtggatcgtggcagcaaggccactctgccacttacatcgtagctactgccgctcagagcaatggagagagcggtgccagttcggaagtcgcacaccaacacggccgaccttctctcctggtcggccacgggccctgacgcatctgcctcgccggccgcgtcgtcccgccccagcctcaagccggccgcggggattatgccggcgatgttcggcgcgccggtcaccgagcaggaggccgaggatctga

SEQ ID NO: 8957 - DNA, 292 bp, Zea mays
catccccgagggcgtgtccgacgccgtcgacgtggccgccatcgtccgatccagcggcaagggctcgccgtcgtcgcgccacgacggggtgtggaaggagctgctcatcaacgcttcgcgccccgtgcgccgcatgctcatggcggggctcgggctcatgttcatccagcaggccacgggcgtggactgcgtggtcatgtacagcccgcgggtgttcgagcgggcgggcatcaagtccaagaccaactcgctgggcgcgtccatggcggtgggcgcgtgcaagaccttcttc

SEQ ID NO: 8958 - DNA, 292 bp, Zea mays
gtgttcttaaggctgtcagcaacgtaaacaacattattggaccagcgattgttggaaaggaccccactgagcaggttgagattgacaacttcatggtccaacagcttgatggaacctccaatgagtggggctggtgcaaacagaagcttggagcaaatgccatccttgcggtttcacctgctgtgtgcaaagctggagctatggtgaagaagattcctctttaccagcacatcgcaaattttgctgggaacaaaactctggtgctccctgtacctgcctttaatgtgattaa

SEQ ID NO: 8959 - DNA, 293 bp, Zea mays
ccagtacaccgtcgacatcctcgagcacgctggcatggctgactgtaagccctgcatgactccaatatacacttaaggcaaggcctcctcctccgatggttcccggtggttgatcccactagctaccatagtcttgccggggcgctgcggtacctcgtcttcacacggcttgacatcgcctacgccgtctagcatgtgtgcctccatatgcatgcccagcgggagcctcatctcactgctatgaagcggatcctgtggtacctctagggctctaccgactttggcctccttcg

SEQ ID NO: 8960 - DNA, 290 bp, Zea mays
gctaaggcggaggagcttataaaagctgttgctgactcaggtgccaaggttattgtcagtggagctgcagttggtgacatggcgctacatttttgtgaacgttacaagctgatggttctgaaaatcagctcgaagtttgaactgagaagattctgccgtactactggggctgttgcaattttgaaacttagccaacccaatgcggatgaactagggtacgcagactctgtttccgtggaagaaattggtggtactcgggttattgtcatcaagaacgaagaaggtggaaa

SEQ ID NO: 8961 - DNA, 284 bp, Zea mays
cgcctatctcgccagcaccgccgcatcaccgaagttcgcaaagatggcggtgccgctgctgacgcagaagatcgtgaagaagagggtcaagcagttcaagaggccccatcttgatcgctacaagtgccttaagccaagctggcgcaggcccaagggtatcgactcccgcgtcaggcgtaagttcaagggatgcaccttgatgcccaacattggatatggctccgacaagaagaccaggcactaccttcccaacaagttcaaaaagtttgttgttcacaatgtct

SEQ ID NO: 8962 - DNA, 283 bp, Zea mays
cgcgttcactcttcctgggctctaccgtgtcgtccatggcatcgatgttttcgatcccaagttcaacattgtctcccctggagcagacatgagtgtttactacccgtatacggaaaccgacaagagactcactgccttccatcctgaaatcgaggagctcatcaacagcgacgtcgagaactccgagcacaagttcgtgctgaaggacaagaagaagccgatcatcttctcgatggcgcgtctcgaccgcgtgaagaacatgacaggcctggtggagatgtac

SEQ ID NO: 8963 - DNA, 283 bp, Zea mays
actacacatatgaaggcaatgttgacatagacgcatatcagatcctaccatgaaggcttcaatactagcacaaatcaaccattttggtcagacccccaaacagttattccagaaaccacatccacagaggcggactgacaggaaagtccctcctcatcctctacggtactgtgcctatctaacacagcaggagattcgcaagacagcatcttcggtgtcccagattgtctcctacaatgataagatcctaattgctgcagttaactgcttgctcaagccgcta

SEQ ID NO: 8964 - DNA, 284 bp, Zea mays
tctggtcaaatcttgtgcacgcttgctggtcactcaaagaagataaccactttgaagtttattccacgggatcaactctttgtaactggatcagcagataagactgttcgcatctggcaagagaatgagaatggaaactataactgtgtccatacactgaaagatcatactgatgaggttgaagctgttacagtacatgtgactcagaagtattttgtgagtgcttccaaggataactcttggtgcttctatgatatttcaacaggatcttgcctgacacaggt

SEQ ID NO: 8965 - DNA, 287 bp, Zea mays
cgcaacatccttcaggggaagcccatcacggtttaccgcggcaaggaccacgtggacctggcccgcgacttcacctacatcgacgatattgtcaagggctgcctcgcctccctggaaacggccggcaagagcaccggcaccggcggcaagaagcgcgggccggcgccctacaggatcttcaacctcggcaacacctctcccgttacggtgcccaacctggtgtccatcctggagaagcacctccgcgtcaaggccaagaagaacgtggtcgagatgcccggcaacgg

SEQ ID NO: 8966 - DNA, 283 bp, Zea mays
gaaagctattgtatggacacgggaggagctgggtgcaaaatttgaatacaaagacatacctgctgatctccaagagatggctcaagactatcgtgttcaaatgctggaaactattattgaattggatgatgaagttatggagaaatatcttgaaggaactgaaccagacgaggaaactgttaagaaactaatcagaaagggaacaatttctgccagctttgtaccagttttatgtggttcagcattcaaaaacaagggtgtccaaccattgcttgatgctgtt

SEQ ID NO: 8967 - DNA, 325 bp, Zea mays
agcctgtgtatgtaatcgatgttgctgctgctattgtgaactccctgaaggatgacggcactagcatgggaaagatatatgaacttgggggccctgaaatttacactgtccatgagctggctgagctgatgtacgagacaatccgcgaatggccaagatatgtcaatgtccctcttcctgttgcaagggctattgcttccccaagggagatgctgctcaataaagtgccgttcccgcttccaacaccatccattttcaacctagaccaaatcaacgcatttgctgtggacaacctcgtctcggaagatgctctgactttcgaaga

SEQ ID NO: 8968 - DNA, 317 bp, Zea mays
ccattggaagcctacttgtggtgtgaaatgcttgctcgacaatgaagctgtgactgttggaggcacctgccacagccatgcgacgaaggatctatatgattccatcgcagctgggaattaccctgaatggaagctctacatccagactattgatcttgaccatgaggataagtttgactttgacccgctcgatgtcaccaagacctggcctgaggatatcatcccgctgcagcacgttggacggaatgtcctgaacaagaacgtcgacaacttctttgcagagaatgaacaggatgctttctgcccagcgattattg

SEQ ID NO: 8969 - DNA, 322 bp, Zea mays
gcttccagagccccccgccgccgctgcgccctcctctcggtcctgccgtccgtcgaggtaaaaggacagcatggtgagggtcagcgtgctcaatgatgctctcaagtccatgtacaatgctgaaaagatagggaaacgtcaggtcatgatcaggccgtcatccaaggtgatcatcaagttcctgacggtcatgcagcggcatggctacattggcgagttcgagtacgtggatgaccacagagctgggaagatcgtgcgtgagctgaatggaagactgaataaatgtggtgttattagcccacgtattgatgtaggtgtaagg

SEQ ID NO: 8970 - DNA, 324 bp, Zea mays
ggacgccccttatcgccctcgttatttacatcgctgccaccctcctctccgccgtcgccgccgccgccggggatggggggagcacaattccccggcgacaacgacgtcgcggaagtagacgcggcccgcgacggagaggtggaccgccgtgacgtgggcaagatgaagcacgggtgcgagcattaccggcggaggtgcaagatcgtggcaccgtgctgcaaccaggtgttcccctgccgccactgccacaacgatgctacggcttccggagatcggcatacaatatgtcgtcaggatgttgaaaaagtagtttgcctactctgt

SEQ ID NO: 8971 - DNA, 279 bp, Zea mays
ctcccaaccaaagaccgatggcgcccaaggccgagaagaagcccgcggcgaagaagccggcggaggaggagcccgcggccgagaagacgaccgccgggaagaagcccaaggcggagaagcgggtccccgcgggcaagtccgccggcaaggaaggcggcgagggcaagcgtggcaagaagaagggcaagaagagcgtggagacgtacaagatctacatcttcaaggtgctgaagcaggtgcacccggacatcggcatctcctccaaggccatgtccatca

SEQ ID NO: 8972 - DNA, 320 bp, Zea mays
  unsure (1)..(320): unsure at all n locations
ctgaaaaccttcccgaataaaaaggtctctgaacaatctcttcaggtattgatagtctggtggatcttcagtttgtgcatgttggtactttagaattgtccagatgaccacggctccgccacgtgcaattgctccagcagtaggacaaagctctgggatggctcctgtggcaaacaacaatagacattcaggcactgaagagggaaggagaagcgggtggtcangtgtggacccaacgcgacgccaggcttccacaccagttatagatgcagggagcctagccaagcagaaaatccctgttcggcctgaggcatcgacat

SEQ ID NO: 8973 - DNA, 237 bp, Zea mays
cccacgcgtccgaagaagaccaagcgcacagcgccgaagtccgacgatgtttatctcaagctccttgtcaagctctaccgtttcttggtcaggaggaccaagagcaacttcaatgctgtcattctcaagaggctcttcatgagcaaaaccaatcgcccaccaatctccatgcggcggcttgtcaagttcatggaaggaaaggagaagaacattgctgtgattgttggcacagtcaca

SEQ ID NO: 8974 - DNA, 313 bp, Zea mays
gaggccttcaagggaatcaaacagatcggtgtaatcggctggggctcgcatggtcctgcgcaagctcagaacttgagagactcacttgttgaggcaaagtcagatattgttgttaaggatggtctccggaaagggtctaaatcctttgaagaagccccgacagcaggaattcacgaagagagttggacgcttggtgatatatgggggcctgtatcaaacagtgatcttcgtttgctactggtaactgattctgctcaggctgataactacgagaacattttctcgcacatgaaacaaacagtatccttggttg

SEQ ID NO: 8975 - DNA, 303 bp, Zea mays
cactgattgttattggaataatgagtagctttgggaggaaaaactaccgtgatgctgtcaggaaatcatggcttccaacaggttcaatgctgaagaaactagaagaagaaaaaggcattgtagtacgttttgttgttggaagaagtgcaaatcgaggtgatactttcgatagggagattgatgacgaaaataggagcaccaaggatttcttgatactggatgatcatatagagtctgatgaagagcttcctaagaggaccaaaagtttctttgctaatgcagcagaaacattcgatgctgcat

SEQ ID NO: 8976 - DNA, 318 bp, Zea mays
ccgaccgtgggcggctagctagcacaagcatagtgcaggggcttgccacctaagtaaggcccgcctgagcaccatggcatccaaggccgtcctcttcttggcactcaacctcctgttcttcacggtggccaacgcctgccgcaactgcccgaccccaacgcccccggtcgagccaccgccgccgcctcctgctgctaccccacccccttcgtccagcggcaagtgcccgctgaacgcgctcaagttcggcgtgtgcgccgatgtgctcggcctcgtcaaaggcgaggctggcaaggtgcctgccgagccatgctgtac

SEQ ID NO: 8977 - DNA, 312 bp, Zea mays
gccggcgtgcttgtgatctcaacccaagtcgtgcctccgctccggtcacccgtcgctccacgcaaccatgtcgaggaggaagaccagggagcccaaggaggagaacgtcacccttggacccactgtccgtgaaggagagtatgtctttggtgttgctcacatctttgcatccttcaatgacaccttcattcatatcactgatttgtctgggagggaaactctggttcggatcaccggtggcatgaaggtgaaggctgaccgtgacgagtcgtcagcttacgctgctatgcttgctgctcaagatgtcgcaca

SEQ ID NO: 8978 - DNA, 309 bp, Zea mays
ggacatgtattcgaggagatgcaaagcctggtacccgctctacaacatcaaggctttcctccctgtcatcgagtcctttgggttctcaagccagctgagggctgcaacctctggtcaggcgttccccagtgtgtgtttgaccactgggacatgatgggctcggatccgtttgaggctggctcccaggctgcccagctggtgctggatatccgcaagacgaagggtcttaaagaacagatgactcctctttctgagtttgaggacaagctctaatcttttcggttttgctactgttagtgggtttaattg

SEQ ID NO: 8979 - DNA, 321 bp, Zea mays
gctccaagtgccacaaggagatgataatgaagcaggagcaggcccagttggctgcctcctccatcgatagcattgtcaatggcggtgataatgggaaaggacctgcaattgctgcaactgtaggtgtggcagttcctcaagtcgaggagaagactatcgccgtgcagcctatgcatgtcgctgaaaccagcgatgctgctgctgttatcgcgaagccaaggaaggccagaccggtgcgcaacctgtaggaagcgtgttgggttgacgggttttaactgccgatgcgggaacacgtactgttcgatgcaccgctactccgac

SEQ ID NO: 8980 - DNA, 137 bp, Zea mays
gttggcttctcctccccctccggttcgggttcgggttcgtgaggttctccggggttcggtttcgtgggtgatcggatcgagatggcggcgtcggatgttgagtaccgctgcttcgtcggctgcctcgcctggtccac

SEQ ID NO: 8981 - DNA, 308 bp, Zea mays
cccacgcgtccgattctgtccagcttacacaagcaacgcgcccactcaggaggttgcacattgaaaatttgcctgattcagctacagaggataagttgattgactggcttgaatgacttcttattgtctactggcagtaaactccagcggtctaaaccatgcctcagttgtacgataaacagagaaaaacgtcaggcctttgtggaatttcttacaccagaggatgctacagcagctatttcttttgatggaaggtctctagatggatctgtgttgagaattcgacgccccaaagaatatgttgaaac

SEQ ID NO: 8982 - DNA, 310 bp, Zea mays
accagattcactggttctccattttcaactctttcatgatggttattttcctaactggtttggtttcgatgatattgatgcggactttgagaaacgattatgccaaatatgctcgtgaagatgatgatctagagtccctggagagagatgttaatgaggaatcaggatggaagcttgtccatggcgatgtatttcggcctccccaaagtttgatgtttctttctgcacttgttggtatcggtacccaattggcagctcttatcctacttgtgatcgttttggccatcgttggcatgctatacattgggcg

SEQ ID NO: 8983 - DNA, 314 bp, Zea mays
tcagtccctcacacactcactatacactgctctgctgcagcaagaaggaagaagctagcgcctccctagctctcgttgtcagcaatggccaccaccgccgcgtccagcctcctcaagtcctccttcgcgggctcccggctcccttcggccacgcgcaccacctccccgtcgtccgttgccgtggccaccccgcgcgccggcagctgccccatccgcgcgtccatctcctcctcttccactccgccctacgacctgacgtccttccggttcagccccatcaaggagtccatcgtgtcccgcgagatgacccggcg

SEQ ID NO: 8984 - DNA, 315 bp, Zea mays
acacaacacaccctcctcgtcctccagatccaatcaacctggtagactcgcttcgcttctcccccagccgtcggacggagctcctcgcagtcgcagcagccgccgatcagcctgcgctcgggctcagcgctggaaggtgttggaagagaataacctgaaggttcacagtaaccttcatctgtcggaagatgtatcgggctaagagggctgcattgtcaccgaagtaaagcgccgcgtcggcaagtacgagctcggacgcaccattggggaagggaccttcgccaaggtccggtttgctaagaacactgaaaacgg

SEQ ID NO: 8985 - DNA, 322 bp, Zea mays
cggaccgtgggctttccgcacccaatcacctaaaatggaaatgattgactcattgtttaagccacgggaagctgaagatgatggtctgatccgggagtggctgacttgactctacaccagttctgggaagagaaagcttgaccaagttatcatattcagggacggtgttagcgaaagtcagtttaatcaggtgctgaacattgagttgcaacaaatcatcgaggcttgcaaatttcttgatgagaaatggaatcccaagttcacgttgattattgcccagaagaatcatcacactaaatttttcattcctggaaagccagat

SEQ ID NO: 8986 - DNA, 286 bp, Zea mays
cccacgcgtccgcggaccgtggcgaaaaagctgttgtgcaggtctttgaaggaacttctggaatagacaacaaatacacaaccgtgcagtttacaggcgaggttttacaaactcctgacatcacttgatatgcttgggcgcatttttaatggttctggaaaacctattgacaatggccccccgatattgcccgaagcctacttggatatctctggaagttctattaaccccagtgagagaacctatccagaggagatgatccaaactgggatatccaccattgatg

SEQ ID NO: 8987 - DNA, 283 bp, Zea mays
cccctcctcccactccacggagaagcgaaaccgacctttccccctcccccgcattccacctcgcggagatccagtccagccctagggtttcgccagcggcgagccaaactccacgagcgggggaagaggggaaagcagggacgacgagggggcagccatggggcagcagtcgctgatctacgcgttcgtggcccgtggcacggtcatactggccgagtacacggagttcaccggcaacttcaccaccatcgcctcccagtggctcatgaagctccccgcaagc

SEQ ID NO: 8988 - DNA, 285 bp, Zea mays
gggccttgtcccgctcgccggctccaacaacgagtcgtggtgccagggcctggacggcctggcgtcccgcgaggccgcctactaccagcagggcgcgcggttcgccaagtggcgcaccgtcgtcagcatccctaacggcccctccgagctcgccgtcaaggaggccgcgtgggggctcgcacgctacgccgacatctcacaggttggttggtttggtttctactcctgccattattattggctgcaacctgcatgccatgaccttcatgcatgcaggacaacggg

SEQ ID NO: 8989 - DNA, 95 bp, Zea mays
cggacgcgtgtgcggacgcgtgggcaactgcaaggttctggtggttgccaacccagcaaacaccaatgctcttatcttgaaagaatttgctccat

SEQ ID NO: 8990 - DNA, 116 bp, Zea mays
gcttctcctccccctcttaccaagtcctcctcgggttagggttccttagggttttgtggaggggcgatggcggcggctgatgtggagtaccgttgcttcgtcggctggcttgcctg

SEQ ID NO: 8991 - DNA, 280 bp, Zea mays
ggagcctactgctcctccgtaatcactgctgtcaccgcgcagaacaccgtcggcgtccaggggatccatgctgtgccggagcagttcgtgggagagcagctcaggtcggttctctcggacatgtcggtggacgtggtgaaaacagggatgctcccttcagctggagtagtcaaagttctgtgtgagagtcttaggaagtttccagtcaaagctctagtggtggatccggtcatggtgtccaccagcggtgatactctttcaggaccatctactctcgcta

SEQ ID NO: 8992 - DNA, 281 bp, Zea mays
ctgcttgcagatcctgatagcaaagagtggctatccatatcgactgaactatgtggaggtacacatatcacaaacacaagacatgctaaagcatttgcactcttatctgaggagggtattgcaaaaggagttaggaggataacagccgtgactgctggatgtgccacccaggctatggagttggcgtcatctatcgattctgatatcaataaagcatctcagttggagggagctttgttggaaaagaaaattgcttccatcaagagtgggctggatgcagc

SEQ ID NO: 8993 - DNA, 282 bp, Zea mays
  unsure (1)..(282): unsure at all n locations
cccacgcgtccgaaagaaggttgcacaacagtctccaagggcccaggttgcaatctttgttgttcttgccatgactttaagaagaaagcctgatgtactggtaaatgttatgccanagataatgggaaacaataaatatctgggacaggaaaagcttcccatcattgtctgggttattgctcaggcctctcaaggtgacctagtgtctggcatgttttgctgggctcattctctatttcccacattatgtgcgaagtcaagtgggaatccccttgcaagaga

SEQ ID NO: 8994 - DNA, 282 bp, Zea mays
cacaaactacattactgatatcatctgcaagcgtgcagatcttggttacaactatggtgttatccttataccagaaggcctgattgatttcatcccagaggttcaaaaactcatcgcggaattgaatgaaattttggcacatgatgttgttgatgaggcaggggcctggaaaagcaagcttcagcctgaatcaagggagctgtttgagtttttgcccaatactattcaggagcaacttatgcttgaaagggatccccatggcaatgttcaggtcgcaaaaat

SEQ ID NO: 8995 - DNA, 283 bp, Zea mays
cagcggcggtggcggacgtaaggcgaaggagtagcagcagcaggcggtgccgagtagcggctccccatctcgagcttgccaccatggctagaggattgaagaagcatttgaagaggctcaatgcccccaagcattggatgctggacaagcttggcggagcttttgctcccaagccatcttctggacctcacaagtctagggagtgcctgccactgatcctcatcatcaggaacaggctcaagtatgctcttacataccgtgaggtcatttccatcctgatgca

SEQ ID NO: 8996 - DNA, 282 bp, Zea mays
cttcacctttcacagcaaagcatgcatctgttacccctactcttgatatcatccgtcagtgaagaagcaccctagtcactacacttcaaatgttcaagattcttgggctcaattgccttgcgacacttacgttctcagtgtcatgtacttggatggtgtcaaactgggcgatgttcaggctactattagtggtgtcttcactgcagccttcttcctcttcatctccaatgctcggccactccaaacgctgtctgcagagcggcctcatcctaacatattctg

SEQ ID NO: 8997 - DNA, 279 bp, Zea mays
cgctgtcgtcactcctcgtcacccagccacgaacagaggcaccacccagcatggccctgcaggcggcgctcctcccatccaccctctcatccgtccccaagaagtgcagcctcgccgtcgcggcgaaggacacggcattccttagcgtatcccacggcgcggacgccgacgttcacggcggacgggtacgagatgagcgtcggcgtcaaccacctgggccacttcctcctggcgcgcctgctcctggacgacatgcagaagtccgactacacgtcccgc

SEQ ID NO: 8998 - DNA, 276 bp, Zea mays
gcgagccaaccgcccgccggcgccgccgtcgtaggaagagggtgaactgaggattagaggagggggaagatgtcgttccgggcgcgggagccgtacaagaaggtggtgcggcgcgtgggcggcgaggggaagctgccggcggacttatgaattcggtgaaggacatttgccgccgatcccttgacattgagcgcccaacctacaccaacctcaacagccttgtgtcccaggttatctcatcccttactgcctccctgaggttcgatggtgctctga

SEQ ID NO: 8999 - DNA, 276 bp, Zea mays
gatggattatcggcaagcctgcaattctactgcacacctcagatgctggcgagagctgggaaagaatacccctgagtgcccaacttcctgggaacatggtttacataaaagctactggggagcagagcgcagagatggttaccgatgagggagcaatctatgttacctctaaccgtggatacaactggaaggctgccgtgcaggagaccgtttcagctactctgaacagaacagtttcaagtggcattagcggtgcaagctactacactgggactt

SEQ ID NO: 9000 - DNA, 277 bp, Zea mays
cccacgcgtccgcccacgcgtccgcccacgcgtccgacttgcagctcttggatcaatccagtttgtgtccaacattgcttttgcctactttgttttgaacaagactatttcagtgaaagtcatggtagccacaacatttatagtctttggcaacatcttcttagtatcctttggcaaccatcaatcacctgtttacacgccggagcagctgatagcaaaatacagcaatttggtgtttgttctttattgcatgtcattggtctttgttgttgcattt

SEQ ID NO: 9001 - DNA, 277 bp, Zea mays
ctggagcaagcatttcgagtggcgcatatgggcttcgctggtccctatagttggcggaatactcctgacttcggtgacagagcttagcttcaacattttcggtttctgtgctgccatggttggctgcctggctacgtctacaaagaccatcttggcagagtccctactccatggatacaagtttgacagcattaacacggtgtactacatggcaccctttgccaccatgatactggctctaccagcgatggtgcttgaaggaggaggtgtaatgaac

SEQ ID NO: 9002 - DNA, 278 bp, Zea mays
cccacgcgtccgcggacgcgtggtaaaataacgaggcagaggcatcttcgttttgacgtgcgcttcctcttcctcgctcgctctcggtcgcagtgatggctgatgtcgacgagtaccgttgctacattgggaacctgtcctggtcaacgactgatgaaagcctcaaggatgcgttcagcaaattcggcaacctcactgaggcaaaggtggttcttgacaaattttcaggccgttctcgtggtttcggctttgtaacttttgatgagaagcaagccatg

SEQ ID NO: 9003 - DNA, 282 bp, Zea mays
gctcgccggagcccagtgccgtgagcccagttcgacgccgcggacgccggcgcggagaacttcaacaccagctaggccgccgtgtactgggggccctggcagaatgcccgggccaccttgtacggccagcccaacggggccggcccggacgacaactgtggtgcgtgcggctttcaagcacacaaccagtacccttcatgtacagggctcttgcggaaacagccatgttcaagacgcaagggatcggctctgctcaagattggtgcaggaagaccgtctgct

SEQ ID NO: 9004 - DNA, 180 bp, Zea mays
gctggaaaaggcaggaaagacccggcttttgaccccaagtacctgttgagggcaatggcggccaactccgaggaggcaatcaagcagttctcggcgctcatggagcagctagaagagccgctaaagagcacattccagaatgtgcatcaaggaaatctgagaaggaccttgatgcgtttt

SEQ ID NO: 9005 - DNA, 303 bp, Zea mays
ataaaaaaatgagttcatcacatatatcctagacctttctgtgatctcataaaacgatgcggattaggagatctagggttcttaggtggcgctttgataccattgttagattttctggtgcttaggatcgtttcctaagtccctagaataccaatccgtgtctaaaatacctcgatgatgagtagatctattctactgaggggtataagttaacataccgtcgttgttgttcctagccatcattgcggcggcgtcttgcagcgaagacccgcctcctccttcttgtcgatctccctgctggtg

SEQ ID NO: 9006 - DNA, 309 bp, Zea mays
ctcgtctgctcgcatttcctcccaatccatcccgcctccaaacccgaactccaagtcgccccgcatcgatggcgcccaaggccgagaagaagcccgcggcgaagaagccggcggaggaggagcccgctgccgagaacgcgccggccgggaagaagcccaaggcggagaagcgtgtcccagcaggcaagtccgccggcaaggagggcggcgagggaaagaggggccggaagaagggcaagaagagcgtggagacctacaagatctacatcttcaaggtgctgaagcaggtgcacccggacatcggcatct

SEQ ID NO: 9007 - DNA, 306 bp, Zea mays
cccacgcgtccgtatcatgccactttggacgatgggagacaagcagcagttaaaaaacttgatgcatctgaaaatgagcctaatgatgagtttctcaaacaggtctcactggcatcaacgctaaaacatgaaaatcttgttgagatgttgggctactgtgtcgatgggaattaccgtatactcgcatatgaatttgcaaccatgggttcgcttcatgatgttttacatggaagaaaaggcgttcaaggtgcgcacctgcgacctgtacttgactggatgcagagggtcaaaattgctattgaggct

SEQ ID NO: 9008 - DNA, 298 bp, Zea mays
gccttctctaatctctttgcctccctccaccaccagtccaccaccactgctacccaaccctcgcttccccaaaccctagccaagggacacggtggccggcgatggacggcgacggaggaggcgctggtgcgctgcaccaccacacgcgctcacccgaggacgtcttccgcgatttccgcgcgcgccgagccggcatcgtcaaggcgctcaccacggatgtggagaagttctatcagcagtgcgatccagagaaagagaacttgtgcctttatggtttgccaaatgagacttgggaggt

SEQ ID NO: 9009 - DNA, 297 bp, Zea mays
actaaacatattttctgctattagttatcagattaaattataaattgcaccagaatgtttgcaagtaccctgtttttcatgcaaattacggaaacctatgatgcgcaggttatctgaatgatccagaggcgacaaagaacaccattgataaggacggatggctgcacaccggggacattggttatgtggacgatgacgacgagatcttcatcgttgacaggctgaaggagataatcaaatacaagggcttccaagtacctcctgcggagcttgaagcccttctcatcacacatcctg

SEQ ID NO: 9010 - DNA, 297 bp, Zea mays
cccacgcgtccggtttctttcgcaaacctcaactccgaggcagggcttaaaaagcttgatgagtaccttctcactcgcagctacatcactggctaccaagcttccaaggatgacttggctgtctacacttcgttttcggctgctccctcgtccaagtatatcaacgtagcaaggtggtttaaccacattgatgcgctcgtgaggctgagcggaattactgcagagggccaaggtgtgaaggttgaatcctcagcagttccttcagccccaactccagatgttgctgaagcacaggcc

SEQ ID NO: 9011 - DNA, 298 bp, Zea mays
gccgctcgccttctgcgcctccatttcggcctctgtcccttgcaagttcaatctcacctccaaccatgggtaaagagaagtcccacatcaacattgtggttattggccatgtcgactctggcaagtcgaccaccacaggacaccttatctacaagcttggaggcattgacaagcgtgtgatcgagaggtttgagaaggaggctgctgaaatgaataagcggtccttcaagtacgcgtgggtgctcgacaagctcaaggctgagcgtgagagaggtatcaccattgatattgctctgtg

SEQ ID NO: 9012 - DNA, 299 bp, Zea mays
cgaaggaggaggcgcagcagcagcaggcggcgccgaaggagcggcatcccactcagtgcttgcaaccatggctacgggattgaagaagcacttgaagaggctcaatgcgcccaagcattggatgctcgacaagcttggcggagcttttgctcccaagccatcttctggacctcacaagtccagggagtgccttcctctgatcctcatcatcaggaacaggctcaagtatgctctgaactaccgtgacgtcatttctatcctgatgcaacgccatgtacttgttgatggcaaggtcagga

SEQ ID NO: 9013 - DNA, 299 bp, Zea mays
cgcgccgccgccgccgtgcccagcgctcgagctcctcgcctgccgcgagctcgcgccgcaacgccaccatgaagttcaacatcgcgaacccgtctaccgggtgccagaagaagctggaaatcgatgacgaccagaaactacgtgccttttatgaccgaagatctcccaggaggtcagtggtgatgctctgggtgaggagtttaagggttatgtcttcaagatcatgggtggatgtgacaaacaaggcttcccaatgaagcaaggagttctgacttctggtcgtgtccgccttctgctcc

SEQ ID NO: 9014 - DNA, 295 bp, Zea mays
cggacgcgtggcgcttccagccgccgccgccgcgtccgcctcgcccagcgcacagccgccgcagcacatcgctatctcgatctcagccatggcggaggtggcccagcaacaggacacgccgaagctgttcaaccgctggaccttcgatgatgtccaggtgaacgacatctcgctgaacgactacctcgctgtgaacgcgacgaagcacgcgatgtacctgccgcacaccgcggggcgttactccaagaagcggttccgcaaggcgcagtgcccgatcgtcgagcgcctcacaaac

SEQ ID NO: 9015 - DNA, 291 bp, Zea mays
ggcgcgcctgctcctggacgacatgcagaagtccgactacccgtcccgccgcctcatcatcctcggctccatcaccggcaacaccaacacgctggccgggaacatcccgcccaaggccgggctgggcgacctccgcagcctcgggcggggctgcgcggccagaacggctctgccatgatcgacggctccgagagcttcgacggcgccaaggcgtacaaggacagcaagatctgcaacatgctaacaatgcaggagctgcaccggcggtaccacgaggagacgggcatcacg

SEQ ID NO: 9016 - DNA, 290 bp, Zea mays
cgcgagtcggagtgcgagttcctgacggagcaggtgacgtgcatgcgcaacggccgccgcgacgactcgtaccagaagtggcggtggcagcccgatggatgcgacctgcccaggtacgatgctcggttgctgcttgagcggctgcgcaacaagcggctcatgttcgtgggtgactcgctgaaccgcaaccagtgggagtccatggtgtgcctggtgcagtctgtggtgccctggggccacaagacgctgcacaagttcgtcaacaacggatcgctcaacgtgttcacggc

SEQ ID NO: 9017 - DNA, 290 bp, Zea mays
caagcttccgtctctttctctctgcgagactgcacactgccaccacgcgcaatggcggcattccaccatttgttgccggccttgctccttctactcctgctcccttccacccctgaggcgacgtcctcggcgctgcttggcatcagctacggccgcgttggcaacaacctccctgcagctacatcagtgccgcagattgtggcttccctgggcgtcggccgcgtccgactctacgatgctgacagcaccaccattcgcgccttcgccaacacgggcgtcgagctcgtcgt

SEQ ID NO: 9018 - DNA, 289 bp, Zea mays
ggatcacaaactggagatgatgatgatgatgatgatgctgtaaatgtctggaacctgcggaagtgtagtgctgctgggttggatgttctctctaatgtgtttggtgacagcatccttccaactttaatgccattgattgagcaaaacttggctcgaacagatgacaattcttggaaggagagggaaactgctgttttgtgtctaggcgctatagcagaggggtgcattggtggtctatacccacaccttcctcagattgttgccttcctaatcccacttcttgatgata

SEQ ID NO: 9019 - DNA, 291 bp, Zea mays
ggcttcgccgcgaactcgccatgatctcgccggagtggagttcgtcacagagcccgcggtcgcaggcggtggcgggggcgccaatcctgtggatatccgtcatggatcccgtcaagatgggcaccggcgtgcaggcctacatctcctaccgcgttatcaccaagaccaacctccctgaatttgagggaccagagaaaattgttattcgacgctatagtgattttgaatggttgcatgatcggcttgctgagaggtacaaaggcgtttttatacctccccttccggagaaga

SEQ ID NO: 9020 - DNA, 294 bp, Zea mays
cccacgcgtccgctctcctcagtaactatagtttttttgttccttgggaggatagaaaaaatatatccttggttttcttgaacagataacatttcaggtgtgcttctgaagagagatttcgttgaacaggatgaatgcattggcagcaaccagcaggaacttcaagcaggcagctaagctgctgggcctcgactccaagctggagaagagcttgctcattccattcagggagatcaaggttgaatgcacaatcccaaaagatgatggaactttggcatcctatgttggatttag

SEQ ID NO: 9021 - DNA, 299 bp, Zea mays
cagcatctcccgtctccgtcgtctcgtctctgctcctcacctcgccgccagccatgggcaagatcaagatcggaatcaacggtttcggaaggatcggcaggctcgtggccagggtcgccctgcagagcgaggatgtcgagctcgtcgccgtcaacgaccccttcatcaccacggattacatgacctacatgttcaagtacgacaccgtgcacggccaatggaagcacagcgacatcaccctcaaggactccaagacgcttctcttcggcgagaagccggtcaccgtctttggcatcagg

SEQ ID NO: 9022 - DNA, 260 bp, Zea mays
ggagtttcttgaggccgttgtcaacatgaagtttgatgaagagccaaactattccaagttgatttcattgtttgacagtataattggaccaatcccttccattagaccaatcaatactgatggagcccaaaaggtagggcagaagcgtgccaggttgcttaatgatgacgacgaccatgtaaaaaagaagattcggctgggtgctcctgcaacacagtggatttcagtatacaattcaaggcaacctatgaagcagaggt

SEQ ID NO: 9023 - DNA, 259 bp, Zea mays
gaatgatgtaatgttgaagagagttgctgctttctcaaagcggctgcttcaggtggctcttcaacggcctcctcaatatggttgcggatgccttttcattctgtcagaagtccttaatgcaaagccaccattatgggggattgtgctccagaatgaatctgttgatgatggttatgaacactttgaagacattttagagattcccgaggactcttctgttgcctcagcagtgctacataaacataatgtaaaagtagct

SEQ ID NO: 9024 - DNA, 263 bp, Zea mays
atttcagccgccgccgcgcgtacaagcaggagcagcaaggatgccggctggccacgggctgcgctcgccgacgcgcgacctgttcgcgcgccccttccgcaagaagggctacatcccgctcaccacctacctccgcacctacaagatcggcgactacgtcgacgtcaaggtgaacggcgccgtccacaaggggatgccgcacaagttttaccacggccgcaccggtcgcgtctggaacgtcaccaagcgcgccatcggcgtcg

SEQ ID NO: 9025 - DNA, 265 bp, Zea mays
gtcccgtgcaagaagggcacatgaggccaagcagaagggaaggcactctggatacggcaagcgcaggggtaccagggaggctaggctccccaccaagattctgtggatgaggaggatgcgtgttctgaggcgcctgctccgcaagtaccgtgaggccaagaagatcgacaagcacatgtatcatgacatgtacatgaaggtcaagggtaatatgtttaagaacaagagggtgcttatggagagtatccacaagtccaaggctgag

SEQ ID NO: 9026 - DNA, 263 bp, Zea mays
ggacggtggcgccggtcgccgccgctcgattgcctccgcctgaatatgccgtgccccataaggcctgaccttgaaagcctcgcctcttgatccactaccggggggaggggaggggcgatgccgaagcggacgacacacacctactcgagcgaggacgcactgccggagggccccgagtccgaccttttcgtatactactgcaagcactgcgcctgagatgtcctcatcaccgatacccaattgcagaaaatgcctaagcgaaa

SEQ ID NO: 9027 - DNA, 256 bp, Zea mays
agcaaatgcaatagacaagatagtttttgatttaagtttggccagggggcttgattactacactggtgttatatatgaagccgtttttaagggttcagctcaggttggctccattgcagctggtggtcggtacgacaaccttgtgggtatgttcagcgggaagcaaatccccgctgttggtgtgagccttggaattgagagagtctttgcaatcatggagcaacaggagaaagaaagaaatgaggtatttgagccc

SEQ ID NO: 9028 - DNA, 255 bp, Zea mays
ggaaatggaggtttacttgagcgcatgaagaacacaggagttgatgttattgggcttgactggacagtggacatgactgatcgaaggaggcgccttggtaatggcattagtgtacaagggaatgtggatccagcatttttgttctcaccattaccagtactaactgatgaaatccatagggttgtgaaagcagctggtccaaaaggtcatatacttaatctgggccatggtgtacttcagaaaacacccgaagaa

SEQ ID NO: 9029 - DNA, 257 bp, Zea mays
ccctgctcatctgcaacgggtacaaggacgacggctacgtctcgctcgcgctcatggcgcgctccatgggcctcaacaccgtcatcgtgctcgagcaggaggaggagctcgacattgtcgtcgaggccagccgccgcctcggcgtgcgccccgtcgtcggcatgcgcgccaagctgcgcaccaagcacgccggccagttcggctccacgtccggggagaagggcaagttcggcctcagcgccgcgcagatactgtcc

SEQ ID NO: 9030 - DNA, 257 bp, Zea mays
ctcccaagccatcttctggacctcacaagtctagggagtgcctgccactgatcctcatcatcaggaacaggctcaagtatgctcttacataccgtgaggtcatttccatcctgatgcaacgccatgtacttgttgatggcaaggtcaggacagacaagacctaccctgctgggttcatggatgtcatttccatccccaagaccaatgagaactacaggctgctgtacgataccaagggccgcttccgccttcaccca

SEQ ID NO: 9031 - DNA, 259 bp, Zea mays
ggaatcagttcacatgacttttgacgccctcaggcgaagacatctgcagatggatgaaacacaggatgctagcagacgtgcacacctgaaggctggtgccatcatgatggccagtaacatcagggcgaattcaggcaagagggtaggaactgtacctggagttgaaataggagatattttctattttaggatggagctgtgtgtcattgggttgcatgcacctagtatgggaggcattgattacatgactactaaattt

SEQ ID NO: 9032 - DNA, 251 bp, Zea mays
cacatacaagtgcaggagttcttgtacttcagagatagatccttggaactcatcgatcaaggtctaagtggtccaattgatgcacaaggattccaaaacgctctatatatgatagacatagggcagaacgatgtaaacgctcttctgtcaaactcgccctatgatcaagttattgccaaattcccaccaattcttgctgagattaaggacgctgtccagactctatatagcaacggtagccgaaacttctg

SEQ ID NO: 9033 - DNA, 249 bp, Zea mays
cggacgcgtggcggacgcgtgggcggacgcgtccgggaccgtggggcattctcgaattccgattcccaatccagcaaaccttaccagccttttgcaaacccagagagggatccgatggcacacaaggcggagaccaagccggcggcgaagaagcccgcagaggaggagcccgcggccccggcggagaaggcccccgctgggaagaagccgaaggcgaggaagcggctcccggcgggaaaatccgccggc

SEQ ID NO: 9034 - DNA, 243 bp, Zea mays
cggaccgtgggatcacctggaacgggatccagcaccggaagaactgctggcaggacggggtgctcggcaccaactgccccatcccgcccggctggaactatacgtacgagttccaggtcaaggaccagatcggcagcttcttctagttcccctccaccggcctgcagcgctccgccggctggttcggcggcatcgtcgtcaacaaccgcgacgtcatcgccgtgcccttcgcccgccccgacg

SEQ ID NO: 9035 - DNA, 252 bp, Zea mays
cggacgcgtggagctggtaaaacaacaatactgtacaggcttcacatgggagacgttctttcaacagtccctacagtcggttttaatgtcgagaaggttacctataagaatgtggcattcactgtgtgggatgtgggtgggcaagaaaaactcaggtcactgtggaagatgtacctgagtaattctgatgcactgatctatgtcgttgattctctggacagagaaaggatcagagacgcgaggcaagagttc

SEQ ID NO: 9036 - DNA, 254 bp, Zea mays
gagccctccgagttcgaggactccgttgcccaggctttctttgatctggagaacgggaaccaggagctcaagagcgacctcaaggacctgtacatcaacaatgctatccagatggatgttacccggagtaggaaggctgttgtcattcacgtcccataccgcctgcgcaaggccttcaggaagatccatgtcagactcgtcagggagctggagaagaaattcagcggcaaggatgtggtaattgttgctacacg

SEQ ID NO: 9037 - DNA, 255 bp, Zea mays
accaaggaagtgatggttcagatatagatgcagtgtctcactttacggagaagtttgatggagaaactattggggatactgagatggcaaatgaagaaaatttgacgaaagaccagatagaggcagagattaagaaaatcaaagaagctaatgctgatgatgaagaatttcctgatgaggtggagacaccattagatgtcccagcaaagaagcggtttgcaaaatacagaggactaaagtcatttaggacatcat

SEQ ID NO: 9038 - DNA, 312 bp, Zea mays
cccacgcgtccgtatgagcgcaatttcatttctgctgttgtgcctccgaatgaaattggaagtgaatttgacgacatcggtgcacctgaggacgtgaagagacaatggatgagctgttacacttccaatgaggagacctgaacttttttcgcgtggaaatttgtaaaggccctgtcaaagtgttttgctttttgggcctcctgggacaggaaaaacactcttggcaaaagcccttgcaacagaagctggagcaaattttatcagtataactggttctacactcacatcaaagtggtttggagacgcagagaa

SEQ ID NO: 9039 - DNA, 307 bp, Zea mays
gcccggggaccgcaacgggaccgacgtcggcggtgccgtactgcgcctcaagactgcttcagctcatagttgggcgtgcatggatctctacgtttttgcaacaccatataggataacatgggactattattttgctgctcgggagcacactttggagattaaatcatgggaggaagaagcggaattgaaatatgtgaaggagcatggcatttctatttttctcatgccatctggaatgctcggaactttgctatctttgattgatgtcctgcctttgttttcagacactgcctggggccaacattca

SEQ ID NO: 9040 - DNA, 139 bp, Zea mays
gcagtcttcatgaagactgccatccaaagatcatccatcgtgacataaaggcatctaacaatcctcctgacttccaatttggagctaaggttgctgattttggacttgcaaagttcaactactgataacaacacccatg

SEQ ID NO: 9041 - DNA, 298 bp, Zea mays
tccaaagtctacggcagctggaacttcaccgagcaggccctccccgacgacctcatcaagcgaggcatggccgttccagatccgtcgagcccctacaaggtgcggctgctgatcgaggactacccgtacgcctcggacgggctggccgtgtggcacgccatcgagcagtgggtgacggagtacctggccatctactaccccaacgacggcgtgctgcaggccgacgtggagctgcaggcgtggtggaaggaggcgcgcgatgtcgggcatgccgacctcaaggacgagcactggtggc

SEQ ID NO: 9042 - DNA, 300 bp, Zea mays
agcggtacaaggaccaagggatcaccgtggttgctggtgttgaagctagagggttcattttcggtcctcctatcgctttagccatcggcgcaaaatttgtgcctttgaggaagccgaagaagttgccaggcgaggtgatctccgaagagtattctttggaatatggaactgacaagatagaaatgcatgttggagctgtacaggccaacgaccgggctcttgtagtcgatgatcttattgctaccggtggaacactctgtgcagctgtcaaacttattgaacgtgttggagcaaaggttg

SEQ ID NO: 9043 - DNA, 300 bp, Zea mays
caggtaagcagcagcaggaaccctagcaccgccgcatccgcagccatgggtatcgacctcgttgccggtgggaggaacaagaagaccaagcgcacagcgccgaagtccgacgatgtttatctcaagctccttgtcaagctctaccgtttcttggtcaggaggaccaagagcaacttcaatgctgtcattctcaagaggctcttcatgagcaaaaccaatcgcccaccaatctccatgcgccgccttgtcaagttcatggaaggaaaggagaagaacattgctgtgattgttggcacagtc

SEQ ID NO: 9044 - DNA, 296 bp, Zea mays
gcagagttgttggagatcctgggcagtattatcaatgggtttgcccttccgcttaaggaagagcacaaattattccttgttcgtgcattgatccctcttcacaagccaaaatgtgtatctatgtaccatcagcagctatcatattgcatcacacagtttgttgagaaggattgcaaacttgctgacacagttattagaggcttacttaaatattggcctgtgacaaacagctcaaaggaggtgatgttcttgggtgagttagaagaggttttagaggcaacacagcttgcagagtt

SEQ ID NO: 9045 - DNA, 298 bp, Zea mays
acgaacaagacaactacttttccattgaattgacgccaagtttgtttacatctgctgtcgataatgcataccagtccatacatgaattttcaaagcctttgatcaacatgatgaatgctgcaggtttggatcttgatggggctgccaatgcgatcgaacctggtgtggtttacacaagaagggctcacaagaagtttgcttttgaatcctatatttgccaaagaatgttcagtggggtccaagatgagagcttttctatcaaggattctaacatcagtgcttccaatgaggctttctt

SEQ ID NO: 9046 - DNA, 298 bp, Zea mays
tctgaaggtgcagcagcctgaagagcccgaaaacacagccacaatcgtctacattgggcatatcccccatggtttctacgaggacgagatgaaagggttctttaagcagtttggggatattaagaggcttaggatcgctcgtaaccgcaagacaggaaagtccaagcactatggattcattgagtttgagaaccctgctgtggcaaaggtcgtagcagatgagatgaataactatctcttgtttgagcgcaccttgcaagttgcacttgttgagccagagaaagttcatcctaaatta

SEQ ID NO: 9047 - DNA, 304 bp, Zea mays
gccagcggaccggtagcaaggggaagaagggggcggccgggcgcaaggcaggcggccccaggaagaagtcggtgacgcggtccgtcaaggccgggctgcagttccccgtcggccggatcgggcgctacctcaagaagggccggtacgcgcagcgcgtgggcactggcgcccccgtctacctcgccgccgtcctggagtacctcgccgccgaggttctggagttggcagggaacgcggcgaaagacaacaagaagacgcgcatcatcccgcggcacgtgctcctggcgattcgcaacgacgagga

SEQ ID NO: 9048 - DNA, 137 bp, Zea mays
cgcgcactgcttcaagtgcacgcatcccagctgcctggtgaagaagaaggttgagcgctcgcgcgatgggcacgtcacggagatcatctacaagggcacgcgcaaccacccgatgcccacgcagagccgccggccag

SEQ ID NO: 9049 - DNA, 295 bp, Zea mays
ctactttcgtcctcacgagtgaccgataatccgccggcgctaagatgttggtttatcaagatctcctatctggcaacgagctcctgtcggattcattcacctacaaggagctcgagaacggcgtcctgtgggaggtcgagggaaagtgggtcacccaaggtcctgttgatgtagacattggtgccaatccatccgccgagggtggtgaggacgaaagcgttgatgacacagccgtgaaggtggttgatattgttgacacattccgtctacaggagcaacctccttttgacaagaa

SEQ ID NO: 9050 - DNA, 289 bp, Zea mays
ggctgctagtttcaacatcattcccagcagcactggagctgctaaggctgttggcaaagtgcttcctgtcctcaatggaaagctgactggaatgtctttccgtgtcccaactgtcgatgtttctgttgttgatctgactgttaggcttgagaagtctgccacctatgatgagatcaaggctgcggtcaaggccgaggcagagggtagcctcaagggcattctgggttatgtcgaggaggaccttgtttccaccgatttccagggtgacagcaggtctagcatctttgat

SEQ ID NO: 9051 - DNA, 295 bp, Zea mays
cggacgcgtggtttgctgttgctgttttggtaacaggaagaccaagaagaagaccaagacctctaaacctaaatttgagaagataaagaaactttttaagaaaaaggaaaatcaagcccctgcatatgctcttggtgaaattgatgaagccgctccaggagctgaaaatgaaaaggctagtattgtaaatcaacagaagttggaaaagaaatttggccagtcttcagtttttgttgcatccacacttcttgagaatggtggaaccctgaagagtgccagtccagcttctcttctg

SEQ ID NO: 9052 - DNA, 293 bp, Zea mays
cccacgcgtccggaaagaaagaaaaggggcaggaagaaatcgagcctcactcgatccatcgcctcgccgcagcacacacgaggccggcggcgccatggccatgaagctggacatgtccgcgctcgagaccaacttcgccaacctgaccgcctccgccggcgacgacacgtacttctccgccgaggcccccgacgtgccgtccatggtgctccccatctgcgacgacttcgacggcttccaggcggccaccaaggatatggtgaagaataagaaggggacgaccacgcttgcct

SEQ ID NO: 9053 - DNA, 295 bp, Zea mays
aggagaaggcacttgacttccgccccaagctcatcatctgcggtggcagtgcgtacccgagggactgggattacgccaagctcaaggccgtcgccgacaaggtcggggccctgctgctctgcgacatggcgcacatcagcgggctcgtcgccgcgcaggaagctgcaaatccttttgaatattgtgatgtggttaccacaaccacgcacaagtccctcagagggccaagggctggcatgatcttctacaggaaaggccctaagccccccaagaagggccagcctgagggtgctgt

SEQ ID NO: 9054 - DNA, 297 bp, Zea mays
cgcaccacaagcgagcgagggacccggggcggaagaagagagagaagacgtctctctcctctcggcgtccccgttccccaacctctcgtctgctgcctgcctgcctgcctgactgcaaaaaggagtttgtcatggcgtctaagcgcatcctcaaggagctgaaggacctgcagaaagacccccccacatcatgcagtgcaggtcctgctggtgaggacatgtttcattggcaagcaacaattatgggaccacctgacagtccctatgctggtggtgttttcttagtgaacattcatt

SEQ ID NO: 9055 - DNA, 295 bp, Zea mays
gaagcacacaagaaaggtgcaaagattgtactcgttcaggaattgtttgaggggcactatttctgccaagctcaaagactggatttctttcggcgcgctaagccttacaaaggcaatccaactattataaggatgcaacagcttgcaaaggagctggaagttgtcatacctgtcagttttttcgaagaagcaaacaatgcacattataattcggtggctattatcgatgctgatggcgctgatcttggactctatcgcaaatcacacattccagatggaccaggatatcaagaga

SEQ ID NO: 9056 - DNA, 296 bp, Zea mays
cccacgcgtccgcccacgcgtccgcaaggagaagaagaggggaagaaatattcttcccgtcgaaagacagagagaggaaaagggacaagggcaaggcaagagagaggcgtcgtcgtttgatctgctgccggagtgcgaagaggaagaggaagaggagcgccggagttgtaaagatgttcctggtggactggttctatggggtgctggcatcgcttgggctgtggcagaaggaggctaagatcctcttccttggcctcgacaacgccggcaagaccagcctcctccacatgctggag

SEQ ID NO: 9057 - DNA, 296 bp, Zea mays
cctccctctccgaaatcaaggtagcatacaccgctgcagtttctagagccctctctgccactcgtgatcccactagtcacgatgcctgccctcgctaagcccgcctcccgcaccgccaagcccgccgcggctccgaagccgaagcctgccgccgccaagccgaaggggccaccgctggtgcctcccacccgccttacttcgagatgatcaaggaggctatcacggcgctaaaggagaggaccggctccagctcgcaagcgatcgccaagtatgtgggggacaagcacggcgcgtct

SEQ ID NO: 9058 - DNA, 277 bp, Zea mays
cccacgcgtccggggtaccggccttcgcgctcgtcaacagggtcaccggcgaggccatcaagcactcccagggcgagggccacccggtcaagctggtgccctacaaccccggctaccaggacgagtcggtgctgtggacggagagccgcgacgtcggccacggcttccgctgcgtccgcatggtcaacaacatctacctcaacttcgacgccttccacggcgacaaggaccacggcggcgtgcgcgacggcaccaacatcgtgctctggaagtggtg

SEQ ID NO: 9059 - DNA, 290 bp, Zea mays
cgcttccagccgccgccgccgcgtccgcctcgcccagcgcacagccgccgcagcacatcgctatctcgatctcagccatggcggaggtggagcagcaacaggacacgccgaagctgttcaaccgctggaccttcgatgatgtccaggtgaacgacatctcgctgaacgactacctcgctgtgaacgcgacgaagcacgcgatgtacctgccgcacaccgcggggcgttactccaagaagcggttccgcaaggcgcagtgcccgatcgtcgagcgcctcacaaactccctc

SEQ ID NO: 9060 - DNA, 288 bp, Zea mays
cctatccagaggagatgatccaaactgggatatccaccattgatgtcatgaattccattgctcgtggacaaaagattccactgttttctgctgctgggctccctcacaatgaaattgctgctcagatttgtcgtcaggctggtcttgtgaagacattggagaaaggaaagcatgctgagggtggtgaagatgacaactttgctattgtgtttgctgctatgggagtgaacatggaaacagctcaattcttcaaacgtgattttgaagagaatggttccatggagcggg

SEQ ID NO: 9061 - DNA, 289 bp, Zea mays
caaacatgaatattcgatctgctgtactgaaattattaactgattttccaattgacttggaacagtatgaccgaagagagcagcttaagaaaagtggtctgggaaaggtcattatgtttttgtccaaatctgacgaggagactactgcaaataggaaattggctaaggagctggttgataaatggagtcgaccaatattcaacaagagcacgagatttgaggacatgaagagatatgatgatgaaagagcaccttacaggcggccacaaatgaagaaaccttcatcgag

SEQ ID NO: 9062 - DNA, 288 bp, Zea mays
catagcagagcaggcgcacggcgcaccgcacacctcactgccgctcccttctcgtctcgtctcctctcctctcctcggcggatccggcaccgacccaccgcccctctgctcgctccttccgccggaatcgctgctcctctctgtgtgctgtcgatttgtgcggcgactgttagtttggttcggtcccatccttctgttgatcaatggctgacggtgaggatatccagccacttgtgtgtgacaatggcactggaatggtcaaggctggctttgctggcgatgatgcgc

SEQ ID NO: 9063 - DNA, 287 bp, Zea mays
tgcagttatcccttattttggttatgcaagggctgacaggaagtcccagggcagggaatctatagctgcaaaacttgtagctaatatgattaccgaagctggtgccaaccgtgtccttgtttgtgatcttcattctagtcaagcaatgggatactttgacatcccagtagatcacgtttatggccagcctgttattcttgattatctcgccagcaagacaatatgttcagatgacttggtagttgtatctcctgatgttggaggtgttgccagggcacgtgcctttg

SEQ ID NO: 9064 - DNA, 291 bp, Zea mays
cccacgcgtccggggtacccggccttcgcgctcgtcaacagggtcaccggcgaggccatcaagcactcccagggcgagggccacccggtcaagctggtgccctacaaccccggctaccaggacgagtcggtgctgtggacggagagccgcgacgtcggccacggcttccgctgcgtccgcatggtcaacaacatctacctcaacttcgacgccttccacggcgacaaggaccacggcggcgtgcgcgacggcaccaacatcgtgctctggaagtggtgcgagggcgacaac

SEQ ID NO: 9065 - DNA, 317 bp, Zea mays
gtaagttcgagcacccgaggcacggctccctcggcttccttcccaggaagcgctcctcccgccaccgcggcaaggtgaagtcatttcccagggatgaccccaagaagccttgccatctcactgccttacttggctacaaggctggcatgactcacattgtccgtgaggttgagaagccaggatccaaactccataagaaggaaacttgtgaggctgttaccatcattgaaacccctcctcttgtcattgttgggctcgtggcatatgtgaagactcctcgtggcctccgcacactcaactctgtttgggcccaacat

SEQ ID NO: 9066 - DNA, 313 bp, Zea mays
cccacgcgtccgcccacgcgtccggggtattgatatcaaggaaatgctagctggtgcagctttaatggatgaagaaacccggaacactgtggttaaagaaaatccagcagcattgcttgcattatgttggtattgggcatcagaagggataggcaataaggatatggttgtacttccttacaaggatagtttgttgcttttgagtagatatttgcaacaacttgtcatggaatctcttgggaaagaatttgatctggatggcaaccgggtaaatcaagggctatctgtatatggaaacaaaggaagtactgac

SEQ ID NO: 9067 - DNA, 311 bp, Zea mays
atggcggtttctttcgcaaacctcaactccgaggcagggcttaaaaagcttgatgagtaccttctcactcgcagctacatcactggctaccaagcttccaaggatgacttggctgtctacacttcgttttcggctgctccctcgtccaagtatatcaacgtagcaaggtggtttaaccacattgatgcgctcgtgaggctgagcggaattactgcagagggccaaggtgtgaaggttgaatcctcagcagttccttcagccccaactccagatgttgctgaagcacaggccccagttgctgaggaggacga

SEQ ID NO: 9068 - DNA, 308 bp, Zea mays
gctagctagcagcactgcgggtacgtacccaactactacacattacgtacgtgagctagctagctatcagctagtgatagagaccagatcagctgcagcggcgacgatggctcctgagaagctgaagctgctcgtcggagtgctggccctgcagttccttctggcagggttccacatcgtctccagggcggcgctcaacatgggcatcagcgagatcgtgttcatggtgtacaggaacctcatctccctcgccttgctcgctccgttcgcctacttcctcgagaagaaagacaggccgccactcacct

SEQ ID NO: 9069 - DNA, 303 bp, Zea mays
gttggcttctcctccccctccggttcgggttctggttcgtgaggttctcctgggttcggtttcgtgggtggtcggatcgatatggcggcgtcggatgttgagtaccgctgcttcgtcggctgcctcgcctggtccacggacgaccactccctccacaacgccttcagcacctacggctaggtcctcgagtccaagatcatcctcgatcgggagacgcagaggtcccgctgcttcggcttcggcaccttctccacggaggatgcgatgctgaacgcatcgagggcatgatcggcaaggtgctgg

SEQ ID NO: 9070 - DNA, 302 bp, Zea mays
gattgcaactgatgtcgctgctcgtgggattgatattgttggtgttcagactgtaataaatttcgcatgcccaagagatgtgaaaacttatcttcatcgtgttggccgcactgcgcgggcaggaagagaaggctatgccgtgacatttgtaaccgatgatgatagatgcctcttgaaagcaattgcaaagaaggctggttcacagctgaaaagtcgcattgttgcagagaaacctgtggctgagtgtgcacgactgattgagcaactagaaggccaaatttctatcatcattcgagaagaaa

SEQ ID NO: 9071 - DNA, 299 bp, Zea mays
cccacgcgtccgctcatggcgtgccgcgccgagttcggcccgtccaagcccttcgccggcgctaggatctcggggtctctccacatgaccatccagaccgccgtcctcatcgagaccctcaccgcgctcggcgccgaggtccgctggtgctcctgcaacatcttctccacgcaggaccacgccgccgccgccatcgcgcgcgactcggccgccgtgttcgcctggataggggagacccttgaggagtactggtggtgcaccgagcgctgccttgactggggcgaagcgggctgccccga

SEQ ID NO: 9072 - DNA, 298 bp, Zea mays
gatagatctgggcaaacctgttgcgcttgacgtcgttgttgatggcacagttcctcaaggctctggactgtcaagctcagcagcgtttgtctgttcagcaacaattgctatcatgggaatccttgacaaaaactttccaaagaaagaagttgctcaattcacttgtctgtccgagcgccacattggaacacaatctggcggcatggatcaggctatatctatcatggcgaaacctggattcgctgagttgatagattttaatccaatccatgcaactgacgtccaactaccttcaggt

SEQ ID NO: 9073 - DNA, 295 bp, Zea mays
gttcacggcgtgcataaataaagtggatcaacgtggctgggttccactagtcatcgcaataaccttcttcgtcatcatgcacgtgtggcatttctgcactgtgaagcgctacgaatttgacatgcacagcaaggtctccatggcgtggattctggggctagggccgagccttggccttgtcagggtcgctgggataggcttcgtgtacacagagctggcgagttgcgtcgcgcacatcttctcccatttcgtcaccaacctccctgccatccactcggtggttgtctttgtctgc

SEQ ID NO: 9074 - DNA, 297 bp, Zea mays
ggacgtggtgactgccgccgcctgccgctaagggatcgcttgctttcctcggaccactctgccgaccacatctacaccgcactcaacggtccttccaagtgagctccaatcccctgtctgtagatggagagggtgctaaaggatgacgccgtcgaggagaatggcgagcgcgccaggatggcatcgtttgttggggccatggcaatctcggattttgtgaagaccacattggggcccaaaggaatggacaagatcctgcaatcaactggcagaagacgtaatgtgactgttacaaat

SEQ ID NO: 9075 - DNA, 288 bp, Zea mays
aggagagagagaattgcagaaaggatgagggcattgcaggaattagtccccaacacaaacaagacagatagggcagccatgctagatgagatccttgattatgtgaagtttcttaggcttcaagtaaagggtctgagtatgagcagactgggcggtggtggcgccgttgcgcagctggttgctgatattccactctcagttaagggcgaagcaggcgacggcgggggggcgcgcagcagcagcagcagcagcacgtgtgggagaagtggtcgacggacggcacggaga

SEQ ID NO: 9076 - DNA, 312 bp, Zea mays
caaagagcgtcaatgacatccacaaaaggggtggtacagttcttggaacatcacgcggtggccatgataccaaaaagattgttgataacattcaagatcgtggaatcaaccaggtgtatatcattggaggagatggaactcagaagggagcatatgagatcttcaaggaaatccggaagcgtggcctcaaagtttctgttgctggagttccaaagacaatagataatgacattgcgatcatcgacaagtcttttggttttgatacggctgtggaagacgcccagcgtgccattgattcagctcatgtggaag

SEQ ID NO: 9077 - DNA, 307 bp, Zea mays
cctgtgcacgacactaggtggagctgcgccgctctcaccttcaccggcgacgggcattcacaagtagtgatctcttgactaacggcgtagtggtgactaaagagccttgacaatgagcagcataggcacaggttatgatctgtctgtcaccaccttctctcctgatggccgcgtctttcaggtcgagtatgccacaaaagctgtcgacaacagcgggactgttgttgggatcaagtgcaaagatggcattgttctgggtgtcgagaagctggtaacctcaaagatgatgctggaggggtcaaatcgg

SEQ ID NO: 9078 - DNA, 300 bp, Zea mays
cgacgagaagcgcgagttcaccaccgtcatgaagaagccgctgcgcccgcgtctcgtgccaaggagttgatcggacatcagacttcaatagtgaactttttggacaaattaataaaatagacgatctagcagctcgtctaatagcagatcatggagttactaaaaccagctctttaccgagcacagaactttgccgagggcggtactcggcaaagtctgctttgccgagtgcccgataaaaagcactcggcaaaggcgtggattccgatagtaacttgttttctacattatttttacttt

SEQ ID NO: 9079 - DNA, 295 bp, Zea mays
agttactgctagggctggaaaggaccttgtttccagcttggtgtctggattattgacaattggcccccgttttggcggagaattgatgatgcagcccgatacttcaaagatgcatgtgataggggcctcacaccatacgagtttgttgaaggcatgaaaaagaagggaatccgtgtgcctgggattggtcacaggattaagagcagagacaacagggataagcgtgtgcagcttctacagaaatatgctcacacgcatttcccttcagtcaagtacatggaatacgctgttcagg

SEQ ID NO: 9080 - DNA, 295 bp, Zea mays
ggcagtttaacagctaccttggctggcaagaacagggtgatgggaaattattctatggagtgcatgttgataatggtcgtgttggtgggcaagcaaagaaaactctacgagagataattgagaagtataatttggatgttagtattaccccaaaccaaaatcttattttatgtgggattgatcaagcatggagagaacccataactacagctcttgcacaagctggcctgctggaaccgaaggatgtcgaccccttgaatttaactgccatggcatgccctgccttgccactgtg

SEQ ID NO: 9081 - DNA, 295 bp, Zea mays
accctcgtctcgtgccactttctcagtcccctctagccgccgcctaccgctcgcgctctcctcgcgttcgggaaggtcgtttcgccatggcctcggagacggagacgttcgccttccaggcggagatcaaccagctgctctcgctcatcatcaacaccttctactccaacaaggagatcttcctcagggagctcatctccaactcctccgatgccttggacaagatcaggtttgagagtttgacggacaagaccaagctggatgcacagccagagctgttcatccacattgtccc

SEQ ID NO: 9082 - DNA, 300 bp, Zea mays
gatatcttcttatggtatgttcatggtgaatgtaagaactttatggtactgagagggcacaagaatgctattcttgaccttcagtggactactgatgggacccagatcatctctgcaagtcctgacaagactgtgagggtctgggacgttgagactggtaaacaagttaagaagatggctgagcactcatcattcgtcaactcatgctgcccagcacggaagtggccacctcttgtggttagcggttcagatgatggtacagcaaagctgtgggacttgcgtcagagaggtgcaatacaa

SEQ ID NO: 9083 - DNA, 290 bp, Zea mays
aaagtttgctatgtgcagtttcctcaaagatttgatgggattgatcgccatgatcgatatgctaacagaaatgttgtctttttcgatatcaacatgaaaggtttggatggtatccagggcccaatttatgtgggtactggatgtgtcttcagaaggcaggcattatatggctacgatgctcccaaaacaaagaagccaccatcaagaacttgcaactgctggccaaagtggtgcatttgctgttgctgttttggtaacaggaagaccaagaagaagaccaagacctctaa

SEQ ID NO: 9084 - DNA, 291 bp, Zea mays
cccacgcgtccgcgcaccgctcctgagtcctgtccaccctgccaccgccgacgccgcgccgccgcagcaattgtcaccgtcgctatggcccgtatcaaggtgcacgagctccgggggaagagcaagacggacctgcaggcgcactcaaggagctgaagtctgagctctccctcctccgcgtaccaaggtcaccggcggcgcacccaacaagctctccaagatcaaggtggtgcgcacctcgatcgcgcgcgtgctcacagtgatctcgcagaagcagaagtcggcgttgcg

SEQ ID NO: 9085 - DNA, 290 bp, Zea mays
ggtttgccttcgccttcacaattcgcaccacattattgtcttgtgttgcccgcaacccaaagcggatcaaaccctagatctcgtccccgttcctccgatcctcatggattcctcctcctcctcgtccagcctgagccagcagcccgagttcgattacctcttcaagctgctgcttatcggcgactccggcgtcggcaagagcagcctcctcctccgtttcaccgccgactcctttgaggacctttcccccaccataggtgttgacttcaaggtgaagatggttaccattg

SEQ ID NO: 9086 - DNA, 291 bp, Zea mays
cggacggtggtagacaggctccatcaccagctcagccagcagctgcaccaccagtgcagtcatctgccgcctctgcagagcctaatgcgagtcctctgaacctttttcctcagggtgtcccaagtggtggggccaatccaggtgttgttccagctgcaggatctggtgcccttgatgccttgcgacagcttccacagtttcaagcactgcttcagttggtccaggctaatcctcaaatcttgcagccaatgcttcaagaactaggcaaacaaaacccacaaatcctgcgtt

SEQ ID NO: 9087 - DNA, 288 bp, Zea mays
attcagcttgtggacttcggagagatgggacccattcggtgttctcgttgcaaagcgtacataaaccctttcatgaaatttgttgaccaagggaggcatttcatctgtaacttatgtggattcagaaatgatactcctagagattacatgtgcaacttagggcctgatggtaggcgacgtgatgctgatgacaggcctgaattgtctagaggaacagttgaatttgttgctacgaaggaatttctggttcgtgaatcaatgcctgctgtatacttcctccttattgat

SEQ ID NO: 9088 - DNA, 314 bp, Zea mays
gatcgggaggcgaaaccaaggcatacatatacatatttgtagtggtaccatcataacaagtaaagatggtgaagttcacggctgaagagctccgtgccatcatggacaaaaaggacaacattcgtaatatgtctgttattgctcatgtggaccatggcaagtctacacttacagattcccctgtggcagctgctgggattattgcccaggaagttgctggtgatgttcgcatgactgatactcgtgcagatgaagccgaacgtggcatcacaatcaaatctactggtatctctccttattatgagatgactgat

SEQ ID NO: 9089 - DNA, 313 bp, Zea mays
ccctagaggtggtcgtggctatcgctatcctactggacgtggaatgcctgatcctggcatgcacagtgttggtgctgtgatgccaccttcatatgagatgggagggatgccaatgagagaagctgccccccaacctgttccaattggggcgctagcactgcacttgctaacgccccaccagatcagcagagacttatgcttggatagaacctgtatcctcttgttgaacagctggaacgtgagcaggctgccaaggtcactggcatgcttttggagatggatcagacggaggttcttcacctgctggagtcgc

SEQ ID NO: 9090 - DNA, 308 bp, Zea mays
gggggaaaaacccctactgggtcttgaacatgtggcgacccagaggcacgcgccatccacatttattctcggcatacacaagcagcaaccatccatgagaagcaggggggaaaaacccctactgggtcttgaacatgtggcggatcaggtcgacgacgcggttgctgtagccccactcgttgtcgtaccacgagacgagcttgacgaagtggtcgttcagagcgatcccggccttggcgtcgaagatgctcgacctgctgtcaccaaggaagtcggtagaaaccagatcctcttccacataacccatg

SEQ ID NO: 9091 - DNA, 311 bp, Zea mays
cgctcaaggagaggacggggtccagcagctatgcgattgccaagttcgtggaggacaagcacaaggacaagctcccgcccaacttccgcaagcgtctgaacgttcagctcaagaagctcgtcgccggcggcaagctgaccaaggtgaagaactcgtacaagctgtcgtccgccgccaccaagccgaatcccaagcccaaggccgccccgaagaagcccaacaccggcgctaagaagcccaaggccgctgccaagaccaaagctaagacccccgccaaggcgaagccgccacaaagccctaagccgccgcga

SEQ ID NO: 9092 - DNA, 314 bp, Zea mays
gcgggcggcatcgggcagccgctctccctcctcatgaagctcaacccgctcgtctcctccctctccctctatgatatcgccgggacccccggcgtcgcggccgacgtctcccagatcaactcccccgccctggtgaaggggttcatgggggacgaccagctcggggaggcgctcgagggctccgacgtcgtcatcatcccagccggggtgcccaggaagcccggcatgactagggacgacctcttcaacatcaacgccggcatcgttaaggggctctgcactgccatcgccaagcactgccccaacgctcttgt

SEQ ID NO: 9093 - DNA, 314 bp, Zea mays
gtcataaatccagttgcaaataataatggcgttcttctctgttgtaatagcactattcaaggatatacctgacatcgaaggggaccgcatattcgggatccgatccttcagcgtccggttagggcaaaagaaggtcttttggatctgcgttggcttgcttgagatggcctacagcgttgcgatactgatgggagctacctcttcctgtttgtggagcaaaacagcaaccatcgctggccattccatacttgccgcgatcctatggagctgcgcgcgatcggtggacttgacgagcaaagccgcaataacgtcct

SEQ ID NO: 9094 - DNA, 314 bp, Zea mays
cctccgtccgtttactcacacggtcacaccgcctcaaactcgcgctgcccgtcgcccccaagcctcggttccgccggcgcgcgagaggattcgagctgggtcttgggtagcctctcaccgtctcacgatgccgccagcacccaagtccggcgacgccctcttcgccagcgtggatcgcgtcaatgcggagctgttcacgctcacgtacggcgccatcgtgcggcagttgctcacggatctggaggaggtcgaggaggtcaacaagcagctcgaccagatgggttacaacattggaacacgattggttgatgagt

SEQ ID NO: 9095 - DNA, 313 bp, Zea mays
gccatggccagcgagaataaggtctttgggttcgaggaagtcgccaagcacaacgtcaccaaggactgctggatcatcatcgccggcaaggtgtatgacgtcactccgtttatggatgagcatcctggtggagacgaggttttgctagctgtaactgggaaagatgctacagctgatttcgaagatattggccacagtgattccgcaagggacatgatggagaagtaccacatcgggcagatagatgcttcaacaatcccagcaaagcgtgctcatgtgcagccccagcaagcacccagccatgcagacaagg

SEQ ID NO: 9096 - DNA, 311 bp, Zea mays
ggcatgtggtgtgttgccgattgataggatgacaaagcaccgggaagctattcaagtggtggcagatcgtgtcccaagggacatccttgagcagatttacaaaattgcattgccaaagccaaagccatatgaaccccagtcccggccgccaactgctgctgagctgttgcgggcctactgcgcgtctcgtgggcatgtcagccatgctgggctgcctgatgagaccagggctgctcgacagatactgaaggattacattgatggtaaaatcccacactttgagctccctcctggcgtgacaggccctgagg

SEQ ID NO: 9097 - DNA, 308 bp, Zea mays
gccgagatcgacggcgccccgaggatgggcccgacgttcggcgccatgatgatctccggccagaaggcggcgcacctggcgctgaaggcactgggcaggcccaacgccgtggacgggaccatccccgaggtgtcgccggcgctgcgcgaggagttcgtgattgcgtccaaggacgacgaggtcgtggacgcctgagcgagcatccacgcgccagcatgcaagcagcgtcttatctgggccggcgccatcacggggtttcttcttttaatctgggactttgttgttgttggacgaatgaattcccttcg

SEQ ID NO: 9098 - DNA, 309 bp, Zea mays
cgcagaaatctgacgtctacagcttcggcgtcctcctcctcgagatgctcacaggcaaagcccctctcaggtcccccgggcgcgacgactccatcgaacacctcccgaggtgggtgcagtccgtggtccgggaggagtggacgtcggaggtcttcgacgtcgacctgctgaggcacccgaacctagaggacgagatggtccagatgctccacgtcgcgatggcatgcgtcgcggtcgtccccgacgagcggcctcggatggaggaggtggtcggcaggatcgaggagatccggagctcctactcggaca

SEQ ID NO: 9099 - DNA, 309 bp, Zea mays
ctacccggcgctcgcgcggctttctttcccaactccgacgaaggctagctacaccacctggcgcgggctcgtctccatcgcccgccacccgctccgtcgtcgtcgtccccgccgcgccgatcccgaatcgaatggggagcctggcgtccgagaggaaggtggtcgggtgggccgccagggacgccaccggacacctctccccctactcctacaccctcaggaacacaggccctgaagatgtggtggtgaaggtgctctactgcgggatctgccacacggacatccaccaggccaagaaccacctcgggg

SEQ ID NO: 9100 - DNA, 309 bp, Zea mays
agacaacaaatacacaaccgtgcagtttacaggcgaggttttgaaaactcctgtctcactcgatatgcttgggcgcatttttaatggttctggaaaacctattgacaatggccccccgatattacctgaagcctacttggatatctctggaagttctattaatcccagtgagagaacctatccagaggagatgatccaaactgggatatccaccattgatgtgatgaactccattgctcgtgggcaaaaaatccccctattttctgctgctggactccctcacaatgaaattgctgctcagatctgtcg

SEQ ID NO: 9101 - DNA, 305 bp, Zea mays
ctctatgaggtttctgaaagttgacaggaaaacagttgatcttgtcggtaatgagaaactgaaggccagtgcatctgttaagcaccttgctcttccttgtaacaaggcagcaagggcacaagttattccagacattatccgatgttatagccatggaggtcgaaccatcatcttcactgagacgaaggattctgcatcagagctttctggtttgattcatggatcccgtgccttgcatggagatgtagcgcaacgcagctgcaagtaattcttgctggattccgtagcgggaagttccaagtttt

SEQ ID NO: 9102 - DNA, 305 bp, Zea mays
cgcctccgccgcggcaccggcactacgagtgcttcgctaccagccagccagcacactctacgagtcgccatcttccactccaccgaggcagctccaagccatggccatggagaaggccgcctccttcctctcctccctcttaggcggcggcggcggggagccggcggcgactgtgaaatctatcttcatataccctatcaagtcctgcaggggtcttgccgtgtcacaggcgcccatcacctccactgggttccggtgggatcggcagtgggtggtggtgaacgccaaagggcgagcatacaccc

SEQ ID NO: 9103 - DNA, 303 bp, Zea mays
cccacgcgtccgcaaagatggttttccaattggtaatgaagttatttatgtgggtagtttgaatgttcaagttgatcctattgagcaagatcgagtttctcagaagctcttcaaggaacacagatgcgtacctacctttctcccagctgaactccagcatcaattctatcacatattctgcaaacagcacttatggccacttttccattatatgcttcctgtttgtcatgacaaagatgagctctttgaccgttccctttttcaagcctacgtgcgggccaacaaaatttttgctgacaaaat

SEQ ID NO: 9104 - DNA, 304 bp, Zea mays
gaggagagagagagggagagattagagggagcgccctgcccaagcaaagagaaaccgcggcgcgagacgccggaggaaccccagacgggcgagcaggatgagagagatcatcagcatccacatcggccaggccgggatccaggtcggcaacgcctgctgggagctctactgcctcgagcacggcatcgagcccgatggcaccatgcccagtgataccacggttggcgtcgcacatgatgccttcaacacgttcttcagcgagaccggttctggcaagcatgtgccgagggccatcttcgtcgac

SEQ ID NO: 9105 - DNA, 300 bp, Zea mays
caaaattggagaagtgccatcaaagttgctgttcatgaggtgcgaaggctgaaagaatttggtgttacaatgggagaaatgacccgttacatggatgcactgataaaagatagtgaacagcttgctatgatgattgacagtgttccctcagttgacaacttggacttcatcatggagagtgatgcacttggccacactgtcatggatcagttgcagggacatgaaagtttgcttgcagtagctgagactgtcacccttgaagaggtcaatactgttggtgcggaagtattggaattcatt

SEQ ID NO: 9106 - DNA, 303 bp, Zea mays
cacttctgtacccaaccagaagagcggcggcgcgggcggacaaggagcaggcggaggaggagttgtgccaagccacaatgggtatctcgcgtgactcgatgcacaagcgccgagccaccggtggaaagcagaaggcctggaggaagaagcgaaagtatgagcttggtcgccagccagccaacaccaagttgtcaagcaataagacagtgaggagggtccgtgttcgtggaggtaatgtgaaatggagggctcttcgccttgatactggtaactactcatggggaagtgaagctgttacccgca

SEQ ID NO: 9107 - DNA, 306 bp, Zea mays
tttcattctaagacgggtatcatcatgataatagtgtcgctggttgcttcagttgattcgctttcatcgtaccatgctgcatcgctgctggtaaatttatgtccaccaacacgcggagttgtcagcagagcgattgggcttgaagggatttcaagttttattgctggagtgtggggtacaggtacaggatcgataacattaacagagaacatacacacccttgaaacgaccaaaatggccagcagaagggcattgcagcttggggcagccgttttaatcgtctgctccttctttggtaaaatcgga

SEQ ID NO: 9108 - DNA, 320 bp, Zea mays
caaggattttgagatgggtgtctccaacaagacccctgagtttcttaagatgaacccccttgggaaggttcctgttctggagactcctgatggccctgtttttgagagtaatgctatcgcacgctatgttgctcgcttgaaggatgacaaccctctttttgggtcttcccgtattgaacaagcccacgttgagcaatggatggattttgccgcaacagaagttgatcctggtgttgcatggtacttgtatccaaggcttgggtacctcccttatgttagcacaactgaggaaacagctatttcttcattgaagaggtcgc

SEQ ID NO: 9109 - DNA, 318 bp, Zea mays
ttccactcatgcagtggtgtatgctcggctgataactgaaggaaaggactatggtatacatggtttcattgtgcaactgcgaagcttagaggatcactcccctcttcctggtattactctgggtgatattggtggaaaatttggcagtggtgcatataacagtatggacaatggtgttctgcgatttgaccatgtgcgcataccaagggatcaaatgttgatgaggctttcacaagttacaagggaggggaaatatgttcattcagatgtcccaaagcagctgctttatgggacaatggtttttgttcgccagacaat

SEQ ID NO: 9110 - DNA, 266 bp, Zea mays
gcaagaagagagccgatcgaccgagagctagcacgcgatggcgaggtcttccaagatgatggtggcggcagctctgctggccttggccctggccgtgtcgaccgccgaggcgaggaacatcaagaccacgacgacggagaagaaggacgacgcggtggtgcagccgcagaccttcgcgcccttcgaccgcctcggcggcggcgcgtccccggcgttcggcggcctccccggcggcgacattcctggcagcagcattccgcggttca

SEQ ID NO: 9111 - DNA, 104 bp, Zea mays
gttcccgcccatccatcagtgtcaaaatggacatactttgtgttcgacatgcaaggccagggtgcacaaccggtgccctacatgcagacaagagcttggtgata

SEQ ID NO: 9112 - DNA, 317 bp, Zea mays
  unsure (1)..(317): unsure at all n locations
gaaaacctccaaggctccaaccctagccgcgatccgacaacgcctccatccctagccgactgctgcaacttcagagctcaagagtcagggcgccatggcgacagagacggagaccttcgcctttcaggctgagatcaaccagctgctctcactcatcatcaacaccttctattccaacaaggagatcttcctccgggagctcatttccaactcttccgatgcgttggacaaaatcaggttcgagagcctcactgacaagagcaagctcgatgcgcaccnggagctgttcatccacattgtaccagacaaggcttcga

SEQ ID NO: 9113 - DNA, 319 bp, Zea mays
catttcgatctcatttgaaatcaacccatcctcgtttcctccgtctagcagcctctcaccctcatggccaagatcaagatcgggatcaatgggtttggcaggatcggaaggctggtggccagggtggccctgcagagcgacgacgtcgagctcgtcgccgtgaacgaccccttcatcagcaccgattacatgacctacatgttcaagtatgacactgtgcacggacagtggaagcaccatgaggtcaaggtgaaggactccaagacccttctctttggtgagaaggaggttgctgtgtttggctgcagtaaccctgagg

SEQ ID NO: 9114 - DNA, 320 bp, Zea mays
caccgacttcaccggtgacagcaggtcgagcatcttcgacgccaaggccgggattgccctgaacgaccacttcatcaagctcgtctcttggtacgacaacgagtggggctacagcaaccgcgtcgtcgacctgatccgccacatgttcaagacccagtagagagagatatttctgcctccctatcgagggtcgtccccgatggcctttggtcgcagacagtctttgctgcttgtctatgctgagaataaatgtgaacggtgcccctggacgctggatccatgctggttttggacacggttgtctttttgtgtttaactta

SEQ ID NO: 9115 - DNA, 318 bp, Zea mays
cccacgcgtccgcagtctaccttttaatcctgctacggcttttagggctgcttatgaatccttgtctattgatgccattggcacaaagtcagtgagtatgcagaaagtgtggcatctaattcaggcattggttggggaagggttgactcatcgaaatgtttcaagaaaaatgtcactagtggtaggtgcaaggcaccatcttgagtggggtcatgaaaagtacatacttgagaccatcaacagccatccagctcttgctgcccttggtggatctgttggcaatcttcagaagatccgagcatttcttcgggtaaggct

SEQ ID NO: 9116 - DNA, 324 bp, Zea mays
gatcctgactggtactacatcagggctgcatccattgcaaggaagatctacctaaggcaaggcatcggtgtgggtggctttcagaagatctacggtggccgccagaggaatggctcccgcccaccacacttctgcaagagcagtggtgctgttgcacgcaacatcctgcagcagctgcagattatgggcatcatcgatgtcgatcccaagggtggacgcctcatcaccaaccagggaaggcgtgatctggaccaagtggctggaagggtcgctgttgaagcgtgagcagtgtcatctttggtttcaatggtgtcatgtttgatg

SEQ ID NO: 9117 - DNA, 314 bp, Zea mays
gttcagaatgaggatggaacaaaagtcgaatacagggtgtggaaccccttccgttccaagctggctgctgctgtgcttggtggtgttgacaacatctggattgctcctggtacccgtgtgctgtatcttggtgctgcttctggcacaactgtatctcatgtgtctgatattgtagggccggatggtctggtctacgctgttgagttctctcacaggagtggaagagaccttgtcaacatggcaaagaagaggaccaatgtgatccccattattgaggatgccaggcatccggcaaggtaccggatgttggttgg

SEQ ID NO: 9118 - DNA, 315 bp, Zea mays
ggatccgactctctaggacagtcatgtactactagcttgttgcacatatgatggccagcaaagcaagaactgatcaaaagttagtcagcactgaacaagatcacgttttttttgtggttgatgttcttggggccaggctgttcctcttaggcctgaagaaatacggcaagggggactggaggaacatatcgcgcaactacgtccagacgcggacgcccacgcaggtggccagccacgcgcagaagtacttcatcaggctcaactccggcggcaaggacaagaggaggtccagcatccacgacatcaccacggtga

SEQ ID NO: 9119 - DNA, 312 bp, Zea mays
cgcagagccaaagcgttgttgagtccagatcatcggctccagctgctcagctgggagaagatcaagctgcagcgaaggcacaggcagcctttcgtggttacctggcacgaaggtcattccgtgcattaaaaggtatcgtaagactccaggcgctgattcgagggtatcttgtaaggaggcaggctgtatcaacccttcgcgcaacatggttgattgtgaagtttcaggctctagttcgtggaagaaatgttagactctctggcagtcgcatgcagctcaatgtgaagtttggacagagtaactttgggggtg

SEQ ID NO: 9120 - DNA, 310 bp, Zea mays
cgggaaataaaacgtctaaatttgggatccgcaatgagaaattgcaatggtttttggactctatcaagtcatacccgaatgaaatcaaacttgttggtgttcattgccatctgggatctactattacaaaggttgatatattcagagatgctgcagttcttatggtgaattatgtcgatgaaattcgagcacaaggttttaagttggagtacctgaatatcggaggtggtttgggaatagattaccatcataccaatgcagtcttacctacacctatggatctcatcaacactgtgcgagaattagttct

SEQ ID NO: 9121 - DNA, 314 bp, Zea mays
cccacgcgtccgaagacatcgtgccattctacctcgagcacagtcctcgcatcttcccatgcagaactgggattttggcctgatcatcaccttaactgtttgtaggatcttgaagaaccagcccaaaatcctacaaacagttaaggtgatgatcaggccaaaatatgacgggaagtacctgcacaaagtgaccagtgatctgctgggtggtaccagagtggaagagacgctgacaaatgtcgtcattcctactttcgatgtcaagtgcgtaaagccaacaatattcagcacattcaaggcaagatctagtgcct

SEQ ID NO: 9122 - DNA, 318 bp, Zea mays
cggacgcgtggcggacgcgtgggtccgccgtgagtacaaggcaaaaaagatctctgaggaggaatacgtcactgccatcaaggaggaaatcaacaaggtcgtgctagcttcaagacgagcttgacattgatgtgcttgtgcatggcgagcctgagagaaacgatatggttgagtacttcggtgagcagctctccggttttgcgttcactgccaatggctgggtgcagtcttatgggtcaaggtgcgtcaagcctccgatcatctacggtgacgtgagccgccccaaccccatgaccgttttctggtcgaagacggcac

SEQ ID NO: 9123 - DNA, 317 bp, Zea mays
cgacgaggtgtacggcatggtcagcgagaatccgctgcaggggcccaagcagtccggctcgctggcggaatacaccgccgtcgaggagaagctgctggcgctcaagcccaagggcctcgacttcgcgcaggccgccagcctgccgctagccgtcgagaccgccaacgagggcctggagagggcaggaatatccgccggcaagtccgtcctcatcctcggtggcgccggcggtgtcggctcccttgcgatccagctagcgaacgatgtctacggcgcgtccaaggtagctgcgacggccagcaccaagaagatcgagc

SEQ ID NO: 9124 - DNA, 316 bp, Zea mays
ccagccttgaccaaaggctatctttttcctccggacaagaaaccggctcgcctacctggtttccatacatgcgttggatctggtggacagcgacagactgctgaatggtacaaggagaatggtatagaggtgctgtatgaggatccagttgtagcatttgatggcaaaacgcaaaccttaaagacttcatcggggaaagttctgaaatacggctcacttattatttctactggatgtgaagcatcgagattacctgagaaaattggagggaaattacctggagttcactacatacgggatgttgctgatgctgatg

SEQ ID NO: 9125 - DNA, 315 bp, Zea mays
cacgtgccaaggcagttgcgacgccgatccgctcccatctccatggcgcgctccggcagcggcggcaatgccgacccactcccacctccctggtatactcacagacgtagaaatgatgttatcactatcttcttctgcagggcaaattggacccagtcgttggtagacaagatcagattgagcgtgttactcagattttgggcaggcggacaaagaacaacccctgcctaattggagagcctggtgttggaaagactgctattgctgaggggcttgctcagcgtattgctaattgggatgttcctgaaacaattg

SEQ ID NO: 9126 - DNA, 311 bp, Zea mays
atcaagttttatccaccaaggtcgaaatacgccttgcaaaagctgagcaggtgacatggacaaccctggattatagtggaagaccaaaggctattccccagaagataagcacgccagctgaaacagccccaagaccttcatacccatcttcaaagtcaaaaaaggactgggataaactggaagctgaagtaaaaaaggaggagaaggaagaaaaacttgaaggtgatgctgcattgaacaagttcttccgtgatatctacaaggatgctgatgaagatatgcggagggccatggacaagtcattcagggaa

SEQ ID NO: 9127 - DNA, 307 bp, Zea mays
tctaattctcctcgcgagcccaaaccctaaacctaaacctttcacccgccgccgccgccaccaccagcactgccactccgccaccaccgtcccgaagccccctcccagcgccatcgacttcatctcggattgaagcaatgtcgtcggacgatgaggtcagggaggagaaggagctcgacctctcctccaacgacgttgtcaccaagtacaaggctgccgccgaaatcctcaacaacgctctgaagattgttgtgtctcagtgcaagccaaaagtcaagattgttgacctttgcgagaagggcgactc

SEQ ID NO: 9128 - DNA, 305 bp, Zea mays
atgctgtgccctcttgtggctgatgcctgcattcaagtttgccccaaaaatcctgcaaactttaatgttgacaatgttagagtggctaagctacttggacgtggtttgcacaattcttctgtggtccgtgggatggttctgaaaaatgatgctgttggtagcatcaaaagggcggagaaggcaaagattgtcgtatctgctggtggtgtcgacacctcggcaactgaaacaaagggaaccgtgttgatccattccgctgagcagctagaaaattatgctaagactgaggaagctaaggtggagga

SEQ ID NO: 9129 - DNA, 307 bp, Zea mays
cggacggtgggcagcgaaatccaatctagaagctcccctctccctccctccctctctctctctctcttcgccgtccgaagctccgcacccaatctaatcgacacctcaccgagatgggccgcaagttcttcgtcggtggcaactggaaatgcaatggaaccacagatcaggtcgagaagattgtcaaaaccctgaatgaaggacaggttcccccttcagatgttgtcgaggtcgttgtcagccctccttatgtcttccttcctgtggtcaagagccagctgcgccaagagttccatgttgctgctca

SEQ ID NO: 9130 - DNA, 306 bp, Zea mays
cggaccgtgggcttgtcggtccattcctcgatggatttttgaccaaccaaaatgtctttgctttcgactacacaactcaagttctgtttttcatcgtgctgtcatgcctgatttcagtctcggtgaacttcagcacttttctcgtgatcgggaagacgtctcctgtaacctaccaagtccttggccatctgaaaacatgcttggtcctcacctttggctatgtcctgcttcacgacccgtttagctggagaaacatacttgggatcctaatcgcggtaatcgggatggttctgtactcgtacttct

SEQ ID NO: 9131 - DNA, 311 bp, Zea mays
caagaacacaggttctcctacctgcaagagaggatttgttcagttctgctacgagccaatcaagcaaatcatcaaaacctgcatgaatgaccaacaggagaaattgtggcccatgttgcaaaagcttaatgttaccatgaaggctgatgagaaggagttgattggcaaagctttgatgaagcgtgttatgcaaacgtggctaccagccagcactgcacttcttgacatgatgatattccaccttccttccccggcaaaggctcaaaagtatcgtgtggagaacttgtatgagggaccccttgatgatgttt

SEQ ID NO: 9132 - DNA, 310 bp, Zea mays
cccacgcgtccgcgatgagggtctggattacgctcctctcgtatccgatgatggtgaggttgtcgatctcatcaccgccaaggacgtggagcgcatccggagttatcccaagctgggcaagccgtctctcggagccaacgggaagtttgtagttgcggcttccattgggactcgtgaggatgacaagggaagactggagcaactagttaaggcgggggcaaatgctatcgtgattgatagttcacaggggaactccatataccagctcgatatgataaagtttgcgaagaagatgtatccggaggtggat

SEQ ID NO: 9133 - DNA, 178 bp, Zea mays
ctcctgagcactttctcctcgtccccgacaagccaatcgaagccgagatacggccatggactccaccggcaccggagcagggggtaaagggaagaagggagcggccgggcgcaaggtcggcgggccaaggaagaagtcggtgtcgaggtccgtgaaggccgggctccagttccccgtc

SEQ ID NO: 9134 - DNA, 280 bp, Zea mays
tgagctttatctgaacttggtccttgagtatgtgccggagacagttcatcgagttgtgaagcatcacaacaagatgaaccaacgcatgccacttatttatgtgaagctgtatatgtaccagatatgtagggcattggcttacattcatggcactattggtgtctgccacagagatattaagccacaaaaccttctggtgaacccacacacccaccagcataaactatgtgactttggcagtgcaaaagttctggtcaagggggaaccaaacatatcgtac

SEQ ID NO: 9135 - DNA, 280 bp, Zea mays
cccacgcgtccgagccgccccaaccccatgaccgttttctggtcgaagcggcgcagagcatgacgtctcgcccaatgaaggggatgctgactggcccagtcacaatcctcaactggtccttcgtccggaatgaccagccgaggtttgagagttgctaccagatcgctcttgcgatcaagaaggaagtcgaggatctcgaggctggtggtattcaggttatccaaatcgacgaggctgcactgagagaagggctgccgctccgcaaggctgagcatgcatt

SEQ ID NO: 9136 - DNA, 278 bp, Zea mays
cagagggagagattggagggaggcccctgcccaaggcaagagcaaccgcggcgccggagccggaggaagggcagacgcagacgggcgaacaagatgagggaggtcatcagcatccacatcggccaggccgggatccaggtcggcaacgcctgctgggagctctagtgcctcgagcacggcatcgagcacgatggcaccatgcccagtgattcctcggttggcgtcgcacatgatgccttcaacacgttcttcagcgagactggttccggcaagcatgt

SEQ ID NO: 9137 - DNA, 282 bp, Zea mays
ggcacttgtgcaaggctaaatgaggaacttgctgaaacaagccttaagctcaggcagatgagaggagatgagctccagaggctgagcgtcgaacagctgcaggagctcgagaagaccctcgaatccggcctcggctctgtactcaaaaccaagagccagaaaatccttgacgagatcagcggtctggaaagaaagagaacgcagctgatcgaggagaactcaaggctgaatgagcaagtgacacggatgtcgatgatggagacgcagcttggcgccgatcca

SEQ ID NO: 9138 - DNA, 282 bp, Zea mays
ctcgtctctcagatcgggaggcgaaaccaaggcatacatatacatatttgtagtggtaccatcataacaagtaaagatggtgaagttcacggctgaagagctccgtgccatcatggacaaaaagaacaacattcgtaatatgtctgttattgctcatgtggaccatggcaagtctacacttacagattcccttgtggcagctgctgggattattgcccaggaagttgctggtgatgttcgcatgactgatactcgtgcagatgaagccgagcgtggcatcac

SEQ ID NO: 9139 - DNA, 270 bp, Zea mays
cgcttggcgtccgcctcaacccgccgccaggagacccggctcggtcggttcgtcgaagatcccggatctgctctgtcacgaggtctttcggcgggtgttgtctcgcgaggtgtagcgagccaagttcaggagagtttcgagaagctgaaatggctcctaaagctgctcctgccaagaagggtgatgccaagacccaggccttgaaggttgccaaggctgtgaagtctgggtcagtaaagaagaccaagaagatccgcacgtccgtgacat

SEQ ID NO: 9140 - DNA, 275 bp, Zea mays
gctcggccttgagacctaccctggcgtcaagcgcatcaccatcaagccccagactgaccgctgggtgttccccgagaccaacactggcatcattgtccttgctgagggtcgcctgatgaaccttgggtgtgctactggccatcctagctttgtcatgtcctgctcattcactaaccaggtcattgcccaacttgaactgtggaaggagaagagctctggcaagtatgagaagaaggtgtatgtgctccccaagcaccttgatgagaaggttgctg

SEQ ID NO: 9141 - DNA, 278 bp, Zea mays
atgaactattgcagccgtaccctgtacttcatgagaagccaggcgatcttgttgcacacataaagttcactgtgctgctgacgcccaatggatcagataagataacatcacatcctctacaggagttaaagcccaccaaatccattgaagacaatgcagagataaaggcatggcttgctttggggacgaaatcaaagaagaagggtggtgggaagaagaagaaaggcaagacaggagatgcagcagaagcagatcccatggaggaggcgacaaacggt

SEQ ID NO: 9142 - DNA, 276 bp, Zea mays
cggttctttgcgtgcggttgatctcgtcggaggcccggccgcggttccccaatccgccatcgaattcgatggcggaccaacgccggtgaataagatccgcaacgccaagctggttcttcttggagatgtgggcgctggcaaatctagcttggttcttcggtttgttaagggacagtttgttgaattccaggaatcaacaattggagcagccttcttttcccagaccttaccggtcaatgatgagagtgttaagttcgaaatctgggatactgccgg

SEQ ID NO: 9143 - DNA, 148 bp, Zea mays
cacagtcctacgagcagtcgcacgcaagtgtcaagagacaaaacggtcgacatggctcgcacgcaatctgccgtagcggtcgccgtggtggccgcagtgctgctgctggcagcagcggcgacgacctcggaggccgccatcacgtgcg

SEQ ID NO: 9144 - DNA, 277 bp, Zea mays
agcaagtccagtgagagagggagagcggcgagaggatggctgggatggcgtcgctgcagggcgccatggcgtcgctctccatctccgcgctaggtgcggcgacggcgagcagcagcagcttctggggcaaccggctcgccacctactccgcgccgcagcctggggtaaggtttatggtcaagatatgcccaattgaaatgagacttaagagatgggagcgaaagaagtgtaaaccaaacagtcttcctgtgctgcacaagatgcatgttaggatcgg

SEQ ID NO: 9145 - DNA, 270 bp, Zea mays
cccacacgtccgcccacgcgtccgcattcactaaccaggtcattgcccaacttgaactgtggaaggagaagagctctggcaagtatgagaagaaggtgtatgtgctccccaagcaccttgatgagaaggttgctgctctccacttgggcaagcttggtgccaagctgaccaagctcaccaagtctcaggccgactacatcagcgtgccgatcgagggtccctacaagcctgcccactaccggtactaggcacacggcttgcagctcactc

SEQ ID NO: 9146 - DNA, 263 bp, Zea mays
gcagctagcgcgctcctcgagcccagcagagaaaggccggcctacccagtctgtgtctgtgtgtgtgcagtgtccaccggcagcgctaatcgtaatagccatggggtccaccgccggctacgtggccgcggtggtggacgaggaggcgtgcatgtacgcgatgcaggtggcgtcgtcgtccatcctgggcatgacgctgaataacgccatcgagctgggcgtggtggaggtggtgcagaatgaggccggcagcggcaaggcgg

SEQ ID NO: 9147 - DNA, 269 bp, Zea mays
cgccgccgctccctgacccctagtgtccggatttaacttcaaacatggcggacgtcgatgtcgagccggaagtcgccgccggtgctcccaagaagaggacgttccgcaagtacagctaccgcggcgtcgacctcgatgcgctgcttgacatgtccaccgacgacctcgttcagctcttcccagcgcgcgccaggagaaggttccagaggggtttgaagaggaagcccatggcgctcatcaagaagctgcgcaaggcgaaaaaggatgct

SEQ ID NO: 9148 - DNA, 267 bp, Zea mays
atgcattcgcagaggtcttaactcagatctaccgtattgtgagcaagagagcagttgaagctggcgaagatgcagcatctgggcctggcaagggcgagaagattaacataaaggatgatgtttcggcggtgaagaagggtggctgctgctctagctgacctgccctgctgtatttttcttggagctgtggtgatgtagcttatggtacggcatttccagccaccgacaactggtagtggcattagcagcttctatgttacctagaga

SEQ ID NO: 9149 - DNA, 265 bp, Zea mays
ggccgttcgagtacgggagaacgcatgtggtgaggcccaagggcacgcacaaggccaccattgtctggctccatggacttggggacaacggagccagctggtctcaactactggaaactcttccccttcctaatataaaatggatatgccccactgcaccttcaagacccgtgtcagtgtttggcgggttcccctccacagcatggtttgatgttgctgatctttctgaggatgctcctgatgacattgagggaatcgatgcctc

SEQ ID NO: 9150 - DNA, 266 bp, Zea mays
gggactccgatggaaagctttgggttggggaatctggtaatgaaaatgaacagggagaagatgttattgctatcctgccctgcgaggaatggtgggagtttgaagtgacaaaggatgactcaaatcctcagattgcactgcttcctttgcatccagatctgcgggcaaaatttaatgagacagcagcttggatttatgcaaaaagcatggaggggaaaccttatgggtatcacaacatgatatctagctggattgataccatcagt

SEQ ID NO: 9151 - DNA, 266 bp, Zea mays
caccgacgttatgatcgccggtaaggttgccgtggtctgcggatacggtgatgttggcaagggttgtgccgctgcactcaagcaggctggtgcccgtatcattgtgaccgagatcgaccccatctgcggcctccaggctctgatggagggtcttcaggtccttcccttggaggacgttgtctcggaagctgacatcttcgtgaccaccactggcaacaaggatatcatcatggttgaccacatgaggaagatgaagaacaatgcca

SEQ ID NO: 9152 - DNA, 260 bp, Zea mays
atcagctcatccgctccttgtgtgttagtgcactcgaagctgggacactcagtacaggctatacaatcgagtgggtgatgtctctcttgctaaacaaccctcacatcatgaagaaagctcgcgacgaaattgacgcatgcgtcggggaacccaaacgcctactggacgcgactgatgtcccaaagctgccgtaccttcgatgcattatcctggagacgcttcggctgtaccctgtggtaccccttctagttcctcgtgaa

SEQ ID NO: 9153 - DNA, 260 bp, Zea mays
gggaagtgcaaagaaggtggtggttattggtgggggctatattggcatggaggtagctgcagcagcttgtggctggaatcttgacacaacgattatattcccagaggaccacattatgccaagattatttacgccctcgcttgctaagaagtatgaggaactgtatcagcaaaatggtgtcaaattcataaagggagctcttatcgaaaaacttggagctggctctgatggaagggtgtcttctgcagtacttaaggatg

SEQ ID NO: 9154 - DNA, 266 bp, Zea mays
ctggtgtacatctgcgagtgcaaggcctgcccgaggtggccaactactggaagcaggtgatcaagatcaacgactaccagaagagccggttcgtgaaccgcgtcgtggcctccatgttcaacaccgtcgccggcaagaagatcgccgtcctcggcttcgccttcaagaaagacaccggtgacaccagggagaccccggccattgacgtctgcaagggcctgctgggcgacaaggcccagatcagcatctacgaccctcaggtgacg

SEQ ID NO: 9155 - DNA, 268 bp, Zea mays
gaaggagcaccagttctacctgtggttcgacccggccgccgacttccacacctacaccatcatctggaacgacaagaacgtcatgttcaaggtggacgacgtgttcgtgcggtgcttcaagcggtacccggacctggcgtacccgggctggaagcccatgtcggtgcacgccacgctgtgggacggcaggtagtgggccacgcagcagtggaaggtgaaggtggagtggtcgcgcgcgccgttgcgcgtgtcgtaccgcgggtagtcc

SEQ ID NO: 9156 - DNA, 271 bp, Zea mays
ggagaatggaaatgcgaataatggcgatcctatggagaatggtgatggtcaagatggtgccgacgagggcaacacatttcctgatgaacaatatggttatccaaaagctgaatctgagaggtgggtttcctgcattaggatcctggatccaaggagtagggacacaacctgtctgctggaattgcaggaaaatgaggctgctgtcagtatttgcactgtgaatttccatgataaggagcatggaactctactggctattggcactgccaag

SEQ ID NO: 9157 - DNA, 324 bp, Zea mays
ctccgtccgcgtactctcggtttcggcgatgtcggggcgcggcaagggcggcaaggggctgggcaagggcggcgccaagcgccaccgcaaggtgctgcgcgacaacatccagggcatcacgaagccggcgatccgtaggctggccaggaggggcggcgtcaagcgcatttctgggctcatctacgaggagacccgcggcgtgctcaagatcttcctcgagaacgtcatccgcgacgccgtcacctacaccgagcacgctcgccgcaagaccgtcaccgccatggatgtcgtctacgcgctcaagcgccagggccgcacgctcta

SEQ ID NO: 9158 - DNA, 329 bp, Zea mays
gagcgaatccctcgcatcgcattcgcagcctttgctgcatcacaccaccgcgaaaccccagcagccgcatcgatggcgcccaaggcggagaagaagccggctgcgaagaagccagcggaggaggagcccgctgccgcgaaggccccggcggggaagaagcccaaggccgagaagcgcctcccggcggccaagtcgtccggcaaagaaggcggcgacaagaagggtaagaagaaggcgaagaagtcggtggagacctacaagatctacatcttcaaggtgctgaagcaggtccaccccgacatcggcatctcttccaaggccatgtccat

SEQ ID NO: 9159 - DNA, 325 bp, Zea mays
cggacgcgtgggcggacgcgtggggaacccgtcatcgatctcgtttcaaatccatccatcctcgtttcctccgtcccgcagcatctcaaccccatggccacgatcaagatcgcgatcaatgggttcggcaggatcggaaggctggtggccagggtggccctgcagagtgacgatgtcgagctcgtcgccgtgaacgaccccttcatcagcaccgactacatgacctacatgttcaagtacgacactgtgcacggacagtggaagcaccatgaagtcaaggtgaaggactccaaaacccttctctttggtgagaaggaggttgctg

SEQ ID NO: 9160 - DNA, 326 bp, Zea mays
cggacgcgtgggcggacgcgtgggttcttggatctcagtcttgagattgccaaggccacgactttggtgcgggcacttgaaaattttaccgaggatgagctactagacgaggaccaaaaggaatacgagtgtgaacgctgcaggcagaaagttgtagcaaagaaacgacttacaattgataaagcccccaatgtcttgacaattcatctgaagcgcttcagccctttcaatcctcgtgagaagattgacaaaaaagtggacttccaatcaattcttgatttgaaaccatttgttagtgactctaaaggaacagattttaaatacag

SEQ ID NO: 9161 - DNA, 312 bp, Zea mays
cttgcttttgagcaggagagcaggtatatcataatggacccactctttccacaatctccagtaggttttatccgagagaaaagcagcatcatctttaggcagctactcagaacaagacggccatttgttgcagaaataacggatgctatgggtaacgagatatttaaggttcgtaggccattttggtggatcaacagctcaatttatgcagaagtggatggtaaggagataggcgtagtccacaggcgttggcacctttggcggagaatctatgacctgtacttagggaataggcaatttgcagttgttgag

SEQ ID NO: 9162 - DNA, 317 bp, Zea mays
ggaggtttctcatgagtggcaattggtaaacaagcagaagccaatctggatgaggaagcctgaggagattaccaaagaagagtatgctgctttctacaagagcttgaccaacgactgggaggagcatcttgccgtgaagcacttctctgttgagggccagcttgagttcaaggctgtactctttgtgccaaagcgggcccccttcgacctctttgacaccaggaagaagcagaacaacatcaagctctatgtgcgacgtgtcttcatcatggacaactgtgaggagctgatcccagagtggctgagctttgtcaagg

SEQ ID NO: 9163 - DNA, 318 bp, Zea mays
cccacgcgtccggtgtaagttaatgcttttcactctgttcaggtccgtctggggtggcatgattctggtacctatgacaagaatattaaggactggccacagcgaggtggagctaatggaagtttaaggttcgatgctgagctgagtcatggagccaatgccggcctgattaatgcattgaagtttatccagcctatcaaggacaaatacccaggtaccacttatgcagatttgttccagttagcaagtgctacggcgattgaggaagctggtggtccaaaaattccaatgaaatatggacgtgttgatgtcacagca

SEQ ID NO: 9164 - DNA, 320 bp, Zea mays
aaatccaatctagaagcacccctctccctctctctctcttcgccgtccgaagctccgcaccccaatctaatcgacacctcaccgagatgggccgcaagttcttcgtcggtggcaactggaaatgcaatggaaccacagatcaggtcgagaagattgtcaaaaccctgaatgaaggacaggttcccccttcagatgttgtggaggtcgttgtcagccctccttatgtcttccttcctgtggtcaagagccagctgcgccaagagttccatgttgctgctcagaactgctgggtgaagaagggaggtgctttcactggtgaa

SEQ ID NO: 9165 - DNA, 316 bp, Zea mays
caccccactcgccgccgccgctgccaccgccgcttgctgccgcagccgccatgggggcgtacaagtacgtgtcggaactatggaggaggaagcagtcggacgtgatgcgcttcgtgcagcgcgtgcgtctgctgggagtacaggcagcagccgtccatcgtccgcctcaccaggcccacccgccccgacaaggcccgtcgtctcggctacaaggccaagcagggatatgttgtctaccgtgtccgtgtgaagcgtggtggcaggaagaggcctgtgcccaagggtattgtctatggcaagcccaagcaccagggta

SEQ ID NO: 9166 - DNA, 321 bp, Zea mays
ccgcacactcaactctgtttgggcccaacatcttagcgaagaagtgaggagaaggttctacaagaactggtgcaagagcaagaagaaggctttcacaaagtatgctctcaaatatgaaaatgatgctggcaagaaggaaattcagctgcagcttgagaagatgaagaaatatgcttctgttatccgtgtcattgctcatacccagattaggaagatgaagggtttgaagcagaagaaggctcacctgatggagattcaggtcaatggtggtaccattgctgacaaggtggactatggctacaaattctttgagaaagaggt

SEQ ID NO: 9167 - DNA, 316 bp, Zea mays
attaaaagaagacggatccatgagtggatatttaatgagcttgcggcgataaatgaaatggagttccattatcaagacaaagtccgcccaatcaactatgtgatgcgcactgtctcaactatgcggttgttcccaccagaagaatggttggttggagcagcattaccatcaaagtatgcatcacagagaataaatatgatactcaatcaactaatacctgaaacagtaagaatattctgggagtccaaaaaatttgaaggatctacgagttctgctgagccctggtataacacaccattttcagttgaaaatgtca

SEQ ID NO: 9168 - DNA, 313 bp, Zea mays
cacaatccagcttggacaaccagctaccgttaaagttgcagccaacttgattaggttgctagcttatcagaacaagaacatgttgcaagctggcatgattgttggaggatgggacaagtacgagggaggccaaattttctcagtccctctcggtggaacgatcttgaagcaaccatttgcaattggaggttcaggttccagttacctatatgctcttcttgatcatgaatggaaagagggaatgagtcaggaagaggcagagaaatttgtggtgaaggtagtttcccttgctatggcccgtgatggtgctagt

SEQ ID NO: 9169 - DNA, 312 bp, Zea mays
cccacgcgtccgtgcaactccaaccgccgtcgccctcctccccaagaggcagcagctccagcccactgtcgcgcggcgtgtgtgcccgttcacggacaagaagacgaaccgggcgaacaaggtgtcgttttccaaccacaagacgaagaagcagcagttcgtgaacctgcagtacaagaagctgtggtgggaggccggcaagcgcttcgtcaagctgcgcctttccaccaaggccctcaagaccatcgagaagcacggcctcgacgccgtcgcgcgcaaggccggcatcgacctcaacaagaagtgagcaag

SEQ ID NO: 9170 - DNA, 312 bp, Zea mays
ctcaggtcgagcatcacgcctgggacggtgctgatcctcctcgcagggcgcttcatggggaagagagtggtgtttctcaagcagctcaagtccggcctgctccttatctctgggcctttcaagctcaatggagtaccgatccgccgtgtgaaccagacctatgtcattgctacatcaaccaaagttgacatctctggtgttgatgtcgccaagtttgatgacaagtactttgccagggagaagaagcagaaggtgaagaagaccgagggcgagctttttgagacagaaaaggaggcatccaagtcactgcct

SEQ ID NO: 9171 - DNA, 312 bp, Zea mays
gactgttgatggaccctcagccaaggactggagaggtggcagggctgccagctttaacatcattcccagcagcaccggtgctgccaaggctgtcggtaaggttcttcctcaattgaatggcaagctcactggcatgtccttccgggttcccaccgtggatgtgtcagttgttgacctcactgtcagaatcgagaagggggcctcttacgaggaaatcaagaaagctattaaggctgcttctgagggcccactcaagggtattatgggctacgtggaggaggatctggtttccaccgacttcaccggtgacag

SEQ ID NO: 9172 - DNA, 308 bp, Zea mays
ggtgaattcatcacaactgtccaacagcgtggtgctgcaatcattaaagcgagaaagttctccagtgctctctcggctgctagctctgcttgtgaccacattcgtgattgggttcttggaacacctgagggtacatttgtttccatgggtgtgtactctgatggttcatacggtgttccttctggactcatttattcattcccagtaacatgcagtggtggtgaatggaaaatcgttcaaggcctcccgattgatgagttctcaaggaagaagatggatgccactgcccaagagctgacggaggagaa

SEQ ID NO: 9173 - DNA, 315 bp, Zea mays
ctccccgcgggccgccagaggcaatttcgccctcgattcgaccccgattcgtccgcccgcgaccgggattccctccgccaagcgcggatctgaacgctgcgctccgtgtcgccgctcgaatccgccatgaagggggccaaatccaagggcgccgccaaggccgatgccaagctggcggtgaagagcaagggggcggagaagcccgccaagggcaggaaagggaaggccggcaaggaccccaacaagcctaagagggctcccagcgctttcttcgtgttcatggaggaatttcgcaaggagttcaaggagaagaac

SEQ ID NO: 9174 - DNA, 315 bp, Zea mays
ggcaccaaggaaaccggggacgggacagcagaggacctccagccgaagcatccaaaatatgacatccgggtagcaaacgctatgatcaaggcgtacattaccgagggcatgcttgacaaagctgtcgccatgaagaagcgtgccaagatgcgcggcggaaggctgaacgccaagacatgggagatcttcatggagcattacctcaagacgggggatctcaagatggcccattggtgcgcggaccgcgcgatgaagaaggggcacagcagcggcaggatttgggtgccgccgcccgccgtgacggagaccctgatg

SEQ ID NO: 9175 - DNA, 312 bp, Zea mays
gcaaagagagttggagctaggattttgttgacatcaacatctgaagtttatggtgatccacttgagcatcctcaaaccgaggcctacttgggcaatgttaacccaattggagtcaggagttgttatgatgagggtaagcgtgtagcagagacgctgatgttcgactatcacaggcagcatggcattgaaatccgaattgccaggattttcaacacctatgggccaaggatgaacattgacgatggccgtgttgttagcaacttcattgctcaggctgtgcgtggcgaaccccttactgtccagaagccagga

SEQ ID NO: 9176 - DNA, 315 bp, Zea mays
gacgaggaggtggccatcacaatagatgggggaagggcccaggagggggcagcgggattgcgagccacaagccgcctgagaggccctgcaagtactttctcgccggtaccgaatgtagctatggcgagaggtgccgctatccgcacagctactgcataagcgatagtatcgcgatgcttaccttgctcaagggacacgagcagggtgtcacgggcattgcactgcccgctgggtcagacaagctttattccgggagtaaggatggaactgttcgcatgtgggattgccaaactgggcagtgtgctggtgtcatca

SEQ ID NO: 9177 - DNA, 277 bp, Zea mays
gggattttgctatctcttgggtgccagaccacaggatgtgccatatgtgtactgcttgttctatgtcatattcgttccgctccgctggatttactaccgctacaagaaatggcattactatctcctggacttctgctactatgccaacacatttctccttgtaatgattctcttctatccgaaagatgaaaaacttttcatggtttgcttctcgtttgcagagggtccacttgcttgggcattaattgtgtggcgttgcagcttagtttttggttca

SEQ ID NO: 9178 - DNA, 276 bp, Zea mays
gctggagcaacgtgctgctggtcctgcgatgatgcatccatctgaagcagttactaaaggtccaagatgggccgacctatttgagcctggggtgaagcatgcactgtttgttggcataggaatacagatcctgcaacagtttgctggcatcaacggcgttctctactacactcctcaaattcttgagcaagcaggcgtcggtgttcttctgtcgaacctcggccttaacgcttcttcggcatcaatcctcattagcgccctgacgaccttactgat

SEQ ID NO: 9179 - DNA, 278 bp, Zea mays
ggcgaccgaagcgccacttgcttgagtagcgaacgcgtagagcaatggcgtcgctgtcgtgcgcctccacgctgccctggacccccgcctcctacccgcggccctcggcggggcgctgcctcacggcctctcgccgggctccgtcgctggtcatcgtcgcccaggggaaggtcaagaagtaccgccaggtcatattgacagacgacatagaagaggtggggaagaaaggggatacactgaaggtgcgagctggattctaccgcaacttcctccttccc

SEQ ID NO: 9180 - DNA, 277 bp, Zea mays
caaggtcacaggcaatctcatcgtctgcatcgaccgcgccacgcgcctcgtcaagtcgcagcagggcgccggcaaggagtacgtctgcgtcgcccgcttccacgccgccgtgccggacaccgcgcgagtggcccgagcgctagaggcgctcactggcgccgtgttccagcgcccaccgcttatctctgcagtcaagcgccagctcagggtgcgaacaatctacgagagcaagctcctggagcacgatcccgagcgtcaccttgccgtgttctggatc

SEQ ID NO: 9181 - DNA, 275 bp, Zea mays
  unsure (1)..(275): unsure at all n locations
ccctttgcaagtatagtctctctgctaagcgaagtancttcaagctagtctcggcggctctagaagacgatgggcaaggacgacgtgatcgagagctgcgctggcggcggcgagttcgctgccaaggactacacggaccctcccccggcgccgctgatcgacgcggcggatctggggtcctggtcgctgtaccgcgccgtgatcgccgagttcatcgccacgctgctgttcctgtacatcacggtggccaccgtgatcgggtacaagcaccagac

SEQ ID NO: 9182 - DNA, 279 bp, Zea mays
ctttctactgttttaggttgagctattttctcaagcacgtgattgtcttctcccaatgggcctcacatctgagaatgttgcacaccgttttggcataacacgactggagcaagatcaagctgctgttgagtcacatagaaaggctgctgccgcagcagctgctaggtaaattcaaagaggaaattgtgccagttcatacaaagattgttgatccaaaaactggtgaggaaaagaagatcgtaatctcagcagatgatggaatccgagtggatacttctc

SEQ ID NO: 9183 - DNA, 277 bp, Zea mays
cgcagatcaggttgagaagattgtcaaaaccctgaatgaaggaaatgttccctcttcagatgttgttgaggttgttgtcagtcctccttatgtgttcctcccggtggtcaagagccagctgcgtcaagagttccaagttgctgctcagaactgctgggtgaagaagggaggtgcattcactggtgaaattagtgctgagatgctcgtcaaccttggcgttccctgggtcattcttggacactctgaaaggagagctctgctgggagaatcaaatgag

SEQ ID NO: 9184 - DNA, 277 bp, Zea mays
cccacgcgtccgcgacaacggcgaccgcctcggcacctaccgcggccacaacggcgctgtctggacctgcgacgtctcccgcgactcggcgcgcctcatcaccggatccgccgaccagaccgccaagctctgggatgtcagcacggggaaggagctcttcagcttccgcttcgacgcgcccgccaggtccgtcgagttcgccatcggggacgcgctcgccgtcgtcaccaccgacaacttcatggaccacgtccccaccgtccaggtcaagcgcatc

SEQ ID NO: 9185 - DNA, 277 bp, Zea mays
cagaaaggcaaagctacaggcacagttttcacaaatgcgtcctgttgcaatggcaccttcagtaggtcctcgcatgcccatgtttccacctagtgttcctggagttggtcagcagctgttttatggtcagccacctccagccttcatcaaccctcaggctggatttgctttccagcaacctatgatgcctggtatgaggcctggtggtccaatgccgaactttatgatgcctatggttcagcagggacagcaaccgcaacgtcctgctggtaggcgt

SEQ ID NO: 9186 - DNA, 279 bp, Zea mays
gaaccctctctgcgccgccgccgccgttgcagtcgcggccacatcgtcgcctatccatccccaccgctcccactgccacgattcacaagaggtgtcgagatgtctcagaacaacccctcccagctcctcccctcagagctgatcgatcggtgcatcgggtccaagatctgggtgatcatgaagggggacaaggagctcgttggcaccctctgcggctttgatgtctacgtcaatatggtgctggaggacgtcaccgagtatgaatacactgctgaaggg

SEQ ID NO: 9187 - DNA, 270 bp, Zea mays
gtttctttgagaaaaattcggaacttgttgacaagaatgctgcttcatatttctataattttgcagcgactgaatggctgattcaacgcctggaaacaatgagtgctgcagttctttctttttctgccttcatcatggctctcctccctgcaggaacttttagctccggctttataggaatggcgttgtcttatggtctgtccctgaacaattcctttgttttctctatccaaaaccagtgccagctatcaaaccagataatctctgtgg

SEQ ID NO: 9188 - DNA, 270 bp, Zea mays
gaatctttgtggaggccctaacattgtgaagctgctcgatattgttagagatcagcattcgaaaacgcccagcttgatctttgaatatgttaacaacacagatttcaaagtgctgtacccaacattaacagattatgacattcggtattacatctacgagttactcaaggcattagattactgccattcacaaggtattatgcaccgagatgtgaagccccacaatgttatgatagatcatgagcttcggaaactccggctgatagactg

SEQ ID NO: 9189 - DNA, 271 bp, Zea mays
gaaaccgccgccactaggctaggagtggaagcctcgggcccgcggcagcagccatggcggcgttcctggcgcctccctgcacttccttctatcgctcgtccgcattccttaccccctgttcctcgaatcgccggagtacagcgctaagggcggcggccgttcgtgggtcggcggtgacgcgggcccagcggacggtctccgctaggtgggtcccatccaggttagcggtggcgaggccggcggccaggaaggcgtgcctagaggagcttga

SEQ ID NO: 9190 - DNA, 271 bp, Zea mays
caaaatctcatttgagcgtgcaagctccttcgcctcgaaccctctcgcgcttggcttgctttcactctccagggccccactcccacctcgccgccgcagccatggcgatcacagcgccaactcccgacatcctcggcgagcgccagtccggccaggacgtccgcacgcagaacgtgatggcttgcggggcggtggccaacatcgtcaaatccttgctcggccccgttggtctcgacaagatgctagtggacgatattggtgatgttacaat

SEQ ID NO: 9191 - DNA, 271 bp, Zea mays
cttgcctatgtatgacgagttggctagcaagagcaatgttgaatatattgccggacgagccacccagaactctatcagggttgcccaatggatgcttcaaactcctggtgcaacaagttacatgggatgcattggaaaggacaagtttggtgaggaaatgaagaaaaacgctcaagctgcaggagttactgctcattactacgaggatgagactgctcctactggcacatgtgctgtatgtgttgttggtggtgaaaggtcattgattgca

SEQ ID NO: 9192 - DNA, 272 bp, Zea mays
gctcctccgtctcccccgcgccgcgtgccctagagccgccgccgcagccaaaaaaaaaacccctaaacccccaatccatggcgtcgagcagcactgaccttgccgacgacggcttcgcggcgccgcgacttttctcgcagggtgtatcctacacatacgacgacgttatcttcctcccgggctacatcggcttccccgccgacgccgtcgacctctccacccgcctctcccgccgcataccgctatccatcccctgcgtcgcgtctccgatg

SEQ ID NO: 9193 - DNA, 270 bp, Zea mays
gatgtatgaagctccccttggctacagcattgaggacgttcgacctgccggaggcgtgaagaagttccagtctgctgcttactccaactgcgcgaagaagccatcctgatatcccttttggcttcctcattctagtagtttaggatttcttttctgacactttgattctgaccaatctctctggcctgctgcttcctgataatcgaccagttccccagtcttgctccttgcactcctccctccatctccagcattgtgttctgattcacc

SEQ ID NO: 9194 - DNA, 274 bp, Zea mays
cccacgcgtccggtcaccgacttgctgccccttatcgccagcggtgttcgtggagtcaccagcaaccctgcaattttccagaaggccatctcatcctccagcgcatatgatgatcagttcaagcagctcatttcgggcggaaaggacgcggagagcgcttactgggaacttgttataaaggatatccaagacgcgtgcagtctttttgagcctatctacgatgagaccgatggggctgatgggtatgtctccgtggaggtgtctcctaggttgg

SEQ ID NO: 9195 - DNA, 266 bp, Zea mays
gtcctccctttccgtttaaggcagcaagcaggagcagacaggaggcgccgagagcccagcgtcggagatctccgccgccatggagacgctggccagcgccatgcggcgcgagaaccgccggtccaaggccccgccctcctcctctgcttcctccgccctcgcctcgggcagggtccctctcgtcatggccttcctctcctgcctcgcctggctctacgtcgccggccgtttgtggcaggacgcgcagacccgggcgatcctgtccg

SEQ ID NO: 9196 - DNA, 265 bp, Zea mays
tcattggcatatcgtggacgagcaatcgtttccgctcgaaatatcttcctacccaaagttgtggaacggcgcttactcttattcagagagatatacagttgatgatgcactcgacatcgtacagtatgctgaaaaaagaggcgtgaatgtcttggctgagattgatgtacctggccatgctctttcatggggtgtcggatatccatcattgtggccatcagctacatgcaaagaaccgcttgatgtcagcaatgaatttacattt

SEQ ID NO: 9197 - DNA, 271 bp, Zea mays
aatccatcccgcctccaaacccgaactccaagtcgccccgcatcgatggcgcccaaggccgagaagaagcccgcggcgaagaagccggcggaggaggagcccgctgccgagaaggcgccggccgggaagaagcccaaggcggagaagcgtgtcccagcaggcaagtccgccggcaaggagggcggcgagggaaagaggggccggaagaagggcaagaagagcgtggagacctacaagatctacatcttcaaggtgctgaagcaggtgcacc

SEQ ID NO: 9198 - DNA, 299 bp, Zea mays
accaccgctgcctccgcggtttcgcttccccccgtcttcccaagcctttgcttcgctcttcgcttcggattccctctgctcatggccgggagagggaaggcgatcggctcaggggccgccaagaaggccatgtccaggagctccaaggccgggctccagttcccagtgggaaggatcgccaggttcctcaaggccggcaagtacgccgagagggtcggcgccggcgtccccgtctacctcgctgccgtgctcgagtatcctgctgctgaggttctcgagcttgcagggaacgcggctcg

SEQ ID NO: 9199 - DNA, 276 bp, Zea mays
gcaggtcgtagccaacatcgcgcacgtggtgattgacgaatctggaccctatgctcgggactgggtcacctggacacagattttcttgctggttgatgtgatctgctgctgtgctgtgctcctcccgattgtgtggtccatcaagaacctccgggaagctgctcgctcggatgggaacgccgctgtgaacctcatgaagctccacctcttccggcagtactatgttgtcgtcatctgctacatttacttcacgcgtgttgtggtgtatgcgctaca

SEQ ID NO: 9200 - DNA, 306 bp, Zea mays
gaaagaagtgctccggggaagcaccgtgacacccttgctcgcccgcatctctctaaccgccggcgccggcgccggcgccggccatcgttcacatggctgcgatgccaccggccttcacgggcaacctgatgaaagcacttgcaggtctgagaaggatcaatttagatgggcttcgatggcgcgtatttgatgctaagggtcaggtgctgggacgattggcttcccaaatatccgatgtgcttcaaggcaaggataaaccgacctatgcgccacatgtggaaaatggagacatgtgcattgtactta

SEQ ID NO: 9201 - DNA, 294 bp, Zea mays
caaagtctcctcttcctttgactccgaatcccctagaccattgatggttgcgggggcaccggaaggagccactgacgatgggcctctgctcctcctccaccgccgcccgggccgcatccgaccccggcgccgcagccgcgggtgatgccgccgcggcaaagaaggggcgcgggatcgtcgcgtgcgggaagcggaccgacttcggatacgacaaggatttcgaggtgcgctactcgcttgggaagcttttgggccacggccagttcggctacacctttgccgccgtcgatcgcg

SEQ ID NO: 9202 - DNA, 292 bp, Zea mays
  unsure (1)..(292): unsure at all n locations
ctaatccagcccatttcgaactctctctagacgcttcctcggtctctctgttcaccgncgccccgtaccatactcctcttcgcgccgtagaaatggcgctgccgaatcagcagggcgtggattaccccagcttcaagctcgtcatcgttggcgacggtggaactggtaaaaccacatttgtgaaaaggcatcttactggcgagtttgagaagaaatatgagcccaccattggtgttgaagttcaccctctggattttagcactaactgtggcaaaattcgcttttattgctg

SEQ ID NO: 9203 - DNA, 288 bp, Zea mays
  unsure (1)..(288): unsure at all n locations
aagaaatttggccagtcttcagtttttgttgcatccacacttcttgagaatggtggaaccctgaagagtgccagtccagcttctcttctgaaggaagctatacatgtcatcagctgtggatatgaagacaaaacaggctgggggaaagatattggttggatttatggatcagtcacagaagatattcttactccngttaagatgcactgccatggttggcggtcaatttactgcatacctaaacgggccgccttcaaaggttccgcacctctcaatctttccgatcgt

SEQ ID NO: 9204 - DNA, 292 bp, Zea mays
gaaagaagtgctccggggaagcaccgtgacacccttgctcgcccgcatctctctaaccgccggcgacgggccggcgccgccatcgttcacatggctgcgatgccaccggccttcacgggcaacctgatgaaagcacttgcaggtctgagaagaatcaatttagatgggcttcgatggcgcgtatttgatgctaagggtcaggtgctgggacgattggcttcccaaatagcccatgtgcttcaaggccatgataaaccgacctatgcgccacatgtaggaaatggagacatgt

SEQ ID NO: 9205 - DNA, 282 bp, Zea mays
caaaacactgagcagcgtctctgctggcaaaatttatgttgagatagagagagcaagattgatcaaaaggcttgcaaatatcaaagaggagcagggaaagattgacgaggctgctgatttgatgcaagaagttgctgtcgaaacatttggctccatggcaaagacggagaaaattgctttcattcttgagcaggtccggctatgcctagatcgtcaagattatgttcgagcacaaattttatcaaggaaaatcagtactagagtatttgacgcagatccatc

SEQ ID NO: 9206 - DNA, 288 bp, Zea mays
gacttctgctaggacgcctccgccgccgccggcgcatctaacgcattctctccgccgcagcccgaggcaagatggtcctcagaacgacattgatctgctcaacccggcggcagaactcgagaagctctagcacgagaaaaagagactcgtccagtctgccaactccttcttcatggatgttaagtgccagtggtgcttcagcatgaccactgttttcagccactcccagactgttgttgtgtgcctggctgcaaactgtcctctgccaaccacaggacgaaaggcaag

SEQ ID NO: 9207 - DNA, 283 bp, Zea mays
ggaacatctgctggggaagaagaggtgtgattggttttatcagtcgctatcctgatgcagaccttagaaccacaaaagatggggagtatgtgaaggttactggggttgttacttgtggaaatttgccccttgagtcctcgttccaacgggtgccgcgatgtgtgtacacttcaacttgcttgtatgagtacaggggttgggattcgaaagctgctaactccacacatcaccgatttacctggggtctcaggtcaatggagcgtcatgcagtggacttctacat

SEQ ID NO: 9208 - DNA, 286 bp, Zea mays
aggatggccagacccgtgaacatgctctccttgcgttcacccttggagtgaagcagatgatttgctgctgcaacaagatggatgcaaccactccgaaatactccaaggcacgttatgatgagattgtgaaggaagtctcatcctacctcaagaaagttgggtacaaccctgataagattgccttcgttcccatttctggttttgagggcgacaacatgattgagaggtccaccaaccttgattggtacaaaggcccaaccctgcttgaggctcttgaccagatcac

SEQ ID NO: 9209 - DNA, 274 bp, Zea mays
caaagaacctgctaaggctcctccacgtgctgatgttgttaagagccttaaaaatggcatcgtggttaatattcttgggatgggcgctgctgttctcggcatgcaagctactgttggtgctttggtagcaaaagctctcacaacctctgcagtaccctattatcaggctgctggccaaagccctgtcttggctttagatgttttcctagttcaggcttcagcgaacaccatcctgtcgcatttccatgggggtggcgagctccctggagctgct

SEQ ID NO: 9210 - DNA, 280 bp, Zea mays
cgctctggttggaaggtttggagaaactccccggctcgaggagatcgtgacattgagaggacgatgggagggctcgcgctcctcctcctcctcctggtctcggcgttggtctttcagatccacgcctccgacccgctgctgtacgagccgttcgatgaggactttgaggggagatgggtcgtctccaagaaggatgaataccaaggtgtgcggatgcatgccaagagtgatggtcatgaggactatggcctccttgttagtgagaaggccaggtaatacg

SEQ ID NO: 9211 - DNA, 290 bp, Zea mays
gcgcccgtgggcaagctcggtttcaccgtgtacccatccccccaggtgtccacatccgtggttgagccatacaacagtgtcctgtccatccagtctctcctcgagcacactgatgttgctgtcctgctcgacaatgaggccatctatgacatctgccgccgctcccttgacattgagcgcccaacctacaccaacctcaacaggcttgtctcccaggtcatctcatccctgacggcttccctgaggttcgatggtgctctgaacgttgatgtgaacgagttccagaccaa

SEQ ID NO: 9212 - DNA, 279 bp, Zea mays
cccacgggtccgcccacgcgtccggccacgcgttcgattcggaaatcggaagtcacattgggctgggtcgggcaatccgacaacccttatataaagtcccgaaccctagaggaaagcaccttccctccgcaaatcgcggtcctgccttctgcggcttcaatttcggcttctgtccctttgcaagttcaatctcacctccaacaatgggtaaagagaagtcccacatcaacattgtggtaatgggccacgttgactctggcaaagtcgacacaacaggac

SEQ ID NO: 9213 - DNA, 268 bp, Zea mays
gcaagatgcagcagctagctcgcaggcattctcagaagatcattgatgagaatcaaaagctgcgttcctgacttgaagcaaaaatgaatgatcctgatgtgagatccaagcaactcgatgagattgcaagcaaaagcggttatgacagaaagagccttgagcaggagaagccaaagaatgctatcaaatcgagtcatcctaaattggcaacattaaagcagcagaaagctgatgagaatgtgctgaagcctgtggggagacaaaaagg

SEQ ID NO: 9214 - DNA, 263 bp, Zea mays
tcctttccagcctctcctctccccaatcaccgacaccgcgcgcgagatcgcaagcgtccacaccgtgaccaccggcgccgctgcggcgtccggaagcagcggcgaacgtcgtccacaaggtaggctcggcttgccggggcggacgagatgagcgggcacgactccaagtacttctctaccaccaagaagggggagatcccgagctcaaggaagagctcaactcccagtaataggaccagatgaaagatgctgtcaagaaagtg

SEQ ID NO: 9215 - DNA, 276 bp, Zea mays
ctaaaatttcccccactcgccagtcgcagcagcacctgtagcagccatggacgccagcggaccggtagcaaggggaagaagggggcggccgggcgcaaggcaggcggccccaggaagaagtcggtgacgcggtccgtcaaggccgggctgcagttccccgtcggccggatcgggcgctacctcaagaagggccggtacgcgcacgcgtgggcactggcgcccccgtctacctcgccgccgtcctggagtacctcgccgccgaggttctggagttgg

SEQ ID NO: 9216 - DNA, 270 bp, Zea mays
  unsure (1)..(270): unsure at all n locations
cggttgctgctactgatgatgctgatgtgtacagtcaggcagcttcaaaccttgtatctggcaacagtctagaacagactatccaacaaattcttgacatgggtggtggtacatgggaacgtgatacagttgttcgtgctctacgtgctgcatacaataaccctgagagagctatagactacctgtattctggaattcctgagaatgtggaggctcagcctgttgcacgagcacctgctgctggccaacanacaaatcagcaggccgcat

SEQ ID NO: 9217 - DNA, 274 bp, Zea mays
cgattacaaggccaagatggagatgtcactggggaggatgttcctgcaactccaaagaaaatattccagatattgcatcagactattgaagcactttcttgtgttccttctccagagttagctctgagactatatttgcagtgtgcagaggctgccaatgactgtgatttggaaccagttgcttatgagttctttactcaagcgttcattttatatgaagaagaaatcacggattcaaaggctcagatcactgcaattcacctgataattggga

SEQ ID NO: 9218 - DNA, 270 bp, Zea mays
gaagcagcggggtaatgatggcaaaaagaggggtggtggctttacaaaattatgcagtctttcaccggcacttcaagagtttgtcggcgcctctgagttagccaggacagaggttgtcaagaagctttgggcatatattcgagaaaataatcttcaagaccaaaacaataggaggaagattttgccggatgagagattgaagaagatcttcaatgtcaattccattgatatgtttcaaatgaataaagctttgaccaagcatatctggcc

SEQ ID NO: 9219 - DNA, 270 bp, Zea mays
ccgatccccaaaatcgaacccaagtcgaaaccctaacctcggccttctcgatgtcggccgccacaaccgccccaacccctgcggtggccaccccgatggcgccgcctccgtcgtacccggcctcctccacgatctccgcctccgtggccgcgtcggtcgaggaagaggacgacctctatggccgcctcaagtcgctccagcgccacatggagttcgtcgagatccaggaggagtacgttaaagacgaacagaagaacctcaagcgcgaac

SEQ ID NO: 9220 - DNA, 269 bp, Zea mays
cccacgcgtccggcggcggcgtaggtagcggcggtgtgcttgtgatctcaatctcaaccccaggcgagctcggctccggtcacccgtcgatccacgcaaccatgtcgaggaggaagaccagggagcccaaggaggagaacgttacccttggacccactgtccgtgaaggagagtttgtctttggtgttgctcacatctttgcatccttcaatgacaccttcattcatgtcactgatttgtctgggagggaaactttggttcggatcact

SEQ ID NO: 9221 - DNA, 271 bp, Zea mays
cttttaggtggtttctttggcacaagggctgagccaatagaattccctgttcgaaccaatcagataccaagagaaatccctacgaagaagtactcattgctcttcatacttggtgctggaactctaccttttggaacactcttcatcgagctcttcttcattctttctagtatttggcttggaaggttctattacgtgtttggcttcctccttgtcgtgcttcttttgctgattgtggtgtgtgctgaggtatcagttgttcttacctaca

SEQ ID NO: 9222 - DNA, 273 bp, Zea mays
gaaagaacaagaggatctccaagggaaagaagggtggcaagaaaaagaccgtcgaccctttctctaagaaggattggtatgacatcaaggcaccgtcggtgttcagtgtgcgcaacatcgggaagactctcgtatccaggacacagggtaccaggattgcttctgagggtctgaagcacagagtctttgaggtttgcctagctgatcttcagggcgacgaggatcaagcttacaggaaaatcaggctccgtgctgaagatgtgcagggcagga

SEQ ID NO: 9223 - DNA, 271 bp, Zea mays
atggtgtcagtcacactgtcccaatctatgaaggctacgccctcccacatgccattcttcgtctcgatcttgctggcagggacctcactgattccctcatgaagatcctcaccgagaggggctactctttcacaaccactgccgagcgggaaattgtacgtgacatcaaggaaaagcttgcatatgtcgcgctagactatgaacaagaacttgagaccgccaagagcagctcatcagttgagaagagctacgagctgcctgatgggcaagt

SEQ ID NO: 9224 - DNA, 263 bp, Zea mays
tgattttagccgccgccgctgctcatctcacatccctcgagaagacgcctgctcctcgccgatcgatacgatggccgtcttctccgacctccacaccgccgacggcctcaagtccctcgaggctcacctcgccggcaaaacctatgtgtctggtgactccattactaaggatgacattaaggtcttcgccgcggtgccgtcgaagcctggcgctgagtttcctaatgccgcccgatggtacgagaccgtctctgcggctgtag

SEQ ID NO: 9225 - DNA, 264 bp, Zea mays
agaaaaagacttgcagaagcttcgggatgctagaattcagcaagacatgcttgatcgtgaagcttccattttacgtgcaaaaactcaagcagctttggcagagggaatctcatggggtatgacagatgatgcaatagaagagtctgcagaggatgatgcagatgaaattacttggcaaacctacaaaggttagcttactgatagacaagagaaaactcgtagcaagatagtaaaacgaatggagaagattgccaacatgaaaaa

SEQ ID NO: 9226 - DNA, 264 bp, Zea mays
cccacgcgtccgcggacgcgtgggcggctgaccggcggcgcgccaagtacgtcctgaggcacgtggtgcgcacgcacaagggcgcggacgacagggccttcaactgcgtgtaccaggagcaggacggcgaggggaagaccggcgtgtcgctgtccaaggacctgatggccatcgcgggcggcgcgctcaagaccaacatcacgacgctgggcccgctggtgctgcccgtgagcgagcagctgctcttcttcgcgacgctggtgg

SEQ ID NO: 9227 - DNA, 264 bp, Zea mays
aaccccatgaccgttttctggtcgaagcggcacagagcatgacgtctcgcccaatgaaggggatgctgactggcccagtcacaatcctcaactggtccttcgtccggaatgaccagccgaggtttgagacttgctaccagatcgctcttgcgatcaagaaggaagtcgaggatcttgaggctggtggtattcaggttatccaaatcgacgaggctgcactgagagaagggctgccgctccgcaaggctgagcatgcattctact

SEQ ID NO: 9228 - DNA, 266 bp, Zea mays
gaccttcaacatattccctcggaaaggagcaatcctggaaggatctgacgcagatatcataatcctgaaccctgaaaggagctttgtgatgggtgctctcacacaccattcgaggtccaacaccaatgtgtacgagggcaggaaaggaaagggaatggtggaaataacaatctcaaggggccgagtggtatgggaggatggcgttctgaacattgcacctggttcaggacgatacgtcatgatgccacctttcggctacgtctttg

SEQ ID NO: 9229 - DNA, 268 bp, Zea mays
ccgcaactgccgccgccactcccacgctcgcagccatgccgcccaagctcgacccgtcgcaggtggtggaggtgttcgtccgtgtgaccggcggcgaggtcggcgcacgtcttcgctggcccccaagatcggcccgctcggtctttcccccaagaagatcggagaggacatcgccaaggagacggccaaggactggaagggcctccgcgtcaccgtcaagctcaccgtccagaaccggcaggccaaggtctccgtcgtcccctccgcc

SEQ ID NO: 9230 - DNA, 270 bp, Zea mays
cccacgcgtccggtggttttgaggctggtatctccaaggatggccagacccgtgaacatgctctccttgcgttcacccttggagtgaagcagatgatttgctgctgcaacaagatggatgcaaccactccgaaatactccaaggcacgttatgatgagattgtgaaggaagtctcatcctacctcaagaaagttgggtacaaccctgataagattgccttcgttcccatttctggttttgagggcgacaacatgattgagaggtccacca

SEQ ID NO: 9231 - DNA, 319 bp, Zea mays
tcttgactggggtgttgatgacgtgaaactaagagaagcatttagcagctttggagaggttactgaagcgagggtgatcacagacagggagactgggaggtcaagaggctttggctttgtgaactactccgacagtgatgctgccaaggaagctatttctgcaatggatggcaaggaaattgatgggcggcaggtacgtgtcaacatggctaatgagagacctgctgggaaccgtggtggtggcggctatggtggcggcggctatggaggtggtggctacggaggtggtggccgctacggaggtggtggctatggtggt

SEQ ID NO: 9232 - DNA, 348 bp, Zea mays
cagaccaccaaacaagtgccagcgccctctcgcagtcgccgcaatggagagcaccttcatcatgatcaagcctgacggcgtccagaggggcctcattggtgagatcatcagccgttttgagaagaagggcttctacctcaaggccttgaagcttgtcaacgtggagaggtcgtttgccgagaagcactacgccgatctcgcctccaagcccttcttccagggcctcgtggactacatcatctctggccctgtggtggccatggtctgggagggcaagagcgtcgtcacaactggccgcaagatcattggcgccaccaaccccctggcttctgagcccggcaccatccg

SEQ ID NO: 9233 - DNA, 331 bp, Zea mays
ggagaggatcatgaaggcacaggccctgagggactcgagcatggcgggctacatgtcgagcaaaaagacaatggagatcaacccagataaccctatcattgatgagctccgcaagcgtgccgaggctgacaagaatgacaagtcagtcaaggatctcgtgatgctgctgttcgagactgctctcctgacctccggcttcagcctggatgaccccaacaccttcggcaaccggatccaccgcatgctcaaactcggtctgagcatcgatgaggacgagcctgttgaggcagaagctgagatgcctcagcttgaggacgacgctggtgaaagc

SEQ ID NO: 9234 - DNA, 334 bp, Zea mays
  unsure (1)..(334): unsure at all n locations
cccccggcaagggtatccttgctgctgatgagtccactggcaccattggcaagcgcctttccagcatcaatgtcgagaacgttgaggagaaccgccgtgccctccgtgagctcctattctgctgccctggtgctctccagtacatcagcggtgtgatcctcttcgaggagaccctgtaccagaagaccaaggatggcaagccttttgttgatgtcctcaaggagggaggcgtcctccctggcatcaaggttgacaagggcaccattgaggttgttggcactgataaggagnacaccacccaaggccatgacgaccttggcaagcgttgcgccaa

SEQ ID NO: 9235 - DNA, 334 bp, Zea mays
cccacgcgtccgcccacgcgtccgcccaaagctcgccccgctcccagctagggtttcctcttcccatccacagccgccggggcgccgccgacgaggacagcgccgccacgatgttggagttgcgtctggtgcaggggagcctcctcaagaaggtcttggaggcgatccgcgagctggtcacggacgccaacttcgactgctccgggaccgggttctcgctgcaggccatggactcgagccacgtcgcgctcgtcgcgctgctccttcgcgccgaaggcttcgagcactaacgcctgcgacggatactctccatgggcatgatctcaacaacatg

SEQ ID NO: 9236 - DNA, 329 bp, Zea mays
cccacgcgtccgcacgaaggtccaatgtgtgatcttctgtggtctgatccagatgatcggtgtggctggggtatttctcctcgtggtgctggttataccttcggacaggatatatcagagcagttcaaccataccaatagtctaaggctaattgctagagctcaccagttggttatggagggattcaattgggctcatgagcaaaaagtcgtgactatatttagtgcacctaattattgctaccgctgtgggaacatggcatcaatcttagaagtggatgattgcagagagcatactttcatccagtttgagccagcccaagaagggga

SEQ ID NO: 9237 - DNA, 177 bp, Zea mays
cccacgcgtccgggaccaggtcggcagcttcttctacttcccctccacgccgctgcaccgcgccgccgggggctacggcggcatcaccatcaacaaccgcgacgtctataccatcccctttgcctttcccgacggggacatcacgctctttatcggtgactggtataaccgtgggca

SEQ ID NO: 9238 - DNA, 324 bp, Zea mays
ctcaatccatgtggattgggtgggattgagtgggtttcaatcccaaataagtcaaaatctttgataattttttccaatctcatccaatccacatgggataggaataaccgaacaaagtcttactgaggtatgaatttctgctcgtgagataattttgtaatgagacaaatataggctgtttgcctgcagaatccaggtgcttcggctatgaaccatagtgcaattggagaacagcatcagccccctaagccagcaaaggtctcagcaacgcctccagctccctcagctgagcgcccttacgtctgcccctacgatggttgcgac

SEQ ID NO: 9239 - DNA, 301 bp, Zea mays
cgtccggagccactgacccgagtttccgtccagcactccagcgaccagcgcctgttcgtccagagtaccaacagatctcgtcaagaggtctgaaggatgaggaaaggactgcatcctcagatgcaatggatttcatatgtgacgcagagtggtaggctgatcaatatcatgatgaccaaggtgaatcatactggcaaagtgtaccacatgagggccaagcggcaaatggctcaaagcctcggccagattgcgaagttcaaacgtcgatatgagcaggaagcagagaaaagccaagacaagt

SEQ ID NO: 9240 - DNA, 297 bp, Zea mays
cccacgcgtccgcaaaggcacttgctgaggattcgagggggaatgatccatgtatgtttccgggtgttacttgcatccaaggtaacattactgggctgacttttgccaacaagggtctcagtggtagtatctcaccggccattgggaagattagctcacttaaggtgctagatcttgctaacaataacatcactggtactgtgcctgaggaggttgccgtgttgcctttgctgacaacaattgatttgtcaaacaacaatctctatgggaaacttcctacccttgcttccaagaatg

SEQ ID NO: 9241 - DNA, 325 bp, Zea mays
gaccagcagatccgtcgttgccggaacccacgctcgccggctgcgaatgcatctgtagcctgctcttcgtccacacggacaattggacgagctagactctgcgtcgccggcgatggggtgctccttctcagggctgaacgcactgtacgacaccgtcggcggtcggggtggtgacgtctgggttaacgactaccacttccgcgtgctccgcaggctcggcgatgccggccctgcgggctcgtcggtcttcctcgtcaaggaggtcgtcgccgccgcaaccgcctccgacggcacggctgggtcagagtccggcgcctcagggatc

SEQ ID NO: 9242 - DNA, 188 bp, Zea mays
  unsure (1)..(188): unsure at all n locations
cagcatctaacatggattacgacgaggagatcaatgctgtgctcaagaaggtggagcctaatgctcacaagatagtggaacatcgcaggaagtatgagaggttgagaaaagatagggaggaaaagagagcgcactngnatcggcttcgtcaacgtgcagatgcgcaggctgcttacgacaaggccaag

SEQ ID NO: 9243 - DNA, 320 bp, Zea mays
cagccatgcagaaaatggctcatcctgatggagagcttgccacggcaagagctgcagcttccgcagaacaataatgacattgtcctcatggtctacttccagcgttgaagaggtcaactcagttgggccgggcatacgtttcttccagctctatgtctacaaggacaggaatatcgtacggcaactcgtgaaaagggctgagatggctggcttcaaggccattgcactcacggtagacactccaatacttggccgcacggaagctgacattaagaacaggttcgccttacctccacatctggtgttgaaaaacttccaag

SEQ ID NO: 9244 - DNA, 318 bp, Zea mays
gaagatgaagccgccaaatattgtgctgaaaaccagataacaagcatgatcccaaaaattatcaagactggttttgcagcaattcatctgatatactttttcactgctggtcctgatgaggtaaaatgttggcagatcagacgccagactaaagctcctcaagctgctggtgcaattcacactgattttgaaaggggtttcatatgcgctgaggtaatgaagtttgaagatctgaaagaactgggcagtgaatctgctgtaaaggctgctggaaaatacaagcaggaggggaaaacctatgtggtccaggacggggac

SEQ ID NO: 9245 - DNA, 319 bp, Zea mays
ggatttggactgtatgagctaggatttccatcggttgccaaatgtgttgagattggtctacctcaactcatccttcttgtgatctttacaatgtacctgccacatgctgttcacatgctgaagtctatcttcaatcgttttgctgtcctgttcactatacccatagtgtggctctatgcatatcttctcactgttggaggagcatacaggaatgcagcaccaaagactcaatttcattgccgcactgaccgttctggattaattggtggcgcaccctggataagaataccatatccctttcagtggggtgctccaactt

SEQ ID NO: 9246 - DNA, 317 bp, Zea mays
ctagttctagatcgcggccgctcgcgatctaagaactagcccacgcgtccgcccacgcgtccggtctccttcctcctgatgcccttggcctccctagccctgacgcaggacttctgcgtcgccgacctgacctgcagcgacacgacctcggggtacccgtgcaagtccagcgtcaccgccaacgacttctacttccacggcctggccggccagggcaaaataaacccactcatcaaggccgccgtgaccccggccttcgtgggccagttcccgggcgtcaacgggcttggcatctctgcggccaggctcgacatcga

SEQ ID NO: 9247 - DNA, 317 bp, Zea mays
gagaggttgggcagcaccatcagcttctcagagtgtggagggattgagatcgaggagaactgggacaaggttaagactattttccttcctactgagaagccaatgacgtctgattcatgtgctcctttgattgcaacccttccattggaggcacgcggaaaaattggtgacttcattaaaggagtgtttgccgtcttcctagacttggatttctcatttcttgagatgaatccgttcaccatggtcaatggggagccatatcctctggacatgagaggagaactagatgacacagcagctttcaagaacttcaagaa

SEQ ID NO: 9248 - DNA, 325 bp, Zea mays
cgaagccgaaagccgtagtgaagccgaagacacccgccaagcccaaggccaagccagctgccaaggcgaagccaagaccgccggcgctaagccgaagccacttgctaagaaagccggccgccccgccaaggcggcgaagacgtcggccaaggacacgccagggaagaaggcgccggtggccaagaagtccgctgctgccgcgaagaaggcccctgccaagaaggccgctccctcgaagaaggcggcgaccccggtgcggaaagcgccgtcccgtaaggccaagaagtaaagcggccaagaaggggggcgcgatgctgtaaatttg

SEQ ID NO: 9249 - DNA, 287 bp, Zea mays
cttcctttcttggccttctccacctcatcgccgagacgagatctctcccacacgaggaagggagagatgggcgggcgggtggatcacgagtactcctacctgttcaagatggtcctcatcggagacagcggcgtcggcaagtccaatatcctctctcgcttcacgcgcaaccacttctccctcgactccaagtccaccatcggtgtcgagttcgccaccaagtccctgcagatggacggcaaaacaataaaggctcagatctgggacacagctgggcaggaaaagta

SEQ ID NO: 9250 - DNA, 281 bp, Zea mays
acatcactcatccacagctcgcagccgtattcctgtctcgaatcctctctcgccgctccgatggcccgcacgaagcaaacagcaaggaagtcgaccggcggcaaggccccccggaagcagctggccactaaggctgcgcgcaagtcggccccggccaccggcggcgtgaagaagccccaccgcttccgccccggcaccgtcgcgctcccgagatccgcaagtaccagaagagcactgagctgctcatccgcaagctccccttccagcgcctcgttcgcgag

SEQ ID NO: 9251 - DNA, 286 bp, Zea mays
ctctgcaggaggcagcagaggcctacctggttggtctcttcgaagataccaatctgtgcgcgatccatgccaagcgcgtgaccatcatgcccaaggacattcagctggcaagaaggatccgtggcgagagggcgtaagtctgtcgacgggaggaagaactctgcgctcgttttgtgtgttcgcctctctcaccctgtaagttttgtgagaagatgatctagtaaactgtacttggcctgtttgactgtagccgcagtagcatatgcatgcgcatactgttggctgt

SEQ ID NO: 9252 - DNA, 284 bp, Zea mays
gtgaaggggaagcctcactttgcagacttcaaccttgtgccgcctgattggggtggctacgcagggccatggattgatgcagcagcaaagagctgtgttggtctcgaggagttgcgcattaagcggatggttgtgtttgatgagaaccttgagctgctagctcggtcattcctgagattccaagtccttgtccctatcagctgcgaaggggttaacacccgatgtctagctgctattgcgagtcactgcaagctcctgagggagttagatttgcaagaaaatga

SEQ ID NO: 9253 - DNA, 287 bp, Zea mays
cattttggatgttggttgtggagttgccagctttggaggctacatgtttgatagagatgcgcttaccatgtcttttgctccaaaagatgagcatgaagctcaagtacaatttgcattagaaagaggaattccagcaatatcagctgtgatgggcaccaagagacttccgtaccccagcagagtctttgatgtcattcattgcgctcgctgcagggtcccttggcacattgaaagtggcatgcttttgttggaattgaaccgcttgttacgccctggtggttactttg

SEQ ID NO: 9254 - DNA, 232 bp, Zea mays
ggcgacgtgggcaagggcttccgctgcatccgcatggtgaacaacatccgcctcaacttcgacgccttccacggctacaagggctaaggtcgccttcaagactgcaccagcgttgtgctgtcggagttggccaacggagacaaccagagcttgaaaatccttccctggggcgacgaagcctacgccgcgggatgcagcagcgccggcaacgggccccggtttcgcggccgcg

SEQ ID NO: 9255 - DNA, 280 bp, Zea mays
cggcggcgcgggcggacaaggagcaggcggaggaggagctgtgccaagccacaatgggtatctcacgcgactcgatgcacaagcgccgtgccatcggtggaaagcataaggactggaggaagaagcgaaagtatgagcttggtcgccagccggccaacaccaagttgtcaagcaataagacagtgaggagggtccgtgttcgtggaggtaacgtgaagtggagggctcttcgccttgatactggtaactactcatggggaagtgaagctgttacccgcaa

SEQ ID NO: 9256 - DNA, 279 bp, Zea mays
cacagaagcggcggcggcggagcaaacgcaggcgaaggcgagggtgtgagggaaggagcaccagccatggtgcacgtcaacttctaccgcaactatggtaagacgttcaagaaaccaaggcgtccttatgagaaggagcgtcttgatgctgaactgaagctggttggtgagtatgggctgaggtgcaagcgtgagctttggagggtccagtatgcactgagcaggatccgtaatgctgcaaggcacttgctcacccttgacgagaagaaccccgtcgta

SEQ ID NO: 9257 - DNA, 283 bp, Zea mays
cccacgcgtccgccccgctccgcctccactcctcgcgccgctgccgcatctcctctacaggtaagaaggagagaaagagggcgaaatggtgaagcacaacaacgtcatccccaacgggcacttcaagaagcactggcagaactatgtcaagacatggttcaaccagcccgcccgcaagcagaggcgccgcatcgcacgtcaaaagaaggctgtgaagatattcccacgaccaactgctggccctcttcgtcccattgttcaatgccagactctcaagtacaac

SEQ ID NO: 9258 - DNA, 282 bp, Zea mays
tctgtttcaagaaccgggggatctggatctcgtgtaaccggtcatgtagcaccaccaaaatcatctgacttcttccaagagtatgggatgggtaatggattccaaaagaaatcaagcaacgcctcaaaagctcagattgaggaaactgatgaagcaaggaaaaaattctctaatgctaaggcaatttcgtcatctcagttttttggtactcaaaacagagaagagaaagaggctcagctatcccttcagaaattcgcgggttcttcatccatttcaagctct

SEQ ID NO: 9259 - DNA, 281 bp, Zea mays
gataccacggttggcgtcgcacatgatgccttcaacacgttcttcagcgagaccggttctggcaagcatgtgccgagggccatcttcgtcgaccttgagcccactgtcattgatgaggttcgcactggctcgtaccgccaactcttccacccagagcagctcatctcgggcaaggaagacgcagctaacaactttgcccgtggccactacactgttgggaaggagattgtcgatctatgcctggaccgtgtgcgcaagcttgcagacaactgcactgggct

SEQ ID NO: 9260 - DNA, 281 bp, Zea mays
  unsure (1)..(281): unsure at all n locations
atgggcgaatctacctcctgaactcatccgtgatatcatacggagactggaggctgatgagagcacctggccagcgcggaagcacgtcgtttgcttcgcagctgtttgtaggacatggagagaaatgtgtanagagattgtgttgagcccagagttctgtggcaagctcaccttccctgtgtctctaaaacagcctggtcctcgagatggaaatacaatggtccagtgttttataaagaggaataagtcaaaatccacttaccatctctacctgtgcctta

SEQ ID NO: 9261 - DNA, 275 bp, Zea mays
atgcactagagaactgcgcagggggaagttcctggccaagcatgcccattatcggggcattgtggacacagaaagtgcgaagatggcatgacttcattgtcctctcttgtatgcgttctccatttggcagagacaaagatgcagttgcgcactctatccgaagctgcttttcgtcctttctgcagtcatcatccagtggttctgacataatcgcaaaccgtggagttggggctttattaggggactcaatcacggatcaaggtcttaggctccca

SEQ ID NO: 9262 - DNA, 274 bp, Zea mays
gttttccctggcaaggagattatccagcctacggttgtggatcatgcaagttttatggtttggaaggacgaagcatttgaaatctggactcgggggtggggttgcatgttccctgagggtgattcatcgagggagctactagagaaggttcagaagacctactacctggtcagcctcgttgacaacgactacgtccagggggacctgtttgctgccttcaagatctgattatgctctcatggtcggtattgttgtatggttggacccaacaata

SEQ ID NO: 9263 - DNA, 273 bp, Zea mays
cccacgcgtccgctttgcgcttttgactggtcgggttgcataggccattgttgagaggtgatttggcctaagaatgggggctccaaaacaaaggtggacttctgaggaagaggctgctcttagagctggaatagcaaggcatggagttggaaaatggcgcacaatattgaaagatccagaatttagttccaccttatgctaccgctcaaatgttgatctcaaggacaagtggcgaaacatgaatgtgattgtcagtacatcgagttctcgtga

SEQ ID NO: 9264 - DNA, 274 bp, Zea mays
cggacggtggggctcgcatcgtgtgctcagtcagatccccgtcccgcatttcctaaggccaggttagttggcattgaagacgatgactgcttctgcagctgctggtgtgcagatggtggctgcacgcccttgcatttcggcctcgccaggaattcttaccgcacgggtttctaggactgattgcatgctcagtaccactgctacattccccaaaatcagctgctcctggcctctaaggtttaagcgcaatgatgttgttgtaagagcaatatcg

SEQ ID NO: 9265 - DNA, 273 bp, Zea mays
atggcccccccgttacgccgctccacgagagaatgataatggtccgtgctgtgaaatgggtagatgacatcattccagatgcaccttatgccataactgaagaattcatgaacaagctgttcaatgagtataacatagattacatcatccatggagacgatccttgtttgctaccagacggtactgatgcatatgctcttgccaaaaaggctggtcgatacaagcagattaagagaaccgagggagtgtcaacggcagacattgttggacgga

SEQ ID NO: 9266 - DNA, 277 bp, Zea mays
ctcacaatactgtacatgagggtcgcatctaccagctgaagttgttttgtgacaaggactatccggagaagccaccatctgtcagattccactcaagaatcaacatgacatgcgttaatcacgagacaggaatggttgatccaaggaagtttggtttgctagcgaactggcagcgggactacacgatggagaacatcctcacccagctcaagaaagagatggctgcctcgcagaatcgaaagttagtgcagcctccagaagggacattcttctaacg

SEQ ID NO: 9267 - DNA, 279 bp, Zea mays
gaggaggtgagccaccggaagcggagacgtgagcactcgaccaaccccgtcgatccggctgcggcgcggcgtgctagatcgctaccgaccatggtggtggacgagatcgccgagggggtgaagaacctaaccgtcaccggagatgcggcggcttcaggcggagatgggtagaggatgggccgcggcggcagcagcaaccgcatccaggtgtccaacaccaaaaagaccctcttcttctacgtcaacctcgccaagaggtatatgcaacagcacggcgat

SEQ ID NO: 9268 - DNA, 271 bp, Zea mays
ggaagaggctggaatcgatggtggtggaattttcaaggatttcatggaaaatattactcgagccgcttttgatgtgcagtacagtctcttcaaggagacggctgatcatcctttgtacccaaacccaggatcaggattggttcatgaactacatctgcaatatttcaattttcttggaagtctacttgggaaggcaatgtatgaaggcatacttgttgacttgccatttgcaacgttcttcttgagcaaggtgaaacaaaaatacaatttt

SEQ ID NO: 9269 - DNA, 269 bp, Zea mays
caagaatggaacctgcccctggctcaggcccgatgggaagacccaggtgacagtggagtaccgctacgagggtggcgccatggttcccatccgtgtgcacacagtcctcatctctacccagcacgacgagacagtcaccaacgacgagattgctgctgacctgaaggagcacgtcatcaagccagtcatccccgagcagtacctcgacgagaagacaatcttccacctcaacccgtctggccgcttcgtcatcggcggacctcacggcg

SEQ ID NO: 9270 - DNA, 266 bp, Zea mays
ctctgatttgtttcattttcatttagtcacttgatgcagctgtaggcgactttgctatagtgagaaatggcacacagcttgcagaatacacacagccttatattgagtcagggcctgtgatagtagtgccggtgaaacatgtaacctcaagtgcgtgggccttccttgaacctttcacattggagatgtggtgtgtcacagttgccccttttaatttggtgggcatagtagtgtggcctcctgaacatcgtactaatgaggaattt

SEQ ID NO: 9271 - DNA, 270 bp, Zea mays
ctcgtttagaacctctaaaatttcccccactcgccagtcgcagcagcacctgtagcagccatggacgccagcggaccggtagcaaggggaagaagggggcggccgggcgcaaggcaggcggccccaggaagaagtcggtgacgcggtccgtcaaggccgggctgcagttccccgtcggccggatcgggcgctacctcaagaagggccggtacgcgcacgcgtgggcactggcgcccccgtctacctcgccgccgttctggagtacctcgc

SEQ ID NO: 9272 - DNA, 276 bp, Zea mays
tctgctacaaggccggcgcgtggaagacgctaaacgaccagatcgttctcctctccaagaggagaggccagcttaagcaggccattactgctatggttcagaaagcaatggactacattgatttgacaccagacattgacacacgcgtcgagctaatcaaaacactgagcagcgtctctgctggcaaaatttatgttgagatagatagagcaagattgatcaaaaggcttgcaaatatcaaagaggagcagggaaagattgacgaggctgctgatt

SEQ ID NO: 9273 - DNA, 262 bp, Zea mays
cccaaacctgattggaggctcatgcttggagttctgtcgatcccgtcacttatttactttggactgactgtcttctacttgcctgaatcaccaaggtggcttgtgagcaaaggaaggatggctgaggcgaagagagtgttgcaaaggctgcggggaagagaagatgtctcaggggagatggctcttctagttgaaggtttgggggtcggtaaagatacacgtattgaagaatacataattggtcccgatgatgaacttgctg

SEQ ID NO: 9274 - DNA, 261 bp, Zea mays
ggcatcggccccagagatgtatgtgttgttggggttgcacgcaccccaatgggcggtttccttggtgccttgtctcccttgcctgctacgaaacttggctctatagtaattcaagctgctctggaaagagcaaacgtggatccagctctcgtgcaggaggtctactttggaaacgtcttgagtgctaatttggggcaagctcctgcaaggcaagctgctctgggtgccgggataccaaactctgttgtttgcaccactgtt

SEQ ID NO: 9275 - DNA, 263 bp, Zea mays
cccacgcgtccgaccgcgacgagctcaaggagctcatccggaaggctgacgctggcgaggacggggtgaagatctccccctggttcaggctggtggtggacaacttcctcatgggctggtgggaccatgtcgagaaaggcaccctcggcgaggccgtggacatggagaccatccataagctgaaggagtgaggggccgccggccggccggctccgatgacctcaccacctgttgatgttgctgctgctgctgcactgcatgtt

SEQ ID NO: 9276 - DNA, 262 bp, Zea mays
cccacgcgtccgaattgatattgccctgtggaagttcgagaccaccaagtactactgcactgttattgatgccccgggacaccgtgacttcatcaagaatatgatcactggcacttcccaagctgactgtgctgttcttatcattgactcaaccactggtggttttgaggctggtatctccaaggatggccagacccgtgagcatgctctccttgctttcacacttggtgtgaagcagatgatttgctgctgcaacaagatg

SEQ ID NO: 9277 - DNA, 267 bp, Zea mays
gctgcctccgcctctcgagtctcgtccacccgtcatcctcctagctcctctactcgccagtcgccatgggcaagattaagatcggaatcaacggcttcggaaggatcggcaggctcgtggccagggtcgccctccagagcgaggatgtcgagctcgtcgccgtcaacgaccccttcatcaccacggactacatgacctacatgttcaagtacgacaccgtccacggccactggaagcacagcgacatcacactcaaggactccaaga

SEQ ID NO: 9278 - DNA, 269 bp, Zea mays
tgaacctgtgctgccccctgtctatgcgaggcctgaacatgttgaaagagcactaaagagactttatcaagatgccatgagcatactcaggcctcagggccgagagcttgacttgctgatggtaatactgcctgacaataatggctctctttacggggatcttaaaaggatatgtgagactgatcttggattggtctcccaatgctgtctgactaaacatgttttcaaggcgaacaagcatcagtatcttgcaaatgttgccctgaaaa

SEQ ID NO: 9279 - DNA, 261 bp, Zea mays
ccaaggtgaacctggagttgtcatccgaggaaagaagggcactggaggcattactatcaagaaaactggcatgtccttgattatcggtatctatgatgagccaatgactccagggcaatgcaatatggtggtggagaggctcggcgattacctgatcgaacagggcttctaagggggtgtttggtttgaggaatcactccatccaaaatgtggtggtgcatcatggatccattcctcaaatttggtgggatgaccccattc

SEQ ID NO: 9280 - DNA, 259 bp, Zea mays
cccacgcgtccggagagttgggcgcagagaatccccaagcaaacaaacagggtagaggtagagggagaggagaggagaggagaggagaggagaggttgggtctgggacaccatggctccgatgaagctgtacggggcggtgatgtcgtggaacgtgacgaggtgcgcaacggcgctggaggaggctggctccgactacgagatcgtgcccatcaacttcgccaccgccgagcacaagagccccgagcacctcgtccgca

SEQ ID NO: 9281 - DNA, 257 bp, Zea mays
cgactccgtgattccctagtcctacccagatcggcgcccgacgcaaggccgagcaggcgatggccgcagcggcgtcaatggggcaccttacgcgccaccgagctggaccttccgggtttcgtgccgctgaagctgtcccaggtcgagatcctcgtgtcctacctcggcgcctccgtcttcgttttcctcgccgtctggctcgtctccggaagatgtgttagattatccaagaccgaccgtctgctcatgtgctggtg

SEQ ID NO: 9282 - DNA, 266 bp, Zea mays
  unsure (1)..(266): unsure at all n locations
tgccaagagccgggccaaggctgcgctccacggccgtccgggtcagcagcgagcaggaggcggcggcggccgtcnaggcgccgtccgggaggaccatcgaggagtgcgaggccgacgccgtcgctgggaagttccctgctcccccgccgctggttaggccgaagcgcctgaaggaacgccggagatcaggccccttgacatggcaaagcgcccccgtcgcaaccgcaaatcacctgctcttagggctgcattccaggagacgagca

SEQ ID NO: 9283 - DNA, 326 bp, Zea mays
cccacgcgtccgctccgttgcccaggctttctttgatctggagaacgggaaccaggagctcaagagcgacctcaaggacctgtacatcaacaatgctatccagatggatgttaccgggagtaggaaggctgttgtcattcacgtcccataccgcctgcgcaaggccttcaggaagatccatgtcagactcgtcagggagctggagaagaaattcagcggcaaggatgtggtaattgttgctacacggaggattgtgaggccacccaagaagggttcagctgttctgcgccctcgcaccaggactctgactgctgttcacgatggca

SEQ ID NO: 9284 - DNA, 325 bp, Zea mays
cgtcatctcttctccggcgaagaacccccagtcgcccaccagatcacttgttaaactttgttgaggggtgatggcggtttctttcgcaaacctcagctccgaggcagggcttaaaaagcttgatgagtaccttctcactcgcagctacatcactggctaccaagcttccaaggatgacttggctgtctacacttcgttttcgtctgctccctcgtccaagtatatcaacgtagcaaggtggtttaatcacattgatgcgctcgtgaggctgagcggaattactgcagagggccaaggtgtgaaggttgaatcgtcagcagttcct

SEQ ID NO: 9285 - DNA, 327 bp, Zea mays
cccacgcgtccgcggacgcgtgggctcagccactgctgccgtcgacaggtcctcccccgaccccgacgcgctctatgaagaggggatgtggcaacaaatggccatggacagcggtgccactatgcaacctgggtcatatcctgagcgaccaggtgaacccgactgcacttactatctcaggactggattgtgtcgatttggcatgagctgccgattcaatcatcctccggataggaatctggctattgcctctgccagaatgaagggagaatatcctgagagagcgggacagccagagtgtcagtattatctgaagactggaacatg

SEQ ID NO: 9286 - DNA, 328 bp, Zea mays
gaagtgaaggctggtgagattatgaagcttgagtatcagaggaaggttgctttgttaaatagacaaaagaaacacaatgctgccattgaggttcttgagaaaacgaaagctgcggtaacccacttacatactagatacatagttgatatgcaatcaatggattcaactgtgtcagaaattcagtatctccgtgataaccaactgtacccaagactattggatcttactgaccggatggcaaaaatgtgggaggacatgaagatacatcacgcaaatcagctgaaaattgtcctaaatctgaagtctgttgatattcctgattccaata

SEQ ID NO: 9287 - DNA, 327 bp, Zea mays
cagaattcttgatcccaatcctacaactagaatcacgatttctcagatactggagcatccttggttcaaaaaggggtacaagcctcctgtttttgacgagaaataccaaactagcttggatgacgtggatgctgcttttggagattcagaagaccggcatgtgaaagaggaaactgaagatcagccaacctcaatgaatgcattcgaactgatttctctaaaccaggcactgaatctggagaatttgtttgaagcacaggaggagtataaaagagagacaagattcacctcacagtgccccccaaaagagataatcaccaagatcga

SEQ ID NO: 9288 - DNA, 315 bp, Zea mays
acgcgtcaggctggagccatgcctcgtcgacgcctccggggaccgccgccgcgccgtggctgcgaaggtctcgtcgccgtcggtcatcggcaccgccatgccgtcgctcgacttcgagacctccgtcttcaagaaggaaaaggtgtccctggccggccatgaggagtatattgtgacggcgtggacggatctgttcccgctgttaaccggagccttcaagggaatccaacagatcggtgtaatcggcttgggctcgcagggtctgggcagctcagaacttgagagactcactttgttaggcacagtcagatattg

SEQ ID NO: 9289 - DNA, 319 bp, Zea mays
gcccggtccccgatctccgatcccctcgtcgatccaagatgcagatcttcgtcaagaccctcactggaaagactatcaccctcgaggtggagtcttctgacaccattgacaacgtcaaggccaagatccaggacaaggagggcattcccccggaccagcagcggctcatcttcgctggcaagcagctcgaggacgggcgcacacttgccgactacaacatccagaaggagagcaccctccaccttgttctccgcctcaggggaggcatgcagatcttcgtcaagaccctcactggaaagactatcaccctcgaggtgga

SEQ ID NO: 9290 - DNA, 322 bp, Zea mays
agaaaaggggcaggaagaaatcgagcctcactcgatccatcgcctcgccgcagcacacacgaggccggcggcgccatggccatgaagctggacatgtccgcgctcgagaccaacttcgccaacctgaccgcctccgccggcgacgacacgtacttctccgccgaggcccccgacgtgccgtccatggtgctccccatctgcgacgacttcgacggcttccaggcggccaccaaggatatggtgaagaataagaaggggacgaccacgcttgccttcatcttcgacaagggcgtcatcgtcgccgctgattccagggccagca

SEQ ID NO: 9291 - DNA, 322 bp, Zea mays
gcgaggagcagtgggccgccgagaagaaggagaagtccctggccgagaggaagaagtccatcgagagccggaagctcatcttcacccgcgccaagcagtacgccgaggagtacgatgcccaggagaaggaactggtacagcttaagcgtgaggcccgtttgaagggtggtttctatgtcagccctgaggcaaagctgctatttgtggtccgcatccgtggtatcaatgccatgcaccctaagaccaggaagatattgcagcttctgcgtttgaggcagatcttcaatggagtgttcctgaaagtcaacaaagcaaccattaa

SEQ ID NO: 9292 - DNA, 324 bp, Zea mays
ctctccagcatcctcccgtctccgtcgtctcgtctccgctcctcacctcgccagccatgggcaagatcaagatcggaatcaacggtttcggaaggatcggcaggctcgtggccagggtcgccctgcagagcgaggatgtcgagctcgtcgccgtcaacgaccccttcatcaccacggattacatgacgtacatgttcaagtacgacaccgtgcacggccaatggaagcacagcgacatcgccctcaaggactccaagacgcttctcttcggcgagaagccggtcaccgtctttggcatcaggaaccccgaggagatcccgtggg

SEQ ID NO: 9293 - DNA, 322 bp, Zea mays
tggaaattcttgggaatacacttggagaaatcgcaggagagaaggctgggattttcaagaaaggagttccggcctatactgctccacaaccagaagaggcaatgactgctctcaaacaaagagcttcagaattgggtatctctctccaagtcgatgatcctttggagccccatcacctaaaagatcagcatcttgggctgcatggagaacatcaatatataaatgctggccttgcagttgctttggctagtacgtggcttgagaagcagggacataaagatacgttaccactcaatcgtactgtaaatcttctcaatcatga

SEQ ID NO: 9294 - DNA, 321 bp, Zea mays
gctgtcgaggagctcaaacttgcaagggacatttatgagcatgctgttgttttgagtgtgaaacttgaggaccaagatgcatttgaacgtgatttctgccagctcaagccttattacatggatacatgtggcataattcccccctcaccagaggagtacccaattttgggactcaatcttctgaggctgttggttcagaatagaattgctgagttccatactgagctggagcttttacctgtcaaggcacttgagcatccttgcatcaagcatgctgtagagcttgagcaatccttcatggagggtgcctacaaccgagtg

SEQ ID NO: 9295 - DNA, 322 bp, Zea mays
accagccgccccaaccggaggggttctcgccacaccgggagtacggcctggtccccatggtgatcgaaaccacctcccgcggggagcgcgcctacgacatcttctcgcgcctgctgaaggagcgcatcgtctgcatcaacgggcccatcgccgacgacacggcctcgcttgtcgtcgcacagctgctcttcctcgagtccgagaacccactcaagcccgtccacctctatatcaactcccccgggggtgtcgtcaccgcggggctcgccatctacgacaccatgcagtacatccgctgccccgtcaccacgctctgcatcgg

SEQ ID NO: 9296 - DNA, 321 bp, Zea mays
ggagaagtataggaactatgacttcgggcggtgccgcgtgtttactgctgtggtcaaccatgcctgccggttggacaatcagatattcatcgatctagtaccgtgaaaatatactgccccaagtgtgaagacatctactacccacggtccaagtaccaaggcaacatcgacggcgcatattttgggacaacgttccctcacctgttcctgatgacatacgagcacctcaagctacagaagcccttgcagcgctatgttcctcgtgtctttggcttcaagctccataagccatgagcctcatgtatttggcttcaagctcca

SEQ ID NO: 9297 - DNA, 316 bp, Zea mays
gacacacatgaggcactaggggttataggaaaattggcaggggttcagccaagatcgtttggatttgcagggacaaaggataaacgtgctgttacaaccccacaggtgacagtttttaaagtgcatgctagcaagctggctgctcttaatagcaaactcacaggtatcagagttggagactttagttacgtgaaggagggccttgttcttggtcgactcagagggaaccactttgcaattactttgaggaatgttattgcagaatcggccgatgttataaatgctgcagttaatggtctaagtaaaaatggattta

SEQ ID NO: 9298 - DNA, 313 bp, Zea mays
gacgagatcgacatggagttcatgggcaacgcgagcgggcagccggtggtgctgaacacgaacgtgtgggccagcggcgacggcaagaaggagcaccagttcgacctctggttcgacccctccgccgactaccacacctacaccatcatctggaacccgaccaacatcctgttcaaggtggacggcgacgtgatccggtgcttcaagcgctacgccgacctgccgtacccgaacgcgaggcccatggcgctgcacgccacgctgtgggacggcagctactgggccaccgagaagggcaaggtgccggtggaca

SEQ ID NO: 9299 - DNA, 311 bp, Zea mays
cccacgcgtccgagtgaaacggcagcatgcagttcttattcttgctgacaccctttactatgggaagttcaagcgttactgtaagccaggaaatgagtggcataactgctattcagatgagcactacttgccaactctcttcaatatggctgacccgactggaattgcaaactggtcagtgacgcacgtagattggtccgaacggaaatggcatcccaaagtctacagggctgtggatacgagcttcgagctgctcaagaacatctcgtccattgatgagagcgtccacgtcagcagcaacgcgaacgatg

SEQ ID NO: 9300 - DNA, 316 bp, Zea mays
gactacataggcctctcgccgccggcggcagcgccgccggctgaaaacgacgaactgaagggtactgagctccgcctcgggctgccagggtccgggtcgccggaccgccgtgtcgtggctgccaccgcgaccaccctggacctgctcccggccaagggcgccaagcgcgggttttctgacgaggcgcccccgccatcgcctgttgccactgccggaaagggaaagaaggtggcagaagaggagtacgacgagaagaatgtcgcagcgaccccgcagccggccgccaaagcacaggtggtgggatggccaccagtct

SEQ ID NO: 9301 - DNA, 314 bp, Zea mays
gtgacgtcgtcctggacctctctgagatgaacaaccagaccattaaactcggcgcgggtctgcgtcaggagtgtgacaccatccaggcgactagtgctgggaagctgcggcagttgaaacccaacaagtattggattgaaaactcacagaaaagatatataccttctgtagaagataccgttcttggtattgtggtcgacaccaaaccagacaactttttggtagacataaagggtcctaatttggcctttctaccagtactttcatttgaaggcggtaccaggagaaacatacccaagttcgagattggtaca

SEQ ID NO: 9302 - DNA, 317 bp, Zea mays
cctgataaccacctcccaagattgagcggaatcaatcatttgatgatgatgattttgcaaacaagcctgttgccatgaaaagtaatgcagcagcagcaccagttaaggcaactgtttattcagttgctgacctacagatggcaacagatagcttcaacatggacaaccttattggagagggtactttaggacgtgtgtacaaggcacaatttagtgatggaaaggttctagctgtgaagaaattaaacagtacaacactgccaaggcaatcatcagatgatttctatgagctggtgtcgaacatttcgaaattgcac

SEQ ID NO: 9303 - DNA, 324 bp, Zea mays
cggacggtgggcggacgcgtgggcggacgcgtgggcgaattcccaggcaggcaggtcggcgaggagggcaggaagaccgaagaccgagccgtgcgggggctcgggacgggaacgggacaggacctcaaaatctcagatccttcctgcccgcccgcccgtgcccgtcgacgcgtcgttcttgccggccgcgccccacctccgccctctcctcctccagggggatcggatacgccacaggctgcgcgatggtgctgtgggtcttcggctacggctccctcatctggaaccccggcttcgacttcgacgacaaaatcctcggcttca

SEQ ID NO: 9304 - DNA, 322 bp, Zea mays
ggtccatgaccatgctcagctggagtgtgatcgagtacagggcgaagtatgaggccatcggtgagctcgaccatatcaaggagctgatcaagtggggaacagactacatcctcaaaaccttcaattcatctgctgacacgatagacaggattgtcgctcaggtgggtgtaagtgacacctctaaaggcagcagtcagcctaatgaccattactgctggatgagaccagagggcatcgactacaaaaggccagtcaccgagtgtcactcctggtcagatctagcgtcctgaatggctgctgccctggctgcagttccatagtg

SEQ ID NO: 9305 - DNA, 325 bp, Zea mays
ggaacttttcagaaaatctacttcttgtttcctgattgcaactgatgtcgctgctcgtgggattgatattgttggtgttcagactgtaataaattttgcatgcccaagagatgtgaaaacttatcttcatcgtgttggccgcacagcacgggcaggaagagaaggctatgccgtaacatttgtaaccgatgatgatagatccctcttgaaagcaattgcaaagaaggctggttcacaactgaaaagccgcattgttgcagagaaacctgtggctgagtgtgcacaactgattgagcaactagaagatcagatttccatcatcatt

SEQ ID NO: 9306 - DNA, 303 bp, Zea mays
gcaccagggcatcagccactggctcaacacgcatgcggtgatggagccgttcgtgatcgccaccaaccggcagctcagcgtgacgcagcccgtgcacaggctgctgctgccgcactaccgcgacaccatgaacatcaacgccctcgcgcgccagaagctcatcaacgccggcggcatcttcgagatgaccgtattcccgcgcaagtacgccatcgagatctcctccaaagtctacggcagctggaacttcaccgagcaggccctccccgacgacctcatcaagcgaggcatggccgttccaga

SEQ ID NO: 9307 - DNA, 325 bp, Zea mays
ggcgaaagaaggggaaccaaatcttggacgggaacacatagatttctttggtggaggaaggaggagggcaacaagaggaggttacaggtagcccaatagatctactgctgttgagggagttgatgcaaagctgagttgctgcgcgttggctttctttagagatggcttcagctggtgttgccccttctgggtacaagaacagcagcagcaccagcattggtgccgaaaagttgcaagatcacatgaacgagctaaagattagagatgataaggaagttgaagcaaccataattaatgggaaagggaccgaaactgggcacataat

SEQ ID NO: 9308 - DNA, 323 bp, Zea mays
cccacgcgtccgacccaacaaaaaccctcgctcgcctcacttgttcgctcacctcggtgcggcgcgtcgttcggacacggagatacagcggcgattccggcgatggagtacgtgaaccccctcaccggcttccgcgtcgacggccgccgccccaacgagatgcggcaactcaagggcgaggtcggcgtcgttgtgcgcgcagacgggtcggcgctgtttgagatgggcaacaccagagtcatcgtcgccgttacggcccgcgagaggttcagaacaaaggtcagcaagtaaacagcaaggaggctttggttcgttgtgagtac

SEQ ID NO: 9309 - DNA, 322 bp, Zea mays
gctgaccttattgccatgaaccacaccgatttcatcatcaccagcacattccaagaaatcgcgggaagcaaggacaccgtggggcagtacgagtcccacattgcgttcactcttcctgggctctaccgtgtcgtccatggcatcgatgttttcgatcccaagttcaacattgtctcccctggagcagacatgagtgtttactacccgtatacggaaaccgacaagagactcactgccttccatcctgaaatcgaggagctcatctacagcgacgtcgagaactccgagcacaagttcgtgctgaaggacaagaagaagccga

SEQ ID NO: 9310 - DNA, 324 bp, Zea mays
cttcctcgagttctcctcaaccaaattcaaggtcacagcggcgaacctctcggctatcatgtctggccgcggcaagggcgggaagggtctgggcaagggcggcgccaagcgccaccgcatagtgctgcgcgacaacatccagggcatcaccaagccggcgattcgcaggttggcgaggaggggcggcgtcaagcgcatctccgggctcatctacgaggagacccgcggcgtgctcaagatcttcctcgagaacgtcatccgcgacgccgtcacctacaccgagcacgcccgccgcaagactgtcaccgccatggacgttgtcta

SEQ ID NO: 9311 - DNA, 323 bp, Zea mays
ctctcacgctcacgcccccggacccttctccccgcgccgccgctcgccggagctccgcgtctccgcccgcgccacaccctgtagaatcctcaatggctgccgcaaggggcattaaccagctcctgaagagaactctctacaaccagtctgctggttcgtcgccgcttttctcatttcggggaaagcatgaagaatcctctgctggactgagagcattggctcttcttggagttggtgcctctggtcttttgagtttttctacaatagcatctgctgatgaagctgagcatggcttggcagccccagattatccctggccacat

SEQ ID NO: 9312 - DNA, 321 bp, Zea mays
tggcttctgaacaagggcatacgggccttgcaggctatctttcagaagtgtcgctgacgagctatcttgcatcactcactatagaagaaagtgatgtctcaaaaggatcagctgaagttgaagcagagagagctgtggaaagcatatctcagaggagtgtccagctgcatggtggcacagaagatgagctctcaatgaaggattctttggcagcagtgaggaatgcagcgcaagcagcagctcacatccagaatgctttccgtgccttttctttcaggaaaagacagcagaagactgctcgacttagggatgaatatggaa

SEQ ID NO: 9313 - DNA, 318 bp, Zea mays
agggcccccccgttacgccgctccacgagagaatgataatggtccgtgctgtgaaatgggtagatgacatcattccagatgcaccttatgccataactgaagaattcatgaacaagctgttcaatgagtataacatagattacatcatccatggagacgatccttgtttgctaccagacggtactgatgcatatgctcttgccaaaaaggctggtcgatacaagcagattaagagaaccgagggagtgtcaacgacagacattgttggacggatgcttctttgtgttagagagagatcatctgatgcacataatcact

SEQ ID NO: 9314 - DNA, 323 bp, Zea mays
gcctccactcccccctcccaggcgctgcccaggtaagtcggcggcggcgatgacaacgcgcttcaagaagaaccgcaagaagcgcggccacgtgtccgccgggcacggccgcatcggcaagcacaggaagcacccgggaggtcgcggtaacgccggtggcatgcaccaccaccgtatcctcttcgacaagtaccatccgggctacttcggcaaggttggcatgcgttacttccataagctccgcaacaagttctactgccccgcggtcaacatcgagcgcctctggtcgatggtgcccgccgacaaggcggcggaggccggcc

SEQ ID NO: 9315 - DNA, 322 bp, Zea mays
cggaccgtgggcggacgcgtgggttccagagccacaggatgacttctgtatccatccgttcaagaccaagttctcttcggttcaagatttgctgttcggctaggaaggagacagtcgacaaggtctgtagtatagtgaaggagcagctggctcttcccgatgggactgctatcactggtgaatcaaaattcgccgaacttggtgctgattcactggatacggttgagattgtgatgggcctcgaggaggcgttcaacataaccgtcgacgaaacaagcgcacaggacatcgcgacggtgcaggacgctgcagacctcatcga

SEQ ID NO: 9316 - DNA, 317 bp, Zea mays
gttacaggtagcccaatagatctactgctgttgagggagttgatgcaaagctgagttgctgcgcgttggctttctttagagatggcttcagctggtgttgccccttctgggtacaagaacagcagcagcaccagcattggtgccgaaaagttgcaagatcacatgaacgagctaaagattagagatgataaggaagttgaagcaaccataattaatgggaaagggaccgaaactgggcacataattgtcaccactactggtggcaagaatggtcaaccaaaacagacagtgagctacatggctgagcgcattgtagg

SEQ ID NO: 9317 - DNA, 312 bp, Zea mays
gaaattaaagaggcagttgagcttcccttgactcaccctgagctgtatgaagacattggtattaggcctcccaagggagtcatattatatggagaacctggaacaggaaaaactcttcttgccaaggctgtggctaactcaacatctgcgactttcttgcgtgttgttggtagtgaactcattcaaaagtaccttggggatggtcccaaactagtccgagaattgtttagggtggctgatgaactttctccctcaattgtctttattgatgagattgacgctgttggaacaaagaggtatgatgctcattca

SEQ ID NO: 9318 - DNA, 315 bp, Zea mays
gaagatagacagcgcttcgctgtctctgtacgaagaagacaactttctcgcggttgtgtcgaacgtgtcccggctcaggcatccaaacatcgtgccccttgcaggctactgcgtggagcacgggcagaggctccttgcgtacgagtacgtcgggaacggaacgctgcatgacatgctgcacttctctgacgacgacgggatgacgatgccgggcaagactactaggctcgcatggaacacccgcgcgaggatagcgctaggcaccgcgcgcgctctagagtacctgcatgaggtgtgcctgcccccggtggtgca

SEQ ID NO: 9319 - DNA, 321 bp, Zea mays
tgctcctccgccgggacgccgtcagccgcccaggcgctcaagatcagttcaatcccgaccaagccagttgaggggcagaagactgggactagtggcctgaggaaaaaggtgaaagtattccagcaggagaactaccttgctaattggattcaggctctattcaattccttgccccctgaagattatgtgggtgcaacccttgtacttgggggtgatggccggtactttaacaaggaggctgctcagatcatcattaagattgcagctggaaatggagttcagaagatcatagttggcaggaatggtctactgtcaacacct

SEQ ID NO: 9320 - DNA, 314 bp, Zea mays
ggcggtggcaacgtggcggcggctacggtggtggcggcggcggctacggtggtggtggcggcggctacggcggtggcaaccgtggcggcggctacggcaactccgacgggaactggaggaactgagcggtggggcccgcgcggccaagttatcctgttcgctaccgtgttgtttaccctagtccagagtgtttatcttcgttcgtctcgtgtttgttgttgcccatctgtgtttttgattgaaggtcgctctgtgtcagttgttagtgctgtgttcatcctcggctccagcagacccatgcatcaaccagcatg

SEQ ID NO: 9321 - DNA, 308 bp, Zea mays
gcgacgccaccaccacacgttcacggtagcgagagcttatcgtcgtcggcggcgaagatggtgtcgctgaagctgcagaagcggctcgccgcgagcgtcctcaagtgtgggaaaggcaaagtctggcttgaccccaatgaagtcagcgagatctccatggctaactcccgccagaacatccggaagttggttaaggatgggtttatcatcaggaagcctcagaaggttcactctaggtcccgtgcaagaagggcacatgaggccaagcagaaagggaggcactctggatatggcaagcgcaggggtac

SEQ ID NO: 9322 - DNA, 312 bp, Zea mays
catcgtgccgtcctccgtgtcgtccatccccaagggccgctgctccgaagggagtctgattctgatagtgaagcatcagatgttagtggctctgatggagaagacacctcgtggatttcatggtattgcaacttaagagggaatgagttcttctgtgaagtcgatgatgactacattcaagacgacttcaacctttgtggcctcagcagccaagttccttattatgattatgctcttgatctcattttagatattggatcatctcatggtgatatgttcactgaaggacaaaatgagctcgtagaatcagct

SEQ ID NO: 9323 - DNA, 315 bp, Zea mays
  unsure (1)..(315): unsure at all n locations
ctcgtccgcttctctctcacccttccttcccctcctctcctgtggatgctccctccctctccggctctccgcctctcccccgccccccaagcccaaatcaccgcgcctcgccccacagcaccggttgcgtgggannnnnnnnnnnnnnnnnnnnnnnnnnnnncggctgtcgggcgagatgagcgactcctactgccccgactgcaagaagcatacggaggtggcgttcgaccattcggcgggggacacggtgtgcaccgagtgcggcctcgtcctcgaggcgcactccgtcgacgagacctccgagtggcgtac

SEQ ID NO: 9324 - DNA, 312 bp, Zea mays
tgagtacaaggcaaaaaagatctctgaggaggaatacgtcactgccatcaaggaggaaatcaacaaggtcgttaagcttcaagaagagcttgacattgatgtgcttgtgcatggcgagcctgagagaaacgatatggttgagtacttcggtgagcagctctccggttttgcgttcactgccaatggctgggtgcagtcttatgggtcaaggtgcgtcaagcctccgatcatctacggtgacgtgagccgccccaaccccatgaccgttttctggtcgaagaggcacagagcatgacgtctcgcccaatgaag

SEQ ID NO: 9325 - DNA, 310 bp, Zea mays
tttctctcctctctccgtcgccgcctcgggccaaaccctacgcagggagttgattgatcgattgcagccatgagtaagttgcattccgagcttctcaaggattgcatctcccagatagttcaggatgccaagaagaataggaagttcactgagactgttgagcttcagattagtctgaagaattatgatccacaaaaggacaagcgtttcagtggctctgttaagttgcctcacatccctcgtccaaagatgaaggtgtgcatgcttggtgatgcccagcacgttgaggaggctgagaagatgggacttg

SEQ ID NO: 9326 - DNA, 299 bp, Zea mays
tgctcatcccgaacgccttcttccgggcgggctgcgcggcggtgctgctgtccaaccggcgccgcgacttccaccgcgccaagtaccagctggagcacgtggtgcgcacgcacaatgtcgcggacgaccgcgccttccgctccgtgtaccaggaggaggacgagcagcggatcaagggcctgtccatcagccgcgacctgctggatgtgggcgggcacgcgctcaagaccagcatcaccacgctggggcccctggtgctgcccttctccgagcagctgctctgcttgggggcgtgctgt

SEQ ID NO: 9327 - DNA, 291 bp, Zea mays
cgtcgtctactcgtctcccacaacacggtccactaaccctagcgacacctcggctcgtttgatccccgcggggagctctagttccgccaagcgtgcgtaccggcgtccggatccgggaccgaagatgacggagtccctggtgcggaacaagccggggatggccagcatcaaggagatgccggtggtgcaggacgggccgccgccgggcggtttcgcgcccgtgcgcttcgcccgccggatccccacctcggggcccagcgccaccgccatcttcctcaccaccttcggtgc

SEQ ID NO: 9328 - DNA, 303 bp, Zea mays
ccctgtgggcactgctgcatttcttggaacaacaaagggcttccgtgttggtttgaacttggctcttgctatagcactacactacattccagagggtatttcagtagctctcccagcatactttgccactagcagcaaatggcaagccttcaaattagcaactctatctggttttgcagagccactgggtgtgattattgtggcatacctattcccaagcaatttgaaccctgaaatactggaaggtctacttggattagtgggaggagtcatggcttttctaacattgtatgaaatgctacc

SEQ ID NO: 9329 - DNA, 305 bp, Zea mays
cccacgcgtccgcccacgcgtccgcccacgcgtccggggaaacaagaccatggatgcctccaagctccgcgagcttcgcgacttcgtcgaggcgtgcaagaagaatccttcgctcctcgccgaccccaacctctccttcttccgggattacctccagagtttgggtgccaaaattcccgccgccgccccctctttcgaaagtcccaagagatcttccatggacgacattgatgacgacggtgatgacgacgacgatttggatatgagggatcccactcctgagcgagacgagctcgatgaagaga

SEQ ID NO: 9330 - DNA, 303 bp, Zea mays
atgctgtaaatttcaagaaattctgccttgttttgaagaaccaatacctatgtctaggtcaaaatgccgaaccacgcgcgaggaacgctatggcgctcctgcttaacagtgagggtatatctgggccacttcccacggccttgggcgccttctccaacttgagttacctcgccctcgccaacaacaagctcaccgggccaatcccaccatcagtcgggcacctgcaccactccctccgcgagattgtcctcctcaacaaccagctctccggctgcctccccggcgagctagggatgctcagca

SEQ ID NO: 9331 - DNA, 305 bp, Zea mays
atcgaacgaactgaggtcgacgacgactgatcgagcagcgacgatggcggctgtgctgaacagcaggaagacgccgcagtggttgccgtgctggtggcggcggcgctgctggcgtcgtccgcttcggcggcgatcacctgcgggcaggtggggtcgtcgctggctccgtgcatcccgtacgcgacgtggagggccagcgcgctccccgcgtcgtgctgcagcggcgtcaagagcctcaacagcgctgcgcggaccagcgcggaccgccaggcggcgtgccgctgcctcaagagcctcgccaacag

SEQ ID NO: 9332 - DNA, 306 bp, Zea mays
gagccccgacctccgcggcgcccagctcctggtcggcgccaacttcgcgtccgccggcgtcggcatcctcaacgacaccggcatacagttcgtgaacatcatcaggatcggacagcagctgcgcaacttccaggagtaccagcagaggctggcggcgttcgtcggcgaggacgcggcgcggcaggccgtcaacgacgcgctcgtgctcatcacgctcggcggcaacgacttcgtcaacaactactacctggtgcccttctccgtccgctctcgccagtttgccatccaggactacgtcccctacct

SEQ ID NO: 9333 - DNA, 312 bp, Zea mays
cggacgcgtggcggcggtggccgcttcatgcccaagttcaagaacctcacggccaaggccaagacggccatcctgctctaccacgccgtgccggactactactccatgcagttcctcaagtccaacaagggcaaggtcaccacgctcgccaccaccagcgtcgccaagaaggactacacctacgaagcggagagcaaggacgacaccgtcacgctcgacaccaccgtcgtcacctccaccatccaggccaccgtcatggacgacgacccgctcgccgtctacgcttgctccaagttcctgcagcctaaggag

SEQ ID NO: 9334 - DNA, 310 bp, Zea mays
cggacggtgggcggacgcgtgggcgacgcgccgtcactgaatcctcagatcacggctagccgtaatcacgacactctgctgactcccggcgagtgtaacatttttcgttcagccatggactcaaggagaagactcacatcaacattgtggtcattggacatgtcgactctggcaagtcgaccaccactggccacctgatctacaagctcggcggtattgacaagcgtgtgattgagaggttcgagaaagaggccgcggagatgaacaagcggtcattcaagtatgcctgggtgcttgacaagctcaaggc

SEQ ID NO: 9335 - DNA, 117 bp, Zea mays
atcacggtggccaccgtgatcgggtacaagcaccagacggacgcgtcggcgtcgggcgccgacgcggcgtgcggcggcgtgggcgtgctgggcatcggctgagccttcggcggcatg

SEQ ID NO: 9336 - DNA, 310 bp, Zea mays
cgacggctggggtgctgcgccgctctcaccttcaccgccgacgagcattcacaagtagtggtctcttactggtggcggcgtagaggtgacgaaaaaaccttgacaatgagcagcataggcacaggttatgatctgtctgtcaccaccttctctcccgatggccgcgtcttccaggtcgagtatgccacgaaggctgtcgacaacagcgggaccgttgttgggatcaagtgcaaagatggcattgttctgggtgtcgagaagctggtaacctcaaagatgatgctggagggatcacaccgtaggatccatt

SEQ ID NO: 9337 - DNA, 303 bp, Zea mays
cccacgcgtccgcagccatctatggcggcgtcgctgctcctccgcgctgtgcgccgaagggagctcgcgtcccctctcggatccctgggtgccaacttacagtcaacatgtgctgccaacatatgctctgtcttatggaatgaacaacaaggaaggcttgatagcggtatttgatcttggaggaggaacttttgatatctctatcctggagatctcaaatggagtttttgaggtgaaagcaacaaatggtgatactttcttgggtggtgaagattttgataacacgctactagagttcttggt

SEQ ID NO: 9338 - DNA, 301 bp, Zea mays
cggaccgtgggcggacgcgtggggcgtattgaaggaagaacaggctccattacccagattcctattctaacaatgcctaacgatgatatcacacacccaactcctgaccttactggatacattactgagggacagatatacattgataggcagctccataacagacagatttatccacctattaatgtcctgccatctctttcacgattgatgaagagtgctattggtgagggcatgacacgtcgagaccattcggatgtatctaatcagctttatgccaactatgctattggaaaggatg

SEQ ID NO: 9339 - DNA, 123 bp, Zea mays
ggttcaggcaattataaaatttaaaagtgctcttgggcttgatgatgtagatgctgctaacatgcacatggagattggtagacgcatatacagagagaggttggaaacaagtgatcgtgatgc

SEQ ID NO: 9340 - DNA, 306 bp, Zea mays
aataattgcaactgggtctgatgtaaaatcacttccaggaataacaattgatgagaagaaagttgtttcatctactggtgcactgtgcttgtcagagatcccgaagaaactggtggtaatttgagcaggttatattggccttgagatgggttcagtctggaaccgccttggttcagaggtcactgttgttgaatttgcgccagatatagtaccatcaatggatggcgaagtcaggaagcagttccaacgcatgctagaaaaacaaaagttcaagttcatgctcaagacaaaggttgttgggtgtga

SEQ ID NO: 9341 - DNA, 306 bp, Zea mays
cggacgcgtgggccatattttccctcatctcccgccgcctgcacccaacaagcctctcgacgctagtcatggccgcttccaacggcgccgccgcggtcgacgagaccgtcgccgccaccgactccgtgcaggagcctccccagaagatctccaagatctctcccctgctcaaggtgaagaagctctccgagaaggccgtgctgccgtcccgcggctccgctctcgccgccggctacgacctctcgagtgccgaggagatggtggtgccggcgcgtggcaaggcgctcgtgccgaccgacctcagcg

SEQ ID NO: 9342 - DNA, 307 bp, Zea mays
gggctgcaagctcgtactctggcgacgagggcagctcgggcaacgccaggaggcagtatcccactgtctccgcgtctccgctggttggtctccccgagttttcgcatctcggatggggccattggtttactctcagggatttggagcatgcgaccaatcgcttctccaaggagaatgtcattggggaaggtggatatgggattgtttaccgaggtcgcctcgttaatgggaccgatgtcgcaattaaaaagctccttaataacatgggtcaggcagaaaaggagttcagggttgaggttgaggcaat

SEQ ID NO: 9343 - DNA, 103 bp, Zea mays
ggataccagagcgtcaacattatgcacctggtgtgcccgttgttttggcaggcacaaaattggatcttcgtgaagacaagcactacttgatggaccatcctgg

SEQ ID NO: 9344 - DNA, 300 bp, Zea mays
gcgccgcacctcaaggacgtgcgccccgacgaggcccgcgtcgccgagaacgagaagaagctgcacagcatgctgggcgtctacgacgacatcctctccaagaacgagtacctcgccggcgacgacttcacactggccgacctctcccacctgccaaactcccactacatcgtcaactcctccgacaggggcaggaagctcttcaccgccaggaagcacgtggccaggtggtacgacaagatctccacccgcgactcctggaggcaggtcatgaagatgcagagggagcaccccggcgcg

SEQ ID NO: 9345 - DNA, 300 bp, Zea mays
gcaggagttcacacagtcaggtggtgtaagaccatttggagtatcgctgttgattgctgggtatgatgacaatggcccacagttgtatcaggttgatccctcaggatcatacttctcctggaaggcatcagccatgggaaaaaatgtgtcaaatgcaaagacatttcttgaaaagagatacacagaggatatggagcttgatgatgccatccacactgcaattttgactttgaaagaaggatatgaggggcaaatttcctccaacaacattgaaatcggaattattcgagctgaccgtga

SEQ ID NO: 9346 - DNA, 299 bp, Zea mays
ggcggcgggcctctcgcctgccagaccgcgataacggtgttcgacaagatcacgagacccggtttcctggccgaggtgtccaggaaaggggagagcttcaagcagctgctcggcgccatgctgagcgggaacccgcacgtgagggaggtccgcggggtcggccttctcgtcggcgtcgagctggacgtgccggctggtcctctggtcgacgcgtgcttggacgccggcgtcatcgtgctgactgccggtaagggcaatgtggtgaggctggtgccgccgctcatcgtctcggagaagga

SEQ ID NO: 9347 - DNA, 299 bp, Zea mays
gaggacgacaatgccgtgcacctcgtcatggagctctgcgagggcggtgagctcttcgaccgcatcgtggcgcggggacactacactgagcgtgctgccgccttggtcttacgcactatcgttgaggtcgtgcagatgtgccataagcatggagtgatgcacagggatctcaaaccagaaaatttcttgtttgcaaacaagaaagaatcagcggcacttaaggccattgattttggcctgtctgtatttttcacaccaggcgaacggttttctgagattgttggaagtccttattacat

SEQ ID NO: 9348 - DNA, 301 bp, Zea mays
aaagaattccctcccctagccgccgccgccgccgctcgtctccctgagaggtgccgggaccgacgaactggccgagtactaggtagagaatcggtttttcttgtctcagcccggggtctgctgcgtctggtggtggtgaaggggagaaattcgtgagatctgttccggatcaggcgtgcgagctcgggaatcaggggtttcacacatagcttcgtcgatttgaatttgatgtactaatggagtctaagggtggcaaaaagtctagcagtagtcgttctatgatgtatgaagctccccttgg

SEQ ID NO: 9349 - DNA, 321 bp, Zea mays
cgcaaacctcagctccgaggcagggcttaaaaagcttgatgagtaccttctcactcgcagctacatcactggctaccaagcttccaaggatgacttggctgtctacacttcgttttcgtctgctccctcgtccaagtatatcaacgtagcaaggtggtttaatcacattgatgcgctcgtgaggctgagcggaattactgcagagggccaaggtgtgaaggttgaatcgtcagcagttccttcagccccaactccagatgttgctgaagcacaggccccagttgctgaggaggacgacgacgatgatgttgacctttttgg

SEQ ID NO: 9350 - DNA, 310 bp, Zea mays
ggccggcccgcgcgacggccgacgcggtgctgggcttcgtcatggcggtggcgtcagctgaggcggcatcgggggacctggagatggttttcctcaaggccgcggtggccaaacgcgcactgcgcttggacggcagcccagcggtgtaccatttctctcccggctccggttctggcgccaataactgggtcgcccacatcgacggatgcggctcgtgcaggaatcctgatgagtgtgcggtccgcaagggcaacttcatcggctcctgcaaattcatgaagccagtctcgttctcagggacatcaggcgg

SEQ ID NO: 9351 - DNA, 319 bp, Zea mays
cccacgcgtccgcggacggtgggtcagattctgaaaaatttacaatatttagctggttcctgattttttttcttgtacctgttactgttagaacacagaactttgacaataccttatcaagtcttttataattttttgcatacgtgattaatttgcttagcccaaaactctgatttaggctaaatagttctagaggctgctaactggttgcactgcacatcaaatgcaggcggagtggatggcaccagaaatacttcgaaatgaaccatcagatgagaaatgtgacgtcttcagctatggggtcatattatgggagctc

SEQ ID NO: 9352 - DNA, 321 bp, Zea mays
ggaccgggggccggacctacaacgccgtcggcgtaggaggagcgcaggttcgaggtgttcagggacaacctccgctacgtcgacgcccacaacgccgccgccgacgcgggcgtccactccttccgcctcgggctcaaccgcttcgccgacctcaccaacgacgagtaccgcgccacctacctcggcgtcaggagcaggccgcagagggagaggaggctcggtgacaggtacctggccggcgacaacgaggacctgccggagtccgtcgactggcgggccaagggcgccgtcgcggagatcaaggaccagggcagctgcggg

SEQ ID NO: 9353 - DNA, 310 bp, Zea mays
gcaacagcaaaacaagaagcagccgtaagcagcagagagcatggcgagatcagggcgggaagcggatcccagagaggaggaacggaagctggtgctgggcaagtacgagctgggccgcctgctggggcagggcaccttcgccaaggtttactacgcgagggacctgagcgccggcgccggcacgggccacagctgcagcgtacacgtcaaggtggtcgacgaggcgcggctgcggcgtacggagtggatggtggagcagctgcgccgggaggtctccatcatgcggatggtgcgacacccagcgtagtgg

SEQ ID NO: 9354 - DNA, 307 bp, Zea mays
aatctcaagttcctcgacgaccattatagcagatgctgctagcaaagacgatatccaggccagaatcgcgcagtgtaagagagagctttctcagacggactcgacgtatgactctgagaagttggcagagagaattgcaaagctttctggtggagttgctgtggttaaggttggagcatcgaccgaggcagagctagaggaccgcaagctccgcatagaggacgcgaagaatgcgacttttgcagcaatagaggaaggtattgttccaggaggcggtgcagcatatgttcatctatcgacattcgta

SEQ ID NO: 9355 - DNA, 316 bp, Zea mays
aaatattgttagacattgcagatgctttggaacaaaatgaggatctaattagaactgaaaatgaagctgatgtatctgcagcacaagatgctggatatcagaaatctttggttgatagattgacattgaagccagaaaagatagcaagccttgcgaaatccatacgcactcttgcaaatatggaagacccaatcaaccagatactcaaaagaacagaggttgctgaagacttagtgcttgaaaaaacatcttgccctctgggtgtgctgttgattgtttttgagtccaggcctgatgccttagtccagattgcgtc

SEQ ID NO: 9356 - DNA, 319 bp, Zea mays
gtcaagaagcactctgagttcattagctaccccatctccctgtggactgaaaagacaacagagaaggaaatttctgacgacgaagacgaggaagagaagaaagatgctgatgaaggaaaggttgaggatgttgatgagaaggaagagaaagacaagaagataaagaagatcaaggaggtttctcatgagtggtcattggtcaacaagcagaagcccatatggatgaggaagccagaagacatcacaaaagaagaatatgctgccttctataagagcttgacaaatgactgggaggagcatctggctgtgaagcacttct

SEQ ID NO: 9357 - DNA, 319 bp, Zea mays
ttccgatcccaaaccccaaacacgctccaccggcacctccgctcccacaccacaccgatggcccgcacgaagcagacggcgcgcaagtccaccggaggcaaggcgccgcggaagcagctggcgaccaaggcagcgcgcaagtcggccccggcaaccggcggcgtgaagaagccgcaccgcttccgcccgggcaccgtggcgctccgcgagatccgcaagtaccagaagagcacggagctgctcatccgcaagctccccttccagcgcctggtccgcgagatcgcgcaggacttcaagaccgacctccgcttccagtcct

SEQ ID NO: 9358 - DNA, 315 bp, Zea mays
acagcgtgtgtagcactaataagaaacacccaacttgttgtggcaaatgctggtgattcccgatgtgttatttcaaggggtgggaaggcatacaatttatcgagggaccacaaaccagagcttgcagctgagagagaaaggataatgaaagcagggggcttcatccatatgggacgagtaaatggaagtctaaacttgtcaagggcaattggagatgtggaattgaaacagaacaaattcctgcctcccgagaagcaaattgtgacggccaatcctgatatcaacgtcgtggagctctgcgacgatgacgacttt

SEQ ID NO: 9359 - DNA, 316 bp, Zea mays
aaacgaattaccctcggtgccctccctctcggcggcggcggcgcaagtccccttcatctccggcgcggcaaatggcaggcggcagggttgcacatgctaccctcaagggccccagcgtggtgaaggagatcttcattggactgaccctgggtctgatcgctggaggtatgtggaagatgcaccactggaacgagcagaggaaaactagatccttctacgacatgcttgacaagggccagatcgtcgtcgtcgaggagtagttcccacgtgtcacctcagaagtttttttttccagttgtttttgaaaactcactct

SEQ ID NO: 9360 - DNA, 314 bp, Zea mays
gaaaaaatcaaatagaaaaatcaagtgaagccggtaaagaaaaaaatggcagtggttggcctatccagtgctttcgctcctctcagaggttcttggatagccgtaaggatcaggcagggtggccaacgtgcagggatcagcttgtgtccatctccaaggagcaggaggagctgcgcggcagtggttcgggcggaggtgagcttcgtggacgccgacgaggcgaagaggctcgtgggcgaggagggctacacggtgctggacatcagggacagggcgcacgcgagagggcacacatcaagtcctccacacacgtg

SEQ ID NO: 9361 - DNA, 311 bp, Zea mays
cgtccacccgtcatcctcctagctcctctactcgccagtcgccatgggcaagattaagatcggaatcaacggcttcggaaggatcggcaggctcgtggccagggtcgccctccagagcgaggatgtcgagctcgtcgccgtcaacgaccccttcatcaccacggactacatgacctacatgttcaagtacgacaccgtccacggccactggaagcacagcgacatcacactcaaggactccaagacccttctcttcggtgacaagccggtcaccgtctttggcatcaggaaccctgaggaaatcccgtggg

SEQ ID NO: 9362 - DNA, 314 bp, Zea mays
  unsure (1)..(314): unsure at all n locations
ctcgcatttcttcccatccgatccccccttcgcaaccaaaaccccaactcgccccgcatcgatggcgcccaaggccgagaagaaacccgcggcgaagaagccggcggaggaggagcccgcggccgagaaggcgcccgccgggaagaagccgaagganatgaagcgggtccccgctggcaagtccgctgccaaggaaggcggcgagggcaagaggggcaagaagaagggcaagaagagcgtggagacctacaagatctacatcttcaaggtgctgaagcaggtgcacccggacattggcatctcctccaaggcca

SEQ ID NO: 9363 - DNA, 308 bp, Zea mays
ttttagccgccgccgctgctcatctcacatccctcgagaagacgcctgctcctcgccgatcgatacgatggccgtcttctccgacctccacaccgccgacggcctcaagtccctcgaggctcacctcgccggcaaaacctatgtgtctggtgactccattactaaggatgacattaaggtcttcgccgcggtgccgtcgaagcctggcgctgagtttcctaatgccgcccgctggtacgagaccgtctctgcggctgtagcctcaagattccctggtaaggctgttggtgtaaatctgcctgcgggat

SEQ ID NO: 9364 - DNA, 309 bp, Zea mays
cagcgtgtaccaagcatccacaacccagaagggtgctgttggtgttaagcagccttacattagagttgtgggtttagagcaatctcgagacaataactcaaatggcccctcaaacttcactcttgatgaggaaatggaattcaaagaatttgcacagaggccagatgcatatgccaagctatgctcaatgattggtccttcaatttatggtcattctgatgtcaagaaagctattgcatgcttgttatttgggggatctaagaagaggctacctgatggtgtacgtttaagaggggacattcatgtctt

SEQ ID NO: 9365 - DNA, 311 bp, Zea mays
gtcgacgacctcgaggagctcaaggtatgctccgacctgggcttcggcttcaactacgacgagatccccgagctccggagcaccctgccggcgctcgatctgtgctactccatgatccagctcctccagctggacgacgagatgccgccgcagcagcatgatgtcgccgcaccagatgccgccacgccgtcgctgcctgttaccaactggtagatctccagccccggtgacagccctgacgaggtgaaggcgcggctcaagtactgggcgcaggctgtggcgtgcaccgtccgcctttgcagctgaacggc

SEQ ID NO: 9366 - DNA, 310 bp, Zea mays
attgctgcatcagagtccagcagagaagccgtccgggggcttgtcctgctgaactgcgccggtggcatgaacaacaaggcgatcgtcgatgactggcggatcaagctgctcctgccactgctctggctgatcgacttcctgctgaaacagcggccgatagcatcagcgctctttaaccgcgtgaaaaacagggacaatctgaaggacatcttgctctctgtttatgggaacaaagatgctgtggacgatgaattggttgagatcatacgcggaccggctgacacggagggcgccctggacgcgttcgtgt

SEQ ID NO: 9367 - DNA, 298 bp, Zea mays
gagcctcattcatctccattcgaaacaccctcgcacccacactctcccttcgtccccagcctaaatccccgcaaagatggctcgcacgaagcagacggcgcgcaagtccacgggcggcaaggccccgaggaagcagctggcgaccaaggcggcgcgcaagtcggcccctgcgaccggcggcgtgaagaagccgcaccgcttccgcccgggcaccgtggcgctgcgcgagatccgcaagtaccagaagagcacggagctgctcatccgcaagctgcccttccagcgcctggtccgcgag

SEQ ID NO: 9368 - DNA, 300 bp, Zea mays
cgcagttccccgaccacaccgttcctccgagcccaggagcagccccgcgccaggaggaagtttgttcttttaacaatatgtcgagggaggagaatgtttacatggccaagttggctgagcaggctgaaaggtatgaggagatggttgagtatatggagaaggtggctaagactgtagatgtggaagagctcactgttgaggagcgtaaccttctgtctgttgcatacaagaatgtgattggggctcgccgcgcttcatggcgcattgtttcttccattgaacaaaaggaggagtcccgta

SEQ ID NO: 9369 - DNA, 298 bp, Zea mays
ccggagtgctggatatccgcccgctgctcctcagtcgaccctccgctcccgcccatgcctcgacccaagcccgccgctgccggtggcggctggctttcagggtgggggtgggacctcatgctcggatcgattgccgcgttctacgccgtcatggcgccctacaccaaggtggaggagagcttcaacgtgcaggccatacatgatattctttatcacacttatcacatcgagaagtatgatcatttggaatttcgtggagttgttcctcgaacgtttataggagcatttgttatctcta

SEQ ID NO: 9370 - DNA, 305 bp, Zea mays
cccacgcgtccggtactagcaaccagctagctcgggcggcagcaggcagccatcatgtcggaggagaagcaccaccacttcttcaaccaccacaagaaggacgaggagcagcccgccggcgagtacgggtactccgagaccgaggtggtcaccgccaccggcgagggcgagtacgagaggtacaagaaggaggagaaggagcacaagcacaagcagcacctcggcgaggccggcgccatcgccgccggcgccttcgcactctacgagaagcacgaggcgaagaaggaccccgagcacgcgcacag

SEQ ID NO: 9371 - DNA, 304 bp, Zea mays
cccacgcgtccgccaagtctgacaagatcgttgtcgagaagtccaccgtccctgtcaagaccgctgaggctattgagaagatcttgacccacaacagcaagggcatcaactaccagatcctttccaacccggagttccttgcagagggcactgctattgaggacctgttcaagcctgacagagtgctcatcggtggccgggagacccccgagggcaggaaagccgtccaggctctcaaggatgtgtatgctcactgggttcccgaggacaggatcctcaccaccaacctgtggtccgctgagct

SEQ ID NO: 9372 - DNA, 302 bp, Zea mays
cccacgcgtccggacagaatggagcacgtatcgggggcaagttcaagctcgggaagaagatcgggagtggatcatttggggaactttacctcgccgtgaacgtgcagaatggcgaggaggtggctgtcaaactggaatcagtcacatcacgacatccacagcttcactatgagtcaaaactatacatgcttttgcagggtggaactgggattccacatcttaagtggttcggggtggaggggcagtacaatgtcatggtggatgatctgcttggtccaagtctggaggacttatttaactac

SEQ ID NO: 9373 - DNA, 301 bp, Zea mays
cccacgcgtccgcaatggtatactccatgaaggagatcaaatagttgtttgtggcatgcagggacccattgtgacaactgtcagggctttgttaacaccacacccaatgagagagcttcgagttaagggcacctacatacatcataaggagatcagagctgcacaaggagtcaaaatatctgctcagggtctcgaacatgcaattgcagggacagccctttacgtgttaggacctgatgatgatttagacaaactgaatgaagctgttatggaagagatgacacgggttaggagccggatt

SEQ ID NO: 9374 - DNA, 302 bp, Zea mays
cgtcgacgacggcggcgacgccacgctgctcatccacgagggtgtcaaggccgatgaggattacgagaagaccggcaagatctccgacccggagtccaccgacaacgctgagttcaagatcgtgctcaccatcatccgcgacgggctcaaggctgaccccaagaagtaccgcaagatgaaggagaggcttgtcggcgtctctgaggagaccaccacgggtgtcaagaggctctaccagatgcaggataccggcgccctcctcttccctgccattaacgtcgacgattccgtcaccaagagca

SEQ ID NO: 9375 - DNA, 299 bp, Zea mays
gcggcggccggcgatggcagcgagcaacatcgggatgatggacggagcctacttcgtcgggcgcaacgagatcctcgcgtggatcaacactacgctgcagctcggcctctccaaggtggaggaggcggcgtcaggcgcggttgcgtgccaactgatggacgcggcgcatcccggcgccgtgccgatgcacaaggtcaacttcgacgccaagacggagtacgacatgatccagaactacaaggtcctgcaggatgtgttcaacaagctcaagatcactaagcatatagaggtgaacaagc

SEQ ID NO: 9376 - DNA, 300 bp, Zea mays
tctcgttccatttccccatctcccagatccaattcgcgagttctccctcctctgcggccatggcgctctctgtggagaagacctcgtctggacgggagtacaaggtcaaggatctctcgcaggcggacttcggccgcctcgagattgagctggccgaggtcgaaatgcccggcctcatggcgtgccgcgccgagttcggcccgtccaagcccttcgccggcgctaggatctcggggtctctccacatgaccatccagaccgccgtcctcatcgagaccctcaccgcgctcggcgccgagg

SEQ ID NO: 9377 - DNA, 299 bp, Zea mays
gaggaggcggccggcgtcgcgcattttgtcgagcacatgctgttcaagggcacagggaagcgtagcctgcgcagtggtagcaggagattgaggacatgggtggccacctcaacgcttacacgtcgcgggagcagacgacctactacgccaaggtgcttgacaaggacgtgccccgtgcgatggaggtcctcgcggacatcctgcagaactccaatctcgaccaggcccgcattgaacgtgagcgcgaagtgatcctacgagagatggaagaggttgagggacagtctgaagaagttata

SEQ ID NO: 9378 - DNA, 299 bp, Zea mays
ctggaattatctccctggtttgtctcccattctcttgcctttgcaaacggtgcctccattcagacagtctatcttcagaacacaaaatgtgtgaagaaggcatgtttttctgcagcttatgcgaagcagaggttttgaagaacagtaagcattgtagagtatgtgacaaatgtgttgatggctttgaccatcactgcaggtggcttaacaattgcatagggaaaaggaactacaaaggtttctttgttctaatggcttctgcagttatcctgcttgtgatgcagtggttgtcgggggga

SEQ ID NO: 9379 - DNA, 298 bp, Zea mays
attctgcagtacaagcaggagctaaaatggttgagattggaaactatgattctttttatgagatgggcattgagttctcctctgagcagatattgaagctaacaagggaaacaaggaagatgcttccagacatcaccttatcagtaacagttcctcacacacttagtttgccagatcagatgagactagcagagctactcgaagaggaaggagctgatataatccaaactgagggtgggaaatgttctagcccgacaaaacctggagtgcttggattgattgaaaaggcaacaccaac

SEQ ID NO: 9380 - DNA, 297 bp, Zea mays
gaagcatttctctcaagttgcatcagcatatgggactagtgaacactatttatctaagctggctggtgttatgaaattggaatatcgcattgccttgaggtcgtcgattagaaacgattttgttgaaggtgtgcgtgctgttttagttgacaaggaccagaatccgaagtggaatccagccactctggaagaagtaaacatggccgaggtggaatcagttttcgagccattaggggccgaggctgagttgagtgtgtgaaatatggcctgccacactcagttttcttatttgtgctg

SEQ ID NO: 9381 - DNA, 299 bp, Zea mays
cggacgcgtgggtgtgcccaagagcaagttcaagattaaggctggcaaaacattaagtgctcggaaatggcaggctgcatttagtcctgatggctgtcttgatacttgcctcagtcctaagcaggatacagagaggaggtgtccatccaacagtcagaggagaggtttgggaattcttacttggctgttttgatcccagaagtacctttgatgaaagggaagagatcaggcaaatacggaggatacagtatgccagatggaaggaagattgtcgacagatggattctcatgttggtagt

SEQ ID NO: 9382 - DNA, 297 bp, Zea mays
ccagaattggggagggattgatatagatggaaacatgctaacctttatggttggttcaaagcaagcatttgaggtgtccctaccagatgttgcacaaacccagatgcaaggaaaaacagatgttctcttagagcttcatgttgatgatactactggagccaatgagaaagactccctcatggatttgagttttcatgtgcctacttcgaatactcagtttgttggggatgagagtcgccctccggctcatattttatgggagaccatattgaaatttgctgatgttggttcttctga

SEQ ID NO: 9383 - DNA, 297 bp, Zea mays
agctggagaacaatatccccgcggcggcctccgacccggacgcgatggacgcgatctaccgctacgacgacgcgtctcatgcgcgggcgcacagagagaagccttgggccaacgacccgcaccacttccgccgcaccaagatctccgcgctcgcgctgctcaagatggttgtccacgcccgcgccgggggcaccatcgaggtcatggggctcatgcagggcaagtgcgagggcgacgccatcatcgttatggacgcattcgcgctccccgttgagggcaccgagaccagggtcaatg

SEQ ID NO: 9384 - DNA, 297 bp, Zea mays
gaaggccaagatccaggacaaggagggcatcccgccggaccagcagcgcctcatcttcgccggcaagcagctcgaggatggccgcaccctcgccgactacaacatccagaaggagtcgacgctgcacctggtgctccgcctcaggggaggcgccaagaagcgcaagaagaagacgtacaccaagcccaagaagatcaagcacaagcacaagaaggtgaagctcgccgtgctccagttctacaaggttgacgacgccaccggcaaggtcacccgcctccgcaaggagtgccccaacgc

SEQ ID NO: 9385 - DNA, 292 bp, Zea mays
cggacgcgtggggaaaatgggcatgtcaaggccacaatcaacaacattgatggggcaataatggggttgaaagattctactactggaaaagtcgagccgcaggatgctgctccccaaattgatatccctgttctatccttggatgaactgatagaaaaaactgatgactttggttcaacggctttgataggtgaaggttcttatgggagagtgtactatgcgattcttgataatggaacaaaaatggcagtaaagaaacttgattctactgaaaatgaacccactgctgaat

SEQ ID NO: 9386 - DNA, 294 bp, Zea mays
gtgtgccatcattatgtttgatgtcacttcgaggctgacatacaagaatgttccaacatggcacagggacctgtgcagggtgtgtgagaacatccccatcgttctctgcggaaacaaggttgatgtaaagaacaggcaggtcaaagccaagcaagttacattccacaggaagaagaacttgcagtactatgagatttctgccaagagcaattacaactttgagaagcccttcctttacctcgcaaggaagctggcaggggatcagaaccttcactttgtcgaagccgttgctct

SEQ ID NO: 9387 - DNA, 294 bp, Zea mays
cgcaccacaagcgagcgagggacccggggcggaagaagagagagaagacgtctctctcctctcggcgtccccgttccccaacctctcgtctgctgcctgcctgcctgcctgcctgcataaaggagtttgtcatggcgtctaagcgcatcctcaaggagctgaaggacctgcagaaggacccccccacatcatgcagtgcaggtcctgctggtgaggacatgtttcattggcaagcaacaattatgggaccacctgacagtccctatgctggtggtgtttttttagtgaacattc

SEQ ID NO: 9388 - DNA, 94 bp, Zea mays
ctctttctcttctcccattccttccttccacccccccgcccagcgccaccatggcctcctccgtcgcggtgtccctccgcgcactcgctgccgc

SEQ ID NO: 9389 - DNA, 295 bp, Zea mays
atctgctctaccctccttcgcgcggccggcctgattcctcacccctgctcgccgcgaacacagctctgtcaccgcggtttgccgtggccggcgaagatgatgtccggcggtgggtactccgccctcgacgaccccaaggcctccggatccgtcccggcggccacggggacagatccgccggccatcaggttcgccgactccaacctccagaccttcccgccgtccgatgccaggggcaagatctccggcgcctaccgcccgcccaccgacgccgatgacaccttctcgtccaagg

SEQ ID NO: 9390 - DNA, 296 bp, Zea mays
cggacgcgtgggggtcgcacacgatccatatcgcctcggtggcgtacaacagcgtgttcctcggcgagttcatgctcccggactgggacatgttccactcgctccaacaggccggcgactaccacggctccgcccgcgccatcagcggaggccctgtctacgtcagtgacgcacccggcaagcacaacttcgagctgctgaagaagattgtcttgcccgacggttccattctccgcgcgcgtctgcctggccggccgaccaaggattgcctgttcacggacccggcacggtacggc

SEQ ID NO: 9391 - DNA, 284 bp, Zea mays
gagaagtttcgagaagggtggtgtgagtgtcggatagctcaagatggatccggcgttgctggacgacgtcatacgccggcttctggaggtgaagaatctcaagcctgggaagaacgcgcagtgtcagagtcggagattaagcagctctgggctgccgccaaggagatcttcctgcagcagcccaacctgctggagctcgaggcccccatcaaaatctgcggtgatgtccatggccagtactctgatgtcctgaggctatttgattatggtggctatccgcctca

SEQ ID NO: 9392 - DNA, 278 bp, Zea mays
atttcaatactgtactcctgaactgttatgatgcaattggcataatgcttatgatcaggataattcatcagcaccagctcatcatgtttaagcggcgaatcccatgtttggactcttacctagacaaagttaatatgtcactctggcctcgcttcaagatggtgttcgacttgcatttgaacagcttgcgaaatgcggatattaaaacactttgggaggatgatgtccatccacactatgttaccaggagatatgctggatttacagcttctctagtt

SEQ ID NO: 9393 - DNA, 298 bp, Zea mays
gtccgcggtaccgtggtgtgtgagacgcatggctgctgcaggagagtagagaccacagcgcgcgatgcgaggagaataagctatgggagcgccgaagcagaaatggacgtcggaagaggaggatgcgctccggccggcgtgcgcaagacgcgccggcaaatggcggaccatccagaaggaccccgagttcagcccggtcctctcctcccgctccaacatcgacctcaaggacaaatggaggaatttaagtttcagtgcaagtggactgggatcaagtaaactgcgggttccaaagata

SEQ ID NO: 9394 - DNA, 289 bp, Zea mays
ctgacaagtccaagtcggaggtcaatgacgaggatgatgaagagggtagtgaggaggatgaagatgatgacgagtgatggagctcctcgagacaatggaccgtgcttcatccaacaatggagcggctacacaaggccccgtggcgatcacaaaaaaggagcctatatccatgtactagaattattcagtttcactccacatcgtgatgttttatttttacttttgtcgtgctataacggatagcgctcctcgttggcgccactggcgggtggttctgcctctggtctgg

SEQ ID NO: 9395 - DNA, 285 bp, Zea mays
cccacgcgtccgcttgattatgtatttgattggactgtgtcaaggcaagctgtggacaataacagattgcgactgagcgggaagacaggtggcttggtgggaccatctgtggatagggctgaacgagctgcagcaagacaagatgttccagatagattcactggtcaagctggtgcttttgctagaagaaccggctctggttctggtcaatacggagaacacacaaagcacaggactctgttggattcacttatggcatccaagatggctgttgattcagataaa

SEQ ID NO: 9396 - DNA, 283 bp, Zea mays
aaccccatgaccgttttctggtcgaagaggcacagagcatgacgtctcgcccaatgaaggggatgctgactggcccagtcacaatcctcaactggtccttcgtccggaatgaccagccgaggtttgagacttgctaccagatcgctcttgcgatcaagaaggaagtcgaggatcttgaggctggtggtattcaggttatccaaatcgacgaggctgcactgagagaagggctgccgctccgcaaggctgagcatgcattctagttggactggggtgtccactc

SEQ ID NO: 9397 - DNA, 285 bp, Zea mays
gccaaagaaggtgctgatcctcatgagcgacacgggcggcggtcaccgcgcgtctgccgaggccatcaaggctgccttcacccaggagttcggcgacgactaccaggtatttgtcactgatgtgtggactgaccacactccatggccattcaatcaactgcctaggagctatagttttttggtgaaacatggacccttgtggaagatgacatactatggtactgcaccgcgtgtagtccatcagcctcattttgctgcaacatccacattcatagcaagagaagt

SEQ ID NO: 9398 - DNA, 92 bp, Zea mays
atgttgctttggatggctgacgatggttaccgctgtgttgctagccatgtggtacttgatctgtatcacggttgcaaataagtgctgtttct

SEQ ID NO: 9399 - DNA, 278 bp, Zea mays
ggcagggaaatgttggtatagtggaatatgcttaccaacgaacaaagaattttgagaggcttgcttttctgtatcttattaccggttacttggacaaggtgggcttcatgtgcaaaattgctggacagaacaacaatttgatgggacagttccacaatgcgttgtatcttggggatgccaagaagcgtgttgagatcttggagaatgctgggcagctgcctcttgcttatgttaccgctgccactcatgggctcacagaatttgctgagaggattgct

SEQ ID NO: 9400 - DNA, 281 bp, Zea mays
cagagcctgccgctcaacgacgggctgtggttcgtcgtccagaacgacaccgacgtgcagtccgcgcgcgtgtcggtgccgcgcaacgcgtaccgcgccgtcctcgaggtctacgtctcgtcccacgacgccgacgagttctggtacatgaacacgcccgatcagaacgggccgttccgcgatgtcaccgtcgtggtcgacggcgacgtggtgggcgccgtgtggccgttcccggtgatgtacaccggcggcatcaacccggtcatgtggcgccccgtcac

SEQ ID NO: 9401 - DNA, 276 bp, Zea mays
gagcactagcattattgtcatgccacttttgaagttaaaaggctatgttagcttatttgtgcagtctggagaggcagctccatatgtgatacctcagggtggacacactaagattttctcagtgtgtcccgcactatttgatgggcggaactgaaaaagaaggcattccataaggatctcttgaacttgatcctgcagcgcttccctccaacttggaagaggcgtttccttctgctaacccagaatgcagttctgtaagaagtaaggagcataact

SEQ ID NO: 9402 - DNA, 277 bp, Zea mays
cccacgcgtccgggcggagggagcgagggacgtgcccgtggggaactcggtgctggccatgtacgtcaagtgcggagagttgggccgtgcgcgcgacgcgttcgacatgatggggcagcgggacctgtgcacgtggaactcgatgatcttcgggtgctgccgctccaacgaatgggaagaggcacggaggctgctcgacgatatgaggcgccaaggtacagagcctgggcttgtcacatggaacacgctggtttcgagctacgcgaggtctggggaa

SEQ ID NO: 9403 - DNA, 281 bp, Zea mays
cttcgccacgaacaaaagcgcgtcgatctcgctgtcgtcactcctcgtcacccagccacgaacagaggcaccacccagcatggccctgcaggcggcgctcctcccatccaccctctcatccgtccccaagaagtgcagcctcgccgtcgcggcgaaggacacggcattccttagcgtatcccagaagaaggtgcaggcggcgtcgctgtcggtgagaacgcgggtggcgacgacggcgcctgtggccacgccggggtccagcaggcggccaaggatgggaa

SEQ ID NO: 9404 - DNA, 281 bp, Zea mays
tggacaccgacctcaagaagttcatccggggacaccgcagcaacaacgagaagatccccgcggccaccgtcaagatcctgatgtaccagctctgcaaggtcgtggccttcgtccacggccgcggggtgctgcaccgggacctcaagccgcacaacctcctcatggaccgcaagaccatggcgctcaagatcgccgacctcggcctcagccgcgccatcaccgtcccggtgaagaagtacacccacgagatagttaccctgtggtacagggcccccgagatt

SEQ ID NO: 9405 - DNA, 284 bp, Zea mays
agcacttactgaccaccagttcacaagaccacgaggccgtggtaagaagctccaagaggaatgggctgttccactgaaatctgtggaggacattagtgagcgcttcacaaacttctgtcaagggaaactcacaagcagcccatggtcagaattggacggtcttcaaccagagacaaagattatcgatgaccagttggtgaatattaaccagaagggtttccttacaattaacagccaacctgctgtaaatggagagaaatccgactcgcctactgttggttggg

SEQ ID NO: 9406 - DNA, 313 bp, Zea mays
aaacaatgttggcgtgctaattgtttacatgattatcattggtgatgtattatctggaacaacatcaggcgatgttcatcatcgtggtatattggagggctggtttggagctcatttgtggaattctcgtgccattgttcttcttgccacagctcttttggtgttcgctccgttggtgagctttaagcgcttggattcattaagatacacatctgcgctatcagttgccctggcagtagtttttgtcgtaattactgctgggattgccatcatcaaactcttcaatggaactgtagcgatgcccaaacttttt

SEQ ID NO: 9407 - DNA, 311 bp, Zea mays
cgcccaaggagaagatcgagatgtactcgccggccttctatgccgcctgcactgccggaggaatcgccagctgcgggctcacccacatggccgtcacgcctctcgacctcgtcaagtgcaatatgcagattgacccagcgaaatacaagagtatctcatctggatttggtatcctgttaaaggagcaaggggccaggggtttcttcaggggatgggtgcctactttgcttggttacagtgctcagggggcttgcaagtttggcttctatgagttctttaagaagtattactcggacattgcagggcctgag

SEQ ID NO: 9408 - DNA, 304 bp, Zea mays
gctggttgtgcatgaatgggtttccagctacttctattcatggagatagaaaccagcaggaaagagaatatgctctgaggtccttcaagagtgggcaaactcctattttagttgcaactgatgtggcagctcggggcctcgacattcctcatgttgctcatgttgtcaactttgatctccccaatgatattgatgactacgtacacaggattggaagaactggaagagctgggaagagcggacttgccactggcttcttcaatgataataactcatcactggcaagatctcttgctgacctaat

SEQ ID NO: 9409 - DNA, 306 bp, Zea mays
gtcgagcatcttcgacgccaaggccgggattgccctgaacgaccacttcatcaagctcgtctcttggtacgacaacgagtggggctacagcaaccgcgtcgtcgacctgatccgccacatgttcaagacccagtagagagagatatttctgcctccctatcgagggtcgtccccgatggcctttggtcgcagacagtctttgctgcttgtctatgctgagaataaatgtgaacggtgcccctggacgctggatccatgctggttttggacacggttgtctttttgtgtttaacttatctgctgccg

SEQ ID NO: 9410 - DNA, 309 bp, Zea mays
agaggccccatctcgaccgctataagtgccttaagccaagctggcgcaggccaaagggtattgactcccgtgtcaggaggaagttcaagggatgcaccttgatgcccaacattggttacggctctgacaaatcaaccaggcactacctccccaataagttcaagaagtttgtggtgcacaatgtctctgagctggagttgctcatgatgcacaacagaacctactgtgccgagatcgcccacaacgtttcaaccaagaagcggcaggagattgttgaacgtgccgcggagttcgacaatgtggtcaccc

SEQ ID NO: 9411 - DNA, 309 bp, Zea mays
gagacttcctccattcgcggtttgcctctctgcctccctccctcagatcctccctaagattgccatggcggaccagctcaccgacgaccagatcgccgagttcaaggaagcattcagcctcttcgacaaggacggtgacggctgcattcacaacaaggaactttgaactgtgatgcgctcgtttgggccaaaacctactgaggctgagcctcaagacatgatcaacgaggttgatgctgatggcaatggaaccatcgacttccctgagtttctcaaactgatggcacgcaagatgaggacacagactct

SEQ ID NO: 9412 - DNA, 312 bp, Zea mays
gcaagcaaacttggacagggatgcattgaggttggattatcttactcttatcttgagagagctgactgacccactgaaaaaaatgtcaaaggatgaagctgttcaaaaggtggtagagtttatggatacatactctttaagccaggaagacttcgatacaattgttgaagtatccaaatttaagggtcatccaagtcctatggatgggattcaacctgctgttaaaagtgccttgacaaaggcatacaaacaaggaagtagttcccgtgttgttcgagcagcagatctaatagacattccaggcatgaaaaa

SEQ ID NO: 9413 - DNA, 310 bp, Zea mays
gaagaatggatgcatgaagctctggctctttatcacgaatactatggagataaacagggcgcactggagaatttgattcagtgtggcaactggaagaaagctcatactattttcgtgacttctgttgctcattctatgtttctgtcatctaaccatcaggaggtctggaggatcacaagtgccttggagaaccacaagtatgaaattgctgactgggaccttggtgccggaatatacatagacttctacgttctgaagaactcaatgcaagaaagaaatgccatggatgattcgggttcactcgaagaga

SEQ ID NO: 9414 - DNA, 304 bp, Zea mays
cccctctctctgtctcgccgcccggggagaaggagggctccgccgctcccggggaagagcgcgccattgccgccgccgcgctgactggggaagatggttgtccaggagttcacagttgatctcaacaagccccttgttttccaggttggccatcttgaggaacggtaccaggaatgggttcaccaaccgatcgtcagcaaggagggtccacgctttttcggaaatgatgtcctggagttcttgactcgcacgaagtggtgggctgtgccaactatatggctgcctgttgtctgctgcctgctcg

SEQ ID NO: 9415 - DNA, 304 bp, Zea mays
ctcctcgtcgtcgcctcgctgtctcctccgccgttgcctgcgatcccgatcatggagggcgacagtaccaacctcgacgcggctatagagtcgctcctgaacgtggagaagcagatgaggctggccggcgatgtcgccggcacgcggaaggccgtcatcgacatcgtcgagctctgctacaaggccggcgcgtggaagacgctaaacgaccagatcgttctcctctccaagaggagaggccagcttaagcaggccattactgctatggttcagaaagcaatggactacattgatttgacaccag

SEQ ID NO: 9416 - DNA, 302 bp, Zea mays
agatgctcgaatcttactggctagaggaggaagatgatgccatgccctctggcgacaatccccagaatggcttcaactttgggaaccagccctctgttccatcaggtggattcaacttcggctgaagatgcccatttggaatggcggctgtgccattgtgccttggcctagtggttggggctagtcagagttggggtagtggcgtcgtcctccaaaaccttggttcggtcccattggtctggtctcaggtgtttgtcatgtcagtcccagtcagcagggtcagtccttgtgctgcatcacca

SEQ ID NO: 9417 - DNA, 304 bp, Zea mays
ccgaaaccgtcgccgtattccaatggcgcccaaggccgagaagaagcccgccgccaagaagcctgcggaggaggagccggcggcggagaaggccacggcggggaagaagcccaaggccgagaagcggctccccgcgggcaagtccgcagcaaggagggtggcgagaagaaggggaagaagaaggcaaagaagtcggtggagacgtacaagatctacatctttaaggtgctgaagcaggtgcacccggacattggcatctcgtccaaggccatgtccatcatgaactccttcatcaacgacatct

SEQ ID NO: 9418 - DNA, 305 bp, Zea mays
ctctaggttttttgattttagccgccgccgctgctcatctcacatccctcgagaagacgcctgctcctcgccgatcgatacgatggccgtcttctccgacctccacaccgccgacggcctcaagtccctcgaggctcacctcgccggcaaaacctatgtgtctggtgactccattactaaggatgacattaaggtcttcgccgcggtgccgtcgaagcctggcgctgagtttcctaatgccgcccgctggtacgagaccgtctctgcggctgtagcctcaagattccctggtaaggctgttggtg

SEQ ID NO: 9419 - DNA, 303 bp, Zea mays
ccatatagctctcgatcaagcagtgttccctgagagaactccaggctttgtgctagatgttctggcacggtcatctctgtggaagattggactggattatagacatggcacaggccatggagttggagctgcgctaaatgtccacgagggacctcagagcattagctatcgatatgggaatttgacagccttacagaagggcatgattgtcagcaacgagcctggttattatgaggacaactcatttggcattcgtatcgagaatttacttctggtaaaggagcttaatctggcaaattcgtt

SEQ ID NO: 9420 - DNA, 300 bp, Zea mays
caaccagttagatgaaaggaagcgcttaagaatggcacttgatgtggctcgtggtatgaattatctgcataattgttcaccagttatagttcatagagatctgaaatccccgaatctactggtggacaagaattgggttgtgaaggtttgcgattttggtttgtcaagaatgaagaacaataccttcctgtcatcaagatcaacagctggaacagcggagtggatggcaccagaagtacttcggaatgaacgatcggatgaaaaatgcgatgtttttagctacggagtcatattatggga

SEQ ID NO: 9421 - DNA, 299 bp, Zea mays
cccacgcgtccgcaactgttttccattccctatgagggaagaggatgatgaagcagatgcagatggtgccaattatcagcttgagatgatgaggtgtttgagggaagttaatgttgacaacaatactattggatggtatcagtcttgcttgcttggatcttttcaaactgtggaactgattgaaacatttatgaactatcaggagagcataaggagatgtgtgtgcattgtctatgacccatctagatctagtcaaggcgtgctagctctcaaagccttaaagcttacagactcgttta

SEQ ID NO: 9422 - DNA, 298 bp, Zea mays
cgctaagtacgacctcggcgaggagatcggccgcggccacttcggctacacgtgctccgccaaggccaagaagggcgagcacaagggccaggacgtcgccgtcaaagtcatccccaaggccaagatgacaacagctatcgccattgaagatgtgagaagagaagtgagaatactgagttctctgacaggtcacagtaacctagtgcagttctacgatgcttttgaggatgaagataacgtgtatatagttatggaattatgtaaaggaggtgaactgctggacaggatattggctagg

SEQ ID NO: 9423 - DNA, 296 bp, Zea mays
cgcctctcgagtctcgtccacccgtcgtcctcctagctcctctactcgccagtcgccatgggcaagattaagatcggaatcaacggcttcggaaggatcggcaggctcgtggccagggtcgccctccagagcgaggatgtcgagctcgtcgccgtcaacgaccccttcatcaccacggactacatgacctacatgttcaagtacgacaccgtccacggccactggaagcacagcgacatcacactcaaggactccaagacccttctcttcggtgacaagccggtcaccgtctttgg

SEQ ID NO: 9424 - DNA, 296 bp, Zea mays
cccacgcgtccggggctggatccgtcccagacctctttcttccaggtgcttaacatccccaccaagattaacaagggtaccgtggaaattatcacccctgtggagctgatcaagaagggtgaaaaggtgggctcgtccgagtctgccctgctcgccaagctgggtatccgccccttctcgtacggcctccaggtcaccagtgtctacgaggatgggtccgtgttcagccctgaggtgctcgacctttctgaggaggacctgattgagaagtttgccactggtgtctccatggttgc

SEQ ID NO: 9425 - DNA, 303 bp, Zea mays
cgtgaagctgttcaacgccgtggccgtggaggacctcatcgtcaggggagggcgcgtcggcggcgtcgtcaccaactgggcgctcgtgtccatgaaccacgacacgcagtcctgcatggaccccaacgtcatggaggccaaggtcgtggtcagctcctgcggccacgacgggcccttcggcgccaccggcgtcaagaggctccaggacatcggcatgatcagcgccgtgccggggatgaaggcgctcgacatgaacaccgccgaggacgagatcgtgcgcctcacgcgcgaggtcgttcccgg

SEQ ID NO: 9426 - DNA, 319 bp, Zea mays
ccacaatcttcttgtagcacaccactgtcttcgtccaactcggcggcgatgtctgggcgcggcaagggcggcaaggggctgggcaagggcggcgcgaaacgccaccgtaaggttctccgcgacaacatccagggtatcacgaagccggcaatccggaggctggcgaggaggggcggcgtgaagcgtatctccgggcttatctacgaggaaacccgcggcgtgctcaagatcttcctcgagaatgtcatccgcgacgcggtcacctacaccgagcacgctcgccgcaagaccgtcaccgccatggatgttgtgtacgccc

SEQ ID NO: 9427 - DNA, 316 bp, Zea mays
cttccaggtcctcaaagagatgtacaacgagtggccattcttcagggtcaccctggacctgctggagatggttttcgccaagggagaccccggcattgcggcttgtatgacgagctgcttgtggcggaagaactcaagccctttgggaagcagctcagggacaaatacgtggagacacagcagcttctcctccagatcgctgggcacaaggatattcttgaaggcgatccattcctgaagcaggggctggtgctgcgcaacccctacatcaccaccctgaacgtgttccaggcctacacgctgaagcggataaggg

SEQ ID NO: 9428 - DNA, 317 bp, Zea mays
gtcctgctggacgaggagtttagagcgaaactttcagatttcggattggcaagggaagggccatcagctggtgatacccacgtctctacagcagttatggggaccttgggctatgcagctccagattatgtcgagacaggccatctcactacaaaaagtgatgtgtggagctttggagtagttctatatgagatcctcactggacgtcgctcaatagagaggaaccggcccaagaacgagcagaaacttctggaatgggtcaggctgtatcccgttgaaagcaagcagttcagcaagattatagatgcaaggcttga

SEQ ID NO: 9429 - DNA, 318 bp, Zea mays
ccaactcgccgtcgtcttctgcggttctgccgtctacgcctccaatttggcctctctcccttgcaagtttaagcttcatcttcagccatgggtaaggagaagtcccacatcaacattgtggtcattggccacgtcgactctggcaagtcgaccaccaccggccacctgatctacaagcttggaggcattgacaagcgtgtaatagagaggtttgagaaggaggctgctgagatgaacaagcggtccttcaagtatgcttgggtgctcgacaagctcaaggctgagcgtgagaggggtatcaccattgatattgctctg

SEQ ID NO: 9430 - DNA, 321 bp, Zea mays
gcaaaatgataacaagagctccaaaaaatcactgaaggatgttgtcacagagaatgagtttgagaaaaggcttttggcagatgttatacctccaaatgacattggagttacctttgatgatattggagccttggagaatgtaaaggacacgttaaaggagctggtgatgctccctttgcaaagacctgagttgttctgcaaagggcagttaacaaagccttgcaaggggatattgcttttcggacctcctggcactggaaaaactatgcttgccaaagcagtagcaactgaagcaggcgctaatttcatcaatatatcaat

SEQ ID NO: 9431 - DNA, 324 bp, Zea mays
aaacactggacttcgagattaagcgctgggctgctggaaaagaaggcaatttgcgtgcattgctatcaactttacaatatgttctttggccagaatgtggatggcaacctgtatcccttaccgatttgatcactgctgctgctgttaaaaaagtgtacagaaaagcaacgttgtgtatccatcctgacaaggtgcagcaaaagggtgcaaatctccaacagaaatatatcgctgagaaggtttttgatctccttaaggaggcgtggaacaaattcaactctgaagagctcttctaaacagcctcatgactgaacatagcatgac

SEQ ID NO: 9432 - DNA, 313 bp, Zea mays
atcccgtcgcatcccatcccactaccacccatctcgtcgtccgccgattcgatccggttcttccaacccaggggctgtgatggcgacgaagaggagcgtgggcaccctcggcgaggcggatctgaaggggaagaaggtgttcgtgcgcgccgacctcaacgtccctctcgacgacgcccagaagatcaccgacgacacccgcatccgcgcctccgtccccaccatcaagttcctcctcgagaagggcgccaaggtcatcctcgccagccacctgggtcgtccaaaaggtgtcaccccaaagtacagcttgaag

SEQ ID NO: 9433 - DNA, 310 bp, Zea mays
acccaaccataccagcggcgccgcacgtgacgaggaggcggagtagagtggccggactacctcgacacctccactgcaaccatgggtatctcacgtgattcgatgcacaagcgccgggccaccggtggaaagcagaagacgtggcgcaagaagcgaaagtatgagcttggccgccagcctgctaacaccaaactgtctagcaataagacagtgaggagggtccgtgtccgtggaggcaacgtgaagtggagggctctccgattggatacaggtaactactcgtggggaagtgaggctcttacccgcaaga

SEQ ID NO: 9434 - DNA, 297 bp, Zea mays
cccacgcgtccgctctgttttcttcttgtgttgcttttaatctggcacatgtttctaaattataataatgaatacttttttttggacaaaaaagtattcattattataatttagaaacctgtgccagattaaaagcacaaagcgaagctatagctcagcaaagcaaacccaaggacattgaggtgctgctctgctagcgtagtacgtgctacagcatgtcactcacgtcttccttcaatgagaggcctatcatcttttcactgtcaaatccaacctctcattctgaatgtactgctg

SEQ ID NO: 9435 - DNA, 315 bp, Zea mays
gccacagacacagatgggaaagaacgtgaggtagagattggacagaagcaagagcggtgctgctgttgcgctcaagggcttgcagtttgtgactgcgaaagttggtcatgatggctgggctgcagtggagaaacggttcaaccagctacaagttgatggcgtgctgctacgctcgagattcgggaaatgcattgggatggatggatctgatgagtttgcaatgcaagtcttcgattcattagcaaggaagagagggataacgaagcaggtgctgactaaggatgagctgaaagatttctgggaccaactaagtga

SEQ ID NO: 9436 - DNA, 318 bp, Zea mays
gttgctgttatacatggactggcaagaatggcagcaatcatggctaccacctatagaccgtatttgggtgttggtctaggacctttatcgtttttgaccaagttgcggataccacaccctggaagggttggtggcagattcttcatcaagtatggaatgcctgctatgctgagctgggtgcttggtggcaatagctcaaagctagaaggaagacctttaagctgccgactttctgacaaggcacatgacgagctttatcggtggtttgacgatgacgatgcgctggaacaagctatgggtggagaatggtacctcttc

SEQ ID NO: 9437 - DNA, 307 bp, Zea mays
cacacactcgggtaaagctatctcgagctagctagctgctgtaaccgttgccatggccaaaatggtgttgctctgcgtgctcgtctccttcctcctgatgcccttggcctccctagccctgacgcaggacttctgcgtcgccgacctgacctgcagcgacacgccggcggggtaccgtgcaagtccagcgtcaccgccaacgacttctacttccacggcctggccggccagggcaaaataaacccactcatcaaggccgccgtgaccccggccttcgtgggccagttcccgggcgtcaacgggcttg

SEQ ID NO: 9438 - DNA, 305 bp, Zea mays
ctctccactacaagggaagtacattccacagaatcattcccagcttcatgctccaaggaggtgacttcactcttggggatgggaggggtggtgaatctatctatggcatgaagtttgctgatgagaacttcaagatcaagcacactggaccaggccttctgtccatggccaatgctgggagagatacaaacggatctcagtttttcatcaccaccgtgacaacaagctggttggacgggaagcatgttgtgtttggcaaggtgttgtctggaatggatgttgtgtacaaggtggaagctgagggc

SEQ ID NO: 9439 - DNA, 305 bp, Zea mays
cagagagaggcaggaacaacaatggatgttgttgctgcacaaacaaaggctattgctgaaaaaatatcagattggacaaatattgtgttggcatatgaaccagtttgggctattggtaccggcaaagttgcaactcctgctcaggctcaggaggttcatgatggtctgagaaagtggctccactccaatgttagccctgcagttgctgaattgacaaggataatttatggagggtctgtaaatggagctaactgcaaagaacttgcagctcaaccagatgttgatggattccttgttggtggagc

SEQ ID NO: 9440 - DNA, 310 bp, Zea mays
cccacgcgtccgcccacgcgtccgcccacgcgtccgctactcgggctcccccgccaacttcgccgcctacaccgcgctgctcaacccgcacgaccggatcatggggctcgaccttccctccggcggacacctcactcacgggtactacacggccggcggtaagaagatctccgccacctcgatctactttgagagcctgccgtacaaggtgagcgccgcaacggggtacatcgactacgagaagctcgaggagaaggcacttgacttccgccccaagctcatcatctgcggtggcagtgcgtacccgagg

SEQ ID NO: 9441 - DNA, 308 bp, Zea mays
gtgccttacaggccaccattgcaaaataatttggaggacctctacagtcttctctgcttcctacatgttgaaccatggtgcaatgcaaaatggtggcagaggcttattcagaaaccttatgagaatggtgatgatagagggttgaaacttgttagagctattcttaggccactaatgctaaggaggaccaaggaaacaaaagacaagattggcaatcccatactggttctacctccagctcgtattgaagttgtagagtgcgaacaatctgaacatgaacgtgatttctatgaagcacttttcaggag

SEQ ID NO: 9442 - DNA, 310 bp, Zea mays
gatggaactcagaagggagcatatgagatcttcaaggaaatccggaagcgtggcctcaaagtttctgttgctggagttccaaagacaatagataatgacattgcgatcatcgacaagtcttttggttttgatacggctgtggaagaggcccagcgtgccattgattcagctcatgtggaagcttgcagtgctgagaatggaataggtttagtaaaactgatgggccgttatagtgggttcattgcgatgtatgctactcttgctagtcgagatgtggactgctgtttgattccagagtctccattttatc

SEQ ID NO: 9443 - DNA, 314 bp, Zea mays
aattggagtcaggagttgttatgatgagggtaagcgtgtagcagagacgctgatgttcgactatcacaggcagcatggcattgaaatccgaattgccaggattttcaacacctatgggccaaggatgaacattgacgatggccgtgttgttagcaacttcattgctcaggctgtgcgtggcgaaccccttactgtccagaagccaggaacacagactaggagcttctgctatgtcgccgatatggttgatggtcttattaggctgatgaacggaaacaacactggaccgattaacttggggaacccaggtgaat

SEQ ID NO: 9444 - DNA, 322 bp, Zea mays
ctcgagcgtctcgtccaccccggcgcgcggcgggctcaagcgcccgttcccgccgccgtcgcctgccaagcacatccgcgctctcctcgcgcggcggcacggctcggtgaagcccaacgaggtgcccattcccgagggcggcgagccggagctcggcctggacaagagcttcggcttctccaagcacttcttcgctaagtacgaactcggcgaggagatcggccgcggccacttcggctacacgtgctccgccaaggccaagaagggcgagcacaagggccaggacgtcgccgtcaaagtcatccccaaggccaagatgaca

SEQ ID NO: 9445 - DNA, 314 bp, Zea mays
cccacgcgtccgcggacttgtttacagactatgctgacttctgttttaagacctacggcgatcgcgtaaagcactggtttacattcaatgagccaaggatagtagcgctacttggctatgacacagggtcaaatcctcctcaaaggtgcaccagatgcgctgctggtgggaattcagcaaccgaaccttacatagttgctcataattttctcttggcacatgctactgcagttgcaagataccgtacgaaatatcaggctgctcagaagggtaaggtcggaatagtcctggacttcaactggtacgaggctctt

SEQ ID NO: 9446 - DNA, 310 bp, Zea mays
aggaggttttatatgggactgggctgatcagggtttactgaaggaggactcagatgggtctaaattttgggcatatggcggcgactttggagatactccaaatgactccaatttttgcctcaatggcattgtgtggcctgatcggacgattcacccagctcttcatgaagtaaaataccttcaccagcctatcaaaatatcatcagcagataatatgcttaagattgaaaatggacacttttttgagacaacagaagctttggacttcagttgggttcttcatggagatggttgtgtcttgggctctggt

SEQ ID NO: 9447 - DNA, 310 bp, Zea mays
ctggtttgcagaattatgaagaataccaagtgtgttccatctctgttggggtggttggtgatatttgccgtgcattggaagataaaattttgcccttttgtgatcgcattatgactgttcttcttaaggacctatcaagctctatgctcaatcggtctgtgaagcctccgattttctcatgctttggagacattgctcttgctattggtgagaattttgagaaatacctaccatatgccatgccgatgcttcaaggagctgctgaacttcttggtactcttgatcagagtgatgatgatatggttgatta

SEQ ID NO: 9448 - DNA, 313 bp, Zea mays
ggagcagcagcagcaggcggcgccgaggagcggcatcccactcagtgcttgcaaccatggctaggggattgaagaagcacttgaagaggctcaatgcgcccaagcattggatgctcgacaagcttggcggagcttttgctcccaagccatcttctggacctcacaagtccagggagtgccttcctctgatcctcatcatcaggaacaggctcaagtatgctctgaactaccgtgaggtcatttctatcctgatgcaacgccatgtacttgttgatggcaaggtcaggactgacaagacctaccctgctgggtt

SEQ ID NO: 9449 - DNA, 311 bp, Zea mays
  unsure (1)..(311): unsure at all n locations
cggacgcgtgggnaagatgtcgtggttcgggcaccaccaccacaaccagccggctcccccggcgtcgggccccaaccaggtgttcaagatcttctgccgcgataacgagaactactgcctggccgtccgcgacgcgccgtcgtgctggccccggtcaaccccaaggacgaccaccagcactggtacaaggacatgcgcttcagcacccgggtcaaggacgaggaaggcatgccggcgttcgcgctcgtcaacaaggccacggggctcgcaatcaagcactccctcggccagtcccacccggtcaagctcgc

SEQ ID NO: 9450 - DNA, 313 bp, Zea mays
gataaaaagcgcagtgcatctgaaaagaactttagtctggatgttcttcgcaaatacttctctgggagcctgagggatgctgcaatgagccttggtgtttgtccaacgacattgaaacgaatatgcagacaacatggaatttcccgatggccatctcgaaagataaacaaggtcaatcgttcattgaagaagatagagaaggtcattaaatcagttcacggtgtggatagatccttgcagtacgatcctgctactgggtctcttgttcctgcaacctctcttccggaaaagatgccattctctgcttgcgata

SEQ ID NO: 9451 - DNA, 322 bp, Zea mays
ggagattcacaagaagtaaacagcaaagcaaaggtgagggatgatcatgccaattgcaaactcaatgaggtacaccaaagctctgaatcagagaaagataagcaacttgtaccagataacgcagcaacaaccaatatgtcagatgtacaacgtgaaaattctcatgtacagaacaatcagaagtacgaaattatcaatgtgccttctgattctaggccacttctagttttcattaacaagagaagtggggcacagagtggtgattcactgagacagcgtctgcaaattcttcttaatcctgtgcaggttttcgagttgagca

SEQ ID NO: 9452 - DNA, 311 bp, Zea mays
acaagctggaatgaaatctaatgctgaaatagttgatttgacaaaggcttcaatcttgcctgagaagcttgaagaatcttttattgagtgcagtgaagaggataaggatgcctatctgtattatatattgagtgttcatggtcaaggtcgcacaataatattttgtacatcaatcgccgcattacgtcacatttcttccatactgcgcattcttggaattaatgtattgacaaaccatgctcaaatgcaacaaagagctcgcatgaaggctgtggatcgcttccgtgaaagtgaaaattccattttggtcg

SEQ ID NO: 9453 - DNA, 112 bp, Zea mays
ggcacacccaagctcgcgcccaccttccacgtcgaggtccgagtcctgctttgatggcgaccgacgtggctgatactcccgcgccgttggtggatgcggccccagatgcgcc

SEQ ID NO: 9454 - DNA, 304 bp, Zea mays
ctccgatcctcgtcgccgacgcatccacccgaaccctcctccgcgacctcgccgtcgccgcagccttggccatgtcgatcttcgagtataatgggtccgccgtggtggcgatggtggggaagaactgtttcgcgatcgccagcgaccggcggctgggcgtgcagcttcagaccatcgcgacggacttccagcgggtgttcaaggtccacgacaagctttacatcggcctctctgggctcgccactgacgcccagacgctgtaccagcggttggtgttcaggcacaagctgtatcagctgcggga

SEQ ID NO: 9455 - DNA, 304 bp, Zea mays
ctcttggaaataagatcccagaattcaatgaattagttcaccagaacagatggcgcgaacgattggatcgactacttgagacaaacaacttccctgaattcactggacgagtttgccctgctccttgtgaggggtcatgtgttcttgggattattgagaatccggtgtctatcaaaagtatagaatgtgcaatcatagacaaaggttttgaagagggatggatgattccacgacctccacttcaaagaacaggaaggaaggtggccattgttggcagtggaccatctggtttggctgctgcaga

SEQ ID NO: 9456 - DNA, 308 bp, Zea mays
cgttcccgggtttctcggagactactgctacggttcgccgctgaccgtagcgccaggccgtgccatcggcgtcggcgacctcgtgttcgagcccccgatgtcgggcccgacggtgtgggagattggcgtccccgaccggacggcggcggagttctacgtcccggatccggaccccaggtacgtcaacaggctcttcgtcgtccgagacaggtaccggcagtacggtctgtgggagaggtacgccgacctgtacccggacaaggatctcgtcttcaccgtcggcgaaagcgacgaatccaaggactggt

SEQ ID NO: 9457 - DNA, 308 bp, Zea mays
gacccggcgctacatgacggacatgatcacccacgccgacaccgacgtggtgatcgtgggcgccgggtccgcgggcctgtcctgcgcgtacgagctgtccaaggaccccaccgtgagcgtggccatcgtggagcagtccgtgtccccgggcggcggcgcgtggctgggcgcgcagcacttctcggccatggtggtgcgcaggccggcgcacctgttcctggacgagctgggcgtgggctacgacgaggccgaggactacgtggtggtcaagcacgcggcgctgttcacgtccaccgtgatgagccggc

SEQ ID NO: 9458 - DNA, 304 bp, Zea mays
gaaaaacttactaaagatgatgtacaaaaaatgcaatgggaggctttggaggctaaaattggaaactggatacattttatgcgaatcgcggtcaaattattactagcaggggaaagacaaatctgtgatcagatttttgatggtgtgaattttaacaagggccattgttttgctgaactcacagcaaatagtattataactcttttcagctttggagacgctgttgctaaaagcaaaaggtctcctgaaaagctgtttgtgttgcttgacatgtatgaagtaatgcgtgaacttcaaccagaga

SEQ ID NO: 9459 - DNA, 306 bp, Zea mays
cccacgcgtccggaccgcatgatcgaagagtatttctttcacaaaggggcctcaattggctactaccacggagatctgaatgccttgagggacgacattgtggagctgaagccgactctactggttggggtgccccgagtgtacgaaaggatttatgaaggtatcttgaaggccattgcggaactcagacctctaagaagggtcatctttaatgctttgtacaaccgcaaactggcaagcatgaaagcaggctactcgcacaaaaccgcttcacctttcgcggacatgctggcttttcgcaaggtc

SEQ ID NO: 9460 - DNA, 300 bp, Zea mays
ggaaaatttacagatgaaacttgtgttctacttcatgatgatcgtggcctcttgacaacagcagatactggattcaaacctagtggctcccagttctgcattactttcaagcctaattctcatcttgacaggtagcacacagtttttggcaagcttgttgttggaagtgatgttctgaagaggatcgagcaagtagatgtgcaatcccctgattcaactcctgttattccagttactatagtaaattgtggagagctcattgaacgcaaagatattggctctatgtcaatagaaattgat

SEQ ID NO: 9461 - DNA, 304 bp, Zea mays
ggacagggcctgtccacgcgccccgacctctgcccggccgagtacctcgaggagctcgccgagctgcaggattcacttcccacatctccggatgaagaggcatttgcatgtattgagagagagcttggcttcacgcttgattcaatctactcgacaatttcaccttcccccattgcagcggctagtttaggtcaagtttataaagcacggttgaaatactctgggaagctggtagctgtgaaggtgcagagacccagtattgagaaagccattgggcttgatttttatctacttagaggacttg

SEQ ID NO: 9462 - DNA, 301 bp, Zea mays
gcgctcaagttctcgcgcccacagccaaatttttctccactcaatcgcggcataagctgcactgcagccatggacgccagcggaccggtagcaaggcgaagaagggggcggctgggcgcaaggctggcggccccaggaagaagtcggtgtcgcggtccgtcaaggccgggctgcagttccccgtcggccggatcgggcgctacctcaagaaggggcggtaccgcagccgtgggcaccggcgcccccgtctatctcgccgccgtgcttgagtacctcgccgccgaggtgctggagctggccg

SEQ ID NO: 9463 - DNA, 300 bp, Zea mays
atctgcttcttggtttcagccccacccgattaaggaggtgtttgattcatccggagtccgggttttagatgccgattaagactataattataaagctaattgataagccatggttaattcgcgagacgattgtattaagtctaattagttcataattagcacatttttagtatcgcaaaatatgagcaaatcatgtattaatagattcgtctcgcgaattatacaattagttttataattagcatgtgtttagtcgtcctaattggtatccaaactaattggtatccaaaacaccccata

SEQ ID NO: 9464 - DNA, 300 bp, Zea mays
cgttcccgggtttctcggagactactgctacggttcgccgctgaccgtagcgccaggccgtgccatcggcgtcggcgacctcgtgttcgagcccccgatgtcgggcccgacggtgtgggagattggcgtccccgaccggacggcggcggagttctacgtcccggatccggaccccaggtacgtcaacaggctcttcgtcgtccgagacaggtaccggcagtacggtctgtgggagaggtacgccgacctgtacccggacaaggatctcgtcttcaccgtcggcgaaagcgacgaatccaa

SEQ ID NO: 9465 - DNA, 301 bp, Zea mays
caccaagttataaaggctaacgatgacttgaccccagagcattaccagtttttcttgtatcaattgcttcgaggattgaaatacatacatacagcaaatgtatttcatcgagatctcaaaccaaaaaatattctggcaaatgctgattgtaagctcaaaatatgtgactttggcttagcaagagtagctttcaatgatactccaaccgccatcttttggacggattatgttgcaactaggtggtaccgagcaccagagttgtgtggatctttcttctccaagtatacaccggcgatagata

SEQ ID NO: 9466 - DNA, 303 bp, Zea mays
actagttctagatcgcgagctgccgcccttttttttttttttttttaagtgtatttttgtcgtgaatgtcataaattatgcaaattcacttggcgaaagagtgtcatactacaatttcacaagaacaacccctaaaactcaacacataataacaactacagagcatttcgctttgagtaaacaaggaaaattctcgtggtggatatgatatatccagtttactcaatgattttgttgatgacaccagcaccaacagtcttaccaccctcacggatagcaaacctcataccctgctcacaagca

SEQ ID NO: 9467 - DNA, 288 bp, Zea mays
attgaagactgcgtgagggcaggttgctatgccgcaaacgttatcatccagcgcccgggctgtacttacccggagaagcctgacttcaactagtgcaaaactgaggcacgtcatgagagggactgttataggcacacttaattgttaaccagtgcgtggttcggtgtctacacaccctgtattcttccgaggcttctcttctgatccggccaatatttttgccgtgaaatttgtgttctgcaactatggacgtctcctttgttgctgtataaggcatgatttgccatc

SEQ ID NO: 9468 - DNA, 335 bp, Zea mays
gccgcgtcgacggctgcggtgaggacggcgcagaacccgctcgaggagttcttcgaggtcgagcggacaccgaggagggcaagcctcctccccactacggtcgcagctggaaggcttctgaactgcgactaaaatcttgggatgaccttcagaaattgtggtatgttcttctaaaggaaaagaacatgctaatgacacagcgtcaaatgctgcattcagagagcatgaggttcccaaatccagaacgaatttccaaggtaaagacatcaatgtgccggataaagcatgtcttgactgagagggctatagcggacccgactcaaggagatcttcgg

SEQ ID NO: 9469 - DNA, 325 bp, Zea mays
gccatggcgtggtagcgcgccgccgtctccaggttcgccgccgcctccccacccgcggcacccatctccgtcaggcttggagccgccgcttctcgctcctccctgtccttctccagtgggcgctgacgccccgtggccgcgtccctctcgacctctgccaccgttgtaaaggaggctgttcagacagagaaggcaccaccagcactaggcccttattctcaggccatcaaagcaaataatcttgtgtttgtttctggagctcttggcttgaatcccgagaccaggaagtttatctctgaaaatgttgaggagcaaactgagcagg

SEQ ID NO: 9470 - DNA, 324 bp, Zea mays
cccacgcgtccggcggcaaccttgccctctaccaagaactttgcagggttcacaatgctgctcttactgcacaaccagctttggtgcagaatgagcggaactgcttgagaaaatcaatattctttgtctgatggagataatctttagtcggccatctgaagatagaactattccattaagtgttattgctgagcggactaagctttcaatcagtgacgtggaatgtcttcttatgaagagcctctcggttcatcttattgagggaataattgatgaagtggacagtacagttcacgtatcatgggtccagcctagagtgcttgg

SEQ ID NO: 9471 - DNA, 338 bp, Zea mays
cccacgcgtccgattgtgtgtacaatcggtccttcaaccaacacaagggacatgatatggaaactcgctgagactggcatgaatgtggctcggcttaatatgtcacatggagaccatgcatcacaccagaaagttattgatctggtaaaggagtacaatgcatcacatgctgacaatgtgattgctatcatgcttgacacaaagggaccagaagttcgaagtggagatttgcctcaaccgatatttctggaaagcggacaagaatttacttttacaatcaaaaggggagttgggactgatacgtgtgttagcgttaactatgacgactttgttaatga

SEQ ID NO: 9472 - DNA, 335 bp, Zea mays
ctcctaatagagagaaatttatggaggtcattagtggaaccggtgacatcaatgcagatattgagaaattttgcacgaccttctctcctttcctcaaagaaaaccacaactttctggcgagcgtcggtcttgatgatctgaaggcttcatagatcaatctccatgctgattacaacaaaataagcatgtcttacgaaactcaaagtgttgccgagggtatacctgtttcccgtagccatctcccccttgaaaaactttaggagatggtaataatttgtcagcatgattgaccatggctacttacgcagagaattgacaccactcaacaaatttag

SEQ ID NO: 9473 - DNA, 324 bp, Zea mays
cccacgcgtccggttatgcaaggattttggatctgaaaagaagatttctggaagctgcacttcgatattatgacatttctcaaattgaacaacgcaagattggagacgaagagattgatgaaaatgcacttgagcaagctcttagtgctgctgtgacatgcacaatattggctggtgctggtccacaacgctcccgtgttcttgctactctgtacaaggatgaaagatgctcgaagttgaaaatatacccaatactgcagaaggtttaccttgaaagaattttgaggaaaccagaaattgatgcatttgcagaggagcttaggc

SEQ ID NO: 9474 - DNA, 325 bp, Zea mays
acctggcaaagcaggcgtttgatgaagctatctctgagttagacagccttggtgaggagtcatacaaggatagcactctgatcatgcaactcctgagggataacttgaccctttggacatccgacctcacggaggatggtgctgatgagggcaaagatgccccgaaaggtgatgcaggcgagggacagtaatcttcggagggggtgcaaagttgttcgagccccaatgttttagatgctctatgctgtcgaagctgtgctgtgccattattgtagctgatttcgtctccattcacttcttttttcttgttagtaggctggtagtg

SEQ ID NO: 9475 - DNA, 320 bp, Zea mays
gtataatgacaaaatgacgaagatgcagaggtatgatgatgaagcatatgctgcttatgatgagctattctcgtatgcttgccccaagttcattacaccgtcgcctccaattctggaccagccgctaacaaactataaccaggatgcataccgtcttcagttgaagttgtttctctatgaagtaaagcagcaacagttgctttctgggattcggagttatctgaagctatattcaacaataaccattagcaaacttgcccaatatatggaagtggatgaagcaacactaaggtcgatcctgatgacatacaagcacaaaa

SEQ ID NO: 9476 - DNA, 315 bp, Zea mays
cggacggtgggcggacgcgtgggcggacgcgtgggcgccagtccggcccggtgttcaaccccaaggcgtccagctcctacgcctccgtgtcctgctccgcgcagcggtgcagcgaactcaccaccgccacgctcaaccccgcctcctgctccacctccaacgtctgcatctaccaggccagctacggcgacagctccttctcggtcgggtatctgagcaaggacaccgtgtcgttcggctcgaccagcgtgcccaacttctactacggctgcggacaagacaacgagggcctcttcgggcagtcggcggggctca

SEQ ID NO: 9477 - DNA, 289 bp, Zea mays
cttgcccagaacaagacacaggagctcatcctgaactacattaatcagctttgcgagcgtcttccgagtccgatgggagaatcagctgtggactgtggcagtcttgcgtccatgcctgacattgcgttcaccattggaggcaagaagttcaagctgaaaccagagcagtacattctgaaggttggtgaaggacaggctgcccagtgcatcagcggattcacagctatggatatcccaccaccccgtggccctctctggatcttgggtgatgttttcatgggagtctacc

SEQ ID NO: 9478 - DNA, 322 bp, Zea mays
gaaacacacagaagcgaggagcactacttgttggttggattctcttcagtctagcagctagtccagttaagtttcagacacacatggggagcattggcagaggcacggccaactgcgccaccgtgccgcagccgccgccgtcgacagggaagctcatcacgatcctgagcatcgatggcggcggcatccgcggccttatcccggcgaccatcattgcgtacctcgaggccaagctccaggagctggacggcccggacgctcggatcgccgactacttcgacgtgattgccgggacgagcaccggcgccctgctcgcgtcgat

SEQ ID NO: 9479 - DNA, 227 bp, Zea mays
caccactcccaagccagtacccacagtcctacgagcagtcgcacgcaagtgtcaagagacaaaacggtcgacatggctcgcacgcaatctgccgtagcggtcgccgtggtggccgcggtgctgctgctggcagcggcggcgacgacctcggaggccgccatcacctgcgggcaggtgagctccgccatcgcgccctgcctctcctacgcccgcggcacggggtccgg

SEQ ID NO: 9480 - DNA, 321 bp, Zea mays
tcgacggtgggctagttctagatccgcgagcggccccacgcgtccgacgatttagaggctgttgtttgtgtttgtgagcttgcagcggagtggcgccagacttctcactccgatgtggtggttgatctgatttgctaccgccgtttcgggcataacgaaattgatgaaccttccttcacacagccaaaaatgtatcaggtcattaagaaccatcccagctcattgaagctttatgagcagaaactgctaggaacgggtgaagtcatgaaagaagatgtccagagggatcatgacaaggtgaaccgaatcttgaacgaagag

SEQ ID NO: 9481 - DNA, 329 bp, Zea mays
aagaagcaaaagtatgagaaaattagcgagaagaaagttgcaacatcaattgaggctctatgccgtgggtatcctactgagtttgcatcatatttccattattgccgttcactgcgatttgatgacaagcctgactattcctatctcaagcgattattccgtgacctttttatccgcgaaggttttcagtttgattatgtctttgactggacaatattgaagtaccaacaagctcaaattgccactgctccaccccgtgcgggccatggcgctgggccttctgggttggcacctgcattacagaatgataggcaaccaggccctgaggg

SEQ ID NO: 9482 - DNA, 315 bp, Zea mays
cagctcatggagaacgagaagcacgaggtcattgttgctgataactttttcaccggttcaaaagataacctgaagaagtggatcggacacccaagatttgagctcatccgccatgatgtcactgagccacttcttgtggaggttgaccagatctatcaccttgcttgccctgcttcaccaatcttctacaagcacaatcctgttaagaccatcaagacaaatgttattggtaccctgaacatgctgggacttgcaaagagagttggagctaggatcttgttgacatcaacatctgaagtttatggtgatcacttg

SEQ ID NO: 9483 - DNA, 277 bp, Zea mays
ctcgcgcgccgtatcaggggcgagagggcctgagcgaggctggctcctctcaccgcaggcggcgtcgttgttgcttcgggcctgcttgtaggacttgtgcttctcttggtttcctttctggtggcagtggcttcttggtaccattgtgcttgttcttagaatcttagggatagagagttgttcagttgctgggtaacctgattgtttatcttgcattcctgcctctgtaatggttgtctgctgtcttaatggaaatgatatttgctttttaattctc

SEQ ID NO: 9484 - DNA, 315 bp, Zea mays
cggacggtgggggtagttgttctggatgatgatttgattgtccagaaggacttgtcacctctatggaacctcgatatgggtggtaaagtgattggagcagtccagttctgtggagtgagattagggcagctgaaaccttatatagcagaccataacgtcgatgatgattcatgtgtgtggttgtcgggcctgaatgtcattgaattggataaatggagggacactggcattaccagtttgcatgatcaatcagtccagaagttgcgaaaggacagcctgaaatctcagcgactgcaagcactccctgcaggtcta

SEQ ID NO: 9485 - DNA, 317 bp, Zea mays
ggacattgagtacctcaagaaggttgctggagatcgtactgttcctgttgaagttggaaagaattacgtgtgtagtgagtggaagcaggagcttatcacattttctcagttcctggatagaatgtcgtcaactgtctgtccatcaaacttgacatatctggctcagcatccattgtttgagcagataaaagagctcagtgaagacataattgttcccgaatactgttacgctggtggaggtgaactccaatcacttaatgcttggtttggtccagagggtacagtgacaccattgcaccatgatccgcatcacaaca

SEQ ID NO: 9486 - DNA, 318 bp, Zea mays
gctaacaaaagttaagatgccactctcggatttggtgagtgcagctctggcgcttgatcaatctaccttggatgttgatcaagtggagaatctcataaagttctgtcctacaaaagaagaaatggaacttctcaagaattacaccggagacaaacaaaatcttgggaaatgtgaacagttcttcttagaattgatgaaagtgcctagaatggagtcaaaactgcgagtattctccttcaagatccagtttggttcacaagttgctgatcttagaagaagcttgaatatcatcgactcttcatgtaatgagatccgaac

SEQ ID NO: 9487 - DNA, 314 bp, Zea mays
ctagggtttttgattttagccgccgccgctgctcatctcacatccctcgagaagacgcctgctcctcgccgatcgatacgatggccgtcttctccgacctccacaccgccgacggcctcaagtccctcgaggctcacctcgccggcaaaacctatgtgtctggtgactccattactaaggatgacattaaggtcttcgccgcggtgccgtcgaagcctggcgctgagtttcctaatgccgcccgctggtacgagaccgtctctgcggctgtagcctcaagattccctggtaaggctgttggtgtacatctgcct

SEQ ID NO: 9488 - DNA, 318 bp, Zea mays
cccacgcgtccgcccacgcgtccgcggacggtgggctgaccgacacgactccccccttcgtcttccaatccgccgctgttcgagtagtcggcggccggggcggcggcgatgaatcccctcacgcaggtgcagcggacgcagattatcaaccagaaggaggcgctcctgggcatcggcgaggacgcgtcgtggcacgccaagtttaaggactcggcctacgtctacgtcggcggcgtccccttcgacctcaccgagggcgacctcctcgccatctttgcgcagtatggtgaggttgtcgacgtgaacctcgtgcgcgac

SEQ ID NO: 9489 - DNA, 323 bp, Zea mays
ttgacggtgggatctgcttgatgtcgggcgcacgcttgccgactacaacatccagaaggagagcaccctccacttggtgctgcgcctcagatgaggcatgcagattttcgtgaagaccctgaccggcaagactatcaccctcgaggtagagtcttcagacaccatcgacaacgtcaaggccaagatccaggacaaggagggcattcccccagaccagcagcggctcatctttgctgggaagcagcttgaggacgggcgcacgcttgccgactacaacatccagaaggagagcaccctccacttggtgctgcgcctcaggggag

SEQ ID NO: 9490 - DNA, 325 bp, Zea mays
agctgatgaacaaccgccacgtcctggccaagctccagaaggaggtgaggacggcgacgcccgacggccgcatggtgatggaggaggacctgagccggatgccatacctgaaggccaccatcaaggagtccatgcgcatccacccgccggcgccgttcctcctgccgcacttctccacccacgactgcgagatcaacggctacaccatccccgccggcacgcgcgtcatcgtcaacgcgtgggcgctcgccagggacccgacgtgctgggacaaggccgaggagttcttcccggagcgcttcctggaacaaggccgcgacgccga

SEQ ID NO: 9491 - DNA, 244 bp, Zea mays
ccggcgtcgtacgtgcactccaacgtcgccggcctcgtcacgctcctcgaggcctgcatagacgccgacccgcagccggccatcgtctgggcctcctcctcctccgtctacggcctcaacgacaagcgtcccttctcggagcgcgaccgcaccgaccagccggcctcactctacgcggccaccaagaaggccggcgaggagatcacgcacacgtacaaccacatctacggactctccatcaccg

SEQ ID NO: 9492 - DNA, 283 bp, Zea mays
tcggatttggagctcggggaaggggctgacgacgacgtcatcgagatcaagcccttcgccgccaagagtactttctccagagatggcttaagcaccatgactactgctggttatgatgcccctgcagcaaggttggccaaaaggaagaggaagaatcaatacaggggtatccgccagcgcccttggggtaagtgggctgctgagatcagagatccccagaagggcgttcgtgtttggcctggtactttcaatagtcccgaggaagctgcaagagcttatgatg

SEQ ID NO: 9493 - DNA, 289 bp, Zea mays
ccgagggcgccgagctaatcgactccgtgctggacgtcgtgcgcaaggaggccgagaattgcgactgcctccaagggttccaggtctgccactcgctgggaggaggtactggttcaggaatgggcaccctgctcatctctaagatcagggaggagtacccggatcggatgatgttaacattctctgttttcccgtcgcccaaggtgtctgatactgtagtggagccctacaacgcaacgctctctgttcaccagctcgttgagaacgcagacgagtgcatggtgctcga

SEQ ID NO: 9494 - DNA, 287 bp, Zea mays
aggaaagcggtttatttcacttatgcgaattcatagaagactgtgaattcacctatttgtccactcagatacttcactttttgggaaatgaaggccccaaaacatcagatcccagtaaatacatacgctatatatacaatagggtgatacttgaaaatgctacagttcgagctagtgcagtcagcacattggcaaaatttggtgccttggttgactcactcaagcctcgcatatttgtgctcctgagacgctgcctgtttgatggagatgacgaggtgcgcgataga

SEQ ID NO: 9495 - DNA, 118 bp, Zea mays
ctgaagaaggagaagttctctacccggcttcatctccgtctctgtcttgatggaggttaccatgttcttgacgagtctacaaactacagcagtgacctgagaccaactgccaagcaac

SEQ ID NO: 9496 - DNA, 284 bp, Zea mays
caacccggaagaggcaacgaggtgactccgcgcctcggtcatgggtgacagccaatactccttctcgcttaccactttcagcccgtcgggaaagcttgtgcagatagagcacgcgctcacggctgtcggatccgggcagacctccctagggatcaaagctgccaacggggtagtgattgccaccgagaagaaactgccttctattttggtggatgaaacatctgtgcaaaagattcaggcactaacaccaaatattggagttgtctatagtgggatgggtccag

SEQ ID NO: 9497 - DNA, 280 bp, Zea mays
cggacgcgtgggcggacgcgtgggttagttttccccccttcaactgttgctagccttgagtcgctgagaagtttcgagaagggtggtgtgagtgtcggatagctcaagatggatccggcgttgctggacgacgtcatacgccggcttctggaggtgaagaatctcaagcctgggaagaacgcgcagtgtcagagtcggagattaagcagctctgcgctgccgccaaggagatcttcctgcagcagcccaacctgctggagctcgaggcccccatcaaaat

SEQ ID NO: 9498 - DNA, 263 bp, Zea mays
ccataaaaaaattaagtcttaatagcatcacggtttcaacgaaagtaataatacttcatgaccaggcaaacattgccatcatagattacttgttcacgcgacaactgcaaggatgtcaacaagacgagatattttaagcttccacgaggtaaccaacaagcaagcacagcaccagccagatagatcatttcttcttggcagcagccttcgtcaccttggctccagttgggtccttcttctccacactcttgatgactccgaca

SEQ ID NO: 9499 - DNA, 279 bp, Zea mays
agacagtagttgtattccccaaaaatgctggcaaaattgtactagcaggtgaagaaactgaattactagttggtctgcaaaatgagggtgaatcgactttgaatgttgttgctgttcattcaactctccatcttccttttgaccataatatgtatggccagaaccttactgttcagaatttcttcaacgcatcagttcctgtttctgtgcaagcaaccttcccttataaattcgttgtgagcaagttcttgcagcctggagcttatgatctggttggtt

SEQ ID NO: 9500 - DNA, 284 bp, Zea mays
atgcactgttgactccgcagttcagcaatggaagaagtcacatgctgctgtcaacgatctcagcagaaagcaagttgctgaagttgaagcactcgtcaggactgcaattgagaacaatgagcaacatgaagtggaagttgcatcttctcgagctgtggctgaagaagacaccaccaatagcagcaaggacatagcccagggcgttgaaaatctgttggaaaaggcacagaaatctagttcaagagtggtctcaatggtggaggctcacttcgcagagctacaga

SEQ ID NO: 9501 - DNA, 281 bp, Zea mays
cggacgcgtggggtaaagttcacaaattctaagctgaaaaatctaagtgatcaataccaggcattgtttggtgagtacacaagttgtcagaaaaaggtggttggtgatgtagtgagggtttcaggcacattctcagaggtatttgaaaattttgctgcagttctgtcggagttggatgttttacaaagttttgctgatttggcaactagttgcccagttccttatgttaggccagacatcactgcgtcggatgaaggagatattgttctactgggtagcag

SEQ ID NO: 9502 - DNA, 280 bp, Zea mays
atcacgcacgtcgcccccgcccctcctgtcgagcccaaccgcggtgccgtacagccgccgccggggtggggcccaccgccgccgccggtgcacgggcgaaagcgagccgtggtgtgcgggatctcgtatcggcactcgcggtatgagctgaagggctgcatcaacgacgccaagtgcatgcgccacctcctcatgacgcgcttcaacttccccgacgactccatcattatgctcaacgaagaacaaaccgacccctacaaaatcccaacaaagcataaca

SEQ ID NO: 9503 - DNA, 280 bp, Zea mays
caaggttggagcaaataatgttgttgagtgggatccagaagtcgaacgtgtgtacctttcgtctgggaaaccactggttcctgactatgcgatgtcattcatcaagggcaaatcactcaagccattcgggcgcctgtggtgggacgagacggttcctacagttgtgaccagagcagagcctcataaccaggttatattgcatccgactcaagcaagagtcttgactatccgggagaacgcaaggttacagggcttccccgattactaccgattgtttgga

SEQ ID NO: 9504 - DNA, 284 bp, Zea mays
caacgtcccatgacggtcagattcggtttcttgtgtatgttttggagaatgcgatcctggaccaacgtgaaggtcaagagaaaatggtatggctgatagacttcacaggatggacaatggcccatgccacacccataaagactgcaagagaatgtacaagcatcctgcaaaatcattaccctgagaggctggccattgcatttctgttgaatcccccaaaagtattcgaagccttttacagggctgtcaaatatttccttgacccaagatcgatcgagaaactg

SEQ ID NO: 9505 - DNA, 285 bp, Zea mays
ctccccttcccgggccgcggacagagatccggagcgccgcgcgatggccaacatcgacatggcgaagatcctggcggacctggaccgcggcgccacggcgcgacgcgcgggtgcccaagaccaagctcgtatgcacgcttggcccggcctcccgcaccgtgcccatgctcgagaagctgctccgcgccggcatgaacgtcgcgcgcttcaacttctcccacggcacccacgagtaccaccaggagacgctcgacaacctccgccaggccatgcacaacaccggca

SEQ ID NO: 9506 - DNA, 277 bp, Zea mays
tctggaagcagatggctgatgctgggatcaagtacatccccagcaacactttctcgtactatgaccaggtccttgacaccactgccatgctcggcgctgtccccgaacgttactcatggactggaggagagattggatttgacacctacttctccatggccaggggcaacgccactgttcctgctatggagatgaccaagtggtttgacaccaactaccactttattgtccctgaattgggcccaaacaccaagttctcctatgcttctcacaaggc

SEQ ID NO: 9507 - DNA, 228 bp, Zea mays
ggacgcgtgggttcgatccaactcctgagcactttctcctcgtccccgacaagccaatcgaagccgagatacggccatggactccaccggcaccggagcagggggtaatgggaagaagggagcggccgggcgcaaggtcggcgggccaaggaagaagtcggtgtcgaggtccgtgaaggccgggctccagttccccgtcgggcgcatcgggcgctacttgaagaaggg

SEQ ID NO: 9508 - DNA, 276 bp, Zea mays
ggaagatgatgagatggaagatgcacattctgttgctgcatctgctggtgacactgatgctaatgttgatgttaatgaacattttgtatgtttctcctgtgttgatggtgaactttatgagcttgatggacgaaaatcacaacccacatcccatggcccttcatcacctgaaaccttgttgcaggatgctgcaaaagtcatcaaagctagaattgcagagaaccctaactcgatgaacttcaacgtcatggctctttcaaagaagtgaagtgtact

SEQ ID NO: 9509 - DNA, 276 bp, Zea mays
cactgctcttggaggagttcgtccatcagcttgtttgcctatcacaatcgatgttggcacaaataatgagaaactgcttaatgatgagttttacattggactccggcaaaaacgtgcaactggcgaggagtatcatgagcttatggaagagttcatggctgctgttaagcaaatctatggcgagaaagtcctcattcagtttgaggacttcgcgaatcataatgcttttaatttgcttgcaaaatatagcaagagccatcttgttttcaatgatga

SEQ ID NO: 9510 - DNA, 265 bp, Zea mays
gaagactgctggtcagatgaggattactgcaggaagaaggaggattggtatttagtttccaaaacactgtcggaacgagaagctcttgcttttgcagcaaaaacagggctggacgttgtaactgtttgtccgtcattagtatttggacccttgatgcagcctacagtaaatttgagcagcgaaatgatccctaaatatttcaaagatctcgagactgttgaaaatgtactcagtaatatggtggatattcgtgatgttgctgatg

SEQ ID NO: 9511 - DNA, 236 bp, Zea mays
tgattctacttgtgaagatgttcgagaagagcaagatggtgacgatatccacggggctggacctcctcagctactcgatctgcatcttcatgacatcagcttctctctacatcctgcacgatcttcacaagggcgaccatgatgagtgacgagagtgaaatgccgaatttgtagcctattcgagagagagagttgacggtcttgtccaataatcgatactggatttttaagactct

SEQ ID NO: 9512 - DNA, 274 bp, Zea mays
cccacgcgtccgcataactctccagtgctcaaagatgtctctgtaaacaaaccagataaccttgcttcagcatcaaacaacattcatcccaagcttgtgatcctccacatgaacatggccctctatgtatatgatgatataatgaggatgactgacaacttgagcgaaaaatacattattggttatggagcctcaagtacagtctacagatgcgacctgaagaactgcaagccaattgcgattaaaaagctgtatgctcactaccctcagagct

SEQ ID NO: 9513 - DNA, 278 bp, Zea mays
cccacgcgtccgcccacgcgtccgttcaaagatgattcctgcatctgacaagggcaggttctttgccttcggtcgtgtcttctcagggaaggttgctactggtatgaaggttcggatcatgcggtccaactatgtccccgggcagaagaaggatctgtatgtcaagagtgtccagcgtactgttatctggatgggaaagaagcaagagtcggttgaggatgttccgtgtggtaacactgttgctatggttggtctggatcagttcatcacgaagaatg

SEQ ID NO: 9514 - DNA, 320 bp, Zea mays
ttcttctgtgacaaatgctgcagtttgcaggaagcacaaaaaaggatgaaaataaaaaaaccaccaaacattctagtaattcatctcaagcggttcaagtatattgagcagcttcagcgctacaaaaaactatcatacagagtggttttcccactggagcttaaacttcttaatacagttgataattcggacttggaatactcccttttcgctgtggtagttcatgttggaagtgggccaaaccatggccactatatcagtttggttaagagccacaatcattggctattctttgatgacgagaacgttgagatgactga

SEQ ID NO: 9515 - DNA, 311 bp, Zea mays
gctcatgcagagctttaagtccaaggagtatgttagggagaccttctcctggcagtactactactggtatctcaccaacgatggcattgagcacctacgcaactacctgaacctcccgtctgagatcgtgcctgccacgctcaagaagtctgccaagccacctggccgcccatttggctctggccctcctggtgaccgcccaaggggcccaggtcgttttgacggcgacaggccaaggtttggtgacagggatgggtaccgtggtggtcctcgtggtgctcctggtgactttggtggcgataagagtggag

SEQ ID NO: 9516 - DNA, 314 bp, Zea mays
atagcttgcaaaggtacaatgagatatgcaacaccattcaccacagcatcagttgacgttattgcagaacagttgcacagggctggttattcacgatggggatctgagaacgttctaaatgggcgaacaggtgaaagagtgcaatccttggttttcatgggccctaccttttaccagaggctgattcatatgtccgaagataaggtgaaattccgtaacactgggccggtgcaccccctcacgaggcagcctgttgccgacaggaaaaggtttggtggagttaagtttggagaaatggagcgtgactgcctcct

SEQ ID NO: 9517 - DNA, 316 bp, Zea mays
cgaacgcgaaagccgtagtgaagccgaagacacccgccaagcccaaggccaagccagctgccaaggcgaagccaagaccgccggcgctaagccgaagccacttgctaagaaagccggccgccccgccaaggcggcgaagacgtcggccaaggacacgccagggaagaaggcgccggtggccaagaagtccgctgctgccgcgaagaaggcccctgccaagaaggccgctccctcgaagaaggcggcgaccccggtgcggaaagcgccgtcccgtaaggccaagaagtaaagcggccaagaaggggggcgcgatgct

SEQ ID NO: 9518 - DNA, 315 bp, Zea mays
cttcagccggctcttcgccaagaaggagatgcggatcctcatggtcggcctcgacgccgccggtaaaaccaccatcctctacaagctcaagctcggcgagatcgtcaccaccatccccaccatcggtttcaatgttgaaactgttgagtacaagaacattagcttcactgtctgggatgtcgggggtcaggacaagatcagacctctttggaggcattacttccagaacacccagggtcttatctttgttgtggacagcaatgaccgtgaccgtgttgttgaagccagagatgagctccacaggatgctgaacga

SEQ ID NO: 9519 - DNA, 326 bp, Zea mays
ctccccttgctggccaaatcgatcgctccccttcaggctccaggctccggagcttgctttacttcagattgcatctttagcgattcgaagtggcaatggtcttctcttgaaaggtggaaaagaagccatgagatcaaacaaagtatcgcataaggttataactggtgccattcctagcaacgtgggtgaaaaattattggccttgttacaagtagagacgaaattgctgatttactaaagcttcatgatgtaattgatcttgtcattccaagaggtagcaataagctggtttcacaaatcaaggcatcaactaagatccctgttct

SEQ ID NO: 9520 - DNA, 308 bp, Zea mays
gaaaagcaacaggagttctgaggcttacacatttaaccatgatagtatggctcgccgtgcattaaaaaatacatgccttgcataccttgcgtcattgaatgagccagatttcgttgagcttgcactgcatgagtacaagtctgcgactaacatgacagagcagtttgctgcattagcagcattatcccaaaatccaggccaagttcgtgatgataccctcttggatttctataacaagtggcagcatgaatacttggttgtaagcaagtggtttgctcttcaagctacttcagagattcctggaaatg

SEQ ID NO: 9521 - DNA, 308 bp, Zea mays
gaaggatcggcaggctcgtggccagggtcgccctgcagagcgaggatgtcgagctcgtcgccgtcaacgaccccttcatcaccacggattacatgacgtacatgttcaagtacgacaccgtgcacggccaatggaagcacagcgacatcgccctcaaggactccaagacgcttctcttcggcgagaagccggtcaccgtctttggcatcaggaaccccgaggagatcccgtggggtgaggctggtgctgagtatgtcgtggagtccaccggtgtcttcactgacaaggacaaggctgctgcacatctg

SEQ ID NO: 9522 - DNA, 305 bp, Zea mays
ggtttttgattttagccgccgccgctgctcatctcacatccctcgagaagacgcctgctcctcgccgatcgatacgatggccgtcttctccgacctccacaccgccgacggcctcaagtccctcgaggctcacctcgccggcaaaacctatgtgtctggtgactccattactaaggatgacattaaggtcttcgccgcggtgccgtcgaagcctggcgctgagtttcctaatgccgcccgctggtacgagaccgtctctgcggctgtagcctcaagattccctggtaaggctgttggtgtaaatc

SEQ ID NO: 9523 - DNA, 306 bp, Zea mays
gttgatcccgacaataagttagaatggacattcaataacaatacagagggatccatatgcgggttcaatggtgtggagtgctggcatcctaatgagaacagggtcctttcgcttcatcttggtagctttggtcttaagggcgaattccctgatggacttgagaattgtagtagcatgacttcgctggatctctcaagcaacagcctctctggccctatcccggctgacatctcgaggagacttccatttgttacaaaccttgatctgtcatttaatagcttctcgggagagataccagaagcacta

SEQ ID NO: 9524 - DNA, 307 bp, Zea mays
ttctcgatgttctgtttgtagaatgacataagtgatgttttggatctcacctttagcatggatgcagacgaagagaaactgatattgtacgagaaggcagaggtcactgattgtgagttgattcctggagggcgtaacatcagggttactgaggagaacaagcatgaatatgtcgaccgggtagcagagcatcgattgaccactgccatcaggcctcagattaatgccttcctggaagggtttaatgaactcattccacgggagctgatatctatcttcaacgacaaagagcttgagcttctgatta

SEQ ID NO: 9525 - DNA, 310 bp, Zea mays
gtgagatggcacaagccatggcgtccatgaccggcctctcgcagggcgttctgcccagcaggcgcgccgccaacagggccaggacggccgccgtcgttagggcgtccgccgaggcgcaggcgcaggcggcccgccgcgccgtgctcgggctggtggccactggcatcgtcggcggcgccttgtcgcaggcggtgcacgccgagaccgtcaagaccatcaagatcggagccccgccgccgccctccggtggactccccgggactctgaactctgaccaggcgagggacttcgacctccccttgaaggagcg

SEQ ID NO: 9526 - DNA, 317 bp, Zea mays
ggacggtgggtgcacttgaacctgtgctgccccctgtctatgcgaggcctgaacatgttgaaagagcactaaagagactttatcaagatgccatgagcatactcaggcctcagggccgagagcttgacttgctgatggtaatactgcctgacaataatggctctctttacggggatcttaaaaggatatgtgagactgatcttggattggtctcccaatgctgtctgactaaacatgttttcaaggcgaacaagcatcagtatcttgcaaatgttgccctgaaaataaatgttaaggttgggggaacgaatactgta

SEQ ID NO: 9527 - DNA, 305 bp, Zea mays
accagccgccgtcatgtcgaagcgaggtaggggaggttcggctgggaacaagttccgcatgtcactgggtctaccggtggcggccacggtgaactgcgcggacaacacgggcgccaagaacctctacatcatctccgtcaagggcatcaagggccgcctcaaccgcctcccgtccgcctgtgtcggcgacatggtcatggccaccgtaaagaagggaaagcccgacctcaggaagaaagtgatgcccgccgtcatcgtccgccagcgcaagccgtggcgtcgcaaggacggtgtctacatgtact

SEQ ID NO: 9528 - DNA, 302 bp, Zea mays
gtcttggctgaccccagcggaaggggactgcgtgcgctctcgcgtgcccagatcgactctgttcttgaccttgctcggtgcaccattgtgtccgagctctcaaacgaggacttcgactcttatgtcttatctgagtcgagcctgtttgtctacccatacaagattgtgatcaagacctgtggaactacaaagcttctgctcgctattccgaggatccttgaacttgctgaagagctcctgttgccactcgctgcagttatatactcccgtggaacgttcatattccctgaagcacagccttc

SEQ ID NO: 9529 - DNA, 303 bp, Zea mays
gtgatgatcttatcttagaagctttcaagtgcatgaaggataacaagattggtggtgtcccagtagtagaaggccccaaaagaaaacttgttggcagtgttagcataagggacatccgctttctgttgcttagacccaacttattttcaaatttcaggcagttgacagtcattgaattcatgaagactctaggctccactcttcctgattcagagagcaattgcctggtgaagccaccacccacttgcactcctgacgcttcccttggtagtgttattgacagcattgcatcaagaataacac

SEQ ID NO: 9530 - DNA, 303 bp, Zea mays
cggtgtgattacgagcatagctgggaggaagagcatgctgaagctggcagagaggatggtggcgagcttctgcggtggcgtgaccgcgtctgcggcgcatcagtggacgacgctgtcggggagcggacggcaggacgtccgcgttatgaccaggaagagcgtggacgacccaggcaggccgccgggcatcgtcctcaacgctgccacctccttctggctgcctgtcccgcccaagagggtcttcgacttcctccgcgacgagacctctcgcagcgagtgggacatcctctccaacggtggcgc

SEQ ID NO: 9531 - DNA, 304 bp, Zea mays
cgtcgacgacggcggcgacccacgctgctcatccacgagggtgtcaaggccgaggaggattacgagaagaccggcaagatctccgacccggagtccaccgacaacgctgagttcaagatcgtgctcaccatcatccgcgacgggctcaaggctgaccccaagaagtaccgcaagatgaaggagaggcttgtcggcgtctctgaggagaccaccacgggtgtcaagaggctctaccagatgcaggagaccggcgccctcctcttccctgccattaacgtcaacgattccgtcaccaagagcaagt

SEQ ID NO: 9532 - DNA, 302 bp, Zea mays
gggactcttcttcttcgcgttccccggggtcaccaagtgcatcgaagtgggtctccccgcccttgtcctcctggtgatcttcgcagagtacgcctcccacgtgttcgctaaggggagcttcgtgttcagccggtgcgccgtgctggtgaccgtcgtgatcatctggatctacgccgagatcctgacggcggccggcgcctacaacgagaggggccctgtgacgcagttcagctgccgcgccgaccgctccgggatcatccagggctcaccttgggtgaggtttccttatccgttccagtggg

SEQ ID NO: 9533 - DNA, 311 bp, Zea mays
atctccctagcagcagatcctcgtgcaacgcaaagcgctagccttcctactgtcccgatggcccgcacgaagcagacggcgaggaagtccactggcggcaaggcgccaaggaagcagctggccaccaaggcggcgcgcaagtctgccccggcgaccggcggagtgaagaagccccaccgtttccgccccggcaccgtcgcgctccgggagatccgcaagtaccagaagagcacggagctgctgatccgcaagctgccgttccagcgcctggtgcgtgagatcgcccaggacttcaagaccgaccttcgctt

SEQ ID NO: 9534 - DNA, 315 bp, Zea mays
cgccgcggtggccaccatcaagacgaagcgcaccatccagttcgtggactggtgcccgacggggttcaagtgcggcatcaactaccaggcgccgacagtggtgccgggtgccgacctcgccaaggtgcagcgcgcggtgtgcatgatctccaactccaccagcgtcgtcgaggtgttctcccgcatcaacagcaagttcgacctcatgtacgccaagcgcgcgttcgtgcactggtacgtcggcgagggcatggaggagggggagttctccgaggcacgcgactacctggccgccctggagaaggactacgagga

SEQ ID NO: 9535 - DNA, 249 bp, Zea mays
cccacgcgtccgatcgaccccatctgtgccctccaggctctgatggagggtcttcaggtccttcccttggaggacgttgtctctgaagctgacatcttcgtgaccaccactggcaacaaggatatcatcatggttgaccacatgaggaagatgaagaacaatgccattgtctgcaacattggccactttgacaatgaaattgatatgctcggccttgagacctaccctggcgtcaagcgcatcaccatc

SEQ ID NO: 9536 - DNA, 249 bp, Zea mays
gggagtcaagactggcctgccatacatctggcacagcaaggctagcaaccccttcgttaacttgaagaaggaatacaagggcatcttctggcaggaggacatcatccccttcttccagaacgtgaccatccccaaggactgcgacaccgtccaaaagtgctacatctacctctctggacaagtgaaggagaagctgggcacgattgacccctactttgtcaagctcggtgacgccatggtcacctggat

SEQ ID NO: 9537 - DNA, 249 bp, Zea mays
agagcctcattcatctccattcgaaacaccctcgcacccacactctcccttcgtccccagcctaaatccccgcaacgatggctcgcacgaagcagacggcgcgcaagtccacgggcggcaaggccccgaggaagcagctggcgaccaaggcggcgcgcaagtcggcccctgcgaccggcggcgtgaagaagccgcaccgcttccgcccgggcaccgtggcgctgcgcgagatccgcaagtaccagaaga

SEQ ID NO: 9538 - DNA, 247 bp, Zea mays
ctcgttccatttccccatctcccagatccaattcgcgagttctccctcctctgcggccatggcgctctctgtggagaagacctcgtctggacgggagtacaaggtcaaggatctctcgcaggcggacttcggccgcctcgagattgagctggccgaggtcgaaatgcccggcctcatggcgtgccgcgccgagttcggcccgtccaagcccttcgccggcgctaggatctcggggtctctccacatg

SEQ ID NO: 9539 - DNA, 248 bp, Zea mays
cccacgcgtccgcggacgcgtgggatcaggagctggagaacgccaagagcagctcatctgtggagaagagctacgagctgcctgatggccaggtgatcaccattggggcggagaggttccgatgccccgaggtcctcttccagccttccttcattggtatggaagctcctggcatccatgagaccacctacaactccatcatgaaatgcgacgtggatatcaggaaggacttgtatggtaacattgtt

SEQ ID NO: 9540 - DNA, 241 bp, Zea mays
gcgggggccgattcagcggtggtggccgaggtggcggcgggggcgcttcggcggcgggttccgcgacgagggcccgcccgccgaggtcgtcgaggtttcgacgttcctgcacgcgtgcgagggggaggcggtgacgaagctcaccaacgagaaggtgccctacttcaacgcgcccatctatctgcagaacaagacccagatcggcaaggttgaagagatcttcggccccatcaacgaatcc

SEQ ID NO: 9541 - DNA, 245 bp, Zea mays
gttgccccatctctttcgcgacccatttgatcgattcctgatggcgcccaaggccgagaagaagcccgcggagaagaagccgtcggaggagaacgccgagaagaagccaagggcggagaagcgcgtgccgagtaaggagggcggcgagaagaagggaaagaagaaggcgaagaagagcgatgagacgtacaagatctacatcttcaaggtgctcaagcaggtgcacccggacattggcatctcgt

SEQ ID NO: 9542 - DNA, 243 bp, Zea mays
ggccccttctctctcttcgtcgcgccgccgtagcacgactccgactcggccatggcgacacccccagctctcctattcccttcgccctcttcggcatcttctccgccgtcatccgcgcaggtagaggcggtggtcctcttcaacgtctgcgacagctacgtgcggcgaccggaccaggcagaccgtgtcatcggcaccctccttggatccctcctccccgatggcaccgtccacgtccgcaac

SEQ ID NO: 9543 - DNA, 242 bp, Zea mays
actaatccagcccatttcgaactctctctagacgcttcctcggtctctctgttcaccgccgccccgtaccatactcctcttcgcgccgtagaaatggcgctgccgaatcagcagggcgtggattaccccagcttcaagctcgtcatcgttggcgacggtggaactggtaaaaccacatttgtgaaaaggcatcttactggcgagtttgagaagaaatatgagcccaccattggtgttgaagt

SEQ ID NO: 9544 - DNA, 245 bp, Zea mays
aagatttgatttttcctcatcatgagaatgagcttgcacaaagccgcgcactctatcctgagagcgaggtcaagtgctggatgcacaatggctttgttaacaaggatgataaaaaaatggcaaaatcagataataactttttcacgattagagatatcactgctctttaccatccaatggctttaagatttttcttgatgcgcacacattatagatcagatgttaaccattctgatcaagcgctt

SEQ ID NO: 9545 - DNA, 245 bp, Zea mays
cggacgcgtggcggacgcgtgggggcatcctggaaatgaggtggagtggcgtggccatcgacgactggtggaggaacgagcagttctgggtcatcggaggcatttcggcgcatctgttcgcggtgttccagggcctgctgaaggtgttcgccggcatcgacacgagcttcaccgtgacgtcgaaggccggggacgacgaggagttctcggagctgtacacgttcaagtggaccaccctgctgata

SEQ ID NO: 9546 - DNA, 238 bp, Zea mays
ggcatattatctatattgaggatgaacctgtcgaggctgagacactgaaccaagtgaagcatctgacaacattgtctttcactgaagtagaggagttaggcaagacatctagtgttgatgcaaggttaccttcaagctctgatactgcagttatcatgtatacaagcggaagtactggtcttcccaagggtgtaatgatcacacatggcaacatggtggccacaactgcagcagtcat

SEQ ID NO: 9547 - DNA, 238 bp, Zea mays
gctcttgagcctgagagtccatctcaccgtgtgctgctttctaatctatatgctttgtctggtaaaatgaaccatgttgagaaggtgagggatacaatgatcaagagaaggttgaagaagccaataggatatagcttgattgagattgctggtgttgctcatttgtttcgcatgggtgagaagtctcatcccaaaacttcagagatttaccaatatttggagaaactgatccaaaaga

SEQ ID NO: 9548 - DNA, 238 bp, Zea mays
agctcgacgagaagattgctgatgcagaggagaacttgggtgagagtgaagtgcgtgaggcccatctcgccaaatccttatatttcataagggttggggagaaggagaaagcactggagcagcttaaagttactgaaggaaaaactgtagctgttgggcaaaagatggaccttgttttctacacactacaaattggattgttctatatggactttgatctcatctcgaagtccattga

SEQ ID NO: 9549 - DNA, 234 bp, Zea mays
  unsure (1)..(234): unsure at all n locations
cggaccgtggnatctggtgagcatatcattgctggagctggtgagcttcatcttgagatttgcctgaaggatctgcaggaggacttcatgggtggtgctgaaactattgtttcccctcccgtcgtctccttccgtgaaacgttcttgagaagtcctgccgtactgtcatgagcaagtctcccaacaagcacaaccgtctgtacatggaagcgcgccccttggaggagggtctcg

SEQ ID NO: 9550 - DNA, 238 bp, Zea mays
cgttagactaggttaggctaggctagggtgtcgaccagctcgcggtaatggtggccttcaggttccatcagtaccaggtggtggggcgcgcgctgccgacgcccggcgacgagcaccccaagatctaccgcatgaagctctgggccaccaacgaagtccgcgccaagagcaagttctggtacttcctgaggaagttgaagaaggttaagaagagcaacggtcaggtcctggccatcaa

SEQ ID NO: 9551 - DNA, 236 bp, Zea mays
gcagcgatggcgatcaagcggaccaaggcggagaagaagatcgcgtacgacaagaagctgtgcagcctgctcgatgagtacaccaaggtgctcatcgccttcgccgacaacgtcggttccaagcagctccaggacatccgccggggcctcaggggcgactcggtggtgctcatggggaagaacacgctcatcaggcgctgcatcaaggtgtacgccgagaagaccggtaaccacac

SEQ ID NO: 9552 - DNA, 236 bp, Zea mays
ggctcattaaagaccagaataatcacaaggacctcgaggagggaattaaccgtctagttctttgctctggaaaggtgtactacgaactggatgaagaaagaaggaagacggagcgcactgatgttgctatatgtagagttgagcagctctgcccattcccctatgacctcatccagcgcgagttgaagagatatccaaatgctgagatcgtgtggtgccaggaggagccgatgaac

SEQ ID NO: 9553 - DNA, 237 bp, Zea mays
gatacagctcatggagctcggcggtaccgcaatgtcgctgctgctgctgctgctcgtgctcgccgcgtcgccattgcagcaggccagggcggttggcggcggcaggccgcgggtgccggccatcctggtgttcggcgactccatcgtggacacgggcaacaacaacgccgtcctcacgctcaccaagtccaacttcaggccatacggcaaggacctcaacggcggcgtccccaccgg

SEQ ID NO: 9554 - DNA, 239 bp, Zea mays
cgcgcttcgccctctcgctccatccgcttcacagcgccgccgctcgcctctccgaccgccgcgagaatgccgttcaagaggttcgtgtagatcgggcgcgtggccctggtgaactacggcaaagactatggccgcctcgtcgtcatcgtcgatgtggtcgaccagaacagggcacttgtggacgcccctgatatggtcaggtgccagattaacttcaaacggctctcacttactgacat

SEQ ID NO: 9555 - DNA, 138 bp, Zea mays
cgccggagctcgacaaggacgaccgacgacgcacgcggagatccggcgtactgcaaattttgaaaactgaactgtaagatggcatcagcagagctttcccgtgagggaaatgtgtacatggcgaactcgctgagcagg

SEQ ID NO: 9556 - DNA, 303 bp, Zea mays
catctcccaagacctcctcagacccgagaagcgcctgcggccatggacgccaccggcactggagctggagggaaggcgaagaagggagccgccggtcgcaaggccggcgggccgaggaagaagtcggtgacgaggtccgtgaaggccgggctccagttccccgtcggccgcatcgggcgctacctcaagaagggccgctacgcgcagccgtacggcagcggtgcccccgtctacctcgcggccgtcctggagtacctcgccgctgaggtcctggagctcggcggcaacggtgccaaggacaac

SEQ ID NO: 9557 - DNA, 302 bp, Zea mays
cgctcaagttctcgcgcccacagccaaatttttctccactcaatcgcggcataagctgcactgcaccatggacgccagcggaccggtagcaaggcgaagaagggggcggctgggcgcaaggctggcggccccaggaagaagtcggtgtcgcggtccgtcaaggccgggctgcagttccccgtcggccggatcgggcgctacctcaagaaggggcgggtaccgcaggcgtgggcaccggcgcccccgtctatctcgccgccgtgcttgagtacctcgccgccgaggtgctggagctggccggg

SEQ ID NO: 9558 - DNA, 135 bp, Zea mays
agcggcgcatccactggaatatatgaggccttgtagttgagggatggaggatctgattatcttggcaaaggtgttcttaaggctgtcagcaacgtaaacaacattattggaccagcgattgttggaaaagacccc

SEQ ID NO: 9559 - DNA, 299 bp, Zea mays
caaatatgccagatcagagagagttcttttccattataatggccatggcgtaccaaagcctacatctaatggtgagatttgggtgcttaacaagagttacacacagtatattccacttccaattactgatcttgattcatggctgaagacaccttcaatttacgtttttgattgctcagcgtctggaattattgtgaaagcttttctagagcgcctagattggagttctagctcctctgcatcttcacggaaggactgcattcttcttgctgcctgtgaagcacatcaaactcttcctc

SEQ ID NO: 9560 - DNA, 287 bp, Zea mays
aatgcttttaatttgcttgcaaaatatagcaagagccatcttgttttcaatgatgacatccagggcacagcatcagtggtccttgcaggtttgttagcagcactcaaggtggttggtgggaccttggcagagcacacttatttattccttggtgctggggaggctggaactggtattgcagaactcattgctcttgagatttcaaaacagacgtcggctccaattgaagagtgccgcaagaaagattggtttgtggactcaaagggtttgattgttgactctcgtaa

SEQ ID NO: 9561 - DNA, 302 bp, Zea mays
ccttcaagtgctccaacctgtttgggtgctgctcctgcaagcagtgcttcaagtgccagtcctcgtgctgcaagggggcgtcgtcctgctgcaaatgccagtcgtcgtgctgtgagggtgaagacggcagcagctgctgcgggaggccaatgctgcacttttccgaagccagcttgctctgggtgttcgtgcgggtgcgcttggtcctgcagaaagtgtacagaatggtgtcgatgttccgggtgccgcaatccgtgctgtgccactggatgcttgtgttgactgttgaggttgaactagac

SEQ ID NO: 9562 - DNA, 307 bp, Zea mays
cccacgcgtccgaaacgtcaaaaggctgcagaaacgaagctccaagagatcagagagagaaaagaaaggcgtggacgctcattgagagcagctgctttgtctgccccaattgaagctggagaggaagatgacctggagaatgatggggaggaagaaagagaggcctggttagctaccatctcattggctctctgcaaggcatttgatcttctcgacatgctaaagaaggaagaagaaatgcttcaagctgtaaaggaaaggaaggcaaaggatgggaaatgcattgctcgtgaaatgctcgatgaac

SEQ ID NO: 9563 - DNA, 298 bp, Zea mays
cggaccgtggtcgagaaggtgcaggacctgcttctgcttgacgtcactcctctctctctgggtctggagactgccggaggagtgatgaccgtcctacatcccgaggaacaccaccatccccaccaagaaggagcaggtgttctccacctactcggacaaccagcctggtgtgttgatccaggtgtacgagggtgagaggacccggacccgcgacaacaacctgcttgggaagttcgagctctccggcatcccaccggctcctcgtggtgtcccccagatcacggtctgcttcgacatc

SEQ ID NO: 9564 - DNA, 297 bp, Zea mays
  unsure (1)..(297): unsure at all n locations
cattgtccgtngagttgagaagccaggatccaaactccataagaaggaaacttgtgaggctgttaccatcattgaaacccctcctcttgtcattgttgggctcgtggcatatgtgaagactcctcgtgggctccgcacactcaactctgtttggggccaacatcttagtgaagaagtgaggagaaggttctacaagaactggtgcaagagcaagaagaaggctttcacaaagtatgctctcaaatatgagaatgatgctggcaagaaggaaattcagctgcagcttgagaagatgaa

SEQ ID NO: 9565 - DNA, 297 bp, Zea mays
cggacgcgtggctaggaaattcgtaacttgacattgttaacaccaagaagtggaaatgttcttattactggcctcactatggaactaaaagacaagaaccacctactggtgatgggacctagtggaagcgggaagacgtcactgttacgtgctttggctggcctctggactagtggcactggggagatcatataccacgtgagaggttctacgcagtttcaaaaaccaaatccaagttctgataaaccatccagcatgaatttaaagggcgaagaagaatcgttgcaaagttccaag

SEQ ID NO: 9566 - DNA, 286 bp, Zea mays
ccgtgctccgcaaccgctgagtgagtagaagagatggccggcaaaggcgatggccggctatcggcatcgatttcggcacgacgtactcttgcgtcggggtgttgcagcacgaccgcgtcgagatcattgcccaacgacaggggaaccgcaccacgccctcgtaacgtcgctttcacggctccgagcggctcatcggagatgcggccaagaaccaggtcgccaatgaacccatcaacacggtctttgatgcaagcgtctcatcggcaggaagttcagtgatgcgtct

SEQ ID NO: 9567 - DNA, 182 bp, Zea mays
acagagccttcaggagaatcaaggggctatggttttgtacagtttgagaaggatgaatctgcacagtctggtattgataaactcaatgggatgcttatcaatgacaagaaagtgtttgttggaccttttgttcgcaagcaggacaaggaaaatgtctcgagtaatatcaaatttagtaatgt

SEQ ID NO: 9568 - DNA, 296 bp, Zea mays
cccacgcgtccggaagaggaaagcactacttgcattgaaggctgaggagaggaaagttgaagttgacaaggatttgcagtctctgcagccactttcaaacaagaaagaaaatgatgaagttttcattaagctgggttctgacaaggataagaagaaggaaaatgctgagcgtgatgagcgtgccaagaagtcggtgagcatcaacgagttcctgaaacctgctgaaggagaaaggtactatggcggccgtggccgtggaaggggccgtggggagcgtggtggttttagaggcggat

SEQ ID NO: 9569 - DNA, 277 bp, Zea mays
acccgcaacctctatccctcgtctggtatcgtctcccacacccctctgccccaactcagaaaaaccctcgaaaagcggcggcggcgcgacatggcggaggtcgaggctccagctgctgcggttgcggcggcgacccctgaggtggcgacggtgaccgagggcggagcgctacggaagcgaagggtccgcacaagctgcaccgccagtggaccttctggtacgacatccagtccaagcccaaacccggcgctgcgtggggcacctgctcaaaaaggcg

SEQ ID NO: 9570 - DNA, 293 bp, Zea mays
ctcgccatcacataaaaccagtgcaagcagaagcagcgcaatggcgagcagcaccatggccctctcctccacagccttcgccggcaatgcagtgaacgtgccgtcgtctctcttcggcgaggcccgcgtgacgatgcgcaagacggcggcgaaggcaaagctcgcggcgagctccggcagcccgtggtacggccccgaccgcgggctctacctgggcccgctgtccggcgcgcccccgagctacctgactggcgagttcccgggcgactacggctgggacaccgctgggctgt

SEQ ID NO: 9571 - DNA, 290 bp, Zea mays
caaaaatgcaacttggtgtccaagttcttgtaactgatccaagggaacttgagaagattcgtcagagagaatctgacataacaaaggagcgaattgagaaaattctcaaggctggagctaatgttgtgttgaccaccaagggaattggacgatatgtccttgaagtactttgttgaggctggtgcgattgcagtaaggcgtgtgcgcaaggaagatttgcgacatgttgccaaagccactggtgcaactatggtgtctacttttgcggacatggaatgtgaagaaacatt

SEQ ID NO: 9572 - DNA, 294 bp, Zea mays
cccacgcgtccgggcgcaaatatggacagaagcatgtcaagggaagtgaaaatcctagaagttattacaagtgcactcatcctaattgtgaagttaaaaagctattagagcgttcgcttgatggtcagattactgaagttgtttataaagggcatcataatcatcccaagccccaaccaaatagaaggttagctgctggtgcagttccttcaagccaggctgaagaaagatacgatggtgtggcacctattgaagacaaaccttcaaatatttattccaacctctgtaaccaag

SEQ ID NO: 9573 - DNA, 296 bp, Zea mays
catccgcacctctctccatctccctgctcctccgcctccttcttgatccagccaagccagggatcgccatgtcggactcggaggagcaccacttcgaatcgaaggccgacgccggagcgtccaagacctacccgcagcaggctggcaccgtccgtaagaacggcttcatcgtcatcaagaaccgcccctgcaatgttgtggaggtttctacctcaaagactggtaagcatggccatgccaaatgccactttgttgccatagacatattcaacgggaaaaagcttgaagatattgtt

SEQ ID NO: 9574 - DNA, 290 bp, Zea mays
cccacgcgtccgcggaccgtgggggacttcctcgtgctgtgtctctgtctgtcgctctcgctctcagacgactgggacgccgccgcttggtgctgaggctttcgttggactcttcggcgacgacgagcacccaccagttctgtagaaatggctgatggtgaggacatccagcctcttgtctgcgacaatggcaccggaatggtcaaggctggttttgctggggacgatgcaccaagggcggttttccctagcattgttggccgtcctcgccacactggtgtcatggtagg

SEQ ID NO: 9575 - DNA, 298 bp, Zea mays
gatagtttgttacttttgagtagatatttgcctatcccttccgatgcccaataccagcagcattgcttgcattatgttggtattgggcatcggaagggataggcaaaaaggatatggttgtgcttccttataaggatagtttgttacttttgagtagatatttgcaacaacttgtcatgggatctcttggaaaagaattcgacctggatggcaaccgtgttaaacaagggctaactgtatatggtaacaaaggaagcactgaccagcatgcttacattcagcagctgagagaaggtgt

SEQ ID NO: 9576 - DNA, 293 bp, Zea mays
cggaccgtgggaaagatccatcgccatccaaggcacacttacccctgctacatgagtggcatttccgatctggcctcgatcgatacatatggattattggaatgatttatgcttacttccatcctaatgttgaaagatggatggagaagctggaagaatctgagactaaggttagattatcaatcaaggggaccattgtcactctttcattgacgggtggctttctgtggtatgaatatatatacaagctagacaaaggtacatacaacaagtaccatccctacacatcatgg

SEQ ID NO: 9577 - DNA, 285 bp, Zea mays
ccgtcatcgatctcgtttcaaatccatccatcctcgtttcctccgtcccgcagcatctcaaccccatggccaagatcaagatcgggatcaatgggttcggcaagatcggaaggctggtggcccagggtggccctgcagagtgacgatgtcgagctcgtcgccgtgaacgaccccttcatcagcaccgactacatgacctacatgttcaagtacgacactgtgcacggacaatggaagcacccatgaagtcaaggtgaagactcaaaaaccctctcctttgtgaga

SEQ ID NO: 9578 - DNA, 284 bp, Zea mays
cctttatcaatcaactacagacggcaagaagtttgttgactgcttgaaggatcagaatatcatgcctggcatcaaggttgacaagggtttggttccattgcctggactcaacaatgaatcatggtgccaaggtcttgatggtttggcttcaaggtgtgctgagtactataagcagggggcgcgcttcgcaaagtggaggactgttgttagcatcccttgtggtccatctgcattagcagtcaaggaagcagcatggggacttgctcgatatgctgctattgctc

SEQ ID NO: 9579 - DNA, 283 bp, Zea mays
gcagaagtatgataggatcagtgaaaagaaaatgctgacgccagttgaggtcctctgtaaatcatatccatcagagtttactgcatactttcattactgtagatcactacgattcgaagataaaccagattactcctatttgaagagactcttccgtgacttatttatccgcgatgggtaccaactagattatgtatttgactggaccattatgaaatatcctcagtttagagataaaagcaaaattcagtctagcggcaagattagtgggttggcaggccct

SEQ ID NO: 9580 - DNA, 286 bp, Zea mays
actaatctcgccttccgaggaaactcaccagcccaccacagacccgagcggaagaagccatgtccgggcgcggtaagggtggcaaggggctcggcaagggcggcgcgaagctcaccggaaggtgctgcgcgacaacatccagggcatcaccaagccggcgatccggcggctggcgaggaggggcggcgtcaagcgcatctcggggctcatctacgaggagacccgcggcgtgctcaagatcttcctcgagaacgtcatccgcgacgccgtcacctacactgagcac

SEQ ID NO: 9581 - DNA, 279 bp, Zea mays
tctatttccaaggcttccgtgttgtgcttccagtgagatcaaagaatgctcgtggccagcaaggctcatatccaattaagctgttctacacttcaaacatgcccatcattcttcactctgcgctgattaccaacctctattttatatcccagcttctctacaggaagtacagtggaaacttccttgttaaccttcttgggaagtggaaggagtctgaatactctggccattctattcctgttggtggtcttgcttactatgtaactgccccatcaagtt

SEQ ID NO: 9582 - DNA, 280 bp, Zea mays
cccacgcgtccgagggcacttacaaaggaaagaagtttaatgcaatctgtcacttctttggctaccaagctaggggagcactgccttcaaagtttgattgcgattatgcctacgttttggggcatgtgtgctaccacatcatagctgccggattgaacggttacatggctacggtgacaaatcttaagaatccagtgaacaagtggcgatgtggcgcgactcctatttcgtctatgatgactgtgaagcgatggtcgcgtggccctttagccacccaaat

SEQ ID NO: 9583 - DNA, 280 bp, Zea mays
cccacgcgtccggctcgacgtgttctactacagggaccccaatgagatggagaagaaaaccaagctatatgtgttcatctatattggcacaggcatatacgccgtcgttgcttatcttgtgcagcattacttcttcagcatcatgggagagaatcttacaaccagggtcaggcggatgatgttgtctgcaatacttaggaatgaagttggttggtttgacgaagaagaaaacaattcaagtctcgtggctgcgcatctagctgttgatgcagctgatgtg

SEQ ID NO: 9584 - DNA, 281 bp, Zea mays
tggaccggctgctttcctgtgagatggcacattgttaaagatataccgaatggttttttgcagcatatcacactgcagaataatgaaaacaagcctgtgacgcacagcagagatacacaggaaataccatacctccctggaatatctgtgatcaagatcttcaaagacatcaaagtgagggactgcctgtttgatgattttatgagatatgaggcagaagaggcgcaaatgaagccgcacagaagatgcaagctgagttacgatgctccagattttgtacc

SEQ ID NO: 9585 - DNA, 279 bp, Zea mays
gcgatggcggccgagacgagaagtgtcgatggaggccggggcctagcggaggccgttgggaatgttgatgccggagggcaggatgagagggatgcagattctagcggcggtgacgcttcggggaaggttttcgtagggggtgtagcctgggagacaactgaagaaacattcacaaagcattttcagaagtatggagctataactgattctgtgatcatgaaggacaagcatactaggatgcctcgtggatttggatttgttacattttccgatccgtct

SEQ ID NO: 9586 - DNA, 283 bp, Zea mays
gcagaagtatgataggatcagtgaaaagaaaatgctgacgccagttgaggtcctctgtaaatcatatccatcagagtttactgcatactttcattactgtagatcactacgattcgaagataaaccagattactcctatttgaagagactcttccgtgacttatttatccgcgaggggtaccaactagattatgtatttgactggaccattatgaaatatcctcagtttagagataaaagcaaaattcagtctagcggcaagattagtgggttggcaggccct

SEQ ID NO: 9587 - DNA, 273 bp, Zea mays
ggcgagcagtgtaacattttccttcagccatgggcaaggagaagactcacatcaacattgtggtcattggacatgtcgactctggcaagtcgaccaccactggccacctgatctacaagctcggcggtattgacaagcgtgtgattgagaggttcgagaaagaggccgcggagatgaacaagcggtcattcaagtatgcctgggtgcttgacaagctcaaggccgagcgtgagagaggtatcacaattgatattgctttgtggaagttcgaga

SEQ ID NO: 9588 - DNA, 277 bp, Zea mays
ccgcgacccagccgacgcgctcgctctgccgggcctcctcgtcctcccccagtcgttcggtgcgatctatctgggcgagaccttctgcagttacatcagcatcaacaatagctccagctttgaggccagggacgtcgtcatcaaggcagaaatacaaacagagagacagagaatacttcttctggatacatcaaaatcccctgttgagtcaattagatctgggggtagatatgatttcattgtggaacatgatgtcaaagaactaggagcacatacg

SEQ ID NO: 9589 - DNA, 275 bp, Zea mays
attttggcctatcagactttgtaaaaccagatgagaggctcaatgacatagttggaagtgcttattatgttgctccagaagttctgcatagatgctatagcacagaagctgatgtctggagcataggtgtaattgcatatatccttctttgtggcagtcgtccattttgggcacgcacggaatctggtatattccgctcggttctcaaagccgatcccagttaccatgaggcaccatggccttctctgactccggaagcaatggattttgtcaag

SEQ ID NO: 9590 - DNA, 275 bp, Zea mays
cccacgcgtccgaaagaattccctcccctagccgccgccgccgccgctcgtctccctgagaggtgccgggaccgaggaactggccgagtactaggtagagaatcggtttttcttgtctcagcccggggtctgctgcgtctggtggtggtgaaggggagaaattcgtgagatctgttccggatcaggcgtgcgagctcgggaatcaggggtttcacacatagcttcgtcgatttgaatttgatgtactaatggagtctaagggtggcaaaaagtct

SEQ ID NO: 9591 - DNA, 275 bp, Zea mays
tgatgagacacaaaggccatccctgaagaaagctttgcttcttggtgatgcattttcagatttaccaaaggtcgaaaaccatcaacctaacgatgtaatggagtatggtggttcccccaagacagagttccagcgctacattcgacttggtcgtaaagacatgttggattggtcgtttggtgaggaggctggtccagatgaaggcaagctcttggatcaccagcccttacggcttaacaatgatgattatgagcgggttaagcaaattcctgtca

SEQ ID NO: 9592 - DNA, 275 bp, Zea mays
gactgttgatggaccctcagccaaggactggagaggtggcagggctgccagctttaacatcattcccagcagcaccggtgctgccaaggctgtcggtaaggttcttcctcaattgaatggcaagctcactggcatgtccttccgggttcccaccgtggatgtgtcagttgttgacctcactgtcagaatcgagaagggggcctcttacgaggaaatcaagaaagctattaaggctgcttctgagggcccactcaagggtattatgggctacgtgg

SEQ ID NO: 9593 - DNA, 273 bp, Zea mays
gagtggtgctgtgcccatctttgtcaagctactcaactccctcagcgaggatgttcgtgaacaggctgtatgggctttaggtaatgttgctggtgactccccaaagtgccgtgatctggtacttggtcatggtgggctataccctttgctgcagcagcttaatgagcatgctaagctttcgatgcttaggaatgctacatggactctctccaacttctgtcgggggaagccacaaccaaactttgatcaggtcaaaccagcattgccagcact

SEQ ID NO: 9594 - DNA, 274 bp, Zea mays
gattggtatggatggtaaatcaaggtgctttggtttcatcaattttgagaatccagatgcagcttcccgtgctgttcaggaacttaatggtaagaagataaatgacaaagagtggtatgttggaagagctcagaagaagtcagaaagagagatggatctaaaaaggagatttgagcaaagcttgaaagatgctgctgacaaatatcaaggactgaacttatacctcaagaacttggatgatagcattggagatgatcaactttgtgaattgttc

SEQ ID NO: 9595 - DNA, 274 bp, Zea mays
gacaaatcttggtgaggcattggtgatgggttatgatgaaatggggtatgagctttggaagccttatttaagatcaatgatggaagctgatatgaaatcagttagcgtgggtactaagagtaaatcagaagtacttgagagttgtttgcagcagatgaaggcctgttttcttgacgcaagggtgaagaaagcaaaactccttgatgcaatggggacattctttgcaaggtctaataggcctataaatgaaactcaagatccagtagaggttgtg

SEQ ID NO: 9596 - DNA, 277 bp, Zea mays
ccgccgcaaggactcgcgacggacggagcaacggaggaagcaactacgcggcaccatggtgaacgttccgaaaaccaagaagacctactgtaagaacaaggaatgcaggaagcacaccctgcacaaggttacccagtacaagaaaggtaaggatagcctttcagctcaagggaagcgacgttatgaccgcaaacagtctggatatggtggtcagacaaagcctgttttccacaagaaggcaaaaacaacaaagaagattgtgctgaagctgcagtgc

SEQ ID NO: 9597 - DNA, 127 bp, Zea mays
atccggaagaaaacccctgctgcaaagaaggataatgctgagggacaagaggttgaggcagcagctgaggaaacgaaaaagagcaaccatgtcacgaggaagcttgagaagcgcaaggagggacgta

SEQ ID NO: 9598 - DNA, 289 bp, Zea mays
aacagaagagcggcggcgcggacggacaaggagcaggcggaagaggagttgtgccaaggcacaatgggtatctcgcgtgactcgatgcacaagcgccgagccaccggtggaaagcagaaggcctggaggaagaagcgaaagtatgagcttggtcgccagccagccaacaccaagttgtcaagcaataagacagttaggagggtccgtgttcgtggaggtaatgtgaaatggagggctcttcgccttgatactggtaactactcatggggaagtgaagctgttacccgca

SEQ ID NO: 9599 - DNA, 288 bp, Zea mays
cccacgcgtccgcccacgcgtccgttcaaagatgattcctgcatctgacaagggcaggttctttgccttcggtcgtgtcttctcagggaaggttgctactggtatgaaggttcggatcatgggtcccaactatgtccccgggcagaagaaggatctgtatgtcaagagtgtccagcgtactgttatctggatgggaaagaagcaagagtcggttgaggatgttccgtgtggtaacactgttgctatggttggtctggatcagttcatcacgaagaatgctacactcac

SEQ ID NO: 9600 - DNA, 283 bp, Zea mays
cgactttcacaacttatgagatattcccatatgatacgttcatcttctatacagtcctcacaagtgtcatcacattggatcgtgtatctctgaaacaaaaggtggtagatgcaccagaaatcctggctgtaattggcaaagtacctcacctctccgagtttctcaactccctgtacaactgccagtataagtcgttcttcgttgcattttctggtctgacagagcaaatcaagttagaccgttatcttcagcctcatttccgctactacatgagggaagtgcg

SEQ ID NO: 9601 - DNA, 274 bp, Zea mays
ccgtccactcatctttctcgttaaactctaaatttccccatcgcatcgacagcactgtacagcatggacgcacggaccggtagcaaggggaagaagggggcggccgggcgcaaggcaggcggccccaggaagaagtcggtgacgcggtccgtcaaggccgggctgcagttccccgtcggccggatcgggcgctacctcaagaagggccggtacgcgcagtcgtgggcactggcgcccccgtctacctcgccggcgttctggagtagctcgccgc

SEQ ID NO: 9602 - DNA, 121 bp, Zea mays
ggaaacagtatcttcatggtggaggagtgctctactatggcgagcctttttcacaacagcaatggtcgctgttgtgcttagggcattgatagacttctgtcaaagtggcaagtgtggtttg

SEQ ID NO: 9603 - DNA, 119 bp, Zea mays
gcagtaccttggaaatgttgcactcaaaataaatgttaaggttgggggaaggaatactgtacttttagatgctttgtcaaggagaatcccccttgtcagtgacagaccgaccataatat

SEQ ID NO: 9604 - DNA, 316 bp, Zea mays
cccatctcccaagacctcctcagacccgagaagcgcactgcgagccatggacgccaccggcactggagctggagggaaggcgaagaagggagcggccggtcgcaaggccggctggccgaggaagaagtcggtgacgaggtccgtgaaggccgggctcaagttccccgtcggccgcatcgggcgctacctcaagaagggccgctacgcgcagccgtcggcagcggtgcccccgtctacctcgcggccgtcctggagtacctcgccgctgaggtcctggagctcgccggcaacgctgccaaggacaacaagaagacgc

SEQ ID NO: 9605 - DNA, 309 bp, Zea mays
atttgcttggctgttgctgcgaaggtgatgaaaggttgcttgttgcagaatacatgcccaatgatacgctcgcgaaacatcttttccactgggagtcacaatcaatgaaatggaccatgagattaagggttgttctctgtcctgctgaggctttagaatattgcaccaacaggggccgtgctctctaccatgatttcaatgcctatagagctctgtctgatgatgattgtaaccctagactttcctgttttggcctcatgaataacagtcgtgatggaaaaagttatagcactaatttggaatttacgc

SEQ ID NO: 9606 - DNA, 314 bp, Zea mays
cccacgcgtccgcccacgcgtccggtctgtgttcaaagttacacacaggattttaacatctgagagggattggactacagttccagtagtggtacagttgatgatatttgagatgggaaatgtttcagcaccatggagtacgtcaggaactgtggcctaaggtgtctcgtgtactaaattcaattaaaagtgacatgcaaaataagaaccaagagttgatgaagcaaattgaaatttgccaggaggaaaataagatcttggataggctgcaccgccaaaaagttgcggaagtggaaaagctgagtcaaactgtg

SEQ ID NO: 9607 - DNA, 315 bp, Zea mays
gccttggcaatattggccttgttattcgatgataacggatgctttgactatggaaattattttgtcaaaagagatgttacaaagttggagatgaggaggaggctggtattcatctgtaaatttgctgtaaacgcacggccatctagaggaaacttgaaacaggtgtatggtttcctcagcagtcaaaaggaactgctgtcatgtttgacatagcttggtcttctgtgatgtagatgaggtatcagttctgatctgctgcttgagtgataggtgtggagtacgagctggggcttctgagtttgtctttcacacagt

SEQ ID NO: 9608 - DNA, 293 bp, Zea mays
gcaagtccaatcccgagcagaggtgcgactcgagcgctcgcgccggtgtccatttcaaagaggaagccgcggtagcactggtagcggcagcagtaaggggaagatgtcgtcggcgttcagcggcgatgagaccgccccctttcttcggcttccttggcgcctccgctgcgctcgtcttctcatgcatgggggcggcgtacgggacagccaagagtggcgttggcgtggcgtccatgggtgtcatgcgcccagagctcgtcatgaagtccatcgtgcccgtggtcatggctggt

SEQ ID NO: 9609 - DNA, 307 bp, Zea mays
gcggcccggaccccataagcctcaccaacctgtcgccgtggataaccacggtgggcgcgacaccatggaccgggacttcccggccacggtgacgctcggcaatggcgcaaacctcaccggggtttcactctacaaaggccggcgaggtctttcgtccaaggagcagtacccgttagtctacatgggcggcaactcgagcatccctgaccccaggtccctgtgcctggaggggacactccagccccacgaggtcgctgggaagattgtgatctgcgaccgcggcattagtcctcgggtgcagaagggt

SEQ ID NO: 9610 - DNA, 309 bp, Zea mays
  unsure (1)..(309): unsure at all n locations
cccacgcgtccgcaaaaacactattttgaagaaatatgatggcagcttcaaatttggttttccaaccagcttcatacacctcctggaaaatgtccttgaacctgccatcatatttcttcaaaatagtgtttttggtgctaagatacaatggccatttctattcataagcagtggccatagaagcgtcacaaaggcatggatggactcgtcagtgctgtacattgataaggcaactcctccggcaccagtgaagttngccacctccagctcaacttgctcttcttttccctcaaaaactaatttaagctt

SEQ ID NO: 9611 - DNA, 314 bp, Zea mays
cggacgctgggccgcaagaatcttgtcaagaagtgcgttgagctgttttttgagattgcggagaacaaggaggactacaacaagttctatgaggccttctccaagaacctcaagcttggcatccacgaggactccacgaacaggaccaagattgctgagctcctgaggtaccactcgaccaagagcggggatgagctgaccagcctcaaggattatgtgaccaggatgaaggagggccagaacgacatcttctacatcactggtgagagcaagaaggctgtggagaactccccgttccttgagaagctgaagaa

SEQ ID NO: 9612 - DNA, 315 bp, Zea mays
cccacgcgtccgtctggtaccaatgagtgatatagagatggttctaccaatcacggttggaggttacacggacttcttttgttctgtgcaccatgcaatgaattgtggattcatcttccgagggccgcagactccagtcaatccaaattggttttatcttccagtaggatacaatgggcgagcatcatctatagttgtgtctggaaccaatgtcattaggcccaggggacaaggacatccaacaggaaactccgctccttattttggtccctcgcagaagcttgattttgagcttgagatggctgccattgttgg

SEQ ID NO: 9613 - DNA, 300 bp, Zea mays
cggacgcgtccgcccacgcgtccgcggaacgcacacaccgcccgtccccgatctccgatcccctcgtcgatccaaagatgcagatcttcgtcaagaccctcactcgaaagactatcaccctcgaggtagagtcttctgacaccattgacaacgtcaaggccaatgtccaggacaaggagggcatccccccggaccagcagcggctcatctttgctggcaagcagctcgaggacgggcgcacacttgccgactacaacatccagaaggagagcaccctccaccttgttctccgcctcaggg

SEQ ID NO: 9614 - DNA, 297 bp, Zea mays
cacacactcgggtaaagctatctcgagctagctagctgctgtaaccgttgccatggccaaaatggtgttgctctgcgtgctcgtctccttcctcctgatgcccttggcctccctagccctgacgcaggacttctgcgtcgccgacctgacctgcagcgacacgccggcggggtacccgtgcaagtccagcgtcaccgccaacgacttctacttccacggcctggccggccagggcaaaataaacccactcatcaaggccgccgtgaccccggccttcgtgggccagttcccgggcgt

SEQ ID NO: 9615 - DNA, 99 bp, Zea mays
cggaccgtggccagaacagaggatgcttcagtgaacttattgctctcatggagagtggtcctggacttgaacgtgcacacatgggtatcttcacagaat

SEQ ID NO: 9616 - DNA, 305 bp, Zea mays
atttcatcataaagaacgggggcatcgataccgaagatgactacccttacagagccgtggacgggaagtgcgacatgaacaggaaaaatgccagggttgtgagcatcgatggctttgaagatgtgcctgagaacgacgagaagtcgctgcagaaggcggttgctcaccagccagttagcgttgccattgaggccggtggccgggagttccagctctacaaatcgggtgtcttcagcggaagctgcaccacgaaccttgaccatggtgtcgtcgcggtcggctacggcgccgagaacgggaaggac

SEQ ID NO: 9617 - DNA, 262 bp, Zea mays
aacagcattgatcctgctcttcgaagatttggaaggtttgatcgggaaattgacattggagttcctgatgaagttggccgtctcgaggttctccgcattcacactaagaacatgaaactagctgaagatgttaatttggaactcatttcaaaagatacccatggatatgttggtgctgatcttgctgccctttgcactgaggctgctcttcagtgcattcgtgagaagatggacatcatagatcttgaggatgagacaatcg

SEQ ID NO: 9618 - DNA, 264 bp, Zea mays
ggtgctccgtctcaggggtggtatgcagatctttgtgaagacactcactggcaagacaatcacccttgaggtggagtcttcggataccattgacaatgtcaaggccaagatccaggacaaggagggcatcccacccgaccagcagcgcctcatcttcgccggcaagcagctggaggatggccgcaccctggcggattacaacatccagaaggagagcactctccacctggtgctccgcctcaggggtggcatgcagatttttgt

SEQ ID NO: 9619 - DNA, 257 bp, Zea mays
gaagaatacaattcttctggaatatagcgaagaatgcagttgggctcacatctttgtgaggcagtcaaatttcaagttacgtgctgatctgtccactccttttatcatgattggtcctgagacagggttggctcctttcagaggcttcttgcaggaaaggttagcattgaaacaatctggggcagaactgggcacttcaatccttttctttggatgcaggaaccgtaatatggactacatatatgaagatgagttgc

SEQ ID NO: 9620 - DNA, 263 bp, Zea mays
gcaggatggaactccatggcctgggaaataatgtccgtgatcatcctggaatgattcaggttttccttggtcaaagtggtggccatgatgtggaaggaaatgagctgcctcgattggtttatgtttcaagagaaaaacggccaggctacaaccatcacaagaaggctggtgctatgaatgcattggtccgagtctctgctgtactaactaatgctccttatttgctgaacttggattgtgatcactatatcaataatagtaag

SEQ ID NO: 9621 - DNA, 259 bp, Zea mays
gaggaggcgcacattcttccccgttggagcagctaaggagctgtacttcaacaaggatgggtcagctatcaagaagctccagactggagtcaataagcttgcagacctagttggagttacactcggaccgaaggacaggaatgtcgttttggagagcaagtacggctctcccaagattgttaacgatggcgttacagttgcaagagaggttgagctggaggaccctgtggaaaacattggagctaaattggtcaggcaa

SEQ ID NO: 9622 - DNA, 260 bp, Zea mays
cccacgcgtccgcccacgcgtccggggaccaagaagcagaaatatgacaaaatcagcgagaaaaagatgctcactcccgtggaggtactctgcaaatcgtatccatcagaatttatctcctatttccactactgccgttcattgcggtttgaagacaagcctgattactcttacctgaagagactattccgcgatctctttattcgggaaggataccagtttgactatgggttcgactggaccattctgaagtatcctca

SEQ ID NO: 9623 - DNA, 74 bp, Zea mays
attttttagcagacaaattatcgtgtgtaatcgacaatgatatctccttaaattttaagtacctgtgttgtgtc

SEQ ID NO: 9624 - DNA, 262 bp, Zea mays
cccgctcttcgagaagaggccgaagcagtttgggatcagcggcgcccttccgcccaagaaggacctccaccgcttcgtcaagtggcccaaggtcgtgcgcatccagcgccagcgccgcatcctcaagcagcgcctcaaggtgcccccggcgctcaaccagttcacacgtaccctcgacaagaaccttgcaacaaacttgttcaagatgcttcttaagtaccgccccgaggacaaagctgccaagaaggagaggctcttgaag

SEQ ID NO: 9625 - DNA, 257 bp, Zea mays
gctgaattcaatgaagatgacttgtgcaaattgcttccatatgtcagtcgtcgtcgtcagaacctgaactttgtcgattgcttgggttgtcgcagaaaatgccaggtgtcattgaagttctggtggaaagtggaagacctattgatgcaattaatttggcttatgtgtttgagcttactgaacaatttgaaccagtacaccttcttaaagcatatctaagggatgttaagaaaatgtcacacgccaggaatgtcaaa

SEQ ID NO: 9626 - DNA, 253 bp, Zea mays
aagagcttggtgctgatgaaagctcactgttgaattgtgtcccaaaagaggactttggaggtggtcatccggatcctaacctcacctatgcaaaagagttggttgaacggatgggtcttggaaagtcatcctcaaatgttgaacctcctgaatttggtgctgcagctgatggagatgctgaccgcaacatgattctgggtaaaagattctttgtgacaccatcggactctgttgccattatagcggccaatgc

SEQ ID NO: 9627 - DNA, 253 bp, Zea mays
ggcatggaaagagatggagaacctcactgcccgactttgctgggagtttgtgaagaaagagggatacatcgctatgtggaggaaacccttaaataactcttgctacattaaccgaggtcctgaaggaaaacctccactttgtgatgctgatgataacccggatgatgtctggtatgttggtctgaaagcatgtattagtcggcttccagagaatggcgaacgaccaactcctgttcaatggcctgcacgctta

SEQ ID NO: 9628 - DNA, 253 bp, Zea mays
cggacgcgtgggaaaacctagctcctcaagctccagacgcagtcgaccgccgcagaccgggagtagtcgacgcgccgtcactgaatcctcagatcacggctagcactaatcacgccactctgctgactcccggcgagcagtgtaacattttccttcagccatgggcaaggagaagactcacatcaacattgtggtcattggacatgtcgactctggcaagtcgaccaccactggccacctgatctacaagctc

SEQ ID NO: 9629 - DNA, 253 bp, Zea mays
cccacgcgtccggttaaagatggggaaatggttaatgttaatcttgattggagggaggctgttccacatccagatgaccgtgttgagtatgagttatggacaaacagcaatgatgaatgcgggcctaaatgtgatatgctgatgaattttcttaaggaatttaaaggagctgcccaactacttgagaaaggtggctatagccaattcacgccccattacattacttggtactgtcctcaagcatttgtgatca

SEQ ID NO: 9630 - DNA, 250 bp, Zea mays
cccacgcgtccgcttgattatgtatttgattggactgtgtcaaggcaagctgtggacaataacagattgcgactgagcgggaagacaggtggcttggtgggaccatctgtggatagggctgaacgagctgcagcaagacaagatgttccagatagattcactggtcaagctggtgcttttgctagaagaaccggctctggttctggtcaatacggagaacacacaaagcacaggactctgttggattcac

SEQ ID NO: 9631 - DNA, 255 bp, Zea mays
accttcctcgccgcctcactccctctgaggtcgcagatccgtccggttagacgaagccgcccgcacccatggcctccggtgagctcgcctgcacctacgccgccctcatcctcagcgacgacggcatcgccatcaccgtgcgttctctcacgctgcagtgttcttttaatctcagagttttcttttttttgagcggtcgcgtggttatgtggggggtgtttcttgtttgcaggccgagaagatcgccaccatcgt

SEQ ID NO: 9632 - DNA, 280 bp, Zea mays
gacagaaatgactactatggaggagattccacctcactcaaccttaatcagctctggaagaggtttagaggggaagacaagcccccagcacatctaggtgcaagcagagactacaatgtggacatggtgccaaagtttatgatggcaaatgggacattggttcgaaccctcattcacaccgacgtgacaaagtagttgtcattcaaagctgttgatgggagctatgttttcagcaaagggaagatttacaaggtccctgccagtgatatggaggctctga

SEQ ID NO: 9633 - DNA, 177 bp, Zea mays
aggaaatcctcaccccgtgtgaccaatgaagaagtccagaaggctgctgctgctctcaagggctctgaccaccgccgtgcgaccaacgttagtgctagattggatgcccagcagaagaagcttaacctccccatccttcccaccactacaatcggttcgttcccacaaaccgttgag

SEQ ID NO: 9634 - DNA, 113 bp, Zea mays
ggactggcacctaccgccagctcttccaccctgagcagctcatcagtgggaaggaggatgccgccaacaactttgcccgtggtcactacaccattggcaaggagattgttgac

SEQ ID NO: 9635 - DNA, 276 bp, Zea mays
cttggacactctgaaaggagagctctgctgggagaatcaaatgaatttgttggagacaaggttgcgtatgccctgtctcagggactaaaggtcattgcatgtgttggtgagacccttgagcagagggaggctgggtctaccatggatgttgttgctgcacaaacaaaagcaattgctgagaagatcaaggactggagcaacgtagttgttgcctatgaaccagtttgggctattggaactggtaaagttgccaccccagctcaggctcaggaagtg

SEQ ID NO: 9636 - DNA, 189 bp, Zea mays
ccagccacccggactggagccccgcgaagatcaagtccgcgctgatgaccaccgcgtacgtccacgacaacacgtaccggtcgctgaaggacgcggccaccggcaaggcgtccacgccgttcgatcacggagctgggcacatacacccgctgcgtgccctcaaccctggcctggtctacgacatcggcc

SEQ ID NO: 9637 - DNA, 240 bp, Zea mays
tggatccagcgaggcggcgaccctccctcctccccttgcttcgctcgtccagccctgaccacccgcatccccgtcagtcatggcagcggcagcaggcggaggcgcggtgcgtgcgctgtcccagaaggagcaggacatacagatgatgctcgccgccgacgtccaccttggcaccaagaactgcgatttccagatggagcgctatgcctttaagcgccgcaccgacggcatctacatcat

SEQ ID NO: 9638 - DNA, 164 bp, Zea mays
cccacgcgtccgcgccgtcgcctccgcctccgctgccgccgcgcaggtcagggtcatgtcgatcttcgagtacaacgggagcgccgtggtggcgatggtggggaagaaatgcttcgcgatcgccagcgaccgccgcctcggcgtgcagctgcagacgatcggca

SEQ ID NO: 9639 - DNA, 276 bp, Zea mays
gcctctctgccttcctgcctgcttccctccctccgtcagatccccgctcgggttgccatggcggaccagctcaccgacgaacagatcgccgagttcaaggaggccttcagcctcttcgacaaggacggcgacggctgcatcaccaccaaggaacttggcactgtgatgcgctcattggggcagaaccctactgaggctgagcttcaggacatgatcaatgaggttgatgctgatcgcaatggaaccatcgactttcctgagtttctcaacctgatg

SEQ ID NO: 9640 - DNA, 230 bp, Zea mays
acggcatttaatttcccttgtgctgtgcttggttggaatgcttgcattgctttggtctgtggaaattgtgtcgtctggaaaggtgctccaacaactccactgatcactattgcaatgacaaaaatagtggctagtgtattggagaagaacaacttaccaggcgcaatttttacatctttttgtgggggcactgaaattggtcaagcaattggccttgacattaggatacc

SEQ ID NO: 9641 - DNA, 273 bp, Zea mays
cgtcgccttctgcatcaccagccccccgccatggccggagcatcttgctagggttccagcatttcgtcgtcatgctgggcaccaccgtcatcatacccagcgcgctcgttcctcagatgggaggcggaaatgaagagaaggctcgggtggttcagaccatactgttcgttgctggcataaacaccctgttccagacgttattcgggacgcgccttccggtcgtgatgggcggctcgtacgtcttcgtcgggccgaccatctcgatcgtcttgg

SEQ ID NO: 9642 - DNA, 271 bp, Zea mays
cccacgcgtccggggagttgctgcagatctcagccactgcaacacgcctgctcaggttcttgacttcactggaccctcagagttagccaactgcttgaaaggtgtggatgtcgttgtcatccctgccggggtcccaaggaagcctgggatgactcgcgatgacctttttaacatcaacgcaagcatcgtcaagacacttgttgaggctgttgcagacagttgcccagaggcgttcatccatatcatcagcaacccggtgaattccacggtg

SEQ ID NO: 9643 - DNA, 271 bp, Zea mays
cccacgcgtccgcggaccgtggggctcctgctcgtgttggtctggttgctccagttgatgttgttgtgccccctggcaacactgggctggatccgtcccagacctctttcttacaggtgcttaacatccccaccaagattaacaagggtaccgtggaaattatcacccctgtggagctgatcaagaagggtgaaaaggtgggctcgtccgagtctgccctgctcgccaagctgggtatccgcccttctcgtacggcctccaggtcaccagt

SEQ ID NO: 9644 - DNA, 263 bp, Zea mays
gtccaagtccaccatcggcgtcgagttcgccacccgcagtctccaggtcgacggcaaggtcatcaaggcccagatttgggacaccgccggccaggagaggtaccgtgcaatcacaagtgcctattaccgaggagccgtaggggcagtgctcgtctacgatgtcacccgtcgcgccacgttcgacaacgtgggccgttggctgatggagctcagagaccacaccgaccagagcatcgtcgtgatgctggtcggcaacaagtccg

SEQ ID NO: 9645 - DNA, 280 bp, Zea mays
atcagcccacgcgtccgcggtacgcgtgggcttactggttatcggagcaaaccattggaaggaaaacaaacttcaaccagattcttgaatatgtcaaggaaataaggggtatgagcatgcaggtctgttgcacactacggcatgatagagaaacaacaagctgaagaactcaagaaggctggacttacagcatataatcataacctagatacatcaagagagtattaccccaacattattaccacacgatcatatgatgataggctgcagactcttcagc

SEQ ID NO: 9646 - DNA, 264 bp, Zea mays
ccgagtacaaggagaccgtggagcggcgctactacacgctcaccggggatgtccccgatgaggaggtgatcgagcgcatcatctccgacggccgcggcgaggagctcctgggcgccgctgtcgcggacacggcaagggctccgtgctcgccgcggtgcacgagatccaggaccgccgtgacgcggccgcgatgtggaacgcagcctcctggagctccaccaagtgttcctcgacatggccgtcatggtggagacgcagggggag

SEQ ID NO: 9647 - DNA, 269 bp, Zea mays
gactgcgaagaagtcgcgcgtcaagtgcttcatcaagctcgtcaacttcactcacctcatgcccacccgctacaccctcgacgtcgatttcaaggatgtcgccaccggtgggcccgacgcactctctacccacgacaagaaggtcgccgcctgcaagacggccaaagcgcgccttgaggagaggttcaagaccggcaagaacaggtggttctttaccaagctccgcttctagatgctcggcctcccgaatagtcctgctttaggtgtcg

SEQ ID NO: 9648 - DNA, 265 bp, Zea mays
ggcaagaggtggggttagaatcaaaagaaggccacaccgaggggataacttcaccctgatgcaggcattggtgaaggctgatttttggcttatttggctatcacttttgcttgggtcgggatcagggctgacagtgattgataacctgggtcagatgagccaggctattggttataaaaatgcacatatctttgtgtcactggtgagcatatggaactttcttggtcgtgttggaggtggctacttctctgagatcattgtcagg

SEQ ID NO: 9649 - DNA, 269 bp, Zea mays
cggacgcgtggtgtcgaggagggtaaacactatctggatataatggtgagcaagtacaggttaaaaccatggcaggagcactatgcctgtgtggttgatatcctacagacgctcaggccagacggaggaggcttacgagttcatcaagactatgcctatggacccaaaatcagctgtgtggtgtgcgctgctcggcgcatgccgtgtccacaggaactatggcctcgccgtggttgcagccaataagcttctcgagctggaacctgaca

SEQ ID NO: 9650 - DNA, 300 bp, Zea mays
cccacgcgtccggtggatcctctttcccaccaagtcaaggtttgtgacttcgggagtgctaaaatcttgattaaaggtgaagctaatatatcatatatatgctcacgctattatcgtgctcctgagctcatatttggtgcaactgaatacacaacatctattgatatatggtcagctggatgtgttcttgctgagcttcttcttagtcaaccattatttcctggggaaagtgctgtggaccagctggttgagattatcaaggttttgggcaccccaacacgagaggaaattcgttgtatg

SEQ ID NO: 9651 - DNA, 289 bp, Zea mays
tgacaagctctgtgaccaggtctcagatgccgttcttgacgcttgccttgctgaggaccctgacagcaaggttgcttgtgagacctgcaccaagaccaacatggtcatggtctttggtgagatcaccaccaaggccaatgttgactacgagaagattgtcagggagacctgccgcaacattggttttgtgtcaaacgatgttgggcttgacgccgaccactgcaaggtgctcgtgaacattgagcagcagtcccctgatattgctcagggtgtgcatggccacttcacc

SEQ ID NO: 9652 - DNA, 131 bp, Zea mays
cggacgcgtgggtgaagttggaaggctaaatgtcgtcggtggtgctgagattggtccccatagatgttggccaggtggtttatgcctctcaagatcgattggatgtcaggatgtaggtgaatttattattc

SEQ ID NO: 9653 - DNA, 146 bp, Zea mays
cagaaatttaatggaaaagtggtagaggttgtaagtggggattgcattattgtggctgatgattctgctccatatggaagtccttcagctgaacgtcgggttaatctgtcaagcattagggctcctaagttgggcaatgctcgtac

SEQ ID NO: 9654 - DNA, 305 bp, Zea mays
gagcgtcccaacgagggtgctgttgttgaagtcaaaattatcggaaagcttcaggatggcgcggtgtttacaaagaaggggcatgacgaagagccatttaaattcaagaccgatgaagaggaagttattgccggtcttgatcgtgctgtgttgaacatgaagaagggcgaggttgctcttgtcacaattcctcctgaatatgcatttggttcaactgagtcaaagcaggatcttgctgttgttccacctaacagcacagtaatatatgaacgtgagcttatttcatttgtgaaggaccaggagtc

SEQ ID NO: 9655 - DNA, 178 bp, Zea mays
ggcggcttcttcaagctcaaccccaaggagggcctcgccatcgtcaacggcacgtctgtcggctccgcgctcgcggccaccgtgatgtacgacgccaacgtcctggtcgtcctgtcggaggtcctgtccgccgtcttctgtgaggtcatgaacggcaagcccgagtacacggaccacc

SEQ ID NO: 9656 - DNA, 220 bp, Zea mays
cgagaccgtgggtagcgtctgaaatggctgctgccctggctgcagcttccatagtgttcaaggacagcaaaacctactccgacaagctcgtcaaaggcgcaaaacccctgtacaagttcggaaggctgcagcgcgggcgatacagccccaatggatctgaccaggcaatcttctacaattccaccagctactgggacgagtttgtgtggggttgtgcgtg

SEQ ID NO: 9657 - DNA, 307 bp, Zea mays
gtacttgtcagtgattgctatactgacactctttctggatgtcatgtcgagcagagggtgttcaaagatctcctggctaagaagtgtccaaggattgctgctcaccttgaagcaatggggtttgatgtttcacttgttgctacagaatggtttttgtgcctcttctcaaagagcctgccttcagagacaacacttcgggtatgggatatattattcaatgaaggagccaatgttttgttccgtgttgctctcgcaattttcaagatgcgagaagatgatctactgcgcatccaacatatcggtgatg

SEQ ID NO: 9658 - DNA, 299 bp, Zea mays
tgcgcgggcttccgcgccgtcgtcatcgacaacctcaacaactcctccgagctggccgtccgccgcgtcgccgcgctcgcgggggaccactcccgcaacctctctttccacaagattgatctccgtgacaagggagcactggaaatggtttttgcttctacaagatttgaagctgtcattcacttcgctggattgaaagctgtgggtgaaagcgtacagaagccattactttattatgacaacaacgtcattggcacgataaatcttctagaagttatgtctgttcacggttgcaagaa

SEQ ID NO: 9659 - DNA, 296 bp, Zea mays
tttcccgtccggtctttccgttacccggcggcttaaaccctagttcccattccatcttcgtttccgctccgccgccgtcgatggagttctggggtctcgaggtcaaacctggatccactgtcaagtgtgagcctggacatggctttatcctgcacgtttcccaggctgcccttggggaatcaaagaaaagtgacagtgccttaatgtatgtcaaagttgatgacaagaagcttgccattggaacgctctctatcgacaaatacccacagatacaattcgatttggttttcaataaa

SEQ ID NO: 9660 - DNA, 299 bp, Zea mays
aggatggttaaccactttgtccaggagttcaagagaaagaacaagaaggatatcactggcaacccgagggctctccggaggctgaggacctcttgtgagagggccaagagaactctgtcttccactgcccagaccaccattgagattgactcgctgtacgagggcattgacttctactccaccatcacccgtgccaggtttgaggagctcaacatggacctgttcaggaagtgcatggagcctgttgagaagtgcctgagggatgccaagatggacaagagcagcgtccatgatgttgt

SEQ ID NO: 9661 - DNA, 175 bp, Zea mays
gcggaaagttcaggagatgaatgaggaaatgaaaactcttgatcgtgagctagctcgtgcaaaggtttcagcaaatagggttgcagtagtggtggcaaatgagtggaaagatggcgatgataaagtaatgcctgttaaacgatggctcgaggagcgaaggattctgcaaggagaa

SEQ ID NO: 9662 - DNA, 289 bp, Zea mays
ggttgtaagagaaaagcttctttctcatcatcctcgtgcagaagaaaagattggttgtgggcttgatggtataatggttgacaggcacactgagttcaagtcaagatgtctctttgtcgttagaacaaatggcgattgggaggatttctcataccacaagtgtctccgggcataccttcaaaagaagtatccatcctattcagacaagtttctgaagaagcatcttgttaacaagagctccaatcttttccgtgttcagaagaaggccatggtggatcctttgcctgct

SEQ ID NO: 9663 - DNA, 282 bp, Zea mays
cgagaacgcacccgcccgcctcctccttccgtccccatccagatgatgcttagggtttccgcgtctccggccgccgcggtggccaaccagctctctggtggggccgcggccccggctcctgccagggtgacggcgcacgcagcgacgtctcgctgtccgccgccgccgccggcaaggggaaggaggtgctcagcggggtggtgttccagcccttcgaggagatcaagggggagctcgccctcgtgccccagtcccccgacaggtcgctcgcgcgccacaagt

SEQ ID NO: 9664 - DNA, 294 bp, Zea mays
tgcaaaaggagttaggaggataacagccgtgactgctggatgtgccacccaggctatggagttggcgtcatctatcgattctgatatcaataaagcatctcagttggagggagctttgttggaaaagaaaattgcttccatcaagagtgggctggatgcagctgctatccctgctgcgagaaaagctgatttgagaggcaaggtttcaaagttagaggacgaacttaggaaggcaaagaagaaaatgggggagcaaaatatacaaaaggctgtgaagtccgcaatggatgctgc

SEQ ID NO: 9665 - DNA, 105 bp, Zea mays
tggtgttcgtagtgttaggagttgcattttctaatctgcttgttcttgcaccggtgcctctgaagtggcgtttccctctatcttaatggaaatggaatgtgcttt

SEQ ID NO: 9666 - DNA, 283 bp, Zea mays
gatttttgtcggaggcgttgcttgggagacaactgaagaatcattctccaagcattttgagaagtatggggcaataactgattctgtaattatgaaggacaagcatactaagatagctcgtggaattggatttgttacattttctgatccatctgttatagacaaggttttggaggatgatcacgttatagatggcagaacggttgaagttaagaggactgtcccgagggaagagatgatcaccaaagacggccctaagacaagaaagatcttcatcggtggg

SEQ ID NO: 9667 - DNA, 284 bp, Zea mays
  unsure (1)..(284): unsure at all n locations
cccacgagagccgncanacgtcgtccgcgagacgcgtgggcagaccgtggcgcaaatgattacagatgaggaaaagtctgttttccgtacgattggtttacggcttaagcgatatttgccacttggagttcgtggtgtttttgatggtgtaattgaaaatatgcacttgcattggaagcacagggaagttgttaaactaatttcaaagcagaagaccttgtcattcgttgaagagacggcacggcttcttgcatatgagagtggtggtatactagttgcaattg

SEQ ID NO: 9668 - DNA, 282 bp, Zea mays
gttctctcctcctggagcgcctgtctgttgactatggcaagaagtccaagctcggtttcaccgtgtacccatccccccaggtgtccacatccgtggttgagccatacaacagtgtcctgtccacccactctctcctcgagcacactgatgttgctgtcctgctcgacaatgaggccatctatgacatctgccgccgctcccttgacattgagcgcccaacctacaccaacctcaacaggcttgtctcccaggtcatctcatccctgacggcttccctgaggt

SEQ ID NO: 9669 - DNA, 278 bp, Zea mays
gtctcctcttcgcacgagcgcaacaccatccacccaccagttcgaagcggaggcgaccggcaacctgcggcggagatgtcagcagggcaaggggcaagggctcgggaagggcggcgcgaagtcaccggaaggtgctgcgcgacaacatccaggggatcacgaagccggcgatccggaggctggcgaggaggggtggcgtgaagcgcatctccgggctgatctacgaggagacccgcggcgtgctcaagatctttctcgagaatgtcatccgcgacgct

SEQ ID NO: 9670 - DNA, 228 bp, Zea mays
actcgagaactccatttcgatctcatttgaaatcaacccatcctcgtttcctccgtctagcagcctctcaccctcatggccaagatcaagatcgggatcaatgggtttggcaggatcggaaggctggtggctagggtggccctgcagagcgacgacgtcgagctcgtcgccgtgaacgaccccttcaatcagcacgattaaatgacctacatgttccagtaatgcact

SEQ ID NO: 9671 - DNA, 278 bp, Zea mays
aaatcgtaagctctataatcaagtacaagatcttaaaggtagcattagagtttactgcagagtgaaacctttcccaaaggcacaatctgatcaaaggtctactgttgatcatattggggaaaacggagaaatcctgattgcgaatcctcaaaagcaagggaaggatggacggaaaatattcacattcaacaaaatatttggacctagtacttcacaatctgaagtttttgctgatacccaaccattaattagatctgtcaaggatggatataatgtat

SEQ ID NO: 9672 - DNA, 280 bp, Zea mays
gcgaaggcgaccctccctccttcgctccttccgcgccgcctcccggccgtcgccgccatggtgaagtactcgcaggagccgggcaaccctaccaagtcggctaaggccatgggcagggatctgagggtccacttcaagaacacaagggagacagcctttgcgcttcgcaagttgtctttgaccaaggctaagcgataccttgaggatgttattgctcacaagcaggcaattcccttccggagatactgtgggggtgttggtcgcaccgcgcaagctaagt

SEQ ID NO: 9673 - DNA, 276 bp, Zea mays
cattggtgtggaagttcatccgttggatttcaccactaactgtggtaagatcaggttctactgctgggataccgcaggcaagagaagtttggtggcctcagggatggatactatatccatggccagtgtgcgatcatcatgtttgatgtaacttcaaggcttacttacaagaatgttcctacgtggcatagggacctgtgcagggtctgtgaaaacatccccattgtcctctgcggtaataaggttgatgtgaagaacaggcaggtcaaagccaag

SEQ ID NO: 9674 - DNA, 271 bp, Zea mays
  unsure (1)..(271): unsure at all n locations
ccgcaatgggttcacattccttgaccttattgtgattcaaattgagtccctgaacaagaagtaggatgcaagtcctttacttctgatgaactctttcaacacccatgatgacacacagaagattgttgagaagtattccaactccaacatcgaaattcatactttcaatcagagccagtatcctcgcattgttaccgaggacttcttgccacttcccagcaaagggaaatctgnggaggatggctggtatcctcctggtcatggtgatgtg

SEQ ID NO: 9675 - DNA, 272 bp, Zea mays
gggctgaggcatatgggaccagcctttcatgttcttgatgccaatcgcccttggctatgctactggatggttcatccacttgctttgctggatgaagcacttgatgatgatcttgagaatgatatcatagacttcttagctcgatgtcaggataaagatggtggatatagtggtggacctggacagttgcctcacctagctacgacttatgctgctgtaaatacacttgtgacaatagggagcgaaagagcattgtcatcaatcaatagggg

SEQ ID NO: 9676 - DNA, 277 bp, Zea mays
cagatatctgtgggtacagcaccaagaaggttcacactatcctgaccaaggatggcaagaaccacttgatcaagaaggatgtgccttgtgagactgatcagttgactcatgtttacactttgatcatccgtcctgatgcaacatacagcattctcattgataatgaagataagcaaactggcagcatctacgagcactgggataatcttcccctaagaaaatcaaggacccagaggctaagaagcctgaggactgggatgacaaggagtacattcct

SEQ ID NO: 9677 - DNA, 277 bp, Zea mays
gtggagcagccccaggacgcggtgaagctcttcaaccgctggaccttcgacgatgtccaggtgaacgatatctcgctgaacgactacctggctgtgactgcggcgaacacgcgacattcctgccgcactccgcggggcgctactccaagaagcggttccgcaaggcgcagtgcgccatcgtcgagcgcctcaccaactcgctcatgatgcacgggcgcaacaacggcaagaaggtcatggccgtccgcatcatgaagcacaccctggagatcatcca

SEQ ID NO: 9678 - DNA, 271 bp, Zea mays
gcaatccgtgacctagatggcaagaatggatggagagttgagttatctcgtaatgccagcggtggtcgtggaggtcgtgaccggcatggtgggtctgagtccaagtgttacgagtgtggtgagactggccactttgctcgtgagtgccgtttgaggattggttctggaggtctaggcagcggaaggcgccgaagccgtagccgtagccgcagtcgcagtcccagatatcgccggagtccaagttacggtagaaggagttacagtcctgcag

SEQ ID NO: 9679 - DNA, 272 bp, Zea mays
ggttcaacccagagttccgggggtcaccgaggaggcagatggtcaccatcttctggttcagcttctctacgatgttcttcgcgcacagagagaacaccgtgagcactcttggccgcttcgtcctcatcatctggctcttcgtggtgctcatcatcaactccagctacacggccagcctgacgtccatcctgacggtgcagcagctgtccacgggcatccagggcctggacagtctcctctccagcaacgaccccatcggctaccaggtcggc

SEQ ID NO: 9680 - DNA, 271 bp, Zea mays
gcagctcctccgggggcggcgaactactcctcgtcgccaaaaccctagccctgcttctttgccatggcgagcagcgctagccaggcgagcctcctgctccagaagcagctcaaggatcttgcgaagaaccccgtggatgggttctccgccgggcttgtagacgacagcaacatcttcgagtggcaggtcaccatcatcggaccgcctgacaccctatatgatggaggctacttcaatgcaataatgaccttcccccagaactatcccaaca

SEQ ID NO: 9681 - DNA, 273 bp, Zea mays
atagtccagtattatggaactgacaaggaagaatccaaactctatatttttattgagcttgtcacacaatggtctctttcatccctctatcaaaagtataaactacgagaatcacaagtctctgcatacacaaggcagattcttaatggattggtttatctccatgagagaaatgtggtccacagagatatcaaatgcgccaatatattggtccatgcaaatggatctgtaaagcttgcagattttggattggcaaaggagatgtcaaaaatt

SEQ ID NO: 9682 - DNA, 273 bp, Zea mays
cccacgcgtccgattggccccaacacaacgttggaagtctttctacacatactgtcagctgcatcagaatttgatgagcttcctgtacggcacaatgaggacaatttgaatcgaatactcagcggaaatgtcccgtatccagttgatcaacaccaccttgatgatccacatgttaaagccaacttactctttcaggcacatttctccagagcagaattgccaataagcgactatgtcactgacttgaaatcagttcttgatcagagcatacgc

SEQ ID NO: 9683 - DNA, 273 bp, Zea mays
gccgcccaccgcccgcccgccctccgccgcgcgtcggacggtgccgagggaagaggcaccatgaggttggagaagtgctggttctgctcctctaccatctaccccggccatggaatccagttcgtccgcaacgacgccaaggtcttccgcttttgccggtcaaagtgccataaaaacttcaagatgaagaggaaccctcgtaaggttaagtggacaaaagcatacaggcatttgcatggcaaggacatgacccaggatacaacctttgagttt

SEQ ID NO: 9684 - DNA, 273 bp, Zea mays
ctcgtgtatcatctgaatataacgaagaagataaccaaggataaccagagtgtgctggtttattgcttctcatgggttgtaattttcgttgttttactcgttatgaagaccgtatcagtggggaggaggaggttcagtgcagagttccagctagtgttccggctgatcaagggtctcatatttataacttttacagccatcgtggtaatcctaatagcaatccctggcatgacggttctggacatctttgtttgcatccttgccttcatgccc

SEQ ID NO: 9685 - DNA, 273 bp, Zea mays
ccgccggcgttgagatgttggtttatcaggatctcctatctggcgacgagctcctgtcggattcattcacctacaaggagctcgagaacggcgtcctgtgggaggtcgagggaaagtgggtcacccaaggtcctgttgatgtggacattggtgccaatccatccgccgagggtggtgaggacgaaagcgttgatgacacagctgtgaaggtggttgatattgttgacacattccgtctacaggagcaacctccttttgacaagaaatcatttg

SEQ ID NO: 9686 - DNA, 270 bp, Zea mays
  unsure (1)..(270): unsure at all n locations
aactgcagttggggtctttggtggtgaaaagtatactgatggtgtacatgcacctccactaatggttgaaaatgctggacacagtggacgtccagctgtttcaagtttgaactgncccccatttattgcagttgaaacctgcagagagcacttgggtgtccatccatgtgacaagaggaggagcataacagaataccggcctctcttccctgccattgatttttcattgatagagaatgatggagatgttctttgggaaccagatgtgag

SEQ ID NO: 9687 - DNA, 274 bp, Zea mays
cccacgcgtccgctcgttcctgtcgcgcaccacgacctccacttcacatctcccccggcggcggcgcggtcagttgaacaatggcggactccaaggccacctcggcggtcaccctccgcacccgcaagttcatgaccaaccgcctcctggcccgcaagcaattcgtgcttgaggtgatccaccccggccgcgccaacgtctccaaggcggagttgaaggagaggcttgccaaggcgtacgaggtgaaggacccaaacaccatctttgtcttcaa

SEQ ID NO: 9688 - DNA, 273 bp, Zea mays
ctcccaatgctgtctgactaaacatgttttcaaggtgaacaagcagcagtatcttgcaaatgttggccctgaaataaatgtgaaagttggggtgcaagaatactgtgcttgttgatgctttggcaaggagaatcccccttgtcagtgacatagcgactattatctttggtgctgatgtgacccatccccatcctggggaagattctagtccttccattgcagctgtggttgcttctcaagactggcctgaggttacaaagtcatcaggattgg

SEQ ID NO: 9689 - DNA, 299 bp, Zea mays
accaccaccaccaccaatctctgcgttttccgtctgcggcggcggcggcacagcggaggaggtggacgagatgctgtccgccgacatccccccaaaccagaccatctacctcaacaacctcaacgagaaggtcaagaaagaagagttgaagagatcgctttatgccctgtgctcgcagtatggaaggatactggatgtggtggccctgaaaacacagaaactgagagggcaagcatgggtggtgtttagcgagattacagctgctaccaatgctttccgtggattgcaagactttgatt

SEQ ID NO: 9690 - DNA, 297 bp, Zea mays
cggacggtgggtctgacgcgtgggcggacgcgtgggctgttttctttagtgtccgtaagattgatgatccaataggattgctacctggaaaaattattctggttatcaacaaactaggggatcaatttttccgtccagttcccaaggaatatcttcattctgcagaattaagagacatcatgcaatttggtagcagcaatactgctgttttctttaaaatgcgagttgctggtgtccttcatatctttcaatttgaaacaaagcagggcgaggaaatatgtgtagcacttcaaacac

SEQ ID NO: 9691 - DNA, 298 bp, Zea mays
cggacgcgtgggccgcagttcccccgcgcccgagacgcaaccccgcgccaggagtaagtttgttcttttatcgatattatcgatatggcgagggaggagaatgtctacatggccaagctggctgagcaggccgaaaggtatgaagagatggttgagtatatggagaaggtggctaagactgtagatgtggaagagctcactgttgaggagcgtaacctcttgtcggtcgcatacaagaatgtgattggggctcgccgtgcttcatggcgcattgtctcttctattgaacagaaggagg

SEQ ID NO: 9692 - DNA, 298 bp, Zea mays
cccacgcgtccgctgtctatgggccatgggggcgtccggacatggcgtacttcttcttcaccaaggacatccttgctggtcggccaattacgatctacgagagtgccggtggaggttcacaccagactaccatttcccgggatttcacctacgttgatgacattgtgaaggggtgtgtagcggcactggatacagcaggtcggagcacaggcagtggaggcaagaagcgaggtacagcaccgttcaggacatacaatttaggcaacacttcacccgtgcctgttacacagctagtgga

SEQ ID NO: 9693 - DNA, 294 bp, Zea mays
gttctggatttgttgctttcaaatctgctgaagatgctaaccgagctcttacggagatgaatggcaaaatggttggaagcaagcccctttatgtagctcttgcgcacgttaaagaagacagaaaggcaaagctacaggcacaattttcacaaatgcgtcctgttgcaatggcgccttcagtaggtcctcgcatgcccatgtttccacctggtgtccctggagttggtcagcagctgttctatggtcagccaccaccagccttcatcaaccctcaggctggatttgctttccagc

SEQ ID NO: 9694 - DNA, 292 bp, Zea mays
cggacgcgtggagctcatcgagccggcctcccaccgcctcgaggatatcgacgcgtgctccgccgagtgcgaggtccacatcgcgcaggagtggctcgacaagctgccgccaccgtcctacgaggagcggtacgtgctcacgcgcgcgtccaggaaccgcgagctcaacaagcacgcgcgcctgggctgccaggtcgtcctcacgccggagctgcatggcatggtcgtcgctgtccccgagcctaagccgtgggacatcccgtaatggcctgccgcgacgaatggcaaggtg

SEQ ID NO: 9695 - DNA, 294 bp, Zea mays
caagctcaagtctggcgccgagataaaggccgcgctgaaaaggtgcatcctggaactgctgacgagcaagggcggcaactcggagctcaatctcggattcaggaagccggctgtcatcatgatcgtgggagtgaatggcggggggaagacgacctcgctagggaagcttgcttacaggtttaagaacgaaggagtcaaggtattgatggcagcaggtgataccttcagagcagcagctcgtgaccagctagaagtttgggctgagagaactggttcagagattgtcattgacaa

SEQ ID NO: 9696 - DNA, 289 bp, Zea mays
accaaatattggatcagcttgagctgtcgggcgctgggcgccgtggcttccccatgatgccacagcaaccgagcgggccgcagtgaatgggatgcatccgtcggtcacggccggggtcaacaggttcttgctcccggtgtcagagtgcgagtgtacactcagcacgttgctggacgagttacagcctgaccaatggccagtggaggctgggaaccgtgccatccggtgcaccggtgttgctctcagcgtggctgccgggttgcttggtgcttgcatgcctgggactggt

SEQ ID NO: 9697 - DNA, 291 bp, Zea mays
gcgtcgtcttcgctctcacgatccctcggcagtcggcgacggctgggcgaccgccacttccgccttctcttcctactgagcgtctccaggcacgcttctgaattcggagttgccagcattcgctcgaggtgccggaccagatctcaccatcatgcaggctagcgatagattcaacataaactctcagcttgagcatcttcaagccaaatatgttggtacagggcatgctgatttgtctagatttgaatgggctgtaaacatccagagagacagctatgcctcttatattgg

SEQ ID NO: 9698 - DNA, 294 bp, Zea mays
cttctgtgatttcccccggcggcgttgggtgctggttcaggagacgaaaaggcggcgcgcggcggaaaaccctagcttagctcctctccggcgtcaagtgctctccggtttgagggcgcgatgagggtgaaggtgatttcgcgttccaccgacgactacacgcgcgagcgcaccaggacctgcagaaagtattccgcaactatgatccagcgcttcgtagtcaagagaaagctgttgagtatactcgggcactcaatgctgccaagttagagaagatatttgctaagccattta

SEQ ID NO: 9699 - DNA, 297 bp, Zea mays
tgttggaagagcacagaagaagtctgaaagagagatggagttgaaggagaaatttgaaaagaatgttcaagaggtagctgagaagttccaaaacacaaacttgtatttgaagaacttagaggagaacattgatgatgagaaattgcgtgaactctttgctgagtatggcaatattacttcctgcaaggttatgcgggattcgaatggtgtcagcagaggttctggatttgttgctttcaaatctgctgaagatgctaaccgagctcttacggagatgaatggcaaaatggttggaag

SEQ ID NO: 9700 - DNA, 92 bp, Zea mays
cccacgcgtccgcccatgcatcaaccagcatggactgtggatcgatggatgctgttactcctgtcaggatttgttctaagttaatcctaagg

SEQ ID NO: 9701 - DNA, 283 bp, Zea mays
gatatgcgtcatcctttgtcctgatcatggtccctgtgtatctggtgctcataactctatagttactgctagggccggaaaggaccttgtttccagcttggtgtctggattattgacgattggtccccgtttcggtggagcaattgatgatgcagcccgatacttcaaagatgcatgtgataggagcctcacgccatacgagtttgttgaaggcatgaaaaagaagggaatccgtgtgcctgggattggtcacaggattaagagcagagacaacagggataag

SEQ ID NO: 9702 - DNA, 287 bp, Zea mays
agatcatgaaggccgacgaagatgtccgcatgatctcagccgaagctcccgtggtcttcgcaaaagcttgcgagatattcatactggagctgacgctgaggtcgtggatgcacaccgaggagaacaagcgccgcaccttgcatgaagaacgacattgccgcagccatcaccaggaccgacatttacgacttcttggtcgacattgttcccagggatgagatgaaggacgacggaatggggattcctacgcccgggctgccacccatgggagccccagctgacgcata

SEQ ID NO: 9703 - DNA, 286 bp, Zea mays
caaatctcaaaaggaggatttcagaaattgttcgagtgctctcaaacttcagcaagctgaggcagaaagatgttccacgaaaagattatatcaaacaactgaaaactgatatcatttcatactatggatataatgattttctagttgaagcattaattgagatgttcccagctgttgagcttgttgagttactggaagcctttgagaaaaggccgcccgaatgcttgcggacgaatacactaaagacccggaggagggatcttgctgctgctcttataccaagagg

SEQ ID NO: 9704 - DNA, 285 bp, Zea mays
ccgaaaaacgacatggatgtatctggcagtgcctgtttgcctgtatgtaggggagagggtgctgaggttcttcaggtctggcagttattctgtcaggctattgaaggtggccatatatcctggtaatgtgttgacactgcaaatgtccaagcctccggctttccgatacaagagtgggcaatatatgtttgttcaatgtccagcagtgtcaccctttgaatggcatccgttctcaattacttcagcgcctggggatgattatctaagcattcatgttcgacaact

SEQ ID NO: 9705 - DNA, 286 bp, Zea mays
gcatgaggtctgtgatgcaccatctgctagttgcagtaatcaaccaaacagcactaatggtagctacttcagagttgatcagctagtaagcactttctcggccaatccaagcttgattgcttttgcaaaactctgctccgtgtcatggaagagcagatgcaatagcaattttcaggagttctgttctcaagtgctatatgaatgtatgagcaaagatagaccatcactgttacaggcctatatcagtttttacacaacaatagagttaatgtgggagcatttgaag

SEQ ID NO: 9706 - DNA, 286 bp, Zea mays
ggaaaaaagaaaaatggcgcacgcgtggagacgtacgcgtgctcgccggccacggaacgcggccgtggaatcctcctggccggggaccccaagacagacacgatcgcctactgcaccggccgcagcgttatcatccgccgcctcgatgcgcctctcgacgcttgggcctaccccgaccacgcctaccccacgaccgtcgcgcgcttctcccccaacggcgagtgggtcgcctccgccgacgcctccggctgcgtccgcgtctggggccgctacggtgaccgcgctc

SEQ ID NO: 9707 - DNA, 287 bp, Zea mays
gcctacttcatatgctgaacagtgttgctgggctcagggaatggttttcacaaagtgatgagagtcaagtgcttcctaggattcctgttatggtcaacatgactcaatctgtttcttccaagaaaggcagaaaagcacaagagagtactacacaaaccggcattcagatggatccaagcagacattccacagttcttgaggaggagtctgatgaagatgacgaatttctgatacctgaatctgaaccagagccatcaaatcttgaggatgctgcagatgttaggaag

SEQ ID NO: 9708 - DNA, 307 bp, Zea mays
ctccatcggattctggcaaggggacattaggtacctgatggaggatgtgcaagtgatgaaaccgacaatattctgtggtgttcctcgtgtttatgatcgtatatatacaggtataaacatgaaaattcagtctggagggatgatagccagacacctttttcagtatgcctacaactacaaacttgccaatatgaggaaagggctgaaacagcatgaagcatcaccgtttttcgacaagatagttttcagcaaaataaaggaagggcttggagggcgtatacgtctcatgatagctggagcagcacct

SEQ ID NO: 9709 - DNA, 301 bp, Zea mays
attcatgtgagatgccttatgcaagatataccttgcccacagaatataagaaggccttttgtgattttttgcgggaggtgaagtttccagatggatttgcatccaacatatcaagatgtttaaatgctgagggaaccaaattacaagggcttaaaacacatgatcgtcacattcttttgcaaagaatattaccagttgccatgagaggatttttggacaaggatatttatgaagcactagcggatctggggaaattttttagggaattgtgcagcagaactcttaaaaaggatgtgttggc

SEQ ID NO: 9710 - DNA, 299 bp, Zea mays
aatttctatatcgttggaagggatcctgctggtatgagccaccccacagagaaaagggacctctatgatgctgatcacggaaagaaggttttgagcatggctcctggccttgagaggctcaacatccttcctttcaaggtggctgcgtatgacacaaagcaaaagaaaatggatttctttgatccatcaaggaaagatgatttcctcttcatctctggcacaaagatgcgcactcttgccaagaaccgagagagtcccccagatggttttatgtgcccgggtggctggaaggtactcgt

SEQ ID NO: 9711 - DNA, 295 bp, Zea mays
aaaaatcccgcgaatgtttgatccatggggtggatacagcatcattggctttggtgatatccttcttcctggtcttttagttgctttctcgctaagatacgatttttctgcaaagaagggcttacggtctggttactttttgtgggcaatggtggcctatggctctggacttctaatcacatatgttgcgctgaacctgatggatgggcatggacaacctgcccttttgtacatcgtgcccttcactcttggcaccttgatcgcgcttggatggaagagaggggagctgcagaac

SEQ ID NO: 9712 - DNA, 295 bp, Zea mays
ctagctagctagtggttggacttcttttaccagatggaatacacatactacgtacacaagcatttcaacgaactaaaacccgcgatctgaagcgactagtcgaaggcggcggcggcggcgatggggagcgacctggagacggagaagaagaagaccccggtggcgctgatgcccatcgcgaacctctcgctggaaagaagctctgcaagcggaccctcaagctcgtgcgacgagcctctgaggccaagtgcctcaagcgcggagtcaaagaggtagtcaagagcattcgccgcgg

SEQ ID NO: 9713 - DNA, 303 bp, Zea mays
aagatcctcctcgcccgcgggtacgccgtccggggcacctcccgccgcgaagtgctgaccccaagaacgggcacctgtgggcgctcgacggcgcggcggacgtctcaccatgctgcaggtggacctgctcgaccgcgccacctccgtgccgccttccgcggctgcgacggcgtcatccacaccggatcgccgatgcacgacaaccccgaggagatcatcgagccgattatcgcagggacgcggaacgtcgtggaggcggcggcggacgcggcgtgcggcgcctggtgctgtcctccaccatcg

SEQ ID NO: 9714 - DNA, 303 bp, Zea mays
cggaccgtgggtcatgcgcgcccacctcaggcccgagcccttcgaccgcccgctccgcgacgccttccgcgtcctcgacaaggacggctccggcaccgtcgccgacgccgacctccgccacgtcctcacgtccatcggagagaagctcgaggtgcacgagttcgacgagtggatccgcgaggtcgacgtcgcgcccgacggcaccatccgctacgacgacttcatccgccgcatcgtcgccaaatgatcccgtcccctccgagtctccattccgccgatccaccctcgcgcgctcttcgtctg

SEQ ID NO: 9715 - DNA, 298 bp, Zea mays
gcgcgcacgcgtccgcggacgcgtgcgacgtggacgcgacgcgtgggcgagctgctcaggaagctcgtgctccccgacggcaccgtgctacgcgtgcagcttcccggccggcccacacgggactgactcttctccgacccggcgcgcgacggcgcgagtttgctcaagatttggaacctgaacaagtgcggtggcgtggtgggtgtgttcaactgccagggagccgggtggtgccgcgtgaccaagcggacgcgcgtgcacgacgcgtcgccgggcacgctgaccggcaccgtgcgtg

SEQ ID NO: 9716 - DNA, 297 bp, Zea mays
cacacgcgtccgcggaccgtgggcacagttctcgcgcccacagccaaatttttctccactcaatcgcggcataagctgcactgcagccatggacgccagcggactcggtagcaagacgaagaaggggacggctgggcgcaaggctggcggccccaggaagaagtcggtgtcgcggtccgtcaaggccgggctgcagttccccgtcggccggatcgggcgctacctcaagaaggggcggtacggcagccgtgggcaccggcgcccccgtctatctcgccgccgtgcttgagtacctcg

SEQ ID NO: 9717 - DNA, 266 bp, Zea mays
  unsure (1)..(266): unsure at all n locations
ggaattctacgcttcctagcttggagatgccagaacattacaagaaaataaaatacaaggagacgcgcgcggctggtggatctccactgctttttggctctttgcttccctggtactccctccgtttctttgtatttgtcactggatagtgcaaaattacactgtccaacgacaaataaaaagaaaaggagggagtactacctagtagaaaatgcgcatctgatcggcagccagcgccacgangatacacctcattcgattcatca

SEQ ID NO: 9718 - DNA, 303 bp, Zea mays
acccacgcgtccgcggacgcgtgggcgccaagaaccgcgagctggaggtgatccactcccgctgggccatgctcggcgcgctcggctgcgtcttccccgagctgctctcccgcaacagcgtcaagttcggcgaggccgtctggttcaaggccggctcccagatcttcagcgagggcgggctggactaccttggcaaccccagcctgatccacgcgcagagcatcctcgccatctgggcctgccaggtcgtgctcatgggcgccgtcgagggctaccgtattgccggcgggccgctcggcgatg

SEQ ID NO: 9719 - DNA, 293 bp, Zea mays
cttcgacacagcaatgaggttgcttagccgccagttgggtatcaagaactttgttccactgaagcccttgtttattgatctgcacatgggcagtcatacatatatgcgtgcgtttgccgctgcgcctgttatatcagttgcagtagagaaaggttggaatgagtctgcaagtcctaatgtgaggggccctcctgcacttgttttcagcttctcacaaatggaagatagactcaaggctgcctacaaagccacaactgagggcaagttccccgaagcactgagacagttcctta

SEQ ID NO: 9720 - DNA, 290 bp, Zea mays
cgaaaagcaaagctgtcacgtgaagtgatgaagatgataaattcaaccatagctggactggagaaagggcacctttctgtgatgtcagctgaaggttcaggaggtgtttatttcatgcgagatgcaacaggccagaagaatgttgctgtgtttaagcctattgacgaggaacccatggccaaaaacaacccaaggggcgttcctgtgtccacagacggcgaggggatgaagaggggaacaattgtaggggaaggtgcattcagggaggttgcagcttatattctcgacca

SEQ ID NO: 9721 - DNA, 290 bp, Zea mays
gtaactcgcatcttcctccgtgatccaagttctagcagcgcacgctcggtttcggcaatgtcggggcgcggcaagggcggcaagggtctgggcaagggcggcgccaagcgccaccgcaaggtcctgcgcgacaacatccagggcatcaccaagccggcgatccggaggctggctaggaggggcggcgtcaagcgcatctccgggctcatctacgaggagacccgcggtgtgctcaagatctttctggagaacgtcatccgtgacgccgtcacctacaccgagcacgcccg

SEQ ID NO: 9722 - DNA, 287 bp, Zea mays
cccacgcgtccgcccacgcgtccgcccacgcgtccgctaatccatttcggcatttccaacgccttcgccctaccagccacgtcgtttcgaggccgatcgaccgagcagcagcagctggtggcaatggcgtgcggcggcggaggtcgtgctgctggacttctgggtgagccccttcgggcagcgctgccggatcgcgctggcggagaagggcgtggcctacgagtaccgcgagcaggacctcctggacaagggcgagctgctcctccgctccaaccccatccacaaga

SEQ ID NO: 9723 - DNA, 283 bp, Zea mays
cccacgcgtccggtaaggcgcaagacaaagattgtgtgtacaatcggtccttcaaccaacacaagggacatgatatggaaactcgctgagactggcatgaatgtggctcggcttaatatgtcacatggataccatgcatcacaccagaaagttattgatctggtaaaggagtacaatgcatcacatgctgacaatgtgattgctatcatgcttgacacaaagggaccataagttcgaagtggagatttgcctcaaccgatatttctggaaagcggacaagaat

SEQ ID NO: 9724 - DNA, 282 bp, Zea mays
cctttttcctcagggtgttccaagtggtgggtccaacccaggtgttgttccaggtgcaggatctggtgctcttgatgccttgcgacacttccacagtttcaagcactccttcagttagtccaggctaatcctcaaatcttgcagccaatgcttcaagagctaggtaaacaaaacccacaaattctgcggttgattcaggaaaatcaagctgagtttctccgcttggtgaatgaatctcctgagggtggtcctggagggaacatactaggtcaactggcagct

SEQ ID NO: 9725 - DNA, 284 bp, Zea mays
gggcactgcaagaaattggcacctgaatggaaaaaggctgcgaagaacttgaagggccaagtgaagctaggccatgttgattgtgatgctgaaaagtccttgatgagcaagtacaaggtggaaggttttccaactattttggtatttggtgctgataaggagagcccgttcccctaccagggggctagagttgcatctgccattgaatcctttgcattggagcagttggaagctaactctggcccagttgaagtctctgagttgactggctcggatgtcatgga

SEQ ID NO: 9726 - DNA, 167 bp, Zea mays
gaggtctagcatctggaagcaaatgtcagaagctgggatcaagtacattcccagcaataccttctcgtactacgaccaggttcttgataccacggccatgcttggcgctgtcccagagcgctactcttggactggaggtgagattggcttgagcacctacttctcta

SEQ ID NO: 9727 - DNA, 310 bp, Zea mays
gacgacaaatgatgatgatgcgtccagtacaaccacggaggccatgttcatcatctcaccgaatggcaagttcaagcggaagattaagtcatggatgcgtggtgctcttctgggaagcggctcatttgggatggtgtacgaggggatcagtgatgagggtgcttttttcgctgtgaaggaagtatctttgcttgaccaaggaagcaacgcacaacaatctattgttgcacttgagcaggaaattgcactcctcggtcagtttgaacatgaaaatatagtccagtattatggaactgacaaggaagaatcc

SEQ ID NO: 9728 - DNA, 92 bp, Zea mays
ccgggacctggatcgacttcaagtctcgctacgtagcagtgcaataaaaaaagcagccgcaatggcgagcagcaccatggccctctcctcca

SEQ ID NO: 9729 - DNA, 301 bp, Zea mays
tcatgttgttgatattgaactcccagggcagtacttcacagatcaggaaatcgcaccggaccacactgttaagttggacagagttggacctgacattccaattgtccggaggcatggcagtagctttcgacggttgacactcattggttctgatggttcacagcgccattttattgttcagacatcactgactccgaatgctcggagtgatgaaaggatgctgcagctattccgtgtgctaaataaaatgtttgacaaacacaaagaatctaggcggcggcatctggctatccatactcca

SEQ ID NO: 9730 - DNA, 298 bp, Zea mays
atcccttttgcaagtatagtctctctgctaagcgacggagcttcaagctagtctcggcggctctagaagacgatgggcaaggacgacgtgatcgagagcggcgctggcggcggcgagttcgctgccaaggactacacggaccctcccccggcgccgctgatcgacgcggcggactaggggtcctggtcgctgtaccgcgccgtgatcgccgagttcatcgccacgctgctgttcctgtacatcacggtggccaccgtgatcgggtacaagcaccagacggacgcgtcggcgtcgggcg

SEQ ID NO: 9731 - DNA, 300 bp, Zea mays
cggaccgtggggtttgttgaggagtctccagcgcatttgatagatactaatccttcattcttttcccagtttactgttgttattgctacccagcatccagagagttttttactgaagctagattatatctgcaggaaagcagatatcgttttggttgctgcacgttcatatggtctaaccggtttggtcagggttagcataaaggagcattgtgttatagaatcaaaaccagaccacttcttggatgatttgcgacttcacaatccatggactgaactaaagcagtttgcaaaatcaatt

SEQ ID NO: 9732 - DNA, 301 bp, Zea mays
tggtcaatggttggggctcagaccactgaacagggcgactgctcaaagttcaagagcagcccaccccattgctgcaagaaagatccaacaattgtcgatttacttccaggcactccatacaacatgcaaattgccaattgctgcaaggcaggagttgtaaatacctttaaccaggacccagcaaatgctgcttcctccttccagatcagtgttggtcttgctggaactaccaataaaactgttaaggtgccaaggaacttcactcttaagactccaggccctgggtacacatgtgggcgtg

SEQ ID NO: 9733 - DNA, 306 bp, Zea mays
cttcccggcccgaaaccgaaagcaccaccaccaccaccaccaccaatctctgcgttttccgtctgcggcggcggcggcacagcggaggaggtggacgagatgctgtccgccgacatccccccaaaccagaccatctacctcaacaacctcaacgagaaggtcaagaaagaagagttgaagagatcgctttatgccctgtgctcgcagtatggaaggatactggatgtggtggccctgaaaacacagaaactgagagggcaagcatgggtggtgtttagcgagattacagctgctaccaatgctttc

SEQ ID NO: 9734 - DNA, 308 bp, Zea mays
acgcctttgatggcaaattccctgcacaggttaaatttagcgttttcaaggattgtcttcctattcctgagagtagtttcaagcatgccattaaggagaactacagctcaaagggcaggttcacccaagggctcaacactaaacaagttcaaagactattggcactgttcaagcctatcagcctttctaaaccagctccacaacatattgaggatattcgaaaaccaagtgattatgaagaaagaagacagttgcaacatattgaagaaagggctgcacctattaatgtccacgcacatcctcttgaa

SEQ ID NO: 9735 - DNA, 308 bp, Zea mays
cgcacgcgttcgcgctgttcgtggcggtgtcggtgggcgcgaacatctccggcgggcacgtgaacccggccgtgaccttcggcgccttcgtgggcgaccaacatcaccctgttccgagggctcctgtactgggtggcgcactgctggggtccaccgtggcgtgcttcctgctccgcttctcgacgggcgggcaggccacgggcaccttcgggctgacgggcgtgtcggtgtgggaggcgctggtgctggagatcgtgatgaccttcgggctggtgtacacggtgtacgcgacggcggtggacccgaaa

SEQ ID NO: 9736 - DNA, 312 bp, Zea mays
ccctcactctactctggacgcgactcgaacttaaaccctagagccgcagccccggtcgctccaccgaccccaaatctcaaatcagcgggagggaactcgcacgcgaaggctgaactcatggctcgcgtctacgttgggaacctggatccgcgtgtcacggcgcgggagatcgaggacgagttccggacgtttggggttctgaggagtgtatgggttgctaggaaaccaccagggtttgccttcattgactttgatgaccgcaggatgcacaagatgccattcgtgaattggatggtaagaatggttggaggg

SEQ ID NO: 9737 - DNA, 285 bp, Zea mays
catatctcctcgcattttccttgcaaccgattgcctatccccctcccaaccaaagaccgatggcgcccaaggccgagaagaagcccgcggcgaagaagccggcggaggaggagcccgcggccgagaagacgaccgccgggaagaagcccaaggcggagaagcgggtccccgcgggcaagtccgccggcaaggagggcggcgagggcaagcgtggcaagaagaagggcaagaagagcgtggagacgtacaagatctacatcttcaaggtgctgaagcaggtgcacc

SEQ ID NO: 9738 - DNA, 286 bp, Zea mays
cccacgcgtccgcccacgcgtccggtcgacgctggtggacgtgggcggcggcgtgggcgccacgctgcacgccatcacgtcccgccacccgcacatctacggggtcaacttcgacctgccgcacgtcatctccgatgcgccgccgttccccggcgtgcgccacgtgggcggggacatgttcgcgtccgtgcccgccggcgacgccatcctcatgaagtggatcctccacgactggagcgacgcgcactgctccacgctgctcaagaactgctacgacgcgctgccg

SEQ ID NO: 9739 - DNA, 292 bp, Zea mays
gtactctacttgtctgcgcctggatcccctccgcagaagataagacatgggtcaagcactcggcttgattcaagtggatcaatcgacagtagccatcaaggaaacttttgggaagtttgacgaggtcctagagcctggatgccacttcttgccatggtgcatagggaagcaaattgctgggtatctgtcactgcgtgtgcagcagcttgatgtccgctgcgaaacaaagacaaaggataatgtcttcgtcaatgttgtggcatctgtgcaatatcgtgcccttgccgataag

SEQ ID NO: 9740 - DNA, 293 bp, Zea mays
gcattgcccatccgtatcttcttgctgacaatagacactataccttctatatttggaggaaggttatccaagtaaactggatgatgaagtacatgttgattccactttatgtgtactcatggctctcaatcatcaacatcttagggaaatcacagacaaggatttgggtgttatcatttgtgctgtcagttgcactggtccttgtacctgccccgctggttgaattcagatactacacaattccattcgtgatactggttcttcactctccatcaattggcaatggcaaattg

SEQ ID NO: 9741 - DNA, 298 bp, Zea mays
tgaagatgctgatatgcgattcttgtgaagcaggatttcatttgtcttgctgcattccttgtattaaggagctacctactgatgaatggtattgtgctccatgcttgtgtaagaaacccaagagtctttatggcaaactctcagagggcaggataaatccttccaggaatactaacacaaggcctcatgggatgagtcacatagagtacatgctgaaggatgctgaaccatatgtaactggggttcgacttggtagagattttcaggcagaggtgccagaatggtctggtccatcatc

SEQ ID NO: 9742 - DNA, 306 bp, Zea mays
cccacgcgtccgcccacgcgtccgatcaagatgtttgttcttgatgaagctgatgaaatgctttctcgtggtttcaaggatcagatttatgacatcttccagcttctgccatccaagattcaggttggagtcttctctgctaccatgccacctgaagcccttgagattacccgcaagttcatgaacaaaccagtgagaattcttgtgaagagagacgagctgacccttgagggtatcaagcagttctatgtgaatgtggacaaggaagactggaagctggacacactgtgtgacctgtatgagacc

SEQ ID NO: 9743 - DNA, 310 bp, Zea mays
ggcaactgcgaggccgccgacgcccgacggcagggtgcccaggccttcttcggttccatcgcgaggccatagttgcatcattcgcctgagacgactgcccagcaccaggactgatctcctcactaggggcgtagaggtgaagagaagaacttgacaatgagcagcataggcacaggttacgatctgtctgtcaccaccttctccccagatggtcgcgtcttccaggtcgaatatgctaccaaggccgtcgacaacagcgggactgttgttgggatcaagtgcaaagatggcattgtcctgggtgttgaga

SEQ ID NO: 9744 - DNA, 294 bp, Zea mays
agcaatactgacctcgaattggcaagagaaaagggtcatgtgaatgttgttcgtgccatagagggacggcattgtcttttatgtggatggatgagagagaactatgctcctgcttatttggatgcaattgctccacagttcatgacaagaaaaatttgggctgtagatttaccccgagaagtgcgaactccaaccaggcctcttaagatagggatagctatatatcctgaaattacggcttctaaaccacgttctgtacttaaactatggaaatgtcaaattgagcaaccaaag

SEQ ID NO: 9745 - DNA, 288 bp, Zea mays
acagttaagagtcgaaaactcttcgctgctaaggcggcttgctgatgttaaccagaagttcaatgaagctgctgttgacaatagggtgctaaaggcagacgtcgaaaccttaagagcaaaggtgaagatggcagaggactcggtgaagcgggtaacaggcatgaacgcattgtaccctgccgtgtcggatatgtcttccctcagcatgccattcaatggctccccttctgactccgcctctgatagcaccgtcccggtacaagatgacctgaacagttacttcgccaa

SEQ ID NO: 9746 - DNA, 269 bp, Zea mays
ttcccgagtctccagccaaccacatccagtccaccccatccccctcgaccccgacaaccccgagtcccgacccgatggcgcccaaggccgagaagaagccagcggagaagaagccggcggccgaggagaaggcggagaagacgaccgcaggcaagaagcccaagtccgagaagcgcctgcccgcctcgaagtcctccggcaaggatggcggcgagaagaaggggaagaagaaggccaagaagagcgtggagacctacaaaatctacatc

SEQ ID NO: 9747 - DNA, 127 bp, Zea mays
gatcgagatggcggcgtcggatgttgagtaccgctgcttcgtcggctgcctcgcctggtccacggacgaccactccctccacaacgccttcagcacctacggcgaggtcctcgagtccaagatcatc

SEQ ID NO: 9748 - DNA, 295 bp, Zea mays
ccaagacccactgaaccctcgccgtttcgtcgcacccaccaacacgagagatgagctccggcggcgcggacaagcccggcagtggcggcggcgcggtgaagacgccgtcggacttcctcaagtccatcaggggccgccccgtagtcgtaaagctcaactccggcgtcgactacagaggtatattggcttgtctggatggttatatgaacatcgcaatggagcagaccgaggagtacgtgaatggccagttgaagaacaagtatggcgatgccttcataaggggcaacaacgttct

SEQ ID NO: 9749 - DNA, 328 bp, Zea mays
gccaattctcctgagtgggtcatcagtatgcaggcctgcaatgcccatggcatctactgtgtgccactatatgacacgcttggtgccggggcagtagaattcgtattgtaccatgcagaggtacagattgcttttgttgaggaaaagaagatcggagagatgctcaagacatttcccaatgcgaccagatatctgaaaacacttgtaagcttcggtaaggttgatcctgggcacaaggagatagttgaacagaatggcttgtccatctactcatgggaagagtttctgcaactgggaggtaaagagaagtttgaacttccacccaagg

SEQ ID NO: 9750 - DNA, 326 bp, Zea mays
gaaatattcttcccgtcgaaagacggagagaggaaaagggacaagggcaaggcaagagagaggcgtcgtcgtttgatctgctgccggagtgcgaagaggaagaggaagaggagcgccggagttgtaaagatgttcctggtggactggttctatggggtgctggcatcgcttgggctgtggcagaaggaggctaagatcctcttccttggcctcgacaacgccggcaagaccaccctcctccacatgctgaaggacgagcggctcgtacagcaccagccgacgcagtaccccacgtcagaagagttgagcatcggcaggatcaagtt

SEQ ID NO: 9751 - DNA, 315 bp, Zea mays
ctgctctcttcccccgtcttcttcccaagctgccacgttgcctccctccgctccagccgcccatggcctccatggcgttcgccctggcgggggccttcaagggcctctccctggcgcccaccagcaccacctcttccttcgcgcgctgcgaccgcgcctcgctctccgtcggcggcgcacggagcgtgccggcggtgccggttccggcgcggcggctcaccatccagatggcgcacaagaagggggccgggagcaccaagaacggccgctactccaagggacagcggctcggggtcaagatatacggcgaccagc

SEQ ID NO: 9752 - DNA, 315 bp, Zea mays
gagcactggacttgggagaacataaaaatctggactttgaagaattgttggagctttgcatccgtactcaagagagttgctcaggattcagaaggtttgaattatttcagatcattgacgctacaggcaatttcccggaaagtagaatcatcgggtcgggtggttttgctatagtttacaagggtcagttacctgatggatccatggtcgccatcaaaaggatggatgaaggtgccacaatgtttgatttcagcagtgaatttctggctgcgaggcttcagcataccaatctaattagacttttggggtggtgta

SEQ ID NO: 9753 - DNA, 321 bp, Zea mays
gcgccacagcacccgggtgcgggacgaggagggctacccggccttcgcgctcgtcaacaaggtcaccggcgaggcgctcaagcactccacggggcagggccaccccgtcaagctcgtgccctacaacccggactaccaggacgagtccgtgctctggaccgagagccgcgacgtcggcaacggcttccgctgcgtccgcatggtcaacaacatctacctcaacttcgacgccttccacggcgacaaggcccacggcggcgtccatgacggtaccgagatcgtgctctggaagtggtgcgagggcgacaaccagcgctggaa

SEQ ID NO: 9754 - DNA, 322 bp, Zea mays
cattcctcccatctcccaagacctcctcagacccgagaagcgcactgcggccatggacgccaccggcactggagctggagggaaggcgaagaagggagcggccggtcgcaaggccggcgggccgagcaagaagtcggtgacgaggtccgtgaaggccgggctccagttccccgtcggccgcatctggcgctacctcaagaagggccgctacgcgcacgcgtgcggcagcggtgcccccgtctacctcgcggccgtcctggagtacctcgccgctgaggtcctggagctcgccggcaacgctgccaaggacaacaagaagacg

SEQ ID NO: 9755 - DNA, 323 bp, Zea mays
gctgctctcgtccctagaaataaagcagctcctccgcggggcggcgaactactacccatcgccaaaaccctagccccgatccggtcgaggagcactacttcttggcatggcgggcacccctagccaggcaagcctcctgctccagaagcagctcaaggatcttgcgaagaaccccgtggatgggttctccgcacggcttgtagacgatagcaacgtcttcgagtggcaggtcaccatcatcggcccgcccgacaccctatatgatggaggctacttcaatgcaataatgaccttcccccagaactatcccaacagcccgccat

SEQ ID NO: 9756 - DNA, 311 bp, Zea mays
agcacgggatctgcgtgaccgcgcacaccccgctgggtggctccaccgccaacgccgagtggttcgggacggtctcgtgcctggacgaccctgtcatcaagagcttggctgagaagtacggcaagacgccggcgcagtcgtcctccgctggggtctgcagcgggacacggtggtgatccccaagacctccaatgcggagaggctgcaggagaactttgacgtcttcggttttgacatctccggcgaggacatggagaggatgaaggccgtcgaccggaagtaccggactaaccagcctgccaagttctggg

SEQ ID NO: 9757 - DNA, 313 bp, Zea mays
gatttcttctttccccgatggcacttggagggcttgtaactgttctgcatgcgtgtcttgatatgaagtccactatcctagggaaatatcactacatactttacattattgtcctggcaatgcagcccaggatgcttttaactgtcgatgaggatctgaagcccctctcagtacctgtccgcgttgggcaagctgtggacgtggttggtcaggcaggaaggcctaagacaattaccggctttcagacacactccacaccagtcttgcttgcagcaggggagagagctgaactagcaactgaaaaatacatccc

SEQ ID NO: 9758 - DNA, 146 bp, Zea mays
ccatctgtgacagaaccgctagctaatctcacgtcccatattacccagcggttctgtcacagatggtagcaggaagggaagcaaaagtgcaaaacatgtccagaaccgctcgctaatatgggacctgagattagctttttgctgct

SEQ ID NO: 9759 - DNA, 317 bp, Zea mays
cccacgcgtccgccgagttcgtcgcctacttcctcttcctctacatcaccatcctcaccgtcatgggcgtctccaagtccacctccaagtgcgtcaccgtcggcatccagggcatcgcctggtccttcggaggaatgatcttcgcgctcgtctactgcaccgccggcatctccggaggacacatcaacccagctgtgactttcgggctgttcttagccaggaagctgtccctgactagggccctcttctacatcatcatgcaatgcctgggtgccatctgtggagctggagtggtgaaaggcttccagcagggactt

SEQ ID NO: 9760 - DNA, 320 bp, Zea mays
gtctcgaggacagttccgtggtctatgaatgcgtgcaaagcttggtcgggcatcgtgttgaccacggcactgtctcgaggacagttgatgcgaatgtgtccgatgcggaacgtgtatacagcgccttggagaatcttggcattgactggggcgatgtcggaaagcagcttgagctggaaggtgtggactccttcaagaagagctttgacagcctactcgtgagcctacaggagaatggcaacagcctcaagacggcaactgtgtaaaactgagaagattgggtagcggcgggtgaacgattttactatataaaatgctag

SEQ ID NO: 9761 - DNA, 316 bp, Zea mays
acgaggcgaacagccggccaatctagcatcagcgcgcggggtctgagagcagagcggcagggcgccatggcggcatcggtggcgctgagcagcgggcaccggatgccggcggtggggctgggcgtgtggcggatggagaaggcggacatccgcggcctcatccacacagcgctccgcgtcggctaccgccacctggactgcgccgctgactaccagaacgaagctgaagttggtgacgcgctcgcagaggcattccagaccggactcgtcaagcgggaggacctgttcatcacaaccaagctgtggaactcagacc

SEQ ID NO: 9762 - DNA, 311 bp, Zea mays
aatctgctcatcaaaaagttggacgtttgttgcgctctgtttgactttacggatgcgtcaaagaacatgaaggagaaggaaataaagacgctgatgttgttggagatagatgagtatgtaaggactgctaacgtgaagttccctgagatcgttgtggaggcaatcacaaaaatgatttcggtgaacttgttcaggacactaatttccccacctagggagaagaaggcgcttcaagcttttgatctagaagaggacgaaccgttgatggaccctgcgtggccacatttgtaccatgtgtatgagttgctcct

SEQ ID NO: 9763 - DNA, 312 bp, Zea mays
cagaagggtaaggtcggaatagtcctggacttcaactggtacgaggctcttacaaactcacctgatgaccaagcagcagcccaaagagccagggacttccacattggctggtttgttgatccattgataaacggacactatccacagataatgcaagatctcgtgaaggagaggctgcccaggttcactcctgagcaggctaaactggtgaagggctcggcagactacatcggtatcaacgagtacacatccagctacatgaaggggcagaagctggtccagctggcgcccagtagctactctgccgattgg

SEQ ID NO: 9764 - DNA, 312 bp, Zea mays
ctctctctaccgtccgataccccaagcaccagcgcggcggcggcgaccatggctgtcggaaagaacaagaggatctccaagggaaagaagggtggcaagaaaaagaccgtcgaccctttctctaagaaggattggtatgacatcaaggcaccgtcggtgttcagtgtgcgcaacatcgggaagactctcgtatccaggacacagggtaccaggattgcttctgagggtctgaagcacagagtctttgaggtttgcctagctgatcttcagggcgacgaggatcaagcttacaggaaaatcaggctccgtgct

SEQ ID NO: 9765 - DNA, 310 bp, Zea mays
agcttgtgtcctggtacgacaacgagtggggatacagcacccgagtggtcgacctgatccgccacatgaacagcaccaagtaaatgaacaaactgatgaaagcatgcaaagagtgatgaaagcatgcaaagagagttgtgtttcttccccggaagtgcttccgagaataaatttttcttatctgattgtctaaaacctataattggtgtaatggtatcgtagtggttggttgagcattgagtgactcatattttgtcaggtctatgtgttatcgttaaacttttaacggtcattctatttcaaaagtttt

SEQ ID NO: 9766 - DNA, 308 bp, Zea mays
attcaatgtgcgtatctggaagatattcaatgagtggtttaacttgctcccagtggctgcacttattgacgataagatcttttgcatgcatggggggttgtctcctgagctaaagaacatggatcagatacgtaacatttctcgtcctgtggatgttcctgacgttggtcttctatgtgatctgatatggtcggaccctgataaagagattgttgggtggggtgataatgacaggggtgtttcctacacctttggagctgacatagttgctgagtttcttcagaaacatgacctagatttgatctgca

SEQ ID NO: 9767 - DNA, 303 bp, Zea mays
gcttccgcgagacgcgtgggcggacgcgtgggcccaaccagaagagcggcggcgcgggcggacaaggagcaggcggaggaggagttgtgccaagccacaatgggtagctcgcgtgactctatgcacaagcgccgagccaccggtggaaagcagaaggcctggaggaagaagcgaaagtatgagcttggtcggcagccagccaacaccaagttgtcaagcaataagacagtaaggagggtccgtgttcgtggaggtaatgtgaaatggagggctcttcgcttgatactggtaactactcattgg

SEQ ID NO: 9768 - DNA, 307 bp, Zea mays
cagcaacaaatgttgaaattgaagtgcctgttccttcagatgccacaaacccaaatataagaacttcaatgggttctgctgcatatgctcctgagagagatgcaatggtctggaaagtaaaatcattccctggtggcaaggaatacatgtgcagagcagaatttagtcttcctagcataacagcggaagaaggggccccagaaaagaaggcaccaatacgagtgaaatttgagataccatatttcaccgtatcaggtattcaggtccgttatctgaagataattgacaagagtggttaccaggcact

SEQ ID NO: 9769 - DNA, 303 bp, Zea mays
cccacgcgtccgggcccgttatgatgagattgtgaaggaagtctcttcctacctgaagaaggttggatacaaccctgataagatccacttcgttccaatctctggttttgaaggtgacaacatgattgagaggtccaccaaccttgactggtacaagggcccaaccctacttgaggctctggacttgatcaatgagccaaagaggccttcagacaagcccctgcgtctcccccttcaggatgtgtacaagattggtggtattggaactgtccctgttggacgtgttgagactggtgtcattaa

SEQ ID NO: 9770 - DNA, 305 bp, Zea mays
cacactcgggtaaagctatctcgagctagctagctgctgtaaccgttgccatggccaaaatggtgttgctctgcgtgctcgtctccttcctcctgatgcccttggcctccctagccctgacgcaggacttctgcgtcgccgacctgacctgcagcgacacgccggcggggtacccgtgcaagtccagcgtcaccgccaacgacttctacttccacggcctggccggccagggcaaaataaacccactcatcaaggccgccgtgaccccggccttcgtgggccagttcccgggcgtcaacgggctt

SEQ ID NO: 9771 - DNA, 282 bp, Zea mays
gtcgacggcacccgtcttctctccgcactcgaaaccccatccttgactagctccgatctggtacgagatggccggcaagatgaaggagttagacggcgccagcactgccaagatcttcattggcgggctctccaaggatacaagcatgagtacattcaaagaacattttgggaagtatggggatataattgatgctgtcataatgaaggaccgctacacacaaaagcccagaggctttggctttattacttttgctgatcccactgttgttgacagagtgat

SEQ ID NO: 9772 - DNA, 301 bp, Zea mays
caccgtgatttgaacgagatactggatttgtatgagaacgggcagaagttctacctctacacggggagggggccctcgtcggaggccctgcacctcggccacctcatccccttcatgttcacaaaatacttgcaggaggcttttaaggtgcccctagttatacaactgactgacgatgagaagtacttgtggaaaaacttgactattcaggaaagtaaaaggcttgcccgtgaaaatgctaaagatattatagcatgtggttttgacattgaaagaacattcattttctctgatttttctt

SEQ ID NO: 9773 - DNA, 301 bp, Zea mays
ggagcacggaggcgaaggaggaggagcagcagcagcaggcggcgccgaggagcggcatcccactcagtgcttgcaaccatggcgaggggattgaagaagcacttgaagaggctcaatgcgcccaagcattggatgctcgacaagcttggcggagcttttgctcccaagccatcttctggacctcacaagtccagggagtgccttcctctgatcctcatcatcaggaacaggctcaagtatgctctgaactaccgtgaggtcatttctatcctgatgcaacgccatgtacttgttgatggca

SEQ ID NO: 9774 - DNA, 299 bp, Zea mays
gtcccaacgttatggaccaaggatcaaacagaaagattcttgctgctgtcaagaaatataccaagaaatgtccgccagatattgttctatatgtggatcgtctggatagtctgagccgtgatctcaatgatttgcctcttctgaagacaattacctctgttcttggctcatccatatggttcaatgccattgttgccctcacacatgctgcgtctgctcctcctgaaggcctcaatggtgctcccatgacatatgaggtcttgatggctcagagatcccacatcatccagcagtccatc

SEQ ID NO: 9775 - DNA, 302 bp, Zea mays
agaagcggcggcggcggagcaaacgcaggcgaaggcgagggtgtgagggaaggagcaccagccatggtgcacgtcaacttctaccgcaactatggtaagacgttcaagaaaccaaggcgtccttatgagaaggagcgtcttgatgctgaactgaagctggtcggtgagtatgggctgaggtgcaagcgtgagctttggagggtccagtatgcactgagcaggatccgtaatgctgcaaggcacttgctcacccttgacgagaagaacccccgtcgtatctttgagggtgaggcgcttcttcg

SEQ ID NO: 9776 - DNA, 300 bp, Zea mays
cctttccccttccctccctccctctccccgcgggccgccagaggcaatttcgccctcgattcgaccccgattcgtccgcccgcgaccgggattccctccgccaagcgcggatctgaacgctgcgctccgtgtcgccgctcgaatccgccatgaagggggccaaatccaagggcgccgccaaggccgatgccaagctggccgtgaagagccagggggccgagaaagccgccaaaggcaggaaaaggaaaggcggcaaagaacccaacaagcctaagaaggctcccaacgctttcttcgtgt

SEQ ID NO: 9777 - DNA, 296 bp, Zea mays
cccacgcgtccggctcaggaggaacttcagcgacaccgggtgctttggtttcggcatccaggagcacatcgaccttggtatcaagtacgatccttcaacaggcatctacggaatggacttctacgtcgtgctggagcgtgtgggctaccgtgtggcacgccgcatgaggtgcaagtcccgcgtcgggattcagcacagggtgaccaaggaggactccatgaagtggttccaggtcaagtacgaaggcgtcatcctcaacaaggctcaggccaacacgttgtaaacctcacctgtgg

SEQ ID NO: 9778 - DNA, 290 bp, Zea mays
  unsure (1)..(290): unsure at all n locations
ggaactcgatcgcaagtataagccagttgacatgacaagatgggatataccacaatttggagatgaactacatgaattcttacgacacaagaggtacttgatcgttgttgacgacatatgggatgctagatcatgggagacaatcagatatgccttgaaggacaataaccgtggaagtagaataatcatgactactcgtaattttgggggtgtcactacagtagaagacggttacaaattanaacctctaactaatggaaactcaaagaaattattctataaagaataca

SEQ ID NO: 9779 - DNA, 298 bp, Zea mays
gtgaacaccagccgtcttggcccgcttctcccctgctgcggccatggcgacctccgctgcgctctcgaccgccgccaaccccacccagctctgccggtcccgcgctgcgctgggcaagccagtgaaggggcttggcctggggatggggcgggatcgcgcaatccagcggagcatcacgtgccaggcggcgagcagcatccccgccgaccgcgtccccgacatggagaagcggaagctgatgaacctcctcctcctgggcgccatatcgctgcccaccgtcggcatggtcgtcccctac

SEQ ID NO: 9780 - DNA, 294 bp, Zea mays
gaccgaagctctatgtgggttccaatttgttcttacacatctggacaacaggcagcttctgatcaaatcaaaccccggcgaagttgttaaacctgaccaattcaaggcaataaacgacgaggggatgccgatttaccagaggcccttcatgaaggggaagctctacattcatttcacggtggagttccccgactcgctggcaccagagcagtgcaaggctctcgagtcggtacttccgccaaagccttcgtccaagctgacagacatggagatcgatgaatgcgaggagacaac

SEQ ID NO: 9781 - DNA, 295 bp, Zea mays
cccacgcgtccgaagaaatgcttcaagctgtaaaggaaaggaaggcaaaggatgggaatgcatttgctcgtgaaatgctcgatgaacgaacgaagaaggccgaaacatggcaccataatgctgccaaccgtgtggcatattccaaaccagctgatcctatcacttgtgcaacatttgctcaagatgtcattgaaggtagagcaagcgtttcacaagctcacgagcacaaacaccagcccctgatatttggacctgcaagtattgttggtggtggtctaaccagtgaaagggaaag

SEQ ID NO: 9782 - DNA, 282 bp, Zea mays
ccgcgtgcgaaccaagcagaccccagcataagaagcgaagtcgtcgccggagcaggaggaagagcgagcagcaagatgtcgtggcaggcgtacgtcgatgaccacctgctgtgcgacatcgaaggccagcacctcagcgccgccggcatcgtcggccacgacggcagcgtctgggcacagtccgagaacttccccgagttaaagccttaggaggttgctgggatgataaaggactttgatgaagctggaactcttgcaccaactggtctttttgttggaggt

SEQ ID NO: 9783 - DNA, 291 bp, Zea mays
cccacgcgtccgccagatctatcaccttgcttgccctgcttcaccaatcttctacaagcacaatcctgttaagaccatcaagacaaatgttattggtaccctgaacatgctgggacttgcaaagagagttggagctaggattttgttgacatcaacatctgaagtttatggtgatccacttgagcatcctcaaaccgaggcctactggggcaatgttaacccaattggagtcaggagttgttatgatgagggtaagcgtgtagcagagacgctgatgttcgactatcacag

SEQ ID NO: 9784 - DNA, 295 bp, Zea mays
ctcctccgcgtccacggtctcgcccctgccccacatgttcgtcgtcaaggacctggtggtggacatgaccaacttctacagccagtacaagagcgtcgagccatggctcaagcgcaaggaccagcccccgcagcagggcaaggagatcccgcagaccaatgccgaccgggccaagctcgacggcatgtacgagtgcatcctctgcgcctgctgctccacctcctgcccttcctactggtggaacccggaggagtacctcggcccggccgcgctgcttcacgccaacaggcttccg

SEQ ID NO: 9785 - DNA, 291 bp, Zea mays
cgtcactcaacacagcacaggcagctcgagagagagatatagagaaagatgtcgtggttcgggcaccaccaccacaaccagccggctcccccggcgtcgggccccaaccaggtgttcaagatcttctgccgcgccaacgagaactactgcctggccgtccgcgacggcgccgtcgtgctggccccggtcaaccccaaggacgaccaccagcactggtacaaggacatgcgcttcagcacccgggtcaaggacgaggaaggcatgccggcgttcgcgctcgtcaacaaggcc

SEQ ID NO: 9786 - DNA, 303 bp, Zea mays
cccacgcgtccggggacaccatggctccgatgaagctgtacggggcggtgatgtcgtggaacgtgacgaggtgcgcaacggcgctggaggaggctggctccgactacgagatcgtgcccatcaacttcgccaccgccgagcacaagagccccgagcacctcgtccgcaacccgtttggtcaggttccagctctgcaggatggtgacttgtacctcttcgaatcacgagcaatctgcaagtacgctgctcgcaaaaacaagccagagctgttgagggaaggaaacctcgaggaggcagcaatgg

SEQ ID NO: 9787 - DNA, 291 bp, Zea mays
gtgtgcataagctgtggagtcaatatgggagagtacttttgtgatatatgcaaattttatgatgatgatacagacaaagggcagtaccattgcatcgattgtggcatatgcagggttggtggcaaggaaaacttcttccactgtgtgaagtgtgggtcctgctattctgttatactccgtgataaccatcagtgtgtggagaactcaatgaggcagaattgcccaatctgttatgagtatctatttgactcattacaaggaacaagagttctgaactgtggacacacaatg

SEQ ID NO: 9788 - DNA, 287 bp, Zea mays
gcatggtctcacctacagatcgtgtacgaggttttcttgagatttgtagcttcacaggagacagatgcaaagttggccaagagatatatagaccattcctttatccttaggctgctagacctttttgactctgaggaccccagggaaagggactatctaaagacgatacttcatcgaatatatggtaaattcatggtccatcgaccattcatcaggaaagcaattaacaacatattctacaggtttatattcgaaacagagaaacataatggtgttgcagagttgtt

SEQ ID NO: 9789 - DNA, 286 bp, Zea mays
cccacgcgtccgcccacgcgtccgcccacacagaagcggcggcggcggagcaaacgcaggcgaaggcgagggtgtgagggaaggagcaccagccatggtgcacgtcaacttctaccgcaactatggtaagacgttcaagaaaccaaggcgtccttatgagaaggagcgtcttgatgctgaactgaagctggtcggtgagtatgggctgaggtgcaagcgtgagctttggagggtccagtatgcactgagcaggatccgtaatgctgcaaggcacttgctcaccctt

SEQ ID NO: 9790 - DNA, 294 bp, Zea mays
cggacgcgtggggtcaccgacgaccccatgctccgcccctggcagccgtccttccccccgatgcagcccatcgggttctgagaatctgagcctcagccggcggaagagagccaatttctgtcgtcgtgccgctgtctatctcgtattggtatatctattcataaatcatccttgtcatggtttgctcttcttgtcagtgttataaatttgcttcttgttagtgttataaatttggccatcggaaaggatgtgtttgtagttgtaatatcttgtttggagttgtaatatcttatc

SEQ ID NO: 9791 - DNA, 289 bp, Zea mays
cccacgcgtccggcgcgagatctccgatccccgcccaaatcccacgacgccggcggcgccatgggcggcaaggacctgacggaggaccagatcgcctcgatgcgggaggccttctcgctgttcgacacggacggggacggccgcatcgcgccctcggagctgggcgtcctcatgcgctccctcggcgggatacccacgcaggcgcagtccgggacatcgcggcgcaggagaagctcaccgcacccttcgacttcccgcgctttctcgacctcatgcgcgtccacctcaa

SEQ ID NO: 9792 - DNA, 286 bp, Zea mays
gccatggagaactatggcttggttacataccgtgaaacagcattgctatttgatgagatgcactctgcagctgccaataagcaacgggttgcagttgttgtagctcatgaattagctcatcaatggtttggaaatcttgtcacaatggaatggtggacacatctgtggcttaatgagggctttgcgacttgggtgtcttacttagctgcagatcagttctttcctgaatggaatgtttggactcagtttctagaggaatctacaataggtttcaagttggatgctc

SEQ ID NO: 9793 - DNA, 277 bp, Zea mays
gcagctcaaaactctagctagctaccaggggggaaaatggctccacttctcgccgcagccatgaaccacgctacccatccagtccttagaagccatctaggacccaacaatgagagtttctcacgacaccacctatcttcttcaccacaaagcagtaagcgaaggtttaaccttagctttacgccacgatctgcaagggtaggcaatgaaaatggagtccaattgttgagcccctcggaaatccctcgaagggactggttcccctctgacttcatct

SEQ ID NO: 9794 - DNA, 300 bp, Zea mays
gcggctgcagcggatctttggcgcctccggcatggggcagccgccgacggactcgccgctgctcgattcctccgagcaggtctacatctcctccctagcgcttctcaagatgctcaagcacgggagggctggggtgcccatggaggtcatgggcctcatgctcggcgagttcgttgacgactacaccgtcagggtcgtcgacgtcttcgccatgccgcagagcgggactggtgtcagcgtcgaggccgtcgaccacgtcttccagacaaacatgcttgacatgcttaagcagaccggcag

SEQ ID NO: 9795 - DNA, 279 bp, Zea mays
gcttctgctggacgtcacccctctgtccctgggtctggagactgctggaggagttatgacagtgctgatcccgaggaacaccaccatccccaccaagaaggagcaggtattctccacctactcggacaaccagcccggtgtcctgatccaggtctacgagggtgagaggacccggacacgcgacaacaacctgctgggcaagttcgagctctccggcatcccccctgcaccccgtggtgtgccacagatcaccgtgtgctttgacatcgacgccaacgg

SEQ ID NO: 9796 - DNA, 275 bp, Zea mays
caattcctgacctcagtggctcctccaacctatccatcattcatcttgagaacaaccaactgaccggaaatgttccttcctactttggcagcttgccaaaactgagcgagctgtaccttgagaacaaccggttgtctggacccattcccaaggctctgctaagtcgaagcattattttcaactactctgggaacgtgtaccttggaacagcagggaagcaaaagaagaagcatgtcatcatcattatatctgctctgcttggagcatccttgcta

SEQ ID NO: 9797 - DNA, 274 bp, Zea mays
gtctgtaagatagttgaggggcagcgctactcggaacgacttaatgataaacagatcactgctctactgaaggtgacttgcgaacgtgcccaagcgcgtgagaaggacatcttggaggtgattgtgatcatatttcttggagtctgcttctaacccgggacctggtgacttagtgagacgtctctcaccactgcaccaggcctgcccttcttctggaaaattacatatttgttattattggtgcatatataatgactaaatatatggaatattt

SEQ ID NO: 9798 - DNA, 269 bp, Zea mays
gaactctgtcactgtatcttccaggcggcctgttgttcttgcagatggcacttatgccacacaaagcgctgctactgagaccattttgactccatcagttgctcctgggtcattggcatcaaccctgaacctcagatcactcattctatcaggtgatttctttctggctgctgttgttgcatgtaccctggccaagcttgtgctgaggctggaagaagtgcagccatctaaggatgagtcaaacaaggcttgcactggagcattgctga

SEQ ID NO: 9799 - DNA, 328 bp, Zea mays
gtcgtcaggttcacgcagcggaacctactgcgcattttcccgcggtcgacgcgcatcacgtcgtccaactacaacccgctgatggggtggaggtacggagtccagatggtggcggcaaacatgcagggccacgtggaggaagctgtggctgacgcaaggcatgttccgggcgaacggcggctgcggctacgtgaagaaacccgacgcgctgatgcgcacatagccgttggacttcgacccgagagccgagctgccggtgaagacgaggctgagggtgacggtgtacatgggggacggctggcggttcgacttccggaagacgcacttc

SEQ ID NO: 9800 - DNA, 325 bp, Zea mays
cccacgcgtccgagaaaattgctttcattcttgagcaggtccggctatgcctggatcggcaagattttgtcagagcacaaattttatccaggaaaatcagtactagagtatttcacgcagatccatcaaaggaaaaaaagaaaccaaaggaaggtgacagtattgttcaggatgctcctgcagatattccttcccttctagaattgaagcgcgtctactacgaactgatgattcgttattactctcacaacaatgattacttggaaatctgccgttgttacaaggctatttatgatattccagcaataaaagaggatccaacaaa

SEQ ID NO: 9801 - DNA, 321 bp, Zea mays
cgccgacaaggtcggggccctgctgctctgcgacatggcgcacatcagcgggctcgtcgccgcgcaggaagctgcaaatccttttgaatattgtgatgtggttaccacaaccacgcacaagtccctcagagggccaagggctggcatgatcttctacaggaaaggccctaagccccccaagaagggccagcctgagggtgctgtttatgattacgaagacaagatcaactttgcagtgttcccatctctccaaggtggccctcacaaccaccagattgctgcacttgctgttgctctacagcaaactatgtcgcctggctt

SEQ ID NO: 9802 - DNA, 308 bp, Zea mays
actagttctagatcgctatcggccgccctttttttttttttttttttttttttttgatatgaacaatcatggccaatagggggctacgaacaatttactacatagtacaaattggaaacacacacagcagcagtatccaatggagtggaaccatagagtatatactcaaaataacccaaccattaaccaccagagaactacttattagccagctactcaatagtcgtctccctcgtcaccctcatcatcggcaccctctgcaccgacttcctcatagtccttctcaagagcagccaagtcctcaaggg

SEQ ID NO: 9803 - DNA, 321 bp, Zea mays
tgatgatctcattgagaaagccgatggttttgctggtgtattccctgaacataagtatgagatcgtgaaacgtctacaagcacggaagcatatctgtggaatgactggggatggagtaaatgatgctccagccctgaagaaagcggatatcggtattgctgttgccgatgcaactgatgcagccaggagtgcttcagatattgtcctcacagaacctggacttagtgtgatcattagtgctgtgcttactagtcgtgcaattttccagcgtatgaagaattacacgatctatgctgtctctatcaccattcgtattgtgct

SEQ ID NO: 9804 - DNA, 323 bp, Zea mays
ccaaaacccaaccaaaccctaaattcgccgccctcagctccggtcagaccctcccccttcgaagatgccgaacctcgagtgccggatgtatgagcagcggttcccgtgagtggatgccgcggtgatgatccaggtgaagcacatcgctgacatgggcgcgtacgtctccctgctcgagtacaacaacatcgagggcatgatcctcttctccgagctctcccgccgtcgtatccgctccatctcctccctcatcaaggttggtcgccaggagcccgccatcgtgctccgtgtcgaccgcgacaagggctacatcgacctttcaa

SEQ ID NO: 9805 - DNA, 328 bp, Zea mays
caacatcttctgggagaaccaggacgcgacgccccggtgggtgaagaacctgacggcggacgacctccgcgccgccgtcaacacgcgcatccagagcctcatgacccgctaccgcggcgagttcgcgcactgggacgtgaacaacgagatgctgcactacaacttctacgagcagcggctggggcccaacgcgtccgcggagttcttcagcgtggcgcaggacgcctacccgctggccacgctcttcatgaacgagtacaacgtcatcgagacctgcgacgaccccttctccaccgtcgacacgtacgtgtccaagctcaaggacctc

SEQ ID NO: 9806 - DNA, 321 bp, Zea mays
gcccgacgaagaagggacaccggaaggcgtgcccaccgcctccgtctcccccgacgccgacacccacgcccacgccgtcctcggacaagtgccgcatcgacgcgctcaagctcggcgcctgcgaggacgttctcgggaacgaggtgcacgtcggcgacgccaacgtccagtgctgcccgctcgtgaagggcatcgccgggctctccgcggcggcgtgcctttgcaccgccatcaaggccaaggtgctcgacatctccgtctacgtgcccatcgcgctcgaggtgctcgtcaactgcggctgcgtcgtcccgccaggctaca

SEQ ID NO: 9807 - DNA, 317 bp, Zea mays
ggccctgagactcaggtccttaattacaagactcaacagagcagactatttccattgctggcttcagcatatgcatttagatttgtgggtgattggctcaactggctatatacggatgtaactcagaaactggaagccaaggacttctcgacgctgcaggaagctcatgcatgcactgctggtttgaaagctgtgacaacatcagtaacagctgatgcaattgaagaatgccgaaagctctgtggtggacatggttacttgaacagcagtgggcttcctgagttgtttgcggtctatgttcccgcttgcacttacga

SEQ ID NO: 9808 - DNA, 317 bp, Zea mays
ctcacgcgtccgcggacgcgtgggcggaccgtgggtgatccagttcgccgacctcaccaacgacgagttccgcgccgcgtacctcggcgccatggtccccgccgcccgccgtggatccgtcgtggccttagaggtaccgccacgacggcgccgccgaggagctgccggagagcgtcgactggagggagaagggcgccgtcgcgcccgtcaagaaccaggggcaatgcggaagttgctgggctttctctgcagtaagctcagtggaaagcgttaaccagatcgtcaccggtgagatcgtgacactgtctgaacaggag

SEQ ID NO: 9809 - DNA, 321 bp, Zea mays
ggggcgaccgccgcaacacaaatccacacgcccgccgccaccgccgccatacggacccactcctcctttgccctggtgcgagcaggcttcggcagcataacccgcagactgctcccggacgagggagaacgcgcggggctgggctagccgctacccgctagccaggggaccggggcggaggcagcgaggaggtacgtatggacaagtacgaggcggtgcgggacatcgggtcggggaacttcggggtggcgcggctgatgcgcaaccgcgagactcgagagctcgtcgccgtcaagtgcatcgagcgtggccaccggattg

SEQ ID NO: 9810 - DNA, 318 bp, Zea mays
cggacgcgtgggcaagtccactggcttcggcctcatctacgataacctcgagtctgccaagaagttcgagcccaaataccgcctcatcaggaatggtcttgctactaaggttgagaagtcccgcaagcaaatgaaagagcggaagaacagggccaagaagatccgtggtgtcaagaagaccaaggctggtgacgccaagaagaagtaaacagtcatttatatttctgtattactgtcctgaactctgggtggtcgtctagttgcaatgtcataattatggtcgtgttaggttttgttccgcactcagcagtaagtgaa

SEQ ID NO: 9811 - DNA, 320 bp, Zea mays
gtcgactctggcaagtcgaccaccacaggacaccttatctacaagcttggaggcattgacaagcgtgtgatcgagaggttcgaaggaggctgccgaaatgaacaagcggtccttcaagtacgcctgggtgctcgacaagctcaaggctgagcgtgagagaggtatcaccattgatatcgctctgttgaagtttgagaccaccaagtactactgcacggtcattgatgcccctggacaccgtgacttcatcaagaacatgatcactggtacctcccaggctgactgtgctgtccttatcattgactccaccactggtggtt

SEQ ID NO: 9812 - DNA, 322 bp, Zea mays
cccgacggcaagacccaggtgacggtggagtacgtgaacgagggcggcgccatggtgcccgtccgcgtgcacaccgtgctcatctccacccagcacgacgagaccgtcaccaacgacgagatcgccgccgacctcaaggagcacgtcatcaagcccgtcatcccggagaggtacctggacgagaagaccatcttccacctcaacccgtcggggcgcttcgtcatcggcgggccccacggggacgccggcctcaccggccgcaagatcatcatcgacacctacggcggctggggagcccacggcgggggcgccttctccggca

SEQ ID NO: 9813 - DNA, 311 bp, Zea mays
cggacggtgggctccggcacgcggtgccgcgttcaccgcgacgacgccctgtaccaggccaccgaggaccagcagggattgatacaatggaatggacagcaagaagttttgattgacagatttgatggccgtgcattgcttgattttatccgagactcgagctctcgcccttttcgagtccaagggaaatctgaagaagaggaagagttagaggaatttgttaattttgaacgttaccgggatttgattaagcatcgtcgcagaggattttctgatgaggccggtttgcagcatgttgtgcaagagttgga

SEQ ID NO: 9814 - DNA, 311 bp, Zea mays
aaccaaacagtatccttggtttatctcatggatttcttctgggacatttgcaatcactcggactcgatttcccaaagaacatcagtgtgattgctgtatgccccaagggaatgggtccatccgtccgcatgctttatgttcagggcaaggaagtcaatggcgctggcatcaactctagctttgctgtgcaccaggatgttgatggaagggcaactgatgttgctttagcatggtcagttgcacttggttcccccttcacgtttgctactactttggaacaggagtacaagagtgatatctttggagagcga

SEQ ID NO: 9815 - DNA, 312 bp, Zea mays
cccacgcgtccggacgcttcccaattccttccaatcggcacctcgccgtcctcgtgtgcaatccccagctctcctcgcccctccctcccaaactccagcggcaccacctgaccaagctccggggacggatggacggaggagccggctttccgggcacgcagccggtctcccgctcgccggaggacgtcttccgggactaccgcgcgcgccaggccggcctgatcagggcgctcaccaccgatgtggagaagttctacgtgatgtgcgacccagagaaggagaacttatgtttatatggacttcctaatgaga

SEQ ID NO: 9816 - DNA, 310 bp, Zea mays
cgtccttccggttcagccccatcaaggagtccatcgtgtcccgcgagatgacccggcgctacatgacggacatgatcacccacgccgacaccgacgtggtgatcgtgggcgccgggtccgcgggcctgtcctgcgcgtacgagctgtccaaggaccccaccgtgagcgtcgccatcgtggagcagtccgtgtccccgggcggcggcgcgtggctgggcgcgcagctgttctcggccatggtggtgcgcaggccggcgcacctgttcctggacgagatgcgcgtgggctacgacgaggccgaggactacgt

SEQ ID NO: 9817 - DNA, 315 bp, Zea mays
gtagtgaccaggagcgagcagccgaggaaaggagtcaagcaatggagaaggccgtcgacaggcagcgggtcctgctgcgacacctgaaccccgccgcggcgtcgagccccgccccgcccgccatctccgcaagcgcgtgctcggcgggggacagcgcggcgtaccaccggaggccggccttcgccgacgacgtcgtcatcgtcgctgcttacaggacggcaatttgcaaggccaagagagggggtttcaaggatacctttgctgaggacctcttggttcctgtcttcaaggctttggtagacaagacgaagctgg

SEQ ID NO: 9818 - DNA, 313 bp, Zea mays
cctgattctatccagctagtcgctgagcatgctgcagcaaataacaaggtgttcctgatgaacctctctgctcccttcatttgtgagttcttccgtgatgcccaagagaaggtcctcccgtatgctgactacatcttcggcaacgaaactgaggcaaagatctttgccaaagtcagaggatgggagactgagaatattgaggagattgctttgaagatctctcaacttcctttggcttcaggcaagcaaaagaggattgctgtgattactcaaggtgctgatccagtggttgttgctgaggatgggaaggtga

SEQ ID NO: 9819 - DNA, 314 bp, Zea mays
acctccaactatcccacccaatgcaaccctgcagtttgatgttgagctgctttcatggaccagtgtcaaagacatttgcaaagatggcggcatattcaagaagatccttaaagagggagagaaatgggagaacccaaaggatcctgatgaagtacttgtgaaatatgaggcccgtctggaagatggtactgttgtatccaagtctgagggggttgagtttactgtgaaagatggctacttttgtcctgccctggccaaagctgtcaaaaccatgaaaaaggcagagaaggtgctccttacagtaaagccacaat

SEQ ID NO: 9820 - DNA, 299 bp, Zea mays
aacgacacaatctttaaataaattaatgaactgccaagcgataactgcgccacaagcttaaatttatgctccgaggaaaatacatctaatcaaccataaaaagtaggcacgcagtactagctagatggtgccaccgttgcagcgcaggacctgcgcgttgacccagtggccagcatcactagcgaggaagctgacgagcggcgcgatgtcctcgggcatgccgagccggcccagcggcgcctcggcgatgtatcgctccatgtcatcctccgtcttgccggtgtacatcatgggtgtcc

SEQ ID NO: 9821 - DNA, 318 bp, Zea mays
ccctcccctagccgccgccgccgctcgtctccctgagaggtgccgggaccgaggaactggccgagttctaggtagagaatcggttttgcttgtctcagcacggggtctgctgcgtctggtggtggtgaaggggagaaattcgtgagatctgttccggatcaggcgtgcgagctcgggaatcaggggtttcacacatagcttcgtcgatttgaatttgatgtactaatggagtctaagggtggcaaaaagtctagcagtagtcgttccatgatgtatgaagctccccttggctacagcattgaggacgttcgacctgcc

SEQ ID NO: 9822 - DNA, 233 bp, Zea mays
cccaaaccccaattccacaatgaggccgtcgctgatgagatccacctcccagctcctccgccgccggagctactcctccgcatccgggcagcccgagcggaaggtggccatcctccgggcggccgggggcatcgggcagccgctgtcgctgctcatgaagctcaacccactcgtctcctccctctcgctctacgatatcgccggcaacccaggtgtcgcggccgacgtctccc

SEQ ID NO: 9823 - DNA, 241 bp, Zea mays
gcgccacgggtggctcaccaccaccgcgctcctgaagaccgccgacctccagcccaaggagcagggcaagcccgagacgctcgactaccgcgtgttcctcgtcgacggcgggggccggaaggtgtcgccgtggcacgacgtcccgctgcgcgccgggtgacgggtgttccacttcgtcgtcgagatacccaaggagagcagcgcaagatggaggtcgcacgacgaggcttcacgccatcag

SEQ ID NO: 9824 - DNA, 312 bp, Zea mays
tgatactggtaactactcatggggaagtgaagctgttacccgcaagacccgtatcctcgacgtggtctacaatgcatcaaacaatgagcttgtgaggacacaaacccttgtgaagagtgccattgtgcaagttgatgctgccccattcaagcagtggtacctcactcactatggagttgacattggtaggaagaagaaaacccctgctgcaaagaaggataatgctgagggacaagaggttgaggcagcagctgaggaaacgaaaaagagcaaccatgtcacgaggaagcttgagaagcgcaaggagggacg

SEQ ID NO: 9825 - DNA, 304 bp, Zea mays
ccgcttctgcctctgcttctgctggtggtggccgcggcgatgacgctctcccccgccgccgcccgcattcccggcgtgtatgtcggctgcggcggctggcagagcgcgcacgccacgttctacggcggcagcgacgcttcgggcaccatgggcggggcctgcgggtacggcaacctgtacagccaggggtacggcgtgaacaacgcggcgctgatcacggcgctgttcgactatgggctccgctgcggcgcgtgcttcgagatcaggtgcgaggagcagcccggttggcggtggtgccggccag

SEQ ID NO: 9826 - DNA, 316 bp, Zea mays
atgaaccagacacagagctacctccagctgttgatgggttgcttagagttcatagaaggataacagatggtttagaaactgaaactgatcagcctcaacgagctactgtcaacactgggccgacaaggctactggttccagcttcccaagctggcagcctaattgggaagcaaggagcaactattaagtcaatacaggatgcttcaaagtgcgttctccggattgttgagaatgttccacctgttgcattaaacgatgacagagttgtagagatacagggtgaacctcatgattctcacaaagccgtagaactgat

SEQ ID NO: 9827 - DNA, 231 bp, Zea mays
cccacgcgtccgcggacgcgtggtcgccgtcgtcttctgcggttctgccgtctacggctccaatttggcctctctcccttgcaagtttaagcttcaacttcaaccatgcgtaaggagaagtccacatcaacattgtggtcattggccacgtcgactctggcaagtcgaccaccaccggccacctgatctacaagcttggaggcattgacaagcgtgtaatagagaggtttg

SEQ ID NO: 9828 - DNA, 305 bp, Zea mays
gtggacctgattgatttggcaaagaagatacagaaaacaccaatagttgttggcaactgcacaggtttcgctgtcaaccggatgttctttccttacgctcaggcagcttcttttcttgttgattatggtctggatgtgtatcacatagatcatgtgatcacacaatttggaatgccaatggggcccttccgattagccgatcttgttggttttggtgttgctattgctacaagaaagcaatattaccaaagttatcctgagcgaagttacaaatcaatgcttcttcagattcttgttgaggataa

SEQ ID NO: 9829 - DNA, 310 bp, Zea mays
gacatgtacatgaaggtcaagggtaatatgtttaagaacaagagggtgcttatggagagtatccacaagtccaaagctgagaaggccagagagcagacactttctgatcagtttgaggccaagcgtgcaaagagcaaggcaagccgtgagaggaagattgctaggagggaggagaggctggcccagggcccaagagaaccaacagcacctgtcgcagccccagctccatctactggggtgccaaagaaagcaaagaagtgaagtatggaaacaaagctgtagctttttggtactatataagcatgacttt

SEQ ID NO: 9830 - DNA, 306 bp, Zea mays
ggcggactgctgccgcggcggcgtccaacaacctggtggtgtcgttcggcgagatgctgatcgacttcgtccccgacgtggccgggctgtcgctggccgagtcgggctgcttcgtcaaggcacccggcggcgcgcccgccaacgtcgcctgcgccatcgccaagctcggcggatcctccgccttcgtaggcaagttctgcgacgacgagttcgggcacatgctggtgaacatcctgaagcagaacaacgtgaacgcggaggggtgcctgttcgacaagcacgcgtggacggcgctggccttcgtga

SEQ ID NO: 9831 - DNA, 309 bp, Zea mays
cggacgcgtggcggacgcgtgggcaattatttggcctccgtcagagaggggagaaagacccgttcgaggcggcggcgatgtcggggcgcggcaagggcgtcaagggtctgatgcaagggtggagccaagcgccaccggaaggtgctccgcgacaacatccagggcatcaccaagccggcgatccggaggctggctcggaggggcggcgtgaagcgcatctcggggctcatctacgaggagacccgcggcgtgctcaagatcttcctcgagaacgtcatccgcgacgccgtcacctacaccgagcacgcg

SEQ ID NO: 9832 - DNA, 312 bp, Zea mays
gggaaaggcaaagtctggcttgaccccaatgaagtcagcgagatctccatggctaactcccgccagaacatccggaagttggataaggatgggtttatcatcaggaagcctcagaaggttcactctaggtcccgtgcaagaagggcacatgaggccaagcagaagggaaggcactctggatacggcaagcgcaggggtaccagggaggctaggctccccaccaagattctgtggatgaggaggatgcgtgttctgaggcgcctgctccgcaagtaccgtgatgccaagaagatcgacaagcacatgtatcat

SEQ ID NO: 9833 - DNA, 321 bp, Zea mays
cacaccccccgagctcagcttagctccactccagctccaatcacagtcgtgaccagagcgcgagagctagctagagggccgtgaaaatgccgatcaataggatcgccctggggagcctacaggaggtgtaccacccgggcgccctcaaggcggcgttcgctgagttcatctccaccctcatcttcgtcttcgccggccagggctccggcatggccttcagcaagctgaccggcggcggcccgacgaccccggcgggcctgatcgctgcggcggtggcgcacgcgttcgcgctgttcgtggcggtgtctgtgggcgcgaaca

SEQ ID NO: 9834 - DNA, 299 bp, Zea mays
gcacaaattacttatttgcttgcaatcttgttctgcgttttgtgctctatgcaatgatgcgccagaagatcctgttgtcactctatgtggtcatgttttttgcaaccagtgcatactggagcaactcactggtgacgacagtgtatgcccagtgtctaattgtagagtccgactaaacacatcctcactcttctccagaggcactcttgaatgctctctgagtaaattagcctctgatttcaagtctgatgatacatgtatggaaatgatacatgctgaaaagcgccctgggatggatt

SEQ ID NO: 9835 - DNA, 301 bp, Zea mays
catcaacattgtggttattggccatgtcgactctggcaagtcaaccaccaccggccacctgatctacaagcttggaggcattgacaagcgtgtgattgagaggttcgagaaggaagccgctgaaatgaacaaacggtccttcaagtacgcttgggtgcttgacaagctcaaggctgagcgtgagagaggtatcaccattgatattgctctgtggaagtttgagaccaccaagtactactgcactgtcattgatgcccctggacatcgcgacttcatcaagaacatgatcacgggtacctct

SEQ ID NO: 9836 - DNA, 302 bp, Zea mays
ggacggagagccgcgacgtctgcaacggtttccgctgcgtccgcatggtcaacaacatctacctcaacttcgacgccctccacgagcgacaagtggcacggcggcgtccgtgacggcaccaacgtcgtgctctggaagtggtgcgatggcgacaaccagcgctggaagatccagccctactactgaaccaacggatgatatgaccatcgcgcccatcgatcgtgcacatgcatgcatacgtactagcagaataacaggggtcttatctcccgaggcgtcttttgcatgcatgccagcagttg

SEQ ID NO: 9837 - DNA, 301 bp, Zea mays
cggacgctggggtcgcgccgccgccgccgccgaaacagcacatcgctctctcgatctcagccatggcggaggtggagcagccccaggacgcggtgaagctatgcaaccgctggaccttcgacgatgtccaggtgaacgatatctcgctgaacgactacctggctgtgactgcggcgaagacgcgacattcctgccgcactccgcggggcgctactccaagaagcggttccgcaaggcgcagtgcgccatcgtcgagcgcctcaccaactcgctcatgatgcacgggcgcaacaacggcaag

SEQ ID NO: 9838 - DNA, 303 bp, Zea mays
aatacatcctactttgttctcaggtactagagggaggcttgagggataagcctggaaagaacagagatcactatcattcatgctactgcctcagtggcctcgcagttagccagtacagtgccatgactgatactggttcgtgcccattacctcagcatgtgcttggaccgtactctaatttgctggagccaatccatccactctacaatgttgtcctagataagtaccatacagcctatgagttcttctcagaagagtgatctaatgttagaacctaagaacaattggctaaggttgtgtacg

SEQ ID NO: 9839 - DNA, 115 bp, Zea mays
cggacgcgtggctcgcaggagccgggcaaccctaccaaatcggccaaggccatgggaagggacctgagggtccacttcaagaacacaagggagacagctttcgcgcttcgcaagc

SEQ ID NO: 9840 - DNA, 317 bp, Zea mays
tgaaacgggagagagagagagagaagagagagagaagagagagagagagagaggagtgggagacccgcgagaggctgccgtgtagggaccgtagactcagcgactgcgaaggagggataaggggatggccgggatcggaccgatcaggcaggactgggagccggtcgttgtgcggaagaaggcacccaccgccgccgccaagaaggatgagaaggccgtcaacgccgcgcgccgcgccggtgcggagatcgataccatgaagaagtacaacgctggtacgaacaaggcggcatccagcggtacatccctcaacacca

SEQ ID NO: 9841 - DNA, 306 bp, Zea mays
cccacgcgtccgagcttgctggagtggttgcagtcgaagtgactggggggccaactgttgaatttattcctggcagacgtgattcgtcggtgtgcccccgtgaagggcgtctgccagatgctaagaaaggtgcaccacatctgagggacatcttttatcggatgggcttatcggacaaagatattgtagctctatcagggggacatactctgggaagggctcaccctgagaggtctggattcgatggtgcctggacaaaggagcctcttaagtttgataactcatactttcttgagctgttgaatg

SEQ ID NO: 9842 - DNA, 306 bp, Zea mays
cccacgcgtccgcaactcgccgtctgccttctgcgcctccatttcggcctctgtcccttgcaagttcaatctcacctccaaccatgggtaaagagaagtcccacatcaacattgtggttattggccatgtcgactctggcaagtcgaccaccacaggacaccttatctacaagcttggaggcattgacaagcgtgtgatcgagaggtttgagaaggaggctgctgaaatgaataagcggtccttcaagtacgcgtgggtgctcgacaagctcaaggctgagcgtgagagaggtatcaccattgata

SEQ ID NO: 9843 - DNA, 304 bp, Zea mays
accacgcgtccgcggacgcgtgggcctgagagcaatgggtacttgcgtgtctggtgcacggcggcttgacccaacaacgcatgcaatatgtaatgctgttgtcgtagcacgaatcatgaatgctacactagtgctgccagagttagacacaaattcattttggcacgatgagagtggttttgtagatatatatgatgttccccacttcatcaacacattgaaatatgatgttcgaattgtcatgagcattccaaaaatcactgcacaaggaaagaccaagaagctcaaagcatataagatttta

SEQ ID NO: 9844 - DNA, 308 bp, Zea mays
cggaccgtggggtcacttgttgtcatcatgtcagttcttgcttcttttctatttgctcgaaactgccgacttctacgccatggagttgataatcacccacacttacgtcaagaaacaagtggtggaaaagtttccctgctcagcgtacagtgctccctgttctagtgaagataatttccaggaagcttgtgcaatttgcttagaagactacaataatggtgatatgcttagacatctcccatgcaagcatgaatttcacaagatctgtattgattcttggctcaccaaatggggcatcttctgcccta

SEQ ID NO: 9845 - DNA, 308 bp, Zea mays
ggacgcgtgggttttgtcgagcacatgctgttcaagggcacggggaagcgcagccgcgcactggagctggagatcgaggacatgggtggccaccttactgcgtacacgtcgcgggagcagacgacctactacgccaaggtgcttgacaaggacgtgccccgtgcgatggaggtcctctcggacatcctccagaactctaatctcgaccaggcccgcattgaacgtgagcgcgaagtgatcctacgagagatgggggaggttgagggacagtctgaggaagttatatttgatcatctccatgcaactgc

SEQ ID NO: 9846 - DNA, 306 bp, Zea mays
cttatagaatcttgtcttattagtatcagaggtcctgctgaggcggctgttgacgcggtccatgcaattctcaaggaccttgtccgcatagctatcaatgaaacacatgaactgaagcagtttcccacccttcgtgtggaagtaggcaatgcagcttttgagtcattggatagaatgagggatgaaagcaagaaaaatacattaaagctagttgacatggaatgcagctacttgacagtagatttcttcaggaagcttcctcaggatgttgagaagggtggaaatccaagccactctatttttgat

SEQ ID NO: 9847 - DNA, 290 bp, Zea mays
gaagaagccggcggcgcaccctccctacgctgaggtgattgtagaggcgatcgctgccctcaacgagaggaaggggtcgagctcggtggccatcagcaagtacgtcgaggggaagcatggcggcaagctccccaccagcttccgcaagcagctcactgtgcagctgaagaagctcgctgccgccggcaagctgacgagggtgaagaactccttcaagctgccggccaccgacgccaagcccaaggccgccaagcccaaggcacccaaggccgcggccaagcccaagccct

SEQ ID NO: 9848 - DNA, 299 bp, Zea mays
aaacaggtacaagaatctctgaaggttggccaatcaattatacagaaattttgggcaagagtcctgggtgtggaccctgctcttcgtgctgttgcttcaatgagcagggctgattgggcagcaaaacttaagcattggaaggatgaattcgtttgtacactgcagcattactggttagggacaaaactactctgggcagatgttaggatctcatcaagattgctggtgaaacttgctggggggaagagcctttcaagaagagagaggcaacagctgacacgcacaacagcagatatctt

SEQ ID NO: 9849 - DNA, 300 bp, Zea mays
ggaaattgacttgaaaattccaccaaggcctcctggttttgcttttgttgagtttgaggacgcacgtgatgctgaagatgcaatcatatggccgtgatggatacaactttgatggccataggttgcgggtggaattagcccatggtggacgaggcacatcttcttttgatcgatctagcagctatagcagtgctggacaacgcggtgcctcaaaacgttctgattacggggtaaggttactggattaccttcttcagcatcatggcaagatctcaaggaccatatgcggcgagctggtga

SEQ ID NO: 9850 - DNA, 302 bp, Zea mays
agattctgtggatgaggaggatgcgtgttctgaggcgcctgctccgcaagtaccgtgaggccaagaagatcgacaagcacatgtatcatgacatgtacatgaaggtcaagggtaatatgtttaagaacaagagggtgcttatggagagtatccacaagtccaaggctgagaaggccagagagaagacactttctgatcagtttgaggccaagcgtgcaaagagcaaggcaagccgtgagaggaagattgctaggagggaggagaggctggcccagggcccaagagaaccaacagcacctgtc

SEQ ID NO: 9851 - DNA, 303 bp, Zea mays
cactccccagcccagccctgctcactcccgcgggctaataatatctcacgccgctcgtcctcctcggcctcagctgccgccactcccacactcgcttcccgtgggctgcgcgggtgaaggagcgcgcgcgtgcgtacgtacgtgcgggtggttggactcggatctgctgctgggtggggcgcgggatggcgtcgttcgctgtgtccggcgcgaggctcggggtcgtgcggcccggcggctcggcgcgatctggtggggagcggaggagtgcggtggacttgccgtcggtgctcttcaggagga

SEQ ID NO: 9852 - DNA, 309 bp, Zea mays
atttctaccccgagacctccagccgtccgcccctgaaccctcagccttctccgtcccgcctcggcactcgacggccgccggcacacaccgcgcagtctcgagacaggaaccggaggaacgaggatggaggatgacttcgccgctgacgaagacgatgaagggtgcggtgacaggactcgcggcgggaccatctggggcaccgtcgtcgccacctggtacgacgtgccccgtgtggagcgccacgtcgcgctccctggccttatccggacgctcaagatgtgcggcacctacggggccaccttcggcaca

SEQ ID NO: 9853 - DNA, 299 bp, Zea mays
agaaaaggcgttcaaggcgcgcacctggccctgtgcttgactggatgcagagggtcaaaattgttattgaggctgcaaaaggtatagaatatctgcatgaaaaggttcagccttcaatcatccatcgggacatcagatcaagcaatgtactgctgtttgaggatttcaaggcaaaaattgcagacttcaatcttttgaaccaagcaccagatatggcagctcgtctccattcaactcgtgtattgggaacttttggatatcatgcacctgagtatgctatgactggccagctgacacaa

SEQ ID NO: 9854 - DNA, 300 bp, Zea mays
actttttggacctcccagaaacatccaagactcatcttacatatggcgctcttctcaattcttactgcaaagagttgatgactgagaaggccgagtcccttatggagaaaatgaaggagctcaactttgctttcactgccatgtccttcaacagcttaatgacgatgtacaccaaagtcaaccaagctgagaaggtccccagtatcattcaggacatgaaggcagatgacgtattgccagatgtctttacttataatgtttggatgagggcgcttgcagctctcaaggacataccagggg

SEQ ID NO: 9855 - DNA, 296 bp, Zea mays
gtcgcgtgcggccactagatttttcctgacgcggtgtctgctcccacttcccctcctctcccccaggtggcggcacggcggcggggtagcatttgtgctacgagggcttttgcaatggcggcttcggggttcggcggcggcgaggcgttccggctctcggccgcaccaggggccggcttactgaagctgcacaagggcgacatcaccctctggtccgtcgactgcgccaccgacgccatcgttaatgctgctaatgagcgaatgttaggtggcggaggtgttgatggagctataca

SEQ ID NO: 9856 - DNA, 295 bp, Zea mays
acctccacgagtttggtgatactaccaatgggtgcatatcgacaggaccacattttaatccaaacaatctgacgcacggtgcaccagaagacgaagtccgtcatgcgggtgacctgggaaacattgttgcaaatgctgagggcatagccgaggcaaccattgttgatacccagattcctttgactggcccaaattcagttgttgggagagcatttgtggttcatgagcttgaagatgatttggggaaagggggccatgagctcagcctctctactggaaatgctggtggaagact

SEQ ID NO: 9857 - DNA, 295 bp, Zea mays
cgcctaccgcgaccactgtacctacctcgcccgcagaggggacctcgtctccgccttctccgagctgatgggccgcgagggcggctgctcccgcgggaagggcggatccatgcatttctataagaaggatgccaatttctacggcgggcacggcatcgtcggcgcgcaggtgcccctcggatgcggcctcgccttcgctcagaagtacaagaaggaggagacggccacgtttgccctctatggtgacggtgcggctaaccagggacagctctttgaggctctcaacatttcggcc

SEQ ID NO: 9858 - DNA, 291 bp, Zea mays
gagatgaaaattctgggaatatactgaatttggtaatggtgaaggcagatgaaggaacaatgctgaaggtggatttgcctgtagagttcaagggagaggatgcttgccctgggttgaagaaaggctttttgcagaaaataaggaccagcctggtgtatctctgcccagctgagcacatccctccaaaaattgaggtggacctgacaaatcttgatgtcggagatagggtattgatgcatgacattcccgtccatccatcgctcaagttgctgagtaaaaacgagaccatgc

SEQ ID NO: 9859 - DNA, 321 bp, Zea mays
caacatccgcctcaacttcgacgccttccacggcgacaagggccacggcggcgtgcacgacggcaccaccgtggtgctgtgggagtgggccaagggcgacaaccagagctggaagatcctgccctggggcgacgaggcctacgccgggggcggcagcagcgccgccaacgcgccccgcttcggcggcggcgagcccaccgtccgcatctactgcaaggccgacgaagggttcagcgccacggtccgcaacggcgccgtgtgcctcgcgcccaccaacccgcgcgacgagtaccagcactggatcaaggacatgcgccacag

SEQ ID NO: 9860 - DNA, 320 bp, Zea mays
cccacgcgtccgcaactcgccgtctgccttctgcgcctccatttcggcctctgtcccttgcaagttcaatctcacctccaaccatgggtaaagagaagtcccacatcaacattgtggttattggccatgtcgactctggcaagtcgaccaccacaggacaccttatctacaagcttggaggcattgacaagcgtgtgatcgagaggtttgagaaggaggctgctgaaatgaataagcggtccttcaagtacgcgtgggtgctcgacaagctcaaggctgagcgtgagagaggtatcaccattgatattgctctgtggaag

SEQ ID NO: 9861 - DNA, 320 bp, Zea mays
acccacgcgtccgcggacgcgtggactgagagcaatgggtacttgcgtgtctggtgcaacggcggcttgacccaacaacgcagtgcaatatgtaatgctgttgtcgtagcacgaatcatgaatgctacactagtgctgccagagttagacacaaattcattttggcacgatgagagtggttttgtagatatatatgatgttccccacttcatcaacacattgaaatatgatgttcgaattgtcatgagcattccaaaaatcactgcacaaggaaagaccaagaagctcaaagcatataagattttacctcctagagatgc

SEQ ID NO: 9862 - DNA, 314 bp, Zea mays
ggaccgtggggtcacttgttgtcatcatgtcagttcttgcttcttttctatttgctcgaaactgccgacttctacgccatggagttgataatcacccaccttacgtcaagaaacaagtggtggaaaagtttccctgctcagcgtacagtgctccctgttctagtgaagataatttccaggaagcttgtgcaatttgcttagaagactacaataatggtgatatgcttagacatctcccatgcaagcatgaatttcacaagatctgtattgattcttggctcacaaaatggggcatcttctgccctatatgcaag

SEQ ID NO: 9863 - DNA, 321 bp, Zea mays
cggacgcgtgggttttgtcgagcacatgctgttcaagggcacggggaagcgcacgccgcgcactggagctggagatcgaggacatgggtggccaccttgaatgcgtacacgtcgcgggagcagacgacctactacgccaaggtgcttgacaaggacgtgccccgtgcgatggaggtcctctcggacatcctccagaactctaatctcgaccaggcccgcattgaacgtgagcgcgaagtgatcctacgagagatgggggaggttgagggacagtctgaggaagttatatttgatcatctccatgcaactgcattccaatat

SEQ ID NO: 9864 - DNA, 317 bp, Zea mays
ctatgatgcccttggtaccctggctgatgctgttggagcagaattaaatcaggcaaaatatctagatatatttatgccgcctttgatcacgaatggcagcaactttccaattctgacaaagatctatttccactccttgaatgctttacatctattgcacaggcattgggaccaggatttgctcagtttgcggaaccagtgtttcaaaggtgcatcaatcttatccaatcgcaacagttggcaaagattgatcctactgcagctggtgcggtgtatgatagagaattcattgtttgttcgttggacctactgtctgg

SEQ ID NO: 9865 - DNA, 307 bp, Zea mays
ctgccggcacgacgatcctctccgggatcgaggccaccgtggaccccagcacgcaggtggtgtactcggagagcccggacagcggcgtgctggccgacaagtacgactacgcgatcgtggtggtcggtgagccgccatacgcggagacgttcggcgacaacctgaacctgacgatcccggcgcccgggccgagcgtgatccagtcggtgtgcggaccgccaagtgcgtggtggtcctcatctccggcaggccgctggtggtggagccgtacctgggcgacatggacgcgctggtggcggcgtggctg

SEQ ID NO: 9866 - DNA, 298 bp, Zea mays
catccgcagcctttcgagctctactccaccccctcgatctcgaagcgcacagcagcagtcaggcggccatggacgcgagcgcaccggagccggcgggaaggcgaagaagggcgcggccgggcgcaaggccggcgggccgaggaagaagtcggtgacgaggtccgtcaaggccgggctgcagtttcccgtcggccgcatcgggcggtacctgaagaagggccggtacgcgcacgcgtcggcacgggcgcccccgtctacctggccgccgtcctcgagtagctggccgccgaggttctgg

SEQ ID NO: 9867 - DNA, 306 bp, Zea mays
cattggcatcacttcagcatcccaatttatgtaaactgattggctattatgcaaaagaagattctaatgaaaggatgttggtctatgaacggctttatcatggaagcttagataagctactctttggaagatcagatggtcgtttcatggactggtctaaacgtttgaaggttgccctgggtgctgccagaggtctagctttcttgcatgatgaaggaccctttcaggccatgtacagcgagttctcaactttgaacatccaaatagataaaggtttcactgctaagctttcaggatatggttgtg

SEQ ID NO: 9868 - DNA, 310 bp, Zea mays
gatcgaaacagctccagcagattttcgtttcccaacaacaaaccaaacaaggcattgtttcacacgctatgttgaatatcacaggtgtgtggctgcaaaaggtgaggatgcacctgagtgtgataagttcgccaagtactatcgatccctgtgcccaggtgaatgggttgatcgctggaacgagcaacgcgaaaacggcaccttccctggacctctgtaatcctacaatgcaaaagaagtatgaactcacgatgttgtgccggcttctcttccttggtaactggcgccaagttaccttttttggagctct

SEQ ID NO: 9869 - DNA, 312 bp, Zea mays
cctccgtctccaaaagagagcccaatcctaaattcccaatccctcaaaggaaggaggattcttcagcgtctcgcttgccggccccgaatcgcagtcgccgcccggatccgaggaaacaagtcgtcgtcttgctccaccgtccgcccgccgccatgagcttcatcttcggcaagaagaagactcctgctgagctgctgcgggagaataagcggatgctggacaagtccatccgggagattgagagggagaggcagggcctgcaggcccaggagaagaagctcatcaacgagatcaagaaggtggccaagcagg

SEQ ID NO: 9870 - DNA, 291 bp, Zea mays
cggacgcgtggcgcggcgcgaggacctagtcgagcaggtgaggcacgcggccgggacggtgggcttcttctggctggtgaaccacggcgtggcggaggagcagatgggcggcatgctccgcggggtgcgccagttcaacgagggccccgtggaggcgaacaggcgctctactccagggacctggctcgcaacctgcgcttcgcctccaacttcgacctcttcaaggccgctgcggccgactggcgcgacacgctcttctgcgaggtggctccgaatccgccgccgcgggag

SEQ ID NO: 9871 - DNA, 310 bp, Zea mays
atccctcctctccgccgcctacagctgcggggagctcgccagtcgccacttcgccagtcgccacttcgccagaatggttgcccacacggtggcttctcctcgctttgttcctcctaccggcgtggctgctgatctcggccgtctttgtgtaatttgtttggatcccgcagttccatcagtaccaggcagcgggtcgcgcgctgccagtccccgctgatgagcaccccaagatctaccgcatggagcttgcgctaccaacgaggtctgctccaaatccaagctctggtactatctgaggaagctcaagtct

SEQ ID NO: 9872 - DNA, 294 bp, Zea mays
cgtctgctcgcatttcctcccaatccatcccgcctccaaacccgaactccaagtcggcccgcatcgatggcgcccaaggccgagaagaagcccgcggcgaagaagccggcggaggaggagcccgctgccgagaaggcgccggccgggaagaagcccaaggcggagaagcgtgtcccagcaggcaagtccgccggcaaggagggcggcgagggaaagatggggcggaagaagggccagaagagcgtggagacctacaagatctacatcttcaaggtgctgaagcaggtgcacccg

SEQ ID NO: 9873 - DNA, 318 bp, Zea mays
ccactctctattctcaatcactattcacataaaagaggcaacccctgaaggagaagagctgataaaatgcgggaagttaaatctagttgacttggctgggtccgagaacatctctcgttctggagctaaggagggccgtgcaaaggaggctggcgaaattaataaaagcttgcttactctgggtcgtgtgattacggcattggtcgaacaccttggacatgttccttacagggacagcaaactcaccagattgctgcgtgattccattaggagaagaacaaagacttgtattatcgctaactgttcaccctctgtgca

SEQ ID NO: 9874 - DNA, 310 bp, Zea mays
atttctccaaccgtgtaaagcagctgacattcacttttcctgaagatgcaatgactagctctggtgctcctttctggtccgctcctaagcggttcccgcgacctctggagttctcatcttctgactcaagtcatcttagcttcttgttggctgcttctatattaagggcagaaacatttggaatacccatacctgattgggcgaaaaacccaaagaaactagctgaagctgtggacaaggtcattgttccggatttccatccaaagcagggtgttaagatagagatagatgagaaggctactagcctatc

SEQ ID NO: 9875 - DNA, 307 bp, Zea mays
cggacgcgtggcgtgacgcgtgggcgcgggacaccacggatgctacatttgtgaggcattttggacagtatggagaaatagttgattcggtgataatgataggataggcacggatctcagccacggggttttggcttcattacatactctgaccctgctgttgttgataaagtgatagaggaccatcatgttatcaatggaaagccagttgaaattaagagaacccataccaaaggttcggtgcaatctagctccaaggatttccagactaaaaagatatttgttggtgggcttccgtccacactaa

SEQ ID NO: 9876 - DNA, 305 bp, Zea mays
tggccatgctggtgccaagagtggtggtgagttagaatcagcacaagctaagaatcaggcactaaaggaagctggtgcaattgtgcctacttcatatgaagctcttgaaagtgcaattaaggaaacatttgacaaactgtttgaggaaggaaaaatttctcctgttactgaaattacaccgcctctcattcctgaggaccttaaaactgcaatcaagagtgggaaggtccgagctcctacccacatcatctccactatttctgatgacagaggcgatgaaccatgctatgctggtgtccctatgt

SEQ ID NO: 9877 - DNA, 306 bp, Zea mays
accaacctggtgccctacccgatgatccacttcatgctttcgtcctacgctccagtcatttctgctgagaaggcctaccacgagcagctgtccgtggccgaaatcaccaacagcgccttcgagccatcctccatgatggccaagtgcgacccccgccatggcaagtacatggcatgctgcctcatgtaccgtggtgatgtggttcccaaggacgtgaacgctgctgtggccacaatcaagaccaagcgcaccatccagttcgtggactggtgcccgactggcttcaagtgcggaatcaactaccag

SEQ ID NO: 9878 - DNA, 304 bp, Zea mays
cggacgctgtggttgctgtgtcaggcgcggccgggatgatatcaaatcacctgctgttcaaactcgcttctggtgaggttttcggacaagaccaacaagtagcacttaagctactcggctcagaaagatcgtttcaggccctcgaaggtgtagctatggaactggaggactcgctgtatccactgctgagggaagtcagcattggcatagatccttacgtagtctttcaagatgtagattgggcccttcttattggcgctaagcccgaggtcccggcatggagcgagctgcgctactggatatc

SEQ ID NO: 9879 - DNA, 299 bp, Zea mays
cccacgcgtccgcccacgcgtccgcccacgcgtccgcggagaagctgcgtcgtggcctgaccctgtccgtcctctccggtcggcgagagcaagacgagatcccgccccgtcctcttctccacctccaactccacccatggcggcctccaccttcagcggcgacgagacggcgcccttcttcggcttcctcggcgccgcgccgcgctcgtcttctcctgcatgggcgccgcctacgggacggccaagagcggcgtcggcgtcggctccatgggcgtcatgcgcccgagctcgtcatgaag

SEQ ID NO: 9880 - DNA, 310 bp, Zea mays
cgttgctccagaggtgctccaccgatcttacggcaccgaggcagatatgtggagcatcggagtaatcgcctacatcttgctatgcgggagccgacctttctgggcgcgcacggagtcaggaatcttccgggctgtcttgaaggcggaaccgagtttcgatgaggccccatggcccactctcacagctgaagctaaagatttcgtaaaaaggcttcttaacaaggattaccgcaagaggatgacagccgcgcaagctctgagccatccgtggatccgtaatgctcaacaagtgaaagttcccttggatatg

SEQ ID NO: 9881 - DNA, 300 bp, Zea mays
cggaacgacatccaaacccctgggctcgccaacgtagccgcaaccgtgatgaacctccacggatttgaggctcctgctgactacgagcaaaccctcattgaagtggctgacaactaaacactggccacctgtgtccaattttggttatatgtagttctgagaatggacattcaataatttatgtttgcaagcacgttgctcaaactcaccaaaacatcgagggatgccttttgactttggcatttacagcattttcgtttggctttaatccttatcggtttctattgcttctgtttcatt

SEQ ID NO: 9882 - DNA, 300 bp, Zea mays
cccacgcgtccgctttggcagaggtactgaagcaattgaaggacaaagcactaaagagagcggggctgactgaagaaaaattgcaagagcagattgagcagagaaacgttgcaaggaagaataaacagtttgagatatctgatggaatcaggaaaaaccttgctaccaagggcatcgcctgatggatgaaccttctggtacagtgtggagaccatgcgaaccagaggggccgcagccactcaacaaatgatggtaaaatgagatttttgcctgagggcagctacacattttgaactaaca

SEQ ID NO: 9883 - DNA, 295 bp, Zea mays
gtccatcatcatcatcctcgtcaacatcatcggctccgcgtggccttcgccaaggtgctggacggcgagtggacgcactggctaaaggtggccggcggcgtcttcttcaacttctgggtgctgttccacctctaccccttcgccaagggcatcctggggaggcacggcaagacccccgtggtggtgctcgtctggtgggccttcaccttcgtcattaccgccgtgctgtacatcaacatcccccacatccacggccccggcggcaagcacggcggcgcgatcggaaagcacggcg

SEQ ID NO: 9884 - DNA, 294 bp, Zea mays
gcggcattcggcgagatcgagtccgtcaggatccgctccgtgccgctggtcgacaccaaactttcgaggcgaggagccgttttacaggggaaggtcaatggattggtcgacaatgtgcatgcctatattgtcttcaaggatgagcagtctgcacgcgctgctttgtctcataatatggcactgttcggcggcaatcacattcgtgttgatatggcatgcccccctcgtaagaaacttcgaggagaagggcctctatatgacagacaaaggactgtgtttgttgggaaccttcca

SEQ ID NO: 9885 - DNA, 288 bp, Zea mays
tccacgcgtccgcccacgcgtccgggaacacctgagggtacatttgtttccatgggtgtgtactctgatggttcatacggtgttccttctggactcatttattcattcccagtaacatgcagtggtggtgaatggaaaatcgttcaaggcctcccgattgatgagttctcaaggaagaagatggatgccactgcccaatagctgacggaggagaagacgcttgcttactcatgcctcgagtaaattctaccacatccagagagcaattgccaccccaatgttttgaat

SEQ ID NO: 9886 - DNA, 304 bp, Zea mays
  unsure (1)..(304): unsure at all n locations
gagagattggagggaggcccctgcccaaggcaagagaanacgcggcgcgggagagggaggaagggcagacgcagacgggcgaacaagatgagggcgatcatcaccatccacatcggccacgccgggatccaggtcggcaacgcctgctgggagctctactgcctcgagcacggcatcgagcacgatggcaccatgcccagtgattcctcggttggcgtcgcacatgatgccttcaacacgttcttcagcgagactggttccggcaagcatgtgcccagggtcatcttcgtcgaccttgagccca

SEQ ID NO: 9887 - DNA, 307 bp, Zea mays
ccttccctggtgaagctgatgaagcgcctgatactgtcactggagacattgtattcgtcctccagcagaaggatcactccaaattcaaaagaaagggtgaagatctcttctatgagcacaccttgtctctgaccgaagcactatgtgggttccaatttgttcttacacatctggacaacaggcagcttctcatcaaatcagaccctggtgaagttgttaaacctgaccaattcaaggcgattaatgatgaggggatgccaatttaccagaggcctttcatgaaggggaagctgtacatccatttcac

SEQ ID NO: 9888 - DNA, 296 bp, Zea mays
cccacgcgtccggacaactcttacttcaaggaacttctgagtggtgataaggagggccttcttcagctcccaagtgacaaagccctgctgagcgaccctgtattccgccctcttgtcgagaaatatgctgcggatgagaaggctttctttgatgactacaaagaggcccacctcaagctctccgaactggggtttgctgatgcttaaatagaccctatcttggagtgatacattctgctgcctgtatggaatcatgtggtcttttgcatctggagtcaatgtgaacaagcagattg

SEQ ID NO: 9889 - DNA, 292 bp, Zea mays
aaaatgctagcatctcacaagcttcagtcaacgctggcagtcagtctgcatgccccaaatcagaagctgcgggagacgattgttcctagcgccaagtcttaccccttgggagcactaatggatgactgcaagagttacttccttgaaactgggcgcagggtatccttcgagtacactctgctagctgggattaacgatgaaaaggagcatgccgaagagctagcagaactacttcgtatgtgtggaggtggttaccatgtgaacctgattccctataacccaattgaaggct

SEQ ID NO: 9890 - DNA, 294 bp, Zea mays
cccacgcgtccgcccacgcgtccgcccacgcgtccggtttaagatgcactgccgtggctggagatccatctactgcatgccggtgagacctgcattcaagggatcagccccaatcaatctttccgatcgtcttcaccaagttctccggtgggctcttggttctgtcgagatcttcttcagtcggcactgcccgctgtggtacggttacggtggcggccgtctgaaatggctccagaggctctcctacatcaacaccatcgtgtacccgttcacttctcttcctctcgttgccta

SEQ ID NO: 9891 - DNA, 276 bp, Zea mays
atgctttctcgtggtttcaaggatcagatttatgacatcttccagcttctgccatccaagattcaggttggagtcttctctgctaccatgccacctgaagcccttgagattacccgctagttcatgaacaaaccagtgagaattcttgtgaagagagacgagctgacccttgagggtatcaagcagttctatgtgaatgtggacaaggaagactggaagctggacacactgtgtgacctgtatgagaccctggccattacccagagtgtcatcttt

SEQ ID NO: 9892 - DNA, 298 bp, Zea mays
cggacgcgtggctctccgcaatcttcatgacgcatcttccctgtgcaagtaccttgaatcgttctatacactgcggaagccggttgcttccacaataaacatattggccggtgctctgtacaaggtcttcagtgcctcgcctgatcaagctaggaatgagatgcgccaggcttgttttgattacttgagcctcggaggcgtcttctcgaacgggcctatcgctttactctctggccttaaccctcggccactgagtttagttgcacacttctttgctgttgctatctacggtgttggc

SEQ ID NO: 9893 - DNA, 342 bp, Zea mays
cgccaagcagaacctgtcctgcttcctcgccgacctccgcctcgtcatggacgtcatccccggggacatggtggtcaacgccatgatggcggccgtggtggcgcactcggaggcgttcgcgccgccgctgacgcaggtagtggtgtaccacgccacctcgtcgctgcgcaacccggccacctacgacgtgctctaccagtccggacgccgccatttctacgagaacccgcgcgtcggcaaggacggcagggtcatccccaccagggagatgtacttcttcaccagcatcgccaggttccacctctacatgactctcatctacaaggtgccattagagattct

SEQ ID NO: 9894 - DNA, 342 bp, Zea mays
agcagatatcacagaaatttgccagcgtgcgtgcaaatatgcaatcagagagaacattgagaaggatattgagagggaaaggcggagaaaggacaaccctgaggcgatggaggaagatgaagtggatgagatcgccgagatcagggcccctcacttcgaggagtcgatgaagtatgctcggcgtagtgtcagtgatgctgatatccgcaagtaccaggcgtttgcccagactttgcagcagtcccgggggtttggcagtgagttccgcttctcggatcagccggcgacagctggtgctgctgctgcagccgatccgtttgcttctgcgggtgctgcggctga

SEQ ID NO: 9895 - DNA, 341 bp, Zea mays
cttggagtgaagcagatgatttgctgctgcaacaagatggatgcaaccactcccaaatactccaaggcacgttatgatgagattgtgaaggaagtctcatcttacctcaagaaagttgggtacaaccctgataagattgcatttgttcccatctctggttttgagggtgacaacatgattgagaggtccaccaaccttgactggtacaaaggcccaaccctgcttgaggctcttgatcagatcaccgagcccaagagaccctcagacaagcccctgcgtctccccctccaggatgtgtacaagattggtggtattggaactgtgccagttggtcgtgtgga

SEQ ID NO: 9896 - DNA, 341 bp, Zea mays
acgggagcctaacaggaggatgccctcgcgcgagttgaaaagctttcagaagtaaacccgatgcttggcttccgtgggtgcaggcttggtatatcgtagcctgaattgacagagatgcaagcccggggcatttttgaagctgctatagcaatgaccaaccagggtgttcaagtgttcccagagataatggttcctcttgttggaacaccacaggaactggggcatcaagtgactcttatccgccaagttgctgagaaagtgttcgccaatgtgggcaagactatcgggtacaaagttggaacaatgattgagatcccagggcagctctggtggctgatgag

SEQ ID NO: 9897 - DNA, 345 bp, Zea mays
cccacgcgtccgcccacgcgtccgcggacgcgtgggtgcggagattgttgagtccgcagatgcctacctctttgcaggccccattttcaatgactacagctctgctggctactcattcctcctcaagcaggaaaaggccatcatcgtccatcctgagcgtgtgatagtgggaatgggccggcattcggatgtgtgatgatgaaagagttcttgtctgaattggctaagagggttaataagaacaccactgcctatgagaattacaagaggatctttgtacctgagggccagccgctggaaagcgagccaaatgagccactgcgagtgaatgtgctcttcaagcac

SEQ ID NO: 9898 - DNA, 335 bp, Zea mays
cgaatcgtgactgtcagtaagggttattcatgggaggtcacaactgctgaaggtggacagggcctcaatgagctcttaagctccagaaagagtgtattagacggaattgtaaatggaattgacattaatgattgggaccctgccacagacaaatgtatcccctgtcattattctgttgatgacctctctggaaaggccaaatgtaaaggtgcattgcagaaggagctgggtttacctataaggcctgatgttcctctgattggctttattggaagattggattatcagaaaggcattgatctcattcaacttatcataccagatctcatgcggga

SEQ ID NO: 9899 - DNA, 332 bp, Zea mays
gggggacgtgttgttgcttcaccctacgccaagaagctcgccaaggacctcggcgttgatcttttctctgtcacggggtcaggccccggcgggcgaattgtagccaaggatgtcgaggctgcccttgctgcgcccaagaatgccgcaccagtgactgctgcacggccggatgtgccattggggtcgacagtaccattcacgacaatgcagggtgctgtcagcaagaatatggtggagagtcttgctgtcccgaccttcagggttgggtacaccatcacgactgatgccctcgatcagctctacaaaaaaattaagtcccagggggttacaat

SEQ ID NO: 9900 - DNA, 339 bp, Zea mays
gaagcaaagcctgtgttctgcttctgcattctggaaaaacagggtccacctccgtaaaaaaaaaaagaaagcctcgcgccgccgccgccgccgaggaaggttgaggaagaggatggccgacggcggggaagaagcccgccgccgtgctgcgatcggcgagtaccgcaagaagctcctcacctgccgggagctcgaggcgcgggtcaaaactgggagggagaatctaaaaaatgcaaagaaaaatttggaaaaaactgaagaggatctaaaatcactgcaaagtgttggtcaaattatcggtgaagtgcttcgacctttggacaaggaacgatttattgt

SEQ ID NO: 9901 - DNA, 332 bp, Zea mays
caaggattctgttgtggctggtttccagtgggcatcaaaggagggtgcactggctgaggagaacatgcgtggaatttgctttgaggtctgtgatgtcgttcttcatgctgatgctatccacaggggtggtggtcaggtcattcccactgccaggagggtcatctatgcctctcagctcacggccaagccaaggctgctggagccagtctacctggtggagatccaggccccagaaaatgcacttggtggtatctacggtgttctgaaccagaagagaggtcatgtctttgaggagatgcagaggccgggtaccccgctctacaacatcaagg

SEQ ID NO: 9902 - DNA, 338 bp, Zea mays
cggagccgcagtcgccgtagcagatcttctctctaatcctatcggtcaacagctgcttgctcgggacgggaaccggaggtggtggttgcgatggcgctgcagtacgtggaggcgcacggcagttgcgcccggatctctccgactggtacgcctccctcgccgacctctaccagcggaagctatggcaccagctcaccctcaagctcgaccaattcttacagctccaggtcgcacagaccggagacactatcattcagctctacaacaatttcattgtcgactttgagaccaagattaatctgctcaaacttgcgcattttgcggtgataacttctcgc

SEQ ID NO: 9903 - DNA, 338 bp, Zea mays
cccacgcgtccgagaccagtcacttgagaaggagaatgcggcatttgaacaggcaatggtactagctggaagtgaatttatggagagcgttcgcttccatgttaaatcatggttaccggcaaggtctattgtcctggagtgtttgttatcaaaaggaaacattgatccaagtggagaaatcatggttttggatagattctgcccgtggaaacttcatttatttgagcttgaagaggagctgaagactgatcctctgaccaagtatgtgctgtatcaggatgagaggagcaagagttggcgagtccaagcagtcgcagttgctcctgacaggttcgaga

SEQ ID NO: 9904 - DNA, 343 bp, Zea mays
cagggtccaatttatgttggtactggatgtgtatttagaaggcaggcattatatggttatgatgcccccaaaacaaagaagccaccatcaaggacttgcaactgctggcccaagtggtgcttttgctgttgctgctttggcaataggaagcaaaagaagactaccaaacccaaaacagagaagaaaaagttattatttttcaagaaagaagagaaccaatcccctgcatatgctcttggtgaaattgacgaagctgctccaggagctgagaatgaaaaggccggtattgtaaatcaacagagattagaaaagaaatttggccaatcttctgtttttgttacat

SEQ ID NO: 9905 - DNA, 328 bp, Zea mays
ggcggtgtgggcaatgatatatgcacacttttgtggaagttgggggcattatacttgtttgtcttggctaccgacattctttagcgaggagctgaacctgaacttgacagaagcagcatgggtgtcagtccttcctcctttgggttcaatgatcattacatctattgcagcaccttttgcagacaacttgatatcaaatggagttgacaccacgaaggtgcgaaaaatttgccaaacaattgcctttgtgtcacctgcaactttcatgatgctttcctctgtggatcttggactgcctccctgggaaattgttgcttttcttacaagt

SEQ ID NO: 9906 - DNA, 326 bp, Zea mays
aatttgaggaactatgttcagaccttatagacaggcttaaaactcctgttaataatgccttaagagatgccaagttgtctgtcagtgatctagatgaagttattcttgtgggtggatccacccgaatccctgcagttcaagaacttgtgaggaagcttactgacaaagatcccaatgttacggtcaaccctgatgaggttgtttctcttggggcagctgtgcagggtggggttttggcaggagacgtgaaagatgtagttcttctggatgttactccattatctcttggtttggagacattgggaggagtgatgacaaagattatc

SEQ ID NO: 9907 - DNA, 153 bp, Zea mays
cattcctagcagcaccggtgctgccaaggctgttggtaaagttcttcctgatctgaatggcaagctcactggtatgtccttccgtgttcctactgtggatgtctcggttgttgacctcaccgtcagaatcgagaagggggcctcctatgagga

SEQ ID NO: 9908 - DNA, 334 bp, Zea mays
agttgatgaaactaagatgatggagaggctatggggtgagaacttctttgaccctgccacaaagaagtggaccaccaagaacacaggttctcctacctgcaagagaggatttgttcagttctgctatgagccaatcaagcaaatcatcaagacctgcatgaatgaccagaaggagaaattgtggcccatgctgcaaaagctcaatgttaccatgaaggctgatgagaaggagttgattggcaaagctttgatgaagcgtgttatgcaaacgtggcttccagctagcactgctctgcttgagatgatgatattccaccttccttccccagcaaag

SEQ ID NO: 9909 - DNA, 144 bp, Zea mays
ggcgcaccttctttctgatgtggcagcatttgccatatcgttattctctctctgggctgctggatgggaagcaacaccgcagcagtcatatgggttcttccggattgagattcttggtgccttggtctccattcagctcatatg

SEQ ID NO: 9910 - DNA, 332 bp, Zea mays
gtgcttcccaccgatccatttcagccgccgccgcgcgtacaagcaggagcagcaaggatgccggctggccacgggctgcgctcgcggacgcgcgacctgttcgcgcgccccttccgcaagaagggctacatcccgctcaccacctacctccgcacctacaagatcggcgactacgtcgacgtcaaggtgaacggcgccgtccacaaggggatgccgcacaagttctaccacggccgcaccggtcgcgtctggaacgtcaccaagcgcgccatcggcgtcgagataaacaagcaggtgaatggtcgcatcatcaggaagcgtatccatgtccg

SEQ ID NO: 9911 - DNA, 326 bp, Zea mays
cttgccgagatccgtgatgctgtgttttcattcattcgaaagatggaaccgaaaaaagttatggatactatgttagtttcaagagtcaagatattatacatcagatctttgcttgctaaatcacctgaactacagtccatcaaggtctctccagttgagcgtttcttggagaaatcaaatactggtcgaagtagaagttctagtaggggaagtagtcctggcagatctcctgttcaccaccatggttatggttcccgaactgcgcttgttgatgaacatgtgcatggtttcaaggtgaacattacacaggaaaagaaatcaaaatt

SEQ ID NO: 9912 - DNA, 331 bp, Zea mays
cccacgcgtccgcgcctcgccttcccttccccaccagcccccgtctctctctctctctctctgtctctctctcgtagccgcgtccatctcgcagcagcaagcaagcgcgaccaaatggcgcctctaggagacggcggagctgctgccgcggcggcgtccaacaacctggtggtgtcgttcggcgagatgctgatcgacttcgtccccgacgtggccgggctgtcgctggccgagtcgggcggcttcgtcaaggcacccggcggcgcgcccgccaacgtcgcctgcgccatcgtcaagctcggcggatcctccgccttcgtaggcaagttcg

SEQ ID NO: 9913 - DNA, 328 bp, Zea mays
ctcagcgccgcgcttgcgtttccttctctccgcttccaagatgtcgaagcgagggcgtggaggttcggctggtaacaagttccggatgtcactgggtctaccagtggcagctactgtgaactgtgccgataacactggagccaagaacctgtacatcatttctgtgaagggaatcaagggtcgccttaacaggcttccttctgcctgtgttggtgacatggttatggcaaccgtgaagaagggaaagcctgaccttagaaagaaggtgatgccagctgttattgtgacgcagcgcaaccatggcgccgaaaagatggtgtctacatgt

SEQ ID NO: 9914 - DNA, 325 bp, Zea mays
tcttgaggaagggaaagatgtccgtttaggagattggaaagctgctgacattgagatcttgaatacattccagctactttcagctaagccagttgtctatttggtgaatatgagtgagaaggatttccagagaaaaaagaacaagtttctacccaagatacatgcttgggtgcaggaacatggtggtgaaacatacttcctttcagctgttcttttgaacagaaactagtggatatgccagaagatgaagccgccaaatattgtgctgaaaaccagataacaagcatgatcccaaaaattatcaagactggttttgcagcaattc

SEQ ID NO: 9915 - DNA, 191 bp, Zea mays
cggacggtgggcggacgcgtgggtcgtcttgttgacatccttgcagttgtcgcgtgaacaagtaatctatgatggcaatgtttgcctggtcatgaagtattattactttcgttgaaatcgtgatgctattaagacttaatttttttatggaacatcgaatgtaaggcatacatggttatgagttttgtact

SEQ ID NO: 9916 - DNA, 325 bp, Zea mays
cgaaggatttcccaactgaacaactctaccgcgcctaccttataatccagcgcttcaagaacaccatcattagcgaccccaagaacgtcactgccacctggattggtcatgatctctgcggagaaacgacctatgtggggttctactgcggatcgccggcaggaggagataagaagttgacagtcacaggtgtcattttgaatgggtataatctacatgcaccaacgttggaaggtttcgtcaatcagctccctgatctagctcttttccatgctgcttccaacaattttggtggcgatataccccaactaaccggcctagggta

SEQ ID NO: 9917 - DNA, 325 bp, Zea mays
caagaagtaccgcaagatgaaggagaggcttgtcggcgtctctgaggagaccaccacgggtgtcaagaggctctaccagatgcaggagaccggcgccctcctcttccctgccattaacgtcaacgattccgtcaccaagagcaagtttgacaacctgtatggttgccgccactcactccctgatggtctgatgagggccaccgacgttatgatcgccggtaaggttgccgtggtctgcggatacggtgatgttggcaagggttgtgccgctgcactcaagcaggctggtgcccgtgtcattgtgaccgagatcgaccccatctgc

SEQ ID NO: 9918 - DNA, 324 bp, Zea mays
cccacgcgtccgccctgttcagtacgatgctgcaaagttctttgtcattaaatcgtacagcgaggatgacatccacaagagcgtaaagtacaatgtgtgggcaagcacaaccaacggaaacaagaagcttgatgctgcttaccaagaagctcagtcaaagggatctgcatgccctatattcttgttcttctcagtgaatacaagtgggcagtttgttggtgttgctgaaatgactggcgccgttgattttgagaaaaccctagagtattggcaacaggacaagtggaacgtctccttctctgttaagtggcacattgtcaagga

SEQ ID NO: 9919 - DNA, 319 bp, Zea mays
aggaatcactccggctgcacccgccgacgccgctcatgctcccgcacaaggccagctcgaacgtcaagataggaggttacaacatccccaagggcgccaacgtgatggtgaacgtgtgggcggtggcgcgtgatcccaaggtctggagcaacccgctggagtacagaccggagcgcttcctggaggagaacatcgacatcaagggcagcgacttcagggtgctgccgttcggtgctggccggcgtgtgtgcccgggcgcgcactcggcatcaacctcgtggcctccatgatcggacaccttctgcatcacttcgagtgg

SEQ ID NO: 9920 - DNA, 326 bp, Zea mays
cttctgctgcagcgcctccgccgccgccgccgcatctaacgcagttccctccgccgcagcccgaggcaagatggttctccagaacgacattgatctgctcaacccgccggcagaactcgagaagctcaagcacaagaaaaagagactcgtccagtcgcccaactccttcttcatggatgttaagtgccaggggtgcttcagcataaccactgttttcagccactcccagactgttgttgtgtgccctggctgccaaactgtcctctgccaacccacaggaggaaaggcaaggctcactgagggctgctctttcccgcagaagggag

SEQ ID NO: 9921 - DNA, 313 bp, Zea mays
tgcttaaaggatgtaaagagaatggaacctattgatggactgagcagaatcaacaaggaccgttggaaacttgtatgcagcatttgcggagtttcatatggagtttgtatacagtgttctcatcctacctgtcgtgttgcgtatcaccctctttgtgcacgtgctgctgacctttgcattgagcttgaaaatgatgacaaaatccatcacatgtatcttgatgaagacgaggatccttgtattcgtttactctcgtactgcaaaaagcatagacagccttctgctgctgaacgtccatctttagaaagtgatc

SEQ ID NO: 9922 - DNA, 110 bp, Zea mays
gttggcttctcctcgccctccggttcgggatcggggtcgtgaggttctccgtggttcggtttcgtgggtgggcggatcgagattgctgcgtcggatgttgagtaccgctg

SEQ ID NO: 9923 - DNA, 317 bp, Zea mays
cccacgcgtccgacgctgagaagcgtcctgagaattctaaagggctcctccttgcacttgcccagattgctgctaatgccaaccattttcagcttgctgctgactcactatccagaatacctgacattcagcacatgcctgcaacagttgctacattagtggcccttaaagagcgcctaggtgactccaatgctgcagcttctgtacttgattctgctatcaactggtggaagaattccatgaccgaggataacaaattagatatattaacacgggaggctgctgcatttaagctcagccatggacgtgatgaagag

SEQ ID NO: 9924 - DNA, 320 bp, Zea mays
gtccgataccccaagcaccagcgcggcggcggcgaccatggctgtcggaaagaacaagaggatctccaagggaaagaagggtggcaagaaaaagaccgtcgaccctttctctaagaaggattggtatgacatcaaggcaccgtcggtgttcagtgtgcgcaacatcgggaagactctcgtatccaggacacagggtaccaggattgcttctgagggtctgaagcacagagtctttgaggtttgcctagctgatcttcagggcgacgaggatcaagcttacaggaaaatcaggctccgtgctgaagatgtgcagggcagga

SEQ ID NO: 9925 - DNA, 319 bp, Zea mays
cgctgctcatctcacatccctcgagaagacgcctgctcctcgccgatcgatacgatggccgtcttctccgacctccacaccgccgacggcctcaagtccctcgaggctcacctcgccggcaaaacctatgtgtctggtgactccattactaaggatgacattaaggtcttcgccgcggtgccgtcgaagcctggcgctgagtttcctaatgccgcccgctggtacgagaccgtctctgcggctgtagcctcaagattccctggtaaggctgttggtgtaaatctgcctgcgggatcagctcctgcggcagctgctcctg

SEQ ID NO: 9926 - DNA, 320 bp, Zea mays
ggagctgttcctggaattgtgcatgtgttaaagaggggcagcatggaggctcgggagaattcagctgccacacttttcagcctatctattgtagatgagaacaaggtgactattgggtgttcaggggcaattcctgcacttgtgcagctattgagtaatggaagccaacggggtaaaaaggatgcggcaacagcactatttaacttgtgtatttaccagggcaacaaggggaaagctgtaagagctggattggtacctatactactagaactgctcatggagactgaaagtgggatggtagatgaggcccttgcaatatt

SEQ ID NO: 9927 - DNA, 305 bp, Zea mays
cgttacgtccctccctacccagcgatctaggccgccgcctctcctactgcatctccctcgctctcgtcgcctcgttcgcttcgcctcctccccgcaccgccccgagccgagcagagcgcaagccctatccggagctgggatggcggacgcgaacagcagcagcagcagccacagcaggcggcagctgcagccaccggcgtgtggaagacggtcaagcccttcgttaacggcggggcctctgggatgctcgcgacctgcgtcatccagcctatcgacatggtcaaggtcaaacttcatctgctatc

SEQ ID NO: 9928 - DNA, 295 bp, Zea mays
gtgtcagaacagatgaaactgcaatgcacgaagagctatctaacagatttgattacgatggggtctttgggaccgcactaaataggttctgtgttcaggctgctgttgggcatccacttacagtttatggaaaaggtggtcagacccggggatatctggacatcagagacactgtacagtgcgtggagctagcaatagccaacccagccaaacctggcgagttcagagtcttcaaccagttcaccgagcagttctctgtcaatgagctagccaaactggtgactgcggcaggagc

SEQ ID NO: 9929 - DNA, 297 bp, Zea mays
cccacgcgtccgcggacgcgtggaatttgtgttgggctgtgatgtttggtgacaatgaggtacccgttgaaatagttcagccaggtgttctccgctgtcacacaccactgcacagcaatgggaatctcagaatctgcattacttcgggaaacagagaagtttgtagtgaattcaaagactttgagttccgctcaaaaccaacctcttctagtttcacagacatgcaccatcttctagacatctgatatccagtgaagagttattacttcttgcaaaatttgctagaatgcttttgtc

SEQ ID NO: 9930 - DNA, 297 bp, Zea mays
cggctatcttgaagccagacaatgaggtcaaaattttggtagacggggaagaaaagaagaaggcgaacttcctttctgctgatgattttgagccagcacttatcccatccaagaccattcctgaccctgatgacaagaagccggaggactgggatgagagagctaaaattcctgatccagatgcagtaaagcctgatgactgggatgaggatgccccgatggaaattgtggatgatgaagccaccaagcctgagggatgttggatgatgaacctgaggagattgatgatcctgaggc

SEQ ID NO: 9931 - DNA, 297 bp, Zea mays
cggacgcgtgggggaacctggatttcatgttcttaaaatgcgtcgccgtggtggaatgcctgtagcttttgctgattttacggatattgaatcgtctaccgctgctatgaatagactccaaggcactgtactggcatcttctgataacgatggattgcacattgagtacgcaaggtcgaagatgaggaaaagctaagttgttggactgcaaggattggcagtggcatctcctgtctgtcttcctggaggctaccagtaggcatccctgcacacgtagctgcgtgtagctgcttgctt

SEQ ID NO: 9932 - DNA, 299 bp, Zea mays
gcagaagacgcgcaagggacgcgggatcggctccggcaaggggaagacggcgggacgcggccacaaggggcagaaagcgcgaggcaccgctaggttcggcttcgagggtggccagaccccgctccgccgccgcctgccccgccgtggattcaagaaccccttctcactcacatttcagccctgtggactggggaaaattgcaaaactcataaatgctgggaaaattgattcctctgaattgattaccatgaagacactaaaggaaacaggtgccattgggaagcaaataaaagatggaa

SEQ ID NO: 9933 - DNA, 301 bp, Zea mays
tgtacctcggccagcgcgacaccaaggagtggacgtcggacgccaaggcgcaggaggcgttcaagcggttcggcgcgcggctgaccgagatcgagaaacgcgtggaggccatgaacaaggacccgcgcttcaagaaccgctacagcgcggcccagttcccctacaccctgctcttccccaacacctccgacaagggcgataacacctgcgtcaccgccaagggcatccccaacagcatttccatctgattcgatcgagtcctggccagcgtttcacccaaaatagcagagctagcggtgat

SEQ ID NO: 9934 - DNA, 298 bp, Zea mays
gtggtggcgtatcaggacaagttggagctatccgcttagggataagcagggccttggagaattgggaaccaggatggcgtccatatctcaaagcagctggatatttgacgagagattcacgtgtggtcgaaaggaaaaagcctggaaaagcgaaagcaagatagagcttccagtgggtcaagcggtaacagagctatctgcatggctacgtattttgttgtggcgggtctctgccctttgactttgatgtgggttttctactcaacacagatcacttgatctgctgttattttttccg

SEQ ID NO: 9935 - DNA, 293 bp, Zea mays
cccacgcgtccgcccacgcgtccgcccacgcgtccgcggacggtgggcaggaattgctgatagcttctcggaatctggagtttttcaccaatggttatcgatatttgattcagattctgccagctgcagttgttgctccaatgtacttctcagggaaaattgagtttggagtaataaaccaatcggtgtctgctttcaatcatattcttagtgatttctctctcattgttttccaatttcagtcaattagtgcattctcagcagttatcgatcgtctaggtgagtttgatgat

SEQ ID NO: 9936 - DNA, 290 bp, Zea mays
atccttggttgccgcttcctccaaagccactccaaacccccgcttccagaaccttctcgaaactctccgcctcctcctctactcgctccgatggcgaaggaaccgatgcgcgtgctcgtcactggcgccgcaggcaaattggatatgctcttgttcccatgattgctaggggagttatgcttggtgcagaccagcctgttattctgcacatgcttgatattccgccagcagctgaagcccttaatggtgttaagatggagttggttgatgctgcatttcctcttctgaag

SEQ ID NO: 9937 - DNA, 293 bp, Zea mays
agacagtacaaggagtcagatctgtacaggcaactatcatacttttgttatgtacttgatgcaacccggtgtcttgaaaagctggaccagaaggcaaggctccccttcgagagagagtttgtagcagtaggccaaacaattaaattggcactgctagagatccagaaaatccgagacagatgtgcatttggatgggttcagctaaaggaccttgccgtatcaatatgatgtttttcttgtgtgaaagggctcaattagataagtttgaattaaccgtgcaagatattcatctc

SEQ ID NO: 9938 - DNA, 290 bp, Zea mays
cggacggtgggttcgcgagctccgaccatggttccaccaccgcccccaaggacgtgccgggcagctacggcctgccgctggtgggcgccgtgcgcggaccgcctctacttctactacttccaggggcaggacaagtacttcgagtcccgcgtggagcgctacggctccaccgtggtgcgcatgaacgtgccgccgggccccttcatggcgcgtgacccgcgggtggtggcggtcctggacgccaagagcttccccgtgctcttcgacatggacaaggtggagaagaagga

SEQ ID NO: 9939 - DNA, 292 bp, Zea mays
ctgccaagaaccaggtcgccatgaaccccaccaacaccgtcttcgatgccaagcggttgatcggcaggaggttctctgacccgtcagtgcagagtgacatgaagctatggccgttcaatgtcatcccagggcctggtgacaaacccatgattgtagtcaactacaagggcgaggagaagcagtttgctgctgaggagatctcctccatggtcctcatcaagatgaaggagattgctgaagcctaccttggttccaccatcaagaacgcagtgctgacagtgccggcctattt

SEQ ID NO: 9940 - DNA, 293 bp, Zea mays
cggacgcgtgggcggacgcgtgggtccgaagccatcgtccccgtcccagcctccccggactccaggggcaaaagctgcagcgtcgagatggtgaaggggcgcaccgggcagcgcgtctcgctctacgtccggggcaccgtccttggatacaagcggtccaagtcgaaccagtacgagactacgtcgctggtgcagatcgagggggtgaacaccaaggaggacgtcgcgtggtactgcgggaagcggatggcctacatctacaaggccaagaccaagagcagcggcacccacta

SEQ ID NO: 9941 - DNA, 296 bp, Zea mays
cggctgccgagcgcagcccttctatctctacagcaagcttcagatcctccgcaacttcgccgcttaccgcgacgctctccaggggctccgctccatcgtcgggtatgccgtgaaggccaacaataacctccccgtgctacgcgtcctgcgtgagcttggctgcggcgccgtcctcgtcagcggcaacgagctccgactcgccctccaggcgggattcgaccccgccaggtgtatatttaacggaaatgggaagacactcgaagatcttaaattggctgctgagagtggagtatttg

SEQ ID NO: 9942 - DNA, 294 bp, Zea mays
ggccttgcaagcattagatcgaaagtgtatcttactccaaagctttggtatctccgtgtcaatgtcattgaagcccatgatcttataccaaatgacagggccaggttccctgaagtttatgtcaaagcaatgctaggcaatcaagtcctcagaaccagggcaccgagccggaccttgaatccaatgtggaatgaagacttgatgtttgtcgcagctgagccatttgaagaacacctaattttgagtgtagaggacagggtggccccaggaaaggatgaagtaattggaaggaca

SEQ ID NO: 9943 - DNA, 289 bp, Zea mays
cccacgcgtccgcccacatctcagttcaccccggcgtcgtcctcttcccccggcgctactctcccgctccacgttccaaaggaaagatggcgtcccatattgttggataccctcgcatggtgccccaagagagagctcaagtttgccttggagtctttctgggatgggaagagcagcgccgatgatttagagaaagttgcctctgacctcaggtctagcatctggaagcaaatgtcagaagctgggatcaagtacattcccagcaacaccttctcgtactatgaccagg

SEQ ID NO: 9944 - DNA, 269 bp, Zea mays
gcggcaaggaagcagtgaagtatgttagcctgctgataatggcatcctttcgaagcattatagccgtagctcttttatgtaccttttcaggctggtaccgataccgtggatctggatttgctaggttttgtactgtgctcgagtgtaaggtcagttcgtaatacaatcaatctgcgtggaacaatttgatatccttgaatatgttagtgagatcatttcgacaatgaaagttgagaacagaagttacaatgtcagtgcccatttttttt

SEQ ID NO: 9945 - DNA, 286 bp, Zea mays
gcaggccaccgctgctataaaaccctccgcctccaccggcggctcgccaaactccgtttcgaattctagggttttgctgctctccgaccccgagctccgaagccgcagcatcaggcgcggcccccctcgcgtgtgaccgagatggcgctgccgaatcaggggaccgttgattaccccagcttcaagctcgtcatcgtcggcgatggtggaactggtaaaactacatttgtgaagaggcatctcactggagagtttgagaagaaatatgaaccaaccattggtgtgg

SEQ ID NO: 9946 - DNA, 289 bp, Zea mays
tggaaaccctagccgccatatctcacgatccactcgagcaccaagccgagggaaggtgaggagcgatggcgcgcggcgtggtgtcggcgaagggcggcgcggtcgcgggcaagaagaaagggtcggtttccttcacgatcgactgcaccaagccagtggaggacaagatcatggaggtcgcctcgctcgagaagttcctgcaggagcgcatcaaggtcgccggcggcaaggctggcaacctcggcgactccgtcaccatctctcgcgagaagaccaaggtcaccgtcac

SEQ ID NO: 9947 - DNA, 287 bp, Zea mays
cggacgcgtggtgaagtcttctacctcaagatgaagggtgactatcacaggtatcttgcggaatttaagactggtcctgagaggaaggaatctgctgagagcacgatgatggcctacaaggctgctcaggacattgcgctggctgagctggcacctacccatccgataaggcttgggcttgctcttaacttctcagtgttctattatgagattctgaactccccagacaaagcttgcaaccttgcaaagcaggcgtttgatgaagctatctcccagttagacaccct

SEQ ID NO: 9948 - DNA, 280 bp, Zea mays
gaagaagaccagtgtcaagtgaacctgacacttgcggtgtcactggctggtataccctgagtgtgagcgagtgatcgagctagctgagctccgatcctcgctagctagctaggataccgccataccacaagtcttcttcacaagttcaggagtgacagcaacaagacatctcgatggcctctgccaccgtgctcaagtcctccttccttcccaagaagtccgaatggcgcgccaccaggcaggccgccgcgcccaggccgcccaccgtctccatggtcgt

SEQ ID NO: 9949 - DNA, 271 bp, Zea mays
  unsure (1)..(271): unsure at all n locations
cccacgcgtccggcaagcaagctcgatctactactactactagctggtacacatactagccagcctgccagccagcttgccatggcgcccaccgtgatgatggcctcgtcggcaaccggcgtcgccccgttccagggtctcaagtccgccgccagcctncccgtcgcccgccgcagcaccaggagcctcggcaacgtcagcaacggcggaaggatccggtgcatgcaggtgtggccggcctacggcaacaagaagttcgagacgctgtcgt

SEQ ID NO: 9950 - DNA, 294 bp, Zea mays
attcaatcaagctacactgcaagtcttacttccatcctaaccgtgcaacagcttgatacttctataagaggactcaatgacctgaaaaatagtgattatcctattggtttccaagttggttcttttgtcgaagaatacatgatcaaggaactgaatatctcacagtcgaggctaaaagctcttggttctcctgaagagtatgctgaaaacctcaagctaggtcccaagaaaggaggtgttatggctattgttgatgagcgccctatgttgagtggttttgtcacttactgaaga

SEQ ID NO: 9951 - DNA, 302 bp, Zea mays
tgcaaagatcaaccctcaggctccccttgataaagtttgcgtccttagctgtggtatttctaccggtcttggtgcatcaattaatgttgcaaaacctccgaaggttcgacagtggctgttttcggtttaggagccgttggtcttgccgctgcagaaggtgcaaggattgctggagcgtcaaggatcattggtgtcgacctgaaccccagcagattcgaagaagctaggaagttcggttgcactgaatttgtgaacccaaaagaccacaacaagccagtgcaggaggtacttgctgagatgac

SEQ ID NO: 9952 - DNA, 302 bp, Zea mays
cccacgcgtccggaaggtgatagacagcaaacctaatgaccacatcttcatctattactcagatcatgggggtcctggagttcttggtatgccgaacctgccatatctgtatgctggtgacttcatcaaggtcttgaaaaagaagcatgcttccaatagctactcaaaaatggttatatatgttgaagcatgtgaaagttgcagtatctttgaggggttaatgcctgaagatctaaatatttatgtcacaacagcctcaaatccagttgaaaatagttggggaacttactgccctgggatgg

SEQ ID NO: 9953 - DNA, 303 bp, Zea mays
cactcatcttttctcgtttagaacctctacgatttcccccactcgccagtcgcagcagcacctgtagcagccatggacgccagcggaccggtagcaaggggaagaatggggcggccgggcgcaaggcatgcggccccaggaagaagtcggtgacgcggtccgtcaaggccgggctgcagttccccgtcggccgcatcgggcgctacctcaataagggccggtacgcgcagccgtgggcactggcgcccccgtctacctcgccgccgttctggagtacctcgccgccgaggttctggagttggc

SEQ ID NO: 9954 - DNA, 310 bp, Zea mays
ggtgtttctcgttgcacgactcaggtgtttccgggagcatggactgctgtgatgctgtcacttgacagcccaggattttggaatgtacggacagaaaacctggacacgtggtatctgggtcaggagacttacatcagggtggtggatccaaatggaggctataatgttactgagatggtggctccagacaacatgctctactgtggcctcctcaaggataaacagaaggctcagaagcctcatggttcgaggtcatcagcctctgcagcaaaactgaactatcatgtgctcgcggctttggtctctttgg

SEQ ID NO: 9955 - DNA, 321 bp, Zea mays
cttgaagttggtctgaccaactatgcagctgcctactgcactggccttctgttggctcgccgtgtgctcaagatccgtggtttggatcaggagtacgagggcaatgttgaggccactggtgaggacttctctgttgagccagctgatgagaggaggcctttccgtgctctcttggatgttggccttatcaggactacaacagggaaccgtgtctttggtgccctcaagggagcattggatggaggcctggatattcctcacagcgagaagaggttcgctggattcaagaaggacgacaagcagttggatgctgatacccac

SEQ ID NO: 9956 - DNA, 300 bp, Zea mays
cccacgcgtccgacgccaccagccaggctgcgaatgtgacgttcactgcacgcgctgagagaacacgtgtggcgttctatagcgtgtattacaacacgaggagtgacgaccacagctcgctgtgtggcacggtgattgacgatgtccgggtatgggcattgaacgccgcggctgggttgaaggcaagtattgggctggttcttggcattgttggtgtcgttggcatggtgttgttctgaaatctgaatctctcggtgccagtggtcttgggaagtatggatgtataacttcttctgttag

SEQ ID NO: 9957 - DNA, 298 bp, Zea mays
ccatccactactttactcaaagtctagagctagctttttgctttgctcaccagacaaaccgcagcagatggcgtcgacgatcatggccgccacctcccgcatcgtcgcggccaagacgccgtttcttggccagggtcgcgccgccgccgccgccgccaatgccagcaccctccgcgacgtcgccgccgccgctgctggcggccggatcaccatgggcaacgacctgtggtacggcccggaccgcgtcaagtacctgggcaccttctccgcccagacgccctcgtacctgaccggcgag

SEQ ID NO: 9958 - DNA, 318 bp, Zea mays
ctgtcctacaaccagctcacgggccccatcccgcgcgacgacgcgcgcgacgagatcaacaccgtcgacctctcccacaacaggctcaccggcgacccctcccacctgttcgccgccggccggcccatcggcaaggtggacctgtcgtggaactacctcgacttcgacctcagcaggctggtgttcccgccggagctcacgtacctggacctgtcccacaacctcatccgcggcaccgtgccgctgtcgctggagcgcctgtccacgctgcagaagctggacctcagctacaaccgcctgtgcggcccgctccccaag

SEQ ID NO: 9959 - DNA, 291 bp, Zea mays
agctatcttcacactttcttcataaggagtggatcatggaacaatgggataaaagtttctacatcagttctgttgctggctccaacaatggaagttctattgtagtgatgtcaaaaggcacaccatatacacagcaatcttataaagtcagtgattcctttccatttaagtggataaacaagaaatggaaagaaggttttcatgtgactgcaatggcaacatcaggcaatcgatgggctatagtcatgtcccgaagtgctggatttcctgaccaggttgtggagttggact

SEQ ID NO: 9960 - DNA, 303 bp, Zea mays
ccatagtgtggctctatgcatatcttctcactgttggaggagcatacaggaatgcaccaccaaagactcaatttcattgccgcactgaccgttctggattaattggtggcgcaccctggataagaataccatatccctttcagtggggtgctccaacttttgatgcgggtgaagctttcgcgatgatggcagcatcatttgttgctctcgtggagtccactggggccttcattgctgtctctaggtatgctagtgctacaccaatcccaccctctgttcatagccgtggtattggctggcagg

SEQ ID NO: 9961 - DNA, 316 bp, Zea mays
tgatcctggtgttggatggtacttttatccaaggcttgggtacatcccttatgctcacacgactgaggaaacagctattgcttcattgaagagatcccttggtgctctgaacacacatcttgccttgaacacataccttgttggacattctgttactctagctgacattgtattgacatgcaacctctaccatggaattgcacggatcttgaccaaaagcttcacttctgatttccctcatgttgagaggtatttctggaccatggttaaccaacctaatttcaagaaggtcattggtgaggtcaagcaggcagag

SEQ ID NO: 9962 - DNA, 301 bp, Zea mays
ctcacgcgtccgcggacggtgggatttggcttggataggatgtcagatgctcatgtcctaacaagagctgaacagtttgcgaacgaacaaaagattaagatatgggagaactatgtcgacggtgagaatgcttcaaatggatccgcacctgaatcgaaacaaaaggaaatcctcaaggttgtcgccacggaagttcttggtggtgggaagttttatgttcagacagtgggtgaccagagggtggcttcaattcaacagcagcttgcatctttgaaacttaaagatgcaccagtcattggtg

SEQ ID NO: 9963 - DNA, 297 bp, Zea mays
gttctagatcgcgatctgccgcccttttttttttttttttttttgctcaaacaaaaccagaaacacttcctaacaagattacaagaaacacgctcccgattacagcactgtcaatgtgacaagattattaccgcatgctgtgccagcggctcagtccgctgcactgcagtacatggacaaaaaaaaaacggggcgagtctgatacatacattttattcattggtgagatgcaacaggaagtagaactatagaacaagaggcttgaatgaaaatttgtgtaagcgcctcaactcattg

SEQ ID NO: 9964 - DNA, 293 bp, Zea mays
gtggtattggaactgtaccggttggtcgtgtggagactggtgtcatcaagcctggtatggtagtcacctttggtccaactggcctgactaccgaggtgaagtctgttgagatgcaccacgaggcacttcaggaggctcttccgggtgacaatgttggcttcaacgtgaagaatgttgctgtcaaggatctcaagcgtgggtttgtggcctccaactccaaggatgaccctgccaaggaggctgccagcttcacctcccaggtcatcatcatgaaccaccctgggcagattggc

SEQ ID NO: 9965 - DNA, 300 bp, Zea mays
gaatggcatcccgccgaacgtcaccatctatatcaacaacctcaacgagaagatcaagctagaagaacttaagaagtccctaacagccgttttttcccagtttgggaaaattcttgatgtgcttgctttcaagactttgaagcataaaggtcaagcttgggttgtcttcgaagatgtcgcatcagctactgaggctctgaagaggatgcagggctttcccttctatgacaaaactatgagaattcaatatgccaagaccaaatcagatattatagcaaaggctgatggcacctttgtacc

SEQ ID NO: 9966 - DNA, 301 bp, Zea mays
ggtttaaggctacagttaatttcaacggggagatgttcgagagcccagtgttttgttccactctgcggcaggcggagcatgcggcagctgaggtagcactcaatgagttatcaaagagggggccttcgtcgacgctggctgccaaagttctggatgaaaccgggatatacaagaatcttcttcaagaaactgctcatcgagctggtctaaaactccccatctatactactattagatctgggccaggtcatacgcctgtgttcgcatgcacagtggagttggcaggaaaggcatttactgg

SEQ ID NO: 9967 - DNA, 307 bp, Zea mays
cccacgcgtccgcacacgcgtccgcccacgcgtccgaattctgatgctctccaactggcaaggcttgctgatcctgatgggtctcgtacaattggtgttatcaccaagttagatatcatggacaggggcaatgatgctcgtaacttcttgctgggaaatgtgattccactcaagtttggttatgtaggtgttgtcaatcgcagccaagaggatatcaacttcaatcgaagtgtcaaagacgcgctagcttttgaggaaaagtacttcttgactctacctgcttaccatggtcttgcacattgttgtg

SEQ ID NO: 9968 - DNA, 312 bp, Zea mays
catatctcctcgcatttccttgcaaccgattgccttcccccctcccaacccaagaccgatggcgcccaaggccgagaagaagcccgcggcgaagaagccggcggaggaggagcccgcggcggagaagacgaccgccgggaagaagcccaaggcggagaagcggatccccgctggcaagtccgccggcaaggagggcggcgagggcaagcgtggcaagaagaagggcaagaagagcgtggagacgtacaagatctacatcttcaaagtgctgaagcaggtgcaccggacatcggcatctcctcaaggccatgt

SEQ ID NO: 9969 - DNA, 319 bp, Zea mays
acaacacagttgagtgtccctttattaattattgccgaggatgtgtcgcatgaggtatattcaacactggttcttaacaaactgaatggattgctaaatgttgcggttgttaaatgtcctggtttgggagatgaaaagaaggccattctccaagacattgctattatgacaggtgcagatttctttgctagtgaccttggctggggtcttcatggcattacttctgatcagcttggtatggctcagaagatcacaataactagtgaatccacaactatcatagcacatccttcaatgagaccagagattgaggccagaa

SEQ ID NO: 9970 - DNA, 317 bp, Zea mays
actggagttgcaaggtcatctgagtacccagaggtgcagcgtgtcactgataagttgctggagacgctagaaaagttcatgatggaccgggctttcccttcaaatggtggcaacgaggtgacttcggcatggcagaatcctgcagctgaacctgggaaggctgattgggagcttgccctcgtagagacaacaagcaacttgtccatgcagaagccagcaatgtcaagtggtatggacccgctgctgcttaagatgcatttcattgttgtcactctctttaatatctcttatcataggataaaatagaacttaaaatt

SEQ ID NO: 9971 - DNA, 317 bp, Zea mays
cgctcgctagctagggtttccaccaatggcggcgcccaccacctcccgccgcggccccggcggcgcgcgcaacatggacgacgagaacctaaccttcgagacctccccgggggtcgaggtcgtcagcagcttcgaccagatgggcatcaaggacgacctcctccgcggcatctacggctacggtttcgagaagccctccgccatccagcagcgcgccgtgctccccatcatcaacggccgcgacgtcatcgcgcaggcccagtccggtaccggcaagacgtccatgaatctcctcaccgtctgccagatcgtcgaca

SEQ ID NO: 9972 - DNA, 303 bp, Zea mays
aacctttagctttcctccctccctctcctctctcccccctcctctaacaagaactactcccagccattcagatcctaagttgctgaccttgctggtgcttgttggagatagatttgttggttctaagttccaagtaccatgagtccaccgagtgtgatggggcagtttggggacacaacctacaccaaggtttttgttgggggactcgcgtgggaaacccagaaggagacgatgaagaagtacttcgagcagtttggggagatcctggaggctgttgtcatcactgacaagaacactggcaga

SEQ ID NO: 9973 - DNA, 316 bp, Zea mays
ccgctcctcgcgccgccgccgcgtctcctcctgtacaggtaagatggagaggaagagggcgaaatggtgaagcacaacaacgtcatccccaacgggcacttcaagaagcactggcagaactatgtcaagacatggttcaaccagcccgcccgcaagcagagacgccgcattgctcgtcaaaagaaggctgtgaagatattcccccgcccgactgctggtcctctacgccccattgttcaatgccagactttaaagtacaacatgaagtcaagggctgggagaggctttacccttgaggagctgaaggctgctggca

SEQ ID NO: 9974 - DNA, 312 bp, Zea mays
cttgcttgagtagcgacgcgtagatcaatggcgtcgctgtcgtgcgcctccacgctgccctggacccccgcctcctacccgctgccctcggcggggcgctgcctcacggcctctcgccgggctccgacgctggtcatcgtcgcccaggggaaggtcaagaagtaccgccaggtcatattgacagatgacatagaagacgtggggaagaaaggggatacaatgaaggtgcgagctggattctaccgcaactccttgtttcccaagggcaaggctgcgcttctaaccccagcagtccacaagcaaaatacaata

SEQ ID NO: 9975 - DNA, 314 bp, Zea mays
cccacgcgtccgtaaatatccagaggctagaggaggagacatggaggggactggctcaaatggagaagatatgcaaatggttgatgatgcacggctacctttgagccgtatcgtgccaatttcctcaaaccagctcaacctttaccgggtagtgatcattctccgtcttatcatcctgtgcttcttcttccagtatcgtgtcagtcatccagtgcgtaatgcttatggattatggctagtatctgttatctgcgaggtctggtttgccttgtcttggcttctagatcagttcccaaaatggtatccaatcaacc

SEQ ID NO: 9976 - DNA, 315 bp, Zea mays
aactcgtcactggtgtgggccgtggctgtacgccgcagagtgaagcgagacgagacgacgatgcgcaagtgggcgctctcctccgcgctcctccttctcttcctcctcaccaccctccccgacccagctaagaagctacaggtgaatgcggaagagagcagcgatgacttagctaacccacccaaggtagaggagaagcttggtgctgtccctcatggcctgtccaccgactctgaggttgcccagagggaagctgagtctatctctaggaagactcttaggagctccgccgagaagtttgagttccaggctgag

SEQ ID NO: 9977 - DNA, 311 bp, Zea mays
gaggtcttgcgggccgcctcccgtttctcgcgctccgctcacgatgcgtgcgtgcttttacctgctggtcttgctcttggtcttgcagcgaggtacacggtgcgctcgttcggcatccggcgtaacgagaagatcgcctgctacgtcacggtcaggggcgacaaggccatgcagctgcttgacagcggcctcaaggtcaaggagtacgagctgctcaggaggaacttcagcgacaccggctgcttcgggttcggcatccaagagcacatcgaccttggtatcaagtacggctccgtcttatatactttacg

SEQ ID NO: 9978 - DNA, 311 bp, Zea mays
cccacgcgtccgcccacgcgtccgcgaacacagatccatcggagtgacagcgagcgagcgagagcgagagcgagagagacagagagattatccgcgcgtcaacgactcccggcgaagacgatggggaaggggttcgcatcctacctggcgatgaagacggggccggagggcggcgacgcggcggcggcgcagcaggctctgatcgacgcggacctgcgggagctcggcgtcgccgcgcggaagctcgccaaccacgcattcgtcctcggcggcgggctggggttcggcacctccttcctcaaatggctggc

SEQ ID NO: 9979 - DNA, 310 bp, Zea mays
gagaaactctcccagttttgccatgttccggcagcaaatattatcactttgtatgatgtttccaatatctggcgcattcctttgttgctacatgaacaaaaggctcatgaggctattcttaaagttctgaatctggaaaggatggacagcatcgctcgagagccaaagttagacgaatggattgcaagagctactatatttgatacccttcatgacactgtgaggattgctatggttgggaagtacactggcttatcagattcatacctctctgtgttgaaagccctcttgcatgcatctgttgattgcc

SEQ ID NO: 9980 - DNA, 120 bp, Zea mays
agaggtgggctggcttgtcctgcccctgttaccaagtcgtcctcgggtcagggttccttagggctttgtggaagggctatggcggccgctgatgtggagcaccgttggctcgtcggccgg

SEQ ID NO: 9981 - DNA, 313 bp, Zea mays
cggacggtgggttctctttgttcctaagagggccccctttgatctctttgacaccaagaagaagcaaaacaacatcaagctctatgtgcgcagggtgttcatcatggacaactgcgaagagctgatccctgagtggctgagcttcgttaagggtattgttgactctgaggaccttcccctcaatatctctcgtgagactcttcagcagaacaagatcctgaaggtgatcaggaagaaccttgtgaagaagtgtgttgagctcttctttgagattgctgagaacaaggaggactacaacaagttttacgaggct

SEQ ID NO: 9982 - DNA, 308 bp, Zea mays
catccatcgccatggctggccccaccaccacgctcctcctcctgctgctgtgctccgctgggctcgcgtccggcgccacggcggctgacgacagcgggttcactaccttcaaggtatacttccacgacatcgtggcggggacgagcccgacggccatccgcatcgcgcagggggcggcgtccaacacctcgtccaccagcttcggcgcgatggtggccatcgacgacccgctgacgacgggccccacgcgcgccgcgggcaccgaggtgggccgcgcccagggcacctacacgttcgcggaccagcag

SEQ ID NO: 9983 - DNA, 103 bp, Zea mays
gggttggcttgtagtccacctccggttcgggttcgggttcgtgaggatctccggggttaggtttcgtgggtgaacggatcgagatagaggcgtcggatgttga

SEQ ID NO: 9984 - DNA, 305 bp, Zea mays
atgggttcagcaaggaagacaaagcccggttcctccagttcgtcactggcacttcaaaggtaccgttggaaggttttagtgcacttcaagggatctctgggccacaaaggtttcagatacataaggcctacggcagcacgaaccatctgccttcagctcatacttgctttaaccaactagacttgcctgagtacacatccaaagagcagctccaggagcggttactattggcaatccacgaagcaaatgaaggtttcggatttggctaatcagttatactcgtttgtccgtgccctgagaactgc

SEQ ID NO: 9985 - DNA, 313 bp, Zea mays
gtccagatcgggtccagcccagttcatcctccacctgctccgccggctgctcttcttctcccctctcgctatatccccggggacctcacagccacatctctccactgctccgtccagcgcgtccacctcccaaacccctactcccccaggaagcaatggcttcccccacccagggccaggtcatcacctgcaaagcggcggtggcgtacgagccgaacaagccgctcgtgatcgaggacgtgcaggtggcgccgccgcaggccggcgagggtccgcgtcaagatcctcttcaccgcgctctgccacacccgac

SEQ ID NO: 9986 - DNA, 325 bp, Zea mays
tgcagtggcaaggatcttgatgcagtccttaaagctacaccaattcttccagaaaaagaaggaaggatcataattgttcaaatatttcagggtctggtttatctaaacaagaggggccaaaagatcattcactatgatctaaagccgggcaatgttctctttgatgaggttggtgttgcaaaagttaccgactttggcctcagcaagatagtggagaatgatgttgggtctcaggggatggagctcacttctcagggagctggaacctattggtatcttcctccagaatgctttgacctgagcaagacaccatttatttcatcta

SEQ ID NO: 9987 - DNA, 323 bp, Zea mays
cggtgacgcggcccagcggacggtctccgctaggtgggtcccatccaggttagcggtggcgaggccggcggccaggaaggcgtgcctagaggagcttgatacaaccaacatgctccttcggcagcgcatcgtcttcctgggttccccggtggatgatacaagtgctgatctcattatcagccaactcctactattggatgcagaggaccagactaaagatattaaattgtttatcaactcacctggaggctctataacagcagggatgggagtatatgatgctatgaaattttgcaaagctgatgtgtcagctgtttgctttg

SEQ ID NO: 9988 - DNA, 324 bp, Zea mays
catggtgggacgatctgctggctcctcctgcgccacctcagcaagttcgaatccgtcacccagcactggatctacaagctcatgcagccttccatcgttccatagctgccaggcatctcgtacaagggtgccaacagagtctccttgcttctccagtatggtgttctctcgcccgctgatggtcactagaaccaccaccccgaagctgaacacatctgtcttcagtgaatagacacctcgagacgtgtactcaggagctttgtagccactagtccccacaagcctgcttgtacagtcttcagcggagtccgaagtcagagttct

SEQ ID NO: 9989 - DNA, 320 bp, Zea mays
cagaaaaattcccagttctttggtccgcgtcagataggcggcggcgatgtctgggcgcggcaagggcggcaagggtctgggcaagggcggcgcgaagcgaccgcgaaggtgctccgcgacaacatccagggcatcaccaagccggcgatccggaggctggctaggaggggtggcgtgaagcgcatctcggggctcatctacgaggagacccgcggcgtgctcaagatctttctcgagaacgtcatccgcgacgccgtcacctacaccgagcacgcgcgccgcaagaccgtgaccgccatggacgtcgtctacgcgctcaa

SEQ ID NO: 9990 - DNA, 323 bp, Zea mays
gttgaatgaatcacgtttagctgaagacctggagcaaacttgggaggtccttgctgagccaatacagacagtgatgcgaagatatgggatacctgaaccttatgagaagctgaaggaactgacgagaggccaagctgtcaccaaggacagcatgcagcaattcattaatggtctagacataccggaggaggttcgatcgaagctttcgaagctaaccccgcattcctacactgggctagcggaggatttggccagagacatcgagaagtgggttgatcttgaatctggatttcagatcaagtgagctcccatttgacaacaat

SEQ ID NO: 9991 - DNA, 323 bp, Zea mays
tctcactgctaagacaatccagctctttattggtgacatatgtgattttgaattcctctcagaaaccttcaagtcttttgagccggatgccgctgtccactttggcgagcaaagatccgcgccatactctatgattgatcgttcgcgggcagtctacacacagcataacaatgtcattgggacacttaatgtcttgtttgccataaaggaatacagtgaagagtgccatcttgttaagctaggaactatgggtgagtatggaacaccaaacattgacatcgaagaggggtttatcactattactcacaatggaagaacagaca

SEQ ID NO: 9992 - DNA, 325 bp, Zea mays
ggtttggtgggaaaaggcctcgcgggtcgcaaaccgctctctgttgatttgggatttgggaggcgctcgagttttcaggtaaaccatagtttagtgacccatggctcgtactaagcaaactgctcgcaagtccactggagggaaggctcctaggaagcaacttgccaccaaggctgcccgtaagtctgcacccacaactgggggagtaaagaagcctcatcgttaccgccctggaactgttgctcttcgtgaaatccgcaagtatcagaagagcactgacctgctcataaggaagcttccgttccaaaggcttgtcagggagatt

SEQ ID NO: 9993 - DNA, 320 bp, Zea mays
cggacggtggcgctgtgcgcaccggggggaagggtagcgtgcgcaggaagaagaaggcagtccacaagactacaaccacagatgacaaacggcttcaaagcaccttgaaaagaataggagtgaacagcattcctggtattgaagaggtcaacatctttaaggatgatgttgttattcagtttgtaaatcctaaagtgcaagcgtcaattggtgctaatacatgggtggtcagtggaactccacagacaaagaagctgcaagatctgcttccgtcgattatcaaccagcttggtcctgacaacctggacaatctgcggagg

SEQ ID NO: 9994 - DNA, 322 bp, Zea mays
ctccgaaatcaaggtagcgtacaccgctgcagtttctagagccctctctgccactcgtgatcccactagtcacaatgcctgccctcgccaagcccgcctcccgcaccgccaagcccgccgcggctccgaagccgaagcctgccgccgccaagccgaagggccccaccgctggtgcctcccacccgccttacttcgagatgatcaaggaggctatcacggcgctcaaggagaggaccggctccagctcgcaagcgctcgccaagtatgtgggggacaagcacggcgcgtctctgccggccagcttcaagaagatgctttccat

SEQ ID NO: 9995 - DNA, 315 bp, Zea mays
cggctgcctcccccacgagctctgcatgctcaccaaggcggccgtgattgatgccggcatgaaccagctcaccggcccaatcccgtcatctttctcgtgcctaatcagcgtcgagcagctcaacctggccggaaaccgcctctacggtcaggtacccgacgcgctctgcaagcttgctgggcccgctggccgcctcgccaacctcacgctgtccggcaactacttcacatccgccgggccggcatgcgcggcgctgatcaaagacggagtgctggacgtgaagaacaactgcattccggggctcaccaaccagag

SEQ ID NO: 9996 - DNA, 321 bp, Zea mays
cggaccgtgggcaaactggcagaccgatgtggtcacctgggtttgcttttactatattgaaaaggttcatgccagaagataaacttgcagatgtaaagggtgctaatctcaccgctgatggaacaggagttgtatttgatgttcctgcagcagatgttgaagattacattcaagcttcggagagtgccgcacaggtgacaattgatgaagtcaagcaactgccacccttgcaagagaaggaccagtcgagaggcaactcttggggaggaagatttggccatggaggtggccggagattttctggtggtggtggcggcggca

SEQ ID NO: 9997 - DNA, 301 bp, Zea mays
cggacggtgggcggacgcgtgggcggacgcgtgggcggacgcgtgggcgagaagagcggcggcgcgggcggacaaggagcaggcggaggaggagctgtgccaagccataatgggtatcacacgcgactcgatgcacaagcgccgtgccaacggtggaaagcagaaggcctggaggaagaagcgaaagtatgagcttggtcgccagccggccaacaccaagttgtcaatcagtaagacagtgaggagggtccgtgttcgtggaggtaacgtgaagtggagggctcttcgccttgatactggt

SEQ ID NO: 9998 - DNA, 311 bp, Zea mays
cccacgcgtccgatttgaaggcattcacgttcaatgatctaaaaaatgcaaccaagaacttccgaccggacagccttcttggggaaggagggtttgggcatgtttacaaaggttggattgatgagcacacgcttgctccttcaagacctgggagtggtatggttgttgctgtgaagaagcttaaaccggaaggttttcaaggacacaaggaatggctgacagaggttgattaccttggccaactatcacacaagaatcttgttagactcattggttattgctcagatggtgacaacgggcttctggtgtat

SEQ ID NO: 9999 - DNA, 311 bp, Zea mays
gaccactccctcaacaacgccttcagcacctacggcgaggtcctcgagtcgaagatcatcctggatcgggagacgcagaggtatcgcggcttcggcttcgtcaccttctccacggaggacgcgatgcgcaggcccatcgagggcatgaacggcaaggagctcgacggccgcaacatcaccgttaacgaggcccagtcccgcggcggccgtggaggcggcggtggcggatacggtggcgggcgcggtgatggaggcggctacggcggtggcggtggaggctacggcggtggtcgtggaggctacggcggcgg

SEQ ID NO: 10000 - DNA, 305 bp, Zea mays
agaaaactagaaaagcctcctcccgaccgcaacgcccctcatctccctcgaccccgacatccccgacccgatggcgcccaaggcggagaagaagccagcggagaagaagccggcggccgaggagaaggcggagaagacgaccgcaggacagaagcccaaggccgagaagcggctgcccgcgtccaagtcctccggcaaggagggcggcgagaagaaggggaagaagaaggccaagaagagcgtggagacctacaagatctacatcttcaaggtgctgaagcaggtgcaccccgacatcggcatat

SEQ ID NO: 10001 - DNA, 312 bp, Zea mays
cggaccgtgggctccttcccgagcaggaggcggacaaggtaagcagcaatcgcaggaaccctagcgccgccgcacccgcaggaatgggtatcgacctcgtcgccggtacgaggaataagaagaccaagcgcactgcgcccaagtctgacgatgtctacctcaagctcctcgtcaagctctaccgtttcttggtcaggaggaccaagagcaatttcaacgctgtcattctcaagaggcttttcatgagtaaaaccaaccgaccaccaatctccatgcgccgccttgtcaagtttatggaaggaaaggagaaga

SEQ ID NO: 10002 - DNA, 415 bp, Zea mays
atctctccctcttctgagatacgcactcacttataggcgtaatctgcgtacgctctgcatggtatccggtccggctatttccggcttcgacccacgctttcgctcgctgccgccgcttccgctccgtcgctcgcttcatgcctccgtggccacctccaccatggccccgaagaaggagaaggccccgctgccatcgtccaatctggccaagtccggaggcgggatgcagaagatgaagaagtggagcaagggtaagcagaaggagaaggtcaacaacgctgtgctcttcgaccaggccacctacgataagctgctctccgatgtgcccaagtacaagcagatcaccccatccatcctatctgagcgccctatggctaatggatccttggcacggagggccatcaaggatctgatg

SEQ ID NO: 10003 - DNA, 312 bp, Zea mays
cacacgcgtccgcacagctcacagcaaacaccgcgaagcgcccccgctcccaaacccgaccgagcaaagcgcaaagccccccaaccgcggatcaatccgcagcatcgatggcgcccaaggcggagaaaaagccggcggcgaagaagcccgcggaggaggagcacgcgaccgagaaggcggagaaggctccggcagggaagaagccgaaggccagaaacgcctccccgcgggcaagtccggcgccggcgagggcaagaagggcaagaagaaagccaagaagagcgtggagacctacaagatgtacatcttcaa

SEQ ID NO: 10004 - DNA, 140 bp, Zea mays
cccacgcgtccgagatgatgcaaaagaagttaagaaaatcgagaaagtaaccaaccatgacgtgaaagccgtggagtactttctgaagcaaaggtgcagctcaaatccagagattgcaaaggtgtcggaattcttccatt

SEQ ID NO: 10005 - DNA, 296 bp, Zea mays
ctcgtccaaggccatgtccatcatgaattccttcatcaacgacatcttcgagaagctcgccgcggaggccgccaagctcgcccgctacaacaagaagcccaccatcacctcccgcgagatccagacctccgtccgcctcgtcctacccggcgagctcgccaagcacgccgtctctgaaggcacaaaggcggtcaccaagttcacttcgtcttagattggttgccttccctctcgtttgtactggtgtctggtagtagatctcatctagttgggggtgctgttgctagtcggtcgtg

SEQ ID NO: 10006 - DNA, 289 bp, Zea mays
cacaaggtgatcttggcccactgcatcccttcactgctggagtgtatgttgcactaatgatggctcagattgaggtccttaggaagaagggccactcttactcagagataattaatgagagcctgatcgagtccgtggactcgttgaacccgttcatgcatgctcgcggtgtggccttcatggtcgataactgctccacaactgctcgtttgggatctaggaagtgggcaccacgcttcgattacatcttgacccaacaggcgtttgtgactgttgacaagaaagcacc

SEQ ID NO: 10007 - DNA, 99 bp, Zea mays
gttggcttctcctcgccctccggttcgggttcgggttcgtgaggttctccggggttcggtttcgtgggtgggcggatcgagatggcggcgtcggatgtt

SEQ ID NO: 10008 - DNA, 284 bp, Zea mays
cccacgcgtccgctcctcgcatttcttcccatccgatccccccttcgcaaccaaaaccccaactcgccccgcatcgatggcgcccaaggccgagaagaaacccgcggcgaagaagccggcggaggaggagcccgcggccgagaaggcgcccgccgggaagaagccgaagggcagaagcgggtccccgctggcaagtccgctgccaaggaaggcggcgagggcaagaggggcaagaagaagggcaagaagagcgtggagacctacaagatctacatcttcaaggt

SEQ ID NO: 10009 - DNA, 285 bp, Zea mays
cccacgcgtccgaactactccctgttcatgccattctatgactacatatataacaccatggacaagtcatcggacacgttgtatgagaagtcactcaagggaaaagaagaaacggcagatgtggttcaccttacccaccttaccagcctgcagtccatctatcatatgaggcccgggtttgcagaatatgcttctagaccttacactgccaagtggtatgtgcggatgatgtggccgatgtcatggctctccatggttctgacatggtcatatggttcttcattt

SEQ ID NO: 10010 - DNA, 280 bp, Zea mays
ccatcctaatatcaacagcaatggaagtatatgccttgacattctcaaagagcagtggagccctgctttgacaatttctaaggtcctgctctccatctgctccctgctgaccgaccccaacccggacgaccctcttgtcccggagattgcccacatgtacaagacggaccggccgaagtacgagtcgacggcccgcagctggacgcagaagtacgcgatgggctgacgaacgctttcctggtcgtccacccgactggcgtctcaagaaagtcgttcctgg

SEQ ID NO: 10011 - DNA, 285 bp, Zea mays
cggcatggcggacggcagctacaccatcatgcacctggacctggcctccctcgacagcgtgcggcagttcgtggacagcttccggcgcgccggcatgccgctcgactcgctcgtctgcaacgccgccatctaccggcccacggcgcggacgccgacgttcacggcggacgggtacgagatgagcgtcggcgtcaaccacctgggccacttcgtcctggcgcgcctgctcctggacgacatgcagaagtccgactactcgtcccgccgcctcgtcatcctcggctc

SEQ ID NO: 10012 - DNA, 281 bp, Zea mays
cggaccgtgggctctgtggattgcatcggattttggcaccaaggagaccaaatggcttgtccgtgctggagttgggctgaaggaggcaccaggcgcagagaaatggaacgatgctgagcggatttctttcatgcggaacaacattcttgagttgtatgagaggcctaactgccccttactgaagacattgatgctgcaaggaaatcctgggctggacaagatatgtgatggattcttccaatacatgccatctctcagagtgttagatctgtctcatacct

SEQ ID NO: 10013 - DNA, 281 bp, Zea mays
gcttgctcacctacttctcaatttagaagacctcaatttctggatctgagcatcaaatcaagaccataccactttagtcagtcctgtctgatggcactgactgcagctccagccagtggtgattcacagagtggtcctcagaggaactatcaggttgttgttgctgccacttgtgacatgggcattggcaagggtggggtattgccatggaagcttcttggtgatcttaaattcttcaaagaacttacactaactacaactgatcctgccaaaaagaatgc

SEQ ID NO: 10014 - DNA, 280 bp, Zea mays
gaaaaccctgaaaccttggtgaagccgagacgagtttgaggcaattatccaagcagctagtgctagcatctatggcgacctccgttcgtggtttcagtagcgccccctgcagggatgtgccgggcagctacggccttccgctggtgggcgccgtccgcgaccgcctcgacttctagtagttccagggccaggacaagtacttcgagtcccgcgtggagcgctacggctccaccgtggtgcgcatgaacgtcccgccgggccccttcatggcgcgcgaccc

SEQ ID NO: 10015 - DNA, 283 bp, Zea mays
ccgcagtccctctcctctcgaggtggcggcgctccctcctgttttcctcttcttcttcctgtactatatagcctcccctcgcaaatcgtcactgacgagtgatgtcattccgcttgcttgattgttccagatattcgcagttgaccgggtcctcggagcacgatgaagtttgttgctgcctacttgcttgctgtcctcgctgggaacgccagcccctccgctgaggatttgactgccattctggagtcagttggctgtgaagttgacaatgaaaggatggaac

SEQ ID NO: 10016 - DNA, 117 bp, Zea mays
atttcggcctctgtcccttgcaagttcaatctcacctccaaccatgggtaaagagaagtcccacatcaacattgtggttattggccacgttgactctggcaagtcgaccaccacagg

SEQ ID NO: 10017 - DNA, 273 bp, Zea mays
gtgcttctaatacaattctagccacaggaggttatggcagggcatatttctcagcaacctcagcacacacttgtactggagatggcaatgctatggttgcacgtgctggtttacctctccaggatcttgagtttgtacaattccatcctacaggcatttatggtgctggatgcctgattactgaaggttcccgtggtgaaggtggtatccttagaaatagtgaaggtgaacggttcatggaacgatatgctcctactgcaaaagatcttgctt

SEQ ID NO: 10018 - DNA, 227 bp, Zea mays
gatggttatccgtgcttaccacaactcaagaggagaccaccaccgcgatgtctgcatcattcctgtctcagcacacggcacgaaccctgcaagtgctgctatggttggaatgaagattgttgctgttggaactgatgccaagggtaacataaacatcgaggaattgaggaaagctgcagaagcaaacaaggacaacttggctgctctgatggttacctacccttcaa

SEQ ID NO: 10019 - DNA, 323 bp, Zea mays
cccacgcgtccgccgaagatctcccaggaggtcagtggtgatgctctgggtgaggagtttaagggttatgtcttcaagatcatgggtggatgtgacaaacaaggcttcccaatgaagcaaggagttctgacttctggtcgtgtccgccttctgctccacagaggcactccctgcttccgcggttatggcaggcgtaatggtgagcgcaggaggaagtctgtccgtggttgtattgtgagcaaagacctatctgttatcaacttggtaattgttaagaagggtgagaacgatctgcctggtttaactgacactgagaagccaag

SEQ ID NO: 10020 - DNA, 325 bp, Zea mays
  unsure (1)..(325): unsure at all n locations
ctcctccgctccctcccgcatacaaatcgtccgccaacaatcccccaaaccctactccaccacgcgatcaccgaccgacgcctctccgacgagcaactcaaccccccaccgcgcacgctagagccggatccccacgatggcgacgatccagcaccaggcgaaaccggcggtggcggcggcgccgagcacgactactggcggtgggcagcgcgcgatggacctctacgagaagctggagaaggtcggagaggggacctacgggaangtgtacagggcgcgggagacggcgacggggcggatcgtggcgctgaagaagacgcggctc

SEQ ID NO: 10021 - DNA, 325 bp, Zea mays
ctctcttccaccttccaccacaagcgccgccgcagccggtgcctgctccttcccgatccccgaggcaaagctgcgactccgcaaccgccgccatggcgttcgagaagatcaaggtctccaacccaatcgtcgagatggacggtgatgagatgaccagggtattctggcagtctatcaaggacaagcttatcctcccatttctggacctggacatcaagtactatgatttggggatactgcaccgtgaagcaactgatgacaaggtcacagtggaggctgcagaggctactctcaagtacaacgtggctattaagtgtgcgaccat

SEQ ID NO: 10022 - DNA, 140 bp, Zea mays
gtcatattctccagcaccgtggctaataatgtattgttgcagtacaaaaaaaaaaatataatccacaaggtaaatttcttaatctataaccactatttgaaattggtagtctacaatctatttgatgctttaagtgaact

SEQ ID NO: 10023 - DNA, 323 bp, Zea mays
caccaaccttccactccctccctccgtcgccatggcgcgcaagaagatccgggagtacgactccaagcgcctcctcagggagcacctcaagcgcctcgcgggcatcgacctcaccatcctctccgcccagatcacgcaatcaacggacttcgcagagcttgtgagccagcagccatggctgtcaaccatgaagctagtggtgaagcccgatatgctgttcgggaagcgtgggaagagcggcctcgtggctctcaacttggatttcgatcaagtcaaggagtttgtcaaggagcggctgggggttgaggttgagatgggtggct

SEQ ID NO: 10024 - DNA, 219 bp, Zea mays
caatggcatcactgaatccattgcaaaagtaggcttgacaaagtttgttagtgacctattcttggttggactgttctaccatctgtacaaccagattgctacgaacaccttggagcgagtggctcctctgacacatgctgtgggcaatgtgttgaagcgtgtgtttgtcattggcttctcaatcgttgtttttggcaacaaaattagcacacaaactgg

SEQ ID NO: 10025 - DNA, 323 bp, Zea mays
gtttctggaaaggcatttatctcacacaaaccttgcttttcaaaagatatccgcaagttctgtaagttggcatatcctcttgtacactatgctcgcatgtttgggttgtctggctgctttgcaatatgcttgcaaagttcttataccgggaatgacgactacatattagagttctttttgccactcgattgtattgacgaagatgaccaaaatgccttactggagtctatattaactctgatgaagcggtgtcttcgtagcctaaagctagttgatgacaatgatttgagtggggtttctcttcaccttagtaatgtgctaaa

SEQ ID NO: 10026 - DNA, 324 bp, Zea mays
gtcaccaaggaggtggtgaagacgctcgaggagtgtggcaggattaccttccccatatcccttaagcagccggggcctcgtgaaatgccggtccagtgttttgtgaggagagagagggcaacatccacatatctactctacctagggctcagcccatctatgaatgtggagaaagacaagttattgcttgctgcccggaaggtcaggcgtgccacgaggacttattttgtgatatcactggtctctgatgatttctctcactctagtagcacctacgttggcaaactgaagccaaacttcctcggcacaaagttcacaatcttc

SEQ ID NO: 10027 - DNA, 320 bp, Zea mays
cggacgcgtgggcggacgcgtgggcggacgcgtgggtgatcgtgtccctttgaaggaaatgaaatcagattggcatgcttgcctggacaacaaagttacgttcaagggacatgcagtgccacaggagcagcaggataaggttgtcaaatttgactttcatgggcagccagcagaaatcaagcatggtagtgttgttatagcagcaataactagctgcacaaacacctcaaatcctagtgttatgcttggtgctggtcttgtagctaagaaagcttgcgagttgggtcttgaggttaaaccatgggtgaagacaagccttg

SEQ ID NO: 10028 - DNA, 320 bp, Zea mays
cccacgcgtccgatgaagcttcacggatgtcaattgagacagggccctactatttccactacattattgagggcagagtatgttatctgactatgtgtgaccgctcttatccgaagaaacttgcattccagtacctagaagatctgaaaaatgaatttgagagggtcaatggcaaccaaattgaaactgctgcaaggccatatgcttttatcaagtttgatacattcatccagaagactaggaaactgtatttggatacaagaactcaaaggaacctcgcaaaactgaatgatgaactctatgaggtgcatcaaattatg

SEQ ID NO: 10029 - DNA, 322 bp, Zea mays
gtttgggcagataaaatcaaaacttcctggagctcctaggttcctcttgtgccttctccctgagaggaaaaattgtgaaatctatggtccttggaagagaaagtgcctggccgagtttggtattgtcacacagtgtctagctccattaagagtcaatgatccgtacctgcttaatttgctgatgaagatcaatgcaaagcttggtggtctgaactcgttgctgcaagttgaagcatcttcgtcaataccacatgtgtcgcaagtacccaccatcatcttaggtatggatgtttcacatggtcatccaggacaagatagacct

SEQ ID NO: 10030 - DNA, 251 bp, Zea mays
ggagctgtccttgctacagagctcaagaacaatgccagcatgcacctcacacccagccacactcctgatctgatcattcatcttccaacggctgcatctgtttgctaccgctaccgccgttggaagttgaatgatgagatcagccttgttgctcgctgtgagtgcatctgtcagtgttgatcaatgtggtactcgccagtttattaccgtcaatgccctaaatgagtttgattcatagattactggtgttg

SEQ ID NO: 10031 - DNA, 316 bp, Zea mays
ctcatcttttctcgtttagaacctctaagatttcccccactcgccagtcgcagcagcacctgtagcagccatggacgccagcggagccggtagcaaggggaagaagggggcggccgggcgcaaggcaggcggccccaggaagaagtcggtgacgcggtccgtcaaggccgggctgcagttccccgtcggccggatcgggcgctacgtcaagaagggccggtacgcgcacgcgtgaggcactggcgcccccgtctacctcgccgccgttctggagtacctcgccgccgaggttctggagttggcagggaacgcggcg

SEQ ID NO: 10032 - DNA, 318 bp, Zea mays
ctctcccgagacccccgagagtcccctcgctgccgacgccacacaaacgcctccaccctcatgttcaccggcgctgcgggcggcattggcaacctgccacggccgcgcaggccgcggctcggcggaataggacacgggggcgtcatggtgtctccacagggacaggtggctctgggggcacatccgcacctagccgccccgccgtgcaccgactacgacgtggcctacttcaaggcctactcacacatcggcgtccacgaggagatgctcaaggatcatgtgagaactagtacttacagaaatgccataatgcatcac

SEQ ID NO: 10033 - DNA, 316 bp, Zea mays
aattctagggttttgctgctctccgaccccgagctccgaagccgcagcatcaggcgcggcccccctcgcgtgtgaccgagatggcgctgccgaatcaggggaccgttgattaccccagcttcaagctcgtcatcgtcggcgatggtggaactggtaaaactacatttgtgaagaggcatctcactggagagtttgagaagaaatatgaaccaaccattggtgtggaagttcatccgttggatttcaccactaactgtggtaagatcaggttctactgctgggataccgcagggcaagagaagtttggtggcctcag

SEQ ID NO: 10034 - DNA, 315 bp, Zea mays
cggacgcgtgggtcctgatgaccaatccccatattggtaacactggcgttaatcctgacgatgaagaatcaaaccaatgttttcttggtggccttatcacaagaaatctaagcatatgtacttccaactggcgatgcaaagaaacacttgaagagtatctgactaagaggaacatcatgggaatatatgacgtggatacacgtgctataacacgaagattaagagaagacggcagtcttattggtgtcttgagtactgatcagtctcagacagacaatgagttgttggaaatggccaaaaagtggaaaattgttg

SEQ ID NO: 10035 - DNA, 316 bp, Zea mays
aaaccccaagaagtgtatgatgcaatgagaaaacttgcagagcagcctgaagactgtgtggatgatgatgatgcagaggctggtgatgaacatcaagcagtagatgacaatagaggaccatcaccatttgttgcaattccagaggttgtgcaccggaagcctacttttccagagagtggtagaactttgatggatggattgatgtccttaatttacaagtatggagatgaaaggaccaaagcccgtgcaatgctgtgtgacatatatcaccatgcgatctctgatgagttttcagtggctcgtgacttgcttttaa

SEQ ID NO: 10036 - DNA, 307 bp, Zea mays
cccacgcgtccgggtgatggccgctatttctcaaaagatgctgttcagatcataacaaaaatggctgctgccaatggagtaagacgtgtttgggttggacaaaacagtctcatgtctactcctgctgtatctgctgtcatccgtgaaagagttggtgcagatggatcaaaggctactggtgccttcatcttgacagcgagccataacccaggtggtcctaaggaggacttcgggatcaaatacaacatgggaaatggtgggcctgctcctgaatctgttaccgacaagattttctctaatacaacga

SEQ ID NO: 10037 - DNA, 306 bp, Zea mays
caactcctgagcactttctcctcgtccccgacaagccaatcgaagccgagatacggccatggactccaccggcaccggagcagggggtaacgcgaagaagggagcggccgggcgcaaggtcggcgggccaaggaagaagtcggtgtcgaggtccgtgaaggccgggctccagttccccgtcggccgcatcgggcgctacttgaagaagggccgctacgcgcacgtgtcggcaccggcgcccccgtctacctcgccgctgtcctcgaatacctcgccgctgaggttctggagctcgctggtaatgct

SEQ ID NO: 10038 - DNA, 133 bp, Zea mays
aagaaagcctgatgtactggtaaatgttatgccaaagataatgggaaacaataaatatctgggacaggaaaagcttcccatcattgtctgggttattgctcaggcctctcaaggtgacctagtgtctggcatg

SEQ ID NO: 10039 - DNA, 302 bp, Zea mays
gttgagaagtattccaactccaacattgaaattcatactttcaatcagagccagtatcctcgcattgttaccgaggacttcttgccacttccaagcaaagggaaatctgggaaggatggctggtatcctccaggccatggtgatgtgttcccctctttgaataacagtggaaaactcgacatcttattggctcagggcaaggagtatgtcttcgttgctaactcagacaacttgggtgctatagtcgacatcaagatcctgaaccatctgatcaataaccagaatgaatactgcatggaggt

SEQ ID NO: 10040 - DNA, 298 bp, Zea mays
ctcagtggaattccatcatactggattgacagtgaacaaaggattggaccaggaaacaggatcagctacaagctaaatcatggtgaactggttgagaaaaataactggttacccgaggggcctattaccattggtgttacttcaggtgcctcaactccagataaggttgttgaggatgctcttcagaaggtatttgagatcaagcgtcaggaaattttgcaggttgcataaattttaagcagagatttggtgaagagctgaatagttttggcttggcaaaggttactagaaacgttgc

SEQ ID NO: 10041 - DNA, 297 bp, Zea mays
cccacgcgtccggaaattgcgtgaactctttgctgagtatggcaatattacttcctgcaaggttatgcgggattcgaatggtgtcagcagaggttctggatttgttgctttcaaatctgctgaagatgctaaccgagctcttacggagatgaatggcaaaatggttggaagcaagcccctttatgtagctcttgcgcacgtaaagaagacagaaaggcaaagctacaggcacaattttcacaaatgcgtcctgttgcaatggcgccttcagtaggtcctcgcatgcccatgtttcca

SEQ ID NO: 10042 - DNA, 295 bp, Zea mays
acatgctgggacttgcaaagagagttggagctaggattttgttgacatcaacatctgaagtttatggtgatccacttgagcatcctcaaaccgaggcctactggggcaatgttaacccaattggagtcaggagttgttatgatgagggtaagcgtgtaccagagacgctgatgttcgactatcacaggcagcatggcattgaaatccgaattgccaggattttcaacacctatgggccaaggatgaacattgacgatggccgtgttgttagcaacttcattgctcaggctgtgcg

SEQ ID NO: 10043 - DNA, 301 bp, Zea mays
ctacccctctaaatcgatcctcgctccacggccatggtgaggatgaagcaggtaaagatctcggtaaagaaggacgtggattcgtacacaatccgcggcaccaacaaggtcgtccatgtgggcgactgcgtgctgatgcgggcgtcggactcggacaagcagccgtatgtggcgcgggtggagaagatggaggccgacggacgcggcacgtgcgggtgcaggtgcgctggtactaccgccccgaggaatccaagggcggtcgccggcagttccacggcgccaaggagcttttcctttccga

SEQ ID NO: 10044 - DNA, 299 bp, Zea mays
cggacgcgtgggccaaggttcttgatcctactgggaccttgttcgctggacgagtcatatcaagaggtgatgatggtgatccttttgacagtgatgaacgagtgcacaaaagtaaagatctggatggggtactgggtatggaatctgcagttgtgatcatagatgattctgtaagagtctggcctcataacaggcacaatttgatagttgtagagagatacacctatttcccctgcagcaggcgtcaatttggccttcctggaccatcacttctagagattgacagagatgagaggcct

SEQ ID NO: 10045 - DNA, 299 bp, Zea mays
agaagatcaccgatgacgaatacatcagtgccatcaaggaagaaatcagcaaggttgtcaagatccaagaggagcttgacattgatgtgcttgtgcatggagagccagagagaaatgacatggttgagtacttcggtgagcaattatctggttttgcgttcactgccaacggatgggtgcaatcctatggatcacgctgtgtgaagccacccattatctatggtgatgtcagccggccgaaccccatgactgttttctggtccaagatggcacagagcatgacccctcgtcccatgaag

SEQ ID NO: 10046 - DNA, 116 bp, Zea mays
cagacgcgtgggggatggcttgtcctccccctccggttcgggttcgggttcgtgaggatctccggggttcggtttcgtgggtaggcggatcgagatggcggcgtcgactgttgagt

SEQ ID NO: 10047 - DNA, 295 bp, Zea mays
agaaaacatattggtaaagagctacagcagatgtgaaataaaagtaattgatcttgggagcagctgctttgagacagatcatctatgttcatatgtgcaatcacgatcttaccgtgcacctgaagttatactgggcttgccttatgacaaaaagatagatgtatggtcacttggttgtatattagcagagctttgcaccggaaatgtacttttccaaaatgattctcctgcaacattacttgctcgtgtgatgggtatcattggctccatagaacaagctatgcttgcacaggga

SEQ ID NO: 10048 - DNA, 295 bp, Zea mays
cccacgcgtccgcgacgccacgctgctcatccacgagggtgtcaaggccgaggaggagtacgagaagaccggcaagatccccgacccggagtccaccgacaacgctgagttcaagatcgtgctcaccatcatccgcgacgggctcaaggctgaccccaagaagtaccgcaagatgaaggagaggcttgtcggcgtctctgaggagaccaccacgggtgtcaagaggctctaccagatgcaggagaccggcgccctcctcttccctgccattaacgtcaacgattccgtcaccaag

SEQ ID NO: 10049 - DNA, 290 bp, Zea mays
gtgacaaaatgctggaatcacttgacatgcggagagatgttcaggagatcttcaaaatgactcctcatgataagcaagtcatgatgttttcagcaacgctcagcaaggagatccgtcctgtatgcaagaaatttatgcaagatccgatggaaatatatgttgatgatgaggcaaagttgaccctccatggtcttgtacagcactatataaaacttagcgaggcagagaagaaccggaaactgaatgatctcttggacgctcttgatttcaaccaagttgtgatattcgtg

SEQ ID NO: 10050 - DNA, 290 bp, Zea mays
aacccgacccgatggcgcccaaggccgagaagaagccagcggagaagaagccggcggccgaggagaaggcggagaagacgaccgcagtaagaagcccaagtccgagaagcgcctgccggcctcgaagtcctccggcaaggagggcggcgagaagaaggggaagaagaaggccaagaagagcgtggagacctacaaaatctacatcttcaaggtcctgaagcaggtgcaccccgacatcggcatctcctccaaggccatgtccatcatgaactccttcatcaacgacatat

SEQ ID NO: 10051 - DNA, 285 bp, Zea mays
gcaattgaagggacctacattgacaagaaatgtccattcactggaaccgtttctatcagaggcagaattattgctggaacatgccacagtgctaagatgaacagaaccatcattgttcgcaggaactatctccactttgttaagaaataccagaggcatgaaaagaggcactccaacattccagctcacatctccccatgcttccgtgtgaaggaaggcgaccatgtcatcattggccagtgcaggcccctatcaaaaactgtgaggttcaatgtcgtcaaagtc

SEQ ID NO: 10052 - DNA, 283 bp, Zea mays
gtggatatcaggaaggacctctacggcaacattgtgctcagtggaggttcgactatgttcccgggaatcgctgatcgtatgagcaaggagatcacttcccttgcaccaagcagcatgaagatcaaggtcgttgcaccgcctgagaggaagtatactgtctggataggagggtccatcctagcctcgctgagcactttccaacagatgtggatatctaaggaggagtacgatgagtctggcccggcaattgttcacaggaagtgcttctaggcttcgcaagttc

SEQ ID NO: 10053 - DNA, 285 bp, Zea mays
cggacgttgggttagatattagtaaggatctctacggcaacattgtgctcagttgatgttctactatgttccccggtatcgctgatcgtatgagcaaagagtattcttacctttgcacaagcagcatgtagatcaaggtcgtcacatcacctgagagttagtacagtgtctggataggaggttcgattctagcttcgctctgcactttccatcagattatgttatccaatgagtagtatgatgagtctggcccggcaatcgtccacaggaagtgcttctaggttt

SEQ ID NO: 10054 - DNA, 324 bp, Zea mays
ggcaaactcaagcctgtatgcacatctccatggaccgcattccgcggagtgtctcctcgactggcggaggcgagcgtctatcgccatgggcaccgctcgggctctcttgtaccttcatcgccacgcaacgcctaagataatccacggaagcgtcaaggccaccaacgtgctgctggattcagacttccgggcgcacgctggcgatttcggtctggcaaggcttattcccgacgacggaacggaccacgaaaagatagccagcagcgagagccagcgaggctaccttgctcccgagtacgccgccatgtccggcaaaccaactga

SEQ ID NO: 10055 - DNA, 322 bp, Zea mays
gtggagatatcactcggatttcaattccaaaggattatgacactggtgtaagcaaaggaatggcgtacatggatttcaaggacccagattccttgaataaagcatacgagttgaatggaaccgaccttggtggctacagcttgtatgtcgatgaagccaagccgagacctgataacagcggtggcttcagtggcggcttcagtggtggcagacggaggagtggcggcttcagtggtggcagacgagggaggagtgacagggggcgtggtggtagccgtgggcgtggatttggaggccgtggtggaaggggtgacagaggccg

SEQ ID NO: 10056 - DNA, 321 bp, Zea mays
gtgctgctcctgtcggacggcaacggcgagctggcgcgcgccatgggcgtcgagctcgacctctccgacaagcccgtggggctcggcgtccggtcccgccgctacgcgctgctcgcggaggacgccgtggtcaaggtgatcaacctcgaggagggcggcgcgttcaccaacagcagcgccgaggacatgctcaacgcgctctgaactcgcgacgccatggttggttcgtctcttccggcaagagttggtttcttttccctgaagataatcgtgacggcaacggtggcttgtgttactgccgccactgttgtgaccggcgct

SEQ ID NO: 10057 - DNA, 318 bp, Zea mays
caacattcgtaatatgtctgttattgctcatgtggaccatggcaagtctacacttacagattcccttgtggcagctgctgggattattgcccaggaagttgctggtgatgttcgcatgactgatactcgtgcagatgaagccgagcgtggcatcacaatcaaatctactggtatctctctttattatgagatgactgatgagtcactgaagaactacaagggtgagagggatggtaaccaatacttggtcaaccttattgactcacccgggcacgtcgatttttcttcggaagtcacagctgctcttcgcatcaccga

SEQ ID NO: 10058 - DNA, 314 bp, Zea mays
cagcgatggcgcggcacttcgtgctcaacaccggcgccaagatcccctccgtggggctcggcacctggcagtctgaccccggcgtcgttggcaacgctgtctacaccgccgtcaaggcgggttaccgacatatcgattgtgccagagtttacggcaacgaaaaggagattggtttggcgctgaagaagctatttgaagagggtgtagtgaagcgagaagatctgtttatcacctctaagctatggaatgatcatcatgctcctgaagatgtgcctgacgcagtaaatgacagcctgaatgatttgcagcttgag

SEQ ID NO: 10059 - DNA, 314 bp, Zea mays
acgacacgaaggtggggaaggaaaccacagccgcttctggcgggcgctcaccctgccccttccacctcgcctcgcctcgcaatggaggtttccaggtggaccccggcggccggcctcctgctcctgttgctcctcccgctcgcggccaccccgtcacgcgccgccacgatggcgagatcgccgtcgtcgtccactgccgtgttccagctccagggagacgtataccccaccggccactactatgtcacgatgaacattgggaacccagcgaagcctacttcctggacgtggacactggcagcgatctcagctgg

SEQ ID NO: 10060 - DNA, 315 bp, Zea mays
cggacgcgtggcgaatgaagagatactttgtccatgccgcaagtgtttgaatcggcttagtggacatagaggacaggtggaggaccacttatatcttcatgggatggctagtacatacactaggtggatgtatcatggagaagccatggatgacatgattaatgaaatggtgaccacgaggatgaacatgtgagtctcaatgatgatgttggtatgaatcaagatgaagaagatcctgatgataggattaatggtatggtagaggagttatacacagccgaagatcgagataaaaggaaatctatgtttggagat

SEQ ID NO: 10061 - DNA, 312 bp, Zea mays
cgtgaacgaggggcaccagacaagctgtgcgaccaggtgtcggacgcggtgctggacgcctgcctggcgcaggaccccgacagcaaggtggcctgcgagacctgcaccaagacgaacatggtgatggtgttcggcgagatcaccaccaaggcgagcgtggactacgagaagatcgtgcgcgacacctgccgcgagatcgggttcagctccgacgacgtggggctcgacgccgaccgctgcaaggtgctggtgaacatcgagcagcagtcccccgacatcgcgcagggcgtgcacgggcagttcacgaagcgg

SEQ ID NO: 10062 - DNA, 314 bp, Zea mays
ccacaagggcttgaggctaggtacctcagaaattgacaggctacgtggtgctgatttgaagaatctgttgcgtgaaagaaaattagtactcattttggacctggatcacacattgatcaactccaccaaactccaagacatttcttctgccgaaaaagatttgggtattcagtctgctgcttcaaaagatgatccaaatagaagcatcttcgcactagatttaatgccgatgctcacaaagttgagaccatttgtccgagaatttctgaaagaagcaagcaatatgtttgagatgtatatatacacgatgggtg

SEQ ID NO: 10063 - DNA, 311 bp, Zea mays
cccacgcgtccgccgcgtgcgaaccaagcagaccacagcaagaagcgtagtcgtcgccggaaggaaaggcgcggacaagatgtcgtggcaggcgtacgtcgatgagcacctgatgtgcgagatcgaaggacaacatctcagcgccgccgccatcgtcggtcacgacggcagcgcttgggcgcagtccgagagcttccccgagttaaagcctgaggaggttgctggtatcataaaggactttgatgaacctggtactcttgcaccaactggtcttttcgttggaggtacaaagtacatggtgatccaaggtg

SEQ ID NO: 10064 - DNA, 313 bp, Zea mays
caacgaatggtcattgatagcgtaaataagtgcgacgttgacatacgaaaagagctattcagtaacatcttgctctctggtgggtcatcatcaattctgcagttaaaggagcgcctggagaaagaagtattggaggagtctcctcaagctgctccctccaatccaaacactgaaacgtctgtctactgactttcctcttgcgataggcttgagacgagcagcttgaggagactcctccagctgctcgtgtcaaggttatggcaagcggaaactcagtagagagacgtttcagtgtttggattggagggagcat

SEQ ID NO: 10065 - DNA, 310 bp, Zea mays
  unsure (1)..(310): unsure at all n locations
cggaccgtggngggaagcgcgccccctggaggagggtcttggtgaggcaattgatgatggccgcattggcccacgtgatgatcctaaggtgcgctcccagatccactctcaagagtttgggtgggacaaggatcttgccaagaagatttggtgcttcggacctgagaccaccggcccaaacatggttgttgatatgtgcaagggagtgcagtatctcaatgaaatcaaggattctgttgtggctggtttccagtgggcatcgaaggagggtgcactggctgaagagaacatgcgcgggatttgcttcgag

SEQ ID NO: 10066 - DNA, 311 bp, Zea mays
aaaaccctagcggcaaaaccttcgctctgcaccgccgtcgcctgctcccgtcccgccaccacatccgcccaggagctcgccgtcggggaggctgctcgaggagccgcgctgtctctcccgcgccgcgaccttcgccctcgccgccgccatgatctgcgcgatctccggtgaggtgccggacgagccggtggtgtcgaagaagtcggggcttctcttcgagcggcggctcatcgagcgctacattgaggaccatggcaagtgccccatcaccaaggatgagcttactatggatgatatcgtgccggtcaata

SEQ ID NO: 10067 - DNA, 306 bp, Zea mays
gccactccaaacacttgcgccgccgctgcctcacaggtaaggccgccatggtctccggttcgggcgtgtgcgcgaacagtgcgtggtcgacgcgcgccaccacatgctgggccgtctctcctcgatcatagccaaggagctgctcaatgggcagaaggtggtcgtcgtccgctgcgaggagatctgcatgtcgggcggcctcgtccgtcagaagatgaagtacctccgcttcgtccgcaagcggatgaacaccaagccgtcccacgggcccatccagttccgcgcccccggcaagatcctgtggcg

SEQ ID NO: 10068 - DNA, 315 bp, Zea mays
cgccgccgaatccgagactctgatctcgggttcaccgcagcgcacagagcacccccgactcccgtcccgatccgcgctctcctctacgacgcttcagtcatggcaggaatggcacccgagggttctcagtttgatgctaagcactatgattctaaaatgcaggagctgctgagcactggtgagactgaggagttcttcacttcatatgatgaagtttttgaaagttttgatgacatgggccttcaagagaatcttttgagaggcatttatgcatatggttttgagaaaccatctgcaattcagcagagaggaatt

SEQ ID NO: 10069 - DNA, 305 bp, Zea mays
cagggatcgccatgtcggactcggaggagcaccacttcgaatcgaaggccgacgctggggcgtccaagacctacctgcagcaggctggcaccgtccgtaagaacggcttcatcgtcatcaagaaccgtccctgcaaggttgtggaggtttctacctccaagactggtaagcatggccacgccaaatgccactttgtcgccatagacatattcaatgggaaaaagcttgaagatattgttccttcatcacacaactgtgacattccgcatgtgaaccgtactgagtatcagctgattgatatttct

SEQ ID NO: 10070 - DNA, 306 bp, Zea mays
gaaggagagcagcagccgaaacacgccagctgctccccggagctgcttgtgcagcaggtcaataccgcggccagcgccgccggggtggagctctccggcgagaactcgctggagctgtacgacgaggcggcgttctcgcaggtggcgtcgacagcacgcggcgccggcctgtccgcgttcacgtacctgcgcatgaacaagacgctctttgacggcgacaactggcggcagttcgtgtccttcgtcagggccatggccgacggcggcgcgagaccagcactgccacggtgcgacacggggcactcg

SEQ ID NO: 10071 - DNA, 304 bp, Zea mays
cattgctcggtccgtagtctgcatttgactcttgatgatttccagaaggttagtgaccaagttcctttccttgcagacctcaagcccagtggcaaatatgtcatggaagatctacataagattggtgggacacgggcagtcattcattatcttctggagcaaggtcttcttgatggtgattgcatgactgttactgcaaaaactctagctgagaatgccaaaattttccctcctttgtctgaagggcagcaaataattcgaccacttgacaatcctatcaaaccaactggccatattcaaatac

SEQ ID NO: 10072 - DNA, 304 bp, Zea mays
ggcaagctttatgctgcaatttgcgctgcaccagcaatgactctaggaacttggggtttgctcaatggcttaaaggcaacatgttatccttcgttcattgataaacttccttcagaggtacatgctgtggaatcaagagtgcagattgatgggaagtgtatgaccagtcgtggaccgggaacagccatggagtattctgttattttggttgagcaactatatgggaaggaaaaagctaaagaagttgctgggccaatggttatgcgtcctcagcatggtgtggaattctctatgaaagaggtga

SEQ ID NO: 10073 - DNA, 304 bp, Zea mays
cggacgctgggggagcggaaggcgaaagagtagcagcagcaggcggcgccgagtagcggctccccacctcgagcttgccaccatggctagaggattgaacaagcatttgaagaggctcaatgcgcccaagcattggatgctggacaagcttggcggagcttttgctcccaagccatcttctggacctcacaagtctagggagtgcctgccactgatcctcatcatcaggaacaggctcaagtatgctcttacataccgtgaggtcatttccatcctgatgcaacgccatgtacttgttgatggc

SEQ ID NO: 10074 - DNA, 307 bp, Zea mays
tctaggtgtctcagccacatgtttgccgcggagatcttcatgcaccgcttcctactgtctagcgcgatccggactttaaatccagaagaagccgattggttctatactccggtatacaccacgtgtgatctcacaccatggggtcatcccttgcccttcaagtcaccacggataatgcggacgcgattcagttcatttccaaccggtggccatactggaacaggacagagggagcagaccacttctttgtcgtgccacatgactttggcgcatgcttccactaccaggaagagaaggccatcgaacg

SEQ ID NO: 10075 - DNA, 310 bp, Zea mays
atgagtataaggacggcggccgagtcaaaaaatacagaggcatgggctctcttgaagccatgacaaaagggagtgatgcaaggtaccttggtgatacactcaagctcaaagtcgcgcagggcgttgttggagcagtagctgacaaaggttctgtactgaggtttattccttacacaatgcaagcagttaagcaaggattacaagatcttggtgcagattctctccagtcagctcatgatcttttgcggtcagagacactcagattagaggtgagaaccggtgctgcccaggctgaaggaggtatccatgg

SEQ ID NO: 10076 - DNA, 306 bp, Zea mays
ctccctcctccctgcaaatcctgcagacaccaccgctcgtttttctctccgggacaggagaaaaggggagagagagaggtgaggcgcggtgtccgcccgatctgctctgccccgacgcagctgttacgtcctcctcagtctcagtcaggagcaagatgggtgccggcggcaggatgaccgagaaggagcgggagaagcaggatcagctcgcccgagctaccggtggcgccgcgatgcagcggtcgccggtggagaagcctccgttcactctgggtcagatcaagaaggccatcccgccacactgct

SEQ ID NO: 10077 - DNA, 302 bp, Zea mays
accacgcgtccgcggaccgtgggctcaacagcatcgaagcaggatggcaggttagcccagacctgtatggggacaacaacactaggctcttcacctactggactagcgatgcctaccaggcaacaggatgctacaacctgctgtgctcggggttcatccagataaacaaccagatcgccatgggcgccagcatcttccctatctccaactacggcggctcccagtatgacatcaacatcttggtctggaaggaccccaaggagggcaactggtggctgcagttcggcaacgactacgtcctg

SEQ ID NO: 10078 - DNA, 299 bp, Zea mays
ggaagttgatggcgaaaaagctgttgtgcaggtctttgaaggaacttctggaatagacaacaaatacacaaccgtgcagtttacaggcgaggttttgaaaactcctgtctcacttgatatgcttgggcgcatttttaatggttctggaaaacctattgacaatggccccccgatattgcccgaagcctacttggatatctctggaagttctattaaccccagtgagagaacctatccagaggagatgatccaaactgggatatccaccattgatgtcatgaattccattgctcgtggac

SEQ ID NO: 10079 - DNA, 302 bp, Zea mays
ggtgcaccaaaaggatggcagcgccaggctccctgcgacttctccaggccccgtccttcgctgcggccaagtgccagccggtgggtggccgggcatccgcgcggcgagcgccacggccactgttcgccgtgcgcgcctcggctgctgacgccgccaacagggatgccgtgctcaaggccttccgcgagaacagggctctcaagataatttccggtcttcagaactttgacaggagcagtgttgcatctgttgtcacagctgcagataagggaggtgcaacacatgttgacatagcatgtgac

SEQ ID NO: 10080 - DNA, 300 bp, Zea mays
gttgcgcttggccggtccgtggacctctctaaattcaccgactacggtgagctcaaagcggaactagacaagatgtttgagttcgagggcgaattggtatctgctaaccggaactggcagatcgtttataccgacaacgagggtgatatgatgcttgtcggagatgacccgtgggaggagttctgcaacatagtgcgcaagatctacatctacacgaaggaggaggtccagaagatgaactcgaaatcatccgtgccgaggaaggaggaacccccagcagcaggcgaaggctgcgccgcc

SEQ ID NO: 10081 - DNA, 301 bp, Zea mays
atgcgtgggtgcttgacaagctcaaggctgagcgtgagagaggtattacaattgatattgccctgtggaagttcgagaccaccaagtactactgcactgttattgatgccccgggacaccgtgacttcatcaagcatatgatcactggcacttcccaagctgactgtgctgttcttatcattgactcaaccactggtggatttgaggctggtatctccaaggatggccagacccgtgagcatgctctccttgctttcacacttggtgtgaagcagatgatttgctgctgcaacaagatgga

SEQ ID NO: 10082 - DNA, 297 bp, Zea mays
ggcacggggctcaaggagtgcatcctcagcggtctcctctctgtagacggcctcaaggttttgcatatggacagaaatgactactatggaggagattccacctcactcaaccttaatcagctctggaagaggtttagaggggaagacaagcccccagcacatctaggtgcaagcagagactacaatgtggacatggtgccaaagtttatgatggcaaatgggacattggttcgaaccctcattcacaccgacgtgacaaagtacttgtcattcaaagctgttgatgggagctatgtt

SEQ ID NO: 10083 - DNA, 279 bp, Zea mays
gagactaggaccgaatcggagatcttaacaatcgatataaagcctcgcaggaagaagggaactaagatcacattccccgacaagggaaacgagcagccaaaccaactcccatgctttggtacagatcgttgtaccgcgcgatgaggtttctcttcaatctattctaagtttcgatcattattgaacaacacttcatggatatgcaaattttgaacttggttctctgatgcccacagaactgaaagtgtggtaaccttcgaccagttcttcatcttctgt

SEQ ID NO: 10084 - DNA, 293 bp, Zea mays
cagaaaatacaaaggttgttattgatcatggggctgttcctatatttgtgaacttcttgggtctggtagtgatgatgttcgtgagcaggctgtgtgggctttgggcaatgttgctggcgattctccgaagtgtcgtgaccttgttctcgccaatggtgcattgatgcctctgctagcccagttgaatgagcatgcgaactctccatgttgaggaatgccacctggactctgtccaacttttgcaggggaaagccacagccatcatttgatcagactaagcctgctctgccagc

SEQ ID NO: 10085 - DNA, 297 bp, Zea mays
ctcccagatcttcagcgagggcgggctggactaccttggcaaccccagcctgatccacgcgcagagcatcctcgccatctgggcctgccaggtcgtgctcatgggcgccgtcgagggctaccgtattgccggcgggccgctcggcgaggtcgtcgacccgctgtaccctggcggcagcttcgaccccctcggcctggccgacgaccccgaggccttcgccgagctcaaggtgaaggagctcaagaacggccgcctcgccatgttttccatgttcggcttcttcgtccaggccatcgt

SEQ ID NO: 10086 - DNA, 298 bp, Zea mays
agctcttcccgccagcggtgggcggcgcttggccatgtacccgtcagggccatggtgggggcggcgccgcggcgcgcccgagcgcgtcgtcgcgggtggagaaggccacgagccacctgctcatggggcccgactgggccgtcaacctcgaaatctgcgacatcctcaacgccgacgtatggcaaacaaaggatgtggtgaaggcagtgaaaaagagattgcagaacaaggacccaaaggttcagttttttgctttaacgcttttggagacaatgatgaagaactgtggtgaatatgt

SEQ ID NO: 10087 - DNA, 300 bp, Zea mays
tggatgtttcacatggtcatccaggacaagatagaccttcggttgcagcggtggttagttctcgtcaatggcctcttatctctagatatagagcatcagtgcacacccaatctgccagactagaaatgatgtcctcgttgtttaagccgcggggtactgatgatgatggcctcatccgggaatcactgatcgacttctacactagctctgggaagccgaaaccagaacacataattattttcagggatggagtcagtgaaagtcagtttacgcaggtcatcaacattgagctggatcaga

SEQ ID NO: 10088 - DNA, 299 bp, Zea mays
tgatccttgcaccgtgatcacagtggtggtgtttgacaacgggcaaattgggagcaagaatggtggtggcccagatcagcgcattgggaaggtcaggatccggctctctacactggagacagacagagtgtacacgcatttctaccctttgctggttttacatccaagtggactcaagaagactggtgagcttcatttggctgtgcggtttacctgcacagcttgggtgaacatgatggcgctgtatggtcgtcccctgcttccaaagatgcactacacacatccaatcgcagtgatgc

SEQ ID NO: 10089 - DNA, 301 bp, Zea mays
cgcctgcgctccctcgccgccccagttccccaccccctgctcacccacccgtcccctcctgctcgcccatggctcccatcgctgtcggcgacgccctccccgacggccagctcgggtggttcgacgagaacgaccagctgcagcaggtctccgtccacgcgctcgccgccggcaagaaggtcatcctcttcggcgtccccggcgccttcaccccgacctgcagcaaccagcatgtgccaggcttcatcacacaggctgagcagctcaaagccaagggtgtagacgagatcctgcttatcag

SEQ ID NO: 10090 - DNA, 302 bp, Zea mays
caagtacaacatgaagtcaagggctgggagaggctttacccttgaggagttgaaggctgcgggcattccaaaaaggcttgctccaaccattggcatttctgtggatcaccgccgcaagaacaaatccctttgaggggctgcaggccaatgtccagaggcttaagacatacaaggccaagctggttatcttcccaaggcgtgctcgcaaggtcaaggctggtgactctactctggaggagcttaccactgctacccaggtacagggtgactacatgccaattactcgcggtgagaagcgctct

SEQ ID NO: 10091 - DNA, 301 bp, Zea mays
cgccgacgcttctcaattccttccaatcggcacctcgccgtcctcgtgtgcaatccccagctctcctcgcccctccctcccaaactccagcggcccccctgaccaagctccggggacggatggacggaggagccggctttccgggcacgcagccggtctcccgctcgccggaggacgtcttccgggactaccgcgcgcgccaggccggcctgatcagggcgctcaccaccgatgtggagaagttctacgtgatgtgcgacccagagaaggagaacttatgtttatatggacttcctaatga

SEQ ID NO: 10092 - DNA, 297 bp, Zea mays
atctttctctcttctttcacttcttggtagcattcttcccatctacaaggaggttgttgctgagctgaaggcagctggtgcttcatggattcaacttgatgagcctacccttgttaaagaccttgatgctcacgaattggccgcattctcttcagcatatgctgaactggagtcatcgttctctggattgaatgtgcttatcgagacatacttcgctgacattcctgctgagtcctacaagaccctcacatcattgagtggtgtgactgcttacggtttcgatcttatccgtggagc

SEQ ID NO: 10093 - DNA, 301 bp, Zea mays
caagaatagggagttacaaataatgcgatcaattgaccattgcaatgtcatttccctgaagcattgtttcttctctaccacaagtagggatgaacttttccttaacttagtcatggagtttgttccagagtcactttatcgcgttctgaaacactacaaagacatgaagcagaggatgccccttatatatgttaaattgtatatgtaccagatattccggggactagcttatattcatactgtaccaggaatttgtcaccgagatattaagcctcagaatatcttggtggatcctctttcc

SEQ ID NO: 10094 - DNA, 301 bp, Zea mays
cccatgcgtccgcccacgcgtccggtcaacggtctcgagctacgcttctgccagcagtgcagcaggttccacaacctggccgaatttgaccagcaaaagaaaagctgtcgcaagcgtctagcaggccacaacgaacgccggagacggccacctcctggaccccttgcgtcacgatatggccgtctcgctgcaccgctcggtgaatagcccggcggcaggttcagaagcttcatgctggatttctcatacccaagggttccaagcgccatgaggtatgggtttccatcggttcgacctggtg

SEQ ID NO: 10095 - DNA, 299 bp, Zea mays
ggcgagcaccatggaccgccgcctcgcgccgggcctctccacgttcgagatccccgcggggtccatgaccgtcttcgggctgctggccatgctcttcaccctcttcgtctacgaccgcgcgctcatccgggtggcgcgccgcttcacggggctggaccgcggcatctccttcctgcaccgcatgggcgtcggcttcgccatcagcgtgctcgccaccctggtcgctggattcgtggagcggcaccgcatggacgcggcggcggcggccggcgccacggacgcctgcacgtccccgctgt

SEQ ID NO: 10096 - DNA, 299 bp, Zea mays
cccacacgtccgcccacgcgtccgcatgaaccaccctggccagattggcaatggctatgccccagttctggactgccacacctcacacattgctgtcaagtttgctgagctcgttaccaagattgataggccatccggcaaggagctggagaaggagcccaaatttctcaagaacggtgatgctggtatggtgaagatggttcccactaagcccatggtggtggagaccttttctcagtatcctcctcttggtcgattgctgtccgtgacatgaggcaaacggtggctgtcggagtcat

SEQ ID NO: 10097 - DNA, 297 bp, Zea mays
aaaaggcgcccgagaaggagatgcaggttattgtagacatgagagagttcatgagcagccttccgaatgtattacatcaaaaaggtatccgaatcgtaccggtcacccttgaagttggtgactatgtgctctctcctttgatctgtgttgaacggaaaagtatcgcggacttgttccaaagctttgcttctggtcgtctgtacaatcaggttgagacaatggcacgttactacaagatcccggttctcctcatcgagttctcacaagataagagcttttcctttcagtctgcaaatg

SEQ ID NO: 10098 - DNA, 295 bp, Zea mays
ggcagcttaatcctcgatgtgccaagaagattgtccccagcagctgccgtgctatgattgggcaggttgctggtggaggcaggactgagaagccgatgctcaaggctggtaacgcgtaccacaagtaccgtgtgaagaggaacagctggcccaaggtgcgtggtgtggccatgaaccctgtggagcatccccacggaggaggtaaccaccaacacatcggtcacgcctctactgtccgccgagacgctccccctggccagaaggttggtctcattgccgctaggaggactggaag

SEQ ID NO: 10099 - DNA, 292 bp, Zea mays
cccacgcgtccggagcgtcagagcccgatcccgatccagcgaggcggcgaccctccctcctccccttgcttcgctcgtccagccctgaccacccgcatccccgtcagtcatggcagcggcagcaggcggaggcgcggtgcgtgcgctgtcccagaaggagcaggacatacagatgatgctcgccgccgacgtccaccttggcaccaagaactgcgatttccagatggagcgctatgcctttaagcgccgcaccgacggcatctacatcatcaaccttggcaagacatgggag

SEQ ID NO: 10100 - DNA, 293 bp, Zea mays
cccacgcgtccgagaagtttgggccggatgtacaggaaggaaggaggagacagttcaattacatcggaagtcttttgcgtgatgcacaaccagaattgatggatactctaatacaagcttctaaggatggaaatgagaggaagttatataccttacttagtgaaggtaaactgttggtggaagaagaggaagaggaggaagaggacctacctgatggagaagaggagaatcaagagtatatgagaattgcagatagatggtttgacggcctcctctgcaaagacatttcagtt

SEQ ID NO: 10101 - DNA, 293 bp, Zea mays
gaacaagcggtcctttaagtatgcttgggtgcttgacaagctcaaggctgagcgtgagaggggtatcaccattgatattgctctgtggaagtttgagaccaccaagtactattgcaccgttattgatgcccctggaacaccgtgactttatcaagaacatgatcactggtacctcccaggctgactgtgctgtccttatcattgactccaccactggtggttttgaggctggtatctccaaggatggccagacacgtgagcatgctctccttgcgttcacacttggagtgaag

SEQ ID NO: 10102 - DNA, 289 bp, Zea mays
cggacggtgggcggacgcgtgggcggcattgatctgaagaaagagtcttatcttcgcaagtcatattgcacatttctgcaggatttggggatgaggcttaaagtgcctcaagtgacaattgctactgctatagtgttctgtcatcggttttttcttcgtcaatctcatgcgaaaaatgacagacggacaattgcaacagtatgtatgttcttggcgggaaaagttgaagaaacacccagacctctgaaggatgtcatacttctttcatacgagatcatccacaaaaagg

SEQ ID NO: 10103 - DNA, 288 bp, Zea mays
cggaccgtgggcggacgcgtgggagatggcattgaagacgttgttgttgcttgcaactcaaccaagaaaattaggaataatagcaatgctgggattacatttggagcgcctggaggcattatttgtgcgaaggcatccatgttactgcagagcgtcccaccggcagtactggtccgatttctgagggagcatagatctgaatgggccgattacaatattgatgtgtatttggcttcatcactgaagaccagtgcgtgctcacttcctgggttgcgacccatgagattt

SEQ ID NO: 10104 - DNA, 290 bp, Zea mays
cgcctctcgagtctcgtccacccgtcgtcctcctagctcctctactcgccagtcgccatgggcaagattaagatcggaatcaacggcttcggaaggatcggcaggctcgtggccagggtcgccctccagagccgaggatgtcgagctcgtcgccgtcaacgaccccttcatcaccacggactacatgacctacatgttcaagtacgacaccgtccacggccactggaagcacagcgacatcacactcaaggactccaagacccttctcttcggtgacaagtcggtcaccg

SEQ ID NO: 10105 - DNA, 292 bp, Zea mays
ctagaacagactatccaacaaattcttgacatgggtggtggtacatgggaacgtgatactgttgtttgtgctctacgtgctgcatacaataaccccgagagagctatagactacctgtattctggaattcctggagaatgtggaggctcagcctgttgcccgagcacctgctgctggccaacaaacaaatcagcaggccgcatcacccgctcagccagcagttgcattgccagtgcagccatcacctgcctctgcagggcctaatgcaaatcctttgaacctttttcctcag

SEQ ID NO: 10106 - DNA, 317 bp, Zea mays
cccacgcgtccggtagcaaacgctggggactgccgcgccgtcctgtgtaggaaagggacagcggtggaggtgtcaaaggatcacaggccgacatacgacgcagggcgtcaaagggttatcgagtgcggtggatacatcgaagatgggtacctcaacggcgtactctctgtgacccgggctttaggggactgggacatgaagctgccccaaggctctccgtcgccccttatcgcagagccagagatccactggaccaccctgacggaagacgacgagttcctcatcatcggctgcgatgggatatgggatgtgatgag

SEQ ID NO: 10107 - DNA, 314 bp, Zea mays
cgcctcgctttcccttccccaccagcccgtctctctcttctctctgactctctctctcgtagccgcgtccacctcgcagcagcaagcaagcgcgaccaaatggcgcctctaggagacggcggagctgctgccgcggcggcgtccaacaacctggtggtgtcgttcggcgagatgctgatcgacttcgtccccgacgtggccgggctgtcgctggccgagtcgggcggcttcgtcaaggcacccggcggcgcgcccgccaacgtcgcctgcgccatcgtcaagctcggcggatcctccgccttcgtaggcaagtt

SEQ ID NO: 10108 - DNA, 302 bp, Zea mays
ccgagcgctgcctcgactggggcgaagcgggcggccccgacctcatcgtcgacgacggcggcgacgcacgctgctcatccacgagggtgtcaaggccgaggaggattacgagaagaccggcaagatccccgacccggaggtcacggccaaagcggggttaagaaggggccaacaacatcgccgacgggcccaagcctaccccagaagtaccgccagatgaaggagaagcttgtcggcgtctctgaggagaccaccacgggtgtcaagaggctctaccagatgcaggagaccggcggcctcct

SEQ ID NO: 10109 - DNA, 304 bp, Zea mays
cccacgcgtccgatcaaacaatgagcttgtgaggacacaaacccttgtgaagagtgccattgtgcaagttgatgctgccccattcaagcagtggtacctcactcactatggagttgacattggtaggaagaagaaaacccctgctgcaaagaaggataatgctgagggacaagaggttgaggcagcagctgaggaaacgaaaaagagcaaccatgtcacgaggaagcttgagaagcgcaaggagggacgtacccttgacccacacattgaggagcaatttggcagtggacggttgctggcatgc

SEQ ID NO: 10110 - DNA, 304 bp, Zea mays
tcaaggttgagttgaccaaggattttgagatgggtgtctccaacaagacccctgagtttcttaagatgaacccccttgggaaggttcctgttctggagactcctgatggccctgtttttgagagtaatgctatcgcacgctacgttgctcgcctgaaggaagacaaaccgccttttgggtcttcccgcattgaacaagcccacgttgagcaatggatggattttgccgcaacagaagttgatcctggtgttgcatggtacttgtatccaaggcttgggtacctcccttatgttagcaaactgag

SEQ ID NO: 10111 - DNA, 309 bp, Zea mays
cttcggatactctatgatgcccttggtaccctggctgatgctgttggagcagaattaaatcaggcaaaatatctagatatatttatgccgcctttgatcacgaaggtgcagcaactttccaattctgacaaagaaccaattccacaccccgaaaggcctacaaccaatgcaaaggcaatggggacaggagttgctcagtttgcggaaccagtgtttcaaaggtgcatcaatcttatccaatcgcaacagttggcaaagattgatcctactgcagctggtgcggtgtatgatagagaattcattgtttgt

SEQ ID NO: 10112 - DNA, 254 bp, Zea mays
cggatacagacacctttgtcttgggcatccagacagattggcagctacagcaaatgattcagtttggcagccatagtttaatggcttctgattcaaagtttggaacaaacaagctaaagtatcctgtacatagcaaccctggtttcgatcagcaccaaaatgtcaattccggtgcgtggattataacccccaattttgcacatggtgaaatatataaatgggtgggtgctccttatgatcgagcgcatacaaaa

SEQ ID NO: 10113 - DNA, 311 bp, Zea mays
cggacgcgtgggtcaagataagcgttttgtctgtgaagctgctgaggcagctcttacatcgatgacaagttggatctccccattactactgttaccaagaatgcagccctacctcaagaacaggaatccgcgggttcgagcaaaagcatcagtgtgtttgagcaagagtgtaccttgcttagatgtgcagggaatcagagaatatggaatggataagctcgtccagattgcagcaacccaactcagtgaccagcttcctgaatccagagaagctgctcgcaacctggcactggaactacaggtattatatg

SEQ ID NO: 10114 - DNA, 303 bp, Zea mays
ggcgacattatgatttcttgccttggggacaaggaggggaatgcagctggcaatggcttcctgctgttgtattcagagtttaatgtcaaaggacgttgggaaaagccaggtcacagtcccttgtttggatatgacttctggtaccagcctcgccacaagacgatgatcagttcgtcatggggagcccctgcagcgttcaggacaggtttcgatcttcaacatgtccaggatggcctgtatggaaggcacctgcatgtgtacgactggcctggcggtgagctcaagcagacacttgatctaggt

SEQ ID NO: 10115 - DNA, 144 bp, Zea mays
cccacgcgtccgcccacgcgtccgcttcgccggcaagcagctggaggatggtcgcactcttgcggattacaacatccagaaggagagcaccctccacctggtgctccgcctcaggggtggcatgcagatctttgtgaagacatt

SEQ ID NO: 10116 - DNA, 127 bp, Zea mays
aaggctagggaatgatgctagcgttgggcaggtggtggacgttgagaagggttcggagtatgctatcacattcagtgctgcccggacatgtgcacaactggaggcactgaatgtttccgtgctaggt

SEQ ID NO: 10117 - DNA, 301 bp, Zea mays
ccagttttagtacatgctggaccatttgctaacattgctcatggaaactcttcaattgttgctgataagattgctttgaagttggttgggaagggtggctttgttgttactgaggcaggttttggtgctgatattggaactgagaagttcatggacatcaaatgtaggtatagtggattggtgccgcagtgtgctattatcgtggccacaattagagctcttaaaatgcatggaggggggcctgaagtggtggctggaaagcctctggatcatgcatatgtgagcgaaaatgtggcccttg

SEQ ID NO: 10118 - DNA, 304 bp, Zea mays
  unsure (1)..(304): unsure at all n locations
cggacgcgtggngctgacgcgtgggttcacgaatcccttcttcttccgccttcttcgtcgggccctcctcaccgacgagaagagatctcctcttcggcacgaggaggacagcaggggagaaagaagggcgggcgggtggatgacgaagaatcctaacatgtcaagaaggggccaacggggacagcggcgtcggcaagtccaatatcctctctcgcttcacgcgcaaccacttctccctcgactccaagtccaccatcggcgtcgagttcggcaccaagtccctgcagattgacggcaaaaccat

SEQ ID NO: 10119 - DNA, 297 bp, Zea mays
  unsure (1)..(297): unsure at all n locations
cgacatggccgttaacctcgtcaacttcgccacctacaccaacaagggcgagatctgtgtggccggcacgcgcatctacgtgcaggaagggatctacgacgagttcgtgaagaaggccgccgagctcgncagcaaaaccgtggtcgggggaccgctcaacccgagtgtcagccaaggcccccaggttgacaaggaccagtacgagaaggtcctcaggtacattgacatcgggaagcgccgaagcgccacgctggtcaccggaaggaagcccctgcgcgaccagggctactacatcga

SEQ ID NO: 10120 - DNA, 131 bp, Zea mays
gtccaaggcggacggggagaccgtgtaccgggtgagcttcgagtgggacgagtcgcagggcatcccgggcgccgtcctggtcaggaacctgcagcacgccgagttcttcctcaagacgctcaccctcgagg

SEQ ID NO: 10121 - DNA, 127 bp, Zea mays
gtttctggcaccatcagcaacaaggaggaggcgattatttatctcacctggacttacctatatcgcagattggttgttaatccggcctattatggattggaggatactgaaacaaacacattgaatt

SEQ ID NO: 10122 - DNA, 128 bp, Zea mays
gcgcgcttcagcggaggtgctgggcaaaggcgcgttcgggacggcgtacaaggcggtgatggagaacgggtccgccgtggcggtgaagcggctcaaggacgtggacctcccggagcctgagttccggg

SEQ ID NO: 10123 - DNA, 297 bp, Zea mays
gatcaatggagtaccgatccgtcgtgtcaaccagacctatgtcattgctacatcaaccaaggttgacatctctggtgttgatgtcgcgaagtttgatgacaagtactttgccagggagaaaaagcagaaggtgaagaagacggagggtgagctttttgagacagagaaggaggcgtccaagtctctgcctgatttcaaaaaggatgaccagaaggccgtggatgctgctctgatcaaggctattgaggctatcccagagctgaaggcctatcttggcgctcggttctcccttaggga

SEQ ID NO: 10124 - DNA, 306 bp, Zea mays
agtgtttttcgcagcaatagctcctcgtctgcaaccacgatactactcaatttcatcatctccaaagatggctccctccagaattcgtgtaacatgtgcattagtttttgggccttcaccaacaggaaggatccaccaaggagtttgttcaacatggatgaagaatacaattcctctggaacatagcgaagaatgcagctgagctcccatatttgtgaggcagtcaaatttcaagttacctgctgacccatccactccgattatcatgattggtcctgggacaaggctggctccttttagaggttt

SEQ ID NO: 10125 - DNA, 303 bp, Zea mays
cactgcaaaacattggtgcttcaaacagggatgatgccttctacaggtacaagatgcccagaatgattaccaagatagaaggtcgtggtaatggtatcaagacaaatattgtgaacatggttgacatagcaaaagcacttgccaggcctgcttcctatacaaccagatactttggatgtgagcttggtgaacagtccaaatttgatgagaagacagggatttccttggttaatggggctcatgatactgcaaagctggctggtctccttgaggtattcatcaagaagtatgtccagtgttatg

SEQ ID NO: 10126 - DNA, 300 bp, Zea mays
gcacactccgctccgttctggcaattttgttttctgattttgtggaacgctcgtccctgtgggctgtggcacagtggcagggcaagagaaaggagaggatggcgtcgccgataccgcgcgagtgggtcgggctgcagcagtttccggcggctacacagaccaagctgcacgaactcctcggcaaactcaaggaggaggatgtgagcacattaacaattctggtgatggggaaaggtggagtgggaaagtcatccactgttaactccatcgttggggagagggttgcctctgtcagcgctt

SEQ ID NO: 10127 - DNA, 296 bp, Zea mays
ggcatcctctatcgcgcgcgcgccatggccaccaggccgggccctttgactggatggccgtggcaaaggcttggagacttcaagtagttggtgatggctcgcgtggtggtccacggcgcgcggcgggtgttggcgcggggctggggcgagatcgaccttgccttcgcgctcatcctggcgtcgctgctgctgcggatggtgcacaaccagatctggatcagcgccgcgcgctaccagacggcgcgggcaagcaccgcatcgtcgaccgcggcatcgagttcgacgaggtcgaccgg

SEQ ID NO: 10128 - DNA, 302 bp, Zea mays
caacatagcaccccccctagggtttcacaacatatgtaccctctcgcgcaaacactcctctttccgcgccgcctcccctcccgcccacttgctccgccggcgcggccaccgccgccgcaccgcagcagccagtcagcagatcgtaaccatggcggattctaaggccgctgcggcggtgaccctccgcacgcgcaagttcatgaccaaccgccttctctcccgcaagcagttcgtgctcgaggtcatccaccccggccgccccaacgtctccaaggcggactcaaggagaggctggcgaagat

SEQ ID NO: 10129 - DNA, 303 bp, Zea mays
cccacgcgtccgaaagcaggcttctggtgtttcagaaattgatgtggctgaacacaagatagaagaaacaagcctggttggtgttgcccgcaaagccctaagggagttgactccccagtgcgattctggctattctacgataccaaaacgagctgggaggtctggatcggatggaatttgcaaggattgtggcagaaaggcagacagcaaaggaagaattatctgtgacagatgtgaagctgcgtaccatgtttcgtgtctgaagcttgccatcgatgaagaggccccagcaaaatggtactg

SEQ ID NO: 10130 - DNA, 312 bp, Zea mays
ctttctcctgatgtacgcactattgaccagatacgaacgattgatcgcaattgtgaaattccccatgaaggccctttctgcgatcttatgtggagtgaccctgaggagatagagacatgggctgttagtccccgtggagcaggttggctgtttggatcgcgagtaacagcagagttcaactttgttaatggtatcgagctagtttgccgggctcaccagctggtccaggaaggcttaaagtacatgttccaggagaagggccttgtaactgtgtggtctgcacccaattattgctacagatgtggcaatgta

SEQ ID NO: 10131 - DNA, 304 bp, Zea mays
gaccacctctacgggactaaagtcgggggcaccatattcgacgacaccgggcgccggcacacggctgccgacctccttgctgctggaaaccctagcaacctccgtgtgctgctccatgctaccgtcgacaagattctcctcgcaaggaagcacggcggggggaggaagcagccgagggctactggagttcggttcagagacgagaacggagcgcaccaccaggccttcctcacaaggaagaggggtagcgacgtcattgtttccgccggcgcaattggcagcccacagctactgctgctcagcg

SEQ ID NO: 10132 - DNA, 296 bp, Zea mays
cggaccgtgggtgcaggttaggctaaagaggtaccttgagatgagaggtgctgatggtggcccatgtaggagattgtgtgcgttgcctgcattttgggttgggctgctgtacgacgaggaatcgttacaaagcattttagacatgacttttgattggacaaaggaggaaagagagatgctaagacggaaggtaccatcgactggtttgaagacgccgtttcgtgatggatatgtaagagatttagctgaggaagttctaaaactggccaagaatggactggaaagaagagggtaca

SEQ ID NO: 10133 - DNA, 295 bp, Zea mays
aaaatctgaggggctcagtgtagatgacggtggcttgacagccctagtgcggttaagcaatggtgatatgaggaaggctttgaatatattgcagtcaacgcacatggcatcccaacaaatcacagaagaagctgtctatctttgcacaggaaaccccatgccaaaagatattgagcagatagctttttggctattaaatgaaccattttcaaccagcttcaaatatatatcttacatgaagatgagaaaagggctggccttggttgatatcatacgggaggttactatgtttgtg

SEQ ID NO: 10134 - DNA, 297 bp, Zea mays
cgaagatggatgccggagcaaaggtggtgaagaaggccgcggcggggcgtcgcggcgggggcggccccaagaagaagccggtctctcgctccgtgaaggccggcctccagttccccgtaagccgtatcggccgctacctcaagcagggtcgctactcccagcgtgtcggcaccggcgcccccgtctacatcgctgccgtcctcgagtacctcgccgccgagctcctcgagttggcggggaacgcagcgcgggacaacaagaagaaccggatcatcccgcgacacgtactgctggcga

SEQ ID NO: 10135 - DNA, 226 bp, Zea mays
gcgctgaggagcatggtcttggaagcaacaaggaagcagcgtttcgagcgcgtgacgcgtgacctgaaggtgacgcgggtgttgtcgacgctggtggaggaggtggaggcggtcggcgtcatagcggcgggcggcggcggcggcgaggcgtcgcagtgcacggacgtgatgggccccgtggcgcagtcggagcgcacccgggtgctggtgctgatgggcggcggga

SEQ ID NO: 10136 - DNA, 302 bp, Zea mays
gcacatgaccgaggacatgttctgccatgagttccacctcgttgatctcagggtcatggacaactgtctcaaggtcacccagggtgtcgaccatgtcttcaatctcgctgctgatatgggtggcatggggttcatccagtcaaatcactctgtgatcatgtacaacaacaccatgatcagttttaacatgctggaggctgcacgtatcaatggtgtgaagaggttcttctatgcctcgagtgcatgcatttaccctgagttcaagcagctcgacacaaatgtgagcttgaaggaatctgatg

SEQ ID NO: 10137 - DNA, 289 bp, Zea mays
cccaagggccacatcgtcgcgacatcgccatcctttgccaacaggctgccccacatctacaagaaccctgactcgtatgaccctgatcggttcggtcctggaagggaggaggacaaggctgcaggcgccttctcatacatctccttcggtggcggcaggcatgggtgcctcggtgagcccttcgcctacctgcagatcaaggcaatctggacgcacctactgaggaactttgagttcgagctggtatcgccattcccagagaacgactggaacgccatggtggttggca

SEQ ID NO: 10138 - DNA, 277 bp, Zea mays
cccacgcgtccgagcagctcaaaaaagtttagccagctagcaagacatggctccacttgttgctgctgccacgaatcacactgcccatagaagccacatagtaggacccaacaatgagaattttccaagggagaagccatgttcgagccgaaacagaaacaagagactcaggcgtaggtcacgagcacaaaggataagcagtcagctgcttgcaagccgaaagcttatgccatggcaaatccctaaaagggactggtttcctcctagcttcatcttt

SEQ ID NO: 10139 - DNA, 273 bp, Zea mays
cggacgcgtgggcggacacgtgggcggacgcgtgggcgtttttcaaacttgatctctcaaactcttctggtcctcctcaagagggttcctcctaagggaaaaaacctgcttatgattggaacaacaagcgaggttggcttcctagaatctggtggaatgtgtgacgtgggctctggggcagagcatgggcccgagctgtgaaaggaggatgcgaaaaaggtattgcatcatcttgatgtgttcgatgacggggaccttgatgcagcagcagaa

SEQ ID NO: 10140 - DNA, 274 bp, Zea mays
caagggacctgtcgttggcaattactcggtcggcgggcacagcattttccgtcatggacgggtgtctcacgccttgagcgacgatgcgctggcacaggcgttgatggacccaaggtaccccactgagacactcaaggattatgaggagtggacgattgatttagctaagctccacatgggaatgccctttgcacagggcgcctttggaaagctctacaggggtacctacaacggtgaggatgttgccattaagcttttggagaggccagaggca

SEQ ID NO: 10141 - DNA, 275 bp, Zea mays
cacagatcacacacactcgagaactccatttcgatcccatttgaaatcaacccatcctcgtttcctccgtctagcagcctctcaccctcatggccaagatcaagatcgggatcaatgggtttggcaggatcggaaggctggtggccagggtggccctgcagagcgacgacgtcgagctcgtcgccgtgaacgaccccttcatcagcaccgattacatgacctacatgttcaagtatgacactgtgcacggacagtggaagcaccatgaggtcaag

SEQ ID NO: 10142 - DNA, 262 bp, Zea mays
cgagggagcggcagctgcagcggccgagggcggacacgcgaggcatggatagataccaaagggtagagaagcctcggaatgacacgccaatcagccagaatgagatcagaatcgctactcagggggagatgaggggctgtatcaggcaagggggtgtcgcggcgtgagggaaatggacatgatgagattagtatcaaggccatgggacgggccataaataagacagttatggttgttgaagtgatcaagaggaagggttgga

SEQ ID NO: 10143 - DNA, 266 bp, Zea mays
aactcggtcttgattcccttacccccataacctccatccagaatcgtgtccgtagatggaagtctctcactgctaagacaatccagctctttattggtgacatatgtgattttgaattcctctcagaaaccttcaagtcttttgagccggatgccgctgtccactttggcgagcaaagatccgcgccatactctatgattgatcgttcgcgggcagtctacacacagcataacaatgtcattgggacacttaatgtcttgtttgcc

SEQ ID NO: 10144 - DNA, 270 bp, Zea mays
tctgctcaacccgccggcagaactcgagaagctcaagcacaagaaaaagagactcgtccagtcgcccaactccttcttcatggatgttaagtgccaggggtgcttcagcagatcaatgtcgttctggagaaccatcttgcctcgggctgcggcggagggaagatggttctccagaacgacattgatctgctcaacccgccggcagaactcgagaagctcaagcacaagaaaaagagactcgtccagtcgcccaactccttcttcatggat

SEQ ID NO: 10145 - DNA, 269 bp, Zea mays
gtgcttgaacgcaggctttgttggttatggtggttgatgctcgggatcctttgttctaccgctgccctgaccttgaggcatatgcaaaggaaattgatgaacacaagagaacaatactccttgttaacaaggctgatctgttgccgttaaatatcaggaagagatgggctgattattttaaggcacatgacattctctatgtgttctggtcggctaaggctgccactgccacattagaaggcaaaaagttaagtggatactctgaagga

SEQ ID NO: 10146 - DNA, 274 bp, Zea mays
cacatgggtcagcaaagaatttgccgccttcatgcacttcgacgttacctccaggaacgtgctttttcccccagaacgaggtgaaacagatacagacacctctgttcatcctcaacgcagcatacgattcatggcaggtaaggaacattttggtgccaggagtagctgaccctcatggaaaatggcatagctgtaagcatgacatagaccagtgctctgcatcgcagctacgggtattgcagggattcagaggtgattttctgaaggaagtggc

SEQ ID NO: 10147 - DNA, 274 bp, Zea mays
gctgcccgcatgattgcggatgtctccaagtctgacaagattgttgttgagaagtccactgtccctgtcaagaccgctgaggctattgagaagatcttgacccacaacagcaagggcatcaactaccagatcctttccaacccagagttccttgcggagggcactgccattgaggacctgttcaagcctgacagagtgcttatcggtggccgggagacccctgagggcaggaaggccgtccaggctctcaaggatgtgtacgctcactgggttc

SEQ ID NO: 10148 - DNA, 262 bp, Zea mays
cccacgcgtccgtgaagactcgctgctcccacaaaagattcaggcttttgagagtgtttgcgtgaaaatgattgctgccggtgccgaacatactgctgcagtaactgaagacggtgacctctacggatggggttggggtcgatatggaaacttaggtcttggtgaccgtaatgaccgtttgcttcctgaaaaagtatcttctgtggagggtgagaagatggtgcttgtggcatgtggatggcgccatacaattacggtttct

SEQ ID NO: 10149 - DNA, 263 bp, Zea mays
ggaaatcttattaagtggagaaagaactttggaaatgttgtgatgatcatgcacgttagtgggcctgtggatcgcacagcacttgagaggaggctgctttatggaaggattttcaagacggttatcattcttgctgagcagagcaatgcagagcttgctgttgaacgctgcatgctgtcacacgcttataagtatttgcccaaggtttttgaaagatacagtggtgctgatggatttgtgttcctccaagaccacatggttct

SEQ ID NO: 10150 - DNA, 263 bp, Zea mays
ctagttctagatcgcgagcggccgccctttttttttttttttaaaataatgaaatactcgtcacatatgccatggctggcatatcaagcggtgcaggtgaaacaaagtctttgtggtagcatacagcatgctacgcacgaaggtactactacataccgcataacttgagcggatacaacaagcaaaccataggcaagccccggaatgaaaggaaacaagggtacaaatgtggcggcccaaaccacccttactcgtcttggatg

SEQ ID NO: 10151 - DNA, 266 bp, Zea mays
cgcccaactcgccgccgccgctgccaacgccgcctgctgccgcagccgccatgggggcgtacaagtatgtgtcggaactatggaggaggaagcagtcggacgtgatgcgcttcgtgcagcgcgtgcgctgctggtgagtacaggcagcagccgtccatcgtccgcctcaccaggcccacccggggcgacaaggggcgtcggctcgggtagaagggcgagcaggggtatggtgtctaccgtgtccgtgtgaagcgtggtggcaggaa

SEQ ID NO: 10152 - DNA, 263 bp, Zea mays
gaactatttgaaaagaactttcctggcaattttgtggcagagggtttagatcaaacccgtggatggttctatactctgatggttctctcaacagcactgtttgggaagcctgcatttaagaatcttatatgcaatgggcttgtcttggctgaggatggtaagaaaatgagcaagagtaaaaagaactatcctccacccaaggatctcattgatgagtttggagcggatgctctgcgactatatttggtaaactccccagttgt

SEQ ID NO: 10153 - DNA, 263 bp, Zea mays
gtttggtgtcggtttctagtcggcatacttgttgctgaaaagggtgtcgtgaccaccaagcacaacgatgatgaacaataagtatgggaatctcaagccggtgggttctttaatgtcacacgtgatacctctggggagcaactttgcaagggtacaaagattaccctttaactcaaggatgatcagttagagtatcctgaggagcgccggcttaaagatcttattaaggagcactcagagttcatcagctatccaatctctct

SEQ ID NO: 10154 - DNA, 266 bp, Zea mays
aaaaaaaacagcgacttgctcacagtagtgctccccggacagaatgaccaaagacgaggagttcaagctggtcaagatccagaaccatgcgctgaaggtgaacatacactgcgacgggtgcaagcacaaggtcaagaagctccttcagaagatcgaaggcgtgtactcggtggccattgatgtggacaaccacaaggtgtcggtgacaggcgacgtggactcggagaccttgatcaggaagctcaccaggggcggcaagcacgcgg

SEQ ID NO: 10155 - DNA, 280 bp, Zea mays
gctaggctgcagcttgatcggtgggacttctgagcttggaaattctcacatggctgcctgcgtctgcttagtgctggttcagttagctctcaatccatgtggattgaatgagattatatgggtttaaatcccaaacaagtcaaacttcttaatttttttcaatcccatccaacccatgtgtattaggaataaccgaacaaccccttagggcttgttcggttagctctcaatccatatggattgagtgagattgggtgggattaaatcctaagcaagtcaa

SEQ ID NO: 10156 - DNA, 281 bp, Zea mays
agagtacgcacacgcgtccgcggacggtggggcagctgggcgtgcacttaacacaacaagggcagctattgaggaaggtgttgtagttggtggtggatgtagcctactaagactgtaagagaagattgacgcaatcaaggaatcatcgttggataatatagagcaggaggttggtgctgacatcttcaaacaagccttgagttaccctacctcactaatagcaaaaaatgcaggggtgaatggcgactttgtcattaaaaaggtgttactgctatgaggac

SEQ ID NO: 10157 - DNA, 272 bp, Zea mays
caactggggcttgttcttctgtgttgcaattggtctgtgggctggtctgattattggttttgtcacagaatactacactagcaatgcatacagtcctgtgcaagacgttgcagattcttgcagaactggtgctgccactaatgtcatttttggtcttgctcttggatacaagtcagttatcatcccgattttcgctatcgctgttagcatctatgtcagtttctccattgctgcaatgtacggcatcgcagttgccgctcttggtatgctga

SEQ ID NO: 10158 - DNA, 272 bp, Zea mays
ctagctttggaatatttgcactctatgcacatagtccatagggatctaaagcctgacaacttgttgatagcccatgatggacatattaagttgacagattttgggttgtccaaggttggtttgatcaacagcacagatctgtctggtcctgctgttagtggggcttcactgtatggagatgatgagcctcagatgaatgagctcgaacaaatggatcaccgagcacggagacaaaatcgttctgctgttggaactcctgattatttagcacc

SEQ ID NO: 10159 - DNA, 272 bp, Zea mays
ctccatgggttccatgtacatgcacttggtgacaccatcaatggatgcatgtcaactggaccacactacaatcctgcgagcaaggagcatggggcaccagaagatgagaaccgccatgctggtgatcttggaaacgtgacagctggagcagatggtgttgctaatatcaatgtcaccgacagccagatcccactgactgggccaaactcaatcattggcagagctgttgttgttcacgctgatcctgatgatcttggaaagggtgggcacga

SEQ ID NO: 10160 - DNA, 272 bp, Zea mays
cccacacagaagcggcggcggcggagcaaacgcaggcgaaggcgagggtgtgagggaaggagcaccagccatggtgcacgtcaacttctaccgcaactatggtaagacgttcaagaaaccaaggcgtccttatgagaaggagcgtcttgatgctgaactgaagctggtcggtgagtatgggctgaggtgcaagcgtgagctttggagggtccagtatgcactgagcaggatccgtaatgctgcaaggcacttgctcacccttgacgagaaga

SEQ ID NO: 10161 - DNA, 272 bp, Zea mays
gtcgcgaacttctactgccacatcctgctgcggaacctcaggagcccaagcggcacggcgggtaccagatcccccgcggtttcttgttcaacatcgtgacctgcgccaattacaccaccgagatctatcagtgggtcggcttcaacatcgccacgcagaccgtggcaggttacgtcttccttgtcgtggcggcaggcatcatgaccaactgggcgctcggcaagcacagccgtctgaagaagctgtttgacggcaaggatgggaggcccaag

SEQ ID NO: 10162 - DNA, 134 bp, Zea mays
cccacgcgtccgccaaaagtgggagaacccgttgatgggatggacatctactggggatccatatgctaatgtcggtgaagcaggacttacgtttgacagtgcagagtcagcaaaggcgtttgccgaaaaacatg

SEQ ID NO: 10163 - DNA, 156 bp, Zea mays
cacacgcgtccgagctggtgcagttgaccctgacttagcgttggctcttcaaatgtctgtccaggatgcaaacatgtccagtgacactgatatgagtaaggtgtttgaagacagaacatttgtgtcatctatccttaattcgcctcctggcgcctg

SEQ ID NO: 10164 - DNA, 277 bp, Zea mays
aacgacggagcacgacgcacgcagagccgcagagatccgtcacactgcaagttttgaaaactgaactgtaagatggcatcagcagagctttcccgtgaggaaaatgtgtacatggcgaactcgccgagcaggcagagaggtacgaggaaatggttgagttcatggagaaggtagcgaaaactgttgactcggaggagctcactgtggaggagcgcaacctcctgtctgttgcatacaagaacgtcattggagcccgccgtgcctcatggcgcatcat

SEQ ID NO: 10165 - DNA, 271 bp, Zea mays
gtcaagagtcactggagccgccacacacccgaaggtgctgcacttgaggctgattggaacgctatgtttgcagagtacgagaagaagtatgcagatgatgcagcaaccttgaaaagtatcatcacgggggagttacccactggctgggttgatgctcttcctaaatacactccagagagcccaggagatgccaccaggaacctctcccagcagtgcctgaacgcgcttgctaatgttgtgcctggtcttattggaggcagtgctgatcttg

SEQ ID NO: 10166 - DNA, 269 bp, Zea mays
cggacggtgggcttcaaaatgcccgaacttactagttctcgcggtgaggaatgtgattggagatagaggattaggagttgttgcggatacgtgcaagaagctccaaaggctcagaatagagcgaggagatgatgaaggaggtgtgcaagaagagcagggaggggtctctcaagtgggcttgacggctatagccgtaggttgccgtgagctggaatatatagctgcctatgtgtctgatataaccaatggggccttggaatctatcggga

SEQ ID NO: 10167 - DNA, 268 bp, Zea mays
cgcgacgtccctcgccttcgccgccgaatccgagactccgatctcgggttcaccgcagcgcacagagcagccccgactcccggcacgatccgcgctctcctctccgtcgcttcagtcatggcaggaatggcacctgagggttctcagttcgatgctaagcactatgattctaagatgcaggagctgctgagcaccggtgagactgaggagttcttcacttcatatgatgaagtttttgagagtattgatgatatgggcctccaagaga

SEQ ID NO: 10168 - DNA, 131 bp, Zea mays
gggtgttctaagaaatggtaggagtgccgcggtcaaaaagttggattctaacaagcagccagaccaagagttcttggcccaggtgactatggtgtcaaggctgaagcatgaaaatgttgtcgagttgcttg

SEQ ID NO: 10169 - DNA, 270 bp, Zea mays
  unsure (1)..(270): unsure at all n locations
acccacgcgtccgcggaccgtggcggagtggnactgagacgtcgcgggagccatgcccggaccggatcctggacgacgtcggcggcgcgttcgggatgggcgccgtccgcggctcggccttcgacctcatcaagggcatctacaactcccccaacgggatgcgcatgtccgggggcgcgcaggccgtgcgcatgaacgcgccgcgcgtgagagggcagcttcgccgtctggggcggcctcttctgaaccttcgactgctgcatggtctat

SEQ ID NO: 10170 - DNA, 271 bp, Zea mays
gccacctgaacgccaaaaaattatggtgaagggaggaatatcgaaggacgatgcagattggtctactttgggagtgaaagatggccaaaagttgatgatgataggcacggctgatgagattgtgaaagctccggagaaaggtccagtgtttgttgaggatctaccagaagaagagcaagtgattgcactgggtcacagtgctggtctttataaccttgggaatacatgctatatgaattccacattgcaatgtctgcattctgttccagag

SEQ ID NO: 10171 - DNA, 274 bp, Zea mays
ccgccattcaaattcaagcattccataagggatcactcgaattttgttaactgtatccggtatgctcctgatggtagtaagtttatcactgtgagttctgataagaagggtttgatatatgatggtaaaactggagaaaaaataggagagctttccactgaaggcggtcacacagggagcatatatgctgttagctggaatcctgacagtaaacaggttctaacagtttctgctgataaatctgcgaaagtatgggatatctttgaagatgcaa

SEQ ID NO: 10172 - DNA, 274 bp, Zea mays
cagcgctcaagttctcgcgcccacagccaaatttttctccactcaatcgcggcataagctgcactgcagccatggacgccagcggaccggtagcaaggcgaagaagggggcggctgggcgcaaggctggcggccccaggaagaagtcggtgtcgcggtccgtcaaggccgggctgcagttccccgtcggccggatcgggcgctacctcaagaaggggcggtaccgcagacgtgggcaccggcgcccccgtctatctcgccgccgtgcttgagta

SEQ ID NO: 10173 - DNA, 272 bp, Zea mays
cccacgcgtccgatgcaaaacggtgtctcttgaatgacttgcacatccttgatcttgaaaccatgacatgggatgatgtggatgcaataggcaaccctccttctccaaggtcagatcatgctgctgcttgccatgctgaccgctatcttttaatttttggtggggggtctcatgcaacatgtttcaatgacctacatgtccttgatttgcagacgatggaatggtcaagacccaaacaacaaggcctgactccaagcccaagagctggacat

SEQ ID NO: 10174 - DNA, 272 bp, Zea mays
ggcgccaattgcggtggccaccacttccaatccactctccgcgttcgcctcgccgagctgttcttgctctgtcctctctccaactccacgatttgttccacacccggttcccgagcctccgcagcgcttcttgctgaaaaagggaactccgagttctccagctctggatcggcagagagcggtggttccttttgcggactctgaggtccagttcttgtttttgatctgtctcatcaacccaccagtcgggctgcaggcttagagctggaagg

SEQ ID NO: 10175 - DNA, 272 bp, Zea mays
agccgcgcagaggaaaggaagccatgcccgcctcgccggcgctcgccggcgcccactccttcgcggcgtccgtgtatggaagcctcctcgtcccctcgcctcccgtccccgcgccggcacgtcgcgcggcgctgtccgtcgtcgccaaggtcaaggtggccacgccccaggacgaccgcatcgcccgccacgtccgcctgcgcaagaaggtaagtggcaccactgagaggccgaggttgagtgttttccgctcaaacaaacatctgtacgct

SEQ ID NO: 10176 - DNA, 121 bp, Zea mays
tgaatagctcacactttcaggttgctgagcgggcgctatttttgtggaataacgaccacatcgagagtctgatcaaacaaaacagcttggttccagtgcccactggcatttctctccagtg

SEQ ID NO: 10177 - DNA, 270 bp, Zea mays
agaagaccggcaagatccccgacccggagtccaccgacaacgctgagttcaagatcgtgctcaccatcatccgcgacgggctcaaggctgaccccaagaagtaccgcaagatgaaggagaggcttgtcggcgtctctgaggagaccaccacgggtgtcaagaggctctaccagatgcaggagaccggcgccctcctcttccctgccattaacgtcaacgattccgtcaccaagagcaagtttgacaacctgtatggttgccgccactcgc

SEQ ID NO: 10178 - DNA, 268 bp, Zea mays
cgccacgtcgggctcgggcggcgtcatcgtggactccggcaccgccgtgacgcggctccagtccgccgcctacgcggcggtccgcgacgccttcgtccagggcgcgccgtcgctgccccggacctccggggtgtcgctgttcgacacgtgctacgacctgtcggaccggacgagcgtggaggtgcccgctgtgtcgctgcggttcgagggcggcggcgcgctgcggctgccggcgaagagctacctgatccccgtggacggagccggc

SEQ ID NO: 10179 - DNA, 267 bp, Zea mays
agaacaagcttactggtgttctcccaaagcagctttctaatctcccccacctcttgcaattcaatgtttcacataaccagctctctggggatctccctcccggtagcttctttgacaccatccccctatcttgtgtgtcggataatcctggcctttgtggcgcgaactcaattcatcttgtcctggtgtgctaccaaaaccaatcgtgctgaacccaaacacttcttccgatccaatatcaccaaccgagcttgtgcctgatggtgg

SEQ ID NO: 10180 - DNA, 263 bp, Zea mays
agaaaaccctagccgccgccaccgaagcggcctcccaggtaagcaagagcgtccaccccgccgccgccatgaagcgcaatccccgcgtcacgagctctcgccggaagtgccgcaagcgcacttcacggccccgtcctccgtccgccgcgttctcatgtccgccgggctgtcgacggagctccgccacaagtacaacgtgcgctccatcccgatccgcaaggacgacgaggtgcaggtcgtgcgcggcacctacaagggccgtg

SEQ ID NO: 10181 - DNA, 267 bp, Zea mays
gaaaaccctagccgccgccaccgaagcggcctcccaggtaagcaagagcgtccaccccgccgccgccatgaagcgcaatccccgcgtcacgagctctcgccggaagtgccgcaaggcgcacttcacggccccgtcctccgtccgccgcgttctcatgtccgccgggctgtcgacggagctccgccacaagtacaacgtgcgctccatcccgatccgcaaggacgacgaggtgcaggtcgtgcgcggcacctacaagggccgtgaggg

SEQ ID NO: 10182 - DNA, 263 bp, Zea mays
gaccttgactgcttcagatacaagtacccatggtggattctctgtcctcaggaggcatgctgaagaatgtttgccccaactggacatgactcagaatccaccgtggcaagaactagtggctaaagatctccatggaaatgaatggcatttccgtcacatctttcgagggcaaccaaggaggcatctacttacgacaggctggagtgtttttgttagctcaaaaagattggttgcgggtgacgcgtctatcttcttgagaggtg

SEQ ID NO: 10183 - DNA, 262 bp, Zea mays
ggctcacctgatggagattcaggtcaatggtggtaccattgctgacaaggtggactatggctacaaattctttgagaaagaggtccctgttgatgctgtcttccagaaggatgagatgattgacatcattggtgtgaccaaggggaaaggttatgagggtgtggtcactcgttggggtgtcacccggcttccccgcaagacccacaggggtctccgcaaagttgcttgtatcggtgcatggcatccggctagggtctcctat

SEQ ID NO: 10184 - DNA, 260 bp, Zea mays
cccggtcctctcccggcgtcttctccctccgcaccgggctccggcgatggcgggcgtcggctccgcgctgcgtcggctctacctctccgtctacaactgggtcgtcttcttcggatgggcgcaggtgctgtactacgcggtcctgacgctgcgtttgagcgggcacaaggccgtctacgccgccgtcgagaggccgctgcagttcgcgcagacagccgccatcatggagatcgttcatgggctcgtagggttggtgaggt

SEQ ID NO: 10185 - DNA, 264 bp, Zea mays
cccacgcgtccgctagggtttttgattttagccgccgccgctgctcatctcacatccctcgagaagacgcctgctcctcgccgatcgatacgatggccgtcttctccgacctccacaccgccgacggcctcaagtccctcgaggctcacctcgccggcaaaacctatgtgtctggtgactccattactaaggatgacattaaggtcttcgccgcggtgccgtcgaagcctggcgctgagtttcctaatgccgcccgctggtacg

SEQ ID NO: 10186 - DNA, 263 bp, Zea mays
gtgctgtcgtcgagagatgggataaccgcacctgcaagggattacagcatccccaaatcatcgcagtcaactcgagtcttcactacgataggttccatagcagaccttgtgtttgcttacaacaccggcatgctgccagaaattcaggcaaccatcaggcctcctgtggtgaagaacatggagaaagctctatggttccagttcaccattggctccttgcctctctatgctgtagtttttgtgggttactgggcttatgggtc

SEQ ID NO: 10187 - DNA, 266 bp, Zea mays
gcagaatctcaggtgcatgagtgttacctcttgccctggagtcaccgatcttgcgcttgcttctattgccaagttctgcccgaacttgaagcagctgtacctcaggaagtgcggatatgtgtcagatgctggcctcaaggcgttcacagaatcagcaaaggtgtttgagaacttgcatctcgaggaatgcaaccgggtttctcttgtcggtattcttgctttcctcctcaactgcagagagaagttcagggctctatcgttggtga

SEQ ID NO: 10188 - DNA, 236 bp, Zea mays
cggacgcgtggaaaagggataatgaatcaacttggccttgttgttcgagaagatgctgttggtaacatatttggccgctgggagggttccgagcctggactaggagcagttgcaactggatctcatgttgatgccattccattctcaggcaaatttgatggtgttgttggagttctgggtgctcttgaggcaattagtttgctgaaaaggtctgctttcctgccaaaaagatcttt

SEQ ID NO: 10189 - DNA, 269 bp, Zea mays
aacttccagcaccttaaggctatccagcaacttgcaactgcagcaaatggcgtgtggtctaaaccaaatgtaaggcgcaagacaaagattgtgtgtacaatcggtccttcaaccaacacaagggacatgatatggaaactcgctgagactggcatgaatgtggctcggcttaatatgtcacatggagaccatgcatcacaccagaaagttattgatctggtaaaggagtacaatgcatcacatgctgacaatgtgattgctatcatgct

SEQ ID NO: 10190 - DNA, 269 bp, Zea mays
ggaggatctgattatcttggcaagggtgttcttaaggctgtcagcaacgtaaacaacattattggaccagcgattgttggaaaggaccccactgagcaggttgagattgacaacttcatggtccaacagcttgatggaacctccaatgagtggggctggtgcaaacagaagcttggagcaaatgccatccttgcggtttcacttgctgtgtgcaaagctggagctatggtgaagaagattcctctttaccagcacatcgcaaatcttgc

SEQ ID NO: 10191 - DNA, 271 bp, Zea mays
cacacactcgagaactccatttcgatcccatttgaaatcaacccatcctcgtttcctccgtctagcagcctctcaccctcatggccaagatcaagatcgggatcaatgggtttggcaggatcggaaggctggtggccagggtggccctgcagagcgacgacgtcgagctcgtcgccgtgaacgaccccttcatcagcaccgattacatgacctacatgttcaagtatgacactgtgcacggacagtggaagcaccatgaggtcaaggtgaa

SEQ ID NO: 10192 - DNA, 270 bp, Zea mays
cgcaaccccgcgccaggagtaagtttgttcttttatcgatattatcgatatggcgagggaggagaatgtctacatggccaagctggctgagcaggccgaaaggtatgaagagatggttgagtatatggagaaggtggctaagactgtagatgtggaagagctcactgttgaggagcgtaacctcttgtcggtcgcatacaagaatgtgattggggctcgccgtgcttcatggcgcattgtctcttctattgaacagaaggaggagtcccg

SEQ ID NO: 10193 - DNA, 269 bp, Zea mays
ctccgacatcctactttcgtcctcacgagtgaccgataatccgccggcgctaagatgttggtttatcaagatctcctatctggcgacgagctcctgtcggattcattcacctacaaggagctcgagaacggcgtcctgtgggaggtcgagggaaagtgggtcacccaaggtcctgttgatgtagacattggtgccaatccatccgccgagggtggtgaggacgaaagcgttgatgacacagccgtgaaggtggttgatattgttgacac

SEQ ID NO: 10194 - DNA, 271 bp, Zea mays
acatcaacgactaccagaagagccggttcgtgaaccgcgtcgtggcctccatgttcaacaccgtcgccggcaagaagatcgccgtcctcggcttcgccttcaagaaagacaccggtgacaccagggagaccccggccattgacgtctgcaagggcctgctgggcgacaaggcccagatcagcatctacgacccccaggtgacggaggaccagatccagcgggacctggccatgaacaagttcgactgggaccacccgatgcacctgcaacc

SEQ ID NO: 10195 - DNA, 271 bp, Zea mays
cacgacgcacgcagagccgcagagatccgtcacactgcaagttttgaaaactgaactgtaagatggcatcagcagagctttcccgtgaggaaaatgtgtacatggcgaactcgccgagcaggcagagaggtacgaggaaatggttgagttcatggagaaggtagcgaaaactgttgactcggaggagctcactgtggaggagcgcaacctcctgtctgttgcatacaagaacgtcattggagcccgccgtgcctcatggcgcatcatctcc

SEQ ID NO: 10196 - DNA, 270 bp, Zea mays
gaggaaatcaacaaggtcgttaagctccaagaagagcttgacattgatgtgcttgtgcatggcgagcctgagagaaacgatatggttgagtacttcggtgagcagctctccggttttgcgttcactgccaatggctgggtgcagtcttatgggtcaaggtgcgtcaagcctccgatcatctacggtgacgtgagccgccccaaccccatgaccgttttctggtcgaagaggcgcagagcatgacgtctcgcccaatgaaggggatgctga

SEQ ID NO: 10197 - DNA, 272 bp, Zea mays
gcatcaccaagctgaagaacatcctcgagggcaagcccgagccgcagttcagttccgaggactacatgatgctctacacgacgatatacaacatgtgcacgcagaagccgccgcaggactactcacagcagctctacgacaagtatcgggagtcgttcgaggagtacatcgcctccatggtactaccttcattaagggagaaacatgacgagtttatgctgagggagctagtgcaaaggtggtcaaaccataaagtcatggttcgctggctg

SEQ ID NO: 10198 - DNA, 267 bp, Zea mays
atttctaaaggagcctccatcggattctggcaaggggacattaggtacctgatggaggatgtgcaagtgatgaaaccgacaatattctgtggtgttcctcgtgtttatgatcgtatatatacaggtataaacatgaaaattcagtctggagggatgatagccagacacctttttcagtatgcctacaactacaaacttgccaatatgaggaaagggctgaaacagcatgaagcatcaccgtttttcgacaagatagttttcagcaaa

SEQ ID NO: 10199 - DNA, 266 bp, Zea mays
cggacgcgtggcggacgcgtgggccggcgggcccaactccaacgactacgggaccaaccgcatcctccaccacaccatcggcctccccgacttctcgcaggagctccgctgcaccgagaccgtcacctgccatcaggcggtggtgaacaatctggatgacgcgcacgagcagatcgacacggccattgccacggcactgagggagagcaagcccgtgtacctcagcatcagctgcaacctccctgggctgcctcatcctaccttca

SEQ ID NO: 10200 - DNA, 268 bp, Zea mays
aaaccccagagcggagaagagcgcaagatgttcggcttcgggcaccacggccaccacggccagaacccgccggcgcacggcggcgtgcaccagcccaccttcaagatgttctgcaaggccgacgaggggtactgcctcaccgtccgctacggcaacgtggtgctggcccccgccaacccgcgcgacgagcagcagcactggtacaaggacatgcgcttcagcacccaggtcaaggacgaggagggcaaccctgcgttcgccctcgtca

SEQ ID NO: 10201 - DNA, 267 bp, Zea mays
ctgcgttgacatactgtagattgacaattcctgtttatgaaagagtttatccaccttttcatccgatgattggattacaattctatacttgtggaaagcttgaatggttgcttgagttcacagaggatgcactaaaatctttaaccagagcagcagatatacttaaagtaacacatggcgtaaaatcccagttcatgaaagagctctttggcaagttagaggaagcaagagctgaagtttcgtttagactatcctccagacatggac

SEQ ID NO: 10202 - DNA, 268 bp, Zea mays
attgactggcaagaccatcaccttggaggtggagtcgtctgacacaatcgataatgtcaaagccaagatccaggacaaggagggcattccaccggaccagcagcgcctgatctttgctggcaagcagctggaggatggccgtaccctcgccgactacaacatccagaaggagagcaccctccacctggtgctccgcttgcgaggtggtatgcagatctttgtgaagaccttgactggcaagaccataaccctggaggttgagagctcc

SEQ ID NO: 10203 - DNA, 91 bp, Zea mays
cgacttcctcgccctcaaccctttcggccagatcccggctctcgtcgacggagacgaagtccgcttcgagtcccgttcgatcaaccgggac

SEQ ID NO: 10204 - DNA, 261 bp, Zea mays
ctcacttccgcgccgccacccccttcaggtaaggaagacgaggagggcaggatgtcgcaccgtaagttcgagcacccgaggcacggctccctcggcttccttcccaggaagcgctcctcccgccaccgcggcaaggtgaagtcattccccagggatgaccccaagaagccttgccatctcactgccttccttggctacaaggctggcatgactcacattgtccgtgaggttgagaagccaggatccaaactccataagaag

SEQ ID NO: 10205 - DNA, 258 bp, Zea mays
atgacatatattactgagaacataattgctatgggttttcctgctggtgatttgagttcagggctttttggatattttgacggtttctaccgcaaccacatggaggaagtcatcaggttctttgaaatgcaccataaggggaagtataaggtgtacaatctttgttctgaaaggctatatgatgcatctctttttgaaggaaaggtggcctgctttccttttgatgatcataactgccccccgatacaacttgtcata

SEQ ID NO: 10206 - DNA, 102 bp, Zea mays
ggtaggtacaacatccctgatctggccaagaagtacaaggtgtacgccatagacctgctggggttcggctggagctagaaggcgctggtggactacgaggcc

SEQ ID NO: 10207 - DNA, 257 bp, Zea mays
ctcctcaaatgcgtgctatggtggaacagctgcattgtttaattgtgttaactgggttgaaagcaactcatgggatgggcgttatggacttgttgtttgcacagacagtgcggtttatgctgaaggtccggctcgtcctactggtggtgcagctgctattgcaatgctgattggaccaaatgctcctatttcttttgaaagcaaatataggggatctcatatggcccatgtatacgacttttacaagcctgatctcg

SEQ ID NO: 10208 - DNA, 259 bp, Zea mays
atcacgtattcatgaaagacatgtagtgaactggctgtgggctgcaggctgtcatccgtttggaccattctcgaactcctcacagatcagtcaaattcttcaggatgtagcactcagaactacaatttatgctcaagtcgatgctgctcttcgcaaaataagagacacatcagagtttgtccaatcttttgcatcagagcatcttaagacgccattaggagaacttgtgaaaggtaataaaaacaagtccaccactgag

SEQ ID NO: 10209 - DNA, 260 bp, Zea mays
ctcgtcaaaggcgcaaaagccctgtacaagttcggaaggctgcagcgcgggcgatacagccccaatggatctgaccaggcaatcttctacaattccaccagctactgggacgagtttgtgtggggtggtgcgtggatgtactttgccacagggaacaattcatacctcacggttgccactgccccaggaatggcaaagcatgctggagcctactggtttggaagtccaaactatggagtatttacctgggatgacaaact

SEQ ID NO: 10210 - DNA, 260 bp, Zea mays
atccgctcccctacctctccagcatcctcccgtctccgtcgtctcgtctccgctcctcacctcgccagccatgggcaagatcaagatcggaatcaacggtttcggaaggatcggcaggctcgtggccagggtcgccctgcagagcgaggatgtcgagctcgtcgccgtcaacgaccccttcatcaccacggattacatgacgtacatgttcaagtacgacaccgtgcacggccaatggaagcacagcgacatcgccctca

SEQ ID NO: 10211 - DNA, 266 bp, Zea mays
cggacgcgtgggtgggattaatcagatctatgatgttgctattgacaaggtaaacaagccatatttacccattgctgctggtgatctctcaattcagtcagcatggttgttggtgatattatttgcagctgcaggtttttcaattggtatatcaaactttggacctttcattacctctctatactgccttggcctatttcttggcactatatattctgttcctccattcagactgaagagatatccggttgctgcttttcttatca

SEQ ID NO: 10212 - DNA, 296 bp, Zea mays
tcgatgccgaccgcgatgtcaagctacacttcatgcgggacattctcgcgcgctactggccgcaggcgagcgtaacaaggtgcaaaggcacagagaatataggcagaggatactccacctttacaagcctcttcatgaagaattatacaatatgcatccttcagtgttcttcttaccaacattccttgaagcagttaggagcaatacagaagaatgctttagaagtattatgactgagccaattcctggtggttattcggttgctaggttgcagcctactttctgtgagatgttat

SEQ ID NO: 10213 - DNA, 295 bp, Zea mays
cccacgcgtccggagattgttcgttcgcctagagctccaacccattctttcaagaagccgattggtgctaaaaagcctggaaataagactggtggacttggtgcacggaagcttacatcaaagccaaatgaaagcctctatgagcagaagcccgaggaaccagctcccgtcctgccatcatcggtgattgagagtactacaactaggagcaaatcacatacttcccgatttgattacgttgaaaatgcacctgctcttaagaatgggaatagctcagaaggcaaccacatgagtg

SEQ ID NO: 10214 - DNA, 293 bp, Zea mays
aattttcacgaggaaaatctcttttgcgtttttgtttctcgaggttggagcgccgctcgagattgtcggtcggctttctgccctcgctgatgacgtcgaaacgaattcagacggcagacaagaagaacaaccagcagacccagagctcgatcagttcatggagatctactgtcacatgttggtaaggtacagacaggagctcacaaggccaatccaggaagcggacgaattcttcaaaagcatggaggcccagatcgactcattttcattagatgacaatggctatgaggaag

SEQ ID NO: 10215 - DNA, 295 bp, Zea mays
gtgaccctcttcactcgcttcaccctgttcatcactcgcttgtacaagaagtcacgcaccaaacgggcaagggcaaacaccaccaaagaaggcgagaacgcactccgtccctctcctccaggaccgcccgctcttatcccgtttctcccttctctgggctcggagaatcggagatggcgtccagcgcctctcggttcatcaagtgcgtcacggtcggcgacggtgccgtgggcaagacatgtatgctcatctgctacaccagcaacaagttccccactgattacatacccacggt

SEQ ID NO: 10216 - DNA, 293 bp, Zea mays
ctgcgagatccaggacaccacccagatccacacccacatgtgctactccaacttcaacgacatcatccactcgatcatcgacatggacgcggacgtgatcaccatcgagaactcgcggtccgacgagaagctgctctccgtgttccgggggtgtcaagtacggcgcgggcatcggccccggtgtctacgacatccactcccccaggatcccgtcggccgaggagatcgccgaccgcatcgacaagatgctggccgtgctggacaccaacatcctctgggtgaaccccgactgc

SEQ ID NO: 10217 - DNA, 290 bp, Zea mays
cggacggtgggtttggctcacagcgtttttgagccatcctctactaagtgagcttctgactgaagaggatcagaagatattcaagtacttggactccattgacgtcgatgattctgatgttaaggcaggatattccatttaccttaacttctctgagaacccgtactttgaagacacaaagcttacaaagacctattcctttgttgatgatggaacaaccacaataaaagcttctcaaattaagtggaaggatggaatgggacctgcaaatggaaatggtattaacaaga

SEQ ID NO: 10218 - DNA, 293 bp, Zea mays
gacagcctgtggcatcttggggacgagctccgcgggcagcccaaggtggtggaggaccgccagtggtctctcatgacgtccaagctggcggagatcaccaggtccaagggcgagaggatgaacaccgtccctgacgccaagcagtgggacaagacgtcctaccagcttcacgacgacagcaggatcggccacatcggcctcatgaacctggatctcaagatgaacgaggctgccgccatgaagctccccttccgtggcatgccgtataacatgaaccagatgtacctcaaggg

SEQ ID NO: 10219 - DNA, 290 bp, Zea mays
cttttatatgaatatcaggttgacattgttttctcaggacatgtacatgcatacgaaaggatgaaccgagtatttaactacacattggacccctgtggcccgatttacatcggcattggagacggcgggaacattgaaaaaattgacatggatcatgctgatgaccctggaaagtgtccctcaccaagtgataaccaccctgaatttggtgggctctgccatctgaacttcacttctggccctgccaagggcaaattatgctgggaccgacagccagaatggagtgcata

SEQ ID NO: 10220 - DNA, 291 bp, Zea mays
gccggaggcctttcagacggaggggaacagtatcaggtctgttgcaactgagctggcagtggatattgttgtcactggtagggatgtcaagttctaccgtcacaagttccctctgctgtccaaggagctcgggcctacagacgctggttgcctcgacaagcgaggagggcagcgacgaggtggacatctccgacatcccgggcgtcccggcggcgttcgatgtctgtgccaagttctgctacggcatggggggtgacgctcaacgcctacaacgtgctggccgcccggtgc

SEQ ID NO: 10221 - DNA, 290 bp, Zea mays
aggaaaacaaattatacaactttcatgagtatttaagagcaagcacacgggctcagttgatgaattccctgaatcacatttcccatatggctcggaacaacggttgggtggaaatgccccaatggagtatgcaagctttacaataagatttggctcattgaatgtgacccagtgctttactcggtcaccaaacatcttgaagcaaagctcaacgaagtaggtgaagtcctccctgaatagaaataaagaaacaaccacatatgaacttacggcatcttcgtagataaagc

SEQ ID NO: 10222 - DNA, 289 bp, Zea mays
ctcagtcgcctgcaccgccgcttcgttcgtgtagaggggagaagacaggaaatggcggcgactgagggcgtgctcttggggatgggcaaccccctcctcgacatctccgccgtcgtcgatgacgccttcctgacaaagtatgacatcaagctgaacaatgctattctcgctgacgagaagcacttgcctatgtatgacgagttggctagcaagagcaatgttgaatatattgccggaggagccacccagaactctatcagggttgcccaatggatgcttcaaactcctg

SEQ ID NO: 10223 - DNA, 289 bp, Zea mays
ggcgaacctcgtgatcgtcgccggtgaccacggcaaggagtccaaggacagggaggagcaggcggagttcaagaagatgtacagcctcatcgacgagtacaagttgaagggccatatccggtggatctcggcgcagatgaaccgcgtccgcaacggggagctgtaccgctacatttgcgataccaagggcgcattcgtgcagcctgcgttctacgaagcgttcgggctgactgtgatcgagtccatgacgtgcggtctgccaacgatcgcgacctgccatggtggccct

SEQ ID NO: 10224 - DNA, 287 bp, Zea mays
cggaccgtgggcggacgcgtggggttcgccacggcatgtggggtgctgtgaagaaacttcagtctgggttcagagcgtaccagcaaatgagagacacagaaaataccctgtcacacagcgccattatggctcgaatgaccaccagggtatccatcacggcttcgaatggtggcttagaccatgacctctccatcgccgataaaatcagtggcgagaatgacagctcccatgcagttcagcatggttttgactggaagtgggtggtttttggtggtgcggtggctgcg

SEQ ID NO: 10225 - DNA, 287 bp, Zea mays
gtcgctgatgagatccacctcccagctcctccgccgccggagctactcctccgcatccgggcagcccgagcggaaggtggccatcctcggggcggcggggggcatcgggcagccgctgtcgctgctcatgaagctcaacccactcgtctcctccctctcgctctacgatatcgccggcaccccaggtgtcgcggccgacgtctcccacatcaactcccccgccctggtgaagggtttcacgggtgatgagccacttggggaagcgctagagggctcggacgtggtga

SEQ ID NO: 10226 - DNA, 287 bp, Zea mays
gttacggcatcatctacgtcgaccgtgacgacggctacaggcgctacctgaagcactcagctaagtggctgagagagttcaacggagctgccaaaaaggctgaaaagaaggttcttacgccagcttagaatgtagtggtgtgtagtttcagttcagctgtgtgtctgatgtgtatggccgtgggatgaaacaagctagctagaatgtagtggtgtgtagtttcaatacagtagtgtgtgtccgacccgttttatgcaaataaataattaatggacgtgtgatccatt

SEQ ID NO: 10227 - DNA, 287 bp, Zea mays
ggcagaggtgaatgccatcaagcaagtcttcaaggacccatctgggattaaaataaatgcaaccaagtccatgataggacattgccttggcgcacaggcggtttggaagccattgctactattaaagcgataactactggatgggtgcatccaagcataaaccaatttaacccagaggaagcagttgaatttgacactgtacctaatgtaaaaaagcagcatgaagtgaatgttggtatctcaaattcctttggatttggaggtcacaattctgtcgtagtatttgc

SEQ ID NO: 10228 - DNA, 289 bp, Zea mays
tgctaatccaaagcaaaacaaagaaggctccatctcgaatcagctactctactatcatcacatggaacttgattgtcatattggttgtgctatctctctatgctacctacagccattggcatcaaaggtctacccaagacttcgaaatggagcttcatgaagctgagcttgctgtgagaccggaggatccaaaaatgataagtagaccaagatatgcggtaatgaacaccgcaaaaggcccaattactatagaaatatacaaagatgcttctgctgacgttgtggatag

SEQ ID NO: 10229 - DNA, 286 bp, Zea mays
ctctctccactctacctctcctctcctgtgcgctacagccacgaggaaggggagcgtcgaccgattcgtcccggcctcccgtcccgccgctggcctcgcctgccccgatggcggcggtggcgatccaccagttcgccgagtgcatcacctgccacgcctggagcccggaccagtcgatgattgccttttgtccaaacaaccatgaagtacatatctataaattcttcacagacaagtgggagaaacttcatgttctgtcaaagcatgatcagatggtttcggggat

SEQ ID NO: 10230 - DNA, 284 bp, Zea mays
aatgtacaatcacaaattgatcaaatatgtggtgaaatcgctggcaccatagaggtgggtgaacaggtgacaacaccccaagtcaatgaggatgatttgacacttgagaggcttgaagattttcggtctcaactccaggagcttgagaaagagaagagtaataggctggagaaggttcttgagtatgtaattatggtacatgatctttgtactgtcttggggatggattttctcagcacagtgactggagttcaccccactttagatgactctgttggcgacaa

SEQ ID NO: 10231 - DNA, 282 bp, Zea mays
ctcctcaaatgcgtgctatggtggaacagctgcattgtttaattgtgttaactgggttgaaagcaactcatgggatgggcgttatggacttgttgtttgcacagacagtgcggtttatgctgaaggtccggctcgtcctactggtggtgcagctgctattgcaatgctgattggaccaaatgctcctatttcttttgaaagcaaatataggggatctcatatggcccatgtatacgacttttacaagcctgatctcgcgagtgaatatccggtggttgatgg

SEQ ID NO: 10232 - DNA, 282 bp, Zea mays
cagagcgtcagagcccgatcccgatccagcgaggcggcgaccctccctcctccccttgcttcgctcgtccagccctgaccacccgcatccccgtcagtcatggcagcggcagcaggcggaggcgcggtgcgtgcgctgtcccagaaggagcaggacatacagatgatgctcgccgccgacgtccaccttggcaccaagaactgcgatttccagatggagcgctatgcctttaagcgccgcaccgacggcatctacatcatcaaccttggcaagacatgggag

SEQ ID NO: 10233 - DNA, 280 bp, Zea mays
cggacgcgtgggtcaggctgctttatgacaccaagggccgcttccgtcttcacccaatcagggatgaggatgccaagttcaagctctgcaaggtgaggtccgttcagattggccagaagggcatcccctacctgaacacctacgacggccgtaccatccgctaccccgacccgctcatcaaggccaacgacaccatcaagatcgatctggagaccaacaagatcatggacttcatcaagtttgacgtcggcaacgtggtcatggtgaccggcgggaggaa

SEQ ID NO: 10234 - DNA, 281 bp, Zea mays
cggaccgtgggcggacgcgtgggcggacgcgtgggttctgagaagattctggacaagaaagagctggagttctacaagtaggagggcaatctctcccagctgctgcagaacgtccgcaacaagcttaaccaagtcgcttcaagctggtctcgggaggagaaggatcactgcctgcaggagacggagaagtcgttcgcctactcaggaggcctcctccgccacatattcacctgatttaacactgttggccgatccagtttcaaacgctgtacatacataac

SEQ ID NO: 10235 - DNA, 237 bp, Zea mays
gtttcaaagaggaattctcacacattgaacaagaaaatcccactttcctgtatgctatgcccatgtcatccacacgagttttctttgaggaaacatgcttagcttctaaagatgctatgtcttttgatctacttaagaagaggctgatgtatcggttgaacgcgatgggaattcgtatcctgaaagtttatgaagaggaatggtcctacattcctgttggagggtccttcccaacac

SEQ ID NO: 10236 - DNA, 297 bp, Zea mays
gttggcttctcctccccctccggttcgggttcgggttcgtgaggttctccggggttcggtttcgtgggtgagcggatcgagatggcggcgtcggatgttgagtaccgctgcttcgtcggcggcctcgcatggggcacggacgaccactccctccacaacgccttcagcacctacggcgaggtcctcgagtccaagatcatcctcgatcgggagacgcagaggtcccgcggcttcggcttcgtcaccttctccacggaggaggcgatgcggaacgagatcgagggcatgaacggcaag

SEQ ID NO: 10237 - DNA, 309 bp, Zea mays
cttgagctcgaaggagaaattgtacagtctgaccatgatgacccaccacagaagatgggaaatccttcagtggaggtgactgaggaaaaccgtgatgcttcccaagaagcaaaaggcaaggctatggaagcaatttctgaaggaaaacttgaagatgctattgaacaccttaccaacgcaatagtgctgaatccactctcagcaatcatgtatggtactagagcatctgtgtttataaaaatgaagaaaccagctgctgccattcgtgatgccaatgctgctctagagatcaacccagactctgcaaaa

SEQ ID NO: 10238 - DNA, 308 bp, Zea mays
gctgtaggcaagaaggaagaaaggggtgaccataaggttgcagggtttatatttatgtgcaatgcaaagactaagaaggagtgctaccagaatcgcttgtttgggatgcctggtgggaagattggaatggtcaagaagataaggccaggggtgaagctgttcctttatgattttgacctgaagcttttgtatggtgtgtacaaggcagcatcacatggggggctaaaccttgtccaaggagcatttagtgggaagttccctgcacaggttaagtttaagattgataaagattgccgtcctctccctga

SEQ ID NO: 10239 - DNA, 308 bp, Zea mays
aaatgttgtaatgctgataggtttttgcgttgaggacagaaggcgtttattggtttacgagtacatctgcaatagatctttggattcacatctctatggtcataatcgagaaacattggagtggactgcacgacaaaagattgcagttggtgctgctcgtgggctgcggtaccttcacgaggaatgtagggttggctgcataatccatcgtgacatgagaccaaacaacatccttgtcacacatgatttcgaaccactggttggagatttcggcctggcgcgatggcaacctgatggagacatgggcg

SEQ ID NO: 10240 - DNA, 312 bp, Zea mays
cagaatttgaggtgtctgatgtacagatcgtaaaggaatatattgaaagaggaaattcagctagaagcacagggtcaacaggggccaatgaggaatcatcaaggtcacatgctattctacaactggctgtgaagaagcatatcattgtaaaagataccaggagacagagagatcgtgatgctaatgaagctaaaaatacaaaggctgtggggaaaatatcatttattgaccttgctggaagtgagcgtggtgctgatactaccgataatgatagacaaacaaggattgagggagcagagataaataaaagtc

SEQ ID NO: 10241 - DNA, 311 bp, Zea mays
tgcagagattccatggggtaactttggggctgaatatgttgttgaatcttctggtgtcttcacgacgactgataaagcatcagcacacttaaagggtggtgcaaagaaagtggtgatatctgcaccatcagctgatgctcccatgtttgtagttggagttaatgagaatagctatgatccaaagatgaatgttgtttctaatgcaagttgcactaccaactgccttgctccacttgccaaggttgtccatgaggaatttggcatcgtggagggccttatgacaactgttcatgcaacaacagctacccaga

SEQ ID NO: 10242 - DNA, 311 bp, Zea mays
cccacgcgtccgatgaattacagcctaaccagatgaaaaaccaccattcttctgtatcatcatacaacccacaaccgaaggatttcccaactgaacaactctaccgcgcctaccttataatccagcgcttcaagaacaccatcattagcgaccccaagaacgtcactgccacctggattggtcatgatctctgcggagaaacgacctatgtggggttctactgcggatcgccggcaggaggagataagaagttgacagtcacaggtgtcattttgaatgggtataatctacatgcaccaacgttggaaggt

SEQ ID NO: 10243 - DNA, 311 bp, Zea mays
cgccgacgcgccgcgcctgttcaagatgaatgtggagaagctcaagaagatggcgggtgctgtgcgcactggaggaaagggcagcatgcgcaggaagaagaaggcagtccacaagaccgcaaccaccgatgacaagcggcttcagagcacgttgaaaagaattggagtgaacactattcctggtattgaggaggtcaacatcttcaaggatgatattgttatccaattccagaaccctaaagtgcaagcatccattcctgcaaatacatgggtagtcagtggagtaccccagacaaaaagtctacaagacc

SEQ ID NO: 10244 - DNA, 307 bp, Zea mays
gtttttggaagttctgcagaagatggtttcttaaatgtttgggaccatgagaaggttgggaagaagaaaaattctaatgtcccagctgggcttttctttcagcatgctggtcatagggataagatcgtagacttccactggaattcgtcagatccttggacaattgtcagtgtctcagatgatggtgagagcactggtggaggtggaacactgcagatatggcgaatgagtgatttgatctaccgcccagaggatgaagttcttacagagctggagaatttcaaggctcacctggccagttgcgctc

SEQ ID NO: 10245 - DNA, 305 bp, Zea mays
cggacgcgtgggcgtaaaggcaccctaatcctagccgcacgcgggaggcagctaagagagcttgaagcaccagccatggcggaccacgacctcacggcgctgatgacgggcactggaccggcacctggtcttcccgctgctggagttcctccaggagcggcagtctactcgaggccggagatcctggaggccaagatccgcctcctcagcggcaccaacatggtcgactacgccatggacatccacaagtccctccacggcaccgatgacgttcccgaggacatggtcaagcgccgctccgaggt

SEQ ID NO: 10246 - DNA, 302 bp, Zea mays
cagccagtcagccacatcactagctatctgtgcagaggcaatggcgtccaaggttgagctggtggtggaggtcaagtccccggctgacaagctgtgggcggcgctgcgtgactcgacggagctgttccccaagatcttccccgagcagtacaagagcatcgagaccgtcgagggcgacggcaagtcggccggcaccgtccgcctcctcaagtacaccgaggcggtgccgatgctgacgttcgccaaggagaagcttgagacggcggacgacgagaacaaggtggtgtcgtacagcgtggtgg

SEQ ID NO: 10247 - DNA, 303 bp, Zea mays
cctcctcgcccgcccgctccgtgttcattgccccactccctcacgcctctcgcgcccgccgctccaccacccccatccacgctcagggaaagggggtctgggttgcgtacaggcgaaaggcacgcgccgccgctgccgcgcgagcctctccgtccccatcgccgcgcagatggatccgtcgtcggagcccctgtacgcgcaggtcgagccgtacgactccgggttcctcaaggtctccgatgtccacaccatctactacgagcagtccgggaacccgctaggccatgcggccgtgtttctcca

SEQ ID NO: 10248 - DNA, 302 bp, Zea mays
cccacgcgtccggaaagtacttcgcaactcaaaaatccatgaatttaacataaagctagcaacccacaaaagactcattccagctcatatcaagggaaggccgccgtcatattacattgttgctggctttgtttttatggctgtgtctgttccatatcttcgatctgagtatggaaaagaatatgaatacgatgcccccgtgaagttgttggacaagcatttgcatgcaatggcacaatcatctgatgagcagcttgtggtggtgtcacaggtgcttgtggctgatataaacattggttacg

SEQ ID NO: 10249 - DNA, 303 bp, Zea mays
  unsure (1)..(303): unsure at all n locations
cggaccgtggngggaacgcctgaatgatattgccacacaaataggaaatgccattggcaaactacatgatggaggccttgttcatggtgatttgaccacgtcacacatgataattaagaacagtaacaatcaattggttcttattgattttgggctgagtttcacttcgacaattcccgaggacaaagcggtggacctatatgtgctagagagagctttgatttccatgcattcgtcctgtggggatgtgatggagaaaatcctggctgcgtacagaaaggcttcgaagcaatggtgctccac

SEQ ID NO: 10250 - DNA, 305 bp, Zea mays
caagctgaagacgagtttaggtgttcagaagatgcagcagctaccagacttcactgcagaagggcttcacttgtctgagatttctacagagtgcagaacaatgctatatacactgtctagaatatgggcaaacaatgccacagtgagggaggctcttgggattcacaagggaacagttcccctatggttaagatgcaacacggacataccgtatttgaaagatattaagagttcagtgaagtaccatttggatgtgaccaccaaaggatacaaaagtctagtttacagtggtgatcatgacatgg

SEQ ID NO: 10251 - DNA, 302 bp, Zea mays
ctccctcacaatgaaattgctgctcagatctgtcgtcaggctggccttgtgaagacattggagaaaggaaagcatgcagagggtggtgaagatgacaactttgctattgtgtttgctgctatgggagtgaacatggaaacagctcaattcttcaaacgtgattttgaagagaacggttccatggaacgggtcaccctttttctgaatctggctaatgatcccaccattgaacgtattatcacccctcggattgctctaacaacagcagaatatttggcatatgaatgtgggaagcatgtact

SEQ ID NO: 10252 - DNA, 297 bp, Zea mays
tgggttcttccggattgagattcttggtgccttggtctccattcagctcatatggctacttgctggcatactggtatatgaggctattgtaaggctcattaacgagagtggcgatgtgcagggctccctcatgtttgctgtgtcggcgtttggactgtttgtcaacattataatggctgtattgctaggccatgaccacgggcacggccatggacacagccatggacatccacatgaccatggtcatggtgattcagacgatggccattctcaccatgaagaaccagaacagggcca

SEQ ID NO: 10253 - DNA, 293 bp, Zea mays
cccacgcgtccggatgaatgttccttctggttccctaaaggaggtactgggcttgctgagatctctatatgtcatggtgaacatagatgaatccacatcttttctaagatacgggcatttatcacgtgacaatgtagcccttgtgcggaaagaagtcctgaaactgtgcagtgaactcaggccccatgcgcttgctgttgttagttctttcggaatccctgatgccttccttagtccacttgcttttgactggattgaggcaaatgcactgtcaaccgggagccactgatctc

SEQ ID NO: 10254 - DNA, 295 bp, Zea mays
gagaggttcgtcccgagcgatccggcaaccatgaacatcttcaagaagaaggtcgaccccaaagaggctctcaggaccagcaaacgtgaaatggcggtcgccacgcggggagttgaaagagagattggttccctgcaaatggaggagaaaaggctggttgcagagatcaagaagactgccaagactggaaatgaggctgcaaccaaaatattagctcggcaacttgtcaagctgaggcaacaaatcctcaaattgcaaggcacacgggcacagattcgtagagtagctaatcaca

SEQ ID NO: 10255 - DNA, 297 bp, Zea mays
gcggcgccggcgtgctcgtgatctcaacccaaggcgtgcctccgctccggtcacccgtcgctccacgcaaccatgtcgaggaggaagaccagggagcccaaggaggagaacgtcacccttggacccactgtccgtgaaggagagtatgtctttggtgtcgctcacatctttgcatccttcaatgacaccttcattcatatcactgatttgtctgggagggaaactctggttcggatcaccggtggcatgaaggtgaaggctgaccgtgacgagtcgtcaccttacgctgctatgctt

SEQ ID NO: 10256 - DNA, 296 bp, Zea mays
cggacggtgggtgcgccgccacccactacaggtaaggaagaggaggagggcaggatgtcgcaccgtaagttcgagcacccgaggcacggctccctcggcttcctacccaggaagcgctcctcccgccaccgcggcaaggtgaagtcatttcccagggatgaccccaagaagccttgccatctcactgccttccttggctacaaggctggcatgactcacattgtccgtgaggttgagaagccaggatccaaactccataagaaggaaacttgtgaagctgttaccatcattgaaac

SEQ ID NO: 10257 - DNA, 297 bp, Zea mays
cgggctcgtcctcgtcggccgcaaccaggagaagctggccgccgtcgccgccgagatcaaggccaggcaccccaaggtccccgaggtgcggacgttcgtgctcgacttcgccggcgaggggctggccgccggcgttgaggcgctcaaggactccatccggggcctcgacgtcggcgtgctcgtcaacaacgccggcgtgtcctacccgtacgcgcgctacttccacgaggtggacgaggagctgatgcgcaccctcatccgggtcaacgtcgagggcgtcacgcgtgtcacgcacgc

SEQ ID NO: 10258 - DNA, 300 bp, Zea mays
agtcactgcagccaccagatccactttctgttaagaatgctattgagcttcttaaaaccattggcgcactggatgatatggaggagctcacttctcttgggcgacatctctgtactctcccactggacccaaacatcgggaaaatgctgcttatgggatctgtattccagtgcctggatccagtattgacaattgctgctgctctcgcatatcgaaatccatttgtgctcccaatagatagaaaagaagaagctgatgctgtcaaaagatcatttgctggtgactcgtgcagtgatcaca

SEQ ID NO: 10259 - DNA, 293 bp, Zea mays
ccgatccccaattcctccttcggatctcgcattcagcgcagcgaggtgtgaaggaagggggacgcggaggaagatggggctcgcgttcgggaagctcttcagccggctcttcgccaagaaggagatgcggatcctcatggtcggcctcgacgccgccggtaaaaccaccatcctctacaagctcaagctcggcgagatcgtcaccaccatccccaccatcggtttcaatgttgaaactgttgagtacaagaacattagcttcactgtctgggatgtcgggggtcaggacaaga

SEQ ID NO: 10260 - DNA, 290 bp, Zea mays
gcctgatcctggcatgcacagtgttggtgctgtgatgccaccttcatatgagatgggagggatgccaatgagagaagctgccccccaacctgttccaattggggcgctaccactgcacttgctaacgccccaccagatcagcagagacttatgcttggtgagaacctgtatcctcttgttgaacagctggaacgtgagcaggctgccaaggtcactggcatgcttttggagatggatcagacggaggttcttcacctgctggagtcgccagatgctctgaagccaaggtt

SEQ ID NO: 10261 - DNA, 290 bp, Zea mays
attactatggagtgaccctcagcctcagcttggaagaggtccaagtaaacgtggtgttgctctttcctttggcgcagatgtgactaagaagtttttacaggaaaataacctggatcttattgtccggtctcatgaagtaaaggatgaaggccatgaaattgaacatgatggaaagcttataacagtcttctctgcgcctaattactgtgaccagatgggcaacaagggtgcatttattcgcttcacagctccagaaatgaaaccagatattgttactttctcagctgtgc

SEQ ID NO: 10262 - DNA, 291 bp, Zea mays
tgcagtacaagcaggagctaaaatggttgagattggaaactatgattctttttatgagatgggcattgagttctcctctgagcagatactgaagctaacaagggaaacaaggaagatgcttccagacatcaccttatcagtaacagttcctcacacacttagtttgccagatcagatgagactagcagagctactcgaagaggaaggagctgatataatccaaactgagggtgggaaatgttctagcccgacaaaacctggagtgcttggattgattgaaaaggcaacacc

SEQ ID NO: 10263 - DNA, 290 bp, Zea mays
gggtttttgattttagccgccgccgctgctcatctcacatccctcgagaagacgcctgctcctcgccgatcgatacgatggccgtcttctccgacctccacaccgccgacggcctcaagtccctcgaggctcacctcgccggcaaaacctatgtgtctggtgactccattactaaggatgacattaaggtcttcgccgcggtgccgtcgaagcctggcgctgagtttcctaatgccgcccgctggtacgagaccgtctctgcggctgtagcctcaagattccctggtaag

SEQ ID NO: 10264 - DNA, 291 bp, Zea mays
cccacgcgtccgaaacgaccagatcgttctcctctccaagaggagaggccagcttaagcaggccattactgctatggttcagaaagcaatggactacattgatttgacaccagacattgacacacgagtcgagctaatcaaaacactgagcagcgtctctgctggcaaaatttatgttgagatagagagagcaagattgatcaaaaggcttgcaaatatcaaagaggagcagggaaagattgacgaggctgctgatttgatgcaagaagttgctgtcgaaacatttggctc

SEQ ID NO: 10265 - DNA, 293 bp, Zea mays
cctcgcgtcttcttcgacatgaccgtcggcggcgcaccggcgggccggatcgtgatggagctgtacgccaacgaggtgcccaagaccgcggagaacttccgcgcgctgtgcacgggcgagaagggcgtgggcaagtccgggaagccgctccactacaagggctccaccttccaccgcgtcatccccgagttcatgtgccagggcggcgacttcacccgcggcaacggcaccggcggcgagtccatctacggcgagaagttccccgacgagaagttcgtgcgcaacacaccgcc

SEQ ID NO: 10266 - DNA, 294 bp, Zea mays
ctcccgtctcgcacgttccttcccaactccgcagcgtacctctccgcggcgcgatccagatccaggtttttcagcatgggcctggtgaaggaaggcatcgacatggaggagggaacccttgagatcggcatggagtacaggactgtatctggtgttgctgggcctctggtcatattggataaagtaaagggcccaaagtaccaagaaattgtaaacatccgacttggagatggcaccaatcgccgtggtcaagtcctggaagttgatggcgaaaaagctgttgtgcaggtcttt

SEQ ID NO: 10267 - DNA, 290 bp, Zea mays
ctccactcatcttttctcgtttagaacctctaaaatttcccccactcgccagtcgcagcagcacctgtagcagccatggacgccagcggaccggtagcaaggggaagaagggggcggccgggcgcaaggcaggcggccccaggaagaagtcggtgacgcggtccgtcaaggccgggctgcagttccccgtcggccggatcgggcgctacctcaagaagggccggtacgcgcagccgtgaggcactggcgcccccgtctacctcgcggccgtcctggagtacctcgccgcc

SEQ ID NO: 10268 - DNA, 287 bp, Zea mays
atgacaagcagctggatgctgatatccatcgcaagtacatctatggtggccatgttgctgactacatgaggaacctcgctgaagaggagccagagaagtaccagtctcacttcagtgagtacattaagaagggaattgaggctgatgacatggaagctctgtacaagaaggtccatgctgccatccgtgctgatccttctgtggtcaagtcaaccaagcagccaccaaaggagcacaagaggtacaaccccaagaaactgacgtacgagcagaggaaggccagtctc

SEQ ID NO: 10269 - DNA, 289 bp, Zea mays
cggacgcgtgggcaaatccccctgtcccgctaggattcccccgaaaccctcccccaaaaccccagagcggagaagagcgcaagatgttcggcttcgggcaccaacgccaccacggccagaacccgccggcgcacggcggcgtgcaccagcccaccttcaagatcttctgcaaggccgacgaggggtactgcctcaccgtccgcgacggcaacgtggtgctggcccccgccaacccgcgcgacgagcaccagcactggtacaaggacatgcgcttcagcacccaggtcaa

SEQ ID NO: 10270 - DNA, 287 bp, Zea mays
tgataatgtcaaggccaagatccaggacaaggagggcatccctccggaccagcagcggctcatttttgccggcaagcagctcgaggacgggcgcacgctggccgactacaacattcagaaggagagcaccctccacttggtgctgcgtctcagaggtggcatgcagatcttcgtgaagacacttactggcaagacgatcacccttgaggtggagtcctcagacaccattgacaacgtcaaggccaagatccaggacaaggagggcattccaccggaccagcagcggc

SEQ ID NO: 10271 - DNA, 285 bp, Zea mays
  unsure (1)..(285): unsure at all n locations
caccaccaccaccacgctggctgctgccccggcgccgttccccgggccgcagccgatggccgtgtacagctccatctggaacgcggacgactgggcgacgcagggcgggcgcgtgaagacggactggtcgcacgcgccggtcgaggccacgttccaggaggtgcgcgtggaacggtgcgcctgggcgggcaacgcacggacggcgacccgcggaggcgcgccggtgcagcgagtcctcgtggggcaaggagggccgctactggtggaaggagaangagatgtcgg

SEQ ID NO: 10272 - DNA, 291 bp, Zea mays
ggaaagaatgccttacattttgctgctcgacagggacatactggaatcgtcaaagcgctacttgagaaggatcctcagttagcaagaagaaatgacaagaaaggtcaaacagctcttcatatggccgtaaagggaacaagctgtgatgttcttagagccctagtggatgctgatccagcaattgtaatgctgccagataaaaatggcaacacggctttgcatgttgcaacaagaaaaaagagagcagagatagttagtgttcttttgcggctaccagatactcatgtcaat

SEQ ID NO: 10273 - DNA, 278 bp, Zea mays
gactagttctagatcgcgagccggatccagcaaatggagcggctcacgcagcaccggccgtcggtacgaggggagcagccatggtgacgatctggagctgccaatatttgatctgggcacaattgcagccgctacggatggtttctccatcaacaacaagcttggcgagggtggctttggaccagtatacaagggtaaactcgaggatggaatggagatcgcagtgaaaacactctcgaagacatccgcacaaggtcttgacgagttcaagaacgagg

SEQ ID NO: 10274 - DNA, 282 bp, Zea mays
cccacgcgtccgagcgagtgctcgcacgccgtaccgcggtaccgcgcccaggcgagggcaaggacttcctgccgctggaaggaggccccggtaagaagctccggaaggtgcagcagcctgaagagcccgaaaacacagccacagtcgtctacattgggcatatcccccatggtttctacgaggacgagatgaaagggttctttaagcagtttggggatattaagaggcttaggatcgctcgtaaccgcaagacaggaaagtccaagcactatggattcattg

SEQ ID NO: 10275 - DNA, 280 bp, Zea mays
ctagtctcctcttcgcacgagcgcaacaccatccacccaccagttcgaagcggaggcgaccggcaacctgcggcggagatgtcaggcaggggcaagggcggcaaggggctcgggaagggcggcgcgaagatcaccggaaggtgctgcgcgacaacatccaggggatcacgaagccggcgatccggaggctggcgaggaggggtggcgtgaacgcatctccgggctgatctacgaggagacccgcggcgtgctcaagatctttctcgagaatgtcatccgc

SEQ ID NO: 10276 - DNA, 281 bp, Zea mays
gaaaggatgaggggagtgccagttgaggttggtggggagcctggatatgcagtccgtaactatcgttttgaacaacctgttgagacacactgggagggggtgtccacacttgctgatctgtttgagcaatcttgcaaagagtatgtatacatgccactccttggcacaaggaagctcatttcaagggaaactgaagcagcacctggtgggagatcgtttgagaagctgcatctgggcgagtatgagtggaagtgttatgcagagtgcttcaagagcgtttg

SEQ ID NO: 10277 - DNA, 298 bp, Zea mays
cccagctcgcgcaggcaggcgacacagcgacgctaaaaaccctagagcgaggaggcgtgccaggccagcggtttgcgatgacggcaccggcggacaaggggaagaaggccaagaccgatgccgacggcggcgaggagaacgagcaaatcgacggcgcccttgtcttctccatcgagaagctccaggagattcaggacgagctcgagaaggttaatgaggaagcaagtgacaaggttatggaggtggagcagaaatacagtgagattcgcagacctgtctatctcaagaggggtgacat

SEQ ID NO: 10278 - DNA, 293 bp, Zea mays
attgactttctacttgagcgctttgaaaatggagatctttgtggtgttgtggaactgcaacaactgctggatattttggagcttacacaccaatcaatatcaagatttcttgaattggattcttactctcttatgcttagcgagacgcaagaaaatctgtcattggtttcttattcaagtcgcatctcttctcagatatggagtgagatgcagacagatttcttgccgaatttcatcttatgtaataccacacagcggtttgtccggtccgcaaaaggaactcaccactcttc

SEQ ID NO: 10279 - DNA, 291 bp, Zea mays
aacagatctcctcgtcgtcgcctcgctgtctcctccgccgttgcctgcgatcccgatcatggagggcgacagtaccaacctcgacgcggctatagagtcgctcctgaacgtggagaagcagatgaggctggcaggcgatgtcgccggcacgcggaaggccgtcatcgacatcgtcgagctctgctacaagaccggcgcgtggaagacgctaaacgaccagatcgttctcctctccaagaggagaggccagcttaagcaggccattactgctatggttcagaaagcaatgga

SEQ ID NO: 10280 - DNA, 287 bp, Zea mays
caaccacttactctcgtgcgctctccgtgggagcgaggactcgcggccggcgcacggcaggttctcctagatctccggcatcatcagtaacaaatggctgacggtgaggacattcagccccttgtttgtgacaatggaactggcatggtcaaggctggttttgctggtgacgatgcgccaagggctgttttcccaagcattgtcggacgcccccgtcacactggtgtgatggttggcatggggcagaaggatgcgtatgttggtgacgaggcccagtccaagagggg

SEQ ID NO: 10281 - DNA, 285 bp, Zea mays
cccacccccagtcgcgctctgccatcgagatactgcagcagttcgactgggaggtgcccgactgggtgatcgtgccgggaggcaatctggggaacatatacgccttctacaaggggttcgagatgtgccgtgtcctcgggctcgtcgaccgcgtgccgcggctcgtctgcgcgcaggcggccaacgcgaacccgctctacggctactacaagtcaggctggaccgagttccagccgcaagtggccaggccgacgttcgcgtcagcatccagatcggcgacccggt

SEQ ID NO: 10282 - DNA, 287 bp, Zea mays
cacaaattgaagtgaagtttgatattgatgcaaatgggatactctcagttgctgccattgataagggcactggaaagaaacaggacatcaccatcactggtgctagtacgttacctaaggatgaggttgagagaatggtagaagaagccgataagtttgccaaggaggacaaagagaagagagatgcaattgacacaaaaaatcaggccgattctgtggtctaccagactgagaagcaactgaaggagcttggcgataaagtccccgctcccgtgaaagagaaggtg

SEQ ID NO: 10283 - DNA, 285 bp, Zea mays
ggtgcgtcaacctccgatcatctacggtgacgtgagccgccccaaccccatgaccgttttctggtcgaagacggcgcagagcatgacgtctcgcccaatgaaggggatgctgactggcccagtcacaatcctcaactggtccttcgtccggaatgaccagccgaggtttgagacttgctaccagatcgctcttgcgatcaagaaggaagtcgaggatctcgaggctggtggtattcaggttatccaaatcgacgaggctgcactgagagaagggctgccgctccg

SEQ ID NO: 10284 - DNA, 286 bp, Zea mays
ggcaccccgaggatgggcccgacgttcggcgccatgatgatctccggccagaaggcggcgcacctggcgctgaaggcacagggcaggcccaacgccgtggacgggaccatcccagaggtgtcgccggcgctgcgcgaggagttcgtgattgcgtccaaggacgacgaggtcgtggacgcctgagcgagcatccacgcgccacatgcaagcagcgtcttatctgggccggcgccatcacggggtttcttcttttaatctgggactttgttgctgttggacgaatgaa

SEQ ID NO: 10285 - DNA, 288 bp, Zea mays
cccacgcgtccggtgctcgacaagctcaaggctgagcgtgagaggggtatcaccattgatattgctctgtggaagtttgagaccaccaagtattactgcaccgtcattgatgcccctggacaccgtgacttcatcaagaacatgatcactggtacctcccaggctgactgtgctgtccttatcattgactccaccactggtggttttgaggctggtatctccaaggatggccagacccgtgagcatgctctccttgcgttcactcttggagtgaagcagatgatttgc

SEQ ID NO: 10286 - DNA, 295 bp, Zea mays
ccgagatttaaaaccaagaaacattcttctggtgaattctgctgccaaccacttgaaggttggagacttcggccttagcaagatcatcaaagctcagcatgcgaatgatgtatacaagatgactggagagacaggaagctatcggtacatggcccctgaagttttcaagcaccggaaatatgacaagaaagttgatatcttctcttttgccatgattctatatgagatgctggaaggtgattcacccttctccaactacgaaccttatgaggctgctaagtacgtggcagatggg

SEQ ID NO: 10287 - DNA, 294 bp, Zea mays
cggaccgtggtctgacaagggcaggttctttgcctttggtcgtgtcttctcagggaaggttgctactggtatgaaagttctgatcatgggtcccaactatgtccctggccagaagaaggacctgtatgtcaagagtgttcagcgtactgatatctggatgggaaagaaacaagagtcagttgaggatgttccttgtggtaacactgttgctatggttggtctggatcagttcatcacgaagaacgctacactcactaatgagaaggaggctgatgcatgcccaatcagggcaat

SEQ ID NO: 10288 - DNA, 284 bp, Zea mays
tcttggtcggttgtagtatgtggcaatagaagtccattgatgagaggttatctgcccttggcaattgcatagcctgcaatgaccatgttgcacttacgcaccctgaccttgacaaggagactgaggagttcattgcagatgtgcttggggtcgaggtgtttaggcagactattgctggaaatatccttgtggggagttactgcgccttctctaacaggggtggtttggttcatccccatacatccgttgaagaccttgacgagctctccacgctcctccaagtt

SEQ ID NO: 10289 - DNA, 285 bp, Zea mays
aattcgatttggttttcaataaagagtttgagctgtcacacacatcgaaaactaccagtgtatttttctctggttacaaggttgagcagccaattgagggagatgaaatggatcttgattctgaggatgaagaggaggagctaaacattccagtaatcaaggaaaatggcaaagctgatgggaaggaggagcagaaaaatcaagagaaggcagtagctgctacagcttcaaaatcaagtcttggccttgaaaagaaaagcaaggatgactctgatgattctgatg

SEQ ID NO: 10290 - DNA, 282 bp, Zea mays
tgttgttgaagtcaaaattatcggaaagcttcaggatggcgcggtgtttacaaagaaggggcatgacgaagagccatttaaattcaagaccgatgaagaggaagttattgccggtcttgatcgtgctgtgttgaacatgaagaagggcgaggttgctcttgtcacaattcctcctgaatatgcatttggttcaactgagtcaaagcaggatcttgctgttgttccacctaacagcacagtaatatatgaagttgagcttatttcatttgtgaaggacaagga

SEQ ID NO: 10291 - DNA, 281 bp, Zea mays
cccacgcgtccgcccacgcgtccgggcggtggaggcgcccaaggggttcgtggccccgcagctggacgccagcacgccgtccccgatcttcggcggcacacgggcgggctgctccgcaaggcgcaggtggaggagttctacgtcatcacgtggacgtcccccaaggagcaggtgttcgagatgcccaccggcggcgccggcatcatgcgggatggccccaacctcttgaagctggcgcgcaaggatcagtgcctggcgctcggcaccaggttgcgctccaa

SEQ ID NO: 10292 - DNA, 279 bp, Zea mays
cggacgcgtggcgtgacgcgtgggctcaagcagagcagtgctagctggagatgatgatattccaccttccttccccagcaaaggctcaaaagtatcgtgtggagaacttgtacgagggaccccttgatgatgtgtatgcaactgctatcagaaactgtgatccagagggtcctcttatgctgtatgtttcaaagatgattcctgcatctgacaagggcaggttctttgccttcggtcgtgtcttctcagggaaggttgctactggtatgaaggttcgga

SEQ ID NO: 10293 - DNA, 233 bp, Zea mays
ggaatgagctgcagggagctgcaatcctgtgtgcgcaccggaagacggtgccgagagaagatggcccgctccaacttccgccttgtgatacatgttgctaggaaatatgaaggatgtggccttgacattcaggacctggttcaggatggatgctgtgggttgatgaaaacctttgagaagttcaacccgagcaagggatgcagattcccgacctacgcgtactggtggatacg

SEQ ID NO: 10294 - DNA, 293 bp, Zea mays
ctcaagcgtccgcttgttggtactccagccaagcgccatgcagtaaccaatccccagaatactttctttggaacaaagaggatgattgggcgacgctttgatgatccacagacgcagatagagatgtagatggtgccatacgaaatcgttaatgctccaaatggtgatgcttgggttgaaacaacagatggcaagcagtactcaccgagtcaggtcggtgcatttgtgctgaccacgatgaaggcgacagctgaatcttaccttggcaaatctgtctcaaatgcagtgactac

SEQ ID NO: 10295 - DNA, 289 bp, Zea mays
ttccttcaccatgtttatatgtatggaggttgccgacattgctcttatacatgtatatgtgctactggagataatagtgctgttctacattatggacatgcggcactccaaatgaccggactttgaatgatggagacatggcactaatggatatgggagctgaataccatttctatggatctgatatcacatgctcataccctataaatgggaaattcaacagaagtcagacaataatatacaatgctgtgcttaaggctcataatgctgttatatcagacatgcggcc

SEQ ID NO: 10296 - DNA, 283 bp, Zea mays
aggtgaacaagatggacaggtgcttccttgagcttcaggttgacggtgaagaagcttatcagactttctcccgtgtcattgagaatgccaatgtcatcatggcaacatatgaagataagctccttggtgatgtccaagtatacccagagaaggggacagttgctttttctgctggtctgcacggatgggccttcaccctcactaacttcgcaaagatgtatgcatctaagtttggagttgatgcaactaagatgatggagatgccatggggtgagaacttctt

SEQ ID NO: 10297 - DNA, 279 bp, Zea mays
gctgagatcagagatcctcagaagggtgtccgtgtttggcttggtactttcaatagtcctgaggaagctgcaagagcttatgatgctgaagcgcgcaggattcgtggcaagaaggccaaggttaactttcctgatgcaccagaagttggtcagaagcgccgttctggctcagcttccgctaaagcatccaagtcaagttttggacagaagcctattgtcaaagtaactatgaacagccttgccaacacaaatgcatccttcttccaatctgttagctac

SEQ ID NO: 10298 - DNA, 277 bp, Zea mays
cccacgcgtccgcagctcccatatccgctcccctacctctccagcatctcccgtctccgtcgtctcgtctctgctcctcacctcgccgccagccatgggcaagatcaagatcggaatcaacggtttcggaaggatcggcaggctcgtggccagggtcgccctgcagagcgaggatgtcgagctcgtcgccgtcaacgaccccttcatcaccacggattacatgacctacatgttcaagtacgacaccgtgcacggccaatggtagcacagcgacatc

SEQ ID NO: 10299 - DNA, 277 bp, Zea mays
ctcagctgggccaccagctttgaccgccgcctccctacccctccgctactgctcctccccaccccactcccccgcagagcggcggcggcggcggcgacggtcgtaccccacatcggcgagcggcggcggcaccgcggaggcaaaggcaagatgttcgggcgcgcgccgaagaagagcgacaacaccaagtactacgagatcctcggggtgcccaagtcggcgtcccaggacgatctcaagaaggcctaccgcaacgctgctatcaagaaccaccccg

SEQ ID NO: 10300 - DNA, 277 bp, Zea mays
tgtgatttctatgtcagcggcgactggatttcctaggtttgatctccagcttctgggaatgggacctgatggccacattgcgtctctcttccctggccaccctcttgttaacgagaaagagaggtgggtgacatacattaaggattctccaaagccacctccagagagaatcacattcacgtttccagtaatcaactcatccgcatacgttgcgatggtggtgactggagctggaaaggccgcagcggtgcagaaggcgctctcagacaagcaaacc

SEQ ID NO: 10301 - DNA, 301 bp, Zea mays
cacccgactcgtcagacgtcagccagcagttcgaaaccaaggattgatccaggagcttccggaaggcgaggcgcgcgcgcacgtcgaggtgctggtgccggtgccgcccatggatcgggctcgcggatccgcgttcctgctcggcgtcctgctcgcaggatccttgttcgcgttttcagttgccaaagaggagaccaagaagctcgggaccgtgatcggtatcgatctcggtaccacctactcctgtgtcggtgtgtacaagaacggtcatgtcgagatcatcgccaatgaccagggtaac

SEQ ID NO: 10302 - DNA, 299 bp, Zea mays
cgccggcgtgcttgtgatctcaacccaagtcgtgcctccgctccggtcacccgtcgctccacgcaaccatgtcgaggaggaagaccagggagcccaaggaggagaacgtcacccttggacccactgtccgtgaaggagagtatgtctttggtgttgctcacatctttgcatccttcaatgacaccttcattcatatcactgatttgtctgggagggaaactctggttcggatcaccggtggcatgaaggtgaaggctgaccgtgacgagtcgtcaccttacgctgctatgcttgctgct

SEQ ID NO: 10303 - DNA, 298 bp, Zea mays
aaaagatacccatggatatgttggtgctgatcttgctgccctttgcactgaggctgctcttcagtgcattcgtgagaagatggacatcatagatcttgaggatgagacaatcgatgcagagatattgaactcaatggctgttacaaatgaccatttcaagactgcgcttggaacaagcaacccatctgctcttcgtgaaactgttgtcgaagtcccaaatgtctcttgggaggatattggtgggctggagaatgtcaagagggagctccaggagactgttcaatatcctgtggagcat

SEQ ID NO: 10304 - DNA, 300 bp, Zea mays
gaagaacgtgctgtccctgtggtttgacgggctcaagctgctcgtcgtcaccgacggggacaagggatgcaggtacttcaccaaggacttcaagggcagcgtgcccggcttcaaggtcgacaccgtcgacaccaccggcgccggcgacgccttcgtcggctccctcctcgtcaacgtcgccaaggacgactccatcttccacaacgaggagaagctccgcgaggccctcaagttctccaacgcctgcgtggccatctgcaccaccaagaagggcgccatcccggcgctgcccacggtcgc

SEQ ID NO: 10305 - DNA, 301 bp, Zea mays
cgatgcatgtgatgatcaagaaatgattacagatgaggaaaaatacatagagcagaacgcttactatcaaagattgaagcttctttggtacttgccgatccatgtgatgatcaagaaatgattacagatgaggaaaagtctgttttccgtaggattggtttacggcttaaggcatatttgccacttggagttcgtggtgtttttgatggtgtaattgaaaatatgcacttgcattggaagcacagggaagttgttaaactaatttcaaagcagaagaccttgtcattcgttgaagagacgg

SEQ ID NO: 10306 - DNA, 304 bp, Zea mays
ctcacgcgtccgcccaaacgtccgcccacgcgtccgcactatcataaagatcgctcgagacgaggacttaaaggagcaaatcggtaagaatatatattttgatctggtggaccatgaaaaagttcacagtttccgcattcagaagcagttgccttttacttcattcaaggaggaagttgcaaaggaatttggcatccctgtacagtttcagcgcttctggttgtgggctaagaggcagaaccatacataccggcccaatcgtccattgacaccccatgaggaagcacaatcagtcgggcagctt

SEQ ID NO: 10307 - DNA, 301 bp, Zea mays
atcgaggcagtcgtagtaataagccaacaaacaaaccggccggaacgccatgctggaggagtacaaaccgtgtgcggccatggtggtgacgcagtgcatctacgccgctctagcgctcttgtccaaggcggcgttcaccggcggcatgagccccctggtgttcgtcgtctacaggcaggccgtcgccaccattgtactcgtccccgtcgtcatcgcggccaacaggaagaagatgaaggagatgacgacgggccttggactgacgggcttctcgctggtcttcgtcgcctcccttgtcggg

SEQ ID NO: 10308 - DNA, 299 bp, Zea mays
aggctacagcctggacacaagtactgcctcctcggcgagctctctaaggaggtcgggtggaactaccatgacaccatcagggaacttgaggagaagaggaaggagaaggccaaggttgcctacgagaggaagaagcaattggccaagctgcgtgtcaaggccgagaaggcagccgaggagaagttggggtctcagttggagattcttgcccctatcaagtactgaggagctgtgctttgtcatcagttttggggaacatctagtctttgttttaagtgttcggtaacagtttgtgacag

SEQ ID NO: 10309 - DNA, 297 bp, Zea mays
cgccgggacccccggcgtcgcggccgacgtctcccacatcaactcccccgccctggtgaaggggttcatgggggacgaccagctcggggacgcgctcgagggctccgacgtcgtcatcatccccgccggggtgcccaggaagcccggcatgactagggacgacctcttcaacatcaacgccggcatcgttaaggggctctgcactgccatcgccaagcactgccccaacgctcttgtcaatatgatcagcaaccctgttaactccactgtcccgattgcggcggaggttttcaagaa

SEQ ID NO: 10310 - DNA, 294 bp, Zea mays
ccggcctcgttcacgacggacgccgaagccgcaaccgcaaagctgccggtggcggtggcccaacagacacggagaagaggagcaccattgacgagctcctgtcgctgcaggaaactgatgctggctactacaccgacactgtcatcaaaggcattgtctcgatagtgctcagtgcgggcacagacacgacggcgctgacaatggagtgggcaatggcgcactgctgacgcaccgggacgcaatgcagaaggcgagagcgagatagacgccaacgtcggcacatcccggctggta

SEQ ID NO: 10311 - DNA, 294 bp, Zea mays
atttctcaaacatgaggaagaatttgggtcctggagtggatggttgggcaatttcgttgaaggccatgatgagcatagtggttgtactgggtcttgtcatcaccggtatctattggggagtgaacaagtttgttattgataactcatctgtgcccgtggttgagcggaaaaagaaggacaagccaaagctcagcatgggtgagagcatgaaggttctgttgtcatctcggtatgtgagggatcttgctacattggttgttgcttatggaataagcattaaccttgtcgaggtga

SEQ ID NO: 10312 - DNA, 299 bp, Zea mays
cgcttctcttcggcgagaagccggtcaccgtctttggcatcaggaaccccgaggagatcccgtggggtgaggctggtgctgagtatgtcgtggagtccaccggtgtcttcactgacaaggacaaagctgctgcacatctgaagggtggtgccaagaaggttgttatctctgccccaagcaaagatgcacccatgtttgttgttggtgtcaatgaggacaagtacacctccgatgttaacattgtttccaatgctagctgcaccacaaactgccttgctccccttgctaaggtcattcat

SEQ ID NO: 10313 - DNA, 293 bp, Zea mays
tctagccactacaagggcgatcacacgtttgtcccagtcactcggaagggatactggcagttcaacatgggtgatgtcctggttgatggaaagtccactgggttttgtgccggtggctgtgcagccatcgcagattctggaacttccttgcttgctggccccacagccataattactgaaatcaatgaaaagattggtgctgctggtgtagtcagccaggagtgcaagactgttgtttctcaatatggacagcagatcctagatcttttgctagctgagacacaaccaacgaa

SEQ ID NO: 10314 - DNA, 293 bp, Zea mays
tgtgaaccgtactgagtatcagctgattgatatttctgaggatggatttgtgagccttcttacttcagatggcaacactaaggatgatcttagactcccaactgatgagactcttgtggcccagattaaggaagggttcgaaagcgggaaggatcttgttgtgactgtccagtctgcgatgagggaggagcagatctgcgcgttgaaggatgttggccccaagtaacttccttggctttggagacggaaccctactgtatctcaacttaaatcggaaaagaagtgtatcacca

SEQ ID NO: 10315 - DNA, 290 bp, Zea mays
atttgagaactcaaacaaggagtctaaattcatgtctaccaacacagctatgacaattatcaccaagctaatggaagttgcaaagagcttggatctgaaggttataacaaaaactggtgggttgttgaatatggaagctgccaaatcaggaataaaaggtgtgatgtctataaatgctgagatatttcaaatcacaccaaattatcatctcgtggagatcaagaaaatcaatggtgacatccttgagtatcataactttatgaaccaaagcatgagaccggcactagaag

SEQ ID NO: 10316 - DNA, 289 bp, Zea mays
gcggaaagtacaaggatgagctcatcaagaatgctgcctacattggcacccctggcaagggtatccttgctgctgatgagtccactggcaccattggcaagcgcctttccagcatcaatgtcgagaacgttgaggagaaccgccgtgccctccgtgagctcctattctgctgccctggtgctctccagtacatcagcggtgtgatcctcttcgaggagaccctgtaccagaagaccaaggatggcaagccttttgttgatgtcctcaaggagggaggcgtcctccctgg

SEQ ID NO: 10317 - DNA, 286 bp, Zea mays
cccacgcgtccggcttatgatgctcatggcttacctctcctacatgctggccgagctgctagatctgagtggcattcttaccgtattcttctgcggcatcgtgatgtcgcattacacctggcacaatgtgacagagagctcaagagtcacaaccaagcatgcctttgctactttgtccttcatcgctgagacttttctcttcctgtatgttgggatggatgccctcgacatcgagaagtgggagtttgccagtgacagccccggtaaatccatcggcataagctcg

SEQ ID NO: 10318 - DNA, 287 bp, Zea mays
gcgagcaattgcctttcaaggaacacttcctcaaaagtgtatccagcaatgtatattgataatgtcactgaacttgcatttgacgatgtcacacctgaagatcctgattttccattcatacaaggcctagcagaagctggattgatttctagcaagctttcaagatctgatatgaatatcccagaagatgttcatgacaatcatatcttgttttcccctgagagtcctttgtcacgtcaagaccttgtgagttggaaaatggccctggataagagacaactgcctga

SEQ ID NO: 10319 - DNA, 288 bp, Zea mays
cagaagttgcggttggcctcgtcctcctcttctccgtcgcggctcagatctctgcgtgcgtcgatggcgtcgttctcggaggctccccccgggaacccgaaagccggcgagaagatctttaagaccaagtgcgcgcagtgccacacggtcgacaagggcgccggccacaagcaaggtccaaacttgaacggtctttttgggagacagtcgggtaccactgcaggctactcctactctgcgggaaacaaaaacaaggctgtagtctgggaagaagacactttgtatgag

SEQ ID NO: 10320 - DNA, 305 bp, Zea mays
gattctagtaaagggttgggttttactgaggttgcaaaagcccgtgcgagtacaaacaaagttgtttgttgccatttctcattggatgggaaacttcttgccaccggagggcatgataaaaaggtcgttttatggtttacagatgtgctaaaacgtaaatccgcattagaagagcactcttccctaattacagatgttcgatttagccctggcatgacccgccttgccacatcttcctttgacaaaaccgtgcgggtttgggacgctgacaatccagattattcgctccgcacttttacaggtca

SEQ ID NO: 10321 - DNA, 308 bp, Zea mays
cccaaatccagccgtcggcacctccgcttcaagatgcagatctttgtgaaaaccctgactggcaagactatcaccctcgaggtggagtcgtctgacaccattgacaacgttaaggccaagatccaggacaaggagggcatccccccagaccagcagcggctcatcttcgctggcaaacagcttgaggacgggcgcacgcttgctgactacaacatccagaaggagagcaccctccaccttgtgctccgcctcaggggaggcatgcagatcttcgtgaagaccctgaccggcaagactatcaccctcga

SEQ ID NO: 10322 - DNA, 306 bp, Zea mays
ctggaacacatgtattttctgctttcggatttgttcataagatcgctacctttgagaaagcatctggttatcaggctttgattcagttttctcatgctgaaactgcaacatctgcaaaagctgcactggatggtagatgcattcctagctatttgctaccagaactggatgtggcctgcactttgagaataacctattcagcacacagtgttctcaacgtcaagtatcagagccacaggagtagggacttcactaatccttaccttccttttctggactctgctaaagatggctctggaccggatg

SEQ ID NO: 10323 - DNA, 304 bp, Zea mays
atgacaggggctgtcgattttgagaaaaccctggggtattggcaacaggacaagtggaatggttccttctctgttaagtggcacattgtcaaggacgtgcctaacaacattctcaaacacatcatcctagagaacaacgagaacaagcctgtcacgaacagccgtgacactcaagagatacacctagaacaaggccttcagatgctcaagatatttagggagcatgtcagcaagacgtccatcttggatgacttcgccttctatgagagtcgccagaagctgatgcaggataagaggtcgaaac

SEQ ID NO: 10324 - DNA, 303 bp, Zea mays
gctccaagtagcaagttccaactcgagtagattcacttcgccactccgttgccctctcctccgccgcccgatcctttccccgtctgagatggcatctccggcatcggcgtcgcttaaggaagccgtgggcagcctcgaccgcgacggctttgttggtctcctctccaacctcatcggcgagaccgcacacctgcagaacgacccgccgacctacaggcctcaggaggagcgcgtggcgcacacgtagtcgacgtgctccgcccggtgtccgcggacacgggggcggccccctccttgtgcgga

SEQ ID NO: 10325 - DNA, 306 bp, Zea mays
cccacgcgtccggtgacattcctgaagcgtccgccatggacttcgtcggaggctatgcacttgctttggacatgacagcaaggggccttcaatctgttgctaagtctgcaggccttccatggactttggctaaagggcaagacaccttcactccaattagtgcagtagttccaaaatcatctgtcactaatcccgacgatctagagctgtggctaaaggtagatgatgaactaaggcagaaaggatcgacaagtgacatgatattcaagatcccttttctgatcagctatatcagctccatcatga

SEQ ID NO: 10326 - DNA, 304 bp, Zea mays
tgaaggataaattaatagcgctcaacgagactgtggaggaattgcccttaaaccttgaagttggtcctattagcatgaccaagtggcaattatttttacagattgagcagtacttccaggttcatcgtagttatggaagtatgcttgaaggcgaggctgatgaactcaagagggtttttcttgaaggaaatccttatcttcttggattgactatggtcgtttctctattacactccctgtttgattttctggccttcaaaaatgatatccagttctggaacaagaacaagtccatggaaggtct

SEQ ID NO: 10327 - DNA, 300 bp, Zea mays
cccacgcgtccgctgcgtttagtgacagatacgaggaatttgagaagttgaacactgaggttcttggtgtttccattgacagtgtgttctcccaccttgcatgggtgcagacagacaggaagtcgggtgggctcggcgatcttaaatacccacttgtttctgatgtgaccaaatcaatttcaaaggcctttggtgttctgatccctgaccagggtattgctttgagaggactgttcatcattgacaaggagggagtgattcagcactctaccattaacaaccttgccattggtcgtagtg

SEQ ID NO: 10328 - DNA, 302 bp, Zea mays
tgataatgaaggataggcacacatctcagccacggggttttggcttcattacatactctgaccctgctgttgttgataaagtgatagaggacaatcatgttatcaatggaaagcaagttgaaattaagagaaccataccaaaaggttcggtgcaatctagctctaaggatttcaagactaaaaagatatttgttggtgggcttccgtcaacactaacagaagacgaattcaagagtttctttgcaagatatgggactgtggtggaccaccagattatgtttgatcatgaaaccaaacgttcc

SEQ ID NO: 10329 - DNA, 303 bp, Zea mays
ctcatcttttctcgtttagaacctctaaaatttcccccactcgccagtcgcagcagcacctgtagcagccatggacgccagcggaccggtagcaaggggaagaagggggcggccgggcgcaaggcaggcggccccaggaagaagtcggtgacgcggtccgtcaaggccgggctgcagttccccgtcggccggatcgggcgctacctcaagaagggccggtacgcgcagacgtgggcactggcgcccccgtctacctcgccgccgttctggagtacctcgccgccgaggttctggagttggcag

SEQ ID NO: 10330 - DNA, 304 bp, Zea mays
tccgtctccaaaagagagcccaatcctaaattcccaatccctcaaaggaaggaggattcttcagcgtctcgcttgccggccccgaatcgcagtcgccgcccggatccgaggaaacaagtcgtcgtcttgctccaccgtccgcccgccgccatgagcttcatcttcggcaagaagaagactcctgctgagctgctgcgggagaataagcggatgctggacaagtccatccgggagattgagagggagaggcagggcctgcaggcccaggagaagaagctcatcaacgagatcaagaaggtggcca

SEQ ID NO: 10331 - DNA, 303 bp, Zea mays
acataaacaaaaaccagtcctttgttcttcttcccccggcacgcccagcgccagtcaccaaccttccactccctccctccgtcgccatggcgcgcaagaagatccgggagtacgactccaagcgcctcctcagggagcacctcaagcgcctcgccggcatcgacctcaccatcctctccgcccagatcacgcaatcaacggacttcgcggagcttgtgagccagcagccatggctgtcaaccatgaagctagtggtgaagcctgatatgctgttcgggaagcgtgggaagagcggcctcgtgg

SEQ ID NO: 10332 - DNA, 299 bp, Zea mays
gcaagcacaccttcagctcgccgggtgacttgaattatccggccatctccgcggtcttcgcggacagccatctgctgcgctgacggtgcgtcgcaccgtgacgaacgtcggcccgccgtcttcgacttaccatgtcaaggttacagagttcaaaggcgcagacattgtcgtcgaaccaagcaccctgcacttcacaagttcgaaccagaagctaacctacaaggtgacgatgacaaccaaggctgcccagaagacaccggagttcggagcgctgtcttggagcgacggcgtccacatcg

SEQ ID NO: 10333 - DNA, 292 bp, Zea mays
gaccaatgatctagctggagatgggacaaccacctctgtggttcttgctcaggggctgatcgctgagggtgttaaggttgtggcagctggtgctaatcctgttcagattactcgtggtatcgagaaaacagcgaaagcactagttgaagaactacggaagttgtctaaggaggtcgaagatagtgagcttgcagatgttgctgctgttagtgcgggcaacaactacgaaattggtaatatgatagcagacgccatgagcaaggttggtcggaagggtgtggtaacctcgaag

SEQ ID NO: 10334 - DNA, 299 bp, Zea mays
cccacgcgtccgggcaattattcatgaaaaccagacatacactaaatcaggcgaagattcaatagcaattgttcttaaggcaggaatggatgtcaactgtggttctttcctagttcggcatactaagtcagcaattgagaagggaaaaattcaagaagaagatatcgaccgtgccctttttaatctattctcggttcagttgcgtcttggaatatttgataagcccagcaacaaccaatggttctctcaactagggcccaacagtgtgtgcacgaaagagcatagagagcttgcagcag

SEQ ID NO: 10335 - DNA, 295 bp, Zea mays
tatgcttcgtggcgccactctccgatggctacaataagtttgtgtttacttgctcaggcatacagtcatgcgagctgtgttattcagtcgctgggagaagaagacataaatgtgaaatttttggttcagttagataaattgatccgtctcttagagactccagtatttgcttacttgcgtttgcagcttcttgagcctggaaagcacacctggcttctgaaaactctttatggtctcctgatgctgttgcctcagcaaagtgcggccttcaagatcttgaggactcgactgaaaa

SEQ ID NO: 10336 - DNA, 296 bp, Zea mays
cggacgcgtggttattggaaggctttccttcctgtggtctacaacatatttaatcttcatggtgcaacactaatggcaagggagaatgaccgcttctacaatcaaattgcttttcatcttttgcggcttgctgtttttcgaaatgattctattaggaaaagagctgttgttgggttgcagattctcgttaggaacgcattcaactatttcaagaacactacaaggttgagagtcatgttgacaattactttgtcagagttgttgtctgatgtgcaagtgactcaaatgaaatccga

SEQ ID NO: 10337 - DNA, 297 bp, Zea mays
gagccccccgccgccgctgcgccctcctctcggtcctgccgtccgtcgaggtaaaaggacagcatggtgagggtcagcgtgctcaatgatgctctcaagtccatgtacaatgctgaaaagatagggaaacgtcaggtcatgatcaggccgtcatccaaggtgatcatcaagttcctgacggtcatgcagcgccatggctacattggcgagttcgagtacgtggatgaccacagagctgggaagatcgtggtggagctgaatggaagactgaataaatgtggtgttattagcccacgt

SEQ ID NO: 10338 - DNA, 297 bp, Zea mays
aggagctatcgaacttgtacaaagctgatttgctactctgtgaatctggaggagataacttggcagctaacttcagcagagaattagcagactacataatctacattatcgatgtctctggtggggacaagataccaagaaaaggtggccctgggataacccaggccgatctgttggtaataaacaagacagacctagcacctgctgttggagctgatctgtctgtaatggagcgagacgcacttcgcatgcgcgaaggagggccctttgtgtttgcacaggtgaaacatggagtgg

SEQ ID NO: 10339 - DNA, 296 bp, Zea mays
cggacgcgtggtggttgagatttataacgagcaagtgcgggatcttctctcaaatgatattgcacaaaaaagacttggaatttggagtacatctcagactaatggacttgttgtccctgatgcaagtttacatccagtcaaatcaacactagatgtgctacagttgatggaaattggacaaacaaatagagcagttggatcaacagctctgaatgaaaggagcagtcgatctcacagcattctgactgtgcatgttagaggggtggatctgaagaatggatctacttccagaggat

SEQ ID NO: 10340 - DNA, 296 bp, Zea mays
atggtcttattaagctgatgaatggaaacagcactggaccgattaacttggggaaccaggtgaattcaccatgctggaacttgctgagaatgtgaaggagttgatcaacccagatgtgacagtgacgatgaccgagaacactcctgatgacccccgccagaggaagccggacatcacaaaggcgaaggaagttctgggatgggagcccaagatcgtcctgcgggacggcttggtgctcatggaggatgatttccgggagcgcctgaccgtgcccaagaaaaccaaggcctgaattg

SEQ ID NO: 10341 - DNA, 319 bp, Zea mays
ggtgccaaggttattgtcagtggagctgcagtgggtgacatggcacttcatttctgtgaacgttataagctgatggttctgaaaatcagctcgaagtttgaactaagaaggttctgccgtactactggggctgttgcaattttgaaacttagccaacccaatgcggacgaactaggatacgcagattctgtttctgtagaagaaattggtggtactcgggttactgtcgtcaagaacgaagatggtggaaattcagtggctactgttgtcctgagaggcagtactgacagtatactagatgatcttgaaagagctgttg

SEQ ID NO: 10342 - DNA, 313 bp, Zea mays
ctacgtcgacctgtcgcccggcgagttcgactccttcaaggacatcatgaagctgtacgagggcgggatccagctgcccaaaataccagccctcgaggacctgcggaagcagttcccactcgagctcgtcaaggatgtcctcccggtcggcggcgactacctcctcaagctccccatgccgcagatcatcaaagaggacaagacaggttggatgacagatgaggagtttggacgggagattctcgccggcgtgaaccccatgctcgtcaagcgtctcacggagttccctccgagaagcagtcttgacccgagc

SEQ ID NO: 10343 - DNA, 317 bp, Zea mays
ctaggatacaacaacgggaagaagcagcagtaaagcgtgaggacgccatggcgtacgcgttcaaccatcagtggagagcaaggtctgccacaagtctaggaaacttcagctatgaagtcggtaagggtggctggggctggagctggatggaccgctggatcgcagcacgaccatgggagccgcgatccatggtccaccctgagaacccgaagaaagcacaggcaaagaaggagaacaccacaaacccatcagctctcaagctgcaaggctccattaccctaagcaacaatatcaatgaccggaaaaccctgaaaaag

SEQ ID NO: 10344 - DNA, 314 bp, Zea mays
cgccgtcctcggcttcgccttcaagaaggacaccggcgacaccagggagaccccggccatcgatgtctgcaagggcctgctgggtgacaaggcccagatcagcatctacgacccccaggtgacggaggaccagatccagcgggacctagccatgaacaagttcgactgggaccacccgatgcacctgcagccgacgagcccgacggccgtgaagcaggtgagctgcgtgtgggacgcgtacgaggccaccaagggcgcccacgggctgtgcatcctgaccgagtgggacgagttcaagaccctggactaccaga

SEQ ID NO: 10345 - DNA, 313 bp, Zea mays
acccaaccgaagcgagagctgagcaaggcagaggcgtcgtgaccggcgatggagcggctgcagcggatctttggcgcctccggcatggggcagccgccgacggactcgccgctgctcgattcctccgagcaggtctacatctcctccctagcgcttctcaagatgctcaagcacgggagggctggggtgcccatggaggtcatgggcctcatgctcggcgagttcgttgacgactacaccgtcagggtcgtcgacgtcttcgccatgccgcagagcgggactggtgtcagcgtcgaggccgtcgaccacgtct

SEQ ID NO: 10346 - DNA, 309 bp, Zea mays
ctgatttgtctgggagggaaactctggttcggatcaccggtggcatgaaggtgaaggctgaccgtgacgagtcgtcaccttacgctgctatgcttgctgctcaagacgtcgcacagcgctgcaaggagcttggcattactgcactgcacattaagcttcgtgccaccggaggcaacaagaccaagacccccggacctggtgcccagtctgccctcagggcgcttgctcgttctgggatgaaaatcggacgcattgaggacgttaccccggtccccacggacagcactcgcagaaagggcggtaggaggg

SEQ ID NO: 10347 - DNA, 319 bp, Zea mays
gcgcaccttcatgctgggcaactgcctgttccgctccggcggctgcgcctacttcctgaccaacgacccgcggctccggccgcacgccaagctccgtctccgccacgtggtgcgcacccacacgggcgcctccgacgaggcctacaactgcgcgctccagatggaggacgaggccggccgcccggggttccacctgggcaaggagctgccgcgcgccgcggtgcacgccttcgtgcacaacctccgcgtgctggcgccccgcgtgctgccgctctcggagctgctccgcctcgcctgcgccaccctctcggcgcgcctg

SEQ ID NO: 10348 - DNA, 302 bp, Zea mays
agttggtgagaagggtggcctgacaaaaaagctgtttgatttttcatataagcgaaatattgcagcaattgaagggagttggtttggatcttgggcaccagagaggatgttatgggatcacattatttataaaccaatacgggcaatgctcggaggacgtctaagatttgttctttgtggtggtgcacctctgtcaagtgacacacaaagatttatgaatatatgtctaggtgtcccagtgggtcaaggctatggattgactgacacttgtgctggagcagctttcactgaatgggatgata

SEQ ID NO: 10349 - DNA, 308 bp, Zea mays
cccacgcgtccgcccacgcgtccgcaagggcaaggcaagagagaggcgtcgtcgtttgatctgctgccggagtgcgaagaggaagaggaagaggagcgccggagttgtaaagatgttcctggtggactggttctatggggtgctggcatcgcttgggctgtggcagaaggaggctaagatcctcttccttggcctcgacaacgccggcaagaccaccctcctccacatgctgaaggacgagcggctcgtacagcaccagccgacgcagtaccccacgtcagaagagttgagcatcggcaggatcaagt

SEQ ID NO: 10350 - DNA, 307 bp, Zea mays
ggggtgggtagtttctagggttttcgcggcgaagggaaatggggctgcacgacgagatggggttcagccgcccgagcaagatccaggcgatcaccctgcccatgatcctcacgccgccctacaaggacctcgtcgcgcaggcgcacaacggttctggcaagaccacctgtttcgtcctcggcatgctcagccgcgtcgacccgcaacacaagataccccaggctatctgcatttgccccaccagggagcttgcgcacagacataaggcagttctcatgaggatgggcaagtttactggcattacatg

SEQ ID NO: 10351 - DNA, 305 bp, Zea mays
cccacgcgtccggcatatgcttgggattatataccgtgatcttaaaccagaaaatgtcctcgttcgggaagatggccacatcatgctgtcagactttgatctctctcttcgctgttcagtaagcccaacggtgatcaaatctgcaaatcctggcctagatgcaatgcagaggaacaatgcagcatactgtgcccagcctgcttgcattgaaccatcctgcattcagccctcttgtgtagctccaactacttgctttggcccccggttcttctccaaatctaaatcaaagtccaagtccaagtcca

SEQ ID NO: 10352 - DNA, 307 bp, Zea mays
gaaaagatctcatttagagaaatacaagatgaagttcaagaacttaaggatctcttggacattctgcacgcgcctgtggtttatgcacacaatgacttgctttcaggaaatctgatgctcaatgatttggaagggaagctatattttattgattttgagtatgggtcatacagctaccgtggctatgacattgcaaatcatttcaatgagtatgcaggatttgattgtgactataacttgtacccagataaagatgcccagtatcacttcttcaggaattatctacacactgatagacctagtgagg

SEQ ID NO: 10353 - DNA, 304 bp, Zea mays
ccccggatgtacaagtattacatacagacgaaagacgtggctgcgaacggctcgcgaactgtagggttctcacgttaacccttgggactctctgctggctagttgatcgcatcttctgcaagaagctttcgcattggtacgtcaacccgcagggtcacgcatggtggcatgtgcttatgggcctcaactcatactatgcaaacacattcctaatgttctgtcgggctcagcagcgcgggtgggaggcgagaatcacctaccttcttggatttttgccttatgtcaaggtccagaaaccagagaa

SEQ ID NO: 10354 - DNA, 302 bp, Zea mays
ctccgctttgaccggctcatacgggtttcctggtagcacgtcgctgcacctcgccgctcgcagcgggagcctggattgcacccggaagctgctcgcctggggagcggatcgtctccggagggattcagcagggaggatcccttacgccgtggcgctgaagcgcaaccacgaggcgtgcgcggcgctgctgaacccgtcggcggcggacccatggtgtggccgtccccgctcaagttcatcagcgagctggagccggaggccaaggcgctcctggaagcggcgctgacggaatccaacaggga

SEQ ID NO: 10355 - DNA, 300 bp, Zea mays
cagaacaagaaattggtgcactaagagcagcgtttgcacaagaggtcgctgtctggcataagcttgagcatccaaacgttactaagtttattggggctataatgggcgcaagagatttaaatatacaaacggaacatggacagcttggcatgccaagcaatatttgctgtgttgttgttgagtaccttgctggaggtgcgctgaaaaattttctgataaagaacaggagaaggaagcttgcctttaaagttgtggtccaaatagctcttgaccttgccaggggattatgctatctccact

SEQ ID NO: 10356 - DNA, 303 bp, Zea mays
cccacgcgtccgcccacgcgtccgcgagacgcgtgggtcgcccacgcgtccgcccacgcgtccgctctgtttttttttcacagtatctgttcgactccacgaaggacatcagcgtgctgcaatgtgggcataccatccacttggagtgcacgaacgagatgagagcacaccatcagtaagcatatataccgttctcttcggagctgagaaacggtgccacctcacaacatcctcttttagtcgcagtgaccttacagtctcagccctgtttggtctttggcagcttctcatgcccagtgtgct

SEQ ID NO: 10357 - DNA, 300 bp, Zea mays
cccacgcgtccgcccacgcgtccgcccacgcgtccgcccacgcgtccgcccacgcgtccgcccacgcgtccgatttgagtatctacctcgtggcagtccatctgaagcatgccttatgaggatatttgtggcaacggttgaagctatacttaggagaacttttccttctgaaacatcagagcaatccagaaagccaagaagtcaatctaagaaccttgctgttgctgaacttcacacaatgatacattcactctttgttgaatcctgtgcctcaatggaccttgcctcccggttgctatt

SEQ ID NO: 10358 - DNA, 302 bp, Zea mays
cccacgcgtccggggatcccagccaccgccgctagaagaagagctcggcgattcccaggtcccgcgagaatatgccgaagcagatccatgagattaaggacttcctcctcaccgcgaggaggaaggatgcccgctcagtgaagatcaagaggagtaaggatgttgtcaagttcaaggtgcgctgctccaagtacttgtacacgctctgcgtcttcgatgctgagaaggcaaacaagttgaagcaatctcttccgccaggtttgaccgtcgacgaggtctgattggatacatggcaacgccga

SEQ ID NO: 10359 - DNA, 303 bp, Zea mays
cggacgcgtgggcagagcgcaagatgttcggcttcgggcaccacggccaccacggccagaacccgccggcgcacggcggcgtgcaccagcccaccttcaagatcttctgcaaggccgacgaggggtactgcctcaccgtccgcgacggcaacgtggtgctggcccccgccaacccgcgcgacgagcaccagcactggtacaaggacatgcgcttcagcacccaggtcaaggacgaggagggcaaccctgcgttcgccctcgtcaacaaggccactgggctcgccatcaagcactccctcggcc

SEQ ID NO: 10360 - DNA, 298 bp, Zea mays
caacgggcctgggagtctgagggaggcgtgtcgggcggaggagcccctgtggatcgtcttcgaggtgtctggcaccatccacctccactcctacctccgcgtctcctcgtacaagaccatcgacgggcgcggccagcgcgtggtgctcaccggcaaggggctccagctcaagtcatgccatcacgtcatcatctgcaatctggtgttcgaaggaggccgcgggcacgacgtggatggcatccaggtcaagcccgactccaccaacatctggatcgaccgctgcaccctcgccgactac

SEQ ID NO: 10361 - DNA, 297 bp, Zea mays
gtcctctctgagtcaagcttgtttatctatcctctgaagattgtcatcaagacctgtggcactaccaagctcctgctcaccattccaagaatccttgagcttgctgaagagctgtctatgccacttgctgctgtgaagtactcccgtgggacgttcatctttcctggtgcacagccagccccccacaggagcttctctgaggaagttgctgcacttaaccgctactttggcggcctgaaatctggtggtaatgcttatgtgattggagatccagcaagacctggacagaagtggcac

SEQ ID NO: 10362 - DNA, 303 bp, Zea mays
gcgaacgacaaagcgcagatcgtcgatctagcgagctcggagtcggagcacgcctagacaccaaagcaatggcggctcggcggctcctcgtcgcgttccttgccttgtgctctggcttctcggccgtccacgggcagaagttcaacgccatcttcagcttcggcgactccatgtccgacaccggcaacctgtgcgtgaacggtccccccgccggcctgacgctcacccagccgccctacggcgagaccttcttcggccgcgtcatctgccgctgctccgacggccgcctcgtcgtcgacttcc

SEQ ID NO: 10363 - DNA, 305 bp, Zea mays
cccacgcgtccgcgcggtctgctcgttcgatctgtgcagcagatctgaggtcccgggcgaccgtgaagcagcttcaatcgtcggcatggcgctcgtattgcatagtggggctggaaacaagaatgccttcaaagcacttattgctgcagaatacagtgggatcaaggttgagttgaccaaggattttgagatgggtgtctccaacaagacccctgagtttcttaagatgaacccccttgggaaggttcctgttctggagactcctgatggccctgtttttgagagtaatgctatcgcacgctatg

SEQ ID NO: 10364 - DNA, 302 bp, Zea mays
caccgccgccgccgcagactcctccttttcgatcccttcgcaaagcgccgccgtcgccccatccggcatggctccgaagaaggataaggccccgcccccgtcgtcgaagcccgccaagtccggcggtggcaagcagaagaagaagaagtggagcaagggaaagctaaaggagaaggtgaacaacgcggtgctgttcgaccaggctacctacgacaagctgctctctgaggtgcccaagtacaagcagatcaccccctccatcctatccgagcgcctcaggatcaatggctccctggctcgga

SEQ ID NO: 10365 - DNA, 305 bp, Zea mays
atatgttatccctgttacaactgttgcttcagaagctgctttcagcactagtggtagagtacttagtgagcatcgcagtaggcttacttcaaagatgttggaggctctcatgtgctctcaagattggcttaggaacaaatacaaagttgatgagaaaactaaacaacctgccaccttttggtcctgtctccaagacatgcaagagggcctccaggaacttgcactttgacattttcatttcaaggatttaggtggcgttaatcttttggctgttgacatgtagtgaacaagtcaagtacaagtag

SEQ ID NO: 10366 - DNA, 305 bp, Zea mays
gcccggtgctccctctctgcagatctcccttcgcagccgccgaggaaccccttcacagcgcggaagatggctgaacaggaggccccagtcgtggttgaggcaccaaccccagttcttggggagcctatggacttgatgactgctctgcagctcgtgatgaagaagtcaagtgctcatgatggacttgtgaagggtctccgtgaggctgccaaggccatcgagaagcacgccgctcagctttgcgtgcttgctgaggactgtgaccagccagattatgtcaagctggtgaaggcactctgcgcgga

SEQ ID NO: 10367 - DNA, 304 bp, Zea mays
gtcgagcgcctcacaaactccctcatgatgcacgggcgcaacaacggcaagaaggtcatggctgtccgcatcatcaagcataccctggagatcattcacctgctcaccgatgccaaccccatccaggtcgtcgtcgacgcgatcatcaacagtggaccccgtgaggatgccacccgtattggttccgctggtgttgtgaggaggcaggccgtggatatctcacccctgaggagggtgaaccaggccatctacctcctcaccactggtgccagggagagtgctttccggaacatcaaaaccattg

SEQ ID NO: 10368 - DNA, 302 bp, Zea mays
cccacgcgtccggcgatccttcaagtatgcttgggtgcttgacaagctcaaggctgagcgtgagacgggtatcaccattgatattgctctgtggaagtttgagaccaccaagtactattgcaccgttattgatgcccctggacaccgtgactttatcaagaacatgatcactggtacctcccaggctgactgtgctgtccttatcattgactccaccactggtggttttgaggctggtatctccaaggatggccagacacgtgagcatgctctccttgcgttcacacttggagtgaagcaga

SEQ ID NO: 10369 - DNA, 302 bp, Zea mays
  unsure (1)..(302): unsure at all n locations
agagcttctccccgcgccgccgccaaaaccctcaaaacccgagacgccggcggtgaagacgagagggcggaggcggagatggcgacgcggatgaaggacgtggcgcggaggtcgaccaagaagtacgtggaggaggcgctgtaccggcgtctgttccggaaggggtcgacgccgcacggtntcgcagaggaggtcgatggcttcctcgacagccggaagcgggcgttcaagtgggaggtgggcgtttgcgtnccccggatgcggcggaacgcgctctaccgcccttcgctcaagctttctga

SEQ ID NO: 10370 - DNA, 300 bp, Zea mays
ggaacaatgattgtaggtgagttcagtggtagaaaggttcaggaagcgaaaccgctgattaaaagtaagcttttggaagaaggcacagctgtgttgtatagtgagccggagaagaaggtcatgtctagatctggtgatgaatgtgttcttgccctcactgatcagtggtatataacttatggcgaggctgaatggaagcagaaggcagtcaaatgtttggaccgcatgaatacattctcaactgaaacccgcaatggttttgaacatacgctgggctggctgaaccagtgggcttgttca

SEQ ID NO: 10371 - DNA, 300 bp, Zea mays
ggaaaccctagccgccatatctcacgatccactcgagcaccaagccgagggaaggtgaggagcgatggcgcgcggcgtggtgtcggcgaagggcggcgcggtcgcgggcaagaagaaggggtcggtttccttcacgatcgactgcaccaagccagtggaggacaagatcatggaggtcgcctcgctcgagaagttcctgcaggagcgcatcaaggtcgccggcggcaaggctggcaacctcggcgactccgtcaccatctctcgcgagaagaccaaggtcaccgtcacctctgacggacc

SEQ ID NO: 10372 - DNA, 299 bp, Zea mays
cggacgcgtggcttgtagtcattggtggtgatgattcaaacaccaatgcctgcctccttggtgaatactttaggtcaaggaacatgaaaacccgtgttattggttgcccaaagactatcgatggggatctgaaatgtaaggaggttccgacaagctttggatttgatacagcttgcaagatatactctgaaatgattggcaatgttatgactgatgcgagatccactggaaaatactaccactttgtgaggcttatgggtcgtgctgcttctcacattacgctggaatgcgctttgcaa

SEQ ID NO: 10373 - DNA, 302 bp, Zea mays
cggacgcgtggcgtgacgcgtgggcagctgacggggcccggtggcggcagccacagcagcggcggctacgacgacgagcggaagaacatccggaacacgaggaacaaggagtctgcgctgcgctccagggcaaggaagagggcctatgtgcaggagctggagaaggaggttcgtcgcctggtgaatgagaacctcaagctcaagaggcagtgcaaacaactgaaactagatatggctgcactggtccagcaaagcagcagcaagagcagctcccacatcagaagaacctcctcatccactca

SEQ ID NO: 10374 - DNA, 299 bp, Zea mays
gcctcgccttcccttccccaccagcccccgtctctctctctctctctctgtctctctctcgtagccgcgtccatctcgcagcagcaagcaagcgcgaccaaatggcgcctctaggagacggcggagtgctgccgcggcggcgtccaacaacctggtggtgtcgttcggcgagatgctgatcgacttcgtccccgacgtggccgggctgtcgctggccgagtcgggcggcttcgtcaaggcacccggcggcgcgctcgccaacgtcgcctgcgccatcgccaagctcggcggatcctccg

SEQ ID NO: 10375 - DNA, 294 bp, Zea mays
gttgaattgacatacaactatggcgttgacaagtatgacattggaacgggctttgggcatttcgcaattgctaatgatgatgtgtacaagttagctgagaatatcaaatccaagggtggtaagatcacccgcgaacctggtcctgtcaagggaggatccactgttattgccttcgcacaggatcctgatggctacatgtttgagcttatccagagggctgacacacctgagcctctttgccaggtcatgcttcgtgttggtgaccttgagcgttctatcaagttttatgagaag

SEQ ID NO: 10376 - DNA, 296 bp, Zea mays
gccaggagggagaggcctagggctcgccctcatggcctgacgcagcagaggaggcaggaaataaaggaagcctttgatctgtttgatacagataactctggaaccattgatgcaaaagagctcaatgttgccatgagagccttgggatttgagatgactgaagagcaaattaggcaaatgattgctgatgttgacaaagatggcagtggagcgatcgactacgaggagtttgagcacatgatgactgccaaaatcggagagagggatagtaaagaggagctttcaaaagcattccg

SEQ ID NO: 10377 - DNA, 295 bp, Zea mays
aggctatcacggcgctcaaggagaggaccggctccagctcgcaagcgatcgccaagtatgtgggggacaagcacggcgcgtctctgccggccaacttcaagaagatgctttccatccagctccgtgggtccgcagccaagggcaagctcgtgaaggtcaaggcttcgtacaagctctcggacgccgccaagaaggcatcccccaagaccaaggctaagccggcaaaggccgccgctgccaagaccaccgcccccaagccggccaaggccgccgccgccaagtcaaagaaggcagc

SEQ ID NO: 10378 - DNA, 295 bp, Zea mays
catatatagcccttgactatgagcaagagttggaaactgccaagaacagctcttcagttgaaaagagctatgagctacctgatggacaagtaatcaccattggtgcagagagattcaggtgccctgaggtcctcttccagccgtcgatgattggtatggaggctgctggaatccatgagacaacatacaattcaatcatgaagtgtgacgtggatatcaggaaggacctctatggtaacattgtgctcagtggtggttcgactatgttcccgggtatcgctgatcgtatgagcaa

SEQ ID NO: 10379 - DNA, 295 bp, Zea mays
aagaaattcgggtattgtacctataggttcactgcaattaggtgtttgtaggcaccgagctgtcctaatgaagtatttgtgtgaccgggcggatcctccaattccttgtgagcttgtgaggggccatcttgactatacacctcatgcttggaacattgttcctgttaaaaagaggaatggctgggtaaggatgattgttgatgcttgttaccccaccaacataaaggaagagacagatccagagtacttttgcaggtatataccactcagtcgacttcaaattgtgctcgatgat

SEQ ID NO: 10380 - DNA, 292 bp, Zea mays
agcagaagcagacatggccaccattccgaccaccgattctggcctcgtcctcagttcctccgctctcctccggaggactaggagggccgcctcatccgtcaccgccaggctgccagccgtcgcccgccgtcgcccgcagctcctcgtgcgtgcctccgccaaggagatcgcctttgaccagggctccagagccgcccttcaggccggcgtcgagaagctcgccgccgcggtcggcgtcaccctcggacccagaggaaggaatgttgtcttggatgagtttggaacccccaaa

SEQ ID NO: 10381 - DNA, 296 bp, Zea mays
actacccaaacccaacaggcggcgcacagcatcgccaccaccgtccaaagatggtgaagttcctcaagcccggcaaggccgttatcctcctccagggccggttcgccggccggaaggcgttgatcgtgcgcgttttcgaggagggcacccgtgatcgtccctacgggcactgcctcgtcgcgggcctcgccaagtaccccaagaaggtgatccgcaaggactccgccaagaagacggccaagaagtcccgcgtcaagtgcttcatcaagctcgtcaacttcacgcacctcatgccc

SEQ ID NO: 10382 - DNA, 290 bp, Zea mays
agtcaggcccaggcctaacctcagttcatccgagcagccgaacacgcccgccgccattctacgccctgctgcccaggtcggacggaccctttgccggagacgagcacacgccacagcaggaattatcgggcgtagagcagcgcgaacgagagatccaatggcggcggcggaggggcagtgggtgctcatggcaacggggcggacgccgactaacattgcggtgatcaagtactgggggaagcgggacgaggcgctcatcctccccatcaacgacagcatcagcgagatct

SEQ ID NO: 10383 - DNA, 298 bp, Zea mays
catcagttgaagtccttgccaagagagcagcattgacatatgaagcagcattgccaaatggccgaggcgctgcccggaatgtctcaaaggtgatgccatctcaatcccactttgggatgaatatgctgatcagcagggtcctagaatcacatggagactgctgcaagaactcctccaaagtaaggcacaacctttttggaagccgtctggattgtgactgttgtacctgcagccagtagcacagttgctatgtctgactcgaatggcaacctctgcgccatgattatgttgccaccta

SEQ ID NO: 10384 - DNA, 314 bp, Zea mays
caagaatgtgcttgctgttgctgtcgagacagactactcatacccacatgctgacaagatcaaggagtacctcaaggacccaagcaagtttgctgttgccgccccggttgctgctggggactctggcgctgcagctgctcccaaggaagaagagaaggctgcggagcctgaagaggagtcggacgaggaaatgggcttcagcctcttcgacgactagagctgctgttttcgtcaaactgctgcaagttttggctttttttatcatctacaagtactgtttcctatattttttagcagacaaattatcgtgtgta

SEQ ID NO: 10385 - DNA, 311 bp, Zea mays
cacaatgtagcctgctcacatgatgggtgtggagttgtccttcggaaggaagaagcagcagatcatgtgcactgcaacaagtgcggacgagcttaccagcagagagaaatggaaaagcatatgaaagtcttccatgaaccgttgcagtgcccctgtcgggtggtcctggagaaggaagatatggttcagcaccagtccttgacttgccccttgcgattaattgtgtgccgcttctgtggtgacacagtccaggctggtggagagccttctgatgttcgtgacaggatgcgaaacatgtctgagcatgagag

SEQ ID NO: 10386 - DNA, 310 bp, Zea mays
agcaagtgtgtggctatagaggaggacatgtacctgaagcccctcaaccttggccttattgcttcatactactatattagctacacaactattgagcgttttagttctatgctgacccagaagactaaggtgaaaggactcctagagattctagcatctgcctcagaatatgcagagcttccgggtcgtcctggtgaggaagaattcattgagaggcttgttcgtcaccagaggttctctatcgagaaacccaagtatggggatccacatgtgaaggccaatgctctgctgcaagcccatttttcaaggc

SEQ ID NO: 10387 - DNA, 312 bp, Zea mays
atcttagcgaagaagtgaggagaaggttctacaagaactggtgcaagagcaagaagaaggctttcacaaagtatgctctcaaatatgaaaatgatgctggcaagaaggaaattcagctgcagcttgagaagatgaagaaatatgcttctgttatccgtgtcattgctcatacccagattaggaagatgaagggtttgaaacagaagaaggctcacctgatggagattcaggtcaatggtggtaccattgctgacaaggtggactacggctacaaattttttgagaaagaggtccctgttgatgctgtcttcc

SEQ ID NO: 10388 - DNA, 311 bp, Zea mays
acgacacttctgatcccgcccaccaccatcctgatcatcaacctggtcggcgttgttgccggcatctcctacgccatcaacagcgggtaccagtcgtggggtccgctcttcggcaagctcttcttcgccttctgggtgatcgttcacctgtacccgttcctcaagggtctcatgggtcggcagaaccgcaccccgaccatcgtggttgtctgggcgatcctgctggcgtcgatcttctccttgctgtgggttcgcatcgatccgttcaccacccgcgtcactggcccggatactcgaacgtgtggcatcaa

SEQ ID NO: 10389 - DNA, 315 bp, Zea mays
ctacatttcttctctctctgctcctccgcctccgcctccgcctgatccatccaagacagggatcgccatgtcggactcggaggagcaccacttcgaatcgaaggccgacgctggggcgtccaagacctacccgcagcaggctggcaccgtccgtaagaacggcttcatcgtcatcaagaaccgtccctgcaaggttgtggaggtttctacctccaagactggtaagcatggccacgccaaatgccactttgtcgccatagacatattcaatgggaaaaagcttgaagatattgttccttcatcacacaactgtga

SEQ ID NO: 10390 - DNA, 307 bp, Zea mays
ctttgacaacaggatggtcaaccacttcgtccaggagttcaagaggaagaacaagaaggatatcactggcaaccccagggctctccggaggctgaggaccgcttgtgagagggcgaagaggactctgtcttccactgcccagaccacgattgagattgactcgctgtatgagggcatcgacttctactccaccatcacccgtgccaggtttgaggagctcaacatggacctgttcaggaagtgcatggagcctgttgagaagtgcctgagggatgccaagatggacaagagcaccgtccatgacgtt

SEQ ID NO: 10391 - DNA, 297 bp, Zea mays
cttaaggattcctttttggacgaagggttcattcttgacaagaaaattggcattgggcagcccaagcgcattgagaatgccaaaattttggttgcaaacactgctatggacacagataaagttaagatatatggagcacgggtccgggtggattcaatgtctaaggttgcagatattgaagctgctgagaagcagaaaatgagagagaaagtccaaaagatcatagcacacgggatcaactgttttgtcaacaggcagttaatctataacttccctgaggaactctttgctgacgct

SEQ ID NO: 10392 - DNA, 303 bp, Zea mays
tctttgctgagtatggcaatattacttcctgcaaggttatgcgggattcgaatggtgtcagcagaggttctggatttgttgctttcaaatctgctgaagatgctaaccgagctcttacggagatgaatggcaaaatggttggaagcaagcccctttatgtagctcttgcgcacgtagaagaagacagaaaggcaaagctacaggcacaattttcacaaatgcgtcctgttgcaatggcgccttcagtaggtcctcgcatgcccatgtttccacctggtgtccctggagttggtcagcagctgt

SEQ ID NO: 10393 - DNA, 306 bp, Zea mays
cgagacgcgtgggtgtcagaccagaactggatggttgaagctggtgaaaaaatcaagtttccaggtggtgggacccattttcaccatggagctgacaaatacatatcaaatattgcaaatatgctaaatttcaaagataacaatataaacaatgaggggatgcttcgtacagttcttgatgttggttgtggagttgctagtttcggaggataccttctttcttctaatgtgatagcaatgtctttggcaccaaatgacgtgcatcagaatcagattcagtttgcactcgaaagaggaatccctgca

SEQ ID NO: 10394 - DNA, 300 bp, Zea mays
gtggtgctactgttactgtagtacgtcgtcgtcttcatgcatgcatggttcgtggtttcccctagctccatacgagcagtagttgggccttgcacgtaccgtacgtctagctagctatatatatagcttgtgttctactgctttttagtttaattacctgcctgcattggagagttggatctgtttcatttggtggtgtttgctttactattaggtcagtatctgtttgtggagacttggtgtttaatttatttagccgtttgtgactggttgtagctagcggtggtgcggtggtgatgt

SEQ ID NO: 10395 - DNA, 302 bp, Zea mays
cggaccgtgggtgcgcgccgggcgccgcggagttgcccaggctggaccacccggccaggagtgacggatcgctgaagctgctcgtcgtcggggactggggacgcaaggggactcacaaccagtcccgggtcgccgaccagatgggaagggtcggggagaagctcgatatcgactttgttatatccaccggggacaacttctacaagaacggcctcaagggcgtgcgcgaccaggcatttgaagaatcgttcatggatatctacacagctcaaagcttacagaagccatggtactcagttcta

SEQ ID NO: 10396 - DNA, 305 bp, Zea mays
cggagagctctttgacaagattggcaagagtggcaagctcacagaggccgctgcacacaagtacttccagcagctcattggtgcggtggattactgccacagccgaggtgtgtatcaccgggacttgaagcctgagaaccttctgttggatgagaatgagaacctcaaggtctcagattttggactgagtgcactttcagaatccaaggggcaagatggcttactccacaccacctgtgggactccagcatatgtagctccagaggtgatcagcaagacaggctatgatggggcaaagtcagaca

SEQ ID NO: 10397 - DNA, 309 bp, Zea mays
aagacttagaacagttgatgaacagcaggaacacttatctagccaagcaagaagagtgcacgaagaagatccgagatttgggcttgttgcctgctgatgcttttgaagcgtacaagaggaaaaacaagaaacagctacataagatactctatgactgtaatgagcagttgaagcagtttagtcatgtgaaccaaaaggctcttgaccaatatgtgaacttcacagaacaacgcgaacaactgcagagaaggcgagctgaacttgatgccggtgatgtgaaaatcatggaactcatatcggttttagacc

SEQ ID NO: 10398 - DNA, 295 bp, Zea mays
ggcctgcgagacctgcaccaagaccaacatggtgatggtgttcggcgagatcacgaccaaggcgactgtggactacgagaagatcgtgcgcgacacctgccgcgagatcgggttcacctccgacgacgtgggcctcgacgccgaccgctgcaaggtgctggtgaacatcgagcagcagtcccccgacatcgcgcagggcgtgcacgggcacttcacgtagcggcccgaggagatcggcgcgggcgaccagggccacatgttcgggtacgccaccgacgagacccccgagctgatg

SEQ ID NO: 10399 - DNA, 298 bp, Zea mays
gactgactgcctaatgaagatcctcacggaaaggggttattccttcaccacgacggcagaacgggaaatcgtgagagacataaaggagaagctggcctttgtggccctagactacgagcaggagctggagaccgctaagagcagctcctccgtcgagaagagctacgagctgcccgatgggcaggtcatcacgatcggcgcggagaggttcagatgcccagaggtgcttttgcagccgtcgctgatcgggatggaagctcccggcatccacgagaccacctacaactcgatcatgaaa

SEQ ID NO: 10400 - DNA, 297 bp, Zea mays
cgtgcgccgtcctcatggaccttgagcccggcaccatggactccgtgcgctcggggcccttcggccagatcttccgccccgacaacttcgtcttcggccagtccggcgccggcaacaactgggccaagggccactacaccgagggcgccgagctaatcgactccgtgctggacgtcgtgcgcaaggaggccgagaattgcgactgcctccaagggttccaggtctgccactcgctgggaggaggtactggttcaggaatgggcaccctgctcatctctaagatcagggaggagtacc

SEQ ID NO: 10401 - DNA, 296 bp, Zea mays
atcatgaaccaccctggccagattggcaatggctatgccccagttctggactgccacacctcacacattgctgtcaagtttgctgagctcgttaccaagattgataggcgatccggcaaggagctggagaaggagcccaaatttctcaagaacggtgatgctggtatggtgaagatggttcccactaagcccatggtggtggagaccttttctcagtatcctcctcttggtcgatttgctgtccgtgacatgaggcaaacggtggctgtcggagtcatcaagagtgtggagaagaa

SEQ ID NO: 10402 - DNA, 297 bp, Zea mays
aaacaattcccttacatggtggatccaaacacaggggtcgccatgtatgaatccgatgacatcataaaatatctagctgatacatatggcgatggaactgttccaattatgctatcacttggtctgttgacagcaattacagcagggcttgctactcttggtcgtattggaaagggaaattcctacattgcttcaaaagtcccatcccagcccatagagatatgggcatatgagggatctcccttctgtaaattagtacgagagacacttgtcgagttggaattgccacatctgcta

SEQ ID NO: 10403 - DNA, 300 bp, Zea mays
gctaggattcccccgaaaccctcccccaaaaccccagagcggagaagagcgcaagatgttcggcttcgggcaccacggccaccacggccagaacccgccggcgcacggcggcgtgcaccagcccaccttcaagatcttctgcaaggccgacgaggggtactgcctcaccgtccgcgacggcaacgtggtgctggcccccgccaacccgcgcgacgagcaccagcactggtacaaggacatgcgcttcagcacccaggtcaaggacgaggagggcaaccctgctgtcgccctcgtcaacaa

SEQ ID NO: 10404 - DNA, 297 bp, Zea mays
cttgggtttcaagttagcattggagtgcctggagctacggatctgtctatacctggctcttgaagactataagtctgctatctgtgatatccatgcgattcatactctttcacctgattatcggatgttggaaggacgtgtagctgcttccaaaataggcactcttcttggtgcacatgtcgagcagtggaatacggctgagtgttggctacaactttatgagcgctggtcatcagttgatgatattggctccctttcagtgatctatcggatgcttgagtcagatgcagcaaaagg

SEQ ID NO: 10405 - DNA, 298 bp, Zea mays
tccatttcgatcccatttgaaatcaacccatcctcgtttcctccgtctagcagcctctcaccctcatggccaagatcaagatcgggatcaatgggtttggcaggatcggaaggctggtggccagggtggccctgcagagcgacgacgtcgagctcgtcgccgtgaacgaccccttcatcagcaccgattacatgacctacatgttcaagtatgacactgtgcacggacagtggaagcaccatgaggtcaaggtgaaggactccaagacccttctctttggtgagaaggaggttgctgt

SEQ ID NO: 10406 - DNA, 287 bp, Zea mays
ctacaaggttgcatcaatagtactgagtccgaatgttcccgggcaaatctttatgggagtgatggttaaccctcctaaacctggagatatctcatacccgaagttcactgccgaaagcaagtccatcctcgaatctttgaggaggagagcgcgcatgatgacagacggtttcaacagctgccgaaatgtggtgtgcaatttcacagaaggagctatgtactctttcccccaaatacagctgccagcaagagccatcgaggcggcaaagagagccggcaaagcagcag

SEQ ID NO: 10407 - DNA, 318 bp, Zea mays
atctgctctcctgcaggagttggaagctcttcgcagttcaggcgccaagagtatcgtgtttagccagtggactgcttttttagatctgttgcaaattccactttctaggaataatttctcatttgctaggctggatgggacgttgaatcttcagcaaagggagaaagttataaaggagttctcagaggacaaaggcattttggttctgcttatgtctctgaaggctggaggtgttggaatcaatcttactgccgcttctaatgcatttgtcatggacccttggtggaatcctgctgtggaagaacaagctgtcatgcg

SEQ ID NO: 10408 - DNA, 311 bp, Zea mays
atccgggacctggcggacggtggcggacgctgggcaagtcaggtgagccgataactgctgatgatcttggtgttggaggagcattgactgtcttaatgaaagatgctattcatctcacactcatgcaaactcttgaaggcacaccagttttagtacatgctggaccatttgctaacattgctcatggaaactcttcaattgttgctgataagattgctttgaagttggttgggaagggtggctttgttgttactgaggcaggttttggtgctgatattggaactgagaagttcatggacatcaaatgtagg

SEQ ID NO: 10409 - DNA, 314 bp, Zea mays
tgaaaaaggcagtgctaccagaagtactggcacaaccggtgcaaatgaagagtcctcaaggtctcatgccattcttcagcttgccattaaacgccgtgtggatggcaatgactccaaaccacccagaccagtcggcaagttgtcatttattgaccttgctggcagcgagcgtggtgctgatacaactgacaatgataaacaaacaagaatcgagggtgctgagatcaataaaagtttgcttgccctaaaggaatgcattagagcgcttgataatgatcagactcacatacctttccgaggtagcaaattaactg

SEQ ID NO: 10410 - DNA, 311 bp, Zea mays
gagatctccatggcaaactcccgccagaatatccggaagttggttaaggatgggtttatcatcaagaagcctcataagatccactctagatcccgtgcaagaagggcacatgacgccaagcaaaagggacgccactcaggatatggtaagcgtaggggtaccagggaggctaggctacccaccaaggttctgtggatgaggaggatgcgtgtgctgaggcgccttctccgcaagtatcgtgaggccaagattgacaagcacatgtatcatgacatgtacatgaaggtcaaaggtaacgccttcaagaacaa

SEQ ID NO: 10411 - DNA, 311 bp, Zea mays
tgaatccacaatggaatgagcagtacacttgggaggtgtttgatccttgcaccgtgatcacagtggtggtgtttgacaacgggcaaattgggagcaagaatggtggtggcccagatcagcgcattgggaaggtcaggatccggctctctacactggagacagacagagtgtacacgcatttctaccctttgctggttttacatccaagtggactcaagaagactggtgagcttcatttggctgtgcggtttacctgcacagctatgggtgaacatgatggcgctgtatggccgtccgctgcttccaaagat

SEQ ID NO: 10412 - DNA, 311 bp, Zea mays
gacgaagacgtccttcctagtccagctccctcgataaagccaatcgatgagccggcgcaagagaagtgttctcctatcaacgcttttcagttgatcgggatggcctcttcccttgacctttctggtttcttcgaggaagaggatgcagcgcaaagaaagattcggttcacttcgacgcacccacccaaggatctatttgacaagatcgagagcgttgtcatggagatgggattcaaagtccataggggggcaggcaagctcaaggtcttgaagaatagcaagtgttccaggaacccgtcatcattgttggt

SEQ ID NO: 10413 - DNA, 311 bp, Zea mays
aattttcagttgagaatccatgatcagatgatcatgttagaagcagctaaagctacaacagagactgttgatgcattgagaactggagctgcagctatgaaagcaatgcaaaaagcaacaaacattgatgatgtagacaagaccatggatgaaattaatgaacagactgaaaatatgaaacaaattcaggatgctttgtcagctcctctcggagcttctgctgatttcgatgaggatgaactggaagccgaacttgaagaactggagggagcagagttggaatctcagcttctggagcctgttgcagctcc

SEQ ID NO: 10414 - DNA, 309 bp, Zea mays
cccacgcgtccgcccacgcgtccgcccacgcgtccgcggaggcgaaggaggaggagcagcagcagcaggcggcgccgaggagcggcatcccactcagtgcttgcaaccatggctaggggattgaagaagcacttgaagaggctcaatgcgcccaagcattggatgctcgacaagcttggcggagcttttgctcccaagccatcttctggacctcacaagtccagggagtgccttcctctgatcctcatcatcaggaacaggctcaagtatgctctgaactaccgtgaggtcatttctatcctgatgcaa

SEQ ID NO: 10415 - DNA, 287 bp, Zea mays
ccaattttcaaagttgaacgccaacacagtgaagctgaatgtagcaccacatctgatcaggcaacatctagtgattccacagataagaaatctaacaattctataggaaatgaatctgaccggaagccattgaggccactaaccccgtggatcactgacatattgctagctgcacctttgggcattcgaagtgactattttcgatggtgtggcggtgtaatgggaaaatatgctgctggtggagagttgaagcctccaactactgcttacagccgaggatctggaaa

SEQ ID NO: 10416 - DNA, 309 bp, Zea mays
tcttaaccagaacccacttattgtaccattgggaattcttcgtggccattctagttcggatggaagaggggttttggactgcaagttccaccctaaacaaccatggttgttcactgctggcgctgactctgtgattagattatactgcgactaagcattcctccaaggattcatgattttgccaagcaatatgacgtgtagccttttgttgggcctcagtatggtgatgattgctatattctggtatgaagttggattggtacacatgtatgaagccaagagtggtggatcttttgttatggggtcatg

SEQ ID NO: 10417 - DNA, 290 bp, Zea mays
tgtagaaacagatcctccgagaactaaggatcttgatactgttgctttgcttgatcatctaccatcattgcagcaactccttttccgtcttcttgcttgccagccacaaggagcgtcgtcttacaatgttataatccagcatgcactctcaatggttgctttagagagtattaagatctacactgcgattagtgatggaacaatcaatctagttgacaagttcttcgagatgcaaagaaatgatgctgttagggcacttgatgtatacaaaagagcaactaaccaggctg

SEQ ID NO: 10418 - DNA, 309 bp, Zea mays
caatgccatcattgttatggatgatgcagatatccagctagctgtgcgatctgtcttgttcgctgctgttggtacagcaggacaacgctgcactacatgtcgtaggctgattcttcatgagaacatatatcaaaccttccttgatcagcttgttgaggtatacaaacaagtccgaattggggatccgttggagaaaggcaccttactgggaccactgcacactcctgcttcaaaagagaactttttgaaaggcattcagactatcaaatctcagggagggaaaatcctttttggaggatctgccattga

SEQ ID NO: 10419 - DNA, 305 bp, Zea mays
actagttctagatcgcgagcggccggctcggtttgtaaaagaatacattgaggaatcaaaacctctttttgcagttggggaatactgggatagctgtgaatatagcccccctgactaccgactgaactataatcaagatatccataggcagaggattattaattggatagataacactggaggactttgtgccgcatttgatttcacgacaaagggcattcttcaggaagctgtcaaaggagagttgtggcgtttgcgagactcagaaggaaaaccacctggtgtgatgggatggtggccttcaa

SEQ ID NO: 10420 - DNA, 284 bp, Zea mays
tccaccttccctcccctccactcccgcaatctcgtctccgccgtccgccgccgcgccgtagcaaggtaacagagatcacaacaagttaaagcctcaaggaatgctgaaagatgtgctttcctagaagatatttctgttgcgacatcaaggaccttgctgctccccgagggctgctgatctgctcaactcttgatgacctgatctgcatcgattctacaacgttcagactgcgccacgaccaagccataagagtactgttcaccgtcatggatcatgacatgggg

SEQ ID NO: 10421 - DNA, 307 bp, Zea mays
ctgacacaagagagcacgctactactcatcactcgccaacgtgcagagatcagggaagcggcactccatccactgactgaccgctcatggcgaaggtccacctctacgtcgccgcggcctgcgccgtcgtcctcgcgctcgccaccccggccctcgccggtgaccccgacatgctgcaggacgtctgcccggctgactacgcctccccggtgaagctgaacgggttcgcgtgcaaggcgaacttttcggcggacgacttcttcttcgacgggctgaggaacccgggcaacaccaacaacccggcggg

SEQ ID NO: 10422 - DNA, 311 bp, Zea mays
ggggaagccaaatcgatggcggcggcggcggccggcggcgagaacagcggcgcgggcgcgggcgcgggcgagggcgagttctacctgcggtactacgtggggcacaagggcaagttcgggcacgagttcctcgagttcgagttccgccccgacggcaagctccgctacgccaacaactccaactacaagaacgacaccatgatccgcaaggaggtcttcgtctccccctccgtcctccgcgaggccaggaggatcatccaggagtccgatatcatgaaggaggacgacagcaactggcctgagcccgaccg

SEQ ID NO: 10423 - DNA, 307 bp, Zea mays
cttcggatctcgcattcagcgcagcaggtgtgaaggatgggggacgcggaggaagatggggctcgcgttcgggaagctcttcagccggctcttcgccaagaaggagatgcggatcctcatggtcggcctcgacgacgccggtaaaaccaccatcctctacaagctcaagctcggcgagatcgtcaccaccatccccaccatcggtttcaatgttgaaactgttgagtacaagaacattagcttcactgtctgggatgtcgggggtcaggacaagatcagacctctttggaggcattacttccagaac

SEQ ID NO: 10424 - DNA, 303 bp, Zea mays
atcaagtctggccaggtctctcccatatcgggttctcccttcctcttcctgtttccgcgcgcgagatcgccgccccgggtgggctctagatcccgatggcctcgcgccgccgcaccctgctcaaggtcatcatcctcggcgacacggggttgggaagacgtctttgatgaaccaatatgtgaacaagaagttcagcaaccagtacaaggctacgattggggcggatttcctcaccaaggaggtgcagttcgaggacaggctcttcactctgcaaatatgggacactgctggtcaggaaaggtt

SEQ ID NO: 10425 - DNA, 304 bp, Zea mays
attatttcttgagaagactggaaactcatgggaagcttgggaatgtaaaaccaattttcggaagcagcctgggagattttacccacttgatgttgattatggtgttaagaaagcaccaaaacggaaagatatcagtgaaatgaaaagttctcttgctcctcaattgctagaactcatgaagatgcttttcaatgtggagacatatagagctgctatgatggaatttgaaattaatatgtcagaaatgcctcttgggaagctaagcaaggaaaatattgagaaaggatttgaagcattaactgag

SEQ ID NO: 10426 - DNA, 275 bp, Zea mays
ggacctggtgtactccaccactggtggttttgaggctggtatctccaaggatggccagacccgtgaacatgctctccttgagttcacccttggagtgaagcagatgatttgctgctgcaacaagatggatgcaaccactccaaaatactccaaggcacgttatgatgagattgtgaaggaagtctcatcctacctcaagaaagttgggtacaaccctgataagattgccttcgttcccatttctggttttgagggcgacaacatgattgagaggt

SEQ ID NO: 10427 - DNA, 302 bp, Zea mays
cgcttcccccccaaaaaccctagccatcccaggttgctccggccgcatccccgccgaccgccgacgatgcctcccaaggccaagaaggacgctgcgccgtctgagcgccccatccttggacgcttctcctcccacctcaagatcgggatcgttgggttgccaaatgttggcaaatcaacttttttcaacatagtaacgaagttggctatcccagctgagaattttcctttctgtaccatcgaaccaaatgaagcacgggtgaatgttccagatgaacggtttgattggctttgcaaacttta

SEQ ID NO: 10428 - DNA, 300 bp, Zea mays
tccccccgcaaaaaccctagctttacctccccacaagcgcctccaagatgaagctcgtcaggttcttgatgaagctgaacaacgaaacggtgaccatcgagcttaagaacggcaccgtcgtacacggaaccattaccggtgttgacatcagcatgaatactcatctgaagactgtgaagctgacactaaaagggaaaaatcctgttacccttgatcaccttagtgtgaggggaaacaacatccgctattatatccttcctgacagcctaaacctggagactttgctggttgaggaaacac

SEQ ID NO: 10429 - DNA, 301 bp, Zea mays
cctgttccagctagctaggagagagctttatttaggcggcggcaacaagatgaacaggaagccaggagactgggactgcagggcgtgccagcacctcaacttcagccgtcgggacgcatgccagcgctgcagtgaaccacgtggagttggtgatcgtagcggcggtggtggcgacttgggtgggcgtggtggttcctccttcggcggtggctttggtgctggctctgatgtccgccctggtgactggtactgctcctgcggcgcacacaacttcgccagccgctccaactgcttcaggtgc

SEQ ID NO: 10430 - DNA, 299 bp, Zea mays
gataaaacgtgacctcggccgaattgagaaatgggttatccgtaatgcatttgatgatgaggagaggccctatttacctaagcacattctctacaggcaaaaggaacagttcagtgatggtgttgggtatagttggatcgatggattgaaggaccatgccagccaacatgtctccgattccatgatgatgaatgctggctttttttaccccgagaacacacccacaacaaaagaagggtactactacagaatgatattcgagaaattctttcccaagcctgcagcaaggtcaactgttc

SEQ ID NO: 10431 - DNA, 244 bp, Zea mays
cccacgcgtccggtatcttagcaccaaaaacactattttgaagaaatatgatggcaggttcaaggacattttccaggaggtgtatgaagctggttggaaaaccaaatttgaagctgccggcatatggtatgagcaccgccttatcgatgacatggtagcatacgcacttaagagtgaaggagggtatgtctgggcttgcaagaattatgatggagatgtgcagagcgatttcttagctcaaggt

SEQ ID NO: 10432 - DNA, 240 bp, Zea mays
gtccctgatggcaagcctcagcaacccgtacatcgtcgagtacaaggacggatgggtggacgaggggacctccgtctgcatcgtcacaagctactgcctaagaggggacatggccgagaggatcaagaaggcaaggggcatcctattctcagaagagagggtgtgtcggtggttcacgcaattgctcctcgccctcgactacctgcactgcaaccgtgtgctccaccgtgatctcaagtg

SEQ ID NO: 10433 - DNA, 242 bp, Zea mays
ggcggagcggaaggcgaaagagtagcagcagcaggcggcgccgagtagcggctccccacctcgagcttgccaccatggctagagggttgaagaagcatttgaagaggctcaatgcgcccaagcattggatgctggacaagcttggcggagcttttgctcccaagccatcttctggacctcacaagtctagggagtgcctgccactgattctcatcatcaggaacaggctcaagtatgctctt

SEQ ID NO: 10434 - DNA, 237 bp, Zea mays
cctgtttgcatccctctggctgttctggaagctagggctaatgctgctgcaaaggaaaagaagcttgagaaggacattgagaatgagaatggaggtgctggggtctattctgcaagtctcaagaaacattatattttggccaatgatgaatggaaggaggatattcttccagagatactggatggtcacaatgttgccgatattctggatccagatatccttgtaaggtgtgaagag

SEQ ID NO: 10435 - DNA, 237 bp, Zea mays
gcttctcctggcggcgcccgtccgcccggcctcggcggctccggtggtggatggcctgctcagcaatggtgactttgagacagcaccaagtggtggttttgtaaaatctgcttctgttgctgagggtgcatcgtcaatccctggttggacgatcaacggcacggttgaactcatttcagcaggccaacaccagggtggcatgatcctgattgttccacagggggaccatgcagtaag

SEQ ID NO: 10436 - DNA, 239 bp, Zea mays
atccagcaagacctggacagaagtggcacgtcttctacgccactgagtacccagagcaaccaatggttaaccttgagatgtgcatgactggtctggacaagaagaaagcttgtgtctttttcaagactaatgctgatgggaacacaacatgtgccaaggaaatgacaaagctctctggcatctctgaaatcatccccgagatggagatctgcgattttgacttcgaaccctgtggctac

SEQ ID NO: 10437 - DNA, 230 bp, Zea mays
cacacgcgtccgcccacgcgtccggcggcggcgcgggcggacaaggagcatgcggaggaggagctgtgccaagccacaatgggtatctcgcgtgactcgatgcactagcgccgggcctacgttggaaagcagaaggcctggaggaagaagcgaaagtatgagcttggtcgccagccagccaacaccaagttgtcaagcaataagacagtgaggagggtccgtgttcgtgg

SEQ ID NO: 10438 - DNA, 237 bp, Zea mays
aggtagaaggaatccaagttgaaggcttcaagaatgcacatttatgtccgccgaggtggtccaaattaccaatctggactggctaaaatgcgtaactatggtgcagaactcggcgttccaattgaggtgtatgggccagaagcgactatgactggaatctgcaaacaagcaattgaatgcatcatggctgcagcgtaatcagagcgtagctggtgctagtctgggatctgcaaacac

SEQ ID NO: 10439 - DNA, 239 bp, Zea mays
cccacgcgtccgctcagccaaggactggagaggtggcagggctgccagctttaacatcattcccagcagcaccggtgctgccaaggctgtcggtaaggttcttcctgaattgaatggcaagctcactggcatgtccttccgggttcccaccgtggatgtgtcagttgttgacctcactgtcagaatcgagaagggggcctcttacgaggaaatcaagaaagctattaaggctgcttctg

SEQ ID NO: 10440 - DNA, 238 bp, Zea mays
tgatcagccacaaccctgacaacggcacatcgaggattaagctgccctctggcgccaagaagattgtccccagcagctgcagtgctatgattgggcaagttgctggtggaggcaggactgagaagccgatgctcaacgctggtaacgcgtaccacaagtaccgtgtgaagaggaacagctggcccaaggtgcgtagtgtggccatgaaccctgtggagcatccccacggaggaggtaa

SEQ ID NO: 10441 - DNA, 239 bp, Zea mays
cccacgcgtccggccgccactcaccagcaaattcccaagccgccccttcccccatctctttcgcgccccatttgatcgattcctgatggcgcccaaggccgagaagaagcccgcggagaagaagccggcggaggagaaggccgagaagaagccaagggcggagaagcgcgtgccgagcaaggagggcggcgagaagaagggaaagaagaaggcgaagaagagcgtcgagacgtacaaga

SEQ ID NO: 10442 - DNA, 248 bp, Zea mays
  unsure (1)..(248): unsure at all n locations
ngtcacggcggntactgtctacgttcagatactgtgcagcagatcctgaggtcccgggcgaccgtgaagcagcttcaatcgtcggcatggcgctcgtattgcatagtggggctggaaacaagaatgccttcaaagcacttattgctgcagaatacagtgggatcaaggttgagttgaccaaggattttgagatgggtgtctccaacaagacccctgagtttcttaagatgaacccccttgggaaggtt

SEQ ID NO: 10443 - DNA, 235 bp, Zea mays
cccacgcgtccgaaagatttggatcttcatcagctatataaggaggtcacatcacggggtggtattgacaagttgaaggcagagaatagatggagggaagtgaccgcatcatttattttccccgccactgcaacaaatgcttcttttatgttgaagaaatactatatgtcactcttatatcattttgagcagctatacttttttagagtgcaaggctggtaccaacaagaaatag

SEQ ID NO: 10444 - DNA, 235 bp, Zea mays
tgatgatggccttgcaccacctggaacaagggtctcaggggaagatgtcattattgggaagacatctcctattccacaagatgacgctcaagggcaagcttctagatactcaaagcgtgaccatagtactgctctgcgtcacagtgaaagtggcatggtagatcaggttctgttaacaacaaatgcggatggtctaagatttgtcaaggttaggatgcgatctgttcgcatacca

SEQ ID NO: 10445 - DNA, 235 bp, Zea mays
aagacttccgtccgagtctgagctcatctccgcgcgctgccgccgccgccgccgccgctcgacgcccaccgcgcagcatggcggaacagaccgagaaggcttttctcaagcagcctaaggtgttcctcagctcaaagaaatctggcaagggtaagaagccaggcaagggtggcaatcgattttggaagagcattggccttggtttcaagactcccagggaagcaattgaagggac

SEQ ID NO: 10446 - DNA, 233 bp, Zea mays
accagatgagcgataccttgtgggtaggattggacctaaagaatatcggatgtaccgttgcattgttagatatggttacaaagatgtgcagagagatgatgacaattttgagaacatgttagttatgagcatcgcaaagtttattatgatggaagcagaagatgcttcttcagcaagttatgatatcgctaacgaaggaaggatggcggtcataacaaccactgatgcctctg

SEQ ID NO: 10447 - DNA, 231 bp, Zea mays
caccaccaccacatcgtcctcgtcctcgtcctcctccgcccgccgcgacgacgaccccgacccgccgccgaggtcgctcagggacccgccctacacgctggggcccaagatctccgactgggacgagcagcgcgccgcctggcaacgccgccacccggagacgcggccttcctcaacgacatcaagccacgggtgctgctcgtcacggggtcctcgcccaagccctgcgag

SEQ ID NO: 10448 - DNA, 236 bp, Zea mays
cccacgcgtccgcccacgcgtccggcggctgcggcggacacggaggcgaaggaggaggagcagcagcagcaggcggcgccgatggagctgcatcccactcagtgcttgcaaccatggctaggggattgaagaagcacttgaagaggctcaatgcgcccaagcattggatgctcgacaagcttggcggagcttttgctcccaagccatcttctggacctcacaagtccagggagtgc

SEQ ID NO: 10449 - DNA, 229 bp, Zea mays
cgacggcaagcttataccaaaatgcagacatttatcttcttgatgaccctttcagcgcggttgatgcccacacagcaactagtctttttaacgaatatgtcatgggagctctgtcagataagactgtccttttggtgacccatcaagtcgattttttgcctgtatttgattctgttctggtaatgtcagatggtgaaattattcgtgctgcaccttatcaagatttatt

SEQ ID NO: 10450 - DNA, 232 bp, Zea mays
gcaaggacacgtgatccccaccttccgctccaacttctcctcgctcctcgccaccgtggaggcggactgtgccaagggcggcaaggccgagttcaacaagctcaacgacgtcacctccttcgacttcatcggcgaggcctacttcggcgtgcgcccctcggcgaccgagctcggcaagggcgggccgagcaaggcggccaagtggctcatctggcagctccacccgctggtc

SEQ ID NO: 10451 - DNA, 231 bp, Zea mays
ggctcatgtctatgatttctacaaacctgatcttgcaagtgaatatccggttgttgatggtaaactatcccaaacatgctacctaatggctctagactcatgctacagacagttctgcaacaagtatgagaagattgcgggtaaacaattctcaatttgtgatgcagaatattttgtgttccattctccatacaacaagctcgtgcagaagagtttcgctcgactttatta

SEQ ID NO: 10452 - DNA, 227 bp, Zea mays
cgagcgatagtgtttccttgctgctaacctttatgcaaagagtgtgtttggcgaggacgctttggtgaacatcagcattgagaagcaacatgacggcaagctcagtggctacattcgaataaggagcaagacccagggaattgcactcagcttaggggacaagatcactctcaagcagaaaggtggcagttaactgtgacaagtaatcgcagttgtatcatcatttt

SEQ ID NO: 10453 - DNA, 230 bp, Zea mays
  unsure (1)..(230): unsure at all n locations
ggacggcntacggaccgccagtgcgagcgccttgccagtgtcatggccagcaacattccgaccagtgacatcggcgtgatcactagcacggcggggaggaagagcatgctgaagctggctgagaggatggtgacgagcttctgcgatggcgtgacggcctcagccgggcaccagtggacgacgctgtccggcagtggtgctgacgacgtccgtgtcatgaccaggaagag

SEQ ID NO: 10454 - DNA, 231 bp, Zea mays
  unsure (1)..(231): unsure at all n locations
cgatgtcggcacggcgcgagtgctgcgatacggtgnaccttcgtgacgggcaacgccaagaagctggaggaggtccgcgccatcctcgggtcttccgtcccattccagtcgctcaagctcgacctgcctgaactgcaaggtgagccagagtacatatccanagataaagcacgaatcgctgcatctcaggtgaatgggcctgtactggtggaggacacctgcctatgtttt

SEQ ID NO: 10455 - DNA, 229 bp, Zea mays
ggttgtgggagcaggccgaggacctctagtaagagcatcattgcaggctgctgaagaaactggtcgcaagttaaaagtatatgctgttgaaaaaaatcctaacgctgttattactcttcatagtttgatcaaattggagggttgggaaagcctggttactgtaatttctagtgacatgcggtgttgggatgcccctgaaaaggcagatattttggtcagcgaattgctt

SEQ ID NO: 10456 - DNA, 228 bp, Zea mays
caacccagtcgctcaaaaccctagagctctcgcctgctcgcctccgccgccggagcgagctccccatcttcatccgtcaaccatggcgacccagatcagcaagaagaagaagttcgtcagcgacggtgttttctacgccgagctccatgagatgctgacgcgggactggcggaggatggctactctggcgtggaggtgcgcgtcacgccgatgcgcacggagatcatc

SEQ ID NO: 10457 - DNA, 315 bp, Zea mays
cccacgcgtccgctcacgcgtccgggacgcgtggtcagcatccacatctagtgaaattggttggctactgcattgaagatgaccagaggttgcttgtgtatgaatttatgccccgtggaagtttggagaatcatctttttagaaagtcattgcctctaccatgggccattagaatgaaaattgctcttggtgctgcgaaaggcctcgcttttcttcatgaagaagctgaaagaccagtaatctatcgggacttcaaaacctccaatattcttttagatgcggactataacgcaaaactctctgattttggacttg

SEQ ID NO: 10458 - DNA, 301 bp, Zea mays
gagacgagacgaccccccctcccctcaaccggaacttgttttaccccatctcatcccactgactccccccacccacccgcccgctgcctccgccggatctcgtcggactcggatccgcccgaccacgaccaccccgcgtcgccgccgcgcagcagcagcagatcagagaagatggccggactcgacaccttcctcttcacctcggagtccgtgaacgagggacaccctgacaagctctgcgaccaggtctcagatgctgttctggacgcttgccttgctgaggaccctgacagcaaggttg

SEQ ID NO: 10459 - DNA, 313 bp, Zea mays
atctgttctccgcgaggcgcaacgaaggcacaaaacccttacctccatcaaaccctagcgctcgtgtccccgtttagctcccgtcgccgctaccatgggctcagatgcggatatggaggactacgggttcgagtactcagacgaggagccggaggagcaggatgtcgatatcgagaaccagtattacaactctaaaggtttggttgagacagacccagagggtgcacttgctggttttgatcaagtagtcagtatggagcctgaaaaagctgaatggggatttaaagctcttaaacaaactgtcaagctttac

SEQ ID NO: 10460 - DNA, 308 bp, Zea mays
cagttcaaggacattttccaggaggtgtatgaagctggttggaaaaccaaatttgaagctgccggcatatggtatgagcaccgccttatcgatgacatggtagcatacgcacttaagagtgaaggagggtatgtctgggcttgcaagaattatgatggagatgtgcagagcgatttcttagctcaaggttttggctcattgggtttgatgacttcggtactggtgtgccctgatggaaagacgatcgaagctgaagctgcccatggtactgttacccgtcattaccgtgttcaccagaaaggaggtga

SEQ ID NO: 10461 - DNA, 314 bp, Zea mays
gtttcatctacacctccttccaagagcgggcgaccttcatctcgcatgggaacactgctcgtcatgccaaggactttggcgacttaaagctcgcacaaatctgtggcatcatcgcctcagatgagaagcgacatgaaactgcgtacaccaagatcgtggagaagttgtttgagatcgaccctgatggtaccgtggttgctctggctgacatgatgaagaagaagatctcaatgcctgcccacctgatgtttgacggtggaaggtggcggacctgactggtctgtcgggtgaggggaacaaggcgcaggactacc

SEQ ID NO: 10462 - DNA, 317 bp, Zea mays
cgcaagttcaatctcacctccaaccatgggtaaagagaagtcccacatcaacattgtggttattggtcatgtcgactctggcaagtcgaccaccacaggacaccttatctacaagcttggaggcattgacaagcgtgtgatcgagaggttcgagaaggaggctgctgaaatgaacaagcggtccttcaagtacgcgtgggtgctcgacaagctcaaggctgagcgtgagagaggtatcaccattgatatcgctctgtggaagtttgagaccaccaagtactactgcacggtcattgatgcccctggacaccgtgact

SEQ ID NO: 10463 - DNA, 292 bp, Zea mays
gtgaccaccatccctacaatcgggtttaatgtggagactgttgaatacaagaacattagcttcactgtctgggatgttggaggtcaggacaagatcaggccattgtggaggcactatttccagaacacccaaggccttatctttgttgttgatagcaatgacagagatcgtgttgttgaagcaaaggatgagctccacaggatgctgaacgaggatgaattgagggatgctgtcttgctcgttttcgcaaacaagcaagatctaccaaatgcaatgaacgctgctgagatca

SEQ ID NO: 10464 - DNA, 314 bp, Zea mays
cgcttccaagatgtcgaagcgagggcgtggaggttcggctggtaacaagttccggatgtcactgggtctaccagtggcagctactgtgaactgtgccgataacactggagccaagaacctgtacatcatttctgtgaagggaatcaagggtcgccttaacaggcttccttctgcctgtgttggtgacatggttatggcgaccgtgaagaagggaaagcctgaccttagaaagaaggtgatgccagctgttattgtgaggcagcgcaagctatggcgccgaaaggatggtgtctacatgtactttgaagacaatg

SEQ ID NO: 10465 - DNA, 316 bp, Zea mays
cacagatcacacacactcgagaactccatttcgatctcatttgaaatcaacccatcctcgtttcctccgtctagcagcctctcaccctcatggccaagatcaagatcgggatcaatgggtttggcaggatcggaaggctggtggccagggtggccctgcagagcgacgacgtcgagctcgtcgccgtgaacgaccccttcatcagcaccgattacatgacctacatgttcaagtatgacactgtgcacggacagtggaagcaccatgaggtcaaggtgaaggactccaagacccttctctttggtgagaaggaggt

SEQ ID NO: 10466 - DNA, 295 bp, Zea mays
ctttgacaacaggatggtcaaccacttcgtccaggagttcaagaggaagaacaagaaggatatcactggcaaccccagggctctccggaggctgaggaccgcttgtgagagggcgaagaggactctgtcttccactgcccagaccacgattgagattgactcgctgtatgagggcatcgacttctactccaccatcacccgtgccaggtttgaggagctcaacatggacctgttcaggaagtgcatggagcctgttgagaagtgcctgagggatgccaagatggacaagagcacc

SEQ ID NO: 10467 - DNA, 312 bp, Zea mays
caatagaccctcctactgcatcggatctggatgatgctatatcaattgaaatactttcaggaggaactgtccgtattggggttcacattgctgatgtttcttactttttacatccagagactgctttagatgctgaagctcaaagtcgatctacaagtgtttacaccctgaaacataaaatctcaatgttgccttcaggattttcggaagtggtttcacttaatccaggtgtagataggcttgccttttcaattatttgggatattgatcctcatggtaacctaattagtcgttggattggtcgaagcatca

SEQ ID NO: 10468 - DNA, 312 bp, Zea mays
gccaacgtcaagtgctgcccgctcgtgaagggcatcgccgggctctccgcggcggcgtgcctgtgcaccgccatcaaggccaaggtgctggacatttccgtctacgtgcccatcgcgctggaggtgctcgtcaactgcggctgcgaggtcccgccaggctacaaatgcacttaaacgactccattccatttcatcccatctcaccatgcgtgcacagcgaggtctccttttgccctcccgaatgcaaagtttgaaaggctcgtcgacggatttgggtctccttttgcccacccgaatgcaaagtttcgaagg

SEQ ID NO: 10469 - DNA, 313 bp, Zea mays
gggagagattggagggaggcccctgcccaaggcaagagaaaccgcggcgcgcggagagggaggaagggcagacgcagacgggcgaacaagatgagggagatcatcagcatccacatcggccaggccgggatccaggtcggcaacgcctgctgggagctctactgcctcgagcacggcatcgagcacgatggcaccatgcccagtgattcctcggttggcgtcgcacatgatgccttcaacacgttcttcagcgagactggttccggcaagcatgtgcccagggccatcttcgtcgaccttgagcccactgtca

SEQ ID NO: 10470 - DNA, 311 bp, Zea mays
cggacgcgtgggcttagtgtccatgctttctgcccactgctcaaagggaaaaggggcggtgctgtgacaaaggttgggccatggggcggaagcggagtgtctccaatggagctgacagagacggagacgcccatgcgtctggagagcatcaccgtccgcagcggcgtggccgtcaactccatctcattctcctacgtcgactctgccggccacaagcgctctgctggtccctggggtggttccggtggacagcctgatcaggtccagctcgccgagtctgaggtggtcacacaagtgtccggaacatacgg

SEQ ID NO: 10471 - DNA, 280 bp, Zea mays
ggcttatcctttgtatgcttccattaaggcaatagagaccaaatctcctgtggatgatcaacaatggctcacatattgggtcctgtactcactaataacattgtttgaactcacatttgcatcaattattcagtggcttcctttctggccttcaatgaaattgatctttatttgctggcttgtcttgccatacttcaatggcgcagcctatgtgtaccagaattatgtgagacctgccttcataaagaaccagatggtcgacatttggtatgtccctcag

SEQ ID NO: 10472 - DNA, 184 bp, Zea mays
attgccgaccccgtcaacaacaacgcttgggcctacgccaccaacttcgtccccggcaagtgagggaggcgccgccggtgacctttaggtgtccggatgcatgtgagcgcacgctggttttcggtttgtaccatgatgtaaactattgttcaatcgacaaggaataattgtgttcattgtcatt

SEQ ID NO: 10473 - DNA, 288 bp, Zea mays
ggcgctcgacatgaacgccgccgaggacgagatcgtgcgcctcacgcgcgaggtcgtgcccggcatgatcgtcaccgggatggaggtcgccgagatcgacggcgccccgaggatgggcccgacgttcggcgccatgatgatcttcggccagaaggcggcgcacctggcgctgaaggcactgggcaggcccaacgccgtggacgggaccatccccgaggtgtcgccggcgctgcgcgaggagttcgtgattgcgtccaaggacgacgaggtcgtggacgcctgagcgag

SEQ ID NO: 10474 - DNA, 311 bp, Zea mays
gagcgagcaccgtgacctctctgtttctctctcttcccttctcgtcttctgcaagaagccacaacaaatgtgaccgtctctgtttctctcatccccttcatcactctgctggtctccctcttccacctctggtcttggccatggcctccagcgcctcccggttcatcaagtgcgtcacagtgggggacggcgccgtgggaaagacctgcatgctcatctgctacaccagcaacaagttccccactgattacatacccactgtcttcgataacttcagtgcaaacgtggtagtcgacggtaccacggtgaat

SEQ ID NO: 10475 - DNA, 312 bp, Zea mays
cccacgcgtccggcgggcgcacgcagcggcatcgcaggacgcagcaaagccctgaaaccgcccccacgtccccctccccgcaccgcagagccagtcagaacagtaacaccggagcggcagctgcagtggccgaggccggagcacgcaaggcatggatagataccaaagggtagagaagcctcggaatgacacaccaatcagccagaatgagattaggattactactcaggggaggatgaggaactatatcagctatgggatgtcgctgcttgaggaaaatggacacgatgagattagtatcaaggccatggg

SEQ ID NO: 10476 - DNA, 306 bp, Zea mays
cccacgcgtccgcaatgggagaaaaaggcagtgtatacattttacttggagctcataagtgaccttgtgcacttgtcattatacatgctcttcttcatagctatcttcctgaactatggtgtcccgctgcacttgattcgtgagctatatgagactttccgcaacttcagaattcgcattgcagattatgtgcgctacagaaagatcacttccaacatgaatgaacgctttccagatgctacatcagaagagctcgatgtgagtgatgctacatgtattatttgccgtgaggagatgactacagca

SEQ ID NO: 10477 - DNA, 307 bp, Zea mays
cagtccctcacacactcactatacactgctctgctgcagcaagaaggaagaagctagcgcctccctagctctcgttgtcagcaatggccaccaccgccgcgtccagcctcctcaagtcctccttcgcgggctcccggctcccttcggccacgcgcaccaccaccccgtcgtccgtggccgtggccaccccgcgcgccggcggcggccccatccgcgcgtccatctcctcctcccccaccccgccctacgacctgacgtccttccggttcagccccatcaaggagtccatcgtgtcccgcgagatgac

SEQ ID NO: 10478 - DNA, 301 bp, Zea mays
attctccacgctccgatccaatcgcaacaatgaagttcggcaagagcctcaacaaccagatcgtggagacgctcccggactggcgcgacaagttcctgtcctacaaggacctcaagaagcggctgaagcagatcggcgccggctctggcgagcggcggacaagcgccacgagtgggggacgggcgcggcggatcctcgccgcctgcgatgaccccggaggaggccggattcgtcgcgctcctcgacgccgagctcgacaagttcaacgccttcttcctcgagaaggaggacgactacgtca

SEQ ID NO: 10479 - DNA, 304 bp, Zea mays
caagccctgggacgaccactggatcttctgggtgggccctctcgtgggcgctgccatcgcggccttctaccaccagtacatcctccgggctggcgccatcaaggccctcggctccttcaggagcaacgcgtgttgagcggggcttggctgtggagcaatggcgggcgacctacgggcggggggccgtgagcgaggagaatgccatcattcatcgatcgacttgggtgccggtggttggttcgggtcgccttttttttgtttcagcagctgctgcgttgcgcgcgtgcgtgagatttggtttggt

SEQ ID NO: 10480 - DNA, 304 bp, Zea mays
aaaaaagatatctgttctaacccattgtaatactggcagtcttgcaactgctggttatggaactgcccttggggttatacgcgctcttcattcggggggagttttagagaaggccttttgcaccgaaactcgtccatttaaccagggatccagacttacagctttcgagttagttcatgaaaaaatacctgcaacactgatagcagattctgctgctgctgcgttgatgaaacaagggcatgttcaggctgtcattgttggtgctgatcgaatagcagcaaatggtgacacagccaacaagatt

SEQ ID NO: 10481 - DNA, 302 bp, Zea mays
agaaaccaacacatttgagatttctagtgtctaatacggcagcagggtgcatcattggcaagggtggatcaaccattaatgattttcagtcccagtctggggctcgtattcagttatcacgtagcaatgagtttttccctggtacaaatgacagaatcatcatggtttctggactgtttgatgaagtaatgaaggccatggagctgattcttgagaaactgttggctgagggtgaagaattcaacgaagcagaagctagacctaaagttagacttgtagttcctaatagctcttgtggtggt

SEQ ID NO: 10482 - DNA, 306 bp, Zea mays
ggatgccaccacacccaagtactccaaggcccgttatgatgagattgtgaaggaagtctcttcctacctgaagaaggttggatacaaccctgacaagatccactttgttcccatctctggtttcgaaggtgacaacatgattgagaggtccaccaaccttgactggtacaagggcccaaccctacttgaggctttggacttgatcaatgagccgaagaggccttcagacaagcccctgcgtctccccctacaggatgtgtacaagattggtggtattggaactgttcctgttgggcgtgttgagac

SEQ ID NO: 10483 - DNA, 309 bp, Zea mays
cggacgcgtgggcggacgcgtgggcgaaaaaatcacagaactcactcgaacgacggtgccgccgcttgcctcgccggaccatggccgctgtgccgtcggggttcctcctcatcactggcccgccgggcgtggggaagacgacgctggtcatgcgggtgtttgaaaccctcagaggctcctacccgaacctcaacattcgcggattctatacccgagaggtgagagagggcggagaaaggatagggttcgaggttgtcacgctcgacggtagaactggaccactttcctcatgcaaggtttccagcccgg

SEQ ID NO: 10484 - DNA, 320 bp, Zea mays
  unsure (1)..(320): unsure at all n locations
agttgctgatgataatggctatggatgggcaattgcgaaggcacttgctgcggctggtgctgaaattcttgtgggtacatgggtgccggcacttaacatatttgagacaagtctgaggcgtggaaagtttgatgaatcacggaagctgccagatggatctcttatggatattgttaaagtctatccacttgatgctgtctacgattcccctgatgatgttcctgaagatgtcaaatcgaacaaaagatatgcaggggcatcaaactggacagtanaggaagttgttgaatcagtgaggaatgattttggcagcattgaca

SEQ ID NO: 10485 - DNA, 319 bp, Zea mays
tcctcactcacatccctacgcacgaacggaaacgccccgtgctgcgctcgcagtctcgcatggactccaccactgctgctgctaccgcggcggcgcgccgcaccggtgctgctggtgacgaacgacgacggaatcgacgcgccggggctccgcttccttgtcgaccgtctcgtcgccgcagggcgataccgcgtactcgtctgcgcgcccgacacagacaaatcgggtgtgagccactgcatcacatggcgccctgcactccgctgtaaacgtgttgatataataggtgctacagcatttggagtttcaggaactcctg

SEQ ID NO: 10486 - DNA, 317 bp, Zea mays
agcaggcgctggacaccgccgagggcctgggcctgtcgcgcgaggaggcctgccacaacctcctcttcgccaccaccttcaacagctacggcggcctcaaggtgctgttcccgggcctgctggccaacgtggccagcggcggcgagaagctccacgagcggctggtggccgagatccgcggcgccgtggccgacgccggcggcaaggtcaccctcgcggcggtggagaggatcgagctggccaagtcggtggtgtgggagtcgctgcgcctggacccgcccgtcaagttccagtacgggcacgccaagaaggacctg

SEQ ID NO: 10487 - DNA, 316 bp, Zea mays
caatgatggtattcagaaatgcattagggtgcgcttgggttcagggccacgctgtggtatgggaaggaacaggagaggcatggacacttcaggctggagagatgacaagccgtttgacagtagaggctctacattctggccttatcacctggggaagttcctgaggtttcacctttataaggagaacaaggacacacatgaggcactaggggttataggaaaattggcaggggttcagccaagatcgtttggatttgcagggacaaaggataaacgtgctgttacaacccaacaggtgacagtttttaaagtgcat

SEQ ID NO: 10488 - DNA, 314 bp, Zea mays
acagacatcaaatatgcagccaaaggttggtagagggagcggtggtgccgcagggccacaggcgggtggtaattatggcggtggccgtggaggacctgttggacctggtgccggtggtggagctggtggaggcggtggaaatttgtgaagaggtggtggaggcatggggaatagaggccctattggtaatatgaggaacaggatgggcccagctggtggtggtcgtgggataatgggaaatggggggatggttgcgccgccgccaccaatgatgcctccaggtggaatgctggggcagggttttgatcctactg

SEQ ID NO: 10489 - DNA, 315 bp, Zea mays
gatccgccggcgagcgcgcgggggcaatgggtgtcgtctcggcagcggcggacgcgattgtcgcggttttctccctcaccatcgtcgtcgcggcgccgctactcgacgcgcagtccgtcctcccgcataccctctacccggcgccgctcctggaactcaagcgctggtacgccgccgagtttggcgactacctcgtggcccagtcccccggcttcttccgtggccttgtttgcctcgagctcgccttccaatggccgctcgccgtcgccacactctacggcatcctcacccgccgccgctgggctgccaccacct

SEQ ID NO: 10490 - DNA, 314 bp, Zea mays
caactcccaaggtccctttttttttctcgatctggaagcgccgcagtagcagccatggacgtgagcggacaggcggtaaggcgaagaagggcgcggcggggcgcaaggccggcgggccgacgaagaagtcggtgtcgcggtcctccagggccgggctgcagttccccgtcagccgcgtcgggcggtacctcaaaaagggccggtacgcgcagtcgtaggcacgggtgcccccgtctacctcgccgccgtcctggagtacctcgcggccgaggtgctcgagctcgccggcaacgccgcaagggacaacaagaaga

SEQ ID NO: 10491 - DNA, 316 bp, Zea mays
cccacgcgtccgcccacgcgtccgatccgaattcccaggcaggcaggtcggcgaggagggcaggaagaccgaagaccgagccgtgcgggggctcgggacgggaacgggacaggacctcaaaatctcagatccttcctgcccgcccgcccgtgcccgtcgacgcgtcgttcttgccggccgcgccccacctccgccctctcctcctccagggggatcggatacgccacaggctgcgcgatggtgctgtgggtcttcggctacggctccctcatctggaaccccggcttcgacttcgacgacaaaatcctcggcttca

SEQ ID NO: 10492 - DNA, 313 bp, Zea mays
gtgcaagaacctcaaacttttggaagtgatgaagcacaaaatccaggtgctgaacaggaagctttcctctgggaactttttgggtcattaagatacttcaccctacccaatttggatggtcttaattgtcactgcccttacttggatggcatggtttccttttaccctctttgatactgattggatgggccgagaaatctatcgaggaagcccagacaacccaggagagacccaaaggtaccatgatggtgtgagaatgggttcttttggtctaatgctcaactctgtcgtccttggattcacctctgttgtg

SEQ ID NO: 10493 - DNA, 307 bp, Zea mays
gctcgtaccgccagctcttccacccagagcagctcatctcggggaaggaggatgcagctaacaactttgcccgtggccactacacggttgggaaggagattgtcgatctatgcctggaccgtgtgcgcaacttgcagacaactgcactgggctgcagggattcttggtgttcaatgctgttggtggtggtactggctctggacttggttcactgctgttggagcgcctttcagttgattatggcaagaagtctaagcttggtttcaccatttatccttccccacaggtgtcaacagctgttgtagag

SEQ ID NO: 10494 - DNA, 307 bp, Zea mays
gggttctggaaccattggtactgtgtaccatggaaagtggagaggctcagatgttgctataaagagaatcaacgagcgatgttttgctgggaaggcatctgagcaagagcgtatggtatgaaatgttttcttttagattgaatccatcatgtgctatcttttcttttgtatgtagaggactgatttctggaatgaggcagacaagcttgcatctttgcaccatccaaacgtagtagcattgtacggtgttgttctagatggacctggtggatctgttgcaacggtaacggagtacatggctaatggc

SEQ ID NO: 10495 - DNA, 310 bp, Zea mays
gcagctggtaagaccactatcctctacaagctcaagctcggcgagatcgtcaccaccatccccaccattggatttaacgttgaaactgtcgagtacaagaacattagtttcactgtttgggatgtcggtggtcaggacaagatccggcccctgtggaggcactacttccagaacacccagggcctcatttttgttgtagacagcaacgacagagagcgtgttgttgaggccagagatgagctccaccggatgctgaatgaggacgagctccgtgatgctgtgcttttggtgtttgcaaacaagcaagatc

SEQ ID NO: 10496 - DNA, 311 bp, Zea mays
gcacacacacgcaaccagatctcccccaaatccagccgtcggcacctccgcttcaagatgcagatctttgtgaaaaccctgactggcaagactatcaccctcgaggtggagtcgtctgacaccattgacaacgttaaggccaagatccaggacaaggagggcatccccccagaccagcagcggctcatcttcgctggcaaacagcttgaggacgggcgcacgcttgctgactacaacatccagaaggagagcaccctccaccttgtgctccgcctcaggggaggcatgcagatcttcgtgaagaccctgac

SEQ ID NO: 10497 - DNA, 311 bp, Zea mays
gaagaatgttgctgtgaaggatctgaagcgtgggtatgtggcctccaactccaaggatgaccctgccaaggaggctgctagcttcacctcccaggtcatcatcatgaaccaccctggccagattggcaatggctatgccccagttctggactgccacacctcacacattgctgtcaagtttgctgagctcgttaccaagattgataggcgatccggcaaggagctggagaaggagcccaaatttctcaagaacggtgatgctggtatggtgaagatggttcccactaagcccatggtggtggagacctttt

SEQ ID NO: 10498 - DNA, 309 bp, Zea mays
cagaatggtttgcaagctttgggcgcaagaacaactctggaaccaagctctattgcatctcagggcatgtgaacaaaccttgcaccgtggaagaggaaatgagcatacctctgaaggagttgctcgagaggcactgtggaggtgtgagagggggatgggacaacctgcttgcggtaattcctggcggttcatctgttccccttttgccaaagcacatatgtgatgatgtgttgatggactatgatgcactgaaggctgtgcaatctggattgggtaccgcagctgttatcgtgatggacaaatctacgg

SEQ ID NO: 10499 - DNA, 305 bp, Zea mays
gagcaacgaagtattcaaaccgaaaacaatggagccggtgcggaagagcgtgtgcgtgaccggcgctggcggcttcgtcgcgtcggagctggtgaagctcctcctctcccggggccaatacgcggtccgctgcaccgtgcgcgaccctggtgctagcaagaatgcccatctcaaggtgctggaaggagctgaggaaaggttgcagcttctcaaggctgatctgatggactacaacagcattgcatcagcagttgccggctgtgagggtgtcttccatgtagccagtcctgtcctttcccatcgac

SEQ ID NO: 10500 - DNA, 302 bp, Zea mays
gtagggacttcttgaagaacatgtgcaatagagaatcctgccggtttttacaccctgggacacatacagcggctgcgagcgccaatgttgaagtatgccgtgattttaaacgaggagaatgcaatcgacctgcctgtcgctttttgcatccatatacaagttgaagttttctgttagctaaacttgagtgctctgcccaccgccgccgctactgctgtgctgctgctgctgctgctgccgccgctgctgcgccaccaccacccattctgcttctgccaccaaagagctgctgcgctggctgt

SEQ ID NO: 10501 - DNA, 298 bp, Zea mays
gccaaggtgcagcgcgcggtgtgcatgatctccaactccaccagcgtcgtcgaggtgttctcccgcatcaacagcaagttcgacctcatgtacgccaagcgcgcgttcgtgcactggtacgtcggcgagggcatggaggagggggatttcttcgaggcacgcgaggacctggccgccctggagaaggactacgaggaggtcgccgcagagggcggcagtgatgacggtgacgaggaggaggaatactgatctgcttgcatgaatctgtttggctgtcgagccaggttgtggtgttgaa

SEQ ID NO: 10502 - DNA, 298 bp, Zea mays
cccacgcgtccgcggatccgtcctgcaaatctcctctcatacttctccaccggatccctgtaagattcccggagatgtcggacgaggagcaccagttcgagtccaaggccgacgccggcgcctccaagacctacccgcagcaggccggcaccatccgcaagaacggctacatcgtcatcaagggacgtccctgcaaggttgttgaggtctccacttccaagactgggaagcatggccatgccaagtgccactttgttggcattgacgttttcactggaaagaagcttgaggatattgt

SEQ ID NO: 10503 - DNA, 299 bp, Zea mays
cccacgcgtccgcccacgcgtccggccatctaggacccaacaatgagagtttctcacgacaccacctatcttcttcaccacaaagcagtaagcgaaggtttaaccttagctttacgccacgatctgcaagggtaggcaatgaaaatggagtccaattgttgagcccctcggaaatccctcgaagggactggttcccctctgacttcatctttggtgccgccacttcagcgtaccaaattgaaggtgcatggaacgaagatggaaagggggaaagcaattgggatcacttctgccacaat

SEQ ID NO: 10504 - DNA, 320 bp, Zea mays
ggctcccgctccctccgcagagcatctcaacaccgccttgaggaccccccaactcgccggctgcagccatggtgaaatattcgacggagccaaccaaccccaccaagtcaaccaaggccatgggccgtgacctacgtgttcacttcaagaacacccgtgagacagcttttgcccttaggaagttgtcactcaccaaggccaaaaggtaccttgaggatgtgattgcccacaagcaggccatcccgttccgcagtattgtggcggtgttgacgtactgctcaggctaagtctcgtcactcaaatggacagggacgctggcc

SEQ ID NO: 10505 - DNA, 323 bp, Zea mays
cagcactccaggagtcagtgcaatactttttgatgcattagcaaaggcaaacattaatgttcgagcaatagctcaaggttgcagtgaatacaatattactgttgtattgaagcaacaagattgtgtaagggctctgagagctgctcactcaaggttcttcctctccaaaaccacacttgctgttgggatcattggacctggtttaattggtggagcactccttaaccagttgaagaatcagactgctgttctcaaggaaaatatgaacattgatctgcgtgtcattggaataactggctcaagtacaatgcttttgagcgaca

SEQ ID NO: 10506 - DNA, 320 bp, Zea mays
gggacctgtgaaattgcaatggctgttgatgtgaatgatcgtggggcaatgctaggccttgtgaagagctccattggtacgaaattcactgcccagtttggtgaccttattgctgaccttgctattgatgctactacaacagcaggtgttgaccttggtcagggtatgcgtgaagttgatatcaagaaatacattaaagttgaaaaggttcctggtggtcagttggaggattctagagtccttaaaggagttatgatcaataaggatgtcgtggctcctgggaaaatgaggagaaagatagtaaacccccgtatcatcct

SEQ ID NO: 10507 - DNA, 317 bp, Zea mays
agctcttgcaaggagaaaaaaaaaggaggggcaaggaacgcgctggctgagagacatggttctgacgcacgttcacgaccttgacgaggcatccgccgcatcggccgtcgtcttcgcctcgagatacgtgcaggacccgcttccaaggtatgagctgggagagaagtccgtctccaaggacgcggcgtaccagatcatccacgacgagctgctgctggacagcagccgcggctgaacctggcgtcgttcgtgaccacgtggatggagcccgagtgcgacaagctcatcctcgatggcatcaacaagaactacgccga

SEQ ID NO: 10508 - DNA, 317 bp, Zea mays
gtcgtcgcctgtccgctggacgaggtcctcgtgcagtacgtgctagaccacttcgtcacgctgaggttcgtcagccccacgttcaccgtgctccctggccttatccctgcaagatcctaagcggaggtatatattaatttacctgcgaggatgtggtgtctgcaatcacctctctttctttctttgtgctgaccataataagctactcccaggatggagtcactttgcgcaatttacaatagctctaattaataaagaccctaagacatctaagtattcagatacactgcatcggttttggcagacagagcatgatt

SEQ ID NO: 10509 - DNA, 317 bp, Zea mays
ggaccgtccgcccacgcgtccggacggcgagaccagccgcttcgtcgacaagtacgacgtcacgctcgacgtctgcctctcgtcggtgatctcccagtccaagatcctctcgccgcacgagcaggtcgggcagcggatcgacgtgtgcgtggaggacgagacggtgaggtacctcaaccgccgggacgtgcaggcggcgctgcacgcgaggctcgtcggcgtcgacaagtgggcggtctgcagcagcgttctcgagtacgacctgctcaacctgcagatcccgaccatcagcgtcgtcggatcgctcgtgaaatccg

SEQ ID NO: 10510 - DNA, 319 bp, Zea mays
cgagaagtgacaatagcttaattcgtgttgatcgtctagaatatcacatcacggaggagcttaacaaaacagcccctcgaaccatggttgttttgcgacctctaaaggtggtaataactaacttggaagaaggaaaagtactagaccttgatggcaaaatgtggcctgatgcttctgatactgatgcttcctcccactataaggttccgttctcaagaactgtctacattgagaaaactgattttcgcctaaaggactcaaaagactactatgggctagcccctggtaaatctgtcatgctaaggtatgcgttccccat

SEQ ID NO: 10511 - DNA, 322 bp, Zea mays
atcgacggaagcttgagaggaaagctgtcctcaaagctatttgtgctggttttgaggaaactacagaaccaaatgtttgcctgagtgatgatatagagacaaatgagtgtctgaatgacaacgggggctgctggcaagacaaatctgctaatgtaacagcctgtagggacaccttccgtggtagagtgtgtgaatgccccactttcaatggcgtacaatttaaaggcgatggctacagcaattgtgaacctgctggaccaggaaaatgcttgataaaccatggaggatgttggcatgaaactcgcaacggaaaaacattctc

SEQ ID NO: 10512 - DNA, 326 bp, Zea mays
ccgcacgcgagggcatcctcagcatctggaaggaggccgacttcatcaaggtcagcgacgacgaggtggccttcctcacgcgcggggacgccaacgacgagaagaacgtgctgtccctgtggtttgacgggctcaagctgctcgtcgtcaccgacggggacaagggatgcaggtacttcaccaaggacttcaagggcagcgtgcccggcttcaaggtcgacaccgtcgacaccaccggcgccggcgacgccttcgtcggctccctcctcgtcaacgtcgccaaggacgactccatcttccacaacgaggagaagctccgcgaggcc

SEQ ID NO: 10513 - DNA, 322 bp, Zea mays
gtgggctgctgagatcagagatcctcagaagggtgtccgtgtttggcttggtactttcaatagtcctgaggaagctgcaagagcttatgatgctgaagcgcgcaggattcgtggcaagaaggccaaggttaactttcctgatgcaccagaagttggtcagaagcgccgttctggctcagcttccgctaaagcatccaagtcaagttttggacagaagcctattgtcaaagtaactatgaacagccttgccaacacaaatgcatccttcttccaatctgttagctacccctccaattcatttgttcagcatggcaatatacca

SEQ ID NO: 10514 - DNA, 305 bp, Zea mays
ggaatgctgaagtattttatagggctgcttcattctttaacctattattgtttctttatggtggaaggtacaaaactgttgtagaaaggattctgaaggcaagacttgtttatgggagccccaacatgaatagagctgttagttttgagtacatgaatcggcagctggtctggaatgagttttcggaaatgttgcttttgcttcttcccctcctaaactcgtcttcggtaaagaagttccttctccccttctccaaagataagtcaggaggttcttctggtgatgaagcagattgtcctatatgt

SEQ ID NO: 10515 - DNA, 311 bp, Zea mays
ggcttgcttgattgttccaggtattcgcagtcgaccgtgtcctcggagcacgatgaaggttgttgctgcctacctgcttgctgtcctcgctgggaatgccagcccctccgctgaggatttgactggcattctggagtcagttggctgtgaagttgacaatgaaaggatggaactgctgctgtcccaactgagcggtaaggacatcaccgagctcattgccgcgggcagagagaagtttgcttcagtcccatgtggcggcggcggtgtggctgttgcggcaggtgcacctgctgctggcggactgctcctgc

SEQ ID NO: 10516 - DNA, 314 bp, Zea mays
ggtatccagcgacctctaaaaaccatcgctattaagtcaggagatgtgtatattcctcgtggtgtttcagttcctgcccttgacaaagatgtattgtgggaatttcagccaacgaagctaggtgttggagatgtcatcacaggtggagatctatacgctactgtttttgagaacacattgatgcagcaccatgttgctcttccaccgggttctatggggaaaataagttacattgcaccagctggccagtacaacctgcaggacacagtgctagaattggaatttcagggcataaaacagaaatttaccatgct

SEQ ID NO: 10517 - DNA, 315 bp, Zea mays
gttacaaatgagatggtccgcttaattgagacagcaactgcccctgtcttggctgtcgacattgccggtaacataaatggatggaacaataaagctgcagaactaacaggtttacctgtaatggaagccatagggaggcccctgatagatcttgttgttactgattctatagaagtggttaagcagattttggactcagctttacaaggaattgaagagcaaaatatggaaatcaagcttaaaacattccatgaacatgaatgcaatggtccagtaatcttgaaggttaactcctgctgtagtcgggacctttca

SEQ ID NO: 10518 - DNA, 316 bp, Zea mays
cggacggtggacctgacagaggcagaaactgaatatgctgttagtgtggttaaacacatttatgacggctacattgtattgcagtacaattgtgctaacactatagaagaacaactgctagaagatgtcactgtttgcgttgatgcctcagatgctgaggagttttcagagatttgttcaaagcctcttgcaagcttgccgtataattcacctgggcaagtttttgttgcttttgaaaagccagagcgtgtacctgttgttgggaagtttttaaatttgttgaagtttacagttaaagaggttgacacaactacgg

SEQ ID NO: 10519 - DNA, 315 bp, Zea mays
aggaccgtccgcccacgcgtccgaggagtttgagggcaagaagctcgtctctgccaccaaggagggcctgaagctggacgagagtgaggatgacaagaagcgcaaggaggagctcacggagaagtttgagggcctctgcaaggtcatcaaggaggtgctgggcgacaaggtggagaaggtggtggtctccgaccgcgtggtggactccccctgctgcctggtgaccggcgagtacggttggaccgccaacatggagcggatcatgaaagcccaggcgctgagggactccagcatgtctgggtacatgtcctccaa

SEQ ID NO: 10520 - DNA, 317 bp, Zea mays
gtccgtggccgaaatcaccaacagcgccttcgagccatcctccatgatggccaagtgcgacccccgccatggcaagtacatggcatgctgcctcatgtaccgtggtgatgtggttcccaaggacgtgaacgctgctgtggccacaatcaagaccaagcgcaccatccagttcgtggactggtgcccgactggcttcaagtgcggaatcaactaccagcctcccagcgtcgtccccggcggtgacctggccaaggtgcagcgtgccgtgtgcatgatctccaactccaccagtgttgtggaggtcttctcccgcattg

SEQ ID NO: 10521 - DNA, 306 bp, Zea mays
  unsure (1)..(306): unsure at all n locations
caccacgcgtccgcggaccgtggggagtggnncggacgcgtgtgcggacgcgtgggcggaccgtgggtgcgcctctacatttcttctctcactggtcctccgcctccgcctgactgcatccaagacccgggatcgcacatgtcggactcggaggagcaccacttcgaatcgaaggccgacgctggggcgtccaagacctagccgcagcaggctggcaccgtccgtaagaacggcttcatcgtcatcaagaaccgtccctgcacagttgtggagggttctatctccaagactggtaagcatggccac

SEQ ID NO: 10522 - DNA, 321 bp, Zea mays
cccacgcgtccgggctggtgcccgtgtcattgtgaccgagatcgaccccatctgcgccctccaggctctgatggagggtcttcaggtccttcccttggaggacgttgtctcggaagctgacatcttcgtgaccaccactggcaacaaggatatcatcatggttgaccacatgaggaagatgaagaacaatgccattgtctgcaacattggccactttgacaatgaaattgatatgctcggccttgagacctaccctggcgtcaagcgcatcaccatcaagccccagactgaccgctgggtgttccccgagaccaacactgg

SEQ ID NO: 10523 - DNA, 311 bp, Zea mays
cggacgcgtggcggacgcgtgggcaattgtgtccgagctctccaacaaggatttcgactcatatgtcctctctgagtcaagcttgtttatctatcctctgaagattatcatcaagacctgtggcactaccaagctcctgctcaccattccaagaatccttgagcttgctgaagagctgtctatgccacttgctgctgtgaagtactcccgtgggacgttcatctttcctggtgcacagccagccccccacaggagcttctctgaggaagttgctgcacttaaccgctactttggcggcctgaaatctggtg

SEQ ID NO: 10524 - DNA, 307 bp, Zea mays
cttggagaaacctgatgttattccagagcataatttgtatttccaggtttactacagattcaacaacatatccttgctcagagagccgttgatgctgattactggtttcttcctcctgtttgtggcctgtattgtttacatgcgtactgatatgtcaatatccaagagctctccttcctacttggccaagctgcaatgggatgaggtgcaagcaactgttcagaaaatccagggtatctttgagcaatgcttagcagttcatgataaactggaggcctcattgcgggatttgtctaggacaggagac

SEQ ID NO: 10525 - DNA, 313 bp, Zea mays
aggaccgtggtccgcgaagtacatgacattcaagaaggactacaacgagctgctcctgctgctcctgcgcacactggtcaaggacgccgtgcacttcaccgaaatcatggcaggatcagcctcacgccttactcacgtcgaggtcaaattggaggacctgaggaacaaggcccaagaatacgagatctacgatctgaagcccttcttctccagcgcgtgcttcagggacaacggcttcgttctggatgaggggcgtgggatcatcaggcatccactggcggagtaactgatcatcaggcattagggatgaaga

SEQ ID NO: 10526 - DNA, 320 bp, Zea mays
cagaggtactggaaggagaggattactgcccccatcatcatctccctcgccaaaggaattgaggcctcgctggatccactcccacggatcataactcccacgcagatgattagcaatgcaactggagttccatcagagaatattctttatcttggcggacctaatattgcttctgaaatttacaacaaagaatatgcaaatgcacgtatttgtggagctgacaaatggagaaagccccttgcaaagtttttgaggcagcctcattttattgtgtgggataacagtgatctcatcactcatgaagtcatgggtggcttaaa

SEQ ID NO: 10527 - DNA, 318 bp, Zea mays
cggaccgtgggcgcatccaaaagggagtgttctggcaccgatggctggcttggttgtgatgattcccatgccagacatgtatgtgtgtggatgtttctggactgcaaactgatgtgactctagcatcttattcaaagggaaacagcaaacacatacatgtctggcatgggaatcatcaccaccattacagacagactgtaagagctgagcatgcagttgaagatagctcccaacctagtcatgcttctgaagggaagtcgcatccaaaagggagtgttctggcaccgatggctggcttggttgtgaaagttttgcttg

SEQ ID NO: 10528 - DNA, 322 bp, Zea mays
atgatgaaaggaaggacgaggatggaaggaagtctctcagctctgaagagaaaccacagcagacaagtacggctaccgatgaagaacctgcaggaagcaaaggaaccaccgaggatcagatggacgtggacagcgggaatggagagggtggagttgtaggccctgtcccaccagcaccagacactgaagggggtaatgatgaagtatcagttcaagagatcagtgaagcccagcccttgccttgaagacggcgctcctttcccttcaagctccgctttcttctcccgcacctggcgatcttcacgatgttgttgttgcacag

SEQ ID NO: 10529 - DNA, 321 bp, Zea mays
ctctcgcaagtcgccaagccaccgatttgtttacaggcgccggagctcccgacgacgactgagccatgtgcggcggcgcgatccttgccgagctccgcgagccggcgccgcgccggctcacggagcgggacatctggcagcagaagaagaagcccaagaggggcggcgccggcgggaggcgctcgttcgcggcggaagacgatgaggacttcgaggccgacttcgaggactttgaagccgactccggtgattcggatttggagctcggggaaggggctgacgacgacgtcatcgagatcaagcccttcgccgccaagagta

SEQ ID NO: 10530 - DNA, 321 bp, Zea mays
cggacgcgtggggacgagaagctcgataagcttcgcgccgaggtcgccaagctcgaccagatcagcgagaacgagaagtccgggttcatcagcctcgtgtcacggtacctcagtcgggaggcggacagatcgagtggagcaagatccagacccctacggatgaggtggtggtgccctacgataccgtcgcgtcgcctcccgaagatctcgaggagacgaagaagctgctggataagctcgttgtgctcaagcttaacggagggctcgggacgaccatgggctgcactgggcccaagtctgtcattgaagtccgcaatgggt

SEQ ID NO: 10531 - DNA, 316 bp, Zea mays
ggcaaagctagaagaagacaacgcaaagggagaggacagaggaggagcagaggacgatgggcagcggcggcgctaacactgcccccctcctcaccccctacaagatgggaaaattcgatgtttcccacagggtagtcctcgcaccactgacgagacagcggtcctacggcaatgttcctcagcctcatgccatactgtactatcagcagagggcgactaaaggaggtcttctgatcgctgaggccacgggggtttcagacactgctcaagggtacaaggacactcctggcatttggacccatgagcaagtcgaagc

SEQ ID NO: 10532 - DNA, 315 bp, Zea mays
cacaaggtctacttcgacatcgagatcgacggcaagcccgcagccggattgtcatggggctttttgggaagactgttcctaagacggcagagaacttccgagctctttgcacaggagagaaaggggtcggcaagagtggcaaagccctccactacaagggaagtaagttccacagaatcatccccagcttcatgctccaaggaggtgacttcactctcggggacgggaggggtggtgaatctatctacggcttgaagtttgcggatgagaacttcaagatcaagcacactggtccaggccttctgtccatggcca

SEQ ID NO: 10533 - DNA, 315 bp, Zea mays
cttcaacgacgagtccttcgcaaagatgaagactggtgtccggatcatcaacgtggccaggggtggagtgatcgacgaagacgctctggtcagggcgcttgactccggcaaagttgcccaggcggctcttgatgtcttcaccgtggagcccccgcccaaggacagcaagctggtgttgcatgagaatgtcactgtaacaccccaccttggagcaagcactgtcgaggctcaggaaggcgtcgctatcgagattgcggaagccgtggttggtgcgctgagaggggagctcgcagcaaccgctgtgaatgcgcccat

SEQ ID NO: 10534 - DNA, 314 bp, Zea mays
aatgggtacaagaatgtgcttgctgttgctgtcgagacagactactcgtacccacatgctgacaagatcaaggagtacctcaaggacccaagcaagtttgctgttgccgccccggttgctgctggggactctggcgctgcagctgctcccaaggaagaagagaaggctgcggagcctgaagaggagtcggacgaggaaatgggcttcagcctcttcgacgactagagctgctgttttcgtcaaactgctgcaagttttggcttttttttttatcatctacaagtactgtttcctatattttttagcagacaaat

SEQ ID NO: 10535 - DNA, 315 bp, Zea mays
caactgccgattataaaataaaccccaaagatgctcgtgctgatggctcatccccttcttatggtagcactgccgtaagtcgtagaattaacatagagaagcatggagatgggcgcccatacaataagaaatcagaaaggaagcgggaaaatattcttgattttaacaacgatccacttccaagctattcaatggatgaggaggcagtgggaataatcacaatggaagatgtcatggaagaacttctacaggaagaaatctatgatgaaacagatgagtatgttgatgtacataacaagtaagtattccactaat

SEQ ID NO: 10536 - DNA, 313 bp, Zea mays
cacgacggtgggcggaagagtgatggcgaggaccatctagtttttgaccggacatcatgaagtatatgcagccttgtgcatgtaatggatctgtggctccgaagctacatgcatttttctgcttataacagaacccacgcgtccgcatggtaggcctcatgtgcgctttgctactgagggttggtcagtttttcttggaatttaccattcttctcttgttttattgcttgattgtggcctcatgtgcgctttgttgctgcatttctcaggttcgacatgccccatgcctactatcactctcgatttgaagaag

SEQ ID NO: 10537 - DNA, 313 bp, Zea mays
ctctctcaagagtttgggtgggacaaggatcttgccaagaagatttggtgcttcggacctgagaccaccggcccaaacatggttgttgatatgtgcaagggagtgcagtatctcaatgaaatcaaggattctgttgtggctggtttccagtgggcatcgaaggagggtgcactggctgaagagaacatgcgcgggatttgcttcgaggtctgtgatgtcgttcttcatgccgatgctatccacaggggtggtggccaggtcattccaactgccaggagggtcatttatgcttctcagctcacagccaagccga

SEQ ID NO: 10538 - DNA, 315 bp, Zea mays
  unsure (1)..(315): unsure at all n locations
ggccaaggaagaagtcggtgtcgaggtccgtgaaggccgggctccagttccccgtcggccgcatcgggcgctacttgaagaagggccgctacgcgcagtngtcggcaccggcgcccccgtctacctcgccgctgtcctcgaatacctcgccgctgaggttctggagctcgccggtaatgctgccagggacaacaagaagactcgcattattccgcgccacgtgcttctggcgatccggaacgacgaggagcttgggaagctgttgggcggcgtgactatcgctcacggcggtgtgctccccaatatcaaccctgt

SEQ ID NO: 10539 - DNA, 317 bp, Zea mays
ggcgcggcggcggcggctaccatggcagtcgggaagaacaagaggatctccaagggaaagaagggtggtaagaaaaagaccgtcgatcccttctctaagaaggactggtatgacatcaaggccccatcggtcttcagtgtgcgcaacattgggaagactctcgtgtccaggacacagggtaccaggattgcctctgatggtctgaagcacagagtctttgaggtttgtctagctgatcttcagggtgacgaggatcaggcttacaggaaaatcaggctccgtgctgaagatgtgcaaggcaggaatgtgctcacaaa

SEQ ID NO: 10540 - DNA, 311 bp, Zea mays
cccacgcgtccgcccacgcgtccgcccacgcgtccgggagcctgttgagaagtgcctgagggatgccaagatggacaagagcaccgtccatgacgttgtacttgttggtggctccactaggatccccagagtgcagcaactgctccaggacttcttcaacggcaaggagctgtgcaagaacatcaaccccgatgaggctgtcgcctatggtgctgctgtccaggctgccatcctgagcggtgagggcaatgagaaggtgcaggacctgcttctgctggacgtcacccctctgtccctgggtctggagactg

SEQ ID NO: 10541 - DNA, 309 bp, Zea mays
tgaatgatgaacagtggttgaaggttgagtgtgcactaagggacctcatcctttctgattatgcaaagaaaaacaatgttaatacttctgcactgacacaatctgaaatgcgagatatcattcttggcgctgaaattgctccaccatcacagcagaggcaacagattgctgaaattgagaaacagtcaagagagactactcagttaactgctgtaaccacaaggacgacgaatgtgcacggagatgaactcattatcacaaccacaagtccatatgagcaacaagcattcgcatcgaagactgattggc

SEQ ID NO: 10542 - DNA, 310 bp, Zea mays
gacgccgtcgtggtcgtcgagtctgacaaggccgacatggacgttgagaccttccacgacggcatcgtggcggtggtcctcgtccaggctggcgagtcggcgccggtcggcgcgcccatcgcgctgctcgcggagtcagaggaggaggtgccgctcgctctcgccaaggctcaggagctctccaacgggcagccgcagcaggcgcctcctgctccgacggaggatgccgcagcgacgccgccccctccttctgctccggccactgctcccacgccggtggccgtgggtacgaagggcattgccagcccgc

SEQ ID NO: 10543 - DNA, 308 bp, Zea mays
cttttctcgtttagaacctctaaaatttcccccactcgccagtcgcagcagcacctgtagcagccatggacgccagcggaccggtagcaaggggaagaagggggcggccgggcgcaaggcaggcggccccaggaagaagtcggtgacgcggtccgtcaaggccgggctgcagttccccgtcggccggatcgggcgctacctcaagaagggccggtacgcgcacgcgtgaggcactggcgcccccgtctacctcgccgccgttctggagtacctcgccgccgaggttctggagttggcagggaacgcgg

SEQ ID NO: 10544 - DNA, 307 bp, Zea mays
gcgacaactgccgcgcgggcttcgagacccccgcatccacctacattgccggagctaaggtgagagtcgactgcaaatcgaagaccaccggggcaaatacatgcagcttcgaggggcatactgaccgcaccggcacctacaacatccttgtcattgatgagcatgagcatgagctctgcgagtccgtccttgtgagcagcccggacaaggggtgtgccaatgttgtggctggtcgtgagagggcccccgtcttccttaccagcaacaacggtgttgcatccaacgttcgtttggcaaatgctctggg

SEQ ID NO: 10545 - DNA, 308 bp, Zea mays
gcaatgctgacaagtcttctcatgaaccaagattgcggttaaaggctttcttcggttcattatatagatgcctagcaaggggagcaagagctgttctacagttttatgctgataatgtgaagcagagtgaaatgattgtgacttttgccatgcgtgctggttttgctggcggagtggttgttgactggcctcatagttcaaaagcgaagaagtcctaccttgtcctcacttgtggaccaccttcagttactacatcacttccaaaaggtaaaggtgaaaatggtgaggcgtgcagcgatgatgacgat

SEQ ID NO: 10546 - DNA, 310 bp, Zea mays
ctcctcgtggcctccgcacactcaactctgtttgggcccaacatcttagcgaagaagtgaggagaaggttctacaagaactggtgcaagagcaagaagaaggctttcacaaagtatgctctcaaatatgaaaatgatgctggcaagaaggaaattcagctgcagcttgagaagatgaagaaatatgcttctgttatccgtgtcattgctcatacccagattaggaagatgaagggtttgaagcagaagaaggctcacctgatggagattcaggtcaatggtggtaccattgctgacaaggtggactatgg

SEQ ID NO: 10547 - DNA, 310 bp, Zea mays
cccacgcgtccggttgactatggcaagaagtccaagctcggtttcaccgtgtacccatccccccaggtgtccacatccgtggttgagccatacaacagtgtcctgtccacccactctctcctcgagcacactgatgttgctgtcctgctcgacaatgaggccatctatgacatctgccgccgctcccttgacattgagcgcccaacctacaccaacctcaacaggcttgtctcccaggtcatctcatccctgacggcttccctgaggttcgatggtgctctgaacgttgatgtgaacgagttccagacca

SEQ ID NO: 10548 - DNA, 120 bp, Zea mays
cgtgaagcaaagaaaatcgacaaacacatgtaccacgatatgtatatgaaagtaaaaggaaacatgtttaaaaataagagggtactcatggagagcatccacaagtcaaaggccgagaag

SEQ ID NO: 10549 - DNA, 304 bp, Zea mays
ggcttgccaaggcgtacgaggtgaaggacccaaacaccatctttgtcttcaagttccgcacccacttcggaggaggaaagtccactggtttcggcctcatctacgacaagctcgaggctgccaagaagttcgagccgaaataccgcctcatcaggaatggtcttgctactaaggttgagaagtcccgcaagcaaatgaaagagcggaagaacagggccaagaagatccgcggtgtcaagaagaccaaagctggtgacgccaagaagaagtaaacgttcgtttacatttgtattactgttctggg

SEQ ID NO: 10550 - DNA, 301 bp, Zea mays
gttgactctgataaagcttttgcaatgcaactgtcgctagaggagacattaatgaccacccagactgtatacttccaagtggcgttgctacatacatcatcctctggtgaaaggcgtatcagggtccacacagcagctgcacctgtggtcacagatcttagtgaaatgtatcgtcaagcagatactggtgccattgtgtcattgttgggtagaattgcgattgaaaattcactgtctgataagctggacagtgtccggcagcagttacagttgaagctcgttaaaagtttgaaggaatacc

SEQ ID NO: 10551 - DNA, 301 bp, Zea mays
ccccgattcgtccgcccgcgaccgggattccctccgccaagcgcggatctgaacgctgcgctccgtgtcgccgctcgaatccgccatgaagggggccaaatccaagggcgccgccaaggccgatgccaagctggcggtgaagagcaagggggcggagaagcccgccaagggcaggaaagggaaggccggcaaggaccccaacaagcctaagagggctcccagcgctttcttcgtgttcatggaggaatttcgcaaggagttcaaggagaagaaccctaagaacaagtctgtcgctgcggtg

SEQ ID NO: 10552 - DNA, 302 bp, Zea mays
cacatacacaagcacaagcgcactctagcaatggcttctgaggttgtccgccctagcgacgccgagctactaaaggcacaagccgacatatggcggctcagcctctcctacctcacgcccctgtcactgaggtgcgccgtggagcttggcatccctacggcgatctaccgccatggcggggctgcctcagccgctgagctggtcacggcgctgtctctcccctccactaagctgccgttcctccgccgcctgctgcggctcctcgccgcgtcgggcgtgttcaccgtcgacaagcagagctc

SEQ ID NO: 10553 - DNA, 295 bp, Zea mays
atggtctgcttcatacaacatgtggaacccccaattatgttgcccctgaggtgatcgaggatggaggctatgatggtgcaactgcagatatctggtcttgcggagtaatcctctttgttcttcttgctggatatttacctttcgatgatggacagacatcatcgccctatacgagaagagttcagaagctcagtttagctgcccctcttggttttcagctggggccaagaacatgattaccagaattcttgatcccaatcctacaactagaatcacgatttctcagatactggag

SEQ ID NO: 10554 - DNA, 300 bp, Zea mays
gatttattgacaacaccgatcctgctgggattgatcatcaaattgctcaactaggacctgaactggcaactactcttgtaattgtcatttctaagagcggaggcacacctgaaacccgcaatggtctactagaagtacagaaagccttcagagatgcggggctgcaattctcgaaacagggtgttgcaattactcaagaaaattctctgttggataacactgctagaatagagggatggttagctcggtttcctatgtttgattgggttggtggtaggacttcagaaatgtctgctgtgg

SEQ ID NO: 10555 - DNA, 299 bp, Zea mays
gcaggagggagaatatgaaccagaggagcacccagaacctgacactgattacatccgggctcaagaggctaggaggtttatgatctatgttcataccaaaatgatgatagtggacgacgagtacatcatcattgggtccgccaacatcaaccagaggtccatggacggtgccagggactccgagatcgccatgggcgcgtaccagccgtaccacttggcgactaggcagcctgcccggggccagatccatggcttccggatgtctctttggtacgagcacctgggaatgctggaagacg

SEQ ID NO: 10556 - DNA, 299 bp, Zea mays
cccgagtctccagccaaccacatccagtccaccccatccccctcgaccccgacaaccccgagtcccgacccgatggcgcccaaggccgagaagaaaccagcggagaagaaaccggctagccgaagagtaagctgagaagacgaccgcaggcaagaagcccaagtccgagaagcgcctgcccggctcgaagttctccggcaaagaaggcggcgaaaagaaggggaagaagaatgccaataagaacgtggagacctacaaaatctagatcttcaaggtcctaaagcaggtgcaacccgaca

SEQ ID NO: 10557 - DNA, 299 bp, Zea mays
ctggaaaccctagccgccatatctcacgatccactcgagcaccaagccgagggaaggtgaggagcgatggcgcgcggcgtggtgtcggcgaagggcggcgcggtcgcgggcaagaagaaggggtcggtttccttcacgatcgactgcaccaagccagtggaggacaagatcatggaggtcgcctcgctcgagaagttcctgcaggagcgcatcaaggtcgccggcggcaaggctggcaacctcggcgactccgtcaccatctctcgcgagaagaccaaggtcaccgtcacctctgacgg

SEQ ID NO: 10558 - DNA, 298 bp, Zea mays
cgttccccaacctctcgtctgctgcctgcctgcctgcctgcctgcaaaaaggagtttgtcatggcgtctaagcgcatcctcaaggagctgaaggacctgcagaaggacccccccacatcatgcagtgcaggtcctgctggtgaggacatgtttcattggcaagcaacaattatgggaccacctgacagtccctatgctggtggtgtttttttagtgaacattcatttcccgccagattaccccttcaaacctccaaaggtttctttcaagacaaaggtcttccatcctaatatcaaca

SEQ ID NO: 10559 - DNA, 296 bp, Zea mays
gacgagtaccgttgcttcattgggaacctgtcctggtcaacgactgatgaaagcctcaaggatgcgttcagcaaattcggcaacctcactgaggcaaaggtggttcttgacaaattttcaggccgttctcgtggtttcggctttgtaacttttgatgagaagcaagccatggaggatgctattgagggaatgaatggactggacttggacgggaggaacatcactgttgataaagctcagccacaaggacctggtagagaccgtaatggtgaccgtgattatgaccgcgagcgtgg

SEQ ID NO: 10560 - DNA, 295 bp, Zea mays
cttaatagcatatagaataaaattcaccccccatccacatgctggcgacaagtggtgtgtctatccgagctatgactacgctcattgcatggtggattctcttgaaaacatcacacattcgctgtgcacacttgagtttgacatacgtcgcccttcatactactggctacttgttgacactggctggtctccggcgacggggagtatcatcaactgcaataaattcctttattcgtggaatcgggataacgagaagtgacaatagcttaattcgtgttgatcgtctagaatatca

SEQ ID NO: 10561 - DNA, 295 bp, Zea mays
cgccggccgcgtgcacctccgtgcgtgccttgagggcgcgtatcacgtcatggaggagccgaccatgtacgccagcgacacgcgcccagccgcgcggcagctgtggcgcccgccgattggcgtgctggaagtcggcgtcctcggcgcgcaggggctaacgccgatgaagactgtcgacggccggggcatgaccgacgcgtactgcgtcgccaagtacgggcagaagtgggtgcgcacgcggaccgtggtggactcttgcagcccccggtggaacgagcagtacacgtgggaggtg

SEQ ID NO: 10562 - DNA, 293 bp, Zea mays
cccacgcgtccgctcctctctccgtcgccgcctcgggccaaaccctacgcagggagttgattgatcgattgcagccatgagtaagttgcattccgagcttctcaaggattgcatctcccagatagttcaggatgccaagaagaataggaagttcactgagactgttgagcttcagattagtctgaagaattatgatccacaaaaggacaagcgtttcagtggctctgttaagttgcctcacatccctcgtccaaagatgaaggtgtgcatgcttggtgatgcccagcacgttg

SEQ ID NO: 10563 - DNA, 291 bp, Zea mays
cggacgcgtgggcggacgcgtgggctgacgcgtgggcggacgcgtgggtgagactcaaatatccccatattgctattggggctctcgcatcatcagctccgatactgcagtttgaggacattgttccttctactatattctatgatctcgtgtctgatgattttaggagggaaagtttaagttgttttcttacaataaaagactcctggaaagaattagatgaccaagcaaacgagcaagatggtcttctgaaactaagtaaaaccttccacctttgccagaccctgaaaa

SEQ ID NO: 10564 - DNA, 320 bp, Zea mays
ccgagcgctgccttgactggggcgaggcgggcggccccgacctcatcgtcgacgacggcggcgacgccacgctgctcatccacgagggtgtcaaggccgaggaggagtacgagaagaccggcaagatccccgacacggagtccaccgacaacgctgagttcaagatcgtgctcaccatcatccgcgacgggctcaaggctgaccccaagaagtaccgcaagatgaaggagaggcttgtcggcgtctctgaggagaccaccacgggtgtcaagaggctctaccagatgcaggagaccggcgccctcctcttccctgccatt

SEQ ID NO: 10565 - DNA, 309 bp, Zea mays
cggcgacacggcgtgcccccacgaactccgccaaattcccccaaacccacctagcaggtcggaccccgcaaatcgccccccaaaccaaccgggccggccgacacaagcagcatcccgtcggcggcgatggacctggcgtcgagcgacctcgcggcgctgggcgcggcggagctgatccgcgtctcggcgtcgatcccgcgcgcggctccgcgcaccttcgcgctgctcaccgcctgcctcgtcttcccgctctccttcgccgtgctcgcggactccctcttcaaccagcccatcctgctccggatccgg

SEQ ID NO: 10566 - DNA, 317 bp, Zea mays
cccacgcgtccgggaggagggcgagttctccgaggctcgtgaggatctggctgcgctcgagaaggactacgaggaggtcggtgctgagtttgacgagggtgaggacggcgacgagggtgacgagtactagacgctctactggcgcggcgtcgtcgggcttgtgtgccactgctatcctgtgatctgccctgagtggctcctatcgtgttatgtttctgtcggttcttatctatctgtcgttgtgtggtttacaacttacgttgtaagactttattcccccgctttgctactgggttattaagtttggcgttattgtt

SEQ ID NO: 10567 - DNA, 317 bp, Zea mays
cggacgcgtgggcggacgcgtggggatgttttggggcggcatgatggtccggttcgttgcgtggaatactcttatgctgcaggtcaagtcatcaccggaagctgggataaaactgtaaaatgctgggatccaagaggagttagtggaccagagcgcacccttgttgggacatatgctcaacctgaacgtgtatattctctttcgttagtaggaaataggttggttgttgcaacagctggaagacatgtaaatatttatgatctgcgcaatatgtctcaacctgagcaaaaaagagactcttctttgaaatatcaaac

SEQ ID NO: 10568 - DNA, 319 bp, Zea mays
cacacgcgtccgcggacgcgtgggaacggatgggtgcaatcctatggatcacgctgtgtgaagccacccattatctatggtgatgtcagccggccgaaccccatgactgtattctggtccaagatggcacagagcatgacccctcgtcccatgaagggaatgttgactggtccggtcacaatcctgaactggtcattcgtcaggaacgaccagcctaggtttgagacatgctaccaaatagctcttgcaatcaaaaaggaggttgaggatcttgaggctgctggtattcaggtgatccagatcgatgaggcagctctaa

SEQ ID NO: 10569 - DNA, 320 bp, Zea mays
cttctgcgccgccacccactacaggaagaagaggagggcaggatgtcgcaccgtaagttcgagcacccgaggcacggctccctcggcttccttcccaggaagcgctcctcccgccaccgcggcaaggtgaagtcatttcccagggatgaccccaagaagccttgccatctcactgccttccttggctacaaggctggcatgactcacattgtccgtgaggttgagaagccaggatccaaactccataagaaggaaacttgtgaggctgttaccatcattgaaacccctcctcttgtcattgttgggctcgtggcatatgt

SEQ ID NO: 10570 - DNA, 322 bp, Zea mays
atcgctcgccaacgtgcagactaaggaagcactgaccggccggtcatggcgaggatccacctctacgtcgtcgccgcggcctgcgccgtcgccctcgcgctcgccggcgacccggacatgctccaggacgtctgcgtggctgactacgcttccccggtcaagctgaacgggttcccgtgcaaggcgaacgtctcggcggacgacttcttcttcgacgggctgaggagcccgggcaacaccaacaacccggcgggctccgcggtgacggcggccaacgtggacaagttcccgggggtgaacacgctgggcgtctccatggcgc

SEQ ID NO: 10571 - DNA, 312 bp, Zea mays
gccactgactttgggctgtccatgttctacaagcccggtgataaattctctgatgtcgttggaagcccttattatgttgcaccagaggtacttcagaaatgttatggtccagaagctgatgtgtggagcgcaggggtaattctgtacattttgctttgtggtgtccctccattttgggcagaaactgagtctggaatcttcaggcagattatgcgagccaaacttgattttgaatctgaaccctggcccagtatttctgatagcgctaaggatctggtccgcaatatgcttactcgggatcctaaaaagaga

SEQ ID NO: 10572 - DNA, 311 bp, Zea mays
cggacgctggtacgtgagcccggccgagcgagacgagggcagaggcatggctgctccgaagctcgcgacgctggcgctggccgtgctcctggcggcgaccgtggtggctcccccggccgcggtgcgcgcggcgatgtcgtgttccaccgtgtacagcacgctgatgccgtgcctgccgttcgtccagatgggcggggccatgccgccccagccgtgctgcggcggcatccgcagcctgctgcagcaggccaacaacacccccgaccgccgcaccatctgcggctgcctcaagaacgtcgccaacgggccaa

SEQ ID NO: 10573 - DNA, 315 bp, Zea mays
agaatttgctccatctattccagagaagaacgttacttgcctgacccgtctggaccacaacagggctcttggccagatttctgagagacttaatgtccaagttagtgatgtgaagaatgttatcatctggggtaaccactcgtcctctcagtaccctgatgttaaccatgccacagtgaagacttccactggggagaagcctgttcgtgagcttgtctctgatgacgagtggcttaatggtgaattcatcacaactgtccaacagcgtggtgctgcaatcattaaagcgagaaagttctccagtgctctctcggc

SEQ ID NO: 10574 - DNA, 313 bp, Zea mays
  unsure (1)..(313): unsure at all n locations
gttcgcggcgctggacgagctgttcggcaagtgccgcgtccggcccaaggacgtgggtgtgctggtggtcagctgcggcctcttcaacccgacgccctccctgtccgccatggtcgtcagccgctacaagatgcgcggcaacatcctgagctacaacctgtgcggcatgggctgcagcgctggcgtcatcgccatcgatctggcccgcgacgtgctccaggccagcggcgcgggcctggccgtggtggtcggcacggaggccgtctccttcacgtggtaccccgggaancggcgctccatgctcatcccggac

SEQ ID NO: 10575 - DNA, 317 bp, Zea mays
ctccactcatcttttctcgtttagaacctctaaaatttcccccactcgccagtcgcagcagcacctgtagcagccatggacgccagcggaccggtagcaaggggaagaagggggcggccgggcgcaaggcaggcggccccaggaagaagtcggtgacgcggtccgtcaaggccgggctgcagttccccgtcggccggatcgggcgctacctcaagaagggccggtacgcgcagacgctgggcactggcgcccccgtctacctcgccgccgttctggagtacctcgccgccgaggttctggagttggcagggaacgcg

SEQ ID NO: 10576 - DNA, 315 bp, Zea mays
tgttcttctctcgggggcaacaattgttgatcgtgctgtcattataactcttgctgagaacaatcagctgcctcctgaagcacacaaacaattatcgggagcaaacgtctctactgaatcagcagtcaggaaggcagaagatgttgtcagcagcatgttggccaagggatttgtgctcagcaaagatgctctcaacttggcaagatccttcgacgagcgtcacaatatcctatccaatgctactgccactgttgcatctctagaccgccagtatggcctgagtgaaaagatcaatctgggaagggccattgttgg

SEQ ID NO: 10577 - DNA, 319 bp, Zea mays
aaaggaggataaggagaagagagatgccattgacaccaagaaccaagccgagtcggtcatctaccagaccgagaaacaactgaaggaactaggggacaaggtcccgggcgacgtcaaggggaaggtcgagtcgaagctgcaagagctcaaggatgctgttgctggtggctccacacagacgatgaaggacgccattagtgcattgaaccaggaagtcatgcagattgggcagtccctctacagccagcagggtgccccaggcgccggacctggtccagctgatgcttctgctggttcagcggcgggcacttctgagaag

SEQ ID NO: 10578 - DNA, 310 bp, Zea mays
atcttattgccaaaggatgcaagaaggtggttgtggtcaaccgttcagtggaaagggtggatgccatccgcgaggagatgaaaggtatcgagattgtgtacaggcctctttcagagatgtacgaagctgctgctgaagctgatgtcctattcacgagcactgcatctgaaaccccattgttcacaaaagagcacgcagaggcacttcccacaatttccgatgccatggatggtgcccggctttttgtcgacatatctgtcccaaggaatgtcagcgcgtgcgtctctgaaattggctccgcgcgagtata

SEQ ID NO: 10579 - DNA, 308 bp, Zea mays
gcaaggagggcactaagagcactacgaggccttgtacgattgaagtcattggttgagggtaattcagttaagcgtcaatctgcaagcactctgcgctgtatgcaaactctatcgcgggtgcagtcacaaatacgatctaggagagcaaagatgtccgaggagaaccaggccctccaacgccagctcctacttaaacaggaactggagaatttcagaatgggtgagaactgggacgacagcactcaatccaaggagcaaatcgaggcaagcctaataagcaggcaagaggcagcgataagaagagaaag

SEQ ID NO: 10580 - DNA, 304 bp, Zea mays
cccacgcgtccgccgcactcgacagaatcctcgccttctctcaagatgtcgtctctggaaagattctttccccatctggtcgtttcacttcaattctctctataggaatcggagggtcagctttgggccctcaatttgttgctgaggcacttgcgcctgataaccctccactgaagataagatttattgacaacaccgatcctgctgggattgatcatcaaattgctcaactaggacctgaactggcaactactcttgtaattgtcatttctaagagcggaggcacacctgaaacccgcaatgg

SEQ ID NO: 10581 - DNA, 303 bp, Zea mays
gttctgggtttcgttgtcctctcttgcttgattgcggtgtctgtgaacttcagtacatttcttgtgattggaacaacatccccagtgacgtaccaggtgcttggccaccttaagacatgtctggttctatcatttggctacactctattacatgatcctttcactctaaggaacatattgggcattctaattgccatatttgggatggcactatactcctatttctctgtaagagagggcaagaagaagtcagcaaatgatgccctgccagtttcacagatgccagataaggaggttgaaccg

SEQ ID NO: 10582 - DNA, 309 bp, Zea mays
cccacgcgtccggcttctcagctttaccttctgcgggatccagcacgtccaattctgcctgaaccacttctcgtccgatgtgtacgtcgggccacccaagggcaacgactggttcgagaagcagacggcaggcacgctcgacatcctgtgccctccttggatggattggttccatggcggcctgcagttccagattgagcaccatctgttcccccgcctgcctcggtgccaccttcggaaggttgcgccggccgtgcgtgacctttgcaagaagcatgggctgacctattccgcagcctccttcttgga

SEQ ID NO: 10583 - DNA, 306 bp, Zea mays
ctcatgaaggctcaaacacttggtgacacatcaagtttggaattcatgaggggaagaaggatctttgaaatcaaccctgaccacccaattatcaaggatttgagcgctgcttgcaaaaatgagcccgaaagcacagaagccaggagggctgtagagctcctaaacgaggctgctttaatctcgagtggatatactccggagagtccagcggagttgggtggcaagatctatgagatgatggcgattgccctcggcgggagatggggaaggtccgacatggaggaggccgaagcgtcgacgggtgag

SEQ ID NO: 10584 - DNA, 306 bp, Zea mays
gcactgatgaggtctatggggagactgacgaggatgcagttgttggcaaccatgaagcatcacagctgcttcctacaaacccatatgcagccaccaaagcgggagcggagatgcttgtaatggcatatgggagatcctatggactgccagttatcactactcggggaaacaatgtctatggcccaaatcagttccctgagaagcttatcccaaagttcattctcttggccatgagaggggagcccctccctatccatggtgatggagtcaatgtccgtagctacctctattgtgaggatgttgcgg

SEQ ID NO: 10585 - DNA, 309 bp, Zea mays
cccacgcgtccgctgctgcgcacctgcaagcctcgagtggagctcttccacggccgcggtggagatggcggcgaatctggaggacgtgccgtcactggatctgatgcacgagctgctccgccgcatgaagtgcagctccaagcccgacaagcgcctcatcctcatcggtccacctggctctggaaagggaactcagtctcctattatcaaggatgaatattgcttgtgccatttagccaccggtgatatgctgagggctgctgtggcggccaagacacctctaggtatcaaagctaaagaagctatgaa

SEQ ID NO: 10586 - DNA, 308 bp, Zea mays
ggaggaagtctgtccgtggttgtattgtgagccaagacctatctgttatcaacttggtaattgttaagaagggtgagaacgatctgcctggtttaactgacactgagaagccaaggatgaggggtcccaaaagggcctccaagatcaggaagctgttcaatcttgcaaaggatgacgacgtgcgcaagtacgtgaacacgtaccgcaggacattcactaccaagaatggcaagaaggtgagcaaggcacctaagatccagcggcttgtgacccccttgaccctccagaggaagcgtgctagaattgct

SEQ ID NO: 10587 - DNA, 312 bp, Zea mays
cccacgcgtccgcccacgcgtccggcctcgggtcaaaccctaagcagggagttgatttatccgctgcagccatgagtaagttgcagtctgagtctgtcaaggatgccatctcccagattgttggggatgccaaggagaagaataggaagttcactgagactgtggaacttcagattggtctgaagaattatgatccacagaaggacaagcgtttcagtggctctgttaagttgccccatatccctcgtcccaagatgaaggtgtgcatgcttggtgatgcccagcatgttgaggaggccgagaagatgggac

SEQ ID NO: 10588 - DNA, 288 bp, Zea mays
ctcccatccagccgccaccaggtgcagagtctttcgtcatctcttctccggcgaagaacccccagtcgcccaccagatcacttgttaaactttgttgaggggtgatggcggtttctttcgcaaacctcaactccgaggcagggcttaaaaagcttgatgagtaccttctcactcgcagctacatcactggctaccaagcttccaaggatgacttggctgtctacacttcgttttcggctgctcgctcgtccaagtatatcaacgtagcaaggctggttaacacattga

SEQ ID NO: 10589 - DNA, 285 bp, Zea mays
ggcaagggcttccgctgcatccgcatggtgaacaacatccgcctcaacttcgacgccttccacggcgacaagggccacggcggcgtgcacgacggcaccaccgtggtgctgtgggagtgggccaagggcgacaaccagagctggaagatcctgccctggggcgacgaggcctacgccgggggcggcagcagcgccgccaacgcgccccgcttcggcggcggcgagcccaccgtccgcatctactgcaaggccgacgaagggttcagcgccacggtccgcaacggc

SEQ ID NO: 10590 - DNA, 282 bp, Zea mays
gctccagttgttgcccagatatcaaaggaagctggttatcttactgttggtgttgtcacctatccattcagtttcgagggccgtaagcgctctgtacaggcattggaagcactagagaagctggaaaagagtgtagacacacttattgtgattccaaatgataagttattagatgttgcggatgaaaacatgcccttgcaagatgcatttctccttgcagatgatgtccttcgtcagggtgttcaaggaatatcagacatcatcacaataccgggacttgtc

SEQ ID NO: 10591 - DNA, 281 bp, Zea mays
cggaccgtggtcggagtgttccaactcctgcctggtgctgctattccaaaacaacaaagagttgagcatcgaggacatcctcaagtccaccaccaacttcgaccaggcctacatagtcgggtgcggcggtttcggcctcgtctacaggtcgacgctgccggacgggaggagggtggcgatcaaaagactgtcgggagactactcgcagatcgagcgggagttccaggccgaggtggagacgctgtcgcgggcacagcacgagaacctcgtcttgctgcagg

SEQ ID NO: 10592 - DNA, 279 bp, Zea mays
atgacatcgatgaagacactgctgatgagctgcagagtcaaatggagcatgattatgacattgggaccaccataagggataagattatccctcatgcagtttcctggtttactggtgaggctgtgcaaggtgaggattttggtgagttgggcgatgatgatgaagatgatgatgatgaagacgatgacgaagatgatgaggatgaagaagaggatgatgatgaggaagaggatgatgaggaagacagcaagccagcaaggaagtcaggatctggtcgca

SEQ ID NO: 10593 - DNA, 277 bp, Zea mays
cgtcactgaatcctcagatcacggctagccgtaatcacgccactctgctgactcccggcgagcagtgtaacattttccttcagccatgggcaaggagaagactcacatcaacattgtggtcattggacatgtcgactctggcaagtcgaccaccactggccacctgatctacaagctcggcggtattgacaagcgtgtgattgagaggttcgagaaagacgccgcggagatgaacaagcggtcattcaagtatgcctgggtgcttgacaagctcaag

SEQ ID NO: 10594 - DNA, 284 bp, Zea mays
cccacgcgtccgataccatttacaaacattggaaacattattgaatgcatttccccagcttcagccaagtgttgatatcaaaacagtactctctcaacttatggacagattgtctaactatgctgcctcaagtcctgaagtgttaccagagttcttgcaagttgaagcttttgctaagttcagtaatgctattggaaaggtgatagaagcccaacctgacatgccagttgttggagccgtaactctatatgtatcgcttctgacttttactctccgtgtacatc

SEQ ID NO: 10595 - DNA, 288 bp, Zea mays
ggacgtgactctatctgaagctgagttccgtgaacgcatttccgagattggtgagcttcagcacgagttcattgtgccactccgtgcttactactacagcaaagatgagaagctacttgtttacgacttcatgcccatggggagcctgtctgcagtcctgcacggcaacgtaagttctggcaggacaccacttaactgggatttaaggtcaagcattgctctagctgcagcccgtggtgttgagtacatccactcaacgacctcaacggcttcccatggtaacatcaa

SEQ ID NO: 10596 - DNA, 280 bp, Zea mays
attttcattatctagaggagataaattgtgattctcttgtgcaactaaaaaccacatttcaaaatgagaacaaggatcaaactatcaagcacactttccttccgttcctcataaagtcactttctatggcactgagtaaataccctatgttgaacagttctttcattgaggaaactaacgaagttgtgttcaaggggcctcacaacattggggtggcgatggctacaacacatggattagtcgtgccaaacatcaagaaagtgcagtcgctatcaatatt

SEQ ID NO: 10597 - DNA, 282 bp, Zea mays
cgcgacgcgtgggcggacgcgtgggcggacgcgtgggcttttgcaatggcggcttcggggttcggcggcggcgaggcgttccggctctcggccgcaccacgggccggctacactgaagctgcacaagggcgacatcaccctctgcgtccgtcgactgcgccaccgacgccatcgttaatgctgctaatgagcgaatgttaggtggcggaggtgttgatggagctacatcaagctgctggaccagagctagtgcaagcatgccggaaagttccagaggtcaaa

SEQ ID NO: 10598 - DNA, 279 bp, Zea mays
gtctgcagcccccaaccacccccagcctcggaaggaaccttccagaagcgcaagactctaaaggccgtcgccttcccactcttcctcgccgcgggggtcgcctgacctcacataaacaatggtgaaggctgtcgctgtgcttggtagcagcgacggtgtcaagggcaccacctctctcacccaacagcgagacggccctaccgctgtcaccggaagtgtctctcggctcaagcctcggctccatgggttccatgtacatgcacttggcgacaccaccaa

SEQ ID NO: 10599 - DNA, 281 bp, Zea mays
cggacgcgtgggcggacgcgtgggtcttactgctgcagttcacaaagatccagtaacacgagaatggacacttgagggaggtgcactagttcttgcactataggggcaactgcctcattgacgagtttgacaagatgaatgatcaagatagggtaagtattcatgaagctatggagcaacaaagtatcagtatatcaaaagcaggaatcgtcacatctcttcaagctagatgcagtgttattgctgcggcaaacccagtagggggaaggtatgattcatca

SEQ ID NO: 10600 - DNA, 280 bp, Zea mays
ctcccacctcacatcccttcttgcttctcgcctccccacccttcatccacccgccgctcctcaagccccaagctccggcgatatgtcacgcttcggtcgatccggtccgccgccgccgatccgcgacacatattcactcctcgtcctcaacatcaccttccgcacgactgctgatgacctcttcccgctcttcgacaagtacggcgagattgtcgacatctacatcccaagggaccgcaggactggcgactcgcgcggattcgcgttcgtgaggtacaag

SEQ ID NO: 10601 - DNA, 280 bp, Zea mays
ggctccctgcgttgcgtcttgggggagagagagaagtgggagacccgcgagacgctgccgtgtagggactagggaccgtagagtaagcgacacgcaggagggagagggggatggccgggatcgggccgatcaggcaggactgggagccggtggttgtgcggaagaaggcacccaccgccgctgccaagaaggatgagaaggccgtcaacgccgcgcgccgctccggcgcggagatcgagaccatgaagaagttcaacgctggtatgaacaaggcggcgtc

SEQ ID NO: 10602 - DNA, 287 bp, Zea mays
cgcagatcgaagccgaggagagggtgaccagggaggcggaggccaagaggaaggcggacgaggacgagaggaaggcggaggccgaggcgcagagggctgccaaggaggcggtaatggcgacggcagaggagaagccagagagcacggtggagaaggacagcatggaggtggataagaaggaggaagccaacgtgagacaaccaaatgctggcaatggtcttgacttggagaagtactcgtggactcaacagttgccagaggttaacatcaccattcctgttcctcaa

SEQ ID NO: 10603 - DNA, 276 bp, Zea mays
acaattccctcccctagccgccgccgccgctcgtctccctgagaggtgccgggaccgaggaactggccgagttctaggtagacaatcggttttgcttgtctcagcacggggtctgctgcgtctggtggtggtgaaggggagaaattcgtgagatctgttccggatcaggcgtgcgagctcgggaatcaggggtttcacacatagcttcgtcgatttgaatttgatgtactaatggagtctaagggtggcaaaaagtctagcagtagtcgttccatg

SEQ ID NO: 10604 - DNA, 272 bp, Zea mays
tgcttgtcttattctgtgggatgctcgaactggcactgccccagctgttaaggttgagaaagctcacagtggagatgttcattgtgttgattggaatccccttgatgttaactatatcttaactgggtctgccgataactctgtccgaatgtgggatcgtcggaatctgggttcaggaggagctggttctccaattcacaaatttgaaggccataaagctgctgttctttgtgttcagtggtcacctgacagagcatctgtttttggaagtt

SEQ ID NO: 10605 - DNA, 274 bp, Zea mays
gtcggtgtcgcggtccgtcaaggccgggctgcagttccccgtcggccggatcgggcgctacctcaagaaggggcggtaccgcagcgatgggcaccggcgcccccgtctatctcgccgccgtgcttgagtacctcgccgccgaggtgctggagctggccgggaacgcggcgaaggacaacaagaagacgcgcatcgtcccgcgacacttgctcctggcgattcgtaacgacgttgagctcggcaagctgctgtctggcgtcaccatcgcgcacgg

SEQ ID NO: 10606 - DNA, 276 bp, Zea mays
caacaagatggatgccaccacacccaagtactccaaggcccgttatgatgagattgtgaaggaagtctcttcctacctgaagaaggttggatacaaccctgacaagatccactttgttcccatctctggtttcgaaggtgacaacatgattgagaggtccaccaaccttgactggtacaagggcccaaccctacttgaggctttggacttgatcaatgagccgaagaggccttcagacaagcccctgcgtctccccctacaggatgtgtacaagat

SEQ ID NO: 10607 - DNA, 278 bp, Zea mays
ccctctcgtcgccgtcctctcccgttcgcaacgccacgctccccaccgccgaaatggccccgaagcgaggtggcagggcaccggtgccggccaagaagaagacggataaagtgacgaaccctctgttcgagaaaaggccgaagcagttcggcatcggcggcgcgttgcctcccaagaaggacctgcaccgattcgtcaagtggcccaaggtcgtgcgcatccagcgccacagtcgcatcctcaagcagcgcctcaaggtgcctccggcgctcaaccag

SEQ ID NO: 10608 - DNA, 277 bp, Zea mays
acgtcatccccaaggccaagatgacaacagctatcgccattgaagatgtgagaagagaagtgagaatattgagttctctgacaggccacagtaatttagtgcagttctacgatgctttcgaggatgaagataacgtgtatatagttatggaattatgtaaaggaggtgaactgctggacaggatattggctagaggtggaaagtactctgaagaggatgcgaaggtcgttatggtacaaattttgagtgttgtatcattttgccatcttcaaggtgt

SEQ ID NO: 10609 - DNA, 276 bp, Zea mays
cggacggtgggcgtgacgcgtgggtggtcactgctgttggtggccacggcggttatccagggggcaagaagtttgtttctgcggaacagctcagggagacactgtcatacctccgtcacgagaaagcgctcatagtcaaattggttgacatcgttgacttcaatggaagtttcctggcacgtgtacgcgattttgctggtgctaatcctattatacttgtgataacaaaggttgatctccttcccagagatactgatttgaattgtataggcgact

SEQ ID NO: 10610 - DNA, 281 bp, Zea mays
ctgttccacatccagatgaccgtgttgagtatgagttatggacaaacagcaatgatgaatgcgggcctaaatgtgatatgctgatgaattttcttaaggaatttaaaggagctgcccaactacttgagaaaggtggctatagccaattcacgccccattacattacttggtactgtcctcaagcatttgtgatcagtaaacaatgcaagtgtcaatgcataaaccatggaaggtactgtgcacctgatccagagcaagattttagcacaggctacgaagaa

SEQ ID NO: 10611 - DNA, 312 bp, Zea mays
cgaatgggtgctacggttactgcaattgatgctgttgacaagaatataaagattgcaagtattcatgcggcatctgatccaacaactgcttctattgagtattgttgtgcaacagctgagggactggtaaaagagaaaaggctgtttgatgctgtaatttctcttgaggtgattgagcatgtcgccaatcctttggagttctgtgaatccctctcggctttgacaattcctaatggtgccactgtgatttccacaatcaaccgatcaatgcgagcatatgccactgcaatagttgctgctgaatatatcctc

SEQ ID NO: 10612 - DNA, 311 bp, Zea mays
acacactcgggtaaagctatctcgagctagctagctgctgtaaccgttgccatggccaaaatggtgttgctctgcgtgctcgtctccttcctcctgatgcccttggcctccctagccctgacgcaggacttctgcgtcgccgacctgacctgcagcgacacgccggcggggtaccgtgcaagtccagcgtcaccgccaacgacttctacttccacggcctggccggccagggcaaaataaacccactcatcaaggccgccgtgaccccggccttcgtgggccagttcccgggcgtcaacgggcttggcatc

SEQ ID NO: 10613 - DNA, 303 bp, Zea mays
gctttacctcgttttgttcgggaaaaggatgttccgttggagtcccatccatctaagcttgtgggtagcagtgattcaaaaaatagatattttgattttgagaagctagctgaggttacctcaactgttacttacaatcttaacaaaattatcgatattaattactatcctgttgagacagcaaagaggtcaaacatgcgtcacaggccaattggcataggtgttcaaggcctggcagatactttcatattactgggcatgccgtttgattcaccagaggctcaacagttgaataaggatata

SEQ ID NO: 10614 - DNA, 303 bp, Zea mays
gcgatgtcgcacttcgggaggtcaggcccgccggacatccgcgacaccttctcgctcctcgtcctcaacatcagcttccgcaccacggccgacgacctcttcccgctcttcgagcgctacggcaaggtcgtcgacgtcttcatcccgagggacaggaggtcaggcgtccgtttcaatttccgggccggtggttcgatggctgtttcctcaggttttgttcgtcggtggctcgcaggaccggggactcgaggggtttcgcgttcgtgcggtacaagtacgccgacgaggcgcagaaggctatag

SEQ ID NO: 10615 - DNA, 313 bp, Zea mays
caggggcacaactagtcaccccattgaagcatttcagcttttgtcttgagatctttctatcagtgctaaaggcaaaagaggtcttagggcgatggcgcaaactagcctgcctcctggatttcgtttccacccaactgatgttgagattgtttcctactatttgaagaggaagattatgggaaagaagcttattgtagacgctatatcagaggttgatctctacaagtttcctccctgggatctccctgaaaagtcctctcttcgaagcaaagatcttgaatggttcttcttttgtcctcgtgacaagaagtac

SEQ ID NO: 10616 - DNA, 313 bp, Zea mays
ctttatgacaccaagggccgcttccgtcttcacccaatcagggatgaggatgccaagttcaagctctgcaaggtgaggtccgttcagtttggccagaagggcatcccctacctgaacacctacgacggccgtaccatccgctaccccgacccgctcatcaaggccaacgacaccatcaagatcgatctggagaccaacaagatcatggacttcatcaagtttgacgtcggcaacgtggtcatggtgaccggcgggaggaacaccgggcgtgtaggtgtgatcaagaacagggagaagcacaagggcggcttcg

SEQ ID NO: 10617 - DNA, 298 bp, Zea mays
ggtggaggtagcgcctccgcagccatggaggtgcgcgtcaagatcctcttcacctcgctctgccacaccgacgtctacttctgggaggccaaggggcagactcccgtgttccctcggatctttggccacgaggctggaggtatcatagagagtgttggagagggtgtgactgacgtagctccgggcgaccatgtcgttcctgtgttcactggggagtgcaaggagtgtgcccactgcaagtcggcagagagcaacatgtgtgatctgctcaggatcaacaccgaccgccgtgtgatga

SEQ ID NO: 10618 - DNA, 319 bp, Zea mays
atgcagatcttcgtgaagaccctgaccggcaagactatcaccctcgaggtggagtcctccgacaccattgacaacgtcaaggccaagatccaggacaaggagggcatccctccagaccagcagcggctcatctttggtgggaagcagcttgaggacgggcgcacgcttgccgactacaacatccagaaggagagcaccctccacttggtgctgcgcctcagaggaggcatgcagatcttcgtgaagaccctgaccggcaagactatcaccctcgaggtagagtcttcagacaccatcgacaacgtcaaggccaagatcc

SEQ ID NO: 10619 - DNA, 100 bp, Zea mays
cagacgcgtgggtccgtccacgcccggtcgtactcataaccgcatcaggtctccaaggtggacagcgtctgggccaatggaacaatgtaggcaagggaag

SEQ ID NO: 10620 - DNA, 309 bp, Zea mays
cacaccgcgacccatcgcgacctgacccgaccctcccgaagccgccagccttatcctctccgcctccgcctcccgccgtcccccgcgacccatcgcaagcgcgagtagaagacatggcctcgacgttcggtgccacttctacagttggccttatggctgctccaacggggaagaatgtgcgccttcagaggagggctaacttcagagtaaaagcggctaaggagctgtacttcaacaaggatgggtcagctatcaagaagctccagactggagtcaataagcttgcagacctagttggagttacactcg

SEQ ID NO: 10621 - DNA, 310 bp, Zea mays
ctttctgatattcctgtgaagagccttgtgccagaaacacttgcagcatgctcgtcagcagatgaattcatgcagaagctaccatcctttgacgaggactgggccaggcaacgcagtgagtgctgatgctgcagacgagtcctgcgttacgttggagtggtggatacggtgaacaagaggggacaggtggagctacgtaggtacaagagggaccacccgttcgcgcagctctccggctccgacaacatcatcgcattcaccacctcgaggtacaaggagcagccgctaatcgtgcggggcccaggcgcgg

SEQ ID NO: 10622 - DNA, 308 bp, Zea mays
cccacgcgtccggtgtactattgctatgccaatctgtatacactgaacaagcttcgtgagtccaagggcatgacaacaatcaaacttcgtccacactgtggggaggctggtgatatcgatcaccttgctgcagcatttcttacttcacataacattgctcatggggtgaacctaaagaaatcccctgtacttcagtacctgtattatcttgctcagattggtctagcaatgtctcccttaagtaacaactcactgtttatcgactatcatcggaaccctttcccaacatttttcttaaggggtcttaa

SEQ ID NO: 10623 - DNA, 309 bp, Zea mays
cggacgcgtggcgagacgcgtgggcggacgcgtgggtttggaggaggtggtggaagcagcaggggaagaaggcaaaggaggggagaagatgtagttcacccacttaaagtttcatctggaagatcattacaatggcacctcaaagaagctctctctttcgcgcaatgtcatctgctccaagtgcaagggcaagggctcgaagtctggtgcctcaatgaggtgccctggttgccagggctcaggcatgaaagtcactattcgtcagcatggcctttcaatgatacagcaggatgcagcagccttgcaatg

SEQ ID NO: 10624 - DNA, 297 bp, Zea mays
tgtcacgtttggcaatgtgaagacgacggctgctgaagttattgtcctcattgtctcaatgggatatggtgttgtcgcacctaccttgggtggcttgacatcgaaagtggtcatgcttggaggaacgttctttctagcaacaggaattcttgagttggtagagaatcttggtgctgttaatgatctatctggaaaagctcgtctgttcttggtctatccagtggccattttagatgccgcatttgttgtttggatatttatttctttagctaagaccatcggtaaacttcaggcaag

SEQ ID NO: 10625 - DNA, 309 bp, Zea mays
ttcagtgtcaaccaatcctatctctacataactatcatatatacaatctcatactcgatggctttgtatgcccttgcattgttctatgcggcttgcagagatctacttcggccatataatcctgtcccaaaattcatcatgataaaatcagtggtgtttctcacatattggcagggtgtcctggttttccttgctgcaaaatctcgatttatcaagaatgctgataaggctgctgatcttcagaactttgtgttgtgtgttgagatgctaatagcagccattggccacttatttgccttcccctacaag

SEQ ID NO: 10626 - DNA, 303 bp, Zea mays
cccggcgaaaccccccaaaccctcgcaccctaaaacaccggcgcacaagatgtccgacgaccccaccaacggcggcggcggtgatcgcgtggaggacgtcgtccgcgccgagggtgaaacacaacctcgtgatgatggcttgtcgaaatccaaggatagggacaaagatagagaaaaggacaaggacagagatcgtcgccgagaccgtgacagagatcgagggagagacagggaccgtgatagggatagggacagggacagggatcgggacagagacaaggatcgccaaagtaggcatcaccg

SEQ ID NO: 10627 - DNA, 308 bp, Zea mays
gtgtgaccaatgaagaagtccagaaggctgctgctgctctcaagggctctgaccaccgccgtgggaccaacgttagtgctagattggatgcccagcagaagaagcttaacctccccatccttcccaccactacaatcggttcgttcccacaaaccgttgagctcaggagggtccgccgtgagtacaaggcaaaaaagatctctgaggaggaatacgtcactgccatcaaggaggaaatcaacaaggtcgttaagcttcaagaagagcttgacattgatgtgcttgtgcatggcgagcctgagagaaac

SEQ ID NO: 10628 - DNA, 304 bp, Zea mays
gcgtacgatgccaccaaggacgcccacgggctgtgcatcctgaccgagtgggacgagttcaagaccctggactaccagaagatcttcgacaacatgcagaagcacgccttcgtcttcgacggccgcaacatcgtcgactccgagaagctgagggagatcggcttcatcgtctactccatcggcaagccgctcgacgcctggctcaaggacatgcccgcggtcgcctaatcccacccccctcacccatggattggattccgggaaggaagaggagagaagctggttgaccgttctttattacagt

SEQ ID NO: 10629 - DNA, 304 bp, Zea mays
agtggctaagctacttggaggtggtttgcacaattcttctgtggtccgtgggatggttctgaaaaatgatgctgttggtagcatcaaaagggcggagaaggcaaagattgtcgtatttgctggtggtgtcgacacctcggcaactgaaacaaagggaaccgtgttgatccattccgctgagcagctagaaaattatgctaagaccgaggaagctaaggtggaggagcttatcaaagctgtcgctgactctggtgccaaggttattgtcagtggagctgcagtgggtgacatggcacttcatttc

SEQ ID NO: 10630 - DNA, 305 bp, Zea mays
ccctcgtagtacaccagaattttgaaccagccaacgtgctcctcgacaatagatgctcagtacgtgttgctgaatgtgggctggcacaattgatggcgtctggttctgttacacagctatcaggccgtatgcgagctctactcaattatgaagcacctgaaatccatgaatctgagccttttacttgtcaaagtgacgtatatagtttgggtgtggtgatgctagaacttcttactggtcgtaagccatatgacagttctcgtccacgtgatgaacaacatcttgttcgatgggctgattctcag

SEQ ID NO: 10631 - DNA, 303 bp, Zea mays
cattgactccaccactggtggttttgaggctggtatctccaaggatggacagacccgtgagcatgctctccttgctttcacgcttggagtgaagcagatgatttgctgttgcaacaagatggatgccaccacacccaagtactccaaggcccgttatgatgagattgtgaaggaagtctcttcctacctgaagaaggttggatacaaccctgacaagatccacttcgttcccatctctggtttcgaaggtgacaacatgattgagaggtccaccaaccttgactggtacaagggcccaaccct

SEQ ID NO: 10632 - DNA, 307 bp, Zea mays
ctattctccagtccacccattccattccactaccgacgcccagaattcacgcgaacgcacacgcacccacacgacacatccagatgatgcttagggtttccccgtccccggccgccgcggtgccaacccagctctccggtgcgcccgcgacccctgctcccgtcgtcagggtggcggcgccgcgcggagtcgcgttgccgtccgctggcgccgcgtgcagggccgcgggcaaggtgaaggaggtgctcagcggggtcgtgttccagcccttcgaggagatcaagggggagctcgccctcgtgcccca

SEQ ID NO: 10633 - DNA, 299 bp, Zea mays
gggcagattggcaatggctatgccccagtgctggactgccacacctcccacattgctgtcaagtttgctgagctcataaccaagatcgataggcggtctggcaaggagcttgagaaggagcccaagttcctgaagaatggtgatgccggtatggtgaagatgattcccactaagcccatggtggttgagaccttctctcagtatcctcctctgggtcgttttgctgtccgtgacatgaggcagacggttgctgttggagtcatcaagagcgtggagaagaaggacccaactggtgccaa

SEQ ID NO: 10634 - DNA, 301 bp, Zea mays
gacatcccctcgcctaccccagctctacccgcgacgaagcatcaccaggaaggatgacgggctcaatggatctcccggccaagggcgggttcagcttcgacctgtgccgccgcaacagtatgctggagaagaacgggctcaaactcccgggattcaggaagaccggaacaaccatcgtcggcctcgtctttcaggatggggttgttcttggggcagacacaagagcaactgaggggcctatagttgctgataagaattgtgagaagatccactttatggcgccaaacatttattgttgtgg

SEQ ID NO: 10635 - DNA, 297 bp, Zea mays
agacaacattgcactaattgcggttttagaagccaaatttggtaatcatggagctgaaaatcctggtaaaagacagctcctttgtgtggcaaatacacatataaatgtccatcaagacctaaaagatgtgaagctatgggaggttcataccctcctaaaaggattggagaagatagctgtcagtgcagacattcctatgttggtctgtggagatttcaactcaacccctgggagttctccacatgcgcttctggcaatgggcaaagttgatcagcatcatccagatctggcaataga

SEQ ID NO: 10636 - DNA, 296 bp, Zea mays
atctcttcttccaattgttggtggtgttgcattggcatctcttactgaggcatcctttaactgggctggcttttggagtgcaatggcttcaaatgttacctttcaatcccgaaatgtattgagcaagaagctcatggttaagaaagaggaatccttggacaaccttaatctcttctctatcattacagtgatgtcatttttccttttggcccctgttaccttctttacagaaggtgtcaaaattactcctacatttttgcaatctgctggtctgaatgtaaaccaagtccttacaa

SEQ ID NO: 10637 - DNA, 299 bp, Zea mays
gaacttgatgatgtcacattccaccagtgtgtcaacttaacaagatttaactcagaaaagacagtcagtttcgtgccacctgacggtgaatttgagttgatgaagtatcgaatcacagagggtgtaaaccttccattccgtgttctgccgacaatcaaggaattgggccgaacacgcatggagatcaacgtgaaagtcaagagtgttttcggtgctaagatgtttgcacttggtgtcgttgttaaggttccagttccgaagcagacagctaagactagtttccaaacaacatcaggcaa

SEQ ID NO: 10638 - DNA, 296 bp, Zea mays
gtgaggttaacagaatcagggaacttccacagaacagtaagatcatagccactcacactgacagtccagatgtacttatttgggatgttgaagcacaaccaaatagacatgctgtcctaggagcaagcgagtctcgccctgatctgatattaacaggacataaggaaaatgcggaatttgcgcttgccatgtgtccagcagaaccatatgtcctatcaggaggaaaggacaaatctgttgtcttgtggagcatccaagaccatatatctgcccttggggattcctcgtcttctcct

SEQ ID NO: 10639 - DNA, 299 bp, Zea mays
ctcttggatacatcaatggaccaccatatcctgggcctatccctcccatgtattattacatgcccactgtgcctatggattcgatgagaagtccatcacactacattcaaaatcaaccagctcctaatcctgttttatccccagaagctgctgagttaagatctaatatactaactcaagtggagtactacttcagtgatgcaaatctggagcgtgatgatttcctgaaatctttaatggatgagcatggttgggttccagtttcaaaacttgcagatttcaatagacttaagaaaatg

SEQ ID NO: 10640 - DNA, 292 bp, Zea mays
cccacgcgtccgcattggagaaggttcaagttaaatcctcaggacatgttctgccatatgttggcgttgcttgtttgggggctattctgtttggttaccatcttggtgtggtcaatggcgcacttgaatatctcgcgaaggatcttgggattgctgaaaatgctgtcttgcaggggtgggtggttagcacatccttggctggtgcaacactaggttcttttactgggggttctttggcagataaatttgggcggacaagaacattcatcctggatgcagtcccacttgctct

SEQ ID NO: 10641 - DNA, 290 bp, Zea mays
catgtggtttggtgagagcgaggccaatgtccgtgagatttttgacaaggctaggcagtctgctccgtgtgtcctcttcttcgatgagctcgactccattgctactcagagaggaagcagtgttggtgacgcgggcggtgctgctgacagggtgttgaaccagctgcttactgagatggatggcatgaatgccaagaagacggttttcattatcggtgcgactaacagaccagatatcattgaccctgccttgctgaggccaggacgcctcgatcagcttatctacattc

SEQ ID NO: 10642 - DNA, 290 bp, Zea mays
agcaattttacctgtgaaccctaaatttcttcctcacactgatgatgagaaagaaatggtatccaggactgtgtattgtactaacattgacaagaagatcgcagaagatgaagtgaagcaattctttgagggaacatgtggtgaagtttctcgtctgaggctacttggtgattatgtgcactccacatgcatcgcttttgttgagtttgtccaagcagatagtgctattctcgctctgaactgcagtggcattgttcttggaacgcttcctgttagggtgagcccatcaa

SEQ ID NO: 10643 - DNA, 295 bp, Zea mays
atataatagtacctccaagaatgattgacataattgttgatggagaggtcaatgatgaatacatgaaaacacttgagactctaagcaaaaaaatcaaattcatcgatgctgaccccatggttaaatcatccaaggctctaaaagatgttcaacctgaggttgagagactacgacagaaagccgtctcaaagattttcgagtttgtcatccaaaagttctatgccttgagaaaaccaaagactaatattcagattctacagcagagtgttcttcttaaatacaagtacacgataaa

SEQ ID NO: 10644 - DNA, 290 bp, Zea mays
gtgccgtgctatgtcacagcttgaggttggacaatttgcagttgcaagttttgggaagaaggggaacgttagtgtgctacacgattttgatcagatctttaatagtgaagctggagttaatgtgatctctagcttgtcgtttgagcaagataacaaaattgaggatgaaccggtgtctcatctcttgacacatctgaatgttatgcttgatactgccgttgcacgggcacgcaccccatcagggcaaaatcctctccagcaactgatactgataatatctgatggaaaat

SEQ ID NO: 10645 - DNA, 289 bp, Zea mays
cccacgcgtccggaaggaggcaagtggaggtctcttatgacccacaagcgaggtttaaccagatagcagaccaaattgacaaggatgctgggatgacacggcttaacctattctcaccttgcaaaattaatgtgttcttgaggataacgggcaagagaccagatgggttccatgacctggcttctctatttcatgtcataagtttgggtgatactatcaaattctcattgtcaccaagtaaaagtagagatcgcctgtcaaccaatgttccaggtgtcccagttgatga

SEQ ID NO: 10646 - DNA, 295 bp, Zea mays
cctcagtcctcagtccctcacacactcactatacactgctctgctgcagcaagaaggaagaagctagcgcctccctagctctcgttgtcagcaatggccaccaccgccgcgtccagcctcctcaagtcgtccttcgcgggctcccggctcccttcggccacgcgcaccaccaccccgtcgtccgtggccgtggccaccccgcgcgccggcggcggccccatccgcgcgtccatctcctcctcacccaccccgccctacgacctgacgtccttccggttcagccccatcaaggagt

SEQ ID NO: 10647 - DNA, 334 bp, Zea mays
cggacgcgtgggtaagttctgaagtgaatgatgcaactctttatgcctgtttctcagcatatccttcttgttctgatgctcgagtcatgtgggacaacaagactggacgctccaggggttatggttttgtctccttccgtaatcaacaggaagctgaaactgctataactgaaatgactggaaaatggcttggaagcagacaaataaggtgcaactgggcaacaaagaacaattcggaagagaaaccagaaactgacaatcataacgcagtcatactaacaaatggtagctccaacaattcagcaacggatgcaagccaggacgcaggaagtaa

SEQ ID NO: 10648 - DNA, 331 bp, Zea mays
cgcgtctagccgtcgacgagcaccgcagcctgacacagccgcgggcgaaccatcgcgtgcggcctcgcccgggatggcgaccatggagagcctgatcgggctggtgaaccgtatccagcgcgcgtgcaccgtcctcggcgatcacggcggcggcggcggcggcgagggctccctctgggaggcactcccctccgtcgctgtcgttggcgggcagagttccgggaagtcgtcggtgctcgagagcatagtggggagggacttcctgccccgtggatctggcattgtcacgaggcggcctttagtgctgcagctccacaagacagatggtggg

SEQ ID NO: 10649 - DNA, 330 bp, Zea mays
cccacgcgtccgtgaagatgtacgccgcactagagcgatacaacgttcaagtcggaaaagacatggtggctcgtttggtcaagagcttgtaactgttgcagtcgtcggatatacaaatgctgggaaatctacgcttgtgagtgcactttctgaagctgatttatacagtgatgacaggctgtttgcaacagtagatccccggttacgaagtgtgattcttccatcagggagaaaagcacttcttagtgataccgttggcttcatctcagatttaccagtacagcttgtggaagcatttcatgcgaccctagaagaagttgttgaagcaga

SEQ ID NO: 10650 - DNA, 333 bp, Zea mays
gggagaactgatctttatattggcaggtggatgcaatcaaaaccacgagacaagataattttggccaccaaagttgccggttattcagagcggtctacatttcttcgagacaatgcaaaagtggttcgtgtcgatgctgccaatatcaaagaaagtattgaaaagagtcttaaacgcttgtctacagattacattgatttgcttcagatacactggccagataggtatgtggcactatttggtgagtttagttataatccgaccaaatggaggccaagcatcccttttgaagaacaattgaaggctttacaggagttagttgacgaaggaaag

SEQ ID NO: 10651 - DNA, 328 bp, Zea mays
gagttaatcggggactggtcgtgtgcggagatgttggtgctcttcgagacccccgcggggttcgccctattcaaggtgctcgacgaggggaagctcgacaaggtcgaggatctatggaaggagttcacgacgtcggactcagcgagaaaggtggtcgagctgaaggctttcaacaagtttgagaacacatctgatgccctatccgcggcaacgctgattattgatagcaacctagcaagggtctgcgcaagttcttgcagaaacattgtgagggtgaaacattagcagtagctgattctaagcttggaaatgctataaaagcaaagct

SEQ ID NO: 10652 - DNA, 307 bp, Zea mays
tcccgaaattagcagccggcatacacgagagatacgaccagcggtcagccccctttcggcctttccctcccgtatactcgccgtcggccagcggatctaatcggggcgggcgcgatggctgggcagaaccagcggctcaacgtcgtgccgacggtgacgatgctcggcgtcatgaaggctcggctcgtcggcgcgacccgcggccacgcgctgctgaagaagaagtccgacgcgctgacggtccagttccgggccatcctcaagaagatcgtcgccgccaaggagtcgatgggcgatacgatgcgcg

SEQ ID NO: 10653 - DNA, 330 bp, Zea mays
aaaacaaagaagccaccatcaaggacttgcaactgctggcccaagtggtgtttttgctgttgctgctgtggtaataggaaacacaagaagaagactacgaaacccaaaacagagaagaaaaagttattatttttcaagaaagaagaaaatcaatcccctgcatatgctcttggtgaaattgatgaagctgctccaggagctgagaatgaaaaagctggtattgtaaatcaacaaaaattagaaaagaaatttggtcagtcttctgtctttgcaacatccacacttctcgaaaatggtggaaccttgaagagtgcaagtcctgcttctctt

SEQ ID NO: 10654 - DNA, 327 bp, Zea mays
cccacgcgtccgctgctgaagaaggatcctaggtgcctgaaccacatgtttgccgccgagatcttcatgcacaggttcctgttgtcgagtgctgtccgaacttttaatcctgaggaagcagattggttctacacgcccgtatacacgacatgcgatctcacccccaagggtcttcccttgcctttcaagtctcctcgaatgatgcgcacgcgatccagctgattgctacgaattggccttactggaatagatcagagggcgctgatcatttctttgtcacgccccatgactttggtgcttgctttcattatcaggaagaaaaagcaa

SEQ ID NO: 10655 - DNA, 323 bp, Zea mays
gtgacaagcaaggcttcccaatgaagcaaggagttttgacttctggtcgtgttcgtcttctgctccataggggcactccctgcttccgtggttatggcaggcgtaatggtgagcgcaggaggaagtctgtccgtggttgcatcgtgagccaagacctatctgttatcaacttggtgattgtgaagaagggtgagaatgatctgcctggtttgacggacactgagaagccaaggatgaggggtcccaagagggcctccaagatcagaaagctgttcaaccttaacaaggatgatgatgtacgcaagtacgtgaacacataccgc

SEQ ID NO: 10656 - DNA, 318 bp, Zea mays
ggagcctaccccgaggtggctgtgaagatcatggctcgtatttgcatcgaggcagaatcttccctggaccacgaggcagttttcaaggccatgatcaggtccgcgcctcttccaatgagccctctggagtcccttgcatcatctgctgtgaggactgccaacaaggccaaggctgcactgattgtcgtcctgactcgcggtggcaccacggccaaactggtcgccaagtaccgccccagggtccccatcctctccgttgtcgtacccgtgcttacgaccgactctttcgactggaccatcagctccgagggcccagct

SEQ ID NO: 10657 - DNA, 323 bp, Zea mays
caccatgttggccctggtgtgctaagcatggcaaatgctggccccaacacaaatggaagtcaatttttcatttgcactgtgaagacaccgtggttggacaaccgtcacgtcgtgtttggacacgtattagaggggatggacgtggtgaagcagcttgaatcgccagagaccagcaggtccgatactcccaagcagccttgccgaatcgttaactgtggcgaggtccccctggacagctgagcgagcgaaatgctcttggtgagtttgaacctgaggtaccgcgaagtcttctcttacgttagagcgtcgacgcccatttgtgg

SEQ ID NO: 10658 - DNA, 322 bp, Zea mays
ggaaagacggcatctcaacggaggggattattgatcctgcaacaatttttgcaattctgtttggtagtgagctttttgaggaatatattggtcaactggcaatggcatcaatggcttcacttgataattttggtgaagatgagcagattgatgcaagacagctgcaagagagaatgcaggctgttcaaaaggatcgggaagaaaaacttgcagagacactgaaaaaccggctacacatctatgtgcaaggaaataaggcagaattcatccagcatgctgaagcagaggtgtccaaacttagaaatgcagcatatggagttgt

SEQ ID NO: 10659 - DNA, 325 bp, Zea mays
aaacacaagtcgtcgtaggcagcgagcgtctctcctctcccacgcatcgcgccaaggaagagagagagatcgccgctccccttctcggcgtcggtggtgcgggtgccctccctcctcgagcgagatctgtctggtcacagatctatctgacaaaatggtgaagatctgctgcatcggtgctggctatgtcggtggcccaaccatggccgtcattgccctcaagtgcccagacattgaggtcgtcgtcgttgacatctccaagccccgcattgaggcctggaacagtgacaccctgccaatctacgagcctggtctcgatgatgtt

SEQ ID NO: 10660 - DNA, 325 bp, Zea mays
gaagctgacatcttcgtgaccaccactggcaacaaggatatcatcatggttgaccacatgaggaagatgaagaacaatgccattgtctgcaacattggccactttgacaatgaaattgatatgctcggccttgagacctaccctggcgtcaagcgcatcaccatcaagccccagactgaccgctgggtgttccccgagaccaacactggcatcattgtccttgctgagggtcgcctgatgaaccttgggtgtgctactggccatcctagctttgtcatgtcctgctcattcactaaccaggtcattgcccaacttgaactgtgga

SEQ ID NO: 10661 - DNA, 324 bp, Zea mays
gctgtgcggcggcgcgtggctgcagcaggcggcggaggcgcgcccccaccacatggacgacgacagcagcatcgacatggaccgcggcacgacgacttcttctccatcgtggggtactcgccggaggacctgacgcagcacgaccggctcgtcaggctgttcgaggagtgggtggccaagtaccgcaaggcgtacggcagcttcgaggagaagctgcgccggttcgaggtgttcaaggacaacctgcaccacatcgacgaggccacaggaaggaggtcaccagctactggctgggcctcaacgcttcggcgacctcacgcacga

SEQ ID NO: 10662 - DNA, 314 bp, Zea mays
gagctcgtcgccgtcaacccccttcatcaccacggactacatgacctacatgttcaagtacgacaccgtccacggccactggaagcacagcgacatcacactcaaggactccaagacccttctcttcggtgacaagccggtcaccgtctttggcatcaggaaccctgaggaaatcccgtggggtgaggctggcgctgagtatgtcgtggagtccaccggcgtcttcactgacaaggacaaggctgctgcacatctcaagggtggtgccaagacgttgttatctctgcccaagcaaagatgcaccatgtttgttg

SEQ ID NO: 10663 - DNA, 324 bp, Zea mays
  unsure (1)..(324): unsure at all n locations
cggacgcgtggnggaaaccttgtagccctgactcaagtggaccaatgaaggattcttcaggttctgagagctctacgactgaccaggacagtgggaatgatactgaagaggaggtgcttgtgtcgaagggcaaagaatcatgtaaagagtacatcaagagtttcttggcagccataccaatccgggaactacaggcggacatcaagaaaggactgatgggcatcaaccccattgcacaacggctccagattgagttccagtacacccagtcgtcgccaaagagactgcatcaagcactcagcttcttaccatggaggccccctt

SEQ ID NO: 10664 - DNA, 317 bp, Zea mays
atatccgctcccctacctctccagcatcctcccgtctccgtcgtctcgtctccgctcctcacctcgccagccatgggcaagatcaagatcggaatcaacggtttcggaaggatcggcaggctcgtggccagggtcgccctgcagagcgaggatgtcgagctcgtcgccgtcaacgaccccttcatcaccacggattacatgacgtacatgttcaagtacgacaccgtgcacggccaatggaagcacagcgacatcgccctcaaggactccaagacgcttctcttcggcgagaagccggtcaccgtctttggcatcag

SEQ ID NO: 10665 - DNA, 316 bp, Zea mays
ctcaagttgagcagaagactattgttgtgcagcccatgcttgtagctgaaaccagcgaggctgctgctgtaatccccaaggccaaggaaggcccagaccggtgcgcggcctgcaggaagcgtgttgggctgacgggatttagctgccgatgcgggaacatgtactgttcggtgcaccgctactccgacaaacatgactgtcagttcgactatcggactgcagcaagggacgcgattgccaaggccaatcctgtggtgagggcggagaagctcgacaagatctgaggcgggcattgggggagcgaaatggttgcaat

SEQ ID NO: 10666 - DNA, 321 bp, Zea mays
cggaccgtggggcgcccaaggcgaagaaggcgcccaaggagaagaaggcgcctaaggagaagaagctttccgcggcgaagaagccggcggcgcaccctccctacactgagatgattgtagaggcgatcgctgccctcaaggagaggaaggggtcgagctcggtggccatcagcaagtacgtcgaggggaagcatggcggcaagctccccaccaacttccgcaagcagctcactgtgcagctgaagaagctcgctgccgccggcaagctgacgagggtgaagaactccttcaagctgccggccaccgacgccgaacccaagg

SEQ ID NO: 10667 - DNA, 315 bp, Zea mays
gtaaacgagatctatggcaaatatttcccggtgccagcacctgcacgatcaacctaccaagtggcggcgctgccactgaatgcccggattgagattgagtgcatcgctgctctctaatcagatcatccaaccactcattaaatcatcaataagcacccaggaatttgtggtagaggtacctgtaccagttcagtgtctgaaaactgcgggtaacaaacctttgtgtcccggataagtgatgtgtgtgtgtgtgtgagtgaacagtgcatctagtaggagaattgttgcgtggtttgttacttggattcttcgctc

SEQ ID NO: 10668 - DNA, 315 bp, Zea mays
aatgaacattcctcttgctggaattgaagccatcctatggagcaatgaccttcaggtcgcgtcggaggatgctatctacgacttcatgataaagtgggcacgtgctcaatacccaaaattggaggaaagacgtgagatcttgggcacacgcttgctgccccttgttcggttctgccatatgacctgcaggaagttgcggaaggttattgcctgcagtgatctggatcacgagcaggcgacgaaatgtgtcacagaggcacttctctacaaagctgatgcaccacataggcagcgtgcccttgcagcagacgtgat

SEQ ID NO: 10669 - DNA, 309 bp, Zea mays
cggacgcgtggcagacgtgggttggcttctcctcccccaccggttcgtgttcaggttctggttcgtgggcgagacggaagagatggcggcgacggacgttgagtaccgttgcttcgttggcggcctcgcctgggccaccgacgaccactccctcaacaacgccttcagcacctacggcgaggtcctcgagtcgaagatcatcctggatcgggagacgcagaggtcccgcggcttcggcttcgtcaccttctccacggaggacgcgatgcgcacgcacatcgaggcatgaacggcaaggagctcgacggc

SEQ ID NO: 10670 - DNA, 309 bp, Zea mays
cccacgcgtccgcagaatgttgagtttggtgatgactctgagaggccaccacggagaaactatgagcgccacagcgggactggccatggctatgagatgaagcgtgatggcgcagggcgagggaactggggcactgccactgatgaacttattgcccaggatgcagaggactctccgaagatggaggaggctgctcctgttgctgagaaacaaggtgagcagaatgatgccccagcagcagatgagaacaaagataacaaggatgctactgcaaatgaggaggaagaaaaggaagaggacaaggagatg

SEQ ID NO: 10671 - DNA, 309 bp, Zea mays
cgctcgtggtcactacaccattggcaaggagattgttgacctgtgccttgaccgcatcaggaagcttgcagataattgcactggtctccagggcttcctcgtcttcaacgctgttggtggaggaacgggctctgggcttggttctctcctcctggagcgcctgtctgttgactatggcaagaagtccaagctcggtttcaccgtgtacccatccccccaggtgtccacatccgtggttgagccatacaacagtgtcctgtccacccactctctcctcgagcacactgatgttgctgtcctgctcgacaa

SEQ ID NO: 10672 - DNA, 309 bp, Zea mays
ggcgcactgtccagcgagtactatggccagacgtgccccgtcgtgcaccgggtcgcgcggcgggtgctgaagaaggcgcatgaggccgacgtccgcatctacgccagcctcacccgcctccacttccacgactgcttcgtgcaaggctgcgacggctccatcctgctggacaacagctcgagcatcgtgtcggagaagttcgccacgcccaacaacaactcggcgcgcgggtaccccgtggtcgacgccgtcaaggggcgctggaggaggcctgcccaggcgttgtctcctgcgctgacatactggcca

SEQ ID NO: 10673 - DNA, 306 bp, Zea mays
caaattttcaggaacatgggcacactggagaaatatggtttggtgcagatgtaatggacacagttgctgtttggacgaaaagtttgtgtaacattattgaaggcaagattccatctggtcaagacaacatcaaaagtgaagtcaatgaaaatttattctccaactaccctgttcttgatgttggaactggaaatggtcttcttttgcaagcattggctaagcaggggtttacagacttaactggaacagattacagtaaaggagctgttgaacttgcaagaaacctagctgctcgtgatggcttct

SEQ ID NO: 10674 - DNA, 305 bp, Zea mays
atgggagcataaatggccagggtgaagtttggtggatgaagcatcgcagaagaattctgaataacacaaggcctcctcttgtgcagctgatgtggtccaaggacattattgttgcaaacataacactgaggaactcacctttctggcacttgcatccttatgattgcacaaatgtgactgtttcgaatgttactatcatgtctcctgtttctggtgctccaaacacagatggcatagatccagattcttgtcaggatgtgcttattgagaattgctacatatcggttggcgatgatgcaatagct

SEQ ID NO: 10675 - DNA, 309 bp, Zea mays
ctgccacgcgcgccccggatcgacggagggcacgcagacgcggaggagggaggatgagtctcttcgggcttggacggaaccagaagacattccgccccaagaagaccgctccatcaggcagcaagggagcacagctccgtaagcacatagatgccactctcggcagtggaaaccttagggaagctgtgaggttgcctcctggagaggatatcaatgaatggcttgctgtcaataccgtggatttctttaaccaagttaatatgctgtatggcacgctcacagaattctgcacacctgagagctgcccga

SEQ ID NO: 10676 - DNA, 301 bp, Zea mays
gtgcttccgaacttgtataatttggctgcaggacagttcaacccccttgttattcagccacaagccatgacacaacaggctacccggcatgctcggcgtgtctatgtgggtggacttcctccaacagctaatgagcagaccgttgccatattcttcaatggagttatggctgctattggaggaaacacagctggtccaggtgatgctgttcttaatgtctatataaaccatgacaagaaatttgcttttgtggagatgagatctgtggaggaagcaagcaatgcaatggctttagatggca

SEQ ID NO: 10677 - DNA, 303 bp, Zea mays
gatggacaggtgcttccttgagcttcaggttgagggtgaggaagcttatcagactttctcccgtgttattgagaatgccaatgtcatcatggcaacatatgaagataagctccttggtgatgtccaagtatacccagagaaggggacagttgccttttctgctggtctgcatggatgggcctttacactcactaactttgcgaagatgtatgcatctaagtttggagttgatgaatctaagatgatggagaggctatggggtgagaatttctttgaccctgccacaaagaaatggaccaccaa

SEQ ID NO: 10678 - DNA, 297 bp, Zea mays
gcagagcatgacgtctcgcccaatgaaggggatgctgactggcccagtcacaatcctcaactggtccttcgtccggaatgaccagccgaggtttgagacttgctaccagatcgctcttgcgatcaagaaggaagtcgaggatctcgaggctggtggtattcaggttatccaaatcgacgaggctgcactgagagaagggctgccgctccgcaaggctgagcatgcattctacttggactgggctgtccactccttcagaatcaccaactgcgagatccaggacaccacccagatcca

SEQ ID NO: 10679 - DNA, 303 bp, Zea mays
aaaccctagccctcgcgccgccgccgccgtgcccagcgctcgagctcctcgcctgccgcgagctcgcgccgcaacgccaccatgaagttcaacatcgcgaacccgtctaccgggtgccagaagaagctggaaatcgatgacgaccagaaactacgtgccttttatgaccgaagatctcccaggaggtcagtggtgatgctctgggtgaggagtttaagggttatgtcttcaagatcatgggtggatgtgacaaacaaggcttcccaatgaagcaaggagttctgacttctggtcgtgtccgcc

SEQ ID NO: 10680 - DNA, 304 bp, Zea mays
cccacgcgtccgcccacgcgtccgctggggcacgcaggccacgcacccgctgccgcccaagatcgtggcgcagtcctcagggacaacggcatcaagaaggtgaagctgttcgacgccgaccagggcacgctcagcgcgctcgccggcaccggcatcgaggtcatggtcgccatccccaacgtcatgctcgacaccatgacggactacgacaccgccaaggagtgggtgcgccggaacgtgtcccgctacaagttcgacggcggcgtcaccatcaagtacgtggccgtgggcaacgagccgttcc

SEQ ID NO: 10681 - DNA, 302 bp, Zea mays
cgcaccaagaccgtgaagaagacctccaggcaggtgatcgagaagtactactcccgcatgaccctcgacttccacaccaacaagaaggtgctggaagaggtctcgatcctcccctcgaagcgcctccgcaacaaggttgccggcttcaccacccacctgatgcgccgcatccagcggggccccgtccgtggcatctcgctcaagctgcaggaggaggagcgggagcgccgcatggacttcgtcccggagaagtcagcgctcgaggtcgaagagatccgcgtcgacaaggagaccatggagat

SEQ ID NO: 10682 - DNA, 304 bp, Zea mays
cacacagaagcggcggcggcggagcaaacgcaggcgaaggcgagggtgtgagggaaggagcaccagccatggtgcacgtcaacttctaccgcaactatggtaagacgttcaagaaaccaaggcgtccttatgagaaggagcgtcttgatgctgaactgaagctggttggtgagtatgggctgaggtgcaagcgtgagctttggagggtccagtatgcactgagcaggatccgtaatgctgcaaggcacttgctcacccttgacgagaagaacccccgtcgtatctttgagggtgaggcacttct

SEQ ID NO: 10683 - DNA, 295 bp, Zea mays
cggacgcgtggcggacgcgtgggctggtttggctgctgcagatcaactaaataaaatgggccacttcgtaactgtgttcgaacgtgcagatcgaattgcaggtttaatgacgtatggtgtgccaaacatgaagacagacaagattggcgttgtccagcgccgtgttaatttaatggctgaagagggtgtcacatttgtggtgaatgccaatgttggtagtgatcctttgtactcgattgaacgtctacgttctgaaaatgatgcggttattttggcttgtggagcaacaaaaccg

SEQ ID NO: 10684 - DNA, 298 bp, Zea mays
attcaaccttcaggcctgaaatgatggaaatcgaccatcgtctcaaggcgctctatgttgacacaaacaagcttgagggcattgatagcccagtggaacaaatcatacagtggcttacaggaaatgggaaacacgatcaagaactaaacataatggccatagtgggcttcggaggtttaggcaaaactacccttgcaatgcaggtatacaataaattcaaggacaaatttgattgcacagcttttgtgtcagtgtcaagaggccccaacatcaagaaagttttgatggacttacttaa

SEQ ID NO: 10685 - DNA, 295 bp, Zea mays
gacccaaacactggactggtttacactaacatgttcgacgcccaggtcgattccatcttctttgcgctcatggctctgaacttcaagactttgaagatcatgatcactgagtcagggtggccaaacaaaggggcggtcaaggagactggagccactccagacaatgctcagacttacaataccaatttgatacgccatgttgttaatgacagcggcacaccggcgaaaccaggggaagagattgatgtctacatattttcattgttcaatgagaacaggaaacctggcatcgagt

SEQ ID NO: 10686 - DNA, 295 bp, Zea mays
ggatttctccttggacatttgcaatctctgggttttgatttccctaaaagcatcagtgtgattgctgtatgccccaagggaacgggcccatcagtcagaagactttatgttcagggcaaagagatcaatggtgctggtatcaatgctagctttgctgttcaccaggatgttgatggaagggcaacagatgtagctctagggtggtcagtagctttaggttctcctttcacatttgctactactctagagcaggagtaccggagtgacatttttggcgagcgaggtattttgcttg

SEQ ID NO: 10687 - DNA, 298 bp, Zea mays
gcaaccggtccaacactttcacgctcaggcgctcagctctagcaatggctgcctccaccatggcgatctcctccacggcgatggccggtacccccatcaaggtgggctccttcggcgagggccgcatcaccatgcgcaagaccgtgggcaagcccaaggtggcggcgtccggcagcccctggtacggccccgaccgcgtcaagtacctcggccccttctccggcgagcccccgagctacctcaccggcgagttccccggcgactacggctgggacaccgccgggctgtccgccgaccc

SEQ ID NO: 10688 - DNA, 299 bp, Zea mays
acgacgggtgcatgcagttcatctcggaggggccgtgggatgtccacgacgaggtcgacctcgagttcctgggcaacgccagcgggcagccgtacacgctgcacaccaacgtgtacgccagcggcaacggcagcagggagcagcagttccacctctggttcgaccccaccgccgacttccacacctactccatccagtggacgcagcagcacatcctgtaagtttcagaactactacttgcccaagccgatcagcagcgattcagcatcagtcagccaataatcctcattcttcttcgc

SEQ ID NO: 10689 - DNA, 311 bp, Zea mays
ggaccgtgggctcgttttcgaaattttccaatcctttgggaagtacaatggctagacctttgccttcccaagggaaagaagttatggttggttccaacggtgttattaagaaggaggaatttgttaggataatcaccaaaactctgtatagtcttggatatgaaaaaagtggagcagttctggaggaggaatcagggattattttacataaccctatggtgaaacttttcagagaacaggtgattgatggaaattgggataatgcggtggttaccatgaatacaattggccttcaagatgaaaacatcttg

SEQ ID NO: 10690 - DNA, 301 bp, Zea mays
gattcggaaggacggtttgcctacctctggttccggcggccatggcggtggcggcccctggccagctcaacctcgacgaggccccgtcatggggctcccgcagcgtagactgcttcgagaagctcgagcagatcggcgagggcacctacgggcaagtgtacatggcgaaggagacgggcaccaacgagatcgtcgcgctcaagaagatccgcatggacaacgagcgcgaagggttcccgatcaccgccatacgcgagatcaggatcctgaagaagcttcaccaccagaacgttatcaagct

SEQ ID NO: 10691 - DNA, 315 bp, Zea mays
agcaaatttattgatcagttaccatcagtaatgaaccaggttacagaaggtgtgtctgaatttaaaccaacaccacctgaaaaccgtgaattctgcaagaattcctacagtgtacccaatacattattggtcaaattcactgtagatgctattgatgatacagacatagttgaagatgtcctgagaccccgcgttgattcaatcggtggacaaataaagaaggtcatactgtcaggaacacatctaactccatgtatacaggatgtcaaatggcaagttggttcagaatacactccagcagatgccattgcacaa

SEQ ID NO: 10692 - DNA, 313 bp, Zea mays
cggacgcgtgggcggacgcgtgggcggacgcgtgggtgcgattatgcctacgttttggggcatgtgtgctaccacatcatagctgccggattgaacagttccatggctacggcgacaaatcttaagaatccagtgaacaagtggcgatgcggcgcgactcctatttcgtctatgatgactgtgaagcgatggtcgcgtggcccttcagccacccaaattggaaagcccgctgttcacatggctagcgttgacttgaaaggaaaagcatacgatgtgttgagacagaattcttccagctttttgttggaagatg

SEQ ID NO: 10693 - DNA, 315 bp, Zea mays
tggtaatgtggccaatgtaactgctgatgcctgtcatgcttttggccatcctgatcaagacaagtcatttaaaaggcgctcagggcaaagatctagggtccgaaaacttcaatacatcgctgaacttgaaagaactgtcgaatcgcttcagaacattggagctgatttggccgtcagaatgtcatcacttttccatcttcacaatgctctatcaatggaaaacaagcaactgaggatacatatttccagtcttcagcaagcaaaactgattaaggatggtcagacgcaggccctaaagaatgaagctgaaaggtt

SEQ ID NO: 10694 - DNA, 316 bp, Zea mays
gagcggagttgctaagtactccgcgaacgtggagatgtgtaggctcacggagcaagttgtgttctcggacccataacgtgtctccaaatttaatcggtggacctcgccttatctcgacaaagatgctgaggcagttcgcgaggatgatgagctcaagttggaagtagctgggctgaaatcgatgtttatcgagagagctcaagctctgattcatggagatctccatactggttctatcatggtgaccgaagttcaactcaagtcattgatccagaatttgggttctatgggccaatgggttttgatattggagcct

SEQ ID NO: 10695 - DNA, 307 bp, Zea mays
gatcaaccgccatccattctcctcctccgttgcagctgcggcatccatccagtagtccgaccaatccatggcttcagcgttcgggaccgcctccacttgcggcattaaacatgcacctgccggcgttgcgcttgctgcgcccatgaagcacctttccctcgtctcgccctcgctggtttcgcttccgcgcaagatgaggccgcgaaggaagtacaacttcagggtaaacgctgcaaaggagctgcatttcaacaaggatggctcggctatcaggaaaatgcaaaatggggtcaacaagcttgcagat

SEQ ID NO: 10696 - DNA, 309 bp, Zea mays
cgccgccgccgctcccagtctccacgcggaagcagcgcctcgcaacgctcctacccaatggcgccgacgtcgaagctgtcgatgggcatcaagcgcgcgtcgcggtcgcacgcgtaccaccgccgtgggctctgggccatcaaggccaagaacggcggcgtcttccccaaggccgagaagcccgccgccgccgcggaacccaagttctaccccgccgacgacgtcaagcctcgcgttcccagcacccgcaagcctaatcccaccaagctcaggtcgagcatcacgcctgggacggtgctgatcctcctc

SEQ ID NO: 10697 - DNA, 311 bp, Zea mays
gcccaaggccgagaagaagcccgcggcgaagaagccggcagaggaggagcccgctgccgagaaggcgccggccgggaagaagcccaaggcggagaagcgtgtcccagcaggcaagtccgccggcaaggagggcggcgaggtaaatatgggccggaagaagggcaagaagagcgtggagacctacaagatgtacatcttcaaggtgctgaagcaggtgcacccggacatcggcatctcctctaaggccatgtccatcatgaactccttcatcaacgacatcttcgagaagctcgccgccgaggccgccaagc

SEQ ID NO: 10698 - DNA, 304 bp, Zea mays
ggccgagaaggacttgcagccttggattgctagagacgacgaacaaggccagaagatgtggagagtcaaccaacgtatagtgaagcttatagcggactcatgaggaaccatgacagccctgaagccttggtgatactcgctagtgcctctgaccttctacttcgtgctactgatggaatgcttgttgacggtgaagcttgtactttgccacagcttgagcttctcgaagtaaccgctcgagcagtccatcttattattgaatggggagatccaggtttatcagttgctgatggcctttctaatc

SEQ ID NO: 10699 - DNA, 308 bp, Zea mays
ctagttctagatcgcgaccggccgcccttttttttttttttttttttttactgacgaagaacagagtcactttattccttgcattatttaatcttgttcccggtacagctagcaagacacaagttttacagatgtaggattatcaggaagcaatccttggaacaaggagaagcttctccttccggcgaacgtcagcccaaaggactcgtccatggacacccctgctgcagagcccggaacctcccaatcaaaatggtacatgagattggccagcatgatctccatggtcgcgaatccgaagttcatcc

SEQ ID NO: 10700 - DNA, 309 bp, Zea mays
atttcccactccactcgaattaaaaccctagcggcaaaaccttcgctctgcgccgccgtcgcctgctcccgtcccgccaccacatccgcccaggagctcgccgtcggggaggctgctcgaggagccgcgctgtctctcccgcgccgcgaccttcgccctcgccgccgccatgatctgcgcgatctccggtgaggtgccggacgagccggtggtgtcgaagaagtcggggcttctcttcgagcggcggctcatcgagcgctacattgaggaccatggcaagtgccccatcaccaaggatgagcttactat

SEQ ID NO: 10701 - DNA, 301 bp, Zea mays
ggaccagttctttgaccatgccattggtatcaacgttccaaggtcccgcttcctaccagttaaggcgacatcagatttgcagctagtacagtctgatctatataccttggttgatggcttcgttacacgtaattcagccagaacaaatccatcaaatccctcaattgaacttggtcctgagttcaagaaggttgggagcttccttggtcgcttcaagtccatacctagcattgttgagcttgacatcttgaaggtttccggtgatgtttggttcggttctggaattgtactgaaggggaaa

SEQ ID NO: 10702 - DNA, 296 bp, Zea mays
ttcttaaatttcatccatcaattggagtacagcttgtaataggcggcactagaatggcacttgaacagaagcgcatgcacactaacccttgccagattctagtagctactcctggaaggcttagggatcacatggagaacactccagggtttgctacaaggttgttgggtgtcaaagttctaattcttgatgaagctgaccgcttgttagatatgggattccgatcagatattgaaaaaattgtggctgcactaccaaaacagcgtcaaacacttctattttctgcgacagttcca

SEQ ID NO: 10703 - DNA, 296 bp, Zea mays
cagtgctggtgaaggtggtgttccggcgggacatctcgttcaagctgacgtcgaagcagcccgctggggacgagaagaaggacccctacgccgacctgtacgtggtgcgctggacctggctcatggtgacgcccatcatcatcatcctcgtcaacatcatcggctccgccgtggccttcgccaaggtgctggacggcgagtggacgcactggctaaaggtggccggcggcgtcttcttcaacttctgggtgctgttccacctctagcccttcgccaagggcatcctggggaggcac

SEQ ID NO: 10704 - DNA, 302 bp, Zea mays
cggacgcgtgggcgagctctctggtggggccgcggccccggctcctgccagggtcacggcgcacgcagcggcgtctcgctgtccgccgccgccgccggcaaggggaaggaggtgctcagcggggtggtgttccagcccttcgaggagatcaagggggagctcgccctcgtgccccagtcccccgacaggtcgctcgcgcgccacaagttcgtcgacgactgcgaggcagccatcaacgagcagatcaatgtggagtacaacgcctcgtatgcgtaccactccctcttcgcctacttcgaccg

SEQ ID NO: 10705 - DNA, 299 bp, Zea mays
  unsure (1)..(299): unsure at all n locations
cggacgcgtggngccgacgcgtgggcggacgcgtgggggcctctacaccttcgccgacatcgacgccgacggagcaccccgcctcgaggttgccgatggcgaggagttcgtccgtgtcgatcgcgttgtcgagcttgccctcggtccccgggtgctgaaggcccctggaaccctttacctcaccaccaggagggtgatttgggtcagcgatggcggcgagggctacgctgtggacttcgttgccatctcgctccacgccgtgtcgcgtgatgccgaggcgtatccatacccctgcatct

SEQ ID NO: 10706 - DNA, 301 bp, Zea mays
caaggaagtatcattagtggatcaaggactcaatggaaaacaacgcattctgcagcttgaacatgagatatctctcttgagtcgtttggagcatgaaaatatagttcaatatatagtttcccaccttccttatgtgttccaaaatattgaactatattttggaacacataaggaaggtgggaaactatatatttttcttgaacttgttagtcaaggatctttggcaactttatatcaaaaatatcatttgcaagattcacaagtctcagcatatacacgacagattctgaacggtttgcac

SEQ ID NO: 10707 - DNA, 187 bp, Zea mays
tgaagaaggcgcctaaggagaagaagccgtccgctgcgaagaagccggcggcgcaccctccctacgctgagatgattgtagaggcgatcgctgccctcaaggagaggaaggggtcgagctcggtggccatcagcaagtacgtcgaggggaagcacggcggcaagctccccaccaacttccgcaagca

SEQ ID NO: 10708 - DNA, 314 bp, Zea mays
agaggatcctggtcgattacatgcttcggatgtcctactacaattccgccaccaagctcgctgagacttctggtattcaggacctcgttgatattgatgtctttctcgatgcgaaaagagtaattgattctcttcagaataatgaagtttctcctgctttagcttggtgtgcagaaaacaagtctcggctaaagaaatcgaagagtaagcttgagtttttactgaggcttcaagagtttgtggagtttgtcaaggttaagaatttcattcaggctatagcatatgctcgaaaacaccttgctccctggggctct

SEQ ID NO: 10709 - DNA, 314 bp, Zea mays
cggcgtcctgtgggaggtcgagggaaagtgggtcacccaaggtcctgttgatgtagacattggtgccaatccatccgccgagggtggtgaggatgaaagcgttgatgacacagccgtgaaggtggttgatattgttgacacattccgtctacaggagcaacctccttttgacaagaaatcatttgtctcttacataaaaaaatacatcaagaatctcactgctgtgttggagccagagaaagcggatgagttcaaaaagggtgtcgagggtgcaacccagtttctccttagcaagctgaaggaccttcaatttt

SEQ ID NO: 10710 - DNA, 306 bp, Zea mays
ccagaccttcgcgcggccggcctgattcctcacccctgctcgccgcgaacacagctctgtcaccgcggtttgccgtggccggcgaagatgatgtccggcggtgggtactccgccctcgacgaccccaaggcctccggatccgtcccggcggccacggggacagatccgccggccatcaggttcgccgactccaacctccagaccttcccgccgtccgaatccaggggcaagatctccggcgcctaccgcccgcccaccgacgccgatgacaccttctcgtccaagggcggaagagccggaagcggt

SEQ ID NO: 10711 - DNA, 312 bp, Zea mays
gagccgactccacaccaatccaatcctggggcgggcgacagctccttccctcgatctattcctcatcttgtcctccctttgctaaaaataacgaggcagaggcatcttcgttttgacgtgcgcttcctcttcctcgctcgctctcggtcgcagtgatggctgatgtcgacgagtaccgttgcttcattgggaacctgtcctggtcaacgactgatgaaagcctcaaggatgcgttcagcaaattcggcaacctcactgaggcaaaggtggttcttgacaaattttcaggccgttctcgtggtttcggctttg

SEQ ID NO: 10712 - DNA, 313 bp, Zea mays
ctaattgtgggtggcataggggatggttctatacaggtctggaccataaaagctggatggggtagcagaccagatatccacgttgagaaaacacacacagaggatattactggggttaagttctcaacagatggacagagtcttctgtcaagaagtatggatagtactcttaagatatgggatttgagaagaatgaaaactcctttgaaagtatttgaagatctgccaaatcactacgctgagacaaatgcagcatttagctcagatgagcagcttatttttacaggaacatctattgaaaaagatggtgaca

SEQ ID NO: 10713 - DNA, 314 bp, Zea mays
aatttcaggaggaagtacaatggtgaggtgctgaaatacatgtggccttgcgcatgggcatgcacacatgagagacatcaagtacttatggataaaatttcagaaacttgtccaaacgctgtcgcatatcttagatatgaccacccacacttatggacaagagccaaattcaataaaatctgcaaggtggattacgttaataacaacatttcagaatgtttcaacaattggattaaaaatgtgaaggagttgcctgcagttgatctcatggacatgctcagggtgatgataatggagaagattgctacaagaca

SEQ ID NO: 10714 - DNA, 310 bp, Zea mays
tcatgaggtttgctgattactttggccgggcatttgcagctgtgagcgcatctcaatttccatgggcaaagatgttcaaagaatcaacagtgtccaagatggttgatatcccattgtgccatatatctgaggctgtgatcaagactgtgagtgattggatcagtcaaagatcttctgatgccctgggagactttgttttgtggtgtatagatagcatcatgtctgaattgtcaggtccatcagctggccctaagggttcaaagaaggttgcacaacagtctccaagggcccaggttgcaatctttgttgt

SEQ ID NO: 10715 - DNA, 312 bp, Zea mays
cccacgcgtccgcgcgacccggcccgggaccccgtcgtgctctggctcaacggcgggcccggctgctccagcttcgacggcttcgtctacgagcacgggccattcagctttgagtcatcaggagggtcagctgggagcctgccaaagcttcatctcaacccttatagctggtctaaggtgtcgagtgtgatatacttggactcccctgccggcgtcgggctttcctactcaaacaacgtttcggactacgagactggcgacttcaagaccgccgccgattcgcacactttcctgctcaagtggttccagctc

SEQ ID NO: 10716 - DNA, 314 bp, Zea mays
gggaggcgtcctccctggcatcaaggtcgacaagggcaccattgaggttgttggcaccgacaaggagaccaccacccagggccacgatgacctcggcaagcgctgcgctaagtactacgaggccggtgcccgctttgccaagtggcgtgctgttctcaagattggccccaacgagccgtcacagcttgccattgacctgaatgctcagggtctggctcgctacgccatcatctgccaggagaacggtctggtgccaattgttgagcctgagatccttgttgatggccctcatgacattgatcgctgcgcttacg

SEQ ID NO: 10717 - DNA, 319 bp, Zea mays
ccgtggcggcgtccgcgtcggccagcagcgggagcacctggatctcgacctgggcttcctctcctctggggaacgccggagggagtgccgcggcacggtggccgagtgcctcgccgaggagtcggatgaggagggccttgacctggctggatcccaccgccgcgcgctctacggcggcgggtacatcagctacggcgcgctgcggcgggacaacgtgccctgctcccgccgcggcgccagctactacaactgccgcccgggcggccaggccaacccctaccaccgcggctgctcccgcatcacccgctgccgcggctga

SEQ ID NO: 10718 - DNA, 255 bp, Zea mays
cccacgcgtccggcttatagcttgtcagccatggccaccgccgccgcgtctaggctcctcaagtcctgcttcgcaggctcccggctcccggccgccacgcggaccacaccggcgtccctcgtggtggccaccggcccacgcggcgccggcgacggggccatctgcacgtccatgtccatgtcgtcctccaagccgccctacggcctgacgtccttccggttcagccccatcaaggagtccgtcgtatcccgcgag

SEQ ID NO: 10719 - DNA, 310 bp, Zea mays
atcctacgcgagggcgaaacccacaaaccctctccctcccgtactccggcctacacatccaggggcgatgacgctgggtagctccggcgccggatcgagcgtcgtcgttccccgaaacttcaggctattagaggagctcgagcgtggagagaagggcattggtgatggaacagtgagctatggaatggatgatgccgatgacatctacatgcggtcatggactggtaccatcattggccctcacaatactgtacatgagggtcgcatctaccagctgaagttgttttgtgacaaggactatccggagaag

SEQ ID NO: 10720 - DNA, 307 bp, Zea mays
gccttggcaacaatactagggcagaccggtgactgggatgttcttgttgctggtgttgtagtggctgccattgagggaattggcatgctcatgtacagaaaaccaattgccaggcctcctggtaggttccaatctttgatttcaatggtgaactactggaaagccggtgtatgcctgggcctttttgtggatgccttcaagctgggtagctgagtttatacaatcatctgctgctatctgcctatggtaattttttgggtatattgggatcacaaaaaaaaaaaaaaaaaaaagggcggccgctcta

SEQ ID NO: 10721 - DNA, 310 bp, Zea mays
gaaaagcaagaatatgctttttgtcatctcgaagccagatgtgttcaagagcccaaactcggacacctatgtcatattcggcgaggcgaagatcgaggacctcagctcccagctgcagacccaagctgcagagcagttcaaggctcctgacctgagccaaatgatcccgaagcctgagacatctggcctgggcctggaggacaacgaggaggaggaggttgacgaaactggtgtcgaggccaaggatgtcgagctggtgatgactcaggcatctgtttcgaggcccagggcggtcaaggccctcaaagct

SEQ ID NO: 10722 - DNA, 306 bp, Zea mays
cggaccgtggcgcccgcgccgagccaaaggcccgggagctctacacccgctacgagcctgtggcagagcggcgtgccccgaggcctgggtggacatgaaccgtctccctatagtgccctcggtcaccagggccgtcctccccactgccgcacagctctctgccaggtacaattcggcggtgcgtgatggtgccaagcgcgggaacgccgtggccacctatctcccgctggtgcccactgagcggctcgcccgcgtgttcaggtaccccgtggctgacgttgctgcagcaccagagatgcagcccat

SEQ ID NO: 10723 - DNA, 307 bp, Zea mays
ggacctggccggacgctagctcaccaccaacctcagcacatcgaggagaagaggagtggccaatggcttcgtcggtggccgccgcggcgagcacattcctgggcacccgcctggcggacccggtgccgcagaacgggcgcatcgtggcccggttcgggttcggcggcggaaagcccaaggctgccgtcccgaagaaggtggcgaagacgtcgatctcctctgaccggccgctgtggttccccggcgccgtggccccgactacctcgacggctcgctggtcggcgactacgggttcgacccgttcggg

SEQ ID NO: 10724 - DNA, 313 bp, Zea mays
cccacgcgtccgcgatcccttcgcaaagcgccgccgtcgccccatccggcatggctccgaagaaggataaggccccgcccccgtcgtcgaagcccgccaagtcctgcggtggcaagcagaagaagaagaagtggagcaagggaaagctaaaggagaaggtgaacaacgcggtgctgttcgaccaggctacctacgacaagctgctctctgaggtgcccaagtacaagcagatcaccccctccatcctatccgagcgcctcaggatcaatggctccctggctcggagggctatcaaggacctgatggcgcgtgg

SEQ ID NO: 10725 - DNA, 310 bp, Zea mays
caagcagcagccgtcggtggaagatgtcgtacctgctgccgcatctgcactcagggtgggcggtggaccaggccatcctcgccgaggaggagcgcctcgtcatcatccgcttcggccatgactgggacgagacctgcatgcagatggatgaagtgctagcagcagtagctgagaccataaagaactttgcggtcatctaccttgttgacatcacagaggtccctgatttcaacaccatgtatgagctgtacgacccttcgacagtgatgttcttcttccggaacaagcacatcatgattgatctcgggac

SEQ ID NO: 10726 - DNA, 316 bp, Zea mays
  unsure (1)..(316): unsure at all n locations
aaaatttccctctcagccgtgttgctcgccgccgccccgccgtgttgctcgccgacaccgccccgccggcagccaaaatgccgttcaagaggttcgtggagatcgggcgagtggcccttgtanactacggcaaggagtatggccgcctcgtcgtcatcgtcgacgtcgtcgaccagaacagggctcttgttgatgcccccgacatggttcgttgccaaatgaacttcaagcggctttccctgactgacatcaagattgacattaaacgtgtcccaaagaagactacactgatcaaggcaatggaggaagctgatgt

SEQ ID NO: 10727 - DNA, 309 bp, Zea mays
catcagttttacttgatgtgaagccatgggacgatgagactgacatggccaagctcgaggaagctgttaggagtgtccagatggaagggctgctctggggcgcatccaagcttgtcccagttggatatggtatcaagaagctgcaaatcatgatgaccatcgtcgacgaccttgtctctgtcgacactctcattgaggactatctgtgcgctgagccagtgaacgagtacgtgcagagctgcgacatagttgccttcaacaagatctaggcgtgacttccgatcagtccttctcctggggtgctggcga

SEQ ID NO: 10728 - DNA, 306 bp, Zea mays
aagaacactcctagctgaagatctcgagtgcaagcaacgttggcgcttggtggccagtagtagcagctaatttagcgtcgctccttcctactagacgagagatcgagaaaccatggccaagctccaagtcactcctggcgccgcgttcaccgagtgcaatgaactcaacttccagggcctgtacatgtaccacacgcccctgggtcccaaggccaaccaagctgcgatcctagagagcaaggccaagatcggcatcggtgccaccgtggttaacaactgggcagtgtatgacgggccagggccagg

SEQ ID NO: 10729 - DNA, 300 bp, Zea mays
gtgtaaagagggagatttgcatactgcctataacttatatcttgaaatgattgagaaaggtctggtaccaaatctttttatttgcagttctttagtgagttgtttctacaggaagggaaagtttgatgaggcaaatttagtgttgcaaaatcttgtgggtactgacatgattccagatatcagtgcgcccagacttgagatagggaaagtagcaaatttcattgatactgttgctggtggaaatcatcattctgcaaaaatcatgtggaacattgttatttttggtctatgcaaattggg

SEQ ID NO: 10730 - DNA, 304 bp, Zea mays
cccacgcgtccggaattacccaaccgtgagcgccgagtacagcgaggccgtcgagaaggccaggcgcaactccgcgccctcatcgccgagaagagctgcgcgcccctcatgctccgcctcgcgtggcactccgcggggacgttcgacgtgtcgtcgaggaccggcggtcccttcggtactatgaagtgcccggcggaactggctcacggcgccaacgcggggctggacatcgcggtgcggctgctcgagcccatcaaggaggagttccccaccctctcctatgccgatttctaccagcttgccg

SEQ ID NO: 10731 - DNA, 303 bp, Zea mays
gacgcgctactagttctattgccgcaccccagatctccaggagggactcgttcgttcagctaactacactgcacgcaatggccaccacggcgaccgaggcggcgccggcgcaggagcagcaggccaacggcaacggcgagcagaagacgcggcactccgaggtcggccacaagagcctgctcaagagcgacgacctctaccagtacatcctggacacgagcgtgtacccgcgggagccggagagcatgaaggagctccgcgagatcaccgccaagcacccatggaacctgatgacgacctccg

SEQ ID NO: 10732 - DNA, 304 bp, Zea mays
gtcccagccctcgtccaggcgcgcggccaccgcatcgagaccgtcccagagatgcccctggtcatctccgactcggcggagtccatcgagaagacctcccaggcgctaaagatcctcaagcaggtcggcgcctacgccgacgccgagaaggccaaggactccgtcggcatccgccccggcaagggtaagatgcgcaaccgccgctacattaaccgcaagggcccgctcgtcgtctacggcacagaaggctccaaggtcgtcaaggccttccgcaacctccccggcgtggacgtcgccaacgtcg

SEQ ID NO: 10733 - DNA, 306 bp, Zea mays
cccacgcgtccggcgaaggcgaccctccctccttcgctccttccgcgccgcctcccggccgtcgccgccatggtgaagtactcgcaggagccgggcaaccctaccaagtcggctaaggccatgggcagggatctgagggtccacttcaagaacacaagggagacagcctttgcgcttcgcaagttgtctttgaccaaggctaagcgataccttgaggatgttattgctcacaagcaggcaattcccttccggagatactgtgggggtgttggtcgcaccgcgcaagctaagtcgcgccactccaat

SEQ ID NO: 10734 - DNA, 302 bp, Zea mays
cggaccgtggcggcgccaagaagaccatggagatcggcgtgtacaccggctactccctcctcgccacggcgctcgccctcccggaggacggcacgatacatggccatggacatcaaccgcgagaactacgagctgggcctgccctgcatcgagaaggccggcgtcgcccacaagatcgacttccgcgagggccccgcgctccccgtcctcgacgacctcatcgcggaggagaagaaccacgggtcgttcgacttcgtcttcgtggacgccgacaaggacaactacctcaactaccacgagcg

SEQ ID NO: 10735 - DNA, 310 bp, Zea mays
cggacgcgtgggttgagattacccgcaagttcatgaacaaaccagtgagaattcttgtgaagagagacgagctgacccttgagggtatcaagcagttctatgtgaatgtggacaaggaagactggaagctggacacactgtgtgacctgtatgagaccctggccattacccagagtgtcatctttgtcaacacccgccgcaaggtggactggctcactgacaagatgaggagcagggaccacaccgtttctgccactcatggtgacatggaccagaacactagagacatcatcatgagggagttccggtc

SEQ ID NO: 10736 - DNA, 291 bp, Zea mays
cggacgcgtggggtttcatcctttgctgggcacgaagaaggtgactacgaacagcttgtgtcataagctcccgctgcgaaaccactgctggagatctgacctagaaatggcagcatcagtagagagccaagtgtcctaggcaaacgcccgtataagacctcaaacggcgacttgcccaacgacgagtggagagatgtattaaaccagagttcagccaggggcagccaacgggtccagtgacacgggtgggaacttacagagcatcgcgggaatgtttcgaggcactggttg

SEQ ID NO: 10737 - DNA, 293 bp, Zea mays
gtcacggatgggtcagacgaatgggcgatctacggcggaaccggggtgttcgccatggccaccggtgtcatgaagagaagaaaccttgccggcggtagcaacgacgggaactctgacgagcttgccctggaagttttctgcccggtgtttggcgcatcacagcaaccaattagcaagcagcaggagtccatctcctccgtcaccaagatcggactatggggcggacagggagggtcggcacaggacatcacggcagagcagccaccacggcgtctgcacagcatcaccgtccg

SEQ ID NO: 10738 - DNA, 294 bp, Zea mays
ctcctcgccatcacataaaaccagtgcaagcagaagcagcgcaatggcgagcagcaccatggccctctcctccacagccttcgccggcaaggcagtgaacgtgccgtcgtctctcttcggcgatgcccgcgtgacgatgcgcaagacggcggcgaaggcaaagccggcggcgagctccggcagcccgtggtacggccccgaccgcgtgctctacctgggcccgctgtccggcgcgcccccgagctacctgacgggcgagttcccgggcgactacggatgggacaccgcggggct

SEQ ID NO: 10739 - DNA, 292 bp, Zea mays
ggcggcggcagatagcagagtttaatgatttgaatagcagtctgaatgtctttattctgagcacacgggctggcggacttggtatcaaccttacttctgctgatacatgtatcctttatgacagtgactggaatcctcagatggatcagcaggccatggatcgatgccaccggattggtcaaacacgcccagtgcatgtatataggctggctacctcatattctgttgaggagcggatcatcaagaaagcttttgggaagttaaagctagagcatgtggtgataggcaaggg

SEQ ID NO: 10740 - DNA, 293 bp, Zea mays
cgtaatactgcctgacaacaatggttctctttatggggatctcaaaagggtatgtgagactgaactcggattggtctcccagtgttgtctgactaaacatgtttttaagatgagcaagcagtaccttgcaaatgttgcactcaaaataaatgttaaggttgggggaaggaatactgtacttttagatgctttgtcaaggagaatcccccttgtcagtgacagaccgaccataatatttggtgctgacgttacccatccacatcctggagaagattccagtccttccattgcag

SEQ ID NO: 10741 - DNA, 287 bp, Zea mays
gccgtctgccttctgcgcctccatttcggcctctgtcccttgcaagttcaatctcacctccaaccatgggtaaagagaagtcccacatcaacattgtggttattggccatgtcgactctggcaagtcgaccaccacaggacaccttatctacaagcttggaggcattgacaagcgtgtgatcgagaggtttgagaaggaggctgctgaaatgaataagcggtccttcaagtacgcgtgggtgctcgacaagctcaaggctgagcgtgagagaggtatcaccattgat

SEQ ID NO: 10742 - DNA, 285 bp, Zea mays
cccacgcgtccgggcgacattatgatttcttgccttggggacaaggaggggaatgcagctggcaatggcttcctgctgttggattcagagtttaatgtcaaaggacgttgggaaaagccaggtcacagtcacttgtttggatatgacttctggtaccagcctcgccacaagacgatgatcagttcgtcatggggagcccctgcagcgttcaggacaggtttcgatcttcaacatgtccaggatggcctgtatggaaggcacctgcatgtgtacgactggcctggc

SEQ ID NO: 10743 - DNA, 286 bp, Zea mays
attgataagttaaacaagaaggtcagcactatacttaatgaggaattccagaacagcaaggactatgttcccaacaagagggactggctttcagcttactggactgggttcaagtcaccagagcagatttcgcgtatccaaaacactggagtcaagccagagattctaaaacgagttggagaagccatgactactctaccagaaaatttcaatcctcacagggctgtgaagaagattttttatcagaggcgtcagatgatcgagactggagaaggcattgattggg

SEQ ID NO: 10744 - DNA, 284 bp, Zea mays
  unsure (1)..(284): unsure at all n locations
cccacgcgtccgcccacgcgtccgcaaggagagtacgtggaggagcagccatggcttcatcggtggccgccgcggcgagcacattcctgggcacccgcctggcggacccggcgccacagaacgggcgcatcgtggcccggttcgggttcgggttgggcggcaaggcgaactgnctccgaagaaggtggcgaagacatcgacctcctctgaccggccgctgtggttccccggcgccgtggcgccgactacctggacggctcgctggtcggcgactacgggttcga

SEQ ID NO: 10745 - DNA, 285 bp, Zea mays
ccaagacccactgaaccctcgccgtttcgtcgcacccaccaacacgagagatgagctccggcggcgcggacaagcccggcagtggcggcggcgcggtgaagacgccgtcggacttcctcaagtccatcaggggccgccccgtagtcgtaaagctcaactccggcgtcgactacagaggtatattggcttgtctggatggttatatgaacatcgcaatggagcagaccgaggagtacgtgaatggccagttgaagaacaagtatggcgatgccttcataaggggca

SEQ ID NO: 10746 - DNA, 286 bp, Zea mays
tggataatggagcagtgggagaaaagctactacataacagcaattgctggatcatccaacgggagctcattggttgtcatgtccaaaggaactccttacacccaacaatcatacaaggttagcgagtcgttcccttacaagtggatcaataagaagtggaaagaagggttccatgtgacatccatggccaccgctgggaatcgctggggcgtagtcatgtcaaggaattcagggttctctactcaggttgtagagttggatttcctgtaccccagcgagggcatcc

SEQ ID NO: 10747 - DNA, 284 bp, Zea mays
ccaagaacccatgggtagtgtgaattatcgagtagctgaacagcttaaggtggatgtgtttgctataaggccaacagggtatttgagctttgatatctccatgggccgtgataccttgtcagttgcactcttcaatgatgttgatgatgatcaggacccactcttattcgaatatctggcacgtccaatatttcctacctctgctgtccaggggaagtttgctgaaggtggtggtggtggttgtgattgtgctgagatttgctcaattggatgtaactgtgcag

SEQ ID NO: 10748 - DNA, 286 bp, Zea mays
ctgaagaaagccttgcttcttggtgatgcaatttcagatttaccaaaggttcaaaatcaccagcctaacgatgtgatggagtatggtggttcccccaagaccgaattccagcgctacattcgactcagtcgtaaagacatgttggattggtccttcggtgagggggctggtccagatgaaggcaagctcttggatcaccaacctttacggcttaacaacgatgattatgagcgggttcaacagattcctgtcaagaagggagccaacttccgcgacctaaagggcg

SEQ ID NO: 10749 - DNA, 286 bp, Zea mays
aggtgcgtcaagcctccgatcatctacggtgacgtgagccgccccaaccccatgaccgttttctggtcgaagcggcacagagcatgacgtctcgcccaatgaaggggatgctgactggcccagtcacaatcctcaactggtccttcgtccggaatgaccagccgaggtttgagacttgctaccagatcgctcttgcgatcaagaaggaagtcgaggatcttgaggctggtggtattcaggttatccaaatcgacgaggctgcactgagagaagggctgccgctccg

SEQ ID NO: 10750 - DNA, 290 bp, Zea mays
ccagagggtggcttcaattcaacagcagcttgcatctttgaaacttaaagatgcaccagtcattggtgcctttaatcctgtgaagggagagatagtcctctcacaatttagccttgacaactcctggaacagagctatgattgttaatggacctcgctctgtagaatctctaaacgacaagtctgaagtattctatatcgactatggcaaccaagaggtggttccctacagtcgtctacgacccgtggacccatctgtttcctcttctcctgctcttgctcagttatgca

SEQ ID NO: 10751 - DNA, 283 bp, Zea mays
cccacgcgtccggttcggaacgccaagcccccctccggcgaaatggcccccaagcgaggtggcagggcgccggtgccggccaagaagaagacggataaagtgacgaaccctctgtttgagaagaggccgaagcagttcggcatcggcggcgcgttgccgcccaagaaggacctgcaccggttcgtcaagtggcccaaggtcgtgcgtatccagcgccactgccgcatcctcaagcagcgcctcaaggtaccaccggcgctcaaccagttcacccgcaccctcg

SEQ ID NO: 10752 - DNA, 280 bp, Zea mays
gactaactcaatgaaagctctaggactggatatattgacaggtgttggcactattgtgggaaagcaaaaggtacgatatggaaaagctggtttcccagataaagaaatcactgccaggaacatcataattgccactggttcagttccttttgttccgaaagggattgagattgatgggaaaactgtatttactagtgatcatgcactgaaacttgagtcggttccagactggatagctattgttggaagtgggtacattggacttgagttcagtgatgta

SEQ ID NO: 10753 - DNA, 281 bp, Zea mays
gttcctgtggaagatgttctttgagaagcatgacgactacaagttcaacggtctgggctggctcttcctgggtgttccaacgagcagctcgttgctctacaaggaggagttcgggaagatgaaggagagagcgccggagaacttccgggtcgactacgccgtcagccgggagcagacgaacgcggcgggggagaggatgtacatccagacccgtatggcggagtacaaagaggagctgtgggagctcctgaagaaggacaacacctacgtctacatgtgtg

SEQ ID NO: 10754 - DNA, 225 bp, Zea mays
atccgccacgcgtccgagattgtagaactcggaacaggaagattctctgcagattacgatccggatctctattcggagctatgaagcagcatttgctggctgtagaagcttaagaacgctctctggggcttgggatgccgttccagaatacctgccagcattttattgtgtatgcgaaggcctcacatcactaaatccgagctatgctactgtaccagggcccta

SEQ ID NO: 10755 - DNA, 279 bp, Zea mays
gtcttccggacgctgcgcaagtgttcaaggtggatgctggtgactatatgttatcgctatgtggaaatgaggctctcagagagctttcatctcctggtaagagtggaagctttttctacctgacaaacgatgatcggtacatgataaagacgatgaagaaatctgaagtgaagatgcttctgaagatgctcccagcttattacaatcatgtccgggcatttgagaatactctagtaaccaagttttttggtctacactgtgtcaagttagctggagcaa

SEQ ID NO: 10756 - DNA, 281 bp, Zea mays
cccacgcgtccgggagaatcatgatgagtttcttcagttactaaatgagccctttgaaggcggagagggggatttcttagaccaacctgaggaggatgaaatgcctcacgccattagtgttacaccagaggagcatgaggccattggacggcttgagtccatggggttcgacagagcacgcgttatcgaagcattcttagcctgcgataggaacgaggagctagcagcaaactatctccttgagcatgctggtgaggaagattaagcgggagtagttttca

SEQ ID NO: 10757 - DNA, 280 bp, Zea mays
cgagactagggtttgggtttggtgtcgagctgcatcggtcggcgccctgtgagggagaaggatgcatatgatgcggcggctcaagagcatcgcctccggccgctcgtccgtctccgatccgggtggtgactctggctccaaaaggccaaaatttgagcaggatggagcatgggatattgttattgagccacacttaactgaggccaagcctgtccggatagaccaagaatcatcatcatcatctaatagggatgctgaggcaagcacatctactagcatg

SEQ ID NO: 10758 - DNA, 283 bp, Zea mays
atcgcgagctagccgccctttttttattttttttttttttttttttttttgtcgtgaatgtcataaattatgcaaattcacttggcgaaagagtgtcatactacaatttcacaagaacaacccctaaaactcaacacataataacaactacagagcatttcgctttgagtaaacaaggaaaattctcgtggtggatatgatatatccagtttactcaatgattttgttgatgacaccagcaccaacagtcttaccaccctcacggatagcaaacctcataccc

SEQ ID NO: 10759 - DNA, 281 bp, Zea mays
ggggacacccccgtccagttccagccttccaacttccaaccctctcctctccgcagctgtagcatttgtcgggttggattgggttgttccgcttgggtagcctggtgggatcgaaatctgtgtgggatccatggcggcggtcgaggggacgacgaagaagaaggtaatcatcgacaccgaccccggaattgatgacgcgatggccatcttcgtggcactgcggtcgccggagctggaggtgctgggcctcaccactaccttcggcaacgtccacaccgccc

SEQ ID NO: 10760 - DNA, 111 bp, Zea mays
ccagacgcagtcggctgccgcagactggtagtagccggcgcgccgtcaccgtatcctcagatcagaggcgagcagaaaccacaccactctactgacgcccgacgagcagtg

SEQ ID NO: 10761 - DNA, 296 bp, Zea mays
cggcaatgctcttgactggctggtcaacttcggttggtgagagcggaaagcttgtggatgttgggtggccatctgtctgggtcaggattgcaacccagtgggcgacggcaggtctgttcatatggtcgcttgttgcacccatcctctttcccgactaggaattctaagttcaaccacggtaagcctggagcatcaaacgtgtctactgtggtagctaatatatcctatcaagtatgttgcctttaaaacatgctccgagcgtggatggcaaaaagtcggtgtttgtccactgttat

SEQ ID NO: 10762 - DNA, 298 bp, Zea mays
cccacgcgtccgggcaagtccgggaagccgctccactacaagggctccaccttccaccgcgtcatccccgagttcatgtgccagggcggcgacttcacccgcgagcacggcaccggcggcgagtccatctacggcgagaagttccccgacgagaagttcgtgcgcaagacaccgcccccggtgtgctctccatggccaacgccgggcccaacaccaacggctcccagttcttcatctgcaccgtcgcgaccccttggctcgacggcaagcacgtcgtcttcggccaggtcgtcgaggg

SEQ ID NO: 10763 - DNA, 295 bp, Zea mays
gtactgtcagctgatgcattctcagcttttgaagacgctggtttggatgatgagaaggcaatcgaggaaactggcagacgattcagagacactgttcttgcgcttggaggtggaaagtctccgcttgaggtgttcgattcattccgaggacgggagccttcgcctgaaccacttcttagacaaaacggcttgcttcctgttgctgcctagtgccccaaagatttctctgttatttatgcttaaacagggaccattttcatccggtcaattattaaataagttagaagacaaacaa

SEQ ID NO: 10764 - DNA, 297 bp, Zea mays
catctcctcgcatttcttcccatccgatccccccttcgcaaccaaaaccccaactcgccccgcatcgatggcgcccaaggccgagaagaaacccgcggcgaagaagccggcggaggaggagcccgcggccgagaaggcgcccgccgggaagaagccgaaggcgagaagcgggtccccgctggcaagtccgctgccaaggaaggcggcgagggcaagaggggcaagaagaagggcaagaagagcgtggagacctacaagatctacatcttcaaggtgctgaagcaggtgcacccggac

SEQ ID NO: 10765 - DNA, 295 bp, Zea mays
cccacgcgtccgcccacgcgtccgcatcttctacgaggctcagaggcagggcaggatctcgttctacctcacttccaacggcgaggaagcgatcaacatagcctctgctgctgctctcagcattgatgacattgtgctgcctcagtacagggaacctggtgttcttctatggcgtggcttcactctgcaggagtttgcaaaccagtgctttgggaacaagctggactatggtaaagggaggcagatgcccattcactatgggtcgaaccgtctgaactatttcacagtctcgtca

SEQ ID NO: 10766 - DNA, 295 bp, Zea mays
atctctagcagcagatcctcgtgcgaacaaagcgctaccccttcgtactgtcccgatggcccgcacgaagcagacggcgaggaagtccactggcggcaaggcgccaaggaagcagctggccacgaaggcggcgcgcaagtctgccccggcgaccggcggagtgaagaagccccaccgtttccgccccggcaccgtcgcgctccgggagatccgcaagtatcagaagagcacggagctgctgatccgcaagctgccgttccagcgcctggttcgtgagatcgcccaggacttcaag

SEQ ID NO: 10767 - DNA, 294 bp, Zea mays
ggcgaggcgacgaaaccctcgccagtccccaactcgaacctcagtcaggcagcgtgaggagggagagttcaaggaccgaggcggcgtcgggcgagatgaagcttaacgtcaagacgctcaagggcaccaacttcgagatcgaggcgagccccgatgcatcggttgctgatgtgaagaggatcattgagaccactcaaggtcagagtacctaccgggcggaccagcaaatgctcatataccaagggaaaattctcaaggatgaaaccactttggaaagcaacggagttgctgaga

SEQ ID NO: 10768 - DNA, 294 bp, Zea mays
cccaaatagcttacatttgtagagaagcactaaagggccttgcttacctgcactccatttttaaagttcacagagatattaaggggggcaacatccttctaactgagcaaggcgaggtgaagttgggtgattttggtgtagctgcccagctgacaagaaccatgtcaaagcgcaacacgttcattggtactccacattggatggcaccagaggtcattcaagaaagtcgttatgatggaaaggtagacgtttgggcattacgtgtatctgcaatcgagatggcagagggcatgc

SEQ ID NO: 10769 - DNA, 294 bp, Zea mays
cgcctccccgatctcgtcgagaggaagcccaatcccgaaaccgccgccctattccaatggcgcccaaggccgagaagaagcccgccgccaagaagcctgcggaggaggagccggcggcggagaaggccacggcggggaagaagcccaaggccgagaagcggctccccgcgggcaagtccgcaggcaaggagggtggcgagaagaaggggaagaagaaggcaaagaagtcggtggagacgtacaagatctacatcttcaaggtgctgaagcaggtgcacccggacattggcatct

SEQ ID NO: 10770 - DNA, 288 bp, Zea mays
aacgaactgccctagaaacatcagactatcttaaagatgattgccttttagtgaactgcactgttggcgttgttcaatcacatactgaaggaccaaagatatacacaattccagtaccgcggtccaacatggctctacatattggtcagctattgacaagtggaaagaggacagacattgcattcgaagttgatggagagatgtttcctgcccacaaggtgattctttcagcccggtctcctgtttttagggcacaactttttggcccaatgaaggataaggacatga

SEQ ID NO: 10771 - DNA, 275 bp, Zea mays
gaggaagctaatcaagagggaatttgtggaatcttctgatggtaggaagtttgagaaactgcaccttggtgaatacggatgggatacctacgccgaagcatttaaccgcgcatgtaattttgcttctggacttgtcaagatgggccacgacctaaatagtcatgctgctgtcttctctgatacaagagctgagtggatcattgctgctcagggatgcttccgacaaaatttgacggttgtaacaatatatgcatctcttggtgaggatgcattgg

SEQ ID NO: 10772 - DNA, 287 bp, Zea mays
cctctctctcgtggttctcccgtgctctgtgtccctagcggcgacgactgggcgatcgccgccgccttaagccaggtgctcaggtctgccacttggcacttcgccggcgacgagcacctaacagagagatggctggtggttttcgagtactgcatcttgtgaggccatttctggctttcttgccagaagtacagagtgctgataggaaaataccattcagagagaaagtgatctacacggtcatttctctcttcatttttctggtctgcagccagctcccactctat

SEQ ID NO: 10773 - DNA, 288 bp, Zea mays
cccacgcgtccggcccaagtacccgatgagcatgtgaatgaatttaaatcaatcgagaagtttaagatattcaacactaacaacttgtgggtgaaccttaaagctatcaagagactcgtagaggctgaggcacttaagatggaaattattccaaaccccaaggaagttgatggtgtgaaagtccttcaactcgaaaccgcagctggtgcagctattcggttcttcgacaaagcgattggaattaatgttccccgctcaaggtttctcccagtgaaggctacatctgat

SEQ ID NO: 10774 - DNA, 308 bp, Zea mays
gataaattttggtgtttttccttcaatgcaagggggacccataataatcatattgctgccttggctattactctgaagcaagtcgcaactcctgagtataaagcgtacattcaacaagtcaagaaaaatgctcaggctctggcatcagcgttgctcagaagaaaatgcagattggttactggtggcacagataatcacttaatactttgggatctcagaactcttggcttgactggtaagatctttgagaaggtctgtgaggcatgccgcatatctatcaacaagacaccaatttatggggataatgg

SEQ ID NO: 10775 - DNA, 313 bp, Zea mays
tggagatcatgcgccacctccccaagcaccccaacgtcgtcacgctcagggacacgtacgaggacgacaatgccgtgcacctcgtcatggagctctgcgagggcggtgagctcttcgaccgcatcgtggcgcggggacactacactgagcgtgctgccgccttggtcttacgcactatcgttgaggtcgtgcagatgtgccataagcatggagtgatgcacagggatctcaaaccagaaaatttcttgtttgcaaacaagaaagaatcagcggcacttaagggcattgattttgagctgtctgtatttttcac

SEQ ID NO: 10776 - DNA, 311 bp, Zea mays
cggaccgtggtagcaggttctctgtaaatggaaagcccatttaccatttcatggggacatcgacattcagccagtacactgtggtgcatgatgtcaacgttgcaaagatcaacccacaggcacccttagataaagtctgcctgctcggttgtggtgttcctactggtcttggagcggtgtggaatactgcaaaggttgaatctggctcagttgttgctgtttttggccttggaacagttggacttgcagttgctgagggagcaaaagctgctggtgcttctcgagttattggcattgacatcgacaataaa

SEQ ID NO: 10777 - DNA, 314 bp, Zea mays
agtgcacctccatcaccaatgcatccaaagttgttcccggagaaccatgtttctcgccctgatggcaatggaagtgctagttttcacccattaccgctccctcctgcttctgtaagcccaaagcagacaaatgctagccaccagttagttccaaaagctgagatgccttcggtggctggtcaatggcagaaaggaaaactcttgggtagtggcacctttggatgcgtgtatgaggccaccaataggcacactggagctctttgtgccatgaaagaggtgaatataattccagatgatgctaaatcagtcgagtc

SEQ ID NO: 10778 - DNA, 315 bp, Zea mays
  unsure (1)..(315): unsure at all n locations
caccacgcgtccgcggaccgtggcggactggtcngagacgcgtgggcggacgcgtgggcagtctccctagcaatctctagcagcagatcctcgtgcgacagaaagcgcaagcgccttcgacctgtcccgaacgcccgcacgaaccagacggcgaggaagtccactggcggcaaggcgccaaggaagcagctggccacgaaggcggcgcgcaagtctgccccggcgaccggcggagtgaagaagccccaccgtttccgccccggcaccgtcgcgctccgggagatccgcaagtatcagaagagcacggagctgctg

SEQ ID NO: 10779 - DNA, 312 bp, Zea mays
accagccgaggtttgagacttgctaccagatcgctcttgcgatcaagaaggaagtcgaggatctcgaggctggtggtattcaggttatccaaatcgacgaggctgcactgagagaagggctgccgctccgcaaggctgagcatgcattctacttggactgggctgtccactccttcagaatcaccaactgcgagatccaggacaccacccagatccacacccacatgtgctactccaacttcaacgacatcatccactcgatcatcgacatggacgcggacgtgatcaccatcgagaactcgcggtccgacg

SEQ ID NO: 10780 - DNA, 305 bp, Zea mays
tgtcccatcatttccgcgagatgaaagttggtgattatttgtctgtgaagggacctaagggccgattcaagtaccacgttggccaagtgagggcatttggaatgctggctggtggatcaggcattactccaatgtttcaagttgccagagcaattcttgagaaccctaatgacaacaccaaggttcacttaatttatgctaatgtcacatatgaagacattcttctgaaggatgagctggacgacatggccaaaacctatcctggccgctttaagatctactatgtgttgaatcagcctcctgag

SEQ ID NO: 10781 - DNA, 305 bp, Zea mays
cggacgcgtggcggacgcgtgggatctttacttgaggattgcaacagagctgcatttgaaaaggatgttggttggaggacttgagaaagtctatgagaataggagaatatgccggaatgaaggcatttctactcgtcataatcctgaatttaccactattgaaatgtatgaagcatattcagactatgaaagcatgatgaatatggccgaagaaattgttactcgatgtgctatggctactcatggcaagcttaaggttgactatgagggaactgaaatctctctcgaaagaccatggaggaggg

SEQ ID NO: 10782 - DNA, 307 bp, Zea mays
cccacgcgtccgcttcccggaaggtctgaaaaggacccatggggcgctcaacctgtttgcctggggcgtgctactgccgatcggcgccatcgtcgcaaggtactgcaggagatgggaccctctgtggttctacctccacgccggcatccagttcgtggggttcatcctgggcctagccggcgtcgtggctggagtatccttgtacagcaagatccaggccgacgtccccgcgcacaggggccttggcatattcgtgctcgtgcttgccattttgcagatcctggcgattttcctgaggcccaacaag

SEQ ID NO: 10783 - DNA, 307 bp, Zea mays
cgaggccatctatgacatctgcaggcgctccctcgacattgagaggcccaactactccaacttgaatcgccttgtgtctcaggtgatctcatcgctgactgcttctctgaggttcgatggtgccctcaatgtggatgtgaacgagttccagaccaacctggttccttacccgaggatccacttcatgctctcctcctacgcaccggtgatctcttctgcgaaggccttccacgagcagctgtctgtggcggagatcaccagcagcgcgttcgagccggcttccatgatggtcaagtgcgacccacgg

SEQ ID NO: 10784 - DNA, 310 bp, Zea mays
ccgtctctcactctctaccgccgccgccgccgccctacgccacgcaaaaagcgccacaagattcgcccctgctgaaaacgcactcgatggcgtccgcgacgggggtttcctcctcggagatggcggtggaccacgcgacggggccgggcgccgtggacaagccgcggttcgatgctctgacgccgaatgagatgagcggcgggaggccccagttccggaaagtgcccgtcccgcagcaccggttcgcgccgctcaagcgatgctggatggaaatctacacacccgtatacgagcatatgaagatcgatat

SEQ ID NO: 10785 - DNA, 308 bp, Zea mays
ctatatttttgtttgctcccatggaagcagggacaaaaggtgtggtgtttgtggacctgctttgattaaaaggttcaaggaagagataaatgaactgggacttgatgatcaggtggctgtcagtgcatgctcacacgtgggaggtcataagtatgcaggaaacgtcatcattttcagttctgatgccaagggagaagtgactggtcattggtatggttatgttgttcctgatgatgtgcctgttttgctgcataaacatattggacaaggagaagttgtggaccatctatggaggggacagatgggtt

SEQ ID NO: 10786 - DNA, 301 bp, Zea mays
tccacgcgtccgccctcttgccggtcccgaataaagagcagcagcgcaagaggtcggtagagctagaagaaggcaatggcggccgagagcttccttttcacctcggagtccgtgaacgaggggcaccccgacaagctgtgcgaccaggtgtcggacgccgtgcttgacgcatgcctcgcgcaggaccccgacagctaggtggcctgcgagacctgcaccaagaccaacatggtgatggtgttcggcgagatcacgaccaaggcgaccgtggactacgagaagatcgtgcgcgacacctgcc

SEQ ID NO: 10787 - DNA, 301 bp, Zea mays
gatcaagaaggttggcaatgcgttcgacaaccacatcgacgccaagcggacgctcagggaaatcaagctgctgcgccacatggaccatgagaacatccttgccttaaaggatgtaattcggcccccaactagagagaactttaatgacgtgtacattgttactgagttaatggatacagatctccatcagatcgtacgctcaaatcagccattgactgatgatcattgccagtacttcttgtatcagttgttacgagggctaaaatatgtgcactcagcaaatatattgcaccgcgatctg

SEQ ID NO: 10788 - DNA, 237 bp, Zea mays
caatctccccagcaatccctagcagaagccttccatcctcactcgctcgatggcccgcacgaagcagacggcgaggaagtccaccggcggcaaggcgccgaggaagcagctggcgactaaggcggcccgcaagtctgcccctgcgaccggcggagtgaagaagccccaccgcttccgccccggcaccgtcgcgctccgggagatccgcaagtaccagaagagcacggagctgctgat

SEQ ID NO: 10789 - DNA, 99 bp, Zea mays
gcgtattacaataatttgataaactatctgcttcagcaaggcatgactccttacatcaacctttaccactatgatcttcctcttgcggttgagaagaaa

SEQ ID NO: 10790 - DNA, 244 bp, Zea mays
ctgacgcgtgggccaggagggtcatctatgcctctcagctcacggccaagccaaggctgctggagccagtctacctggtggagatccaggccccagaaaaatcacttggtggtatctacggtgttctgaaccagaagagaggtcatgtctttgaggagatgcagaggccgggtaccccgctctacaacatcaaggctttcctccctgtcatcgagtcctttggtttctccagccaactgagggc

SEQ ID NO: 10791 - DNA, 245 bp, Zea mays
gtcaagatgtctgatagccatgagactgacaggaacattgagatttgcgagaattagtggcgctgatcaaggcattggaatcagccagaggcaatggcacaagcatgatctctctaatcatggctccacgtgatcaggttgctcgagtggctaagatgttaggtgatgaatatggtactgcttcgaacatcaagaggagagttaatcgtcaatctgtgttggctgccatcacctcagctcagcag

SEQ ID NO: 10792 - DNA, 242 bp, Zea mays
gtgtgcgtgaccggcgcgggcagcatcatcgcgtcatgtctggtgaagctcctcctctgccggggccaatacaaggtccgcggcaccgtgcgcgaccctggtgctagcaagaatgctcatctcaaggtgctggaaggggctggggaaaggttgcagcttgtcaaggctgatttgttggactacagcagtgttgcatcagcaattgccggctgtgagggtgtcttccatgtagctagccctgt

SEQ ID NO: 10793 - DNA, 245 bp, Zea mays
agatgatttgctgttgcaacaagatggatgccaccacacccaagtactccaaggcccgttatgatgagattgtgaaggaagtctcttcctacctgaagaaggttggatacaaccctgacaagatccacttcgttcccatctctggtttcgaaggtgacaacatgattgacaggtccaccaaccttgactggtacaagggcccaaccctacttgaggctttggacttgatcaatgagccgaagagg

SEQ ID NO: 10794 - DNA, 117 bp, Zea mays
gcgaccgtccgcccacgcgtccgcccacgcgtccgaaacgggccgccttcaaaggttccgcacctctcaatctttccgatcgtcttcaccaggttcttcgctgggctcttggttcaa

SEQ ID NO: 10795 - DNA, 240 bp, Zea mays
acaccagccgccgccatgtcgaagcgaggcaggggaggttctgcggggaacaagttccgcatgtcgctgggtctgccagtcgccgcgacggtgaactgcgcggacaacaccggcgccaagaacctctacatcatctccgtcaagggcatcaagggccgcctcaatcgcctcccgtccgcctgcgttggcgacatggtcatggccaccgtcaagaaggggaagcccgacctcaggaagaag

SEQ ID NO: 10796 - DNA, 236 bp, Zea mays
gcccttggcctccctagccctgacgcaggacttctgcgtcgccgacctgacctgcagcgacacgccggctgggtacccgtgcaagtccagcgtcaccgccaacgacttctacttccacggcctggccggccatggcaaaataaacccactcatcaaggccgacgtcaccccggccttcgtgggccagttcccgggcgtcaacgggcttggcatctctgcggccaggctcgacatcg

SEQ ID NO: 10797 - DNA, 243 bp, Zea mays
ctccgtgcttaccactcgccattcctaagtcctaactacctccacccccgcacgcacaactggccgcgccaaggcaaagctagaagaagacaacgcaaagggagaggacagaggaggagcagaggacgatgggcagcggcggcgctaacactgcccccctcctcaccccctacaagatgggaaaattcgatgtttcccacagggtagtcctcgcaccactgacgagacagcggtcctacggca

SEQ ID NO: 10798 - DNA, 241 bp, Zea mays
ctcaatgtatacataaatcatgacaagaaatttgcttttgtggagatgagatctgttgaggaagcaagcaatgcaatggccctggatggcattatgttcgaacgggcaccggtgaatgttagaaggccaacagactacaacccttcccttgcagccgccctgggcccaagccagccaagccccaatctgaatcttgctgcagttggcctaacagcaggatctaatggaggactagaaggtc

SEQ ID NO: 10799 - DNA, 234 bp, Zea mays
ggaggagcgcgcgctcaagtccaaccacccctccatccgatgcgtcgtcctcgacatgggcgccgtcgcggcgatcgacacgagccgtctagacgcgctgtccgagctcaagaaagtcctggacaaaagaaacatcgagctggtgcttgccaacccggtggggtcggtggcggagaggatgttcaactcggcggtgggcgagagcttcgggtcgggccgcctcttcttcagcgt

SEQ ID NO: 10800 - DNA, 99 bp, Zea mays
gatccaagttatggtcaccactggcggaaccagcttgaaggatgatattgttcgtctgtaccaacccgtgcacttaattgttggaacacctggccgtat

SEQ ID NO: 10801 - DNA, 241 bp, Zea mays
tcccactcgtcctcggacgctggcgcttccagccgccgccgccgcgtccgcctcgcccagcgcacagtccgccgcagcacatcgctatctcgatctcagccatcgcggacgtggaccagcaacaggaaccgccgaagctgttcaaccgctggaccttcgatgatgtccaggtgaacgacatctcgctgaacgactacctcgctgtgaacgcgacgaagcacgcgatgtacctgccgcacac

SEQ ID NO: 10802 - DNA, 97 bp, Zea mays
caggaaagcatcgcccccctctcactcgcctcgacgcgcctctgaaagttcggagccgccggcccgtccgcctccctctccgcctcccgtccccaag

SEQ ID NO: 10803 - DNA, 226 bp, Zea mays
gagcacccaaagtatgctaaaaatgatttcttcataactggggaatcatatgctgggcattacattcctgcctttgcaagtcgtgtgcaccagggaaacaagaacaatgagggcattcacattaacttgaagggttttgctattggcaacggactaacagatccagcaatacagtacaaggcataccctgattacgcattggatatgggattaattacaaaaacac

SEQ ID NO: 10804 - DNA, 235 bp, Zea mays
aagatactccttgtcccctggaccatgtagttagagtggcctatgaaacaatgtataggcgggacactgctgcggctcaaaggatccgtcagaaggatgtttttgagaagcagaaagcgctcattttgatcggagagagattgcttcttacaactattcgatttgatttcaacattcagcatccttatagaccacttcttgatgccatgcaaaatcttggcatcaatcaaaaaga

SEQ ID NO: 10805 - DNA, 233 bp, Zea mays
gatttccacaaatacatgactcgcgctgttgaatatgagtttaaaagagttgttggtatcagctggtatctgtggctttttgtaatcttattcctgctgctgaatataaatggatggcacacatacttctggttggctttcttgcctctatttctgttacttattgttggtgccaaactagagcacattatcactcggttggctcaagaggcagcgatatcattatcaaataa

SEQ ID NO: 10806 - DNA, 234 bp, Zea mays
gcgtctgcagaatttatcatcggatgaacgcaagaaaatattgttagacattgcagatgctttggaacaaaatgaggatctaattagaactgaaaatgaagctgatgtatctgcagcacaagatgctggatatcagaaatctttggttgatagattgacattgaagccagaaaagatagcaagccttgcgaaatccatacgcactcttgcaaatatggaagacccaatcaacca

SEQ ID NO: 10807 - DNA, 234 bp, Zea mays
gcgcccttcacttcccaccaaggcttgggaactgagcttgatcttcaatggatggagcagcagcagctgggccacgactgtctccccctccgtatccggctctaaaaccaccacgatccccacggcccccccttccacggccacggccgccgtagtacctttctccttcagcaggtttcaggaactcgttgatgctcaccgacttcttggcacgctcatcacgctcagcatttt

SEQ ID NO: 10808 - DNA, 235 bp, Zea mays
ctccaactgcgccgacggcctgatcgatgctatcatgggatccacggctatcacagtgtccaacaactacttcacccaccacaacgaggtgatgctcctgggccacagtgactcctatgtgaaggacaaggcaatgcaggtgacgatagccttcaaccatttcggtgaaggtctcatccagagaatgccaaggtgccggcatggctacttccatgttgtgaacaacgactacacc

SEQ ID NO: 10809 - DNA, 234 bp, Zea mays
cggacgcgtggcagccgatgaccaggaagagtctggatggaagtatatccatggtgatgtcttcaggttcccaaagaataagtcgctattttccgctgctcttaccacaggaactcaactatttgctctcacaacctttatattccttcttgcacttgtcggagtattctatccttacaaccgtggtgcactatttactgcattggttgtcatttatgcactcacttcaggaat

SEQ ID NO: 10810 - DNA, 296 bp, Zea mays
gggtgaccatcaaatttgctgctcgcgctgatctccaccatctggctatgtttcttgctgggaggcagccagatgcccctcaagaggctcttcaagtacttgacatcgtgctacgtgaaatgcctactgccaagtattgtcctgttggtagatcattttattctcccaagttagggagacctcagcaacttggtgaaggtttggaaacttggcgtggtttctaccaaagcataaggcccacacagatgggtctttctctgaatattgatatgtcctctactgcattttttgaggcc

SEQ ID NO: 10811 - DNA, 298 bp, Zea mays
cggacgctggcggcacgcgtgggtgcgtaatctcctcttctatgattacatggaaaatggcagcctctgggaagctttacatgagccatcgaagaaaaagaaactcgattgggaggctcgcctcaagattgctctcggagctgctcaaggcctggcttatcttcaccatgaatgcagtccacgaataatccacagggatgtgaagtcaaagaatatcctcctagacaaagactacgaggctcatcttgctgacttcggtattgccaagagcttgtgtgggtcgaagagcacacatcaa

SEQ ID NO: 10812 - DNA, 296 bp, Zea mays
gagaacaaataaacgtgacatacaaaataatgcgccgaattgaggcagaggagttgtctcttgatgcgtctgaaatagttatcgctagcacaaggcaagaaatagaagaacaatggaacttgtatgatggttttgaagtcatgcttgcgaggaagctccgtgcgttagtcaagcgtggtgctaactgttatggtcgttatatgcctcgtatggttataattcctccaggagttgaattcggccaattgattcatgattttgatatctatggagatgaagataacccatctccagcc

SEQ ID NO: 10813 - DNA, 292 bp, Zea mays
ctgatgagggccaccgacgttatgatcgccggtaaggttgccgtggtctgcggatacggtgatgttggcaagggttgtgccgctgcactcaagcaggctggtgcccgtgtcattgtgaccgagatcgaccccatctgcgccctccaggctctgatggagggtcttcaggtccttcccttggaggacgttgtctcggaagctgacatcttcgtgaccaccactggcaacaaggatatcatcatggttgaccacatgaggaagatgaagaacaatgccattgtctgcaacattg

SEQ ID NO: 10814 - DNA, 292 bp, Zea mays
gagaaacattaccgttatgtcaggagccatgacgtcgcttattggtcaaagagcttcatcatagacttggaaagggtttgtaaggatcacttcaagaggacttgttggggcatagggttgggttttggtttcagggtggtggccttggaccctcatttcacaaagcttaacatggattcaatcattaatgcttatgagctttcagagagcagggctatattgctcgattatgatggaactctggttccccaaacttccctcgacaaggaacctagtccacaggttttgagca

SEQ ID NO: 10815 - DNA, 283 bp, Zea mays
gaacagcgtccgggacgcgcgtgtgcacctacagcatcaggatgtctgggtactgcaatggcgggcatgtggataacgagctaacacagctggatgagatgattcaggaagggatccagcctgatataactgcgtacaacacaatgattagtgggtattgccattctggggaggtaggggtggcagaggagatgtttaaaaatatgttgatgggtgggattgattcaagtgccacgacgttcgaatggttggtcagagggcattgtatggcacgggatgtcga

SEQ ID NO: 10816 - DNA, 289 bp, Zea mays
tggaggttgatgtggaagaagaaggggactcgacggtggccatggtggtggtttcggtagcgaatctggagttggaagtggtgtctacggcagtggtggagggtttggaggcggcggcggaggaggcctcggcagtgggcatggtggaggctttggctctggactgggtgtaggaagtggtagtacgcatgaaggtcttgatggtgtaggcatcaacggtggcggaggacttggtgccgggtatggtggaggttttggcgcaggagcgggtataggaggtggcattgga

SEQ ID NO: 10817 - DNA, 292 bp, Zea mays
gcacccgtcttctctccgcactcgaaaccccatccttgactagctccgatctggtacgagatggccggcaagatgaaggagttagacggcgccacctgccaagatcttcattggcgggctctccaaggatacaagcatgagtacattcaaagaacattttgggaagtatggggatataattgatgctgtcataatgaaggaccgctacacacaaaagcccagaggctttggctttattacttttgctgatcccactgttgttgacagagtgattgaggatgaacatgttatc

SEQ ID NO: 10818 - DNA, 293 bp, Zea mays
ggcgtgtgaaccctctcactcgggctaactaccttgcctcgccgcctctggttgttgcctatgctcttgccggcactgttgacattgactttgagaaagagcccattggagttggaaagggtggtaaggaagttttcttgagggacatatggccttcaaaccaagagatcgatgaggttgtggagtccagcgtgcagactcacctgttcaagaaagtgtacgactcaatcatggaacgtaaccctaggtggaaccagctgccggttccaaatgaggcactgtacccatgggaa

SEQ ID NO: 10819 - DNA, 287 bp, Zea mays
ggaccgtggcgggcgtcgggggtcacggcgccgcgctgcacgccgttgaagagggcttaaaaacagcaataactcagggagatgttgtgggtgggacttgtgtaaacagaggctgtgtcccatcgaaagcgcttcttgctgtcagcggtcgaatgcgggagcttcatgatgaacatcatatgaagtctttgggtctacaggtttcctctcctggatatgacagacaagctgttgctgatcatgcaaacaatcttgcctcgaaaatccgtatcaacttgactaactca

SEQ ID NO: 10820 - DNA, 286 bp, Zea mays
gtcgtctcccaccaccgccgagcgcgaccctagcccgatctagccggcggcaggcaccagatcccgccgcccgcacgtcccgggacgcgccccgccgaatccgccgctcctcgcactgcaacacgcccggaccacggtgcatttgatccgtcccggccgcctacacgatgtccaagtcgggagcgctggatcttgcttctggcctcggagggaagatcaacaaggtggaagtcaagtcggccgtcgatgagtatgagaaatatcatggatactatggagggaagga

SEQ ID NO: 10821 - DNA, 287 bp, Zea mays
gttgcagtctgagtctgtcaaggatgccatctcccagattgttggggatgccaaggagaagaataggaagttcactgagactgtggaacttcagattggtctgaagaattatgatccacagaaggacaagcgtttcagtggctctgttaagttgccccatatccctcgtcccaagatgaaggtgtgcatgcttggtgatgcccagcatgttgaggaggccgagaagatgggacttgactacatggatgttgaggctctcaagaaaatgaacaagaacaagaagcttg

SEQ ID NO: 10822 - DNA, 286 bp, Zea mays
cagacatctaataaaagttgaaatgagacctaatctgattctcaatgctgagaaagagcttgggattgttgctggacttcaggaccgagtggcacaggtttatggtggactagtttatatggattttagccagggtcatatggacaagctgggtcatggcatatacatgccattggatgtcaatctgcttcctcctctatacctcatctatgccgataaccccagtgactctggcaaggtccacagcactgttagacaaagatggctgtcaggtgatgattttata

SEQ ID NO: 10823 - DNA, 288 bp, Zea mays
gtcgtcatcatcccatccggggtgcgcactaagcccggcatgactagggacgacctcttcaacatcaacgccggcatcgttaaggggctctgcgctgccatcgccaagcactgccccaacccacttgtcagtatgatcagcaaccctgtcaactccactgtcccgattgcggcggaggttttcaagaaggctggtacttacgacgagaagaagctgtttggtgtgactactcttgatgttgttcgtgctaaaactttttatgctggaaaagcgggtgtgccagttact

SEQ ID NO: 10824 - DNA, 287 bp, Zea mays
gcctgccgcggcggcctctgcctccggcggcggggcggccgggtccgcggagtcgtacatcgggagcctcattagcctgacttcgaagagcgagatcaggtacgagggcgtcctttacaaaatcaacaccgaggagtccagcatcggcctgcgcaatgtgcggtcctttgggaccgaatgtcggaagaaagatggaatgcagattcctgctagcgacaaagtatacgagtatatcctctttcggggaactgatatcaaggatttgcaagttaagtcatcaccaccgc

SEQ ID NO: 10825 - DNA, 285 bp, Zea mays
gtacgtgctcgccaacaagttcttcttcgagaaggtcgtggaggtaatcaacccggaggatgactacgtctgggttcacgactaccatctcctggcgctgcctacctttctccgccgccgcttcaaccgcctccgcatcggattcttcctccacagccccttcccctcgtccgagatctaccgcaccctccctgttcgcgacgagatactgaaggcgctgctcaattgtgacctcattgggttccacacttttgattacgccaggcacttcctctcgtgctgcag

SEQ ID NO: 10826 - DNA, 282 bp, Zea mays
ggaggttcagtgatgcgtctgtccagagtgatatcaagttgtggcccttcaaggtcatttctgggcctggtgagaagccaatgattgttgtccagcacaagggtgaggagaagcagtttgcagctgaagagatctcctctatggttcttatcaagatgcgtgagattgctgaagcttaccttggtagcacgatcaagaatgctgtggtcacagtccctgcctacttcaatgactcacagaggcaggccacaaaggatgctggggtgattgctggccttaatg

SEQ ID NO: 10827 - DNA, 282 bp, Zea mays
cagagcactatatggaggaggctttgaaaatgagaaatctgctgcaagagtttgagaagaaacatggagtgagacatccatcaatacttggagtcagagaacacatatttacgggcagtgtgtcatcccttgcttggttcatgtcaaatcaggaaactagttttgtgacaattggacaacgagtgcttgccaatccactgagggttcggtttcattatggccatcctgatgtcttcgatcgtcttttccacgttacgaggggcggtgtcagtaaagcatcca

SEQ ID NO: 10828 - DNA, 280 bp, Zea mays
gtgaggtggccggaggtggtgctcactgtgccgtgtgccaggaggcctttgagcctggcgccgccggacgggagatgccgtgcaagcacgtttaccaccaggactgcgtccttccctggctctcactccgcaactcctgccccgtctgccgccaagagattccggctgcagccaccccagatgcggacgcggatgctgggctcaccatgtggcgacttcctcgcggtggatttgccgtggggaggttcgccggcgggcctagagagcagctcccggtcgt

SEQ ID NO: 10829 - DNA, 320 bp, Zea mays
caaggtcctgctggactacgcgtacaggcccctcgtctcagggtgcggcctgcacaagctcctcgtggacgacctcgtcttctcgacgctcaaggccagcgccgccatggggtacctcgcgccggagtacaccaccgtgggccgcctctcggagaagagcgacgtctacgcgttcgggatcatcgtgctccaggtgctcaccggcaggaggaaggtgacggcgacggctcagctgccgccaacaggcaatgtggatgagctcgtcgacggcaacctgcaggggagttactcggcggctgaggccgcatgctggcgaagat

SEQ ID NO: 10830 - DNA, 318 bp, Zea mays
ggttctcatggactttccccagttgacgatgacattgcctgatggccgtgaggagtctgtcatgaagagaacaacactggtggctaacacatcaaacatgcctgtcgctgctcgtgaagcttccatttacactggaattacaattgctgagtatttccgtgatatgggctacaacgtcagtatgatggctgactccacctcccggtgggctgaggcattgcgtgagatctcagggcgtttggctgaaatgcctgctgatagtggttacccagcttacttggctgcacgtttggcatccttttatgaacgtgctggtaa

SEQ ID NO: 10831 - DNA, 320 bp, Zea mays
cggacgcgtgggcggacgcgtggggttctgacaaggataagaagaaggaaaatgctgagcgtgatgagcgtgccaagaagtcggtgagcatcaacgagttactgaaacctgctgcaggagaaaggtactatggcggccgtggccgtggaaggggccgtggggagcgtggtggttttagaggcggatacggagggggatacagtcgtggcccagctgctgctgctccatccattgaagatcaagctcagttcccaagccttggtgggaagtgaagggcgcccagctgctgctgtcaccgagcgttgtgttgtctgctgttg

SEQ ID NO: 10832 - DNA, 322 bp, Zea mays
ctcaaggcagacaagaagaagatcaaggctgccgtcaagaagatgtatgacatccaggcaaagaaggtcaacaccttgatcaggcctgatgggaagaagaaggcttacgtgaagctgactcccgactatgatgctcttgatgttgccaacaaaatcggcatcatctaagtgctgcattaggcatcctaattcatctgttgtgtcctagttctatgtgaaaccagagttttctagctatggctctcaatcgctccattaccatgtgttatgcacacttctgaatttgatatcatccaagtgaccttttgaactagtttgcgtt

SEQ ID NO: 10833 - DNA, 321 bp, Zea mays
cccacgcgtccggaattacccaaccgtgagcgccgagtacagcgaggccgtcgagaaggccaggcgcaactccgcgccctcatcgccgagaagagctgcgcgcccctcatgctccgcctcgcgtggcactccgcggggacgttcgacgtgtcgtcgaggaccggcggtcccttcggtactatgaagtgcccggcggaactggctcacggcgccaacgcggggctggacatcgcggtgcggctgctcgagcccatcaaggaggagttccccaccctctcctatgccgatttctaccagcttgccggagttgtggccgtcgag

SEQ ID NO: 10834 - DNA, 323 bp, Zea mays
ggagaccctcgccggcgtgaaccccttgatcatcaggcgtctcacggagttccctccgaaaagcacccttgatccgagcaagtacggcgaccagacgagcaccatcacggaggcgcacatcgcggggagcctggaggggctcaccgtgcagcaggcgctggacagcaaccggctctacatcctggaccaccacgaccactacatgccgttcctgatcgaggtcaacagcctgaacgacaacttcatctacgccaccaggacgctcctgttcctgcgcggcgacggcacgctcgcgccggtggccatcgagatgagcctccccg

SEQ ID NO: 10835 - DNA, 314 bp, Zea mays
cgcggtctgctcgttcgatctgtgcagcagatctgaggtcccgggcgaccgtgaagcagcttcaatcgtcggcatggcgctcgtattgcatagtggggctggaaacaagaatgccttcaaagcacttattgcttcagaatacagtgggatcaaggttgagttgaccaaggattttgagatgggtgtctccaacaagacccctgagtttcttaagatgaacccccttgggaaggttcctgttctggagactcctgatggccctgtttttgagagtaatgctatcgcacgctatgttgctcgcttgaaggatgaca

SEQ ID NO: 10836 - DNA, 314 bp, Zea mays
atcaagcctgacggcgtccagaggggcctcattggtgagatcatcagccgttttgagaagaagggcttctacctcaaggccttgaagcttgtcaacgtggagaggtcgtttgccgagaagcactacgccgatctcgcctccaagcccttcttccagggcctcgtggactacatcatctctggccctgtggtggccatggtctgggagggcaagagcgtcgtcacaactggccgcaagatcattggcgcccacaaccccctggcttctgagcccggcaacatccgtggcgactttgctgtcgacattggcaggaa

SEQ ID NO: 10837 - DNA, 316 bp, Zea mays
gtcgaccaccacaggacaccttatctacaagcttggaggcattgacaagcgtgtgatcgagaggtttgagaaggaggctgctgaaatgaataagcggtccttcaagtacgcgtgggtgctcgacaagctcaaggctgagcgtgagagaggtatcaccattgatattgctctgtggaagtctgagaccaccaagtactactgcacggtcattgatgcccctggacaccgtgacttcatcaagaacatgatcactggtacctcccaggctgactgtgctgtccttatcattgactccaccactggtggttttgaggct

SEQ ID NO: 10838 - DNA, 317 bp, Zea mays
cccacgcgtccgcccacgcgtccgggactcgtcccggatcagctggttcatgggcactgtctccgccgtgcacgtcgctgaccccatccgatggcccaattcaccctggaggcttcttccaggtcgcctgggatgagccggacctgttacagaacgtgatgagggtgagcccatggctggttgagctggtgtcgaacatgccggtcatccatcacctcacagccacgcccttctcgccgcccaggaagaagctgtgcgtcccactgtacccggagcttccgctggagggccagttcccggcgccgatgttccacgga

SEQ ID NO: 10839 - DNA, 316 bp, Zea mays
gatggctccgtgacgagacacgacgccgagaggtcacccccacaccgcgccgaggccaccccgcttgggattgtgaggtaaagcgtgatggcagcgccaccggcgagggcccgagccgactacgactacctcatcaaactgctcctcatcggtgacagcggagttggaaaaagttgtctcctgttacggttctcagatggatcattcaccactagctttattaccactattggcattgacttcaagataaggactgtcgagttggatggcaaacggattaagttgcagatctgggacactgcaggccaagaacgtt

SEQ ID NO: 10840 - DNA, 147 bp, Zea mays
aggagctgttttcggaagttggtcatttgaaacgctttgctgttcactacgatggttatggccgcccaaatggcactgcagaggtggtgtttacacggaggagcgatgcaattgctgcactgacgcgttataataatgttctacttg

SEQ ID NO: 10841 - DNA, 317 bp, Zea mays
cgacaagccaatcgaagccgagatacggccatggactccaccggcaccggagcagggggtaacgggaagaagggagcggccgggcgcaaggtcggcgggccaaggaagaagtcggtgtcgaggtccgtgaaggccgggctccagttccccgtcggccgcatcgggcgctacttgaagaagggccgctacgcgcagtagtacggcaccggcgcccccgtctacctcgccgctgtcctcgaatacctcgccgctgaggttctggagctcgccggtaatgctgccagggacaacaagaagactcgcattattccgcgcca

SEQ ID NO: 10842 - DNA, 313 bp, Zea mays
gcgtgacgcgtctcccacacggccgccgccctcgccttcgtgcgttccccgcgtagagtttagggttttgtcgccgccatggcgatcctctcggcgctcgccaccgaggtgttcatccccgtcgccgccgtcatcggcatcgccttcgccgtcgtgcagtgggtgctcgtgtcgcgggtgaagctctccccggctgcagccgcgtccggcggcagcaagaacggctacggcgactacctcatcgaggaggaggaggggctcaacgaccacaacgtcgtcgtcaagtgcgccgagatccagaccgctatctccg

SEQ ID NO: 10843 - DNA, 316 bp, Zea mays
cttgcaagagctatccaggaaagtttgaatgttgagtcaccccctcgcagaaatggcagtgccaatggtggtactatgtatcatccgcctcgcgaaactggcaatgcatatcagccacctcgtgaaaatggcagtgccaatggtggaaatgcatatcacccattaccatttatgttctcatctggattcagagcatgcgcaggatgtcacagagagattggtcacgggcgttttctcagttgcatgggagctgtttggcatccggaatgttttcgttgccatgcatgtagtcaacctatatatgactatgagttct

SEQ ID NO: 10844 - DNA, 310 bp, Zea mays
tgtcgcgcaccacgacctccacttccacatctcccccggcgtcggcgcggtcagttgaaccatggcggactccaaggccacctcggcggtcaccctccgcacccgcaagttcatgaccaaccgcctcctggcccgcaagcaattcgtgcttgaggtgatccaccccggccgcgccaacgtctccaaggcggagttgaaggagaggcttgccaaggcgtacgaggtgaaggaccccaacaccatctttgtcttcaagttccgcacccacttcggaggaggaaagtccactggtttcggcctcatctacgac

SEQ ID NO: 10845 - DNA, 308 bp, Zea mays
gcttgaggctcttgaccagatcaccgagcccaagaggccttcagacaagcccctgcgtctgcccctccaggatgtgtacaagattggtggtattggaactgtaccggttggtcgtgtggagactggtgtcatcaagcctggtatggttgtcacctttggtccaactggcctgactaccgaggtgaagtctgttgagatgcaccacgaggcgcttcaggaggctcttcctggtgacaatgttggcttcaacgtgaagaacgttgctgtcaaggatctcaagcgtgggtttgtggcctccaactccaagg

SEQ ID NO: 10846 - DNA, 309 bp, Zea mays
ggcgttgttctggtttatttttacatttgtgaccggacaaacatatttccagaaagcaagaagagctacaaccgtgatctgttcctgtttctgtacattcttctcatcatagcatcagcgcttacttcacttaagaagcatcatgaaaaatcagcattttcagggaagtccatactctatcttaatcgccaccagactgaggaatggaaagggtggatgcaggtattatttctgatgtaccactattttgctgcttcggagatatacaatgcaatccgtgtgttcattgcttgctatgtctggatgact

SEQ ID NO: 10847 - DNA, 308 bp, Zea mays
aattgattttggcagaaaaggaaggaggatcagggttgagtggacaaaggaggatcgcactgttggccgaaaaagcagctcaaggaggtctccaaccaatacaaaaccgaccaaaaccttgtttgtgatcaactttgacccgatcaacacaagaatccgagatctggagaggcacttcgataaatatggcagggtcgcaaatgtaagaatcaaaaagaactttgcctttatccagtttgaggtacaggaggatgctacaagagcattggagggtactaatggaagccatttcatggacagggtgatct

SEQ ID NO: 10848 - DNA, 309 bp, Zea mays
  unsure (1)..(309): unsure at all n locations
gcgacccgaccaagaccatcaaggtgcccgacggcttcgactacgagctctacaaccgcaacgacatcaaccgcatcctcgggcccaaggcctcctgcatatccttcaaggactccgcctgccgctgcttcggctacatggtctccaagaagaagtacatctacaccatcgacgacgactgcttcgttgccaaggacccatcaggcaaggatatcaatgctcttgagcagcacatcaagaacctcctcagcccgtccacaccgttcttcttcaacaccctgtacgacccctaccgtgnaggtgctgact

SEQ ID NO: 10849 - DNA, 335 bp, Zea mays
ggctgaaatgcctgctgatagtggttacccagcttacttggctgcacgtttggcatccttttatgaacgtgctggtaaggtaaaatgtctgggaagtccagacaggaatggcagtgtcacaattgttggagccgtctctcctcctggtggtgatttttcagaccctgttacctccgcaaccctcagtattgttcaggtcttctggggtttagataaaaagctcgctcaaaggaagcatttcccatctgtgaattggctcatttcctattcgaaatactccaaggcccttgagtctttttacgagaaattcgatccagatttcattgatattagga

SEQ ID NO: 10850 - DNA, 334 bp, Zea mays
ccctcaaaagctccgatggcgaggagttcgaggtggaagaggcggtggcgatggagtcgcagaccatccgccacatgatcgaggatgactgcgccgacaacggcatccctcttcctaacgtcaactccaagatcctatccaaggtaatcgagtactgcaacaagcacgtacatgccgccgcagccgcagccgccgcctcgaaggccggttccgacgacgtgggtgccgcctccgccaacagcaccgccgcctccggtgaggacctcaagaactgggatgcggacttcgtcaaggtcgaccaggccacgcttttcgacctcatcttggctgcaaa

SEQ ID NO: 10851 - DNA, 126 bp, Zea mays
gaagagttcaagctgactgctgcagcagcagttgcttctggaaccgtgctggggttgtatgaggacagcagatacaagtctgaatcgaaaaaggtgcacctgaaacaggttgatattaattggact

SEQ ID NO: 10852 - DNA, 322 bp, Zea mays
cactgcggcctggacgcgtgcgagagacttgaccaagcagcagcagcagggatggcgcctctgaagctgtacgtgatgccgctgtcccccaacgtggtgcgcgtggccaccgtgctcaacgagaagggcctcgacttctagatcgtccccgtcgagctcaccaccggcgccgacaagcagcccgacttcctcgccctcaaccctttcggccagatcccggctctcgtcgacggagacgaatcctcttcgagtcccgtgcgatcaaccggtacatcgccagcaagtacgcgtctgatggcacggacctgctccccgcgacggc

SEQ ID NO: 10853 - DNA, 330 bp, Zea mays
agcaactagtggctatcttggggcagattatcaagaatcaatggacaggaatttaaatcagctggcgtcatctgaatcatctagttctggtacgaggaattatgttccaggaagcagtgatcctcatagcagtggtttgcggccatattatcctgttgaaagaatatgggcgcttggacttcagtctcgggcccaccctcgtgaaataatggttgaggtcttaagagcacttcaagaattaaacgtcagatggaagaagaatgggcactacaacgtgaaatgcagatggtgcccagggtttcctgaagttaatgacacgttagatgccag

SEQ ID NO: 10854 - DNA, 330 bp, Zea mays
ggctcctcctcctccacaacttcacggcctcgtcccccgtcgtcaaggagttcatcctccccgtggactccgacgtcctcgtgctcaccttcgtccccgactccggctccactgccttcgtcaacgccatcgagctcgtctctgcgcccgaagagctcgttggcgacatcggcaccctagtcacgtccggcggcgccgctcagatacacgagctgtcgtctcaggtgtttgagactctctacaggatcaacgtcgcggggcgcaaggtcacgccattcaacgacacactgtggcggacatgggttaacgatgagaaattcctcatcgaca

SEQ ID NO: 10855 - DNA, 332 bp, Zea mays
gcttagcaccagcgtcggattcggactcttctggctatcctgggcagtcaatggattgcgtgacaccatcgccagcattttcagaagccgaagtggcatgaatatcgaggatgacgaggtcgcagtgaaaatagaaaaaagtgtgaacgagatcctcttcagggcattaactctcctggcaatcactgcactgaagtttgcatgagcagtcatcacgattttataggtttgtcgatgcagttgtgatatactcacctatgtctatgtggttcagaagtgtagtactgctttctgtaggaccaagttccacctgcccaaaccatggttatagc

SEQ ID NO: 10856 - DNA, 331 bp, Zea mays
agcaactagtggctatcttggggcagattatcaagaatcaatggacaggaatttaaatcagctggcgtcatctgaatcatctagttctggtacgaggaattatgttccaggaagcagtgatcctcatagcagtggtttgcggccatattatcctgttgaaagaaaatgggcgcttggacttcagtctcgggcccaccctcgtgaaataatggttgaggtcttaaaagcacttcaagaattaaacgtcagatggaagaagaatgggcactacaacgtgaaatgcagatggtgcccagggtttcctgaagttaatgacacgttagatgccagc

SEQ ID NO: 10857 - DNA, 269 bp, Zea mays
gcacgcgctatttcacaagcccacatcacaagacagtttcttttcaacctaaagcaggacggcaaagcacttcctgatggccctgttgttatatctccagatggtctcttcccgtcactttacagagaagtcatcagaagagctccgcatgaattcaagatttcgtgtctagaggccattaaagatttatttccacacgactcaaatccgttttatgctggatttggaaatagagacacagacgagcttagctacctcaaggttggtat

SEQ ID NO: 10858 - DNA, 330 bp, Zea mays
gtctaccattatctctgagaattcaaaggtggtcactgttgtaccatcagacacggtgttgacagcatcaaagaagatgctggaactaaaaatgagttcagcagttgtagcaatcgaaagcaaacctgggggaattctgacatctagagatatcctgatgcgtgttatcgcccaaaatcttcctcctgagtccactacagtcgagaaggtcatgactcagtgtcctgaatgtgcctcggtagacaccccaattcttgatgctcttcacacaatgcatgatggaaaatttttacatttgcctgttctggacagggatggaaatgttgtgac

SEQ ID NO: 10859 - DNA, 327 bp, Zea mays
  unsure (1)..(327): unsure at all n locations
cggacgcgtgggtcaagttaaggcttctgtacaacgaaagattcggcaaagtatcgctgatgcgtaccccagccttgaacctttgctagatgacttgctcccaaacaagtcacctatgattgttgttaaatgccanaatcatcttaatcttgtagtggtgaataatgttcctctatttttcaatatacgtgatggtccttacatgccaaccctgcgtcttcttcatcagtatcctgatatcatgaaaaagttccaagtggatagaggtgctatcaaatttgttctatctggcgcaaacataatgtgtcctgggttgacttcacctgg

SEQ ID NO: 10860 - DNA, 259 bp, Zea mays
cggaccgtgggtgtgaatggtcttgaatgcaagatatcctgcaagacctcgaaagtttcatatgtccttgatactgaagatttcttgttccggcttcggaagaagaggaaaattttgcggggcgggaatgtgcccgaccgtttgcagatttcatcaatatctgctgcaaaagtgcagcgcttcaataggttcctatccaaaccataggatcatttggcatacaaatgtatcgaaacctgttgctggggtcccagctgct

SEQ ID NO: 10861 - DNA, 330 bp, Zea mays
ggcatatcttcatcaccacagcaatccatcaattgtccactgcgatattaaaccaagcaacattctacttgatgaaaatatgactgcacatgttggtgactttggtttagcaagaattctaaacatggatgcatgtgaacataattctggtggaagtagctcggctggaattcgaggcacaattgggtaccttgcaccagagcatgccatgggactcagagttggtgtagaggccgaggtatacagctatggagtgctgctgatggagatacttactaaactaagaccaacagatcatatgtcttttgatggggccacaagccttgtaaa

SEQ ID NO: 10862 - DNA, 329 bp, Zea mays
  unsure (1)..(329): unsure at all n locations
ggaagatgtcgtacctgctgccgcatctgcactcggggtgggcggtggaccaggccatcctcgccgaggatgagcgcctcgtcatcatccngttcggccatgactgggacgagacctgcatgcagatggatgaagtgctagcagcagtagctgagaccatagagaactttgcggtcatctaccttgttgacatcacagaggtccctgatttcaacaccatgtatgagctgtacgacccttcggcagtgatgttcttcttccggaacaagcacatcgtgattgatctcgggactggcaacaacaacaagatcgactgggccctgaaggac

SEQ ID NO: 10863 - DNA, 124 bp, Zea mays
agctgatcagcgccatcgaccgcgaggccgtgttcacgtacgcggaggacgcggccagcggcagcctgccgctgatgcagaagctgcgctccgtgctggtggaccacgccctcagcagcggcga

SEQ ID NO: 10864 - DNA, 167 bp, Zea mays
cggacgcgtgggtgacgagcacccagagttcttgtcaaatccactttacattggcggtgattcatacgctggtatgattgtgcctaccgtcacttctgaaattgaccaggggttgaaaattgtttgtagtaaacctaccatgaatctaaaggggtgcctcgttggaa

SEQ ID NO: 10865 - DNA, 115 bp, Zea mays
cggaccgtgggtggacttcttcagtgaatacggcgatgcgaacagatacaaaatccaagacgtcattggcaaaggaagttatggcgttgtttgctcagctgttacccaacatact

SEQ ID NO: 10866 - DNA, 322 bp, Zea mays
  unsure (1)..(322): unsure at all n locations
tccacctcctcgaagccgccgcgaccgatcgagcgaactncccttcccgcgccgacgccgaaaccctagctcctcttacgccatggccaccgtgtcgctcactccgcagcggtcttctccaccgagtccggcggcgccctggcttctgccaccatcctccgcttcccgccaaacttcgtacgccagctcagcaccaaggcacgacgcaactgcagcaacatcggcgtcgcgcagatcgtcgccgccgcgtggtccgactgcctcgctgctcgccgcctccgcggcggcggatgtcagcgcaattcctaacgctaaggttgcg

SEQ ID NO: 10867 - DNA, 310 bp, Zea mays
gttctacatattggctcatttacaaaaggttcgaaggttttgtctcttggagatagtgtgatatgcaaggttgattacaaccggcgcacactgattgctccaaatcatacgtgtacccacatgttgaactttgctctaagggaagtacttggtgatcatgttgaccagaagggttcaattgttctaccagagaagctaagatttgatttctctcatggaaaacctgtccagcctgaagatctgaggaaaatcgagttcatagtgaaccagcaaataaaggacgagctgggtgtgtatgcacttgaaataa

SEQ ID NO: 10868 - DNA, 307 bp, Zea mays
gccggtcaataccaacaaggtcgtgaagcccaggcctttgcaggctgcaacattccaggactccttgggatttttcagaacgagtgggatgctctcatgctttctaattttgctttggagcagcagctacacacagcaagacaagaacttagtcatgcactctaccagcatgacgctgcctgccgtgttatagccaggttgaagaaggaaagagatgaggctagagcacttttggctcaagctgagagacagattccagcatcagttgcaggagctgctcctgcagctgttgtttccaatggaaaaa

SEQ ID NO: 10869 - DNA, 307 bp, Zea mays
ccctctcctacctcgatggcacgctgcccggcgactatggcttcgacccgctgggcctctcggacccggaggcaccgggggcttcatcgagcccaagtggctggcctatggcgaggtgatcaacggccgctacgccatgctgggcgcggtgggcgccatcgccccggagatcttcggcaagatgggcatcatccccccggagaccgcgctgccgtggttcaagacgggcgtcatcccgcccgcgggcacctacaactactgggccgactcctacacgctcttcgtcttcaacatggcgctcatgggc

SEQ ID NO: 10870 - DNA, 308 bp, Zea mays
ggagaaagatagttaacccccgtatcatcctgttggactgccctgttgagtataagaaaggagaaaatcagaccaacgctgagttgatgaaggaagaagattggcaggttctcctagagatggaggaagaatatataaagaacctttgcgctcaaattctaaaattcaagcctgatttagttatcacagagaaagggctcagtgatctcgctatccattatttgagcaaggctggtgttactgcaatccgtagacttaggaaaactgacaacaacaggattgctaaagcttgtggggcagttatagtg

SEQ ID NO: 10871 - DNA, 310 bp, Zea mays
cccacacccaccaccgcaagggccccgcccgcttccgctccctcgacttcggcgagcgcaacgggtacctcaagggcgtcgtcaccgacgtcatccacgaccccggccgtggcgcgccgctcgccaaggtcactttccgccacccattcaggtacaagcaccagaaggagctctttgtcgcagccgagggcatgtacacgggccagttcgtctactgcggtcgccgcgccaccctctccatcggcaacgtgctgcccctccgcgggaatcctgagggtgccgtcgtctgcaacgtcgagcaccacgtcgg

SEQ ID NO: 10872 - DNA, 310 bp, Zea mays
agaacctcaagcttggcatccacgaggactccacgaacaggaccaagattgctgagctcctgaggtaccactcgaccaagagcggggatgagctgaccagcctcaaggattatgtgaccaggatgaaggagggccagaacgacatcttctacatcactggtgagagcaagaaggctgtggagaactccccgttccttgagaagctgaagaagaggggctatgaggtgctgttcatggtggatgccattgacgagtattctattggacagctgaaggagtttgagggcaagaagctcgtctctgccaccaa

SEQ ID NO: 10873 - DNA, 301 bp, Zea mays
gaccagcgtcagccgaggtccgggaccgtgcgagtggctcgagtccgaggacgagcccaagcccttcgccgcccccaggaactcgctcgccagaggtggactaagcactggtgactgctggtgtagctggccctgctgcaaattcagttaaaaggaagaggaagaaccagttcaggggtatccgccggcgcccgtggggcaaatgggctgctgagatcagagatcctcgcaagggcgtgcgcgtctggctcggtactttcaactcccccgaagaagctgccagagcttacgacgccgaggc

SEQ ID NO: 10874 - DNA, 320 bp, Zea mays
cacgcgtccggctatctcgagctagctagctgctgtaaccgttgccatggccaaaatggtattgctctgcgtgctcgtctccttcctcctgatgcccttggcctccctagccctgacgcaggacttctgcgtcgccgacctgacctgcagcgacacgccggctgggtacccgtgcaagtccagcgtcaccgccaacgacttctacttccacggcctggccggccatggcaaaataaacccactcatcaaggccgccgtcaccccggccttcgtgggccagttcccgggcgtcaacgggcttagcatctctgcggccaggc

SEQ ID NO: 10875 - DNA, 300 bp, Zea mays
cccacgcgtccgcatagagattaaacctccccctgttacacctcaagttgtggatcttcttgatggtttgtcctcaagcacatctcttcctgatgagaatgcagcttacccgacaatcacagcattccagagtgcaaccttgaggatcacattcagtttcaaaaagcaacctggaaaacctcaggagactacaattaatgcttctttcacaaatttagcaactactgcattaacagatttcggcttccagccagcggtgccaaagtccatccagttgcgtttggacccagctagcagcag

SEQ ID NO: 10876 - DNA, 295 bp, Zea mays
agagctgggccgcgtccacagaatggggggtttcgtgaagactcataagaccaatgcgtatttcaaacgtttccaagtgaaattcaaactaaggcgggctggcaagacagactacagggccaggataaggctgattaaccaagacaaaaaccagtaccacacacccaaatacagatttgttgtgcgatttacccaccaggacattcatgcccaattcatactgctagtataacgggtgatatggttcttgcttctgctactcgcatgagttgccacgatatggtcttaagttggt

SEQ ID NO: 10877 - DNA, 304 bp, Zea mays
gagaaggaatggatattgatagggaagcatggttaaaggaagcagaagccgcagaacgtgctgggtctgttttaacttgccaggctattgtgaagaacactgtaggcattggtgttgatgatgaggatcggaagcgtacatgggttgctgatgctgaggaatgcaagaagcgcggttcaattgagacagcgcgtgctatctatgcacatgcgcttactgtgttccttactaagaagagtatttggctgaaagcagctcagcttgagaagagccacgggactagggagtcacttgatgctctcct

SEQ ID NO: 10878 - DNA, 302 bp, Zea mays
tcttaacttgagtctgggtttcaattctgttggtttctatcagatgacaaagctggccataattccctgtactgttatactggagacccttttcttccggaagaaatttagccggaatatcaagctttcccttagtgtgctccttcttggtgttggtgttgcaactgtaactgatctgcaactcaacgttatgggatctgtactgtccctactggcaatcatcacaacctgcatcgctcagatcatgacaaatacaatacagaagaagttcaaggtatcttcaacacagctcctgtaccagt

SEQ ID NO: 10879 - DNA, 306 bp, Zea mays
cccacgcgtccgcccacgcgtccgcgcaaggcaggcggccccaggaagaagtcggtgacgcggtccgtcaaggccgggctgcagttccccgtcggccggatcgggcgctacctcaagaagggccggtacgcgcagcgtgggcactggcgcccccgtctacctcgccgccgttctggagtacctcgccgccgaggttctggagttggcagggaacgcggcgaaagacaacaagaagacgcgcatcatcccgcgccacgtgctcctggcgatccgcaacgacgaggagctcgggaagctgctggccgg

SEQ ID NO: 10880 - DNA, 304 bp, Zea mays
gtgtgtggctcgggggtgcgcgttgcaatgtgcaatgcttagtcctacgttccgtgttcgggaatacgaggtgcaggatgcaatccctgcttccataggatttaacactagtgacggcccagtttcaacattgtcaagtgatgcattgttccggagaggcctgcactttcccagtgttaagatcattactctagagaagaatgatagttttagttttgatgcatattatgtggatggtaatgaattgcctcctggtacctcaacagacatcggtagttttcaggtttccagaaaatatgtggtt

SEQ ID NO: 10881 - DNA, 307 bp, Zea mays
gcttccctttcgttcctcctcgccccagcgacgcggcctcccgtagaccgagcaaggcaacccaccactgagaggcacgcagaggagcaggaagccggagaccaagatgtcgtcggtgttcagcggcgatgagacggcccccttcttcggtttcctcggcgccgcgccgccctcgtcttctcatgcatgggcgcacgtacgggaccgcgaagagcggcgtcggcgtggcgtcgatgggtgtgatgcggccggagctcgtcatgaagtccatcgtgcccgtggtcatggctggtgtgctcggtatcta

SEQ ID NO: 10882 - DNA, 311 bp, Zea mays
cgctcatgcgcgtgtacatcaacctgccgctgcccgagcgcatcgtctactacacctacaagctcatgggcatcaggctcgtcgtcaagggcaccccgccgccgccgcccaagaagggccacccgggcgtcctcttcgtctgcaaccaccgcaccgtgctcgaccccgtcgaggtggccgtggcgctgcgccgcaaggtcagctgcgtcacctacagcatctccaagttctccgagctcatctcgcccatcaaggccgtcgcgctgtcgcgggacgcgacaaggacgccgagaacatccgccgcctgctgg

SEQ ID NO: 10883 - DNA, 299 bp, Zea mays
tgatgcattggtaaagaaagcatatgaggactggatgcaagttgtagaatatgatggcaaggcactcttgagcttcaagcagaaaaagaaaactgtcacgacaagaagtgacgttgcatctgcctcaacaagcaatcctgcttcatatggttcggccaattcacagaaacagttgtctcttccagcaaaagctggacaaacttcctcagcgggtactatgaatgaagcagatggaactagaaatgcatacaacgcaaatggaaaccagtcagcaagatatgcagccaacactcagagca

SEQ ID NO: 10884 - DNA, 298 bp, Zea mays
cggacgcgtggcggacgcgtgggctgcaacttgccaaggctctgatttgggctgcaggccggcctcaaaaggttgccagttcgcctgatgacgaagatacagcagtattctgcttggagctgctgattgccataacccttaataatcgagacaggatcgtgctcctctggcaaggtgtatacgagcatattgccagcatagttcagtccacagttatgccgtgtgctctcgtggagaaagctatttttggactcctgaggatatgccagaggttgctaccatacaaggagaatcttgc

SEQ ID NO: 10885 - DNA, 300 bp, Zea mays
cccacgcgtccggtgaagataattatggacaggatatcaaaaaggtcaaaaggctatgccttcgtagaatacactaccgaggaagctggaggtgctgctctaaaagcaatgaatggacagatcataaacggctggatgatagttgttgatgttgctaaaactagatcgagagaccgtctatctgggggacctaatcaagcatttcgaccacactatcaggctagatgactgttatatgtacagaacttacagctgtagagtagagataagcacgagagcgaggaattgctgggggatgcc

SEQ ID NO: 10886 - DNA, 299 bp, Zea mays
cttttctcgtttagaacctctaaaatttcccccactcgccagtcgcagcagcacctgtagcagccatggacgccagcggaccggtagcaaggggaagaagggggcggccgggcgcaaggcaggcggccccaggaagaagtcggtgacgcggtccgtcaaggccgggctgcagttccccgtcggccggatcgggcgctacctcaagaagggccggtacgcgcagacgtgggcactggcgcccccgtctacctcgccgccgttctggagtacctcgccgccgaggttctggagttggcagg

SEQ ID NO: 10887 - DNA, 301 bp, Zea mays
cggacgcgtgggatgggcacgccggagttccccaacctgggaaagcactgcagcgtcggcgactgcaaccagatcgacttcctccccttcacctactaccgctgcgaccatgtcttttgccttgatcaccgaagttatacatcacaccaatgcccaaatgcaaacatgaaagacgtcactgtcctcatctgcccactctgtgctaaaggtgttcgcctcaatccaagtgaagacccaaatatcacctgggatactcatgttaacactgattgtgatccatcaaattaccaaaaagtgatga

SEQ ID NO: 10888 - DNA, 302 bp, Zea mays
ctcctgagtcctgtccaccctgccaccgccgacgccgcgccgccgcagcaattgtcaccgtcgctatggcccgtatcaaggtgcacgagctccgggggaagagcaagacggacctgcaggcgcactcaaggagctgaagtctgagctctccctcctccgcgtaccaaggtcaccggcggcgcacccaacaagctctccaagatcaaggtggtgcgcacctcgatcgcgcgcgtgctcacagtgatctcgcagaagcagaagtcggcgttgcgggaggcgtacaagaagaagaacctgctccc

SEQ ID NO: 10889 - DNA, 290 bp, Zea mays
ccctgcacgtggaggactacccgtacgcggtggacggcatggacgtgtggcgcgccatcgagggctgggtcaggacctactgcgcccacttctaccactccgacgccgcggtggccgccgacgcggagctgcaggcgtggtgggacgacgtccgccgcgtcggccacggcgaccgccatcgcgacccggcgtgctggctggacctcgactccgtggccaacctctccgagtcgctgtccacgctcatctggatcgcctccgcgctgcacgccgccgtcaacttcggccag

SEQ ID NO: 10890 - DNA, 296 bp, Zea mays
ggagctggcccgacaggtgaagccgccgccgctgcagtgtccatagccacgcagagactgagatggggggttttgtcaagacccacaagagcaatgcatacttcaagcgtttccaggtgaagttcaagagaaggcgcgctggcaagacagactacagggccaggataaggctgattaaccaagacaaaaacaagtacaatacacccaaatacagatttgttgtgcgatttaccaacaaggacatcacagcacaaatcatatctgctagtatagcaggtgatatggttcttgcttct

SEQ ID NO: 10891 - DNA, 301 bp, Zea mays
ctttaccgaggcgctccgggcgaacaagctgcgcactatgtcgaccagatggttgctgaggctgaggagtacttctcaaagtggggagaaagtggcactgttgatttgaagtatgagttggagcacctcatcatactgacagctagccggtgcttgctgggaagggaggtgcgagaaaagctgttcgacgatgtttctgctctcttccacgaccttgacaacgggatgcagccaatcagtgtactcttcccatacctcccaatccctgcacataagcgccgcgacagggcacgtgcacgtc

SEQ ID NO: 10892 - DNA, 288 bp, Zea mays
  unsure (1)..(288): unsure at all n locations
gggaagactctcgtgtccaggacacagggtaccaggattgcctctgatggtctgaagcacagagtctttgaggtttgtctagctgatcttcagggtgacgaggatcaggcttacaggaaaatcaggctccgtgctgaagatgtgcaaggcaggaatgtgctcacaaacttctggggcatgaattttaccaccgataagctcagatctctagtaaagaagtggcagacattgattgaagcccatgttgatgtcaagacaaccgacaactacatgctgcgtttgntctgc

SEQ ID NO: 10893 - DNA, 304 bp, Zea mays
ggcagtactactactggtacctcaccaacgatggcattgagcacctacgcaactacctgaacctcccgtctgagatcgtgcctgccacgctcaagaagtctgccaggccactgggccgtccatttggctctggccctcctggtgaccgcccaaggggccctggtcgttttgaagacagaccaaggtttggagacagggatgagtaccgtggtggccctcgtggtgctcccggtgactttggtggcgataagagtggagctcctgctgagttccagccatctttcaggagttctggcgcaaggcc

SEQ ID NO: 10894 - DNA, 225 bp, Zea mays
cttctggcctttccagccgccaagccttctagaagcttcaagagctcgattcgatcggaaccctcgccatggccgacgaggcgaaggcgaagggtaacgcggcgttctcggccggccgcttcgaggaggcggcgcggcacttcacggacgccatcgcgcttgccccagacaaccacgtcctctactccaaccggtcggcggcgctcgcctcgctccaccgctact

SEQ ID NO: 10895 - DNA, 303 bp, Zea mays
cgactgacgcgcctccgacgacacgccaggtccggcatccatgggcgccgcggcggccgacctcgaggcgcgtcactctgcatcctcggccgtatttctgacctcgagctcgccgcgcacagcaccgcctcggggcgctctccatctccaccgcgccctcagagaaaggcgaggccgacgcgggggctaccgaggttcatctcgcagccctcctggccgcgcgcggcgtgcgggacttcgccttccgtcgcgttcccgccgactactacgaccgctccctcgaggagcggcgctgcctgctcc

SEQ ID NO: 10896 - DNA, 301 bp, Zea mays
cacacactcgagaactccatttcgatctcatttgaaatcaacccatcctcgtttcctccgtctagcagcctctcaccctcatggccaagatcaagatcgggatcaatgggtttggcaggatcggaaggctggtggccagggtggccctgcagagcgacgacgtcgagctcgtcgccgtgaacgaccccttcatcagcaccgattacatgacctacatgttcaagtatgacactgtgcacggacagtggaagcaccatgaggtcaaggtgaaggactccaagacccttctctttggtgagaa

SEQ ID NO: 10897 - DNA, 300 bp, Zea mays
agtcattgctggctcagtggctggtacagttgctggactaggccttgttgctgcattaggattctattgttacaagagaaaacagaagcctttcggaagggtgcagagtccacatgccatggttatccatccgaggcactcaggttcagatgacatggttaaaatcacagttgcagggggaaatgctaatggtggtgctcgcgcaagtgagacatatagccaagcgagcagtggtccacgggacatccatgttgttgaaagtggaaatatggtcatttcaatccaagttctccgcaatgt

SEQ ID NO: 10898 - DNA, 300 bp, Zea mays
cttggaagccgttttctccctgaagccatcatcagttggtacctcatggagctatagctcaaatgaaatagttgcagcagctatggttgctgctcatgtttctgagttatttcgtcggtccaggccatgccttaatgcactctctgcactaatgagatgcaagtgggatgctgagatttcgaccagggcatcatctctctaccatttgattgacttgcatggtaaaacagtttcctccattgtgaacaaagctgagcctcttgaagctcacctgacccttacaccagtaaagagggataa

SEQ ID NO: 10899 - DNA, 301 bp, Zea mays
tgctgattctgtgaagctgtcaattttgaatcatccaaagcttaagttaaaatctgagcatgtccgagtcattgatagagccaagttgcgaatatatccagctggaactgacaagctcaaacttcagcttgaactgcataacctcaaatccatccttccaaaagtgattgtgaagggcattccaactgttgaaagggttgttattgatgaagttaaagtcaacaacgcgacagaaagataccaattgttggttgaaggaacaaacctcctggcagtcatgggtaccccaggagttgatgct

SEQ ID NO: 10900 - DNA, 298 bp, Zea mays
cacatgattgcgcgaatgcaattcctgatttgagcaagatgatcggggctgttaagggcctagttgcacagtgtgaagatttaaagttgaagtactatgaagagatggataagaggaagaaacttcataatattgttcaagagacaaaaggaaatatcagggttttttgtagatgccggcccttaagcaaagatgaggtgtcatcgggtccagaatgtgtagtggattttgatggatccagtgatggtgacattgtaattacaaatggcggaactaaaaagacctttaagttgataga

SEQ ID NO: 10901 - DNA, 297 bp, Zea mays
ggctgaagatggcgtccaccttcatcggcaactctacctccatccaggagatgttccggcgcgtgagcgagcagttcaccgccatgttccgcagaaggccttcttgcactggtacacgggggagggcatggacgagatggagttcaccgaggccgagagcaacatgaacgacctcgtgtccgagtaccagcagtaccaggacgccaccgccgacgaggagggcgagtacgaggacgaggaggagggagatctccaggactagaatagtctgcttcacattcagtcaccgtcagtcat

SEQ ID NO: 10902 - DNA, 295 bp, Zea mays
cagaggctgtgttccgtcaaaggctctccttgctgtaagtggtaggatgcgagaacttcaagatgaacatcacatgaaatcactgggcctacaggtctcatcaccaggatatgacaggcaggttgttgctgaccatgcaaataatcttgcatctaaaatccgcagcaacttgactaattcaatgaaagctctgggtgtggatatactcactggtattggcaccattgtggggaagcaaaaagtgagatatgggaaagttggtttcccagacaatgaaatcactgctagaaacatc

SEQ ID NO: 10903 - DNA, 292 bp, Zea mays
gtgatttgtgttacttaatcttgtgatccgggttataagtggtttatccggggtcgttgggacactcggacatatcctgttaatttatctggtgcacatgcatagccgtttgaggtctttgggacaagggcaggtgcatgtgggcccaataacttgggaggttctgccacaaaaaattagctttagggaataatccactgttagaagagagttgtagttcaaaacaccccctctgccctaaaacttaatatttttgtacagagtgaacccttaacattgtaagcctcaattt

SEQ ID NO: 10904 - DNA, 294 bp, Zea mays
gttgtttgggggctctatgaggctatcaaggcccacaaccaaaacagcaaactcattggtttccttggtggatcagatggtctgctagcacagagaaccttggagatcactgataaagttattgcttcatataaaaatcaaggtggatatgacatgcttggtcgaacaaaggatcagattaggacgacagagcaggtcaatggtgctatggctagttgccaagctttgaagttggatgctctggttatcattggaggtgtcacttccaacactgatgctgctcaacttgccgag

SEQ ID NO: 10905 - DNA, 179 bp, Zea mays
ggatgataaaggactttgatgaacctggaactcttgcaccaactggtctttttgttggaggtacgaagtacatggtgatccaaggtgaacctggagttgtcatccgaggaaagaagggcactggaggcattactatcaagaaaactggcatgtccttgattatcggtatctatgatgag

SEQ ID NO: 10906 - DNA, 294 bp, Zea mays
cccttatgttagcacaactgaggaaacagctatttcttcattgaagaggtcgcttggtgctctgaacacacaccttgcttcaaacacataccttgttgggcatgctgttactctagctgacattgtaatgacatgcaacctctaccatggaattgcacggatcttgaccaagaccttcacgtctgatttccctcatgtcgagaggtatttctggaccatggttaaccagcctaacttcaagaaggtcattggtgaggtcaagcaggcagagtctgcacctcctattccgaaaaa

SEQ ID NO: 10907 - DNA, 290 bp, Zea mays
acaagattggtggtattggaactgtgccagttggtcgtgtggagactggtgtcatcaagcctggtatggttgtcacctttggtccaactggcctgactactgaggtgaagtctgttgagatgcaccatgaggctcttcaggaggcccttcctggtgacaacgttggcttcaacgtgaagaatgtcgcggtgaaggatatcaagcgtggttatgtggcctccaactccaaggatgaccctgccaaggaggctgccagcttcacctcccaggtcatcatcatgaaccaccct

SEQ ID NO: 10908 - DNA, 288 bp, Zea mays
gcccatgataatggccggcacgcttgtcttcttcaccaccaggaagtcgtagtaagcgaagcgtagccttagcttgaggccacgagctgaaaagacgacgacaggcggtgggggtcatgttgtgagcgaaaagctgaccccctggcaaatccccaggagggagtggttcccccctagctttatctttggtgctgccacttcagcataccaaattgaaggggcttggaacgaaggtggaaaggggccaagcacttgggacgacttctgccacaaccatccggagtggat

SEQ ID NO: 10909 - DNA, 288 bp, Zea mays
cggacgcgtggcaaaaagtaaatattctggggatgaatgtgtaaactgctcgtgcaatgatgactctgatatgggtggagttatgttcaacagcaaagctacaacaattgtggacgagtacaatcgtctcctggcaagccaacttgaaactcagagagagtattatgagggcctgttgtctgaggctaaaagaaacaaggagcaccagatttctgaagctgctgataaagctgtaagtgataagcttgaagagatgcaacttaagctcgagaagcttattgtggagaa

SEQ ID NO: 10910 - DNA, 287 bp, Zea mays
cgtttaatgctacaattgccagacactacatattttatggccagcgtgagaaagcagaggcacttctgaaggcaatggagggtgatgatatccagaaaaatcgtgctgcttgcaagactttattacctttacatgcttttctgggcaatagtgatgctgtggaaagaatttggaaggcgtgtgaggataatactcgcgtagctgagtccgtgtctgctatagaggcctttggtaagcttggtgatgttgaaaaggcagagaaggtttttgaggatatgcttgtgcat

SEQ ID NO: 10911 - DNA, 291 bp, Zea mays
cgcgttctccgtctccgtctccgtccgcccggcgtaaagaaaagcctccctcaccacagccgccacgccatggccgaggagaccgacaccaggcctgccttcgcgagctcccgaggccgccccgcgcccgaggacgacgacagggaggagggcgagatcaccgacatcgcctgcgctccttccccgcccgccacgcacccgctcgagcactcctggaccttctggttcgacaacccgcagagcaagtccaagcaggccgcctgggggagctccatccgcccaatacacacc

SEQ ID NO: 10912 - DNA, 258 bp, Zea mays
acaggaagtgcctctcagccggctcgcgtctcttaacaagccagagatcccggtcctcgtactaggttccattgcctcggtcatcagcggagttatcttcccgatcttcgcgatactcctgtcaaatgtgataaaggcgttctatgagcccccacatctcctaaggagggactcacagttctgggcttccatgttcctggtgtttggtgcggtgtacttcctgtcgctccccgtcagttcctaccttttctccatagc

SEQ ID NO: 10913 - DNA, 291 bp, Zea mays
ggggactacgccgctatcaacccagcgcgcgccagcgaggtgaaccgaggcggaggaggaggtggtggagaaccaccacaccgccggtggcctgcgtgagagggtcaccatgggcagccacctcaatgatcgccaggatgaagtaagccacgccaggaccatgagcagcttgtcgggaattggtagtgaattgaatgatgaatctggtaagcccatctggaagaacagggtggagagttggaaggaaaagaagaatgagaagaaagcctcggccaaaaagactgcagctaa

SEQ ID NO: 10914 - DNA, 320 bp, Zea mays
agacctggcgcactcccatcctctcgctcgccaggagaagcagccgccgttgctgctgccgcgtccacagaatggggggtttcgtgacgacccataagaccaatgcgtatttcaaacgtttccaagtgaaattcaagagaaggcgggctggcaagacagactacagggccaggataaggctgattaaccaagacaaaaacaagtacaacacacccaaatacagatttgttgtgcgatttaccaacaaggacatcactgcacaaatcatatctgctagtatagcgggtgatatggttcttgcttctgcctactctcatgag

SEQ ID NO: 10915 - DNA, 323 bp, Zea mays
ggccgccctttttttttttttttttagataataaggagacgacatcaaatatcttccaaaattcaaaccaggacaacaaattgtgctactaatctcggtacagagtgattactaattactgtcgactgatcaaacacaacggttgcactatgctgatggcaacacggagggccacaatttgttttaaaccttgaatccacggctgttcctcctgccacgagccttctcgaacttccttcccttggagcgcacatacggcttggtgtggctgtgcggcactccaggagccttgccaaagtgcctcactgcctcacgggcattct

SEQ ID NO: 10916 - DNA, 323 bp, Zea mays
atctgaagaatcaactgaccctagtaaataccttgatggtactcgggtgtatgtgcaaggatcaatgtgggatggttttgcgaatggtaaaggggacttcactggtgttccatatgagattcagtatccagagagttttttcaaggacagcttctacaaatatgggttcaaccctgaagttgggtctgtaggggttccagttgccgcaacaattagggccacaatgcctccagtaggatggagcattccgattttaaagaaaagaattgatgggtacatcgaagaagtaccaaatccaatatgggactaccacaagtatattc

SEQ ID NO: 10917 - DNA, 322 bp, Zea mays
gcgccgcgacgtccctcgccttcgccgccgaatccgagactccgatctcgggttcaccgcagcgcacagagcagccccgactcccggcccgatccgcgctctcctctccgtcgcttcagtcatggcaggaatggcacctgagggttctcagttcgatgctaagcactatgatactaagatgcaggagctgctgagcaccggtgagactgaggagttcttcacttcatatgatgaagtttttgagagttttgatgatatgggcctccaagagaatcttctgagaggcatttatgcttatggttttgagaagccatctgcaatt

SEQ ID NO: 10918 - DNA, 318 bp, Zea mays
gctagagatgtacacaaaatgcttcatacaatagtccaagagcagggatctttggataactccaaaaccgagagctatgtaaagagcctgcagatggaaggaaggtacctccgtgatgtatggtgacacatcacctcaaataagccatagctctagcgtgtggaagtaaagctggctttgcgtgtatgacatgtctaatgccaacccaatcgtcagctttggaatgaagcgtgccattgatgatatactgaaatgagttgatcagtgcaattctttgacatctaactatttattattatatgagatgggaggaactga

SEQ ID NO: 10919 - DNA, 319 bp, Zea mays
acggtcgcgacctggtacaaattggatctgggaccaatatacaagacaattctcttatacatgtggctaaatctaatctaagtgggaaggtctttccatcaaccattggtaataacgtcacagtaggtcatagtgctgtgttacaaggatgcacggttgaggatgaggcttttgttggcattggggcaaccctattagatggtgttgttgttgaaaagcacggaatggtggctgctggagccctcgtacgacagaatactaggatcccttgtggagaggttgagcacacttcctcaactgtcctttgctttgggttctt

SEQ ID NO: 10920 - DNA, 309 bp, Zea mays
cccggcctcatgtcggggctcaccctcggcctcatgtccctcagcctcgtcgacctcgaggtgctcgccaaggccggcacgcccaaggacaagctcaacgccgccaggatcctcccggtcgtcaagaaccagcacctgctcctctgcacggtcctcatcggcaactcgctcgccatggaggcgctgcccatattcctcgacacgctcgtgccgccctacgtcgccgtcctcatctccgtcacgctcatcctcggcttcggggagatcatgccgcaagccatctgcacgcgctacgggctcagcgtgggg

SEQ ID NO: 10921 - DNA, 317 bp, Zea mays
gagaccgtggacgagacgcgtgggcgggctctcttcgtcgtgcggcaactgcgcgaccgccgacgcccgacggcaggtgcaccaggtcttcgtcagcccccttcgcaacgcctcggttccatccttcgccggatgagcacgcccgtcaacaggacttgatctactactcactagcggtgtataagcgatgagcagaacttgaccatgagcagcataggcacaggttacgatttgtctgtcacgactttctccccagatggtcgtgtcttccaggtcgagtatgccaccaacgccgtcgacaacagctggactgttgt

SEQ ID NO: 10922 - DNA, 317 bp, Zea mays
tggcgacatgtttgagagcattccaccggcagacgccgtcttccttaagtgggttttgcatgactggggcgatgctgattgcatcaagatacttaagaactgtaagaaagctataccttctagggatgcaggaggaaaggtgataatcgttgatatggttgttggaggccagtcgtcaaacaataagcacaaagagactcaggtcttgtttgatctcttcatcatgacgatcaatggcgccgagcgagacgaacatgagtggaaaaagataatttctgaagctgggtttagcgactacaaaatcatacctgttctag

SEQ ID NO: 10923 - DNA, 316 bp, Zea mays
gtcaatggagacagttgattcccttacagttttcaaagcaaaggactacaatgccaccattgagttctattgggctccctttctggccgagtcaaattcggatgatgctgttgtgcaccggatcgcggatcggattgtaagagggacatccattgagaagcatgccaagttttggaagggggctgacatcttggtattcaacacctacctatggtggatgactggacaaaagatgaagattttgcggaactccttcgaagataaaagcaaggatatcatagaaatggaaacggaggaagcctatgagatggtactt

SEQ ID NO: 10924 - DNA, 315 bp, Zea mays
cgtgatttcgccgccggaaagccgagggagagggagcgatatggggttcgtcggagaacgatggagtcgatccgctccatgcagatccgccaagtgctcatgcagatcatcagcctcggtatgattgttacctctgcattaatcatatggaagggtttgatagttttcacggggagcgagtcaccagttgtagtggtgctctcgggtagcatggagcctggatttaaaaggggtgatatcctgtttttgcatatgagcaaagatcctattcgcacaggagaaatagttgttttcaatatcgatggtcgtgagatt

SEQ ID NO: 10925 - DNA, 316 bp, Zea mays
cgaggtcaagcctggttccactgttaagtgtgagcctggatatggctttgtgctgcacctttcccaggctgctcttggggaatcgaagaagagtgataatgccttgatgtatgtcaaaattgatgatcagaaacttgccattggaaccctctctgttgacaagaacccacacatacaatttgatctggttttcgataaagagtttgagctgtcgcacacatcaaaaactaccagcgtcttcttcactggctacaaggttgagcagccattcgaggaagatgaaatggatcttgattctgaagatgaagacgaggag

SEQ ID NO: 10926 - DNA, 320 bp, Zea mays
ccatacaacagtgtcctgtccacccactctctcctcgagcacactgatgttgctgtcctgctcgacaatgaggccatctatgacatctgccgccgctcccttgacattgagcgcccaacctacaccaacctcaacaggcttgtctcccaggtcatctcatccctgacggcttccctgaggttcgatggtgctctgaacgttgatgtgaacgagttccagaccaacctggtgccctacccgaggatccacttcatgctttcgtcctacgctccagtcatttctgctgagaaggcctaccacgagcagctgtccgtggccga

SEQ ID NO: 10927 - DNA, 314 bp, Zea mays
gacaacaatttctcagaatcttaaggactcttccatatgggaactctgttttctttagtgtccgtaagattgatgatccaataggattgctacctggaaaaattattctgggaatcaacaaacgatgggttcactttttccgtccagttcccaaggaatatcttcattctgcagaattaagagacatcatgcaatttggtagcagcaatactgctgttttctttaaaatgcgagttgctggtgtccttcatatctttcaatttgaaacaaagcatggcgaggaaatatgtgtagcacttcaaacacatataaat

SEQ ID NO: 10928 - DNA, 314 bp, Zea mays
tgccggacagagcacatgttcttcgcttcggatgagaggattaaggctgtgaggcagatgattatggctcccacagttgagctgaggcagcaggcgctggatcgccttctgccttaccagaggtctgacttcgaaggcattttccgtgctatggatggactttcagtgactattcgacttctggaccctcccctccacgagttccttccagaagggaacgtcgaggaaatcgtgcgtgaactgtgttctgagacgggagccaaccaggaggatgccctcgcacggatcgaaaagctttcggaagtaaacccgat

SEQ ID NO: 10929 - DNA, 314 bp, Zea mays
ccctttatgtagctcttgcgcagcgtaaagaagacagaaaggcaaagctacaggcacaattttcacaaatgcgtcctgttgcaatggcgccttcagtaggtcctcgcatgcccatgtttccacctggtgtccctggagttggtcagcagctgttctatggtcagccaccaccagccttcatcaaccctcaggctggatttgctttccagcaacctctgatgcctggtatgaggcctggtggtccaatgccgaactttatgatgcctatggttcagcaaggacagcaaccacagcgtcctgctggtagacgtgct

SEQ ID NO: 10930 - DNA, 314 bp, Zea mays
cggacgcgtggcagcgagcaacatcgggatgatggacggagcctacttcgtcgggcgcaacgagatcctcgcgtggatcaacactacgctgcaccacggcctctccaaggtggaggaggcggcgtcaggcgcggttgcgtgccaactgatggacgcggcgcatcccggcgccgtgccgatgcacaaggtcaacttcgacgccaagacggagtacgacatgatccagaactacaaggtcctgcaggatgtgttcaacaagctcaagatcactaagcatatagaggtgaacaagctaatcaaaggaagaccccttg

SEQ ID NO: 10931 - DNA, 311 bp, Zea mays
gtctcctccgcatgcgaaaaccctagcagctccgcagtccctctcctctcgaggtggcggcgctccctcctgttttcctcttcttcttcctgtactatatagcctcccctcgcaaatcgtcactgacgagtgatgtcattccgcttgcttgattgttccagatattcgcagttgaccgggtcctcggagcacgatgaagtttgttgctgcctacttgcttgctgtcctcgctgggaacgccagcccctccgctgaggatttgactgccattctggagtcagttggctgtgaagttgacaatgaaaggatgg

SEQ ID NO: 10932 - DNA, 314 bp, Zea mays
gctatttttaccattcctccagagctggcttatggagcatctggttcacctccaactatcccacccaatgcaaccctgcagtttgatgttgagctgctttcatggaccagtgtcaaagacatttgcaaagatggcggcatattcaagaagatccttaaagagggagagaaatgggagaacccaaaggatcctgatgaagtacttgtgaaatatgaggcccgtctggaagatggtactgttgtatccaagtctgagggggttgagtttactgtgaaagatggctacttttgtcctgccctggccaaagctgtcaa

SEQ ID NO: 10933 - DNA, 314 bp, Zea mays
cggacgcgtggcaacctctgagagtgaggtgtgccatgttctgtttatagctgctgtgcagtatacaccttcctcagaggttgccacaactccaccgcttggatccactgaacttccaatgtgtcctgtttgcattgaaagattggatcaggacatcagtgggattttggcaactacttgtgatcactctttccgttgctcatgtctttcagtgtggaccaattcatcctgtccggtatgccagttttgtcagaagcagtctgaaaattctacatgttctgtttgccaaaccactggaaacctctggatatgtg

SEQ ID NO: 10934 - DNA, 275 bp, Zea mays
cggacgcgtgggttagtggacagttggatgatcatctccagagttgggatgccttgagagctgccttgcccgttggaacagtcagtggtgcaccaaaggtgaaggccatggagttgattgataagttggaagttacgaggcgaggaccatatagtggtggtctaggaggaatatcgtttgatggtgacatgcaaattgcactttctctccgcaccatcgtattctcaacagcgccgagccacaacacgatgtactcatacaaagacgcagatagg

SEQ ID NO: 10935 - DNA, 275 bp, Zea mays
gttctctttgaaggaaacagggttggaccagtatgccattgcgaaatttgctgaaactttgaaatggttccaagaaccctggcagaaaatgctggacttagcgcaatggagataatatcctctctttatgatgagcatgctagtggcaatgcgaaagttggcattgatctggaggaaggcgcctgcaaggacatctcgactttaaaaatatgggacctctatgtcacaaagttttttgccctaaaatactctgccgatgctgcttgcacggtgct

SEQ ID NO: 10936 - DNA, 268 bp, Zea mays
tggacctctagcgcttcgacccatgggagcttccagcaatggcggtgatgggcgggaaggagtggttcttctacgtgccgaaggaccgtaagtaccggaacggagaccgcccaaaccgggtgacggcgtcggggtactggaaggcgacgggcgctgaccggatgatccgaggcgagaacaaccgccccatcgggctgaagaagacgctcgtgttctactccggcaaggcgcccaagggcgtccgcagcagctggatcatgaacgagta

SEQ ID NO: 10937 - DNA, 223 bp, Zea mays
tgcagatcttcgtgaagacacttactggcaagacgatcacccttgaggtggagtcctcggacaccatcgacaatgtcaaggctaagatccaggacaaggaaggcattccaccagaccagcagcggctcatctttgctggcaagcaggtggaggatggccgtacccttgcggattacaacatccagaaggagagcacccttcacttggtgctgcgtctcagggg

SEQ ID NO: 10938 - DNA, 271 bp, Zea mays
tgttcttgaggtttattcagtctcccgagacagacgcgaactagccaagagatacattgatcacggcttcattgtcaggcttctcgatctctttgactcggaggatcctagggagagggagtacttgaagacgatccttcacaggatatacggcaagttcatggtgcaccgtccattcatcaggaaggcgatcaataatatcctctacaggtttatattcgagacagagaagcataatggtatcgcagagctgttagagattttcgggagt

SEQ ID NO: 10939 - DNA, 270 bp, Zea mays
ggacgcgtggcttggggatgcggaaaacgaaactggtgtgcacggtggggcccgcctgcgtcgaggcgctgccggcgctggcgcgcggcgggatggacgtggcgcggatcaacctctgccacggtggccgggagtggcatcgtgccgccatgcgctctgtgcggaggctcaacgaggagggaggattctgcgtgacgcttatggtcgacaccgagggttcccagctcctcgtcgcggaccacggaggcgccacctcagtcaaggccgagg

SEQ ID NO: 10940 - DNA, 277 bp, Zea mays
aggaagggtgttgccatcaactttgtgacccgcgacgacgaacgtatgctgtttgacattcagaagttctacaacgtgttgattgaggagctgcctgccaatgttgctgaccttctgtgatcaatttgaagaaaaaacaaaacaaaaaagggtggtgagggaacctggtaaggattggttttgtcgaaataccgtcggagacggggtgataaggacggtggggggtttctatgttgaagtcgtggtcatggacaatttgtgattttctctcctttat

SEQ ID NO: 10941 - DNA, 272 bp, Zea mays
aggggggtttggggcggccggttacgtgtacaaggaccagatcaacaccttcctcacgcagttctcggggttccttgacggctaaggtccagccggatatgctctgttcgtacttgtatatgcagggttggaggttctcgcaattcccgcaatacctttaaccatgtcagctggtctattatttggtaatgtgactggtacaattattgtttcagtcggtggaacgctagctgcagcggtggccttccttattgctagatactttgccagag

SEQ ID NO: 10942 - DNA, 270 bp, Zea mays
cccacgcttccggccgcttccgcttccgctccgtcgctcgcctcacgcctccgggccacctccaccatggccccgaagaaggagaaggccccgccgccatcgtccaagccggccaagtccggaggcgggaagcagaagaagaagaagtggagcaagggtaagcagaaggagaaggtcaacaacgctgtgctcttcgaccaggccacctacgataagctgctctccgaggtgcccaagtacaagcagatcaccccatccatcctatctgag

SEQ ID NO: 10943 - DNA, 265 bp, Zea mays
caccaagatgaagtcttcattgtcgcctgcagtcctacagattcatcacttgtggcttctggaggcaaagatgataggggattcctgtggaggattggatcagaagagggtgccctggagctgactggacataaggatactgtcggcacagtggctttcagttcagatggaaatttgttggcttgtggaagttttgatgggcaaataaatgtgtggaatacagctacacgaactctcaagggaacccttgagggttccgggtcag

SEQ ID NO: 10944 - DNA, 267 bp, Zea mays
gcagcacataaccccgaaaatattgattacgacatgccgcttcaattcacggaggggacctgcatttattgatgagttaatgcaagtgataccgaattctcagtatgtgaaaagaggaacatatgaactcaagaaaattgtggaatatgcaaataacagggatttcacgtcacttgttgttgtccacacaaatcgaagggaacctgatgctctacttatcatcgggttacctgatggccctactgcacatttcaaactctccaaact

SEQ ID NO: 10945 - DNA, 264 bp, Zea mays
atgatggccaagtgtgacccaaggcatgggaagtacatggcttgctgcttgatgtaccgtggtgatgttgttcccaaggatgtcaatgctgcagtcgcaaccatcaagaccaagagaactgtccagtttgtggactggtgccccaccggattcaagtgtggcatcaactaccagccaccgtctgttgtccctggaggcgacctggcaaaggtccagcgtgccgtgtgtatgatcagcaacaacactgccgttgctgaggtgttc

SEQ ID NO: 10946 - DNA, 265 bp, Zea mays
ggatttctccttggacatttgcaatctctgggttttgatttccctaaaagcatcagtgtgattgctgtatgccccaagggaatgggcccatcagtcagaagactttatgttcagggcaaagagatcaatggtgctggtatcaatgctagctttgctgttcaccaggatgttgatggaagggcaacagatgtagctctagggtggtcagtagctttaggttctcctttcacatttgctactactctagagcaggagtaccggagtg

SEQ ID NO: 10947 - DNA, 257 bp, Zea mays
ggcttctcctccccctcttaccaagtcctcctcgggttagggttccttagggttttgtcgatgtgcgatggcggcggctgatgtggagtaccgttgcttcgtcggctggcttgcctgggccaccagcatcgagtctctggagaatgccttcggctcctactgcgagattctcgactccaaggtcatctccgaccggtagacgtggatgtctcgcggcttcggcatcgctatcttctcctccttaaggtccatgctcg

SEQ ID NO: 10948 - DNA, 261 bp, Zea mays
ccatttaccatttcatggggacatcaacattcagccagtacactgtggtgcatgatgtcagtgttgcaaagatcaacccacaggcacccttagataaagtctgcctgctcggttgtggtgttcctactggtcttggagcggtgtggaatactgcaaaggttgaatctggctcagttgttgctgtttttggccttggaacagttggacttgcagttgctgagggagcaaaagctgctggtgcttctcgagttattggcattg

SEQ ID NO: 10949 - DNA, 261 bp, Zea mays
cccacgcgtccgcaccagccgccgtcatgtcgaagcgaggtaggggaggttcggctgggaacaagttccgcatgtcactgggtctaccggtggcggccacggtgaactgcgcggacaacacgggcgcgaagaacctctacatcatctccgtcaagggaatcaagggccgcctcaaccgcctcccgtccgcctgcgtcggcgacatggtcatggccaccgtcaagaagggaaagcccgacctcaggaagaaagtgatgcctg

SEQ ID NO: 10950 - DNA, 269 bp, Zea mays
gttgagaatgccgatgaatgcatggttcttgacaatgaggcactttacgacatttgcttccgaactctgaagcttacgacgcctagctttggagacctgaaccacttgatcagtgcaacaatgagtggagtgacttgctgcctccgcttccctggacagctgaactcggacctgcgcaagctcgcagtcaacctgattccattccctcgcctgcacttttttatggtcggctttgcgccactcacctcgcgtggctcgcagcagtaccg

SEQ ID NO: 10951 - DNA, 303 bp, Zea mays
ctgggaggctgtttccttggtcgtctcctgctttggtgatcagtggtatcaacacgggatcaaattgtggatatgagatgttccactcttctgccattgctgctgcgagggaggccttagtgtatggggtgccttcaattgcaatctcattgaattgaaggacgaaaccaaagacagtgacttcaaggatgcagctcaggcctgtttaccattgataaatgctgctttggatgacattgagaaaggaactttcctcagaggttgcctattgaatattggagttccaagtgcaccatctgcaaa

SEQ ID NO: 10952 - DNA, 302 bp, Zea mays
accccacacagaagcggcggcggcggagcaaacgcaggcgaaggcgagggtgtgagggaaggagcaccagccatggtgcacgtcaacttctaccgcaactatggtaagacgttcaagaaaccaaggcgtccttatgagaaggagcgtcttgatgctgaactgaagctggttggtgagtatgggctgaggtgcaagcgtgagctttggagggtccagtatgcactgagcaggatccgtaatgctgcaaggcacttgctcacccttgacgagaagaacccccgtcgtatctttgagggtgaggc

SEQ ID NO: 10953 - DNA, 303 bp, Zea mays
gaaccgggagaatcgcttttatgggctccaataccaccccgaggttacacattcagcccaaggaatggaaacactgcgccgctttctctttgatgtttgtgggatcaaagctgattggaagatgcaagatgtgctcgatgaagaaatcaagaccatccaaagcacggttggccctgacgagcatgttatctgtgcattgtcaggtggtgttgattcaacggtcgccgccactctcgttcacaaggcgataggagataggcttcactgtgtttttgttgataatggtctattaaggcacaagga

SEQ ID NO: 10954 - DNA, 302 bp, Zea mays
gccagcaacatcctcctcgacgaccggtgggtgcccaagatcgccgacttcggcatggcccgtctcttcccggaggccggcgatggccactcccgtgttcatacccgtgttgccggcactaacgggtacatggcgcctgagtacctcatgcacggcgacctctccaccaaggccgacgtcttcagcttcggcgtggttgttctcgagatcgtctcaggccgcaagaactccgcctttatcccgcccccggacgccgaggccgacagcctcctggaatacgcatggaggctgtacaagaaagg

SEQ ID NO: 10955 - DNA, 300 bp, Zea mays
cccacgcgtccgaagaagacgagtgtcaagtgaacctgaaacttgcggtgtcactggctggtagcctgagtgtgagtgagtgatcgagctagctgagctccgatcctcgctagctaggataccgccataccacaagtcttcttcacaagtttaggagtgacagcaacaagagatcgatggcctctgccaccgtgctcaagtcctccttccttcccaagaagtccgaatggggcgccaccaggcaggccgccgcgcccaggccgcccatcgtctccatggtcgtccgcgcctccgcctacg

SEQ ID NO: 10956 - DNA, 299 bp, Zea mays
agcctgtctacgaggccaccacagtagacatagagtctttggcttcacctgcttcagttaatctgaaaccacctccgaagatagaacgaaacaaatcatttgatgatgacgatgatttttcaaacaagcttgttgcaaagaaaagtaatataacacctataaatgcaactgtttattcagttgcagatctacagatggcaacagatagctttagcttcgacaaccttgttggagagggtacttttggacgtgtttacagggcacaattcaatgatggaaaggttctggcgatcaagaaa

SEQ ID NO: 10957 - DNA, 300 bp, Zea mays
accccgtcatcgatctcgtttcaaatccatccatcctcgtttcctccgtcccgcagcatctcaaccccatggccaagatcaagatcgggatcaatgggttcggcaggatcggaaggctggtggccagggtggccctgcagagtgacgatgtcgagctcgtcgccgtgaacgaccccttcatcagcaccgactacatgacctacatgttcaagtacgacactgtgcacggacagtggaagcaccatgaagtcaaggtgaaggactccaaaacccttctctttggtgagaaggaggttgctg

SEQ ID NO: 10958 - DNA, 299 bp, Zea mays
atggcgcgcgtctccaatgccaagaagcggcagggcgccaagccgcctccgcgctcagcagcaccgacaccagcaccgccgcaaagaggaacgccgaggacgaccgccccgtgcgcgtctacgccgacggcatcttcgatctcttcaacttcggccaggcccgcgcgctcgagcaggccaagatgctgttccccaacacctatcttctcgtcggatgctgcaacgacgagctaacctaccgctacaagggcaagaccgtcatgacccaggaagagcgatacgaatccctgcggcactgc

SEQ ID NO: 10959 - DNA, 302 bp, Zea mays
ggccggggtgggcgtgatggcgaccaaggtggggatgatgacctacttcgatccggagacggggaagccggtgccggtgaccgtggtcgggttccgggagggcggcaacgtggtgacgcaggtgaagacggccgccacggacgggtacgacgccgtccaggtcgggtaccacggcgtgcgcgaggacaagctcacccgcccggagctgggccacctgggcaaggccggcgccccgccgctgcgccacctgcaggagttccggctcacctccgtcgacgccttcgagcccggccagcccctcg

SEQ ID NO: 10960 - DNA, 294 bp, Zea mays
ctcaaaaagagaaaaagaaaggaagcaagcgtcacaaaatggaggacctcttgtccctgaaattgatgattttgatgaagatgaactaaaagaggctagctctatggttgaagaggagattcaataccttcgagtggccatgggtcatgaaaatgaatcttttgaggacttcgtgaaagcacatgatgcatgccaagacgaccttatgttttttcctaccagcaatagctatggtttagctagtgtggctggaaatgctgataagatttctgctttgcaaaatgagtttgaaac

SEQ ID NO: 10961 - DNA, 298 bp, Zea mays
caagatgaagggtgattactacagataccttgctgagttcaagactggagctgagagaaaggacgccgctgagaacacgatggtggcatacaaggctgcccaggacattgctctggctgagcttgctccaactcaccctattaggcttggactggcacttaacttctcagtgttctactatgagattctgaactcacctgatcgcgcctgcagtcttgcaaagcaggcttttgacgaggccatctcggaactggacaccctgagcgaggagtcctacaaggacagcactttgatcatg

SEQ ID NO: 10962 - DNA, 320 bp, Zea mays
attctcgcagtatcctccccttggtaggtttgctgtccgcgacatgaggcagacagttgctgttggagtcatcaagagtgtggagaagaaggacccgaccggcgccaaggttacaaaggcagctgccaaaaagaaatgatgcaacctgtcgttaatcctgtatctgcttttgcaatacctgacttgtcactccatcccgaagttttgtatgcggttgttactgttattgtgtactgttaagctctgctgcggcgtgccctgttgtttgggtagcgtcaacgtcgagcgccacttgcgggtgtgcctttgtctgctatcag

SEQ ID NO: 10963 - DNA, 107 bp, Zea mays
cccacgcgtccgcgaaggtggcatgcttttgctggaattgaaccgcttgttacgccctggtggttactttgtctggtctgccactcctgtttaccaaaagctcccag

SEQ ID NO: 10964 - DNA, 72 bp, Zea mays
cccacgcgtccgacactcgagaactccatttcgatctcatttgaaatcaacccatcctcggttcctccgtct

SEQ ID NO: 10965 - DNA, 317 bp, Zea mays
gcttccgagatctctccccacctcccggtccgctagcagatagcgggggccagagagatcgagatccggaggcgctagcgccacccatcagcgtctgcggcaatggcgggcacggtgacggtcccggggtcgtcgaaaccctccacgccgctgctcaaggacgagctcgacatcgtgatcccgacgatccgcaacctcgacttcctcgagatgtggaggcccttcttccagccctaccacctcatcatcgtgcaggacggcgacccgaccaagaccatcaaggtccccgagggcttcgactacgagctctacaaccg

SEQ ID NO: 10966 - DNA, 314 bp, Zea mays
cggaccgtgggcgaacaaaccacacaccccacctaccccggccggaccggcaggcagcacagcatggacctcgccctcctagagaaggccctgctgggcctgttcccacgcggctgtggttggccatcgccgtggccaagctgaccggcaagcggtaccgcctcccaccggggcccccgggcgcccccgtggtgggaaactggctgcaggtgggcgacgacctgaaccaccgcaacctgatggccatggcgaacgtgttcggcgacatcttcctgctgcgcatgggcgtgcgcaacctggtggtggtgtcgacc

SEQ ID NO: 10967 - DNA, 312 bp, Zea mays
  unsure (1)..(312): unsure at all n locations
cgcacaaatgaaagttgtccacagccccagacatctgagcatcttgctgctgttgaaatcatgcgccttcaacatatcatcattctgcagaacaagattgatcttaatccagganagtgcagcaatgaatcaacatgaagcaatccaaaaattcatccagggaacaatagctgaaggtgcacctgtggtgcctatatctgcccagctgaaatacaacattgatgttatttgcgaatacattgtgaagaaaatccccatccccgaaaggaactttacctcgcctcccaacatgattgttattcgttcctttga

SEQ ID NO: 10968 - DNA, 313 bp, Zea mays
ctgccgccgccactcccacgcccgcagccatgccgcccaagctcgacccgtcgcaggtggtggaggtgttcgtccgtgtgaccggcggcgaggtcggcgcacgtcttcgctgggcccccaagatcggcccgctcggtctttcccccaagaagatcggagaggacatcgccaaggagacggccaaggactggaagggcctccgcgtcaccgtcaagctcaccgtccagaaccggctagccaaggtctccgtcgtcccctccgccgcggcgctcgtcatcaaggcgctcaaggagccagagagggaccgcaagaa

SEQ ID NO: 10969 - DNA, 308 bp, Zea mays
attaattgtctcaggctctgatgactgttctgttatcttatgggacctgacaagcctagtctttgtgaagcagctaccaaggttcccggcatcagtatccgcgctacatgtgaacagcctcactggtgagattctgactggtgctggtgttctttttgctgtttggagcatcaatggggactgccttgctgtggtgaacacctcccagcttccttctgacctcatcttgtctgtgacaagcgcgacacactcagactggcaggacacaaactggtacgtgacaggccatcaaagcggcgcggttaagg

SEQ ID NO: 10970 - DNA, 308 bp, Zea mays
gaggatgacatccacactgtacgatttaatgacaaagaactttgcagcatcatacagtgaggatgacatccacaagagcgtaaaatacaatgtgtgggcaagcacaaccaatggaaacaagaagctcgatgctgcttatcaagaagctcagtcgaagggttctgcgtgccctatattcttgttttattcagtgaatacaagtgggcagtttgttggtgttgctgaaatgacaggggctgtcgattttgagaaaaccctggggtattggcaacaggacaagtggaatggttccttctctgttaagtggc

SEQ ID NO: 10971 - DNA, 305 bp, Zea mays
gtgcggtacctatgcgctgaccaaggacgagcgggagcgggagcggatgcgccaggtgttcgacgacgcctccgagcgctgccgcaccgcgcccatggagggcgtcgcttctcccccgacgacctcgacaccgccgtcgagtccaccgacatagacacggagatcggctcgctcattaaaggaacagtatttatgactacctcaaatggtgcatatatcgacatccaatccaagtctactgcttttttgcccttagatgaggcatgtcttcttgatatcgataatgttgaagaggctggcattcg

SEQ ID NO: 10972 - DNA, 110 bp, Zea mays
gcccgatggcgacaatcagcttcgggggcacggtcgtcggcgtcaagccggcacccgtggtggcctccttctcggcgcgtggacccaacgggctcgtcccggagattctc

SEQ ID NO: 10973 - DNA, 305 bp, Zea mays
cgttcttcgatctcatgagcatcccagggaagctcagggccggtctaggcgcgcttggcatccgcccgcctcctccaggccgcgaagagtcagtggaggagttcgtgcgccgaacttcgtgctgaggtcttcgagcgcctcattgagcctttctgctcaggtgtctatgctggtgatccttctaagctcagcatgaaggctgcatttgggaaggtttggcggttggaagaaactggaggtagtattattggtggaaccatcaagacaattcaggagaggagcaagaatccaaaaccactgaggga

SEQ ID NO: 10974 - DNA, 297 bp, Zea mays
ctagaactagggatcgcaaatgatgttaaggtggtcattttcaactttggaggacagcctgccggatgggaactgaagaaagagtggttgcctgacggttggctatgtttggtatgtggtgcatctgatactcaagagctccctctaaatttcattaagcttgcaaaggatgcctacacacctgatttgatggcggcatctgactgcatgcttgggaaaatcggatatggcactgtgagtgaggctttggcttacaagctgccatttgtatttgttcgaagagattatttcaatgag

SEQ ID NO: 10975 - DNA, 304 bp, Zea mays
gcccaagcagatctgctaaaagcggaaaaggatcagcttgcaaatctaacatacatttacgggataccagagacccaacttaagttcataattgaagcttggtcacagattataggatgcaggcgagtgctgaaatggacatatgcttatggctactatctggatgataaggtcaagagtgatttttttcagtatctgcaaggtgaggctgagtctggtttggaacgtctgcatcagtgcgctgagaaagacttgcacaattttttgactcctgtgaaatttgagagcactgaaacgacgaccc

SEQ ID NO: 10976 - DNA, 303 bp, Zea mays
accacgcgtccgaccacgcgtccgcggacgcgtgggctcatcaagaaggcggtggcgataaggaagcaccttgagaggaacaggaaggacaaagactctaaattcaggctcattcttgtggagagcaggatccaccgccttgcccgctactacaagcgcacaaagaagcttccacccacctggaagtatgagtcaaccacagcgagcactctggtggcctaagtgtggtatcctccgacagcttgttctagatatgaatttgtgtaatgcttcttatgtctcgatccggttaaatggacaacg

SEQ ID NO: 10977 - DNA, 303 bp, Zea mays
ggccccgccgccgtcgtcgaagccggccaagtccggtggtggcaagcaaaagaagaagaagtggagcaagggaaagctaaaggagaaggtaaacaacgcggtgctgttcgaccaggctacctacgacaagctgctctcggaggtgcccaagtacaagcaaatcaccccttccatcctctccgagcgtctgaggatcaacggctcccttgctcggagggccatcaaggacttgatggcgcgtggcctcattcggatggtctcggtccactcaagccagcagatctacaccagggcaaccaatac

SEQ ID NO: 10978 - DNA, 303 bp, Zea mays
aacctcctctgctctcccccacctcccggtccggcagcagagagcgggggtgcagagagatcgagatccggaggccgcgagtgggagcgccaccaccagcgactgcggcaatggcgggcacggtgacggtcccggggtcgtcgaccccctccaacgccgctgctcaaggacgagctcgacatcgtgatcccgacgatccgcaacctcgacttcctggagatgtggcggcccttcttccagccctaccacctcatcatcgtgcaggacggcgacccgaccaagaccatcaaggtgcccgagggc

SEQ ID NO: 10979 - DNA, 294 bp, Zea mays
cactcctgagcaggctaaactggtgaagggctcggcagactacatcggtatcaacgagtacacatccagctacatgaaggggcagaagctggtccagctggcgcccagtagctactctgccgattggcaggttcaatatgtttttgcacgcaatggcaaaccgattggaccacaggcgaattctaagtggctctacatcgccccgacggggatgtacgggtgcgtgaactacctcaaggagaagtatgggaatccaacgatctacataacggagaacggaatggaccagcctgg

SEQ ID NO: 10980 - DNA, 294 bp, Zea mays
gtcgcctcacgctgggtcgtccgccccaagtccgtcaagtacaacttccggaccagaaccgccgtccccaagctcggggtgatgcttgtggggtggggaggcaacaacgggtccacgctgacggctggggtcattgccaacagggaggggatctcatgggcgaccaaggacaaggtgcagcaagccaactactacggctccctcacccaggcctccaccatcagagtcggcagctataacggggaggagatctatgcgccgttcaagagcctccttcccatggtgaacccagac

SEQ ID NO: 10981 - DNA, 292 bp, Zea mays
gtaattgattgatagatggcgtcggagaagagcaagatcctggtggtcggccgcacggggtacctgggcaggcacgtcgtggcggcgagcgcgcggctgggccaccccacctcggcgctcgtcagggacacggcgccgtccgacccggccaaagcggcgctgctcaagaccttccaggacgccggtgtgacgctcctcaagggcgacctgtacgaccaggctagcctggtgagcgcggtgaagggcgcggacgtggtcatctccgtgctcggatcgatgcagatcgccgacc

SEQ ID NO: 10982 - DNA, 297 bp, Zea mays
cggacgcgtggggacaacccgtcagcccctctcgtttttcatccgccttcgcctccaaccgcgtgcgctccacgcctcctccaggaaagcgagagcttctgcataagaacaacaaatcagaagcgtgatcagctcggtgccaacaaaacctcaacaaccaagtttcatgtctgatctcgacgtccagcttccatctgcctttgatccgtttgctgaggcaaatgctgaggactctggtgctggtcctggaacgaaggattatgtgcatgtgcgcatccagcagcgcaacggcagaaa

SEQ ID NO: 10983 - DNA, 296 bp, Zea mays
gcagaaaaagctcaaccttcctgtccttcccacaaccacaattggttcattccctcagactgtggaactcaggagggtccgtcgtgagtacaaggcaaagaagatctccgaggaggaatacatcagtgccatcaaggaagaaatcagcaaggttgtcaagatccaagaggagcttgacattgatgtgcttgtgcatggagagccagaaagaaatgacatggttgagtacttcggtgagcaattatctggttttgcattcactgccaacggatgggtgcaatcttatggatcacgtt

SEQ ID NO: 10984 - DNA, 295 bp, Zea mays
gctgggtcatccacgtcgagcggatcacccgcgagaaggtgaacggctccaccgtgaacgtgggcatccacccttccaaggtgatggttacaaagctgaagcttgacaaggaccgcatagctctcctcgaccgcacagcccggggccgcgccgccgacaaggctaagggcaagtttactgccgacgacgtcgccgccgctgctggtggcgccgccgccactggcgcgtctctccaggagatcgactaggcgcttcgcggggatctgatggtggtctaccgcctattactccttat

SEQ ID NO: 10985 - DNA, 292 bp, Zea mays
gccgccgccgcgcgccgccgggccgccatcacagactaccgcaagaagctgctcaactgcagggagctagagtcgcgcgtcggcaccgtgagagaaagccttaaaactgcaaagaaggattttaccaagactgaggacgacttaaagtctctgcagagtgtggggcaaataattggagaagtactccgacctcttgataatgaacgctttatcgtgaaggccagcagtggtccccgatacgtggtcggttgccgaagtaaagtggacaaggagaagttgacatctggtactc

SEQ ID NO: 10986 - DNA, 288 bp, Zea mays
gagaatgatttccatgctaaagtgtccgattttggtctggcaaaacaggcgccggaaggtcggacgaactatctttctactcgtgttatgggaactttcgggtatgttgcaccggagtacgccatgacaggacacttgcttgtaaaaagtgatgtatatagctatggagttgttctacttgaactactaactgggaggaggcccgttgatatgtcacagccctctgggcaggaaaacctagtgacttgggcacggccaattctccgagaccaagatagattaggagag

SEQ ID NO: 10987 - DNA, 289 bp, Zea mays
gctgaacggagagttcgacctagcacgcccggccgccgccgcagcccgcaatggcgtcacttttcaaggaccccagcaagctctcggcgtacagggaccgccggttcaaggggacgcaggaggagtatgaggcggcgctgcttgcgtcgacaacgctgtacatcggtaatatgtccttctacaccacggaggagcaggcctacgagctcttctcccgcgccggcgagatcaagaagatcatcatggggctcgacaagaactccaagaccccatgcggtttctgctttgt

SEQ ID NO: 10988 - DNA, 290 bp, Zea mays
ccgagggaggccaactaactgaagcagtccgtcgccgcccatacacagttgttctctttgatgagattgagaaggcacatcctgatgttttcaacatgatgcttcagatattagaagatgggcgattaactgatagcaaggggcgcacagttgacttcaaaaacacactattgatcatgacatctaatgtgggaagcagtgtcattgagaaaggaggccgcaagatcgggtttgaccttgactatgatgagaaagacaccagctataacaggatcaagagcctggtgacg

SEQ ID NO: 10989 - DNA, 227 bp, Zea mays
gcaggaggagtacctcaacgcgccaggcgagacctactccgtcaccctcaccgtgccgggaacctacggcttctactgcgagccgcatcaaggagccggaatggtcggcaagatcaccgtcaactaattaagctagctatcgatcgatatccattcatgtattagctgttgcttcctgctttgtactccgccgatctgtccatctctacatgttttcgtcttcacac

SEQ ID NO: 10990 - DNA, 287 bp, Zea mays
atgaaatcaacgaggatgaggagcttgcggacaaatccagagtgaatttgctatgaagatatcaaattatgcaaacattgttctcttagcgttgaaggtatacgctacaataaaaagtggatcaattgctatagctgcctcaacactggattcactgcttgatctcatggctggtggtatcctttggttcacacatctgtcaatgaagagcatcaatgtctacaagtaccccattggcaaactgagggtacagcctgtaggcattatcatcttcgctgctgtcatgg

SEQ ID NO: 10991 - DNA, 281 bp, Zea mays
ctccattcaagaaggtcattagtttgccttcccgcattgaccctcaccaaacctccgcagttgtcaccctccatgggcagctatttgtgcgtgcaccatttgaacaatcaaaataatgttgatgccacaatgaataatacaagtttaccgtatgggtggggattattttgttgtgacatgagcttagaatttctcaccctgaccgtcgccaaaaactaggtccttgctgattctaatgcttcaagactcttccgtgctagatctcgcctgtatcaagttaa

SEQ ID NO: 10992 - DNA, 282 bp, Zea mays
ggcggcgcgggcggacaaggagcaggcggaggaggagttgtgccaagccacaatgggtatctcgcgtgactcgatgcacaagcgccgagccaccggtggaaagcagaaggcctggaggaagaagcgaaagtatgagcttggtcgccagccagccaacaccaagttgtcaagcaataagacggtgaggagggtccgtgttcggggaggtaatgtgaaatggagggctcttcgccttgatactggtaactactcatggggaagtgaagctgttacccgcaagac

SEQ ID NO: 10993 - DNA, 281 bp, Zea mays
cgatttccaatttcaaatccttcgatcgcgcagccgcccgccctctcgcagctctctccgatggcccgcacgaagcagacggcgaggaagtcaactggcggcaaggcgccgcggaagcagctggccaccaaggcggcgcgcaagtcggctccggccaccggcggcgtgaagaagccgcacaggttccgccccggcaccgtcgctctccgcgagatccgcaagtaccagaagagcacggagctgctcatccggaagctgcccttccagcggctggtgcgtga

SEQ ID NO: 10994 - DNA, 284 bp, Zea mays
gccccaactgcaacaaaacctcctagcaagacatgtaactgctggccaaagtcatgctgcttgtgttgtggatcgaaaagaaaatgttccaaagctaagaaaaaacaagaacaccaaaagaaagtgaaatgcaggaatgcgtccaagcaagtgcatgctctcgaagtagctggaagagaaactgcacctcctgtgcctcgagaaaagtttgagaagagatttgggcagtcagatgcatttttggcttcaacattgcaagataatggtgaaggttgtcgcttcga

SEQ ID NO: 10995 - DNA, 286 bp, Zea mays
atgtccgccgtcccctcgcccccagatctcgcgcacgcccacgatctcgtgcacgcccacgcgtgaacccagccccagttatgcccgcgccgagccctcacccacggatccgaggatctcctacccctctgcgccggatctgctcctcccttcgcccgagattgccgtcatcaatggaagtgccgaggatccgccggatcgcgccctcctcccctctgcgccggatccgtccgctcccccatctgtattggcagtgagggatgcggcgacctgtagtgcgacggcg

SEQ ID NO: 10996 - DNA, 288 bp, Zea mays
gatcacttcggatcccaagaacatcaccggcacgtgggccggcaacgacatctgcggcgagaagagctacgtcggcttctactgtgcaacaccgaccagccgagctaaggagctcacagtgacggcagtagttctcaatggcttcggtctgcgtgcaccgaagctgcaaggcttcgtcgaccagctccccgacgtcgcactcttccatgccgcctccaacaacttcggcaacggcggcatcccccgactcacaggccttgaatactcgtacgatcttagcgtcgacga

SEQ ID NO: 10997 - DNA, 341 bp, Zea mays
gatctctctcttctctctagcggcgaggcgacgcggtgaagacgagcgagcggcgaggatgttgtgggtagacaagtaccggccgaaaaccctagacaaggtcaccgtccacgaccaggttgcgcggaacctcaggaagttcgtgtcggagcaggattgcacgcacctgctgttctatgggccgtcgcggtccgggaagaaaaccctagtcctcgcgctcatcaagcagatgtttggcgccggcgcggagaacgttaagctggacaataagacatggaaaattgatactggaacaaggacacttgagatagaattggcgatgttgtcaagtgctcaccatg

SEQ ID NO: 10998 - DNA, 339 bp, Zea mays
gctttccttcggaactctctcgtgctcacctcatccgtccgacagatccacacgaatcctatgattcagagcagggtgttggcattgatcagacgcctgccatggcggatcagttcgaggattcggcgaacaatgtgatcattgaggaggtgaacaagggcctgaacccaggaatggtggttctgcttgtggttgcaagcttcctgctgatcttctttgtggggaactatgcgctgtatgtgtatgcgcagaagacgctcccgccaaagaagaagaagccggtgtcgaagaagaagctgaagaaggaaaagctgaagcagggggtctctgcgccgggag

SEQ ID NO: 10999 - DNA, 338 bp, Zea mays
ccttcctccaccgccgccaacgtcgcctggcggccgtctgcagctccgcgcctctgctcggaagttggtgaaggtttcttgaagctgagaagatggtgctgaagacagaactctgccgcttcagcggccagaagatttatcctgggaaaggcatccgatttatccgtgctgattctcaggttttcctttttgccaactcaaaatgcaagcgctacttccacaaccgcctgaagcctgcaaagcttacctggacagcaatgtacaggaagcagcacaagaaggatatccatgctgaggctgtcaagaagaggcgcagcgccaccaagaagccatactcg

SEQ ID NO: 11000 - DNA, 335 bp, Zea mays
caacacttcttgagaacggagggaccctgaagagcgcaagtccagcttctcttctgaaggaagctatacatgttatcagctgcggctacgaagacaagaccgactggggaaaagagattggctggatttacggatcgatcacagaggatatcttgactggatttaagatgcactgccatggctggcggtctatttactgcatcccgaagcggcctgcattcaaaggttctgcgcctctgaacctttccgaccgtcttcatcaggtccttcgctgggcccttgggtccgtcgaaattttcttcagcaagcactgcccactttggtacggatacggc

SEQ ID NO: 11001 - DNA, 335 bp, Zea mays
ctcgcatcgtgtgctcagtcagatccccgtcccgcatttcctaaggccaggttagttggcattgaagacgatgactgcttctgcagctgctggtgtgcagatggtggctgcacgcccttgcatttcggcctcgccaggaattcttaccgcacgggtttctaggactgattgcatgctcagtaccactgctacattccccaaaatcagctgctcctggcctctaaggtttaagcgcaatgatgttgttgtaagagcaatatcggaagagtgtggcccgcacgggcttcccattgatctcagacgtaaaagggcattcattgctggagttgctgatg

SEQ ID NO: 11002 - DNA, 340 bp, Zea mays
cccgtcgcatcccatcccactaccacccatctcgtcgtccgccgattcgatccggttcttccaacccaggggcagtgatggcgacgaagaggagcgtgggcaccctcggtcgaggcggatctgaaggggaagaagctgttcgtgcgcgccgacctcaacgtcccgctcgacggatgcccagaagatcaccgacgacacccgcatccgctcctccgtccccaccatcaagttcctcctcgagaagggcgccaaggtcatcctcgccagccacctgggtcgtccaaaaggtgtcaccccaaagtacagcttgaagccttcttgttccacgcttgtctgagct

SEQ ID NO: 11003 - DNA, 324 bp, Zea mays
cggacggtgggcggacgcgtgggcgaacaaggaagtggacgggcacatccccaactaccccaacctgccgccgcagctgatctgccagctccatgatgtcaccaaacatgcggacatggagacaggacgaatgtacgagcagatgacgctgcaaccgctcaatccaccaagagcagaacgacgcgtacctgcctgccgagatgggaatcatgagcaagcagcagacgaattacttctgcaagacgctgaatgcgagcgacaacagcacgcacggcgggttctctgtgccccgtcgtgcggcagagagcgccttcccccagcagg

SEQ ID NO: 11004 - DNA, 331 bp, Zea mays
gtgagcacattgacaattctggtgatggggaaaggcggagtggggaagtcatctactgttaactccatcgtcggggagaggatcgccactgtcagcgctttccagtctgagggtctgagaccgatgatgtggtcgcgcacaagggcagggttcaccttgaacattatcgacactcctgggcttattgaaggtggatacattaatgagcaggctgttgacatcattaagagatttcttctgggcaagactattgatgttctcctgtatgtggatcgtttggatgcgtacagaatggatacacttgatggacaggttataagagccatcacca

SEQ ID NO: 11005 - DNA, 330 bp, Zea mays
gcagaaaaagctcaaccttcctgtccttcccacaaccacaattggttcattccctcagactgtggaactcaggagggtccgtcgtgagtacaaggcaaagaagatctccgaggaggaatacatcagtgccatcaaggaagaaatcagcaaggttgtcaagatccaagaggagcttgacattgatgtgcttgtgcatggagagccagaaagaaatgacatggttgagtacttcggtgagcaattatctggttttgcattcactgccaacggatgggtgcaatcttatggatcacgttgtgtgaagccacccattatctatggcgatgtcag

SEQ ID NO: 11006 - DNA, 327 bp, Zea mays
cggacggtgggcgcgagcagccgcccttttttttttttttttttgcccatgcaaaactctgcaaacaaagagtcccattcccatcgaacccatgaacattacgcgtaccagcaggtgaaactgacatccatgctaagaggatcccggttccaggttaacagacaggaagcagaatacaaccatgacagaggcagagagcacgcaacaaaatgcaaaagaaaaaaggagagagagctccggttccattgcttcctttactcgcaggccaatttggtgtcgaagctactcaagcagatggcgaaacctggaaggccgagagcgggtatc

SEQ ID NO: 11007 - DNA, 330 bp, Zea mays
cactcgcattgcattgcattccttcagttcagtagtgtgctctgacagtgagatggcgagcgtgaaggttttcgggtcacccacctcggcggaggtcgcccgcgtgctcatgtgcctcttcgagaaggaggtggagttccagctgatccgcgtcgacgcctaccgcggcaccaagcgcatgccccagtacctcaagctgcagccgcaaggcgaggcgctcaccttcgaggacgagagcctcaccctctccgactccagggggatcctccgccacatctcccacaagtacgcgaacatgggcaacccgtacctgattggcacgggcgcgct

SEQ ID NO: 11008 - DNA, 330 bp, Zea mays
cggaccgtgggcgagcgtgaaggttttcgggtcacccacctcggcggaggtcgcccgcgtgctcatgtgcctcttcgagaaggaggtggagttccagctgatccgcgtcgacgcctaccgcggcaccaagcgcatgccccagtacctcaagctgcatccgcaaggcgaggcgctcaccttcgaggacgagagcctcaccctctccgactccagggggatcctccgccacatctcccacaagtacgcgaacagtggcaacccgtacctgattggcacgggcgcgctggagcaggcgtccatcgagcagtggctgcagacggaggcgcagag

SEQ ID NO: 11009 - DNA, 329 bp, Zea mays
cccacgcgtccgtccagccgccaccaggtgcagagtctttcgtcatctcttctccggcgaagaacccccagtcgcccaccagatcacttgttaaactttgttgaggggtgatggcggtttctttcgcaaacctcagctccgaggcagggcttaaaaagcttgatgagtaccttctcactcgcagctacatcactggctaccaagcttccaaggatgacttggctgtctacacttcgttttcgtctgctccctcgtccaagtatatcaacgtagcaaggtggtttaatcacattgatgcgctcgtgaggctgagcggaattactgcagag

SEQ ID NO: 11010 - DNA, 322 bp, Zea mays
gccaaaacgtttaatctggttgagatggagagagccacactaggatttgatgagtccagaattattggggagggtggttttgggcgtgtctatgaaggtattcttgaggatggagagcgggttgctatcaaggttttaaaacgggacgatcagcaaggtacccgggagtttttggctgaggttgagatgcttagccgattgcatcacaggaacttggttaagctgataggtatatgcacagaggggcatagccgatgtttggtatatgagcttgttccaaatggcagtgtggaatctcacttgcatggatcagataagggag

SEQ ID NO: 11011 - DNA, 326 bp, Zea mays
gaagcttatagctgagcttatgaggaaccatgacagccctgaagcgttggtgatactcgctagtgcctccgaccttctacttcgtgctaccgatggaatgctcgtcgatggtgaagcttgtactttgccacagcttgagcttctggaagtgaccgctcgggctgtccatcttatcatcgaatggggagattcaggtttatcagttgcagatggtctttcaaatctgctgaagtgccgtctatcaaccaccatccgctgcctttctcacccaagtgcacacgtgcgcgcactcagcatgtctgtcctccgcgacatcctgagcaacg

SEQ ID NO: 11012 - DNA, 326 bp, Zea mays
cccacgcgtccgccgctgtttggccttggtgccaatgtggccctcatcttctctgggcgcacggtgaaatatttctcaaacatgaggaagaatttgggtcctggagtggatggttgggcaatttcgttgaaggccatgatgagcatagtggttgtactgggtcttgtcatcaccggtatctattggggagtgaacaagtttgttattgataactcatctgtgcccgtggttgagcggaaaaagaaggacaagccaaagctcagcatgggtgagagcatgaaggttctgttgtcatctcggtatgtgagggatcttgctacattggt

SEQ ID NO: 11013 - DNA, 329 bp, Zea mays
gcacaattttcacaaatgcgtcctgttgcaatggcgccttcagtaggtcctcgcatgcccatgtttccacctggtgtccctggagttggtcagcagctgttctatggtcagccaccaccagccttcatcaaccctcaggctggatttgctttccagcaacctctgatgcctggtatgaggcctggtggtccaatgccgaactttatgatgcctatggttcagcaaggacagcaaccacagcgtcctgctggtagacgtgctggtggaatgcagcagcccatgccaatgggtggtcagcaacaggtgttccctagaggtggtcgtggcta

SEQ ID NO: 11014 - DNA, 325 bp, Zea mays
aaaaccagtcctttgttcttcttcccccggcacgcccagcgccagtcaccaaccttccactccctccctccgtcgccatggcgcgcaagaagatccgggagtacgactccaagcgcctcctcagggagcacctcaagcgcctcgccggcatcgacctcaccatcctctccgcccagatcacgcaatcaacggacttcgcggagcttgtgagccagcagccatggctgtcaaccatgaagctagtggtgaagcctgatatgctgttcgggaagcgtgggaagagcggcctcgtggctctcaacttggatttcaatcaagtcaagga

SEQ ID NO: 11015 - DNA, 319 bp, Zea mays
acacactcgggtaaagctatctcgagctagctagctgctgtaaccgttgccatggccaaaatggtgttgctctgcgtgctcgtctccttcctcctgatgcccttggcctccctagccctgacgcaggacttctgcgtcgccgacctgacctgcagcgacacgccggcggggtacccgtgcaagtccagcgtcaccgccaacgacttctacttccacggcctggccggccagggcaaaataaacccactcatcaaggccgccgtgaccccggccttcgtgggccagttcccgggcgtcaacgggcttggcatctctgcgg

SEQ ID NO: 11016 - DNA, 322 bp, Zea mays
cgccgctgtcggcgtccgcggcgtcgacaccgtcgtcctcggcgtcgagaagaagtccacccacaagctccaggactccaggtccgtgcgcaagatcgtgagcctggacacccacatcgcgctggcgtgcgcggggctcaaggccgacgcgcgcgtgctcatcaaccgcgctcgcgtggagtgccagagccaccgcctcacagtcgaggaccccgtcaccgtcgagtacatcacgcgctacatcgccggcctgcagcagaagtacacgcagagcggaggggtgcgccccttcggcctctccacgctcatcgtcggcttcgat

SEQ ID NO: 11017 - DNA, 321 bp, Zea mays
cgcttgctttcctcggagcactctgccgaccacatctacaccgcatcaacggtccttccaagtgagctccaatcccctgtctgtagatggagagggtgctcaaggatgacgccgtcgaagagaagggcgagcgcgccaggatggcatcgtttgttggggccatggcaatctcggatttggtgaagaccacattgggcccaaaaggaatggacaagatcctgcaatcaactggcagaggacgtaatgttactgttacaaatgatggggctaccattttgaagtcacttcacattgacaatcctgctgcaaaggtccttgttg

SEQ ID NO: 11018 - DNA, 319 bp, Zea mays
atctgtgaatgggttagctgggccactacatggccttgcaaatcaggaagcgcttctatggctcaagtctataattcaggaaacagggagcgacgttacgacagaccaactcaaagactatgtctggaagacactgaagagtggaaaggttgttcatggatttggtcatggagttctgcgtaggacggacccacggtatctatgccaaagggagtttgccctgaagtatttgccagaggatccgcttttccaactgctgtccaagttatatgaggtcgtgcctccgatcctcactgagctgggaaaggtcaagaaccca

SEQ ID NO: 11019 - DNA, 319 bp, Zea mays
agaccacagccagtcagccacatcactagctatctgtgcagaggcaatggcgtccaaggttgagctggtggtggaggtcaagtccccggctgacaagctgtgggcggcgctgcgtgactcgacggagctgttccccaagatcttccccgagcagtacaagagtatcgagaccgtcgagggcgacggcaagtcggccggcaccgtccgcctcctcaagtacaccgaggcggtgccgatgctgacgttcgccaaggagaagcttgagacggcggacgacgagaacaaggtggtgtcgtacagcgtggtggacggcgagctg

SEQ ID NO: 11020 - DNA, 320 bp, Zea mays
cgggaacctgtggagatttccagcaaggagattgccactcagctaactctcacacagtcctagagaagaaatgcattggactccaaagatgcgtcgtcgccatctcccccgagagctttggaggagacccctgcccgagcgtgacgaaaagggtggcggtccaggcagtatgttctcccgtcgcgtaccttacttctccaagcaatggatttggaaggcggtcgacaaaaaaaaaataaaaaatggtcgaaaccagtgcagggtgagtggaactgtaagtatcgtcgactttgattattagatgtggctggcttgagagg

SEQ ID NO: 11021 - DNA, 295 bp, Zea mays
agcagcctcatccccttgcccacttctacagcccctctgctgcagcaagaaggaaagaagctagcgcttatagcttgtcagccatggccaccgccgccgcgtctagcctcctcaagtcctccttcgcgggctcccggctcccggccgccacgcggaccacaccggcgtccctcgtggtggccaccggcccgcgcggcgccggctcggggcccatctgcgcgtccatgtccatgttcttcttcaacccggcctacgacctgacgtccttccggttcaggcccatcaaggggttcat

SEQ ID NO: 11022 - DNA, 314 bp, Zea mays
acggcgacaagggccacggcggcgtgcacgacggcaccaccgtggtgctgtgggagtgggccaagggagacaaccagagctggaagatcctgccctggggcgacgaagcctacgccgcgggaggcagcagcgccgccaacgcgccccgcttcggcggcggcggcgagcccaccgtccgcatctactgcaaggccgacgaggggttcagcgccacggtccgcaacggcgccgtgtgcctcgcgcccaccaacccgcgcgacgagtaccagcactggatcaaggacatgcgccacagcaacagcgtcaaggacgag

SEQ ID NO: 11023 - DNA, 289 bp, Zea mays
aatacagatgtctcggatgttttatacgacaaggaacaccacgacaaaatggtctgattacatcaatgcctactaaataggcattctgcttgttacgacaccaaactttgtagcatggaataaaagaaaagggtacttaaaaggggagtccagccattcattacgaccacaacggaagttatttgcctcattgcaaaggaagatccttgtgggtgtaaaccactcccttgtcaccattcaccacttgtccactaccgcgcaaaatgcagcgagtagttagaagtccatc

SEQ ID NO: 11024 - DNA, 290 bp, Zea mays
cgtggccatcagtctctcgcccaccgttggtggtgggggatacaatgctgcctccgccaacggagtgatggtgcagaagccgtccaactggaagacaaggatctgtaacaagtgggagatgactggatactgcccatttgggagcaaatgccactttgctcatggttctaccgaacttcacaagtacggagggggcctcgtggacatcgacggcagggacatcttgtccactcctgattcgaagcaagccggtggctctgctaaagctcctctagagtctgctgctgcgt

SEQ ID NO: 11025 - DNA, 308 bp, Zea mays
tctctctcgaaccttcttccaaagcacccgaaccctagtgatctcggaaccctagccgcgcgcggatctcggcttttccccttcctccacgccagccatggacgaggacttcgagatgcctcccgccggcgccgatgagatgatgggcgacgacgagatgggcgacttcggcggcgacgagggcccggtgatgaaggtgggcgaggagaaggaggtcggcaaggaggggctcaagaagaagctgctcaaggagggcgagggctgggagactcccgaggtcggcgacgaggttgaagtgcattacacgg

SEQ ID NO: 11026 - DNA, 307 bp, Zea mays
cggaaagagccgaacgggaacgtggaaggaaggttccagcgatcgcggtcgtggagtaggactgtaggagaaagcgcgatggggaagaagcggcacttatctgcctcgcagccgccgtcgccgccgcggccatcctcctgacagcgtcggccaagaagtccagcgacgtcaccgagcttcagatcggcgtcaagtacaaacctgagtcatgtatcctgcaagcacacaaaggagacaaaattaaggttcattatcgtggggcactcactgacggatcagtttttgattctagctatgacagaggtga

SEQ ID NO: 11027 - DNA, 308 bp, Zea mays
gagctgattgatagtcagatcgatataaagttcataaaaaatgtggacaagggggccatttgcacaattgaacttgatgttcaaaaggttcagcaatttgctaatgccattgaaaactcatattggtttgagcttttcatagatgatctgccattgtggggttttgttggggagactgacaaaaacaatgagaaaaagcactacctttacactcacaagaacattgttgttaaatacaatggtaacaggataattcatgtgaatctaacacaagagtcacctaagcttcttgaagctggcaaaaagtt

SEQ ID NO: 11028 - DNA, 308 bp, Zea mays
gcaatggagctgggagctgaatatgtggatgtcgagcttaaggtggctgacaaatttatgaaacttatttctgggaggaaacctgataactgtaaacttatagtttcatcccacaactatgagaccactccatcgtccgaggaacttgcaaatttggtggctcagattcaagcaacgggggctgatatcgtgaaaatagctacaaccgctactgaaattgttgatgtggcaaaaatgtttcaaatacttgttcactgccaggaaaagcaggtgccaatcattgggctgctgatgaacgacagaggttt

SEQ ID NO: 11029 - DNA, 311 bp, Zea mays
tgcatttctcttcttagaatcaatgctgcaagcaactcatcccagaacgtggagctcatgctgcaggagagcagcacccaccccgacggcgggagctcgtggtgtttgcgtaccgtggacgtggacgccatccaagtgacaatgagcggcgaggacccttcctacatccctctcctcccgctgggcttcgccatcttcccggccgccaacccttcggctgcagcaaccagcgccgcaggctccggcgacggccaaagcagcccagcaggtaacgccgacgagcccgccagcggctgcctcctcaccgtggg

SEQ ID NO: 11030 - DNA, 311 bp, Zea mays
ctcagacccgagaagcgcactgcggccatggacgccaccggcactggagctggagggaaggcgaagaagggagcggccggtcgcaaggccggcgggccgaggaagaagtcggtgacgaggtccgtgaaggccgggctccagttccccgtcggccgcatcgggcgctacctcaagaagggccgctacgcgcacggcgtcggcagcggtgcccccgtctacctcgcggccgtcctggagtacctcgccgctgaggtcctggagctcgccggcaacgctgccaaggacaacaagaagacgcgcatcgtcccgcg

SEQ ID NO: 11031 - DNA, 308 bp, Zea mays
cccacgcgtccgcccacgcgtccgcccacgcgtccgggcgaggcgttgaaacccttaaccctcttccacctcgaagcggcgcgaggagggagagtgtgagtggactcaggaggcggcgggcgaaatgaagcttaacgtcaagaccctcaagggcaccaacttcgagatcgaggcgagccccgatgcgtcggttgctgaggtgaagaggatcatcgaaactactcagggtcagagtacctacccagcagaccagcaaatgctcatataccaagggaaaattctgaaggatgagaccactttggaaagca

SEQ ID NO: 11032 - DNA, 301 bp, Zea mays
cggaccgtgggtcggacgcgtgggttggtgcgaaccttctcaacataccctaggacatacgacctgatacatggcaatgacatcttcagtttatatcagaacaagtgtgatgcagacgacattcttctggagatggataggattttacggccagagggtgcagtcatactgcgggacaatgccgatgtactgaacaaggttagaagtatggtggcaggaatgcggtggaagtccaagttactagatcatgaggatggcccgcacgttcccgagaagattctgatttcagtgaaagaatatt

SEQ ID NO: 11033 - DNA, 302 bp, Zea mays
gaactcattggatttgatgatgttaaagagggtaaatcccgaagtgacatgacagttgaagagaggattgcagctgcagacaggagaaagattgagggcaatgcatatttcaaagaaaagaagcttgaggaggccatgcagcaatatgaaatggcgattgcatacatgggagatgatttcatgtttcaattatttggaaagtacagagacatggccttggctgtgaaaaatccatgccatctcaatatggctgcatgcctgatcaaactaaagagattcgatgaagctattgcgcagtgtag

SEQ ID NO: 11034 - DNA, 301 bp, Zea mays
cccacgcgtccgctccgatcgaatcgatggccgccgagggcgagaagaagatgataaccctcaaaagctccgatggcgaggagttcgaggtggaagaggcggtggcgatggagtcgcagaccatccgccacatgatcgacgatgactgcgccgacaacggtatccctcttcctaacgtcaactccaagatcctatccaaggtaatcgagtactgcaacaagcacgtacatgccgccgccgccgccgccgccgcctcgaaggccggttccgacgacgtgggtgccgcctccgccaacagcac

SEQ ID NO: 11035 - DNA, 303 bp, Zea mays
  unsure (1)..(303): unsure at all n locations
cagtgacgatgaggaggaagacactccaactcctaagaagcctgaggtaggcaagaagagagctgctgaaagttccgtgctgaaaactcctctatctgataagaaagcaaaggttgccacaccgtcatctcagaagacaggtggcaagaagggcgccgccgtccatgtggcaactccacacccagcaaaaggcaagaccattgtaaacaatgacaaatcggtcaagtctccaaaatctgcgccaaaatctggtgtcccttgcanatcgtgcagcaagtcattcatcagtgagacggcacttca

SEQ ID NO: 11036 - DNA, 303 bp, Zea mays
agcctctccgcggcgcgatccagatccaggtttttcagcatgggcctggtgaaggaaggcatcgacatggaggagggaaccttgagatcggcatggagtacaggactgtatctggtgttgctgggcctctggtcatattggataaagtaaagggcccaaagtaccaagaaattgtaaacatccgacttggagatggcaccaatcgccgtggtcaagtcctggaagttgatggcgaaaaagctgttgtgcaggtctttgaaggaacttctggaatagacaacaaatacacaaccgtgcagttta

SEQ ID NO: 11037 - DNA, 303 bp, Zea mays
  unsure (1)..(303): unsure at all n locations
cggaccgtgggtcggatctgagacgagacgagacgatcccccctcccctcaaccggaacttgttttaccccatctcatcccactgactccccccanccacccgcacgctgcctccgncggatctcgtcggactcggatccgcccgaccacgaccaccccgcgtcgccgccgcgcagagcagcagatcagagaagatggccggactcgacaccttcctcttcacctcggagtccgtgaacgagggacaccctgacaagctctgcgaccaggtctcagatgctgttctggacgcttgccttgctg

SEQ ID NO: 11038 - DNA, 302 bp, Zea mays
tgctctgctgctcctcgcgccgccgcagcgacgtaatggcttccgccgcggtgctccggaacgccggctcccggcgcctcttctcctaccctactctccgcgccgctgcgatatatgtaccttctgcgctacccgatgcgcccgctgcggcggcaggccggcccagccgccaccgacggccgggaccctctgggcgaggtctatggccaccttcacgcgcacgaagccccatgtgaacgtcggcaccattgggcacgtcgatcacggcaaaaccactctcactgctgccattaccaaggtcc

SEQ ID NO: 11039 - DNA, 285 bp, Zea mays
cccacgcgtccggatggtagcccacttatactttctgatattactggagctgaagatgcctctggtgacatggatttgaagattgctggtaatgaaagtggcatatctgcatttcagatggacattaaggtagttgggataactctacctgtgatggagaaagcactccttcaagctagggaagggagacaacatattctaaatgaaatgttgaaatcttcacctccaccctcaaaagcactatctccacacgctccattaattcatgttatgaaggtcaaacct

SEQ ID NO: 11040 - DNA, 285 bp, Zea mays
cggaagccatcggtcagctcggtgccagacagtgttaccagggaggatccttccaccaagtacgagctgctccatgagcttgggaaaggttcatatggtgcagtgtacaaagcaagggatctcagaacgcaggagcttgtggctgtcaagatcatctcattaacagaaggggaagaaggctatgaagacatacggggagaaattgagatgctgcagcaatgcagccatccaaatgttgtccgctactttggaagctaccaaggagaggagtacctatggataatt

SEQ ID NO: 11041 - DNA, 279 bp, Zea mays
agatcgtcctggttggtggaagcaccaggattcccaaggtccagcagctcctgcgggactacttcgacggcaaggagcccaacaagggtgtcaacctgatgaggctgttgcctttggtgccgctgtgcagggaagcatcttgagcggcgagggtggtgacgagaccaaagatatcctcctccttgatgtggctcccctcaccctgggtatcgagaccgtcggtggagtcatgaccaagttgatcccgaggaacactgtcatcccgaccaagaagtcgca

SEQ ID NO: 11042 - DNA, 282 bp, Zea mays
cgtctttttccgttcacaggcggccgtcggtgttcggtgcccctctcctgccaaacgatcccgagcagtgccaccggtgcggtcgtgcagagggagcggccggggtacagtacaggatgcgggggttgacacgcgctgcgaaacgcgcaggggagatggcgttcaacgccggtggtggcgccgtcaactggttcccgggccacatggccgcggcctcccgcgccatccgcgatcgtctcaagctcgccgacctcgtcatcgaggtccgcgacgcccgcattc

SEQ ID NO: 11043 - DNA, 277 bp, Zea mays
cggacggtgggttttctcgcacatgaaaccaaacagtattcttggtttgtcacatggatttctccttggacatttgcaatctctgggttttgatttccctaaaagcatcagtgtgattgctgtatgccccaagggaatgggcccatcagtcagaagactttatgttcagggcaaagagatcaatggtgctggtatcaatgctagctttgctgttcaccaggatgttgatggaagggcaacagatgtagctctagggtggtcagtagctttaggttct

SEQ ID NO: 11044 - DNA, 277 bp, Zea mays
atttttgttggggatttggctgcagatgttacagattacttgttacaagagacattcagggttcattatccctctgtcaagggtgcaaaagttgtgactgataaattgacaatgcgcacaaagggttatggatttgtgaaatttggtgatcctacagagcaagctcgtgcaatgactgaaatgaatggaatgccttgttcttccaggcctatgcgtattggtcctgcagcaagtaggaaaaatacaggaggtgttgttcaagagagagtaccaaatt

SEQ ID NO: 11045 - DNA, 279 bp, Zea mays
tgcctgacccgtctggaccacaacagggctcttggccagatttctgagagacttaatgtccaagttagtgatgtgaagaatgttatcatctggggtaaccactcgtcctctcagtaccctgatgttaaccatgccacagtgaagacttccactggggagaagcctgttcgtgagcttgtctctgatgacgagtggcttaatggtgaattcatcacaactgtccaacagcgtggtgctgcaatcattaaagcgagaaagttctccagtgctctctcggct

SEQ ID NO: 11046 - DNA, 277 bp, Zea mays
ggggcagctgccgccgcaagagctgcttgacgatctctgcagccggttccttctgaatgtgcccaaggaggagctggagtcgttcgagcggatcctgttcctgctggagcaggcgcactggttctatgaggacaactccgttgagcacaaccccaacctcaagtccctctccttcaaggacttcacttccctcatgttcaagagctgcactgctctccggccctacatcgcgcacctggatgatatctacaaggacttcaacaactacaagtttcgt

SEQ ID NO: 11047 - DNA, 276 bp, Zea mays
cagagttgaggaggctgtttattccactcatcgagccatcgtccatcataatggccatacaggtgactttcttgaagtgtggaggtgtggtgttaggaacagctatccaccacgccgccacagacgtttcaagcgcgttccacttttttcagacatggtcggcgttctgcaagcatggtgacagtgctgccgtggagctcccgtgccacgaccgcaccctactccgcgcacggtccccgcccacagtccaccccgacgcgctctcgacattgcagc

SEQ ID NO: 11048 - DNA, 275 bp, Zea mays
cagggagcgtgccgtgggagtgggaggttgcctcaggtgcggacagtcgccggcggcgaccatcggtgtctgagatgaaggagagaggcggctctagggcggcagtggacgagcgctacgcgcagtggaagtcgctcatccccgttctctacgactggtttgccaaccacaacctcgtttggccatccctctcctgccggtgggggccacagtttgagaaagctacctacaagaatcgtcaacgcctttacctatctgaacagaccgatgggagt

SEQ ID NO: 11049 - DNA, 276 bp, Zea mays
cccacgcgtccggagagataattttaatgaagatatatacaaggattttaagaaactcgcactggaggatgctgcagcgagctacagatatggtctcgagtgtctattcagattttatagttatggtttggagaaaaaattccaacccaatgtatatgaagatttcgagaagcttactttcgaattctaccgtaatggtgatctttatggactcgaaaaatactgggcatttcaccattaccgaaatccagatagcggtcctgtagataaacttcc

SEQ ID NO: 11050 - DNA, 275 bp, Zea mays
ctagttctagatcgcgatctagaactaggctgaggccgtcaccgggcaggtcacggaggtcaacaaggacaccttctggcccatcgtcgaggccgccggcgacaaggtcgtcgtcctcgacatgtacaccgaatgttgcgggccttgcaaagtgatggctcccaagttccaggagatgtccgagaagaacctggacgtcgtgttcctcaagctggactgcaaccaggacaacaagcctctcgcgaaggagctgggcataaaggttgtgccgacgt

SEQ ID NO: 11051 - DNA, 274 bp, Zea mays
acacactcgggtaaagctatctcgagttagctagctgctgtaagccgttgccatggccaaaatggtgttgctctgcgtgctcgtctccttcctcctgatgcccttggcctccctagccctgacgcaggacttctgcgtcgccgacctgacctgcagcgacacgccggcggggtacccgtgcaagtccagcgtcaccgccaacgacttctacttccacggcctggtcggccagggcaaaataaacccactcatcaaggccgccgtgaccccggcc

SEQ ID NO: 11052 - DNA, 273 bp, Zea mays
cccacgcgtccgtgaaaaggttctcgtacagccggtatatgaagaataagcttgatacatttgtgaactttccgatccatgacctcaatatgagcaagtatgtgaagcctacatcaagaggtgaccagcaccccgtgtatgaactctatgcagtgataaatcattatgggggtctcggtggtggacactactctgcatatgcgaagctagttgaagaggacaattggtaccattttgatgacagtcatgtttcctctgttaatgaggatgaga

SEQ ID NO: 11053 - DNA, 273 bp, Zea mays
gcagccgcgacccatcgcgacctgacccgaccctcccgaggccgccagccttatcctctccgcatccgcatcacgccgtcccccgcgacccatcgcaagcgcgagtagaagacatggcctcgacgttcggtgccacttctacagttggccttatggctgctccaacggggaagaatgtgcgccttcagaggagggctaacttcagagtaaaagcggctaaggagctgtacttcaacaaggatgggtcagctatcaagaagctccagactggag

SEQ ID NO: 11054 - DNA, 271 bp, Zea mays
cagaagcttggagcaaatgccatccttgcggtttcacttgctgtgtgcaaagctggagctatggtgaagaagattcctctttaccagcacatcgcaaatcttgctgggaacaaaactctggtgctccctgtacctgcctttaatgtgattaatggagggtcacatgctggaaacaagcttgccatgcaggagttcatgatcctcccaactggtgcctcctcgttcaaggaggccatgaagatgggagttgaggtgtaccacaacctgaaga

SEQ ID NO: 11055 - DNA, 272 bp, Zea mays
cggacgcgtgggagccgtccgagctctcgccgtgcaccgccaggttcctgggcgacaacatcgggaggtacatggactcctcggcggtgaaggtcgtccagggcggccccgacgtcggagtgcagctcatggagcaccgctgggacaaggtcctcttcaccgggagcccccgcatcgcgcgcgccgtgatggccgcggcgtccaggcacctgacgcccgtcgcgctggagctgggcggcaagtgcccctgcatcttcgacgccatgggcagc

SEQ ID NO: 11056 - DNA, 270 bp, Zea mays
cccacgcgtccgctcgctctgggccgccgccgccgccctaagccacgtgctgaggctttcgttggtctcttcgccggcgacgagcacccagcagttctgtagaaatggctgatggtgaggacatccagcctcttgtctgcgacaatggcactggaatggtcaaggctggttttgctggcgatgatgcaccaagggcggttttccctagcattgttggccgtcctcgccacactggtgtcatggtagggatgggacagaaggacgcatatg

SEQ ID NO: 11057 - DNA, 270 bp, Zea mays
cccacgcgtccgacgagagactggtcggtctgcgactgtctctgaccgctgaccgcactgtcctctgcttctgtctttctctctctcccctgtcccccttccagatttcctccattcgcggtttgcctctctgccttcctgcctgcttccctccctccgtcagatccccgctcgggttgccatggcggaccagctcaccgacgaacagatcgccgagttcaaggaggccttcagcctcttcgacaaggacggtcgaggctgcatcaccac

SEQ ID NO: 11058 - DNA, 289 bp, Zea mays
ctgttgagaagtgcctgagggatgccaagatggacaagagcaccgtccatgacgttgtacttgttggtggctccactaggatccccagggtgcagcaactgctccaggacttcttcaacggcaaggagctgtgcaagaacatcaaccccgatgaggctgtcgcctatggtgctgctgtccaggctgccatcctgagcggtgagggcaatgagaaggtgcaggacctgcttctgctggacgtcacccctctgtccctgggtctggagactgctggaggagttatgacagt

SEQ ID NO: 11059 - DNA, 146 bp, Zea mays
ctttgtttcaaacaataagattcatgtgctggtatgtaccagcacattggcgtggggtgtcaatcttccagctcacctggtcataatcaagggcactgaatactatgatgggaaaacaagaagatacatagattatgatatcacag

SEQ ID NO: 11060 - DNA, 143 bp, Zea mays
cttctggtgtcttgaacattgtgacaggattaggtcctgatgctggcgctcctttgtcagcacacccagatgttgacaaggtcgcttttactgggagttttgaaactggcaagaaaattatggcatcggcagctcctatggtc

SEQ ID NO: 11061 - DNA, 287 bp, Zea mays
  unsure (1)..(287): unsure at all n locations
cagttggcctgaaagcgaacagatgaatctgaactccatagaaggctcaagctcagttgaatggatgcaagggtcattgatagctcaaaaccagcagccattggcctggtatagggcttacttcgagactcncagcggggacgagccattgggctttggatatgggtagcatgggcaagggccaaatctggataaatgggcaaagcattggacgctactggacagcatatgcagatggggactgcaaagaatgcagttacacgggaactttccgggcacccaagtgt

SEQ ID NO: 11062 - DNA, 117 bp, Zea mays
ccgtccgccacggccgtcgtgctggccccggtcaaccccaaggacgaccaccagcactggtacaaggacatgcgcttcagcacccgggtcaaggacgaggaaggcatgccggcgttc

SEQ ID NO: 11063 - DNA, 284 bp, Zea mays
acctcctgttcttcacggtggccaacgcctgcggcaactgcccgaccccaacgcccccggtcgagccaccgccgccgcctcctgctgctaccccacccccttcgtccagcggcaagtgcccgctgaacgcgctcaagttcggcgtgtgcgccgatgtgctcggcctcgtcaaaggcgaggttggcaaggtgcctgccgagccatgctgtaccctcatcaaaggccttgcggacttcgaggccgccgtctgcctctgcacggccatcaaggccaacgtgctcggc

SEQ ID NO: 11064 - DNA, 283 bp, Zea mays
ggccaagtgtgacccaaggcacggaaagtacatggcttgctgcttgatgtaccgcggtgatgttgttcctaaggatgtcaacgctgcagttgcaaccatcaagaccaagagaactgtccagtttgtggactggtgccccactggattcaagtgtggcatcaactatcagccaccctctgttgtccctggaggtgacctggcaaaggtccagcgtgccgtgtgcatgatcagcaacaacaccgccgttgccgaggtgttctcacgcatcgaccacaagtttgac

SEQ ID NO: 11065 - DNA, 282 bp, Zea mays
caaaaacggattcttgaaaaagttgacactaaagttcaaggacccggagaacaccacgctgatcatccttgacaaatttgatgggaactccgaactagctgctgagcttgtgacagccaatggttacaaagctgcttttgcagtgaaggatggtgcagaaggaagccgaggatggaagagcagtaaccttccctggaaggctccgccaaaaggattcagctttgacttgggcgaattatttggggatggttcagatggtttgcctgtgacaattggtctcgc

SEQ ID NO: 11066 - DNA, 285 bp, Zea mays
gagtgaagccgccgccgctgcagtgtccatagccaccgcagagactgagatggggggttttgtcaagacccacaagagcaatgcatacttcaagcgtttccaggtgaagttcaagagaaggcgcgctggcaagacagactacagggccaggataaaggttgattaaccaagacaaaaacaagtacaatacacccaaatacagatttgttgtgcgatttaccaacaaggacatcacagcacaaatcatatctgctagtatagcaggtgatatggttcttgcttctg

SEQ ID NO: 11067 - DNA, 285 bp, Zea mays
ccctagccctcgcgccgccgccgccgtgcccagcgctcgagctcctcgcctgccgcgagctcgcgccgcaacgccaccatgaagttcaacatcgcgaacccgtctaccgggtgccagaagaagctggaaatcgatgacgaccagaaactacgtggccttttatgaccgaaggatctcccaggaggtcagtggtgatgctctgggtgaggagtttaagggttatgtcttcaagatcatgggtggatgtgacaaacaaggcttcccaatgaagcaaggagttctgac

SEQ ID NO: 11068 - DNA, 320 bp, Zea mays
cggacgcgtggggcctcgtgtggccgtcgtctcccgttcggaacgccaagccccccctccggcgaaatggcccccaagcgaggtggcagggcgccggtgcacgccaagaagaagacggataaagtgacgaaccctctattcgagaagaggccgaagcagttcggcatcggcggcgcgttgccgcccaagaaggacctgcaccggttcgtcaagtggcccaaggtcgtgcgtatccagcggcacgccgcatcctcaagcagcgcctcaatgtaccaccggcgctcaaccagttcacccgcaccctcgacaagaacctcgct

SEQ ID NO: 11069 - DNA, 321 bp, Zea mays
ggttgttctacctgaagggtcaaaggatatcgaagtttcagctccctttccaacacagcagcagcaagaggttaagtattcacaccttgacattgtcggaagaccagttgttgtcttggagaaacctgatgttattccagagcataatttgtatttccaggtttactacagattcaacaacatatccttgctcagagagccgttgatgctgattactggtttcttcctcctgtttgtggcctgtattgtttacatgcgtactgatatgtcaatatccaagagctctccttcctacttggccaagctgcaatgggatgaggt

SEQ ID NO: 11070 - DNA, 340 bp, Zea mays
gcaagacaagtttgtcgtcaatcccttccacaattaagagcaactcaagtcgttcaacgctgactcttccatcaatgagagatcgaaatgagcttcctactcctcggacagaaggtgaaatcttgtcatcttctaatttgaaggcattcacgttcaatgatctaaaaaatgcaaccaagaacttccgaccggacagccttcttggggaaggagggtttgggcatgtttacaaaggttggattgatgagcacacgcttgctccttcaagacctgggagtggtatggttgttgctgtgaagaagcttaaaccggaaggttttcaaggacacaaggaatggct

SEQ ID NO: 11071 - DNA, 324 bp, Zea mays
ctcgcgtctcccttcccagatccatcgactcgctcggttcgcccctcccgtcgtccccgttcgaaggtgcggcagccggcaggcgagcgatttcattcgacatgaatcccgagtacgactaccttttcaaacttctgcttattggtgattctggtgttgggaaatcatgcttgcttctcagatttgcagacgattcttatttggacagctatatcagcacaattggggttgatttcaaaattcgcacagtggagcaagatgggaagaccataaaacttcaaatttgggatactgctgggcaagagcgcttcaggacaatcacta

SEQ ID NO: 11072 - DNA, 314 bp, Zea mays
gctagggaggaaggggccgcagcgctctggaagggcatcgtcccgggcctccaccgacagtgcatctacggggggctccgcattggcctctacgagcctgtcaaatccttctacgtcggcaaagaccacgttggggatgtccctttgtccaagaagatagccgccggcttcacaactggtgccatcgctatcagcatcgccaaccctactgaccttgtcaaggtcaggctccaggccgagggcaagcttgcgcctggtgtgccacgccgctacactggcgcaatggatgcttattccaagattgctagacagga

SEQ ID NO: 11073 - DNA, 324 bp, Zea mays
gtcaggtggaggctatcgagacacatagcggctttgatttcccattcaccccgacaaagtatattccattctatggaggagcagaataccatgactatcatcattatgtaggaggccagagccaaagcaattttgcttctgttttcacttactgtgattacttatatggcactgacaaaggttacagattccacaaaacatacctagcaaagctgaaggatctggggcataatgatggccagaaaggagacggcagcggacccagctatgtgaaactggattagattgcaagatatagtgcatcttgagtgtttctatggtcat

SEQ ID NO: 11074 - DNA, 320 bp, Zea mays
cccacgcgtccgcggacgcgtgggcaagaccaacatggtcatggtctttggtgagatcaccaccaaggccaatgtcgactacgagaagattgtcagggagacatgccgcaacattggtttcgtgtcgaacgatgtcgggcttgacgctgaccactgcaaggtgcttgtgaacattgagcagcagtcccctgatattgctcagggtgtgcacggccacttcaccaagcgccccgaggagattggagctggtgaccaggggcacatgtttgggtatgcgactgacgagacccctgagctgatgcccctcagccatgtccttg

SEQ ID NO: 11075 - DNA, 322 bp, Zea mays
catccatactttgagaaatgtattggagcactagatggcacacatataccagcatgggttcctatttatatgcaagataggttcaggggtagaaaacactacccaacacagaatgtattagctgcggtggactttgatcttaggtttacgtatgtgttggctggatgggaaggatcagctcatgattcctttgtgctccaagacgcattgtcacgcccttcgggcttaaaaattcttgaaggtcattactttctagctgatgctggttatgcagcaagacctggtatactacccccgtaccgtggtgttcggtaccatctta

SEQ ID NO: 11076 - DNA, 329 bp, Zea mays
cgacgtcgacttcggcttcggacggcccgagcgcgtccgcagcggcgggaacaacaagttcgacggcatggtgtacctgtaccccggccgcggcggtgacggcggcatcgatgtcgagctggcgctgcagccggagcccatgcagaggctggagaaagacgacgacttcttcctgcgccaggcggcagcctaagcccgagtcgtcgatcgtcgtgtcagtgtccactgtccacccatccagttcgttgatcgtgctttattttagtagtaagtattgtgtacgttcctgcttgctatattattattatactagtggtttgctttgttcc

SEQ ID NO: 11077 - DNA, 322 bp, Zea mays
cgccgtcaccgccccttccttcgccgcaccagcgccacccgcgccgtggtcagaaggaggtccttcaccgtgcgcgcctctctccgcaaggccaccggcaccgccgccgtggcaatggctgccagcgccctgcttgccggcggtgccatggcccaggaggtgctgctgggcgcaggcgacggcgggctcgtcttcgagcccagccagttcaccgtcaaggccggcgacaccatcacattcaagaacaacgccggcttcccgcacaacgtcgtcttcgacgaagacgaggtgccgagcggcgtcgacgccaccaagatctcgc

SEQ ID NO: 11078 - DNA, 324 bp, Zea mays
ccatcctcctctccgccgcccgccgcagcagcacccaccgggcaagatgaagacgatcctggcgtcggagacgatggacatcccggagggcgtcatggtcacggtggccgccaagctggtcacggtggagggcccccgcggcaagctcacccgcaacttcaagcacctcaacctcgacttccagctgcaggaggccggccgcaagctcaaggtggacgcctggttcggcacccgccgcaccatggccgccatccgcaccgccatctcccacgtccagaacctcatcaagggggtcaccaagggctaccgctacaagatgaggtt

SEQ ID NO: 11079 - DNA, 316 bp, Zea mays
cccacgcgtccgaaagcccagttacgtgaaggtctggtcagtgaagcaattgagtccttcattcgtgcagatgatgctgcacacttccttgatgtcatccgtgcagccgaggaagctaatgtgtacaatgatttagtgaagtaccttctgatggtaaggcaaaaggcacgggaacccaaagtcgatggagaactcatttttgcatatgctaagattgacaggctcagtgatattgaggaattcattcttatgccaaacgttgccaaccttcaaaatgttggtgaccgtctgtatgacgaagaactatatgaagctg

SEQ ID NO: 11080 - DNA, 318 bp, Zea mays
cgctccgatcgacctgctccctccccaccaccgagcccatggcggaccagctcaccgacgaccagatcgccgagttcaaggaggccttcagcctcttcgacaaggacggggatggttgcatcacgaccaaggagctgggcactgtcatgcgctcgctggggcaaaatcctacagaggctgagctccaggacatgatcaacgaggtcgatgctgatggcaacggcaccatcgatttcccagagtttctcaaccttatggctcgcaagatgaaggacaccgactctgaggaagagctcaaggaggccttccgtgtgtttg

SEQ ID NO: 11081 - DNA, 317 bp, Zea mays
cggacgcgtgggtgaatctatgcagcttctacgtcgacgacacgccgatccgggaggtgatccggcacccggacatgggcggcgacttcccggcgaacgatggcggtgtacgccaccatctgggacggctccgcgtgggccacggacgggggcaagtacaaggtcaactacaagtacgcgccgttcgcgtccgacttctcggagctggccgtcgtcggctcccgcgccgacccggtgctccgcgtcccgcgccgggacgacggcgcggacctcctcgcgctcatgacggccgactacgccgtcgtgacgccgcggaa

SEQ ID NO: 11082 - DNA, 315 bp, Zea mays
ggcgacggcatccactacgctgctcctctcccttgccttcctcgccttcgcctgggcggcgtcgcgtcgccggatgcggaggcgatctcccggttccaggagtacctccgcatcgacacggcgcacggcgccagattacgccgcggccgtggccttcctccggaaacaggccgccgaggctggactcgaggcgcgcacgcttgagctcgtcgccgggaagcccctgctgctgctgcggtggcccggtcggcggccgtcgctcccctccatactcctcaactcccacactgacgtggtgccgtcggagccgaacaa

SEQ ID NO: 11083 - DNA, 314 bp, Zea mays
tctccaaggatggccagacccgtgaacatgctctccttgcgttcacccttggagtgaagcagatgatttgctgctgcaacaagatggatgcaaccactccgaaatactccaaggcacgttatgatgagattgtgaaggaagtctcatcctacctcaagaaagttgggtacaaccctgataagattgccttcgttcccatttctggttttgagggcgacaacatgattgagaggtccaccaaccttgattggtacaaaggcccaaccctgcttgaggctcttgaccagatcaccgagcccaagaggccttcggac

SEQ ID NO: 11084 - DNA, 319 bp, Zea mays
cccacgcgtccgcacaagcacaagcgcactctagcaatggcttctgaggttgtccgccctagcgacgccgagctactaaaggcacaagccgacatatggcggctcagcctctcctacctcacgcccctgtcactgaggtgcgccgtggagcttggcatccccacggcgatctaccgccatggcggggctgcctcagccgctgagctggtcacggcgctgtctctcccctccactaagctgccgttcctccgccgcctgctgcggctcctcgccgcgtcgggcgtgttcaccgtcgacaagcagagcacggaggaggagc

SEQ ID NO: 11085 - DNA, 316 bp, Zea mays
ctgacgggcgagttcccgggcgactacggctgggacaccgcggggctgtcggcggacacggagacgttcgccaagaaccgggagctggaggtcatccactcccgctgggccatgctgggcgcgttgggctgcgtgttcccggagctgctcgcccgcaacggcgtcaagttcggcgaggccgtgtggttcaaggccgggtcgcagatcttcagcgagggtgggctggactacctcggcaacccgagcctgatccacgcgcagagcatcctcgccatctgggcctgccaggtcgtgctcatggggcgcatcgaagggt

SEQ ID NO: 11086 - DNA, 311 bp, Zea mays
cgccgtctgccttctgcgcctccatttcggcctctgtcccttgcaagttcaatctcacctccaaccatgggtaaagagaagtcccacatcaacattgtggttattggccatgtcgactctggcaagtcgaccaccacaggacaccttatctacaagcttggaggcattgacaagcgtgtgatcgagaggttcgagaaggaggctgctgaaatgaacaagcggtccttcaagtacgcgtgggtgctcgacaagctcaaggctgagcgtgagagaggtatcaccattgatatcgctctgtggaagtttgagac

SEQ ID NO: 11087 - DNA, 308 bp, Zea mays
ttctttgaggtaaagaagaagtttgagacagctctcggcgtccttaaaaaggaaaagatcactattgatccagatgacccagcggcagtttctcaatatgctcaagtcatgaagactgtaagggaaaaggcggatcttctttctgattctcaaaggattaaatataccattgagaccttcaccaagggcatccctgatgcacggacttacttgaatactcttcaacagctcagaataaagagtggtcttatagatcatattggaatcgaacctttgatgatggaagctcttgagaagattgagaagga

SEQ ID NO: 11088 - DNA, 310 bp, Zea mays
cccgctaagatttacatttgtacgtgatattcttgcgtatttctatggtcatcttccaatcaaactaattggtaggatcctcaacctgctgggtgttagcactaagacccccttttcagaatcttttgctaaatatttagtgtcatcaaattcttcaatatgtccaccaccagaatactttgccaacctgttgctaaacctcgttaataatgttatacctcctttaagtagcaaatcgaaatcaaacccagcagacacaacacgctcgactttcaacaaacatcatgcatcttcacaacctggtggagtt

SEQ ID NO: 11089 - DNA, 312 bp, Zea mays
cccgcccgccatcgccaactgctcgcgcctcgccggcttcgacttctcctacaaccgcctctccggcgagttcccggaccgggcctgcgcgccgccggagatgagctacatctccgtccgcggcaacgcgctctccggcgacatagccgccaagctcgcctcctgcggcagcattgacctcttcgacgtcgggagcaacagcttcaccggagctgcgccctttgcgctccttgcctcggtaaacatcacctacttcaatgtctcctccaacgcctttgacggtgaaatccccagcattgcgactatcggcac

SEQ ID NO: 11090 - DNA, 304 bp, Zea mays
ctcggagtctgtgaacgagggacaccctgacaagctctgtgaccaggtctcagatgccgttcttgacgcttgccttgctgaggaccctgacagcaaggttgcttgtgagacctgcaccaagaccaacatggtcatggtctttggtgagatcaccaccaaggccaatgttgactacgagaagattgtcagggagacctgccgcaacattggttttgtgtcaaacgatgttgggcttgacgccgaccactgcacagtgctcgtgaacacttgagagcagtcccctgatattgctcagggtgtgcat

SEQ ID NO: 11091 - DNA, 320 bp, Zea mays
agaaatgggttcaagaacttcaagcacaaggaaactcgaatacaatagtggctcttgccgggaacaaggctgatttgttagatacgaggcaggtgtcagcagatgaagcaaaggcgtatgctcaagagaatggtctcttcttcatggaaacttctgccaaaacagctaccaatgtgaacgacgtgttctatgagattgcgaagaaactgcttcaagggcagcaggttcagaacccacaaggcgggatggttctcaaccagagaccacctgagaggatggtgagctcttcctcctgctgtgcgtgaagcgcaagatggaag

SEQ ID NO: 11092 - DNA, 239 bp, Zea mays
ggaacgcgaaatcgaagtcctgccccttctgtcgcgcctgcctggaagaggtgaagccgggcagcctgtggatatacaccgacgacagcgacgtggtggacatggataccttgactagggagaacatcaggcggctgttcatgtacataaataagctgccacttgtagtcctacatgtagttgaccttgacgtttacaagtaccgcatcaagtaaaatgcaactgatccttccttggtg

SEQ ID NO: 11093 - DNA, 310 bp, Zea mays
ggacctggtgccactaaaattcgttccgtccaggcaaggaagatatcgagcagccaaggagaggagaagatggcagcttacgaagcagaccgcccgcaagtccaccggaggcaaggccccgcgcaacagctcgccaccaaggcggcgaggaagtctgcgccgacgaccggcggcgtgaagaagccccacaggtacaggcccggtgacgtggctctgcgcgagatccgcaagtaccagaagagcacggagctgctgactcggaagttgcccttccagcgcctggtccgtgagatcgctcaggacttcaaga

SEQ ID NO: 11094 - DNA, 311 bp, Zea mays
acaggtcagatgaagctgaaaatattggatatgttattccaactacagttgtatcccatttcttaaatgactatcagaaaaatggaaagtacacaggatttccatgtttgggtgtcttacttcagaaattggaaaatccggcattgcgtgaaagcttaaaagtaccttcaagcgagggtgttcttgttcgtcgggtggaacctactgctccagcaagcagtgttttgcgaaagggagatgtaattgttagctttgatggtatcgcagtaggatgtgaagcaacagtaccatttcggtccacagaacggatt

SEQ ID NO: 11095 - DNA, 310 bp, Zea mays
gttcctcgagatacagaagctgcgggagagcaagaaggactacgacgtgcccaccgccatctcgttgatgaagcagatgtccagtgccaagtttgttgagtcagcggaggcgcacttccgcatgaacctcgaccccaagtacaatgaccagcagctccgggccacggtgaatttgcccaagggaacaggccagtcggtgaagactgcggttctcacacaaggtgagaagatagatgaagctagagctgcaggagctgatatcgtaggtggagaagatttgattgaacaaataaaaggaggatttatggag

SEQ ID NO: 11096 - DNA, 101 bp, Zea mays
gcctgggccacggacgaccactccctccacaacgccttcagcacctacggcgaggtgctcgagtccaagatcatcctcgatcgggagatccagaggtcccg

SEQ ID NO: 11097 - DNA, 306 bp, Zea mays
cggaccgtgggagtcttttgtggcaactatctgtacatgccctgagagaagtccacaagagaacatttgcagctgatgagctgatcaaatccactacctgcagcactaacagatgtttcttatcttcatgctgcttctttactcccagtaaccaaggcaagaatagctctggagaggcgtaaatttcttaaaaatgcaaacatagctgttcagaggcaaatgacatggtcaaatttggcccatgagatgacagctgagttccgaagtctatgtgctgaagaggcttatttgcaacaagagttagag

SEQ ID NO: 11098 - DNA, 307 bp, Zea mays
cccgtaccgtggcggaggcagacgtggtggttacaggaatgttgagtttgctgatgactctgagaggccaccacggagaaactatgagcgccacagcgggactggccatggctatgagatgaagcgtgatggcgcagggcgtgggaactggggcactgccactgatgaacttattgcccaggatgcagaggactccccgaagatggaggaggctgctcctgttgctgagaaacaaggtgagcagaatgatgccccagcagcagatgagaacaaagataacaaggatgctactgcaaatgaggaggaa

SEQ ID NO: 11099 - DNA, 308 bp, Zea mays
tctcacgcgtcctctcacgcgtcctctcacgcgtccgcggacgcgtgcgaggttggccattatgataaaaatgggccgtgaagtacctatagcaagtatggataccggtgggaaaatcatttgggcgaaacatagtgaaatacaaactgtaaatattaagacagtcggtgcaggctttgaggtcacagacggagagagattaccgttggctgtaaaagagttaggaagctgtgatttgtacccacagagcttgaagcataatcctaatggacggttcgttgttgtatgtggagatggtgagtacataa

SEQ ID NO: 11100 - DNA, 306 bp, Zea mays
gttgaaactgttgagtataagaacattagcttcactgtttgggatgttggtggccaggacaagatcaggcccctgtggaggcactactttcagaacacacagggacttatttttgttgtagacagcaacgacagggaacgtgttgttgaggctagagatgagctccacaggatgctgaatgaggatgagctgcgtgacgctgtgctgcttgtatttgcaaacaaacaagatcttcccaatgctatgaatgctgctgaaattactgacaagcttggtctgcattccctgcgacacggcactggtaca

SEQ ID NO: 11101 - DNA, 246 bp, Zea mays
cccacgcgtccgaccagatgaagaagctgtgcctggagccgacgtccttcaccgtcaaggcggagggcatcgccaagaacgccccgcccgagttccagaagaccaagctcatgacacgcctcacgtacacgctggacgagatcgatggcccgctcgatgtcggctccgacggcacgctcaagttcgaggagaaggacggcatcgactacgccgccgtcaccgtgcagctcccggggggcgagcgcg

SEQ ID NO: 11102 - DNA, 295 bp, Zea mays; identical to SEQ ID NO: 7181

SEQ ID NO: 11103 - DNA, 296 bp, Zea mays
acctccaggagcggctcggcgtcacagctgcggccttcgcgccggccgccgtcgtcgcagcgcctggggcgggcggcggggcccggccgaggaggaggcccccgttgagaagacggagttcgacgtataattgaagaggtgcccagcagcgcgcgtatcgccactatcaaggtggtgcgcgtgctcaccagcctcgcgctcaaggaggccaaggaccttatcgagggccttcccaagaagcttaaggaggccgtcagcaaggacgaggccgaggatgccaagaagcagctcgagga

SEQ ID NO: 11104 - DNA, 300 bp, Zea mays
cccacgcgtccgctccctcactcccgttccatttccccatctcccagatccaattcgcgagttctccctcctctgccgccatgcgctctctgtggagaagacctcgtctggacgggagtacaaggtcaaggatctctcgcaggcggacttcggccgcctcgagattgagctggccgaggtcgaaatgcccggcctcatggcgtgccgcgccgagttcggcccgtccaagcccttcgccggcgctaggatctcggggtctctccacatgaccatccagaccgccgtcctcatcgagaccct

SEQ ID NO: 11105 - DNA, 285 bp, Zea mays
catgtcatacacataagctatatgacaagtacagtgattttgtcacgtctgaggacaaggaaggtttgattgctaagcttcaggaggttgaagactggctctatgaagatggcgaggatgaaactaagggggtttatattgctaagctagaagaacttaaaaaagttggtgatcctattgagctgcgcttcaaggaatgggagattagaagttctgctgttagccaactggtatactgcatcaatagcttcagagaagctgcacagtctaccgaccagaagtttg

SEQ ID NO: 11106 - DNA, 303 bp, Zea mays
tcaagaaccaaatgcggaaactgtggcggagaaaactgagccaccagttgcttctagcactggcattcaagaggaggtgaaacggtcaagcatagaatactggaatgagagatttaatcggttacagacatatttggagaactgtgatcattcaacccaggagggttatttgcgaaagcttaggtccctttcggctgctgggagaaacatgcatgcaattgagctggagaaaagggcaatacatctcctaatggaggaagggaaagagctccagcgaatgaaggctttgaatgttcttgggaa

SEQ ID NO: 11107 - DNA, 302 bp, Zea mays
tgccatggtgaagtactcgcaggagccgggcaaccctaccaagtcggctaaggccatgggcagggatctgagggtccacttcaagaacacaagggagacagcctttgcgcttcgcaagttgtctttgaccaaggctaagcgataccttgaggatgttattgctcacaagcaggcaattcccttccggagatactgtgggggtgttggtcgcaccgcgcaagctaagtcgcgccactccaatgggcagggccgctggcccgttaaatcagccaggttcatcctggatttgctgaagaatgctg

SEQ ID NO: 11108 - DNA, 302 bp, Zea mays
gtctctgctcctcacctcgccgccagccatgggcaagatcaagatcggaatcaacggtttcggaaggatcggcaggctcgtggccagggtcgccctgcagagcgaggatgtcgagctcgtcgccgtcaacgaccccttcatcaccacggattacatgacctacatgttcaagtacgacaccgtgcacggccaatggaagcacagcgacatcaccctcaaggactccaagacgcttctcttcggcgagaagccggtcaccgtctttggcatcaggaaccccgaggagatcccgtggggtgagg

SEQ ID NO: 11109 - DNA, 301 bp, Zea mays
ggacgccgctggtcgaattgaagcgaatcgccagcgaggctgggatcgatgcgcggatcgtcggcaagatggaggcttaccagccactttgctccatcaaggaccgctctgctttgagaatgatatacgatgctgatgagatgggattgatttcgcctggagtcacaacactggtggagccgacgagtggtaacatggggttagggttggtcctcttcgctattcagagaggttacaggctcattgcagtcatgccggctaaatactcgcttgacaagcagatcttgctgaggttcatggg

SEQ ID NO: 11110 - DNA, 303 bp, Zea mays
gggtaatctttgatgaagtgcattatgtaaatgatgctgaaagatgtgtagtctgggaggaggtcattataatgctcccgaagcacattaacattgttcttctttcggcaacggtcccaaatactgttgaatttgctgactggattggtcggacaaagcagaagaaaattcgtgtcacatcgaccaacaaaaggcctgttccacttgagcattgcctgttctactctggagaagtgtacaaaatatgtgagagggatatgtttcttgctcaaggatttaaagaagcaaaagatgctttcaaaa

SEQ ID NO: 11111 - DNA, 304 bp, Zea mays
caacaagatcgtgaagcccaggcctttgcaggctgcaacattccaggactccttgggatttttcagaacgagtgggatgctctcatgctttctaattttgctttggagcagcagcttcacacagcaagacaagaacttagtcatgcactctaccagcatgacgctgcctgccgtgttatagccagattaaagaaggaaagagatgacgctagagcacttttggctcaagctgagagacagattcctgcgtcagttgcaggagctgctcctgcagctgttgtttccaatggaaaaagagtaattg

SEQ ID NO: 11112 - DNA, 313 bp, Zea mays
cgcttcgcccactcgctccagccgcttcaccgcgccgccaccgccaccgcgaggatgccgttcaagaggttcgtggagatcgggcgcgtggccctggtgaactacggggaggactatggccgtctcgttgtcatcgtcgatgtggtcgaccagaacagggcacttgtggatgcccctgatatggtcaggtgccaggtgaacttcaagcggctctcacttactgacatcaagattgacatcaaacgtgtccccaagaagacagccctgatcaaggcgatggaggaagctgatgtgaagaccaagtgggagaaca

SEQ ID NO: 11113 - DNA, 307 bp, Zea mays
agcagaacaagatcctgaaggtgatcaggaagatccttaaagatgcaaaacaccctgcgcacatagagcttgatgttgttttgcttctttaagggtattgttgactctgaggaccttcccctcaatatctctcgtgagactcttcagcagaacaagatcctgaaggtgatcaggaagaaccttgtgaagaagtgtgttgagctcttctttgagatatctgagaacaaggaggactacaacaagttttacgaggctttctccaagaacctcaagcttggcatccatgaggactcgcagaacaggacca

SEQ ID NO: 11114 - DNA, 308 bp, Zea mays
cctgacgctggaccgcacgtccggctccgggttccagtccaagagcgagtacctgttcggcaagatcgacatgcagatcaagctggtgccaggcaactccgctggcacggtcaccaccttctacctgtcgtcccagggcgacgcgcacgacgagatcgacttcgagttcctgggcaacgtgagcggggagccctacacgctgcacaccaacgtgttcacgcgcggacagggccagcgggagcagcagttccgcctctggttcgaccctaccactgccttccacacctactccatcctgtggaacccgc

SEQ ID NO: 11115 - DNA, 316 bp, Zea mays
ggtcaaccacgcgcgggagcgggtgtcaagtggcccaaggtcgtgcgcatccagcgccacgccgcatcctcaagcagcgcctcaaggtgcccccggcgctcaaccaactcacacgtaccctcgacaagaaccttgcaacaaacttgttcaagatgcttcttaagtaccgccccgaggacaaagctgccaagaaggagaggctcttgaagagggcccaggccgaaaacgaggggaaaactgttgagtcacagaaaccaattgttgtgaagtacggccttaaccatgtgacttacctcatcgagcagagcaaggccca

SEQ ID NO: 11116 - DNA, 302 bp, Zea mays
gacgaccgcaggatagaagcccaaggccgagaagcggctgcccgcgtccaagtcctccggcaaggagggcggcgagaagaaggggaagaagaaggccaagaagagcgtggagacctacaagatctacatcttcaaggtgctgaagcaggtgcaccccgacatcggcatatcctccaaggccatgtccatcatgaactccttcatcaacgacatctttgagaagctggccggcgaggcgccaagctggcgcggtacaacaagaagcccaccatcacgtcccgcgagactcagacctccgtgcg

SEQ ID NO: 11117 - DNA, 302 bp, Zea mays
gtctttcgtcatctcttctccggcgaagaacccccagtcgcccaccagatcacttgttaaactttgttgaggggtgatggcggtttctttcgcaaacctcaactccgaggcagggcttaaaaagcttgatgagtaccttctcactcgcagctacatcactggctaccaagcttccaaggatgacttggctgtctacacttcgttttcggctgctccctcgtccaagtatatcaacgtagcaaggtggtttaaccacattgatgcgctcgtgaggctgagcggaattactgcagagggccaag

SEQ ID NO: 11118 - DNA, 302 bp, Zea mays
cgagcccaagaggccttcggacaagcccctgcgtctgcccctccaggatgtgtacaagattggtggtattggaactgtaccggttggtcgtgtggagactggtgtcatcaagcctggtatggtagtcacctttggtccaaccggcctgactaccgaggtgaagtctgttgagatgcaccacgaggcacttcaggaggctcttccgggtgacaatgttggcttcaacgtgaagaatgttgctgtcaaggatctgaagcgtgggtttgtggcctccaactccaaggatgaccctgccaaggagg

SEQ ID NO: 11119 - DNA, 307 bp, Zea mays
ccggcatccgcttcgagatcctcgaggccatcacgaagctgctcaacaccggtgtcagcccctgcctgccgctccggggcaccatcaccgcgtcgggcgacctggtcccgctctcctacatcgccggcctcatcacgggccgccccaacgcgcaggccgtcaccgtcgacggaaggaaggtggacgccgccgaggcgttcaagatcgccggcatcgagggcggcttcttcaagctcaaccccaaggagggcctcgccatcgtcaacggcacgtctgtgggctccgcgctcgcggccaccgtgatgta

SEQ ID NO: 11120 - DNA, 307 bp, Zea mays
cccacgcgtccgcggacgcgtggggacttctgctgcagcgcctccgccgccgccgccgcatctaacgcattccctccgccgcagcccgaggcaagatggttctccagaacaccattgatctgctcaacccgccggcagaactcgagaagctcaagcacaagagaaagagactcgtccagtcgcccaactccttcttcatggatgttaagtgccaggggtgcttcagcataaccactgttttcagccactcccagactgctgatgtgtgcctggctgccaaactgtcctctgccaacccacaagagga

SEQ ID NO: 11121 - DNA, 300 bp, Zea mays
ggacgcgtggcggcttctcaacagacgccctccgcctcgtcgcgcgctcctgcaggtctctgagaaccttgttcctggaagaatgtataattgaggatgaagggagtgaatggctccatgaactcgctgtcaacaattctgttctggtgacactgaacttttacatgacagaactcaaagtggagcctgctgatctggagcttcttgcaaagaactgtaaatcattgatttctttgaagatgggtgactgtgatctttcagatctgattgggtttttccaaacctccaaagcattgcaag

SEQ ID NO: 11122 - DNA, 298 bp, Zea mays
gaatattccaattttgtccaccaaaatgtgttactgtgttgtaaatttggcttggttggcaaaaacatctgtcttggatttataggaatttgggattataaactagtaccaacgttctcgaatatttgttgtccgctagttcaattttgaagtaaaacgcaacaaataaaaaagaatggagggagtatctgaaacaagctgtacattctgttgctgccatttgctctatggcatgcttagctgtttataggatacctgaggtcatgatctacagtaatctgaactgcgatttaaaaat

SEQ ID NO: 11123 - DNA, 299 bp, Zea mays
cgtaccccgcctcccggttcaaccaaatccctctcgcctcatccccaccagcgcaaagccgccctatcgtcctgtcgtgagaagcaatggcgggccgtggcaaggcgattggcgctggtgccgcgaagaaggcaacgtcaaggagctccaaggctgggctgcagtttcccgtcggcaggatcgctcggttcctcaaggccggcaagtacgccgagcgcgtgggcgccggcgcccctgtctacctcgcagctgtcctcgagtacctcgccgctgaggtcctggagcttgctgggaacgca

SEQ ID NO: 11124 - DNA, 299 bp, Zea mays
attacaacatccagaaggagagcaccctccacctggtgctccgtctcaggggtggtatgcagatctttgtgaagacactcactggcaagacaatcacccttgaggtggagtcttcggataccattgacaatgtcaaggccaagattcaggacaaggagggcatcccacccgaccagcagcgcctcatcttcgccggcaagcagctggaggatggccgcaccctggcggattacaacatccagaaggagagcactctccacctggtgctccgcctcaggggtggcatgcagatttttgtg

SEQ ID NO: 11125 - DNA, 298 bp, Zea mays
gctcgaggacgggcgcacgctggccgactacaacattcagaaggagagcaccctccacttggtgctgcgtctcaggggcggcatgcagatcttcgtgaagactctgaccggcaagactatcacccttgaggtcgagtcttctgataccattgataatgtcaaggccaagatccaggacaaggagggcatccctccggaccagcagcggctcatttttgccggcaagcagctcgaggacgggcgcacgctggccgactacaacattcagaaggagagcaccctccacttggtgctgcgt

SEQ ID NO: 11126 - DNA, 284 bp, Zea mays
caagagcttgaccaacgactgggaggagcatcttgccgtgaagcacttctctgttgagggccagcttgagttcaaggctgtactctttgtgccaaagcgggcccccttcgacctctttgacaccaggaagaagcagaacaacatcaagctctatgtgcgacgtgtcttcatcatggacaactgtgaggagctgatcccagagtggctgagctttgtcaagggtattgttgactctgaggatcttcccctcaacatctctcgtgagactctccagcagaacaaga

SEQ ID NO: 11127 - DNA, 296 bp, Zea mays
agcaacaaggatatcctgttatttatgcaaaaatcaatggacatgatttggaacttgaacaggcacagtttctatctgatggatcgtctggtcctggaatgtggattgttcctgtaacagcatgctgtggctcatatgatgcacagaaaaagttcttattgaaagataaaatggataagataaatattaaagagttttctgactctcaaagtgctgatggggagaagaatcaaatcatttggatcaaattgaatattgatcaaactggattttatagagtgaagtatgatgatgaa

SEQ ID NO: 11128 - DNA, 292 bp, Zea mays
gcgagggcatcctcagcatctggaaggaggccgacttcatcaaggtcagctacgacgaggtggccttcctcacgcgcggggacgccaacgacgagaagaacgtgctgtccctgtggtttgacgggctcaagctgctcgtcgtcaccgacggggacaagggatgcaggtacttcaccaaggacttcaagggcagcgtgcccggcttcaaggtcgacaccgtcgacaccaccggcgccggcgacgccttcgtcggctccctcctcgtcaacgtcggcaaggacgactccatctt

SEQ ID NO: 11129 - DNA, 297 bp, Zea mays
cgtctcctttgtgaccctgaacaaggttggtggattcctgcagcggatggacctgtgccgcaattacgcctttgggaagatgctcgtgataggctctgagccacccttcaagctgaagggcctttggctcttccgtggccaggatgttcccaagtttgtaatggacgaggtctatgacatggagctctacgagtggaccaaggtggacatctctgatgaggcccagaaggagcgtgtcaatgcgatgattgaggaccaggagccctttgagggcgaggccttgcttgacgcgaaatg

SEQ ID NO: 11130 - DNA, 296 bp, Zea mays
gccgggtgcgcaccaggcgcccgcctgctacgacgcgctgagcgcacgcctcgtcgagcgcgccgagttcagggtctgcttcacgagcggtttctcaatctctgccgcacggcttggattaccagatgttggtctcatctcgtacggggaaatgatcgatcaggggcgtctgatgactgaagcagtttcaatccctgtgatcggtgatgcggataatggttacggaaactgtatgaatgttaagaggacagtgaaaggatttattaatgctggttttgctggaattattcttgaag

SEQ ID NO: 11131 - DNA, 295 bp, Zea mays
atggtgttgtggcactgctggttgctgatatatcactttcaatcggtcttgaccagattgaagctctgtatcagtatgcccaatttcagtttgagtgtggtaactactcaggggctgctgattacctttaccagtatggtgctttgtgcacaaacagtgagcgaaatgtgagtgccctctggggaaagctagcagcagaaatcctaatgcagaactgggacctagctttggaggaactcaaccgcttgaaggaaataattgattcaaagaacttctcatcacctctgaatcagct

SEQ ID NO: 11132 - DNA, 296 bp, Zea mays
cccacgcgtccgcggacggtgggcgcgagaaagaaaccgcatatcagcgggcgctgctcgttctcatcgccccccctcgtctctcgcggaccgaccccgtctccattcggagctcagctagcctccaccaccatggcttcttcgaagaggagatttggtgctgccggcggcgcggacaagaaggatctattccatgtcgtccacaaggtgcccgccggcgacagctcgtacgtcgtagccaagcacctccagctcgtggagaagcaaccggatgtggcgatcgtgtggttctggaa

SEQ ID NO: 11133 - DNA, 298 bp, Zea mays
cccacgcgtccggggatcccagccaccgccgctagaagaagagctcggcgattcccaggtcccgcgagaatatgccgaagcagatccatgagattaaggacttcctcctcaccgcgaggaggaaggatgcccgctcagtgaagatcaagaggagtaaggatgttgtcaagttcaaggtgcgctgctccaagtacttgtacacgctctgcgtcttcgatgctgagaaggcaaacaagttgaagcaatctcttcccccaggtttgaccgtcgaggaggtctgattggatacatggcaacg

SEQ ID NO: 11134 - DNA, 277 bp, Zea mays
ctcccgtctccgtcgtctcgtctccgctcctcacctcgccagccatgggcaagatcaagatcggaatcaacggtttcggaaggatcggcaggctcgtggccagggtcgccctgcagagcgaggatgtcgagctcgtcgccgtcaacgaccccttcatcaccacggattacatgacgtacatgttcaagtacgacaccgtgcacggccaatggaagcacagcgacatcgccctcaaggactccaagacgcttctcttcggcgagaagccggtcaccgt

SEQ ID NO: 11135 - DNA, 277 bp, Zea mays
gtcttgttggtggtcgtgctcatctcgttcgccccccttattaccactaatgcagcagcaggtgtcaacgccacgagatctgctggtaggcagcagaagcagaagcagaagccgctggcgcctgccctcatcgtgttcggcgactccatcgtggaccccggcaacaacaacgacatccacaccatcatcaaggccgacttcccgccctacggcaccgacttccagaaccacagagccacgggaaggttctgcaacggcaggataccaaccgacttca

SEQ ID NO: 11136 - DNA, 276 bp, Zea mays
caacgacgcaatcgacatcccctcgcctaccccagctctacccgcgacgaagcatcaccaggaaggatgacgggctcaatggatctcccggccaagggcgggttcagcttcgacctgtgccgccgcaacagtatgctggagaagaacgggctcaaactcccgggattcaggaagaccggaacaaccatcgtcggcctcgtctttcaggatggggttgttcttggggcagacacaagagcaactgaggggcctatagttgctgataagaattgtgag

SEQ ID NO: 11137 - DNA, 134 bp, Zea mays
atctcctcgcattttccttgcaaccgattgcctatccccctcccaaccaaagaccgatggcgcccaaggccgagaagaagcccgcggcgaagaagccggcggaggaggagcccgcggccgagaagacgaccgcc

SEQ ID NO: 11138 - DNA, 277 bp, Zea mays
gtcatgactgctctacattacgtgcttggtgggaagaagatgaaggaagaagaagtcgtttctacaagactgtagttggcagtgatgaggaggccccatctcgttgcaccccggaagtagtgcacttcattgttcagcagcattttgatgctccatcaatgtgggcaatctttccacttcaggacctccttgcactgaaagacaagtacaccaaaagaccagcgccagaggaaacaatcaatgaccccactaacccaaagcactattggagattccg

SEQ ID NO: 11139 - DNA, 273 bp, Zea mays
gaatgcatggttcttgacaacgaagcactttatgacatttgcttccgaactctgaagctgacgacccctagctttggagacttgaaccacttgatcagtgcaacgatgagtggtgtcacttgctgcctccgcttcccaggacagcttaactctgacctgcgcaacttgcagtcaacctgatcccgttccctcggctccacttcttcatggttggctttgcggcactcacctcgcgtggctcgcagcagtaccgtgcgctcaccgtccctgagc

SEQ ID NO: 11140 - DNA, 274 bp, Zea mays
cggacgcgtggcgtgacgcgtgggcggacgcgtgggctcggctgcgtgttcctgaccggcgagaggctcaagtcccccggcgaggagtgcaacaagatgttcgtcggcatcagccagggcacgctcgtggaccccatgctcgagtgcctcaaggagtgggacggcaagccgctgcccatcaacatcaagtaaaagaacgccaaggagaagaggagggaggggaggaaatacgtgaaaaaaaataaaacctgtacacgtgtctgtccagatcgtg

SEQ ID NO: 11141 - DNA, 269 bp, Zea mays
cagttactctgcaagttgctgatgctctggagcaaccgtttcctgacgggcagttcgatctggtgtggtccatggagagtggcgagcacatgccggacaagagaaagtttgttagtgagctagcacgcgtggcggctcctggagggacaataatcatcgtgacatggtgccataggaacctggatccatccgaaacctcgctaaagcccgatgaactgagcctcctgaagagaatatgcgacgcgtactacctcccggactggtgctca

SEQ ID NO: 11142 - DNA, 272 bp, Zea mays
ggctcctactgattctcgtttgagaccagaccaaaggcatctggaaaatggtgaatatgagatggcaaattcagagaaacttaggcttgaacaactgcaacggcaggcacgacaactgcaagaaaaaggatggagaccaaggtggtttaagaaggatgatggcgacagttaccgctatatgggtggatactgggaagcgagggagacggggaactgggacggtattccggacatctttcgccagaatagtttgtctccaggactgcactaac

SEQ ID NO: 11143 - DNA, 268 bp, Zea mays
ggcggagcgagccgccgaagccggaggagaagaaggagccgccggtgatcgccgtggtgctgaaggtgcacatgcactgcatggcgtgcgccgaggggatcaagaagaggatcctcaagatgaaaggcgtgcagtccgtagaaccggacctcaaggcgtcggaggtgacggtgaagggcgtgttcgaggagtccaagctggcggagtacgtgtacaagcgcacgggcaagcacgcggccgtcgtcaagtccgagccggccccggcgcc

SEQ ID NO: 11144 - DNA, 269 bp, Zea mays
ggacgcgtggagatgattgagaaggctggaaggggtgtattagtctatctccgtggacatgaaggaaggggtattggtctgggccacaagcttcgctcttataacttacaggatgatgggcgtgatactgtggaagctaacgaggaacttggtcttcctgtggactcacgggaatatgggattggcgcacaggtaagactgagttatctctcaagttacggtggaacctttctccacaacacttcctttctgctgaagtctgcttgtat

SEQ ID NO: 11145 - DNA, 266 bp, Zea mays
cgcattcctcccatctcccaagacctcctcagacccgagaagcgcactgcggccatggacgccaccggcactggagctggagggaaggcgaagaagggagcggccggtcgcaaggccggcgggccgaggaagaagtcggtgacgaggtccgtgaaggccgggctccagttccccgtcggccgcatcgggcgctacctcaagaagggccgctacgcgcacgcgtcggcagcggtgcccccgtctacctcgcggccgtcctggagtac

SEQ ID NO: 11146 - DNA, 268 bp, Zea mays
cggacgcgtggggtgtactgagttgcgcacaagatcaagatattttagaaggcgaggtaaagtccgtcgtttgaagtacacctggaaatctgcaggttacgttttcaaaaggattaccgaaaggtaggatcagccttgtcgacaatataatccttgtggttgtcaatctacatgcggaaagcagtgtccatgtctttcaaatgggacatgttgtgagaaatactgtgggtgtccaaaaatttgcaagaatcgttttcgaggatgtcac

SEQ ID NO: 11147 - DNA, 267 bp, Zea mays
cggacgcgtggagaggattatgatccacagacaggttgtcttagatggatgaacgagttctcacagtaccacaacaagcttcttgtggagcagctcaagatagcttcgcaggctccatcctggagtaaccatcatctatgctgattactatggagctgctatggaaatattcctttcccctgaacgatatgggatcgaatatcccctagtggcttgctgtggtgcagaaggaccctacggtgtgtccccaactacaagctgtggatt

SEQ ID NO: 11148 - DNA, 266 bp, Zea mays
cggacgcgtggcgtgacgcgtggggcctgcagttcgggaggctccaagtgtcagacagatagatggagagtggaagttggactcaagaaactctgtgttattatggtctatactccttattgatcagtcgaatcgcagtggttccatggaatttgttgttcccccagctgatccgtcatcatttttccccatctctgttggattttctgcatcgagtactttcagtgatctgaaggttactggaatccttcctctgaaggaaggca

SEQ ID NO: 11149 - DNA, 265 bp, Zea mays
cccaaaaagactggctgtcaactatgagacacttgatacatttgtggtacctaggtcatctaaaaagctctatgaagacaacgaatatgctctctacactgtgacactatttgctaaggttgttgacaactttaaggtccgtgctcgcgagaagggttttcagatccgtgatttcgagtacagtcctgaagcacaggaaagccggatgcaggagatggagaagctactgcgagaccaagaagctatgaggaccactcttcttcag

SEQ ID NO: 11150 - DNA, 265 bp, Zea mays
aattgatattgccctgtggaagttcgagaccaccaagtactactgcactgttattgatgccccgggacaccgtgacttcatcaagaatatgatcactggcacttcccaagctgactgtgctgttcttatcattgactcaaccactggtggttttgaggctggtatctccaaggatggccagacccgtgagcatgctctccttgctttcacacttggtgtgaagcagatgatttgctgctgcaacaagatggatgctactacaccc

SEQ ID NO: 11151 - DNA, 264 bp, Zea mays
cataacttcggcttctatcccttcgtaaacccttctctcttcttcccgcggcctgctcgttctatctgtccagcagacttgaggttccgagcggccggaaaccagcggcaaccgtcggcatggcgctcgtattgcattctggggctggaaacaaaaatgccttcaaggcacttattgctgcagaatacagtggggtcaaggttgagttgaccaaggattttgagatgggtgtctcgaacaagacccctgagtttctaaagatga

SEQ ID NO: 11152 - DNA, 226 bp, Zea mays
cggacgcgtggtcctgatggtgcaaagcttgtgacataccagtggaaccttccatattcatcaagcgagattattagaaggttggagctgcttgatgaagcggacgtggtcggttgtgggggctttggcacggtgtacaggatggtgatggatgatggcacgtcgtttgccgtcaagaggattgacctcagccgcgaaagtcgcgacaggaccttcgagaaggagc

SEQ ID NO: 11153 - DNA, 306 bp, Zea mays
cccacgcgtccgaagagctgtcctggtttcacctacagaagatctgtgtggatgggcacaactgacttgtctagaacagagttccgctcgttcattgaaaaccttgcaggaaagtacaatggcaacacataccatttgatttcaaagaactgcaaccattttacagatgatgtctgtaagaacttgaccaggaaatcaatccctgggtgggtcaatcggctagcaagagtgggttcatttttcaactgtcttctaccagaaagcatccaagtttccacagtaagacacgtccctactcatcctgca

SEQ ID NO: 11154 - DNA, 308 bp, Zea mays
cagagcccgatcccgatccagcgaggcggcgaccctccctcctccccttgcttcgctcgtccagccctgaccacccgcatccccgtcagtcatggcagcggcagcaggcggaggcgcggtgcgtgcgctgtcccagaaggagcaggacatacagatgatgctcgccgccgacgtccaccttggcaccaagaactgcgatttccagatggagcgctatgcctttaagcgccgcaccgacggcatctacatcatcaaccttggcaagacatgggagaaactgcagcttgcagcgagggttatcgttgcca

SEQ ID NO: 11155 - DNA, 306 bp, Zea mays
cacagcagtagcaagagggatagagcaaggccacacacacacacacaccactaggctaggttagccttttaatcgtcgtcgagaagcaagacgggcgcgcacgcaagcaggcaagcaagaagagagccgatcgaccgagagctagcacgcgatggcgaggtcttccaagatgatggtgggcggcagtctgctggccttggccctggccgtgtcgaccgctgatgcgaggaacatcaagaccacgatgacggagaagaaggacgacgcggtggtgcagtgcagacgttcccgcccttcgaccgggtc

SEQ ID NO: 11156 - DNA, 307 bp, Zea mays
agtaggtttaaccgcgggggctgttgatgatcattccagttggcccactcaaactcaaccgaggttcattgtttgtgttgtggttctgttatggcaagccaaagatgtagtgaagactatcaagaaacggattgcacacaagaactcaaaggtccagcttcttgcattaacgttgctggagaccttgattaaaaattgtggtgattttgttcatatgcaagttgctgagaaggatatgcttcatgaaatggtgaagatagctaagaagaagcctgactatcacgtcaaagagaagatattaattctg

SEQ ID NO: 11157 - DNA, 310 bp, Zea mays
cggacgcgtggcggacgcgtgggtccgcaattcccaggcaggcaggtcggcgaggagggcaggaagaccgaagaccgagccgagtgggtggctcagtacgggaacgggacaggaccccaaaatctcagatccttcctgcccgcccgcccgtgcccgtcgacgcgtcgttcttgccggccgcgcctcacctccgccctctcctcctccagggggatcggatacgccacaggctgcgcgatggtgctgtgggtcttcggctacggctccctcatctggaaccccggcttcgacttcgacgacaaaatcctcg

SEQ ID NO: 11158 - DNA, 310 bp, Zea mays
gtgacgcgagcacgagcatccatcgtttccccttcttccccatcgcgtgccctcgccgcagccatcttccatggcggaccagctcacggacgagcagatcgcggagttcaaggaggccttcagcctcttcgataaggatggcgacggctgcatcactaccaaggagcttggaactgtgatgcgctcccttggccagaaccccactgaagcagagctgcaggacatgatcaacgaggttgatgctgatggcaatgggaccattgacttcccagagttcctgaacctgatggcaaggaagatgaaggacacc

SEQ ID NO: 11159 - DNA, 308 bp, Zea mays
gaagctcaagatgttcacattaagtttgcagagaaagcttttgtgcaaaggcggaagtaattcttgctgatgggaaattaacagaggctaaggctgaccagcttgctaagattcaaaagcaggtcggtttgcctactgaacatgcacagaaaatcattaagggtattacaacgacaaagttatcttctgcaattgaagcctctgttgctcggggtcagatcggtatacagcaggtccgaggattgaaggaagcaaacttccaactagatagcttgattgcggaccgcagcgagaaagcatttatagga

SEQ ID NO: 11160 - DNA, 299 bp, Zea mays
cccacgcgtccgccctaaacccagcaccagcgcccccaatcctccaacttccactcgagtagggttctgccggccgtttcctcgtcgtcgcaatggagttctggggtgaagaagtgaagccaggagccacggtttcttgcaaagttggtgatggtttggttatcacctttcacaggctgccctaggggaaccaaagaaagcgagtgagaatgccattgtgtctgtcaaaattgatgataagaaactagtgcttggaatcttatcagttgagaagcatcctcaaatctcttgtgatctgg

SEQ ID NO: 11161 - DNA, 298 bp, Zea mays
ggcaattgcaggagaggctggcgtaccatttttctcaatttcaggttctgagtttgtggagatgtttgttggtgttggtgcttccagagtacgtgaccttttcaagaaggccaaggagaacgctccttgcatagtgtttgtcgatgaaattgatgctgttggaaggcaaagaggtacaggtattggtggtggaaatgatgaaagggagcagactctaaatcaactactaactgagatggatggttttgagggcaacaccggaattattgttattgctgccactaaccgagctgacatc

SEQ ID NO: 11162 - DNA, 297 bp, Zea mays
gccactaacactagttatcacatccaccataacgaccatggctaccacctcagctttgctagctcttgtcttgttagccagcctccttgcaggcacggtgttcagtgatgatatcgtacccatccatatacccttgttggatcggttccaagcctggcaggccggatacaaacgcacatatgcgaccccagaggaattccagcaacgcttcatggtctatagcgagaatgtcaagttcatcgagaccatgaaccagcctgggagctcatatgagctcggtgagaaccaattcggtga

SEQ ID NO: 11163 - DNA, 300 bp, Zea mays
ctctatctctttcgccgagctcctcgaaaccctaggagcgtgcttgaccggcggcggcgaggtgatggcgatggaccctgacgcggtaggaaggccttcgtggagcattactaccgaacgttcgacaccaaccgcgcggcgctggttgggctgtaccaggagacctccatgctcaccttcgagggccagaagttccagggcccctccgccattgccggcaagctcggatctctccctttccaggcctgcgagcatcagatcgtcaccgtagactgccagccatcgggtccccagggaggc

SEQ ID NO: 11164 - DNA, 299 bp, Zea mays
ggaccgtggtgcccaatgttaatcaacctttcaaattgaattgggctaccattggggctggtgagaaacgtggagacgatggttctgattatactatatttgttggggacttggcctcggatgttacagatttcattctacaagatacgttcaagagtcgttatccatcagttaagggtgcaaaagttgtctttgacagaactactggccgttcgaaaggctatggttttgtaaagtttgcagattcggatgaacagacacgggcaatgactgaaatgaatggacaatactgttctagc

SEQ ID NO: 11165 - DNA, 297 bp, Zea mays
actatatgagagactgcttgataggacaaaacatttgaaggtatggatcagttatgctgagtttgaggcctctgctggcttgggcggtgaagacagtgaagacaaggagaaaaagaatgaagttagttatcaggagcagcagatggagcgggttcaaaaatgtagagctgtctttgaaagggcatttgattacttcagaaccagtgccccagagttgaaggaggaaagagctatgcttcttgaagaatggcttaataaggaggtgaactttggtgatcttggagatgtcagcttagt

SEQ ID NO: 11166 - DNA, 293 bp, Zea mays
cccactggcccccaccgtccgcggacctgcgagctgggccggtgagctgtcggcgtggctcagcctctcccgaccacgtagtgttacgtgggcgacctggacggtgccgtagcggactcgcagttgtacgaactcttcagccaggcggggcaggtggtgtcggtgcgcgtctgcagggatgtcacctcgcgccgctcgctcggatacgcctacgtcaactacagcaatcccttggatgctgcgagagcattggaagtgctgaactttgctgctcttaacaacaagcctatccg

SEQ ID NO: 11167 - DNA, 294 bp, Zea mays
aatcggtacagaaaccgtgatgagccactcaaagatgagaaaaacaaacaaatggtgactttcatggatattgtggcgtacttgaagcccaagtatgttctcatggaaaatgtggtggacatactcaaatttgcggatggttacctaggaaaatatgctttgagctgccttgttgctatgaagtaccaagcgcggcttggaatgatggtggctggttgctatggtctgccacagttcaggatgcgtgtgttcctctggggtgctctttcttccatggtgctccctaagtatcct

SEQ ID NO: 11168 - DNA, 294 bp, Zea mays
ccccgtttcgccgcccctagcccaaatcccccacctactcgccgccgggccgtctcagcctcatccttctccgctagccatggccgccgcgggtcccgggctctactccgagatcgggaagaaggccagagatctcctatataaggactaccacacggaccagaagttcacgctcaccacctacgccgccaacggagctgtgagtttccactcgactctccggtatttgtttttgtgatgtcgccttgttactcttggccttgatttgacatgatgcataggtaggcttttttt

SEQ ID NO: 11169 - DNA, 295 bp, Zea mays
cagccacttcgctccctccctagcagcaaaaacctccacgaatcgccgacactccaacccggaagagccaacgaggtgactccgcgccccggtcatgggtgacagccaatactccttctctcttaccactttcagcccgtcgggaaagcttgtgcagatagagcacgcgctcaaggctgtcggatccgggcagacctccctagggatcaaagctgccaacggtgtagtgattgccaccgagaagaaactgccttctattttagtggatgaaacatctgtgcaaaagattcaggca

SEQ ID NO: 11170 - DNA, 296 bp, Zea mays
gtccatggatattcgaactaggcaaggattactcaacgctatggttggcaaagttggaaaacggatggacaatcttttgattccattggaactattatgctgcatatccagaactgaattttctgacatgaaagcataccttcgttggcagaagagacagttaaacatgctggaggaaggcctcataaaccatccagttgttggatttggggagttaggtcgaaaagtcaatgagataaggagcctttttagaaagattgaagaatccgagtccttgccaccatctgctgcagagg

SEQ ID NO: 11171 - DNA, 297 bp, Zea mays
cccacgcgtccgcccacgcgtccgcccacgcgtccggaaaccttctacaacggtcctgttcactatccatccatagactctacgcctgtcgatgtaaccatgccgcctaccactggaggcggtagtacaacagtcatcgcaacggcagcacctacagaacaggaagaaaatgaagctgatgcaagtgacggcggcaaaactccctctggtacttgtgttatatgtctggatgcccctgtggaaggcgcttgcatcccgtgcggccacatggctggttgcatgtcctgtttgaaggac

SEQ ID NO: 11172 - DNA, 299 bp, Zea mays
gtcctcctcgcgagcctcgtcgatcccccactcccctcccctcgcttcaagatgcagatctttgtgaagaccctcaccggcaagactatcaccctcgaggtggagtcttctgacaccattgacaatgtcaaggctaagatccaggacaaggagggcatccctcatgaccagcagcggcttatcttcgccggcaagcagcttgaggacggccgcacacttgctgactacaacatccagaaggagtcaacccttcatttggtgctgcgccttaggggaggcatgcagatctttgtcaagac

SEQ ID NO: 11173 - DNA, 298 bp, Zea mays
agtgccgatcctatcaatctcgtgtcatggatcttgttaacagtactggcgacgagagccttttatttcaggctctaggactaaatgatgagttacagcgtgttgttcagcgtcatgatgacatagcaaaggggatgcctcctggtactggagcacctttacctgcttctggaaatgtcaaccaagggactgccccacctaggcccactgcggtttcattttctccagttctaaatgtacatgaggacgatgaaccagaagacgagttctctgtgctttcccgcaggtctgcgaggga

SEQ ID NO: 11174 - DNA, 294 bp, Zea mays
cccacgcgtccggcggaagctatggcaccagctcaccctcaagctcgaccaattcttacagctccaggtcgcacagaccggagacactatcattcagctctacaacaatttcattgtcgactttgagaccaagattaatctgctcaaacttgcccattttgcggtgataacttctcgccagtaccctgataaggatgctgcaattactttcttagagggggtgatcacaaagctgcgtgagacaagggagtcacggatcaatgaaccaattctctatgtgaagatgcagattgc

SEQ ID NO: 11175 - DNA, 298 bp, Zea mays
agcactcgccgccactcaccagcaaattcccaagccgccccttcccccatctctttcgcgccccatttgatcgattcctgatggcgcccaaggccgagaagaagcccgcggagaagaagccggcggaggagaaggccgagaagaagccaagggcggagaagcgcgtgccgagcaaggagggcggcgagaagaagggaaagaagaaggcgaagaagagcgtcgagacgtacaagatctacatcttcaaggtgctcaagcaggtgcacccggacattggcatctcgtccaaggccatgtc

SEQ ID NO: 11176 - DNA, 295 bp, Zea mays
caccgatccatttcagccgccgccgcgcgtagcacagcaggagcagcaaggatgccggctggccacgggctgcgctcgcggacgcgcgacctgttcgcgcgccccttccgcaagaagggctacatcccgctcaccacctacctccgcacctacaagatcggcgactacgtcgacgtcaaggtgaacggcgccgtccacaaggggatgccgcacaagttttaccacggccgcaccggtcgcgtctggaacgtcaccaagcgcgccatcggcgtcgagataaacaagcaggtgaatg

SEQ ID NO: 11177 - DNA, 210 bp, Zea mays
ggtacccggtgcgggacttcaagaaccactaggcgctcgtggtggcgttcccgaggatgcagcccatgaagctgtacgccagcctgtggaacgcctacgactgggctatgcacggcgtgcgcgtcaatgcggactggtgcaaggccccggtcttcgggtccttcctcggtttcatctccgacgtctgcgtctgggactgcggcatgcagc

SEQ ID NO: 11178 - DNA, 305 bp, Zea mays
gtcggagcaagcgtccgcccacgcgtccgcccacgcgtccgccgcgtcctcgtaccccgcaaggctggtgagcgggttcctctccaatgcggcttcggcggtggtgaagcggctgtggtcgctcaaatccaccaccaagatagcgagcgggggcaagtcgatggtgaagtacgagggcggctacaccgtggagacggtcttcgacggcagcaagctggggatcgagccctactccgtggaggtcacccagggtggcgagctactcgtaatggactccatgaacagcagcatctacaggatggcgc

SEQ ID NO: 11179 - DNA, 290 bp, Zea mays
ctcgagtgcaagcaacgttggcgcttggcggccagtagtagcagctaatttagcgtcgctccttcctactagacgagagatcgagaaaccatggccaagctccaagtcactcctggcgccgcgttcaccgagtgcaatgaactcaacttccagggcctgtacatgtaccacacgcccctgggtcccaaggccaaccaagctgcgatcctagagagcaaggccaagatcggcatcggatgcaccgtggataacaactgggcagtgtatgacgggccagggccaggcgctaa

SEQ ID NO: 11180 - DNA, 287 bp, Zea mays
agtggctacaggcttgctatgcgtgaagcctgcaaatatgttgaggaaaagttagcagtcaaggttgacaaacttggaaaagaatcccttatcaactctgcaaaaactagcatgtcttcgaaattgattaatagtgacagtgatttctttgcaactttggttgttgaggcagttcaagccgtgaagactacaaatgccaagggagacgtgaaatatccaatcaagagcatcaatattttgaaagctcatggtaaaagcgccaaggatagttatctgttgaatggcta

SEQ ID NO: 11181 - DNA, 287 bp, Zea mays
cctcgctccaagtccaagccgcggccaccttgatgcaaccggccaagatcggcggccggtcgccgtccgcctcgctgccgtcgtcccgcccgtcgtcgcaactcgccagggcgttcggcgtcgacgccggcgccgccaggatcacgtgctccctccagtccgacgtcagggacgtcgccagcaagtgcgtcgacgccgccaagctcgccggcttcgcgctcgctacctcggcgctcctcgtctcgggcgcgagcgcggagggcacgcccaagaagctgacctactac

SEQ ID NO: 11182 - DNA, 283 bp, Zea mays
cccacgcgtccgctctccctcaggtttagtgttcgcaatggcggccttcaacaagcttggtggccttctaaggcacagtgctctggtcgacggtatcactggtggctcttctcctgcagtgttcaatgctgcacggctcatgtctaccaagctatttattggtggtcttgactggggtgttgatgacgtgaaactaagagaagcatttagcagctttggagaggttactgaagcgagggtgatcacagacagggagactgggatgtcaacatggctaatgaga

SEQ ID NO: 11183 - DNA, 283 bp, Zea mays
cccacgcgtccgcccacgcgtccggtttgcgcaagaagacgacaacggcgatgaggacgatgacggctccgacgatgatgaggaaagcgactttgacgaggacttcaacgacgtggagggtgagttttcggttgatgaggacgacgaagatgacggagaggaggaggaggacgacgacgacgaggacctaccaagctggtccaaccttgagaccgtgaattcctgccatccactgtactttgcaaggatgctcgtagagactgcaaccaagtctagcatagac

SEQ ID NO: 11184 - DNA, 287 bp, Zea mays
gtggcggcggcaggagatgactcgcctagcgcgcgagcaggagatcctggcgcaggagcgctctatggcagcctcacgcgacgctgccgtcctctccttcatacagaagatcaccgggcagaccatcccgatgccatccattgccgcgcccaccatcaacgccatgccaccgccgtcgcatccgaagccgccgccggcccctcagccgcagcccacacccattgcctccgtgtcgccagccccgccgccaccgcaaccaacagcttcgcagactccgcccccgcagc

SEQ ID NO: 11185 - DNA, 289 bp, Zea mays
ggatatggctgataatgagaaagaagccggggagggaaccaccccccgaagggcggactgggaagttgtgactctcacagcatctgcctatgaagcggcgccaggacctgtcggaacagaagtaaagcctgttaatgaaaatcaagagcatagttcatccaatgcactgctcatgtctgaccactttgtgtttccgccgagtgagcacgagaacctgccaatacaaaccagtttcgatgagatacagcctgagaaggatgtgcagaaacctagtaccactgtggaggat

SEQ ID NO: 11186 - DNA, 314 bp, Zea mays
agcttgcagagaagacagaaacactggcagtcgcagaacccgctgaacttaacttcactggaatgaagaagaaaaagaagaagccggtggatcttgattcaactcttgatgagcttggagattgggaggacactcaagatgatcaagctgtagaggaacaaggggaaggcattgtgctgggaagtgtccctacatacccctgggaggggactgatcgggattataaatatgaagagctgctggacagggtgttcaacattctacgtgagaacaacccagatcttgctggggataggcgtaagaccgttatgagg

SEQ ID NO: 11187 - DNA, 304 bp, Zea mays
acggccgcaccggtcgcgtctggaacgtcaccaagcgcgccatcggcgtcgagataaacaagcaggtgaatggtcgcatcatcaagaagcgtatccatgtccgcgtggagcatgtgcagccgtcccgctgcacagaagagttccgcctgatgaaagtgaagaatgaccagctgaaagcggatgcaaaggagcggggcgaagtcatcagcaccaagaggcagccgtttggccccaggcctggcttcatggttgaagggactaccatcgagaccgtcactcccatcccgtacgatgtggtcaatga

SEQ ID NO: 11188 - DNA, 315 bp, Zea mays
ccattctgaaggctcggtcattgaagaaagctagtgaagctcgagtatggaaactcactgcattccagcgcctagacttcaccagcgatgatgtgctggattgcctgaaagaggagcacattattggcaaaggtggtgctgggattgtgtataagggggcgatgccgaatggtgaacttgtggctgtgaagagactcccagcaatgggccgtggctcatcacatgatcatgggttctcggcagagatacaaacacttggtagaattcgacaccgtcatattgtgcgcctgctaagcttctgctcaaacaatgaga

SEQ ID NO: 11189 - DNA, 302 bp, Zea mays
aaacacttgcgccgccgctgcctcacaggtaaggccgccatggtctccggttcgggcgtgtgcgcgaacatgcgtggtcgacgcgcgccaccacatgctgggccgtctctcctcgatcatagccaaggagctgctcaatgggcagaaggtggtcgtcgtccgctgcgaggagatctgcatgtcgggcggcctcgtccgtcagaagatgaagtacctccgcttcctccgcaagcggatgaacaccaagccgtcccacgggcccatccacttccgcgccccggcaagatcctgtggcggcacat

SEQ ID NO: 11190 - DNA, 305 bp, Zea mays
cacatatggcattgaaccagccatggagcactatgcagcctttgtttatgtccttggctgctggggccgttttgacgaggcagagcagcttataggtggtatgccattgcagcctggtgcattagtttggcggtctttgctagacagctgcagcaagcactccaacatggctgtgcggaggcgggccatgaagcatctgctggcattggaaccacaagacccgtccacgtacgtgctgacttcaaacctactatctgaatcagcaaggtggcgctcctctgagaacacaaggctagagatgtatg

SEQ ID NO: 11191 - DNA, 309 bp, Zea mays
ctggtccaggtgttggatgactctgatgatgctaccacttcggcacttatcaaggaggaggtggagaaatggcagcgagagggtgtgcgcatagtataccggcaccgggtgatccgggatggctacaaggctggaaacctgaaatcagccatgaactgcagttacgtgaaagactatgagttcgttgtcatcttcgatgctgatttccaaccacaggcggacttcctgaagcgcaccgtgccccatttcaagggaaaggatgacgtcgggttggttcaggcgagatggtcgttcgtaaacaaggatgag

SEQ ID NO: 11192 - DNA, 313 bp, Zea mays
ggaccaggtaagcagcagcaggaaccctagcaccgccgcatccgcagccatgggtatcgacctcgttgccggtgggaggaacaagaagaccaagcgcacagcgccgaagtccgacgatgtttatctcaagctccttgtcaagctctaccgtttcttggtcaggaggaccaagagcaacttcaatgctgtcattctcaagaggctcttcatgagcaaaaccaatcgcccaccaatctccatgcgccgccttgtcaagttcatggaaggaaaggagaagaacattgctgtgattgttggcacagtcacagatgac

SEQ ID NO: 11193 - DNA, 312 bp, Zea mays
gtcttgcaaagtttgatccagtaaagctgaagaaacttgggccaacttttaagacgaatggttctgtaacggctggcaattcttctagtataagtgatggcgctgctgcaattgtccttgtcagtggagagagagccaagaatcttggccttgaagttattgcaaggattacagggtatgctgatgctgcacaggcacctgagctgtttacgacagctccagcccttgccattccaaaggctatatcaaatgcagctcttcaaacttcacagatagattattatgaagtaaatgaggctttctctgttgttg

SEQ ID NO: 11194 - DNA, 310 bp, Zea mays
gaacagcgtccgggacctggctacgttcttagggtacttcatcgacaagggtgtgtcttctgccgccaaggtggtgaggaaggcttacccgcaagagaatatggggctgtttgttcatcgaggccgcggtggacctctctccgtgggtgagtacagcgaaatggacgcggcgatgactactgagatcaatcagtcgacagggcgactccgttactgctggagcaacatctgcctgcacatgttcactctggacttcttgaaccaagtggcgaacagcctcgagaaggacagtgtataccatctagctgag

SEQ ID NO: 11195 - DNA, 315 bp, Zea mays
ggctgtttatgattgcttgagaacggagtatgggatagaagaagaggatctaatcctgtatgggcaatccgttggaagtggaccaacgttgcatctagcctcacgtctcgagaagttaagaggggttgtcctccacagcggcatactctctggcatacgggttctgtatccagtgaaagtgacgctttggttcgacatcttcaagaacatcgacaaaataaagcaggtggactgccctgtgttagtcatacatggcacagccgacgacatcgtggacttggctcacggcaagcggctgtgggagcctagccaagg

SEQ ID NO: 11196 - DNA, 311 bp, Zea mays
gagcgtcagagcccgatcccgatccagcgaggcggcgaccctccctcctccccttgcttcgctcgtccagccctgaccacccgcatccccgtcagtcatggcagcggcagcaggcggaggcgcggtgcgtgcgctgtcccagaaggagcaggacatacagatgatgctcgccgccgacgtccaccttggcaccaagaactgcgatttccagatggagcgctatgcctttaagcgccgcaccgacggcatctacatcatcaaccttggcaagacatgggagaatctgcagcttgcagcgagggttatcgttg

SEQ ID NO: 11197 - DNA, 310 bp, Zea mays
gccaggaattcttaccgcacgggatttctaggactgattgcatgctcagtaccactgctacattccccaaaatcagctgctcctggcctctaaggtttaagcgcaatgatgttgttgtaagagcaatatcggaagagtgtggcccgcacggcttcccattgatctcagaggtaaaagggcattcattgctggagttgctgatgataatggctatggatgggtaattgcgaaggcacttgctgcggctggtgctgaaattcttgtgggtacatgggtgccggcacttaacatatttgagacaagtctgagg

SEQ ID NO: 11198 - DNA, 312 bp, Zea mays
ggccatcgcgcagaccatcctcacgcgcgacctggccgacgagatcgcgctggtggacgcggtcccggacaagctccgcggggagatgctggacctgcagcacgcggcggcgttcctgccgcgcacgcgcctcgtgtccggcaccgacatgtccgtgaccaggggctcagacctggtcatcgtgacggccggggcgcggcagatccagggcgagacgaggctcgacctgctccagcggaacgtggcgctgttccgcaagatcgtgccgccgctggcggagcagtcccacgacgcgctggtgctcgtcgtgtc

SEQ ID NO: 11199 - DNA, 312 bp, Zea mays
gaggcagcatagcagcagccagctccatccatcctctttcccctcctcgcttcgcttcctcggcggattcctcctccctcgaccgtccccgtccccgtccccttccggcgcgcagctcgcccgagatggcaaacgcgagatcgggtgtcgctgtgaatgacgagtgcatgctcaagttcggcgagctgcagtcgaagaggctgcaccgcttcctaactttcaagatggacgacaagttcaaggagatcgttgtggaccaggtcggggatcgcgctaccagctacgaggacttcacaaacagcctccccgaga

SEQ ID NO: 11200 - DNA, 305 bp, Zea mays
cggaagaaaacggtgagggtgccgacgatgaggagatcgtcctcgccaacgccttcttcctcgtcggcccgctcgccatggcgcttgccggcgggtacaccttgctcatggtgggccgcttcatcgccggcgtcggcgtcgggtacgcgctcgtcatcgcgccagtctacgctgccgagatcgcgccggcgtcatcccgcgggctcctcagctcacttcctgagatttttatcaacactggggtgatgctgagttacgtgtcgaatctcgccttctcggggctgcccgtgcacctgtcgtggcgg

SEQ ID NO: 11201 - DNA, 301 bp, Zea mays
tgagcttaggtcacgtgatacaagcttagaggttgctgagatgcgcaatgcactctttgctgaggaggaatcgactgctttgtccacatgggcagtagcatccatttgtggatgcctcaggttggaacatgtaatgacactttttgctgccgcactcctggagaaacagattgttattgtctgttctaatctgggaatgttatcggcttcagttttgtccatcttacctctaatacgaccgtatcagtggcagagtctcctcatgacggttttgcctaatgacatgatggattttctggat

SEQ ID NO: 11202 - DNA, 303 bp, Zea mays
gggaaggaaaatattatgccatcaacattccacttaaagatgggatagatgacactagctttactcggctttttaaaacaattactgccaaagttgttgagacatatctgcctggtgctattgttcttcaatgtggggctgattcattggcgagggatcgtttaagctgcttcaatctctctattgaaggtcatgctgaatgtgtaaagtttgtcaaggaattcaatattccccttctggtaactggaagtggtggataaccaaagaggatgtagcacggtgttgggccggttgaactggggg

SEQ ID NO: 11203 - DNA, 300 bp, Zea mays
ccagtctctgggcatcgccgacaagatctggaacaacgggcccctcaacacccagatccagtggttccaggagctgatgccgtccatctgcggctcgacgcaggcctgcaagtcgtacctgtccaagtccctgttcgtgctgggcgagttcggcggcaacgactacaacgcgcagatcttcggcggctacaccccggagcaggcgagcaggcagagcgccaccatcgtggacgccatcggcaagggcgtggagcagctcatcagcctgggcgccatgtacgtggtggtccgggcgtgctg

SEQ ID NO: 11204 - DNA, 306 bp, Zea mays
atttgcatattagcagcgaacagaagttattggagaaagtgcaaaatgaattgcttgctcagtatgcaaccccgctgttagagaaggagcattctggatgttctgctttgcttcgcgatgacaaggttgaggatctttctaggatgtacagactcttctccaaaatctcccgtggtctggagcctatttcaaacatgttcaaaacgcatgtcacaagtgagggtacagccttggtcaagcaagcagaagattctgctagtaataagaagccagagaagaaggatatggttggcatgcaggaacagg

SEQ ID NO: 11205 - DNA, 306 bp, Zea mays
gaactacagtggagcagagttggaaggtgttgtcaaaagtgctgtctcgtatgctttgaaccggcagataaccatggatgacctcactaaacctttggatgaggaaagcattaaggttactatggatgactttgtgaatgcacttcatgaaattactcctgcatttggtgcttccaccgatgatctcgaaagatgcagattgcgaggtattgttgactgtggtaaggcacataagcacatttaccagagagctatgctccttgtagagcaagttaaagttagcaaaggtagtccacttgtgacttg

SEQ ID NO: 11206 - DNA, 284 bp, Zea mays
ggacattccacaaccaaaccgacaacgtcatgtgctcgtatttacctgtattcaattcattcaacttcaccaaaggaggattaatacagctcaaccatggaaggcctcaaccgcttcagtacgctgtcaacgcagctttccttgcttctttatacagcgactatcttgaagcggctgacacgcctgggtggtaatgtggaccgaacttctacaccatagaagtcctccgcaagtttgccaggtcacagcttgactacatccttggaaagaacccattgaagatg

SEQ ID NO: 11207 - DNA, 284 bp, Zea mays
cagacggtgagtaacattacccactcaccttttgctgaaagggaacttatgcttattaaggtttctgtcaacactgctgctcggaaggaaatactagatattgctgaaatcttccgagcaaaacctgttgatgtttctgaccacacagtaacgcttcagcttactggagatcttgacaagatggttgcactacaaaggttattggagccatatggcatctgtgaggtcgccagaactggacgagtagcactggtccgcgaatcgaaggtggacaccaagtacct

SEQ ID NO: 11208 - DNA, 281 bp, Zea mays
ctgtatggcgtgtacaaggcagcatcacatggtgggctgaaccttgtccatggagcacttaatgggaagttccctgcacatgttaagtttaggattgataaagattggcgtcgtctccctgagagtagtctcgagcaaggcatcaaggaagattacaatgcagatagcaaatttgatgcagagctcaccataaaacaagtccaaaggttacttttgctgtttaagcctgttactgcacctcgatctgtttcaaataatcaccttggagaaaggcggcagta

SEQ ID NO: 11209 - DNA, 284 bp, Zea mays
cgcccccaaacgttccgaggtttcgcctctcggagcgcaccaacgccacccggagcgactcgccaccgggcggagaaggagggcggaggctaggcgatggcggacgagaatgaggctgggaagaaagaggaagaggaatttaacacaggccctctgtcagtactaatgatgagtgttaagaacaacacccaggttctcatcaattgccgcaacaacaagaagctgcttggccgggttcgtgcttttgatcgccactgtaacatggtgctcgagaacgtgcggga

SEQ ID NO: 11210 - DNA, 289 bp, Zea mays
  unsure (1)..(289): unsure at all n locations
cccacgcgtccgaccctgtccgtcctctccggtcggcgagagcaagaagagatcccgcgccgtcctcttctccacctccacctccacctccacctccacccatggcggcctccaccttcagcggcgacgagacggcgcccttcttcggcttcctcggagccgcgccgcgctcgtcttctcctgcatgggcgccgcctacgtgacggccaagagcggcgtcggcgtcgcctccatgggcgtcatgcgccncgagctcgtcatgaagtccatcgtccccgtcgtcatggcg

SEQ ID NO: 11211 - DNA, 288 bp, Zea mays
cgacaacgtgaaggcgaagatccaggacaaagagggcatccacccagaccagcagcgtctgaacttcgctggcaagcagctggaggatggccgcaccctagcagactacaacatccagaaggagagcactctccacctggtgctccgcctccgcggtggtcagtaagccatgggacatttaagctgctgctgtacctgggtatctgcgtcgtctggtgccctctggtgtacctctatatggatgtcgtcgtctataaacatctgtggtttgtgtgtcatgaatcgtgg

SEQ ID NO: 11212 - DNA, 283 bp, Zea mays
cacacgcgtccggttggattctcctccccctccggttcgggttcgggctcgtgatgatctccggtgttcggtttcgtggttgggcggatcgatatttctgcgtcgtatgttgagtaccgctgcttcgtagtcagcgtctcctggaccacggacgatcactccctgcagaacgccttcatcaactactgcgacgtcctcgagttcaagatcatccgcgatcttgagacgcagatgtcccgcggcttcgtcttcgtcaccttctccactgaggatgcgatgctgg

SEQ ID NO: 11213 - DNA, 286 bp, Zea mays
cccacgcgtccggccgggcatcccggcgctgccagtgtcggccagggacggggagacaatcctcaaggcgatgggcggcgatgtcgcgccacccaagtggcagggcggcgacggcgcgcccgtgtacaggctcggctacggcccggccgtgttgaacctcacctacattggaaacgagactttagcaacaatcgaaaatgtgtttgcagtgatagaaggaaaagaggagcctgacagatatgtgatcataggcaaccatcgtgatgcttggacatttggagcagtt

SEQ ID NO: 11214 - DNA, 284 bp, Zea mays
gcttcttgaagcattgacatcatttattgtcgtggaaagagatggctcaatcatagcgtgtgctgccctcttcccttttcttgaggataaatatggggaagttgctgctattgctgtatctgaagaatgtcgaggccaaggtcaaggagacaaattacttgattacgttgagaagaaggctttgtcccttggacttgagaaactattcttgcttaccacaaggacagcggattggattgttcgtcgcggctttaaggagtgctcgttcgattccctgcctttgg

SEQ ID NO: 11215 - DNA, 285 bp, Zea mays
ccctaagcagggagttgatttatccgctgcagccatgagtaagttgcagtctgagtctgtcaaggatgccatctcccagattgttggggatgccaaggagaagaataggaagatcactgagactgtggaacttcagattggtctgaagaattatgatccacagaaggacaagcgtttcagtggctctgttaagttgccccatatccctcgtcccaagatgaaggtgtgcatgcttggtgatgcccagcatgttgaggaggccgagaagatgggacttgactacat

SEQ ID NO: 11216 - DNA, 284 bp, Zea mays
ctcgcagctagctgacacggccgagaagcagcttgcattgcaggcgtagtacgtacccagcagcagctagcactagcagtccatcggagcgacgatggtgagaaggacggtgctggcggcgctgctggtggccgccgccctcgccggcgggcgcgggcgcactcaaggaggggttctacgactactcctgcccacaggcggagaagatcgtcaaggactacgtgaaggcgcacatcccccacgcgcccgacgtcgcctccaccctgctccgcacccacttccac

SEQ ID NO: 11217 - DNA, 284 bp, Zea mays
tgacatctgcaggcgctccctcgacattgagaggcccaactactccaacttgaatcgccttgtgtctcaggtgatctcatcgctgactgcttctctgaggttcgatggtgccctcaatgtggatgtgaacgagttccagaccaacctggttccttacccgaggatccacttcatgctctcctcctacgcaccggtgatctcttctgcgaaggccttccacgagcagctgtctgtggcggagatcaccagcagcgcgttcgagccggcttccatgatggtcaagt

SEQ ID NO: 11218 - DNA, 276 bp, Zea mays
cacacgcgtccgcggaccgtgggtagggtttttgattttagccgccgccgctgctcatctcacatcccttgagaagacgcctgctcctcgccgatcgatacgatggccgtcatctccgacatccacaccgccgacggcctcaagtccctcgaggctcacctcgccggcaaaacctatgtgtctggtgactccattactaaggatgacattaaggtcttcgccgcggtgccgtcgaagcctggcgctgagtttcctaatgccgcccgctggtacgag

SEQ ID NO: 11219 - DNA, 276 bp, Zea mays
gccaccaccacacgttcacggtagcgagagcttatcgtcgtcggcggcgaagatggtgtcgctgaagctgcagaagcggctcgcagcgagcgtcctcaagtgtgggaaaggcaaagtctggcttgaccccaatgaagtcagcgagatctccatggctaactcccgccagaacatccggaagttggttaaggatgggtttatcatcaggaagcctcagaaggttcactctaggtcccgtgcaagaagggcacatgaggccaagcagaagggaaggca

SEQ ID NO: 11220 - DNA, 274 bp, Zea mays
tgacactcaaggaactgttgaggaggcaaagtggttacacaaagtggtcaaccgccccaatgtctacataaagatccctgctaccgcagaatgtgttcattccatccgtgaagttatcgctaatggcattagcgtcaacgtcacgcttatattctctattgcgagatacgaggctgtgattgatgcttaccttgatgggctagaggcttctggcttgagcgacttatctcgagttaccagtgtcgcatccttctttgtcagtcgagtcgacacc

SEQ ID NO: 11221 - DNA, 280 bp, Zea mays
aactgaatgcaaggaggggaaccgcattggaaaggccaagctcaaaaatggtttttatttagacttactggaaatgacgatgagattaaccttaatggtgatggatctgagaagccagagtttggtgaatggacatggatgacacccaaggaagttatcgaaaaggcagttgatttcaagaaacctgtatatgaggcagcattgaaacactttgccccctacctgcagtcagatccagccgcttcatcatagaagatttggccaatttgcttgcatccct

SEQ ID NO: 11222 - DNA, 276 bp, Zea mays
ggccggcaaggacgagccgatcgacgcctttgcagctgagatacagattttggggcacatcagacaccggaacatcgtgaagatactcggctactgctctaacagatctgtcaagctcctgctttacaactacatccccaacggcaacctgctggagctcctgaaggagaacaggagcctggactgggacacgaggtacaagatcgccgtcgggacgcgaatggcctggcctacctgcaccacgactgcattccggcgatactccacagggatgtc

SEQ ID NO: 11223 - DNA, 278 bp, Zea mays
gattccgggggatgacatgccgttactaccacccgcatccacaaatccaggagcaattgctgagatcaattggtatggaagatccaaaggtgaagacgcagatctgcagagattttacacgtgggaagtgttcaagatcagctaatgagtgccgattcttgcaccattcatctgttgaagatgctgcaattgtttgccaagattttttgcgtggacaatgcaatcgcatagcatgtaggtactctcatgtagtagcacatccggtgccaccaatgagc

SEQ ID NO: 11224 - DNA, 280 bp, Zea mays
cccacgcgtccgcccacgcgtccgggagaagcagccgccgttgctgctgccgcgtccacagaatggggggtttcgtgaagactcataagaccaatgcgtatttcaaacctttccaagtgaaattcaagagaaggcgggctggcaagacagactacagggccaggataaggctgattaaccaagacaaaaacaagtacaacacacccaaatacagatttgttgtgcgatttaccaacaaggacatcactgcccaaatcatatctgctagtatagcgggtga

SEQ ID NO: 11225 - DNA, 250 bp, Zea mays
gaggagaataaggtggtggtgccctagagacaggacccgatgctggtactcaagttcatctggatggagaagaacatcggcatagcactcgaccagctggtttctggctatggcagcatcccgttgagcccgtactacttctggccgcggaaggacgcgtgggaggagcttagagccaagttggaagagaaagagtggatcttgcagaagcagatgatcatccttctcaaccaggccaccgatatcatca

SEQ ID NO: 11226 - DNA, 305 bp, Zea mays
ccggaaggacttcaactcatatggtagccgtcgtggtaatgatgaagtaatggcaaggggaacgtttgcaaacattaggatcgtgaacaagtttttgaacggagaagttggacccaagaccattcatgttcctactggggagaagctttctgtttttgatgcggccatgagatacaaatctgagggccatgctactataatcctcgctggcgctgagtatggaagcggcagttctcgtgattgggctgctaagggtccgatgctcctgggagttaaagctgtaattgccaagagctttgagcgta

SEQ ID NO: 11227 - DNA, 307 bp, Zea mays
ctaaaatttcccccactcgccagtcgcagcagcacctgtagcagccatggacgccagcggaccggtagcaaggggaagaagggggcggccgggcgcaaggcaggcggccccaggaagaagtcggtgacgcggtccgtcaaggccgggctgcagttccccgtcggccggatcgggcgctacctcaagaagggccggtacgcgcagccgtcggcactggcgcccccgtctacctcgccgccgtcctggagtacctcgccgccgaggttctggagttggcagggaactcggcgaaagacaacaagaagac

SEQ ID NO: 11228 - DNA, 309 bp, Zea mays
cgcacgacgagctggatttcgagttcctgggaagccggtggggcgggcagtggcgcgtgcagaccaacgtctacggcaatggcagcactagccgcggccgggaggagcgctacctcctccccttcgaccccaccgtcgaagcccacagctactccatcctctgggctcccacccacatcatcttctacgtcgacgacacgccgatccgggaggtgatccggcacccggacatgggcggcgacttcccggcgaagcgatggcggtgtacgccagcatctgggacggctccgcgtgggccacggacggggg

SEQ ID NO: 11229 - DNA, 184 bp, Zea mays
ccaaggccagcgagcggctcgtctgccacttctaccgcgacaactggccctgcaaggtcgtggacaagcacctgtcggctctggcaaaacagcacgtggagacacggttcgtgaaggtccacgccgagaaggcccccttcctgacagagaagctcaggatagtcgtcctcccgaacctcgccat

SEQ ID NO: 11230 - DNA, 303 bp, Zea mays
cccacgcgtcacccacgcgtccgcccacgcgtccgtccactcatcttttctcgtttagaacctctaaaatttcccccactcgccagtcgcagcagcacctgtagcagccatggacgccagcggagccggtagcaaggggaagaagggggcggccgggcgcaaggcaggcggccccaggaagaagtcggtgacgcggtccgtcaaggccgggctgcagttccccgtcggccggatcgggcgctacctcaagaagggccggtacgcgcacgcgtgaggcactggcgcccccgtctacctcgccgc

SEQ ID NO: 11231 - DNA, 299 bp, Zea mays
ctttctggaatggttgcaatgatcatgcttcgtaccctttaccgggatatctctaagtataaccaacttgagactcaggaagaggcccaggaggagactggatggaagcttgttcacggcgatgttttcaggcctccgtcaaactcagactggctctgtgtttatgttggcaccggtgtgcaattctttggcatgctgcttgtcactatggtatttgcggttcttggcttcctttctccatcgaacaggggtggactgatgacagccatgctcctgctctgggtgttcatggggttgct

SEQ ID NO: 11232 - DNA, 188 bp, Zea mays
gaatgtgagagatttgtttgctgatgctgaaaatgagcagagaacacgaggtgatcagagtgacctccatgttatcatagtcgatgaaattgatgccatctgcaagtctagaggatctacccgtgatggtacaggtgtacatgatagcattgtaaaccagctggttacaaagatagatggtgttgagg

SEQ ID NO: 11233 - DNA, 302 bp, Zea mays
cccacgcgtccgggttttgtaacctgagttgagtgaaatagtcacaaaatggctaaagtcagatcagtggacaagtaatcttgatctgctcactggacttcgcaaatttgcagatgatgaaaagcttcatgctgagtgggcagcagccaagttatcttgcaagaagcgcctggccaaacatgtgttggatgtgacaggtgttacgattgatacaactagccttttcgatatacagattaagcgcatacatgagtacaagagacagctcctaaacatattgggagctgtttacagatacaaaa

SEQ ID NO: 11234 - DNA, 306 bp, Zea mays
gtcgtcgcaagagtcaaggatattacatcaggaaaaggtgtcaatgtcgtctatgattctgttggaaaggatacatacaaggcttccctggagtgcttggcgtcccgcggcttcctggtgtcgtttgggcagtcgtcaggcaaacctgacccaatcccaacgagcgacctggcttccaagtccttgttcctcactcgtcctagcctcatgcattacactgctacccgtgatgagctgctggagtcagccggcgaggtgtttgccaatgtcgctaacggggtgctgcacgtccgggtgaaccacacg

SEQ ID NO: 11235 - DNA, 293 bp, Zea mays
ggatggaggatctgattatcttggcaagggtgttcttaaggctgtcagcaacgtaaacaacattattggaccagcgattgttggaaaggaccccactgagcaggttgagattgacaacttcatggtccaacagcttgatggaacctccaatgagtggggctggtgcagacagaagcttggagcaaatgccatccttgcggtttcacttgctgtgtgcaaagctggagctatggtgaagaagattcctctttaccagcacatcgcaaatcttgctgggaacaaaactctggtgc

SEQ ID NO: 11236 - DNA, 291 bp, Zea mays
gtttccttggaccagccttgttcttaacactgctgagcaaagttcgtactccagccatggctgtattatgtatggcatgcagtcagggtagcgatgctttttcacagtctggcctgtattcaaatcaccaagacattggaccacgttatgcgggggtacttctcggattgtcaaacactgctggcgtgcttgcaggagtttttggtactgcagccactggctacattcttcagaaaggttcttgggatagtgtgtttaaggtgtctgttgtgctgtacatagtaggaacgg

SEQ ID NO: 11237 - DNA, 294 bp, Zea mays
gagcggccgggcgcaaggtcggcgggcctaggaagaagtcggtgtcgaggtccgtgaaggccgggctccagttccccgtcggccgcatcgggcgctacttgaagaagggccgctacacgcagctgtacggcaccggcgcccccgtctacctcgccgctgtcctcgaatacctcgccgctgaagttctggagctcgccggtaatgctgccagggacaactagaagactcgcattattccgcgccacgtgcttctggcgatccggaacgacgaggagcttgggaagctgttgggcg

SEQ ID NO: 11238 - DNA, 295 bp, Zea mays
cggacgcgtggggtgagatgattgaaaatggatgcacacctagccttgttacttacaatattatgattgcgctccaagccaaagcaagaaattatgagaatgttgttacgctgtacaaagacatgcaggttgctgggtttcgtcctgacaaaataacttacagcatcgttatggaagttcttggtcattgcggccatctggatgaggctgaggcggtttttattgagatgaggcgtgattgggctcctgatgagccagtatatggacttttggtcgatctctggggcaaagctgg

SEQ ID NO: 11239 - DNA, 297 bp, Zea mays
gtcttagctgttgatcttgtcaatacaggtgtcggtgagggtcgcctccgtgaaaaatatgcaaaatctattgaacctattcttagtgaagatataagatatgtgcacttcgacttccaccgagtttgtggtcatattcactttgagcgcctttctcagctatatgatcagatcaaggactatcttcagaaacataagtacttccttataaatgataaaggagagaaaattgaggagcagactggcactgtaagaatcaattgtatagattgtctggatcgtaccaatgtgactcag

SEQ ID NO: 11240 - DNA, 300 bp, Zea mays
cgaccacaccgttcctccgagcccaggagcagccccgcgccaggaggaagtttgttcttttaacaatatgtcgagggaggagaatgtttacatggccaagttggctgagcaggctgaaaggtatgaggagatggttgagtatatggagaaggtggctaagactgtagatgtggaagagctcactgttgaggagcgtaaccttctgtctgttgcatacaagaatgtgattggggctcgccgcgcttcatggcgcattgtttcttccattgaacaaaaggaggagtcccgtaagaacgagga

SEQ ID NO: 11241 - DNA, 293 bp, Zea mays
cggacgcgtggcggaacattgaacagcacgcctctgataacgtcaacaagattttggttggcaacaaggccgatatggacgaaagcaagagggctgaacctactgcaaaaggacaagcacttgctgatgagtacgggatcaagttttttgaaacgagtgccaagacaaacctgaatgtggagcaagtgtttttctccatcgcacgtgacatcaagcagaggcttgcggagactgattcaaagccagaggacaaggcaatcaaaattaacaagccagaccagggttccgaggca

SEQ ID NO: 11242 - DNA, 296 bp, Zea mays
gcgccgctcgagattgtcggtcggctttctgccctcgctgatgacgtcgaaacgaattcagacggcagacaagaagaacaaccagcagacccagagctcgatcagttcatggagatctactgtcacatgttggtaaggtacagacaggagctcacaaggccaatccaggaagcggacgaattcttcaaaagcatggaggcccagatcgactcattttcattagatgacaatggctatgaagaaggaggcggttcctccgacgaagatgagcaagaaaccgtcgacttgggcggcct

SEQ ID NO: 11243 - DNA, 295 bp, Zea mays
actcgggctcccccgccaacttcgccgcctacaccgcgctgctcaacccgcacgaccggatcatggggctcgaccttccctccggcggacacctcactcacgggtactacacggccggcggtaagaagatctccgccacctcgatctactttgagagcctgccgtacaaggtgagcgccgcaacggggtacatcgactacgagaagctcgaggagaaggcacttgacttccgccccaagctcatcatctgcggtggcagtgcgtacccgagggactgggattacgccaggctcag

SEQ ID NO: 11244 - DNA, 291 bp, Zea mays
gtctttcggtactcgcgcgcgccactcacttctctacttcccttccccagatctacctccattcttccctcaaaatcacagatctctctcggccccgtgcccagcgctccgaaaccctagcgccgccgcgggtgccaggccgcgagcgtcgccatgggcatcgtgtttacgcggctcttctcgtcggtcttcggtaaccgcgaggctcgcatcctcgtcctcggcctggacaatgctggcaagaccaccatactctatagactgcaaatgggagaggtcgtctccacgatc

SEQ ID NO: 11245 - DNA, 289 bp, Zea mays
cagaggtgagaacgggagagcgaccccagcagacaagagacagacgagagagagcgagcaagccgagcatcgtgacctctctctgtttctctctctcttcccttctcgtcttctgcaagaagccagtgaccgtctctgtttctctcattccctttcatcactctgctggtctccctcttccacctctggtcttggccatggcctccagcgcctcccggttcatcaagtgcgtcacagtgggggacggcgccgtgggaaagacctgcatgctcatctgctacaccagcaa

SEQ ID NO: 11246 - DNA, 291 bp, Zea mays
actgatttgcgtttccagagccatgcggtgcttgctctccaggaggctgctgaggcataccttgttggcctgtttgaggacaccaacctgtgcgccatccatgctaagcgtgtgaccatcatgcccaaggacattcagctggcaaggaggatccgcggcgagagggcctaatcgccacctcaaacatcgtgacaaaaaaatgaagtcctggggttattgttaatctggtgccattgtaaggacatatgagtagggtttgttttgtggatcgcaagtttctcttctgctact

SEQ ID NO: 11247 - DNA, 296 bp, Zea mays
cccacgcgtccgcccacgcgtccgggatgtcagggaagtctcgggaacatacggcgcatttgaaggtgccattacgctgacctcctcaggctcgtcaccagcagcagaacctggggcccctggggggtcgagaacgggacgcgtttctccatcacggcgcccaacggcagcagcatcgcgggattctatgcgcgggcgggaaccaggctcgtcgacgctatcggtgtttacatacgtccagtggtgccaggcaggcctcggtgaacaagcgagccgagctcgctcgtattacgagc

SEQ ID NO: 11248 - DNA, 293 bp, Zea mays
ggaagggcaactacaagcagacggtagacgcggaggagagccgccgccgccgcgagggccagatggtggacatccgcaaggccaagcgcgaggaaagcctccagaagaagcgccgcgatgggtttcccgcctccgccgccggtgtgccgccgatgggccactccaccgcgctccagcagaagctcgatggcttgccggcgatggtgcaggccgtccactccaacgacccctccgtgcagcttgaggccaccacacagttcaggaagctgctttctatagagcgtagtccccca

SEQ ID NO: 11249 - DNA, 290 bp, Zea mays
actagttctagatcgcgagcagacgcactttttttttttttttttttttattttattttttttttattggaaaaggtgaaatagcaagatggtaccaaataaatagataaaagtgcacatgctaacagatctcaacagttctaacgataacagcaacgatcacaaacaaaacttgtgatgatgaaaactaggtattgctaaagcaggcgcaggatcgcatcatttcttcttggcagccgccttggtcaccttggcgccggtcgggtccttcttctccacactcttgaaaa

SEQ ID NO: 11250 - DNA, 289 bp, Zea mays
gcaagaagtatattagattctatcgtgctgtcatagctggggactcgtatccacacacagcgactatgctaagcagtaccagtcaggtagaccttgacaacattgatttgaaggagtttccaacagttgaaagcctggaattcattgactgcatattggtagagggcgacctgctttacatccctactaaatggtggcactacgtcagatctcttcccaccagcttctcggttagcttttggtggcactacaaggttgttgactactggctcgaccgtggaaaatctgg

SEQ ID NO: 11251 - DNA, 292 bp, Zea mays
cgtccacctcctgtccatattttcccctcgtgtccgccgcacgcaccgccggaaccctagcctcagccgccacaggcagccgggatggagaaaggagcctcggaggcgtcggccccctgcgctcgctgcggcaagcccgcgcactaccaatgccccaaatgtgctgaacttaagctaccgcgtgagaacgcagctttctgcacacaggactgttttagggcagcatggagctctcacaaatctgttcacccaaagcctggtgcactggcatcccagcagtctccggaaggtt

SEQ ID NO: 11252 - DNA, 287 bp, Zea mays
gtcacctgatattttttccgacggacacaaaagcatatatatatacatacacgccgacatagggatgatggcttcctctagtcctcagcgtgcagcgggcgccgccgtcgccggcgtgctgctggtggcggctgccgccctgtgctcgtgcggcgccatggcgcagctgaccgcggactactacgactgcacatgccctgacgcctacaacatcgtgaagcaggtcctgatcgaggcgcacaagtccgacgtgcgcatctacgccagcctcacccgcctccacttcc

SEQ ID NO: 11253 - DNA, 286 bp, Zea mays
cccacgcgtccgcccacgcgtccggcgcgcgcaccgcgaactggcctcctcggcgcccgtggtcagcgtcatgaagtactgcgacatcttccgcggcgagtgggtgccggacgcggaggcgccctactacaaccacaagacgtgccacatgatccaggagcaccagacctgcctcaagtacggccgccccgacctgggcttcctcaagtggcggtcgcggccctccggatgcgagctgccgcccttcgacccgctgcagttcctgcagttcgcccgccggaagtcg

SEQ ID NO: 11254 - DNA, 287 bp, Zea mays
tctccctctccgaaatcaaggtagcgtacaccgctgcagtttctagagccctctctgccactcgtgatcccactagtcacaatgcctgccctcgccaagcccgcctcccgcaccgccaagcccgccgcggctccgaagccgaagcctgccgccgccaagccgaagcggccaccgctggtgcctcccacccgccttacttcgagatgatcaaggaggctatcacggcgctcaaggagaggaccggctccagctcgcaagcgatcgccaagtatgtgggggacaagcac

SEQ ID NO: 11255 - DNA, 287 bp, Zea mays
catatatttgatcaagtaattgagaactactgtatttctaaaggagcctccatcggattctggcaaggggacattaggtacctgatggaggatgtgcaagtgatgaaaccgacaatattctgtggtgttcctcgtgtttatgatcgtatatatacaggtataaacatgaaaattcagtctggagggatgatagccagacacctttttcagtatgcctacaactacaaacttgccaatatgaggaaagggctgaaacagcatgaagcatcaccgtttttcgacaagat

SEQ ID NO: 11256 - DNA, 285 bp, Zea mays
ccaaatgttggcaaatcttccttgattaatcgcttgctaaaacgaagaatgtgcccagcagcacctaggccaggtgtcacaagagagctgaagtgggttcgttttggaacagacctagagttgttagattcacctggaattttacctatgcgaattagtgaccagacatctgcaatcaagcttgctatatgtgatgatattggagaaaggtcatacgattttgctgatgtggcggcgattcttgtgcagatgttgataagacatcctgcagtaggttctgaagca

SEQ ID NO: 11257 - DNA, 284 bp, Zea mays
agccgccaccaggtgcagagtctttcgtcatctcttctccggcgaagaacccccagtcgcccaccagatcacttgttaaactttgttgaggggtgatggcggtttctttcgcaaacctcagctccgaggcagggcttaaaaagcttgatgagtaccttctcactcgcagctacatcactggctaccaagcttccaaggatgacttggctgtctacacttcgttttcgtctgctccctcgtccaagtatatcaacgtagcaaggtggtttaatcacattgatgcg

SEQ ID NO: 11258 - DNA, 281 bp, Zea mays
acggcgtgctgcgggcggacgtggagctgcaggcgtggtggaaggaggcgcgcgacgtcgggcacgccgacctcaaggacgcgccctggtggcccaagatgcagacggtggccgagctggtcaaggcctgcaccaccatcatctggatcgcgtcggcgctccacgcggccgtcaacttcgggcagtacccgtacgccgggtacctcccgaaccgcccgtccgtcagccggaagccgatgccggcgccgggcagcgacgagtacgcggagctggagcgcaac

SEQ ID NO: 11259 - DNA, 282 bp, Zea mays
gctcggccttgagacctaccctggcgtcaagcgcatcaacatcaagccccagactgaccgctgggtgttccccgagaccaacactggcatcattgtccttgctgatggtcgcctgatgaaccttgggtgtgctactggccatcctagctttgtcatgtcctgctcattcactaaccaggtcattgcccaacttgaactgtggaaggagaagagctctggcaagtatgagaagaaggtgtatgtgctccccaagcaccttgatgagaaggttgctgatctcca

SEQ ID NO: 11260 - DNA, 296 bp, Zea mays
cagtattgtcctggattctggagacggtgtcagccacactgtcccaatctatgaaggctatgccctcccgcatgccattcttcgtctcgatcttgctggtagggacctcactgattccctcatgaagatcctgactgagaggggttactctttcacaaccactgctgagcgggaaattgtccgtgacatcaaggaaaagcttgcatatgtcgcgctcgactacgaacaagaactcgagaccgccaagagcagctcatcagttgagaagagctatgaactgcctgatggacaagtga

SEQ ID NO: 11261 - DNA, 298 bp, Zea mays
caaacacaagcctcagatctcagtcacctgcgccgccgcttcgttcgtgtggaggggagaagagaggaaatggcggcgaccgacggcgtgctcctggggatgggcaaccccctcctcgacatctccgccgtcgtcgatgacgccttcctgacaaagtatgacatcaagctgaacaatgctattctcgctgaggagaagcacttgcctatgtatgacgagttggctagcaagagcaatgttgaatatattgccggaggagccacccagaactctatcagggttgcccaatggatgcttc

SEQ ID NO: 11262 - DNA, 298 bp, Zea mays
  unsure (1)..(298): unsure at all n locations
cggacgcgtggnggaagacaggaaatggcggcgactgaaggcgtgctcttggggatgggcaaccccctcctcgacatctccgccgtcgtcgatgacgccttccagacaaagtatgacatcaagctgaacaatgctattctcgctgaggagaagcacttgcctatgtatgacgagttggctagcaagagcaatgttgaatatattgccggaggagccacccagaactctatcagggttgcccaatggatgcttcaaactcctggtgcaacaagttacatgggatgcattggaaaggaca

SEQ ID NO: 11263 - DNA, 299 bp, Zea mays
cccacgcgtccgcggacggtgggtttgcagcatgagtacagtggaaatgactgtctccaacttaaaggacatcagacatatactgaagtatcttctctccttgagcacttgatagctttgcatgttcttctcaaagaaatctttttcagcatttctgaagtttggtgggtacgaacaagtagacattcttattcacaaggctagggcgaggctcatgcagccttctttcgcattggtgtgtgacaaaagaaccaagtgcttgctgcttttcattcgaggtgctatcagcactaaagagc

SEQ ID NO: 11264 - DNA, 167 bp, Zea mays
cccacgcgtccgaattcagcagtaggttctttttataaattctttgttgttatgaagcaggcggtacttttgtagttgatgaaggggatttgtcgccactgtcatttacataattcggacaataatttatattgtgtaatcttgagaatcaaagcactgtttgtgtt

SEQ ID NO: 11265 - DNA, 295 bp, Zea mays
ggacttcaagaccgatctccgcttccagtcctccgccgtcgccgcgctgcaggaggcctggaagcggagatcggtcttgaagtctcaggagatctcacggacgaggagaaagagagagagagacatagactcggactcggagagaaggagatgatgtcgagggagcgcaagaaggcggctgctctacaggagaagctgaagatcctccgctccatcactcactcccacgctctgagcaacacgtcgataatcatggacgcgtcggcgtacatcaaggagctgaagcagaaggtgg

SEQ ID NO: 11266 - DNA, 295 bp, Zea mays
acaaaaacatgtacaataaattcttaacttatctaacttatgaacacgttcagaagttagataagttaagaatctcttgtacatgcttttgttctggttatctggtatagatacatgagtcgccccattccattcgactaccgacgcgcagaattcacgcgaacgcacacgcacccacacgacacatccagaacatgcttagggtttccccgtccccggccgccgcggtgccaacccagctctccggtgcgcccgcgacccctgctcccgtcgtcagggtggcggcgtcgcgcgg

SEQ ID NO: 11267 - DNA, 292 bp, Zea mays
accctagcgacacctcgggtcgtcgtttgatccccgcggggagctctagttccgccaagcgtgcgtaccggcgtccggatccgggaccgaagatgacggagtccctggtgcggaacaagccggggatggccagcatcaaggagatgccggtggtgcaggacgggccgccgccgggcggtttcgcgcccgtgcgcttcgcccgccggatccccacctcggggcccagcgccaccgccatcttcctcaccaccttcggtgctttcgcatatggcatgtaccaggtcggccaggg

SEQ ID NO: 11268 - DNA, 294 bp, Zea mays
  unsure (1)..(294): unsure at all n locations
gtggccctaaacattacagcgattgattcacaagtaattggacagaaagataagtcaaaaagcatcctcgatgtttggaagcaggttttgcaaaagaaaagactcaagcgggctggaaaggctgaaagcttnttcaatgaagacaaggacatagactttcttttcacgctcatatctaaccgtggcgattatgaagttactatggacgggatccatgaaaatttcttgagattatcgtatcatgacccgatgttgcaaaaaactgtaaaatgtctcgatatacttggagtttca

SEQ ID NO: 11269 - DNA, 293 bp, Zea mays
cacagtggggggctctaatgtcatcatgcttgatgcacaacaatgttggtgtgggtgaacgtgtaggaaagaaacttattgagctagagccagatgatggtggacgttatgttgttctgttcaatctgtatgcagttaatggtttatgggaagatgcaaaagctcttcgtaagatgatggaagagaggggagccaagaaggagacaggtttgagctttatagagtggaatggtttagtccatgagttcagatcaggtgatacaagacacccccaaacaaggcagatctatgca

SEQ ID NO: 11270 - DNA, 292 bp, Zea mays
cgccgaacgatgctcatcaacggcaacttcgagacggcgccgcggaggctgaacaagaccctcatcgtggggcgccactcgctgccggggtggacggtgcaggggcacgtggagtacgtctcgggcggtccccagcccgggggcatgttcttcgcggtgccgcacggcgtgcacgcgctgcgcctcggcagccgcgcgtcggcgtcgcagaacgtgacggtgcggccgggggcgctgtacgcgctcacgttcgcggcgacgcgacgtgcgctcaggacgatgccctgcgcgt

SEQ ID NO: 11271 - DNA, 292 bp, Zea mays
gtcttctacctcaagatgaagggtgactaccacaggtaccttgctgagttcaagtcaggtgcagagaggaaggatgctgcggagagcaccatgaatgcctacaaagctgctcaggatattgctcttgctgatctggctccaacccaccccatcaggctcgggcttgctctcaacttctcagtgttctactacgagatcctcaactcccctgaccgtgcttgcaaccttgcaaagcaggcctttgatgaggcaatctccgagctagacagcctgggagaggagtctacaagga

SEQ ID NO: 11272 - DNA, 279 bp, Zea mays
gatgctgaagcgtacatggctggctggctggctttgcagaggataccgatatggtggagatggtactcgtgggcttgcccggtggcttggacactgtatgggctcgtcgcctcacagtttggagacaccacacacgtcaggctggaagacgatggggaaacggttaaaaacttcgtcaacagattctttggattcgagcatgagaacctgggttatgtagctactgctgttgttgggttcactgttctcttcgctttcgtctttgccttctccatcaaa

SEQ ID NO: 11273 - DNA, 290 bp, Zea mays
caaatggatcatgaaagagaacaattggagacatacaaattggagcttgaaaagatcaaatcagcattagaagctgagaaggaaaaaatatcagaagagcagaataatctgaaactcacagcgcaagagaggcaggagcatagcttgttgatagcaaaacttaagaaggagattgaggaatacagaatgcgaacaactccctatctgaggaaatggaggatttaaggaagcaacggcagacatttgaagaagagtgggaacaactagacgaaaagagagccctccttgta

SEQ ID NO: 11274 - DNA, 288 bp, Zea mays
cggacgcgtgggtaaattgcaatggctgttgatgtgaatgatcgtggggcaatgctaggccttgtgaagagctccattggtacgaaattcactggccagtttggtgaccttattgctgaccttgctattgatgctactacaacagcaggtgttgaccttggtcagggtatgcgtgaagttgatatcaagaaatacattaaagttgaaaaggttcctggtggtcagttggaggattctagagtccttaaaggagttatgatcaataaggatgtcgtggctcctgggaaa

SEQ ID NO: 11275 - DNA, 287 bp, Zea mays
cggacgcgtgggtgtggatgttactgagttccagaccaaccttgttccatacccacgtattcatttcatgctttcctcatatgcccctgtaatatctgctgagaatgcctaccatgagcagctctctgtgcctgaaatcaccaatgctgtatttgagccctcaagcatgatggccaagtgtgacccaaggcacggaaagtacatggcttgctgcttgatgtaccgcggtgatgttgttcctaaggatgtcaacgctgcagttgcaaccatcaagaccaagagaactg

SEQ ID NO: 11276 - DNA, 290 bp, Zea mays
atttcccccactcgccagtcgcagcagcacctgtagcagccatggacgccagcggaccggtagcaaggggaagaagggggcggccgggcgcaaggcaggcggccccaggaagaagtcggtgacgcggtccgtcaaggccgggctgcagttccccgtcggccggatcgggcgctacctcaagaagggccggtacgcgcagacgtgtggcactggcgcccccgtctacctcgccgccgtcctggagtacctcgccgccgaggttctggagttggcagggaacgcggcgaaag

SEQ ID NO: 11277 - DNA, 288 bp, Zea mays
cccacgcgtccgcccacgcgtccgtatgaaagctgaactgtgtgttgatcttgaattaaaccaagttattgaccgaaatgtaggagatctttctggcggtgagctccagagatttgcaatagcagttgttgcagtgcaaaatgcggaaatctacatgttcgatgagccatcaagttaccttgatgtgaagcagaggctgaaagctgcacaagtcatcaggtccttgcttaggcccaacagctatgtcatcgttgtggaacatgacttgagtgtcttggattacttgtc

SEQ ID NO: 11278 - DNA, 287 bp, Zea mays
cccacgcgtccgggttctatggggtgctggcatcgcttgggctgtggcagaaggaggctaagatcctcttccttggcctcgacaacgccggcaagaccaccctcctccacatgctgaaggacgagcggctcgtacagcaccagccgacgcagtaccccacgtcagaagagttgagcatcggcaggatcaagttcaaggcgttcgaccttgggggccaccagatcgcccgccgcgtctggaaggactactacgccaaggttgatgctgttgtgtacttggtggatgct

SEQ ID NO: 11279 - DNA, 286 bp, Zea mays
cggacggtgggcaagcatgatcctggtgacaagtaccaccttttgcgtctgtatgattacttctactatcgggagcatttgctgatagtctgtgaacttctgaaggcaaatctgtacgagtttcagaaattcaacagagaatcagggggtgaggtttacttcacaatgccaagactgcagtcaatagctattcagtgtctggaggcgctgcagtttctgcatggtctcggtctaatccactgtgatttgaagccagaaaacatattggtaaagagctacagcagat

SEQ ID NO: 11280 - DNA, 273 bp, Zea mays
cacacagaaaaccctagccgccgccaccgaagcggcctcccaggtaagcaagagcgtccaccccgccgccgccatgaagcgcaatccccgcgtcacgagctctcgccggaagtgccgcaagcgcacttcacggccccgtcctccgtccgccgcgttctcatgtccgccgggctgtcgacggagctccgccacaagtacaacgtgcgctccatcccgatccgcaaggacgacgaggtgcaggtcgtgcgcggcacctacaagggccgtgagggg

SEQ ID NO: 11281 - DNA, 290 bp, Zea mays
cccacgcgtccgctggtgtcagccgcgtcactgtaaagaaaagcaagaatatactctttgtcatctccaaaccagatgtgttcaagagtccgaattccgacacgtatgtcatattcggcgaggctaagatcgaggacctcagctcccagctgcagacccaggcagcagagcagttcaaggctcctgacttgagccagatgatctcgaatccagagacgtctggcccgggataggaggacaatgatgaggaggtcgacgaaactggtgttgaggccaaggacattgagttg

SEQ ID NO: 11282 - DNA, 292 bp, Zea mays
ctaccacccatctcgtcgtccgccgattcgatccggttcttccaacccaggggctgtgatggcgacgaagaggagcgtgggcaccctcggcgaggcggatctgaaggggaagaaggtgttcgtgcgcgccgacctcaacgtccctctcgacgacgcccagaagatcaccgacgacacccgcatccgcgcctccgtccccaccatcaagttcctcctcgagaagggcgccaaggtcatcctcgccagccacctgggtcgtccaaaaggtgtcaccccaaagtacagcttgaag

SEQ ID NO: 11283 - DNA, 261 bp, Zea mays
cgaggcacagtccaagagaggtattctcacgctcaagtatccgatcgagcatggtattgtgagcaactgggatgacatggagaaaatctggcatcacactttctacaacgagcttcgtgttgccccagaggagcaccctgtgttgctcactgaggctcctttgaacccaaaggccaacagggagaagatgacccagattatgttcgagactttcaatgttcctgccatgtacgttgcaattcaagcagtgctgtcactcta

SEQ ID NO: 11284 - DNA, 260 bp, Zea mays
ctttttggtgcctttgtcagcagagctggagtgaaggttgtcgatgtcctctcccccaaggttttcattggtttgattgttggagccatgcttccctattggttctctgccatgaccatgaagagtgttggaagtgccgccctaaagatggtggaggaggtccgcagacagttcaacaccattcctgggttgatggagggaactgccaagcctgactatgcaacctgtgtgaagatctccactgatgcttccatcaagga

SEQ ID NO: 11285 - DNA, 260 bp, Zea mays
gtactctacttgtctgcgcctggatcccctccgcagaagataagacatgggtcaagcactcggcttgattcaagtggatcaatcgacagtagccatcaaggaaacttttgggaagtttgacgaggtcctagagcctggatgccacttcttgccatggtgcatagggaagcaaattgctgggtatctgtcactgcgtgtgcagcagcttgatgtccgctgcgaaacaaagacaaaggataatgtcttcgtcaatgttgtgg

SEQ ID NO: 11286 - DNA, 257 bp, Zea mays
  unsure (1)..(257): unsure at all n locations
gaagagtcgagatgcagtgttcattgttgctttgaataaggttgatcgtctctatggttggaagaaatgtccaaatgctcctattgtgaaggctttaaaacaacaaaatgaagatgttaagagggagttcaatatgagactcacagatattgttacacaattcaagatgcaaggagtgaatactgctttgtactacaagaacnaggagatggaagatacctttaacatagtgcctacgagtgctgtaagtggtgaag

SEQ ID NO: 11287 - DNA, 258 bp, Zea mays
ggacgctggcaacgatgaagcagaatttcactaatctcgacatccacgtgggccagtcttactcatttctggtcactatggatcagaacgcaagcagtgattattacatcgtggacaagtgctaggtttgtgaacgaatcgctttggaccagagtcaccggtgttgcaattttgcaatattcaaattcaaagggaaaagcatctggtcctcttcctgatccaccaaatgatgagtatgacaaaactttctcaatgaac

SEQ ID NO: 11288 - DNA, 258 bp, Zea mays
cccacgcgtccgcccacgcgtccggttgtctctgaagctgacatcttcgtgaccaccactggcaacaaggatatcatcatggttgaccacatgaggaagatgaagaacaatgccattgtctgcaacattggccactttgacaatgaaattgatatgctcggccttgagacctaccctggcgtcaagcgcatcaccatcaagccccagactgaccgctgggtgttccccgagaccaacactggcatcattgtccttgct

SEQ ID NO: 11289 - DNA, 259 bp, Zea mays
  unsure (1)..(259): unsure at all n locations
ctcgaccccgacaacgccaccctctacagcaaccgagctgcagcattcctgcagttggttaagcttagcaaagcgcttgctgatgcagagacaacagtcaggctgaagccancatgggagaagggtcatttcaggaaaggttgtgttttggaggcaatggagcgctatgaagaggcgatactcgcatttcagatagctttgcagcacaattcaccaaatacagaagtctcgagaaaaatcaagaggctatctcagttgg

SEQ ID NO: 11290 - DNA, 258 bp, Zea mays
caccgacaaggttgttgctgtgaaaaaggtcatagagaatatgcaagagcaggcttcctatccagctgaccaacaagtccttatacatcaaggaaaggtgctcagcgatgacaccacattagaggaaaatcaagtgactgagaataatttccttgttataatgctcagacagaacaagggatcatcaagtgcagcaccggctaagacaactgcgaatcaggcacctcctactcagacagtgcctgttgttccacctca

SEQ ID NO: 11291 - DNA, 252 bp, Zea mays
cccacgcgtccggttgatagcttttgttcttctagggaagaatctggagcagagggcaaaacttaaagctaccagtgatatgactggactgcttagtattcttccatctaaagcacgcctaatggtggataatgatgctgagaaatcatcattgattgaagtcccatgtgatactctagctgttggggactatgttgttgtgctacctggggatcacatcccagcagacggtattgtgaaagctggaaggag

SEQ ID NO: 11292 - DNA, 255 bp, Zea mays
gtcgaccctttctctaagaaggattggtatgacatcaaggcaccgtcggtgttcagtgtgcgcaacatcgggaagactctcgtatccaggacacagggtaccaggattgcttctgagggtctgaagcacagagtctttgaggtttgcctagctgatcttcagggcgacgaggatcaagcttacaggaaaatcaggctccgtgctgaagatgtgcagggcaggaatgtgctcacaaacttttggggcatgaatttt

SEQ ID NO: 11293 - DNA, 257 bp, Zea mays
cactcatcttttctcgtttagaacctctaaaatttcccccactcgccagtcgcagcagcacctgtagcagccatggacgccagcggagccggtagcaaggggaagaagggggcggccgggcgcaaggcaggcggccccaggaagaagtcggtgacgcggtccgtcaaggccgggctgcagttccccgtcggccggatcgggcgctacctcaagaagggccggtacgcgcacgcgtgggcactggcgcccccgtctac

SEQ ID NO: 11294 - DNA, 261 bp, Zea mays
gccttacatccggggccaccggggcagcaccttcgtcgtcgtcatctccggggaggtcatcgccggcccgcacctcgacggcattctgcacggatatatccccttaccttcatggtactcgggatcaaaatttgttcttgttcctggaacacatgtccagattgataagctcttggctgagagagggaagaaggctaagtatgctggtcgctaccgcattactgattcagattcattagatgctgcaatggaggcagctgg

SEQ ID NO: 11295 - DNA, 253 bp, Zea mays
atcacactcaaggactccaagacccttctcttcggtgacaagccggtcaccgtctttggcatcaggaaccctgaggaaatcccgtggggtgaggctggcgctgagtatgtcgtggagtccaccggcgtcttcactgacaaggacaaggctgctgcacatctcaagggtggtgccaagaaggttgttatctctgccccaagcaaagatgcacccatgtttgttgttggtgtcaatgaggacaagtacacctcgg

SEQ ID NO: 11296 - DNA, 254 bp, Zea mays
tgaaagtttctgaaaaacaagctcgaaaaagaggcatttatgagggaaacgagaaaaaagtgtcactttgccacaggcgagacggaacagatctgaaaagatgtacagaggatattcccgtttcggctgcatcggaggaggacagacaatcaagggcgaacattgctgcctcttttcagcgagttgctgtgttacatttggaagaaaggtgtgagcgagcagttgaatgggcattgaatatggaaccttccatc

SEQ ID NO: 11297 - DNA, 248 bp, Zea mays
actcgacggagctgttccccaagatcttccccgagcagtacaagagcatcgagaccgtcgagggcgacggcaagtcagccggcaccgtccgcctcctcaagtacacgaggggtgcgatgctgacgttcgccaaggagaagcttgagacggcggacgacgagaacaaggtggtgtcgtacagcgtggtggacggcgagctggcggacttctacaagaacttcaagatcacgctgaaggtgactccggcc

SEQ ID NO: 11298 - DNA, 251 bp, Zea mays
ggtgttgtagcagcgagcgggggcaagtcgatggtgaagtacgagggcggctacaccgtggagacggtcttcgacggcagcaagctggggatcgagccctactccgtggaggtcacccagggtggcgagctactcgtaatggactccatgaacagcaacatctacaggatggcgctgccgctgtcccgatatagcaggccaaagcttgttgctggttctccagaaggatttcctggtcatgttgatgggaa

SEQ ID NO: 11299 - DNA, 250 bp, Zea mays
cccacgcgtccgatttaccaagcacttgagaaagtaaatggtattgctgaaaatctgagctgggaaatttttagggataccttgattgaacaagctgagcagggcgttgattacttcacaatccatgctggtgtcctgcttcgttacattcctcttacagcaaagagaatgacgggcatagtttcacgtggtggctcaatccatgcaaaatggtgcttaacttatcacaaggagaactttgcatatgaac

SEQ ID NO: 11300 - DNA, 251 bp, Zea mays
gctcctctaccatctaccccggccatggaatccagttcgtccgcaacgacgccaagatcttccgcttttgccggtcaaagtgccataaaaacttcaagatgaagaggaaccctcgtaaggttaagtggacaaaagcatacaggcatttgcatggcaaggacatgacccaggatacaacctttgagtttgagaggaagaggaacaggcccgagcgctacgaccgcaatttgacggagcagaccctgaaggct

SEQ ID NO: 11301 - DNA, 248 bp, Zea mays
gttatcctttctcctcatggctacttcgctcagtccaatgtgcttggataccctgacactggcggtcaggttgtgtacattctggatcaagtccgtgctttggagaatgagatgcttctgaggattaagcagcaaggccttgatatcactccgaagatcctcattgttaccaggctgttgcctgatgctgctgggactacgtgcggtcagcggctggagaaggtcattggtactgagcacacagacat

SEQ ID NO: 11302 - DNA, 247 bp, Zea mays
caatttctcaatagcctggtcgtcctcaccagacctcgtacaatatagacctttcttcagcacaccagaacttgttgagttccctacatccaagtctggccagaaagcttatgcctatttctacccaccatcaaatcccaattttcaaggtttgcctgatgaaaagcctcctttgcttgtcaaaacacatggaggaccaactgctgaaacacgtgcaattctggacctcagtgtccagtattggaca

SEQ ID NO: 11303 - DNA, 159 bp, Zea mays
ccgagaaggccaaggactccgtcggcatccgccccggcaagggtaagatgcgcaaccgccgctacattaaccgcaagggcccgctcgtcgtctacggcacagaaggctccaaggtcgtcaaggccttccgcaacctccccggcgtggacgtcgccaacg

SEQ ID NO: 11304 - DNA, 154 bp, Zea mays
caaggcctgcctaaggaagtcccctgtggcaaaggatgtggacctgaatgctcttgctaagtacacacaagggttcagtggagcagatatcacagaaatttgccagcgtgcgtgcaaatatgcaatcagagagaacattgagaaggacattgag

SEQ ID NO: 11305 - DNA, 340 bp, Zea mays
gccccgccgccgcttcgacggcgcgccgaccggctaggacgcgcctccgacccggatagtgttccgctcggtcgaatccgacggccgctcgctgctgcagcgggcgcttgctgtgcgtcgcgtgggctcggctggaggcacggggaacctttcctgggtctcggagatggcggcgcctccggcgagggcccgggccgactacgacttcctcatcaagctgctcctcatcggagatagcggtgttgggaaaagttgtctccttttacggttctcagatggctccttcactactagcttcatcaccaccattgggattgacttcaaaataagaacagttgag

SEQ ID NO: 11306 - DNA, 248 bp, Zea mays
  unsure (1)..(248): unsure at all n locations
tgtttccattggatttcaattattagtcaactctagagttgaaacaaacatacaagttcttcattcagtaatcaatatagaagtgcatatctgtttcctcttcatgcctcttgaccaagttttggccanaaattcagtcaaatcttagttaaatctgtttccatctttttttctctctatcacgtgaattgtaataggtttggcctggtaggcctacaactgcagatagtttgcgaagggatttacat

SEQ ID NO: 11307 - DNA, 133 bp, Zea mays
  unsure (1)..(133): unsure at all n locations
cggacgcgtgggcggacgcgtgggtgaataccaaggtgtatggaagcatgccaagagtgatgggcatgaggactatggcctccttgttagtgacaaggcaaggaaatacgccataatggagngagttgatgag

SEQ ID NO: 11308 - DNA, 334 bp, Zea mays
caggaacagagcgaggcgacgccgcggcacctcttctccggcgaagggaaatggcaaccgttccaggggatctgatctggcaggttgtgaggaagaacaactccttccttgtgaagcagttcggcaacggcaatgccaaggtgcagttcaccaaggagccgaacaacctctacaacatccactccttcaaacactcgggtttggcgaacaagaagactgtgacgatccagccagctgcaaaggactcggctgtggtcctctctactaccaagaccaagaagcagaacgcgctgcgaagctcagccacaagtctgtgatgcgcaaggagttccgc

SEQ ID NO: 11309 - DNA, 156 bp, Zea mays
gctagcgcttatagcttgtcagccatggccaccgccgccgcgtctagcctcctcaagtcctccttcgcgggctcccggctcccggccgccacgcggaccacaccggcgtccctcgtggtggccaactgcacgcgctgcgccggcgaggggcccatc

SEQ ID NO: 11310 - DNA, 319 bp, Zea mays
agcgctcaagttctcgcgcccagagccaaatttttctccactcaatcactgcagccatggacgccagcggaccggtagcaaggcgaagaagggggcggctgggcgcaaggctggcggccccaggaagaagtcggtgtcgcggtccgtcaaggccgggctgcagttccccgtcggccggatcgggcgctacctcaagaagggccggtacgcgcacgcgtgggcaccggcgcccccgtctatctcgccgccgtgcttgagtacctcgccgccgaagtgcctggacttgccggcaacgcggcgaaggacaacaagaagacgc

SEQ ID NO: 11311 - DNA, 128 bp, Zea mays
cgcctttctcatccccacgccatactacccagggttcgaccgtgacctcaagtggcgcaccggcgcggagatcgtccccgtgcactgcacgagcggcaacggcttccggctgacgcgcgccgcgctgg

SEQ ID NO: 11312 - DNA, 336 bp, Zea mays
caactcgccgtcgtcttctgcggttctgccgtctacgcctccaatttggcctctctcccttgcaagccatgggtaaggagaagtcccacatcaacattgtggtcattggccacgtcgactctggcaagtcgaccaccaccggccacctgatctacaagcttggaggcattgacaagcgtgtaatagagaggtttgagaaggaggctgctgagatgaacaagcggtccttcaagtatgcttgggtgctcgacaagctcaaggctgagcgtgagaggggtatcaccattgatattgctctgtggaagtttgagaccaccaagtattactgcaccgtca

SEQ ID NO: 11313 - DNA, 325 bp, Zea mays
cccacgcgtccggacacacaaacacaagtcgtcgtaggcagcgagcgtctctcctctcccacgcatcgcgccaaggaagagagagagatcgccgctccccttctcggcgtcggtggtgcgggtgccctccctcctcgagcgagatctgtctggtcacagatctatctgacaaaatggtgaagatctgctgcatcggtgctggctatgtcggtggcccaaccatggccgtcattgccctcaagtgcccagacattgaggtcgtcgtcgttgacatctccaagccccgcattgaggcctggaacagtgacaccctgccaatctacga

SEQ ID NO: 11314 - DNA, 325 bp, Zea mays
ccccttcagcctcatggagggtgcccacactgctgtctcccacggcctgtggctgaacatccctgactatgatgcacccacccagctggtcaagcctaaggagaggaacgaaaggtacgttgatgctgtcatgacaatccccaagggaaccttgttccccatgtgcggcatgaaccttgccttcgacagggatctcattggccctgccatgtacttcggtctcatgggtgatggccagcccattggtcgctacgacgacatgtgggccggatggtgtgtgaaggtcatctgcgaccacttgagcctgggagtcaagactggcttg

SEQ ID NO: 11315 - DNA, 322 bp, Zea mays
cccacgcgtccggtacaaatatgtacccctcttctgctttattaggacagaacaaggatgagtctattgctgctttaccagttgatgatctcattgagaaagccgatggttttgctggtgtattccctgaacataagtatgagatcgtgaaacgtctacaagcacggaagcatatctgtggaatgactggggatggagtaaatgatgctccagccctgaagaaagcggatatcggtattgctgttgccgatgcaactgatgcagccaggagtgcttcagatattgtcctcacagaacctggacttagtgtgatcattagtgc

SEQ ID NO: 11316 - DNA, 322 bp, Zea mays
gggtagaccagcagctggagaggaaggtgctgtgccgccaaatgcttcgctgctcattgaccttgagttgatttcatggaagactgtcacagaaattggggatgataagaaaatccttaagaaggttctcaaggagggagaaggttatgagcgtcccaacgagggtgctgttgttgaagtcaaaattatcggaaagcttcaggatggcgcggtgtttacaaagaaggggcatgacgaagagccatttaaattcaagaccgatgaagaggaagttattgccggtcttgatcgtgctgtgttgaacatgaagaagggcgaggtt

SEQ ID NO: 11317 - DNA, 324 bp, Zea mays
cgcgtcagtgttcctgatgaccaccgtcgggcagcagctgcaaggggagtaccagctctgcaacggctacggcgccgacaaggccgcgccgctgctgagggagcattggagcacgtacatagtggaggacgacttcaagttctttgcgtcgagtgggctgaccgcagtgaggatccccgtcggatggtggatcgccagcgaccccagcccgcccgctccgtacgtcggaggctccctccaagccctggacaacgccttcagatgggcagagaagcacgagctgggtgtcatcgtcgacctgcacgcagctcccgggtcgcagaa

SEQ ID NO: 11318 - DNA, 321 bp, Zea mays
cccacgcgtccgcccacgcgtccgcccaaaaccagcttggcactcgcatcgccttcatcatactcctcgctgttcccatgacggtctggttgcagcgttccaccacgcagttttgctgaggacagtacgacgcggtgagatgcctggcgatgccttgcgcggcgcagtagtcggcgaagtccttgccgtgaactcgccaccgcgatcggtgcgcagagtccccagcctccgcacggactgcgtctccacgccgccaagaagcctgatgatcgactccgccgcccgatctttagaactcagcaagatcagccacatgtagcg

SEQ ID NO: 11319 - DNA, 322 bp, Zea mays
cccacgcgtccgcaagaggctgcttgtctatgagtttgtccccaataacacattggaattccacttacatgcgaaaggtcgaccaacaatggagtggcctgctagattaaagatcagtttgggtgctgccaagggtttagcttatcttcatgaagactgccatccaaagatcatccatcgtgacataaaggcatctaacattcttcttgacttccaatttgaagctaaggttgctgattttggacttgcaaagttcactactgataacaacacccatgtttcgacaagagtaatgggcacctttgggtatttggcacctgag

SEQ ID NO: 11320 - DNA, 318 bp, Zea mays
gcattggagtgcctggagctacggatctgtctatacctggctcttgaagactataagtctgctatctgtgatatccatgcgattcttactctttcacctgattatcggatgttggaaggacgtgtagctgcttccaaaataggcactcttcttggtgcacatgtcgagcagtggaatacggctgagtgttggctacaactttatgagcgctggtcatcagttgatgatattggctccctttcagtgatctatcggatgcttgagtcagatgcagcaaaaggtgtcctctactttaggcaatctttgctgctccttagg

SEQ ID NO: 11321 - DNA, 200 bp, Zea mays
gtttcaaccagttaaggttccagagcctactgtggatgaaacaatacagatcttaagaggacttcgtgagagatatgaacttcatcacaaactgagatacacagatgatgccttaattgctgctgcacagctgtcttatcagtatatcagcgatcgtttcctgcctgacaaagccaatgacctgattgatgaagctggat

SEQ ID NO: 11322 - DNA, 293 bp, Zea mays
gtatgatcttctgtcgattctgagcaagcgcttgacagagctagatgtctctacagtgttgaccatcctacagtgctgtggaatgaagctgcggggagatgatccatgtgctatgaaagattttgtccttagtattcagaactctgtgaatgatcttaaattgcactctggtgttggagcagacgggaagactgatatacgtagcagaagaatggaatttatgcttgaaaccatatgtgacattaagaacaataagaaaaggcctaaagaggatccttcacaccatactcgaa

SEQ ID NO: 11323 - DNA, 293 bp, Zea mays
cccacgcgtccgccgctttgcttcctccagcctccatccgcttctgtgctcctcgccaccgcccatgccgacgccctcgcctccccctatccgccgcagacggcgacgcctccaactcctccaccgtgtccgctgccaaccaacggggctcttccgcttcctccgtcctcaccttccagcaggccatccagcgcctccaggagtactgggcctccgtaagatgcgccgtcatgcagtgtagcaacaccgaggttggagcgggcacaatgaatcctctcacatttcttagggtc

SEQ ID NO: 11324 - DNA, 294 bp, Zea mays
cccacgcgtccgcagaggttgatgccagcattggaaagtggttgtacccacgtatggggttttatccctatgctgctgtgacagaagaatcagccattgctgctttgaagagagcattcggttccctgaacacccatcttgcatcaaacacattccttgttgggcattcagtgacacttgcggatattgtgctgacatgcaatctttatatgggctttagccgtatcttgactaagagttttacctcagagttccctcatattgagaggtacttctggaccatggttaaccagc

SEQ ID NO: 11325 - DNA, 292 bp, Zea mays
atgggtgctgtcctaaatatgaggcctgacttattcagggcagctgttgctggagtgccttttgttgatgttgtcacaactatgcttgatccaactatcccactgacaacagctgaatgggaggcgtggggtgatccaagaaaagaagaattctattattacatgaaatcgtattctcctgttgacaatgtgatggcgcaagagtatcccaacattcttgtcactgcaggcttaaacgatccacgcgtgatgtactctgagcctgcgaaatacgtggcgaagtgcagggagc

SEQ ID NO: 11326 - DNA, 288 bp, Zea mays
cttctaatctatcacgctatgatggtatcaggtatggaggacaggtctcggcggatgacttgaatgagctttatggagagtcccgggctaatggttttggtcatgaggtcaaaatgagaattttgatgggaacctatgctctttctgctgggtactatgatgcatactacaaacgagcacaacaggtcaggacactggttaagcaaagcttcaaagatgctttggaaagatacgacattctaatctcaccagctgcgccatcagcagcctacaagataggtgaaaaga

SEQ ID NO: 11327 - DNA, 284 bp, Zea mays
tgcctctcgagccttgatgcatttctccccttggtttaccatgtccttttgttatttacagatgctacaagggtcctgaactacttgtggatttgttagattatgattactcattggatttgtggagtcttggttgcatgttcgcagcaatggtaagtggaaagaccatgatcaattagttatcttggctaatagacctatgttgatgtgctatatggtattgacagatattccgagtggaccctttctttagtggccaggataattatgatcaattagtgaaa

SEQ ID NO: 11328 - DNA, 288 bp, Zea mays
ccaaagcctccaccagagacggagaggctagtggttatgaggggcgactacagcaaaatggacacatattatgtcatgcccaatgggaagcgtgcaaggtgtgctggtgatgtggataagtttctggaggcaaatccggagtacaaagaccgcatatctgcttcggatttcagctttgcgccacccaaggttgttgaggagactgtttctcacaaccctgcctggcaagctgccaaggccaagaagcaggagaaggcagaggcacaaaagtgaatgatactcccaacg

SEQ ID NO: 11329 - DNA, 288 bp, Zea mays
cacaatgtaccggttattgctgatggtggaatttcaaactctgggcatattgtgaaagctctgtcgctgggggcatccactgttatgatgggcagctttttagctggtagtcatgaagctcctggtacttatgagtataaggacggccgccgagtcaaaaaatacagaggcatgggctctcttgaagccatgacaaaagggagtgatgcaaggtatcttggtgatacactcaagctcaaagtcgcgcagggcgttgttggagcagtagctgacaaaggttctgtactg

SEQ ID NO: 11330 - DNA, 284 bp, Zea mays
gtcgctgatctacgcgttcgtggcgcgtggcaccgtggtgctggctgagtacaccgagttcaccggcaacttcaccaccatcgccgcccagtgcctgcagaagctccccgccagcaacaaccagttcacctacaactgcgacggccacaccttcaactacctcgtcgaggacggattcacgtattgtgtagttgctgttgaatcagttgggcgacaaatccccatagctttcctggacagagttaaggacgacttcaccaaaaagtatggaggcgggaaagcag

SEQ ID NO: 11331 - DNA, 289 bp, Zea mays
cgtctctcctctgggtctggggccgagacaccgagcacgtactaccagcaagatggtggcgtctcccagattcaagcccatcgaggagtgctgctcggaggggcggtcggagcagacggtggccgccgacctggacggcacgctgctcatctccaggagcgcgttcccctactacctcctcgtggctctcgaggccggcagcgtcctccgcgccgcgctgctgctcctgtccgtgccgttcgtctacgtcacctacgccttcttctccgagtcgctggccatcagcacg

SEQ ID NO: 11332 - DNA, 275 bp, Zea mays
gtggcatcaactatcagccaccctctgttgtccctggaggtgacctggcaaaggtccagcgtgccgtgtgcatgatcagcaacaacaccgccgttgccgaggtgttctcacgcatcgaccacaagcttgaccctatgtacgccaagcgcgcattcgttcactggtatgtcggtgagggtatggcagagggtgagctctcagaagcccgtgaggacttggctgctcttgagaaggactatgaggaagtcggtgcaagaggtgccgatgacgaaggt

SEQ ID NO: 11333 - DNA, 288 bp, Zea mays
cagaaatcgggatggttttgaataatgtgagactagtcgcaaaagcccgagagcaaggaaatgatctctttaaagctgccaagtttttagatgcgtccatagcctatggggaagggctcaagtatgatcccttaaattcagtgctccactgcaatcgagctgcttgctggtcaaagctagaaaagtggggaaaagctgtcgacgactgcaacgaggcactaagaatacagccaaactatacaaaggctctcttacggcgagctgcgtcgtatgctaagcttgagcgtt

SEQ ID NO: 11334 - DNA, 287 bp, Zea mays
gagaatgacagcaagggccaggattgtcaatgctggtggggagtgcctcacatttgaccagcttgctctccgtgctccacttggcgagaacacagtcctcttgaggggccccaagaatgcccgtgaggcggtgaggcacttcggcaaggctcctggagtgccgcacagccacaccaagccatatgtgcgctccaagggaaggaagttcgagaaggctcgtggcaggaggaacagccgtgggttcaaggtttaagaaagttgtgggccatcagcatagtaatcacttc

SEQ ID NO: 11335 - DNA, 285 bp, Zea mays
gaaatctaagagaacttgaccttcaggagaatgagattgaggattgctctattcattggctcagtctatttccagtatctttcacttctttggtaactctaaatttttcatgcctagagggggatgtcaatatcactgtacttgaacaattagtaaccagatgcagcaacctcaagactctcaagctcaacaatgctatacctcttgacaagcttgctaacctccttcgcaaggctcctcagattgtagaactcggaacaggaagattctctgcagattaccatc

SEQ ID NO: 11336 - DNA, 283 bp, Zea mays
tgtgacttcaaaaatttcgagaagctggtgcttctagtgggtactgaacttcagcacgtcattgctcagttggctttggaagtcgctgaggcaacagcgccttatgttggctcacaacttaaactgcgtgatgatctattttggtttggaaagcctcgggtactctggtggcttatacagttcatttcatttcagaatgcttttgagctggcaacattcttatggtctctgtgggaactcagtgcacaaacatgtttcatgaagcactactacatggttgcca

SEQ ID NO: 11337 - DNA, 283 bp, Zea mays
cactcgggtaaagctatctcgagctagctagctgctgtaagccgttgccatggccaaaatggtgttgctctgcgtgctcgtctccttcctcctgatgcccttggcctccctagccctgacgcaggacttctgcgtcgccgacctgacctgcagcgacacgccggcggggtaccgtgcaagtccagcgtcaccgccaacgacttctacttccacggcctggccggccagggcaaaataaacccactcatcaaggccgccgtgaccccggccttcgtgggccagt

SEQ ID NO: 11338 - DNA, 283 bp, Zea mays
ctcctccggcatcgacgaggcgaaaccctagcgcccgagtccctctccctgctcccacaacctatggcggcggatatggcgtacgcgccgccgatgaaggctggcaaggccgggttcgaggctggcatgatggatccacagcacaggatccgcatcacgctctcctccaagagcgtcaagaacctcgagaaagtctgcggggatctggtgaagggcgccaagggtaaggagctcaaggtcaagggccccgtgcggatgcctaccaaggtgctccacatcacca

SEQ ID NO: 11339 - DNA, 282 bp, Zea mays
tcagatccaagaagagggaagagcaccaaggaccttcggcgcccgttcaggatccacatcttcccgagcgagttcttggttgacctcttcctcttcggaccacctctaaggctcttggtgtagcttgccactctcaccaatcaagttttcatgtctgatctcgacattcagatcccaactgccttcgatcccttcgctgaggccaatgctggggactctggtgcggcagagggtcaaaggactacgtacacgtgcgcatccagcagcgtaatggtcgcaaga

SEQ ID NO: 11340 - DNA, 284 bp, Zea mays
cccacgcgtccgccgctgtgtaccggcaaccggatttacttaaagaagccaaatttgtatcgctgccaattccacaaacagaatttgcagacttttaatcaccagactgggaacaaacaatggatcgactgactcaagatgaaaacaaaacaaggtatagaagtaggtcgtgattgtcgacgatgttgtgtccgaggaaggtcccgataatattattcacagcagtcatgcgctctttttccttttctcctcttcaatcttagccttaatgtaagagtacatag

SEQ ID NO: 11341 - DNA, 289 bp, Zea mays
cgtcactgccatcaaggaggaaatcaacaaggtcgttaagcttcaagaagagcttgacattgatgtgcttgtgcatggcgagcctgagagaaacgatatggttgagtacttcggtgagcagctctccggttttgcgttcactgccaatggctgggtgcagtcttatgggtcaaggtgcgtcaagcctccgatcatctacggtgacgtgagccgccccaaccccatgaccgttttctggtcgaaacggcacagagcatgacgtctcgcccaatgaaggggatgctgactg

SEQ ID NO: 11342 - DNA, 289 bp, Zea mays
cgcgcccccgctcgcttcacttctctaggtgcgcaccgatcagaaggtgcctgcctcctcctcgtcggcgaaaagatggcggtgccgctgctgacgaagaagatcgtgaagaagcgggtcaagcagttcaagaggccccacctcgaccgctacaagtgccttaagccaagctggcgcaggccaaagggtattgattcccgtgtcaggaggaagttcaagggatgcaccttgatgcccaacattggttatggttctgacaagtcgaccaggcactacctccccagcaagt

SEQ ID NO: 11343 - DNA, 230 bp, Zea mays
ccaacatcaaatccctcccatctcttcccctccgccgccgtctctgctctccaagatcgcgatggcgtcagaaaagaagcagtcgaacccgatgcgggagatcaaggtgcagaagcacgtgctcaatatctccgttggagagagtggagatcgactcacccgcgccgccaaggtgttggagcagttgagtgggcagtctccggttttctccaaggcaaggtatactgtga

SEQ ID NO: 11344 - DNA, 289 bp, Zea mays
caaccccaaaccaatccgtcgcagcactcaaggtcgcaggatgccgccgccgcgtgagcaccaccagccccaggacgaagaggacgacgataccgcagcgttgtcaagctcatcagcgccgagggcttcgaattcgttgttgacaggaaggccgccatggtctccaacaccctccgcaacatgctcacatccccaggcggcttctctgagacgcgccagggcgaggtccgcttcccagagatccccaccaacatcctcgagaagatctgccagtatttctattggtcgc

SEQ ID NO: 11345 - DNA, 286 bp, Zea mays
attggccctggtgtctacgacatccactctcctaggattccctccaccgaggagatcgcagaccgcgtcgagaagatgctcgccgtgctggacaccaacatcctctgggtgaaccctgactgtggtctcaagacacgcaagtacacggaggtcaagcccgccctgaccaacatggtctcggccaccaagctcatccgcacccagcttgccaacgcgaaatgagtcgtttgatagctccatggtttgatagcgcggaatgagccagttgttttgaataatttgggtg

SEQ ID NO: 11346 - DNA, 284 bp, Zea mays
ttccatatgctggcttgaagttttacatatatgaagatctgaaatctcaagttccagacgattacaaggattctgttatactgaagctctcttgcggagtttagctggtctatttggacaaaccctcacttatccactggatgttgtccggagacaaatgcaggttcagagcaagcagtctcaaaattcgagcgatggcttccgtataagaggaacttttcagggtctcttgctcatcattcggtgccaagggtggagacaactctttgctggcttgagcctta

SEQ ID NO: 11347 - DNA, 285 bp, Zea mays
ctagggttttgctgctctccgaccccgagctccgaagtccgcagcatcaggcgaggcccccctcgcgtgtgaccgagatggcgctgccgaatcaggggaccgttgattaccccagcttcaagctcgtcatcgtcggcgatggtggaactggtaaaactacatttgtgaagaggcatctcactggagagtttgagaagaaatatgaaccaaccattggtgtggaagttcatccgttggatttcaccactaactgtggtaagatcaggttctactgctgggataccg

SEQ ID NO: 11348 - DNA, 285 bp, Zea mays
catgaacttcatgcacagggacgaagaggtgaactacttcccttcgaggtttgatcccgcccgtcacgcggagaaggtccccattcctccccgtgttctaacaggctgtcgtgagaagtgcatcattcagaaggagaacaacttcaagcaggctggcgagagatatcgttccttcgaccctgcaaggcaagaccggttcatccagcgatgggttgacgcactgacagaccctcgcgtgacccatgaacaccgtaccatttggatctcctactggtcccagtgcga

SEQ ID NO: 11349 - DNA, 284 bp, Zea mays
ataatacccacaacccactcgatagaagcatcgccccttgaaccctagctcccgcaactgccgccgccactcccacgcccgcagccatgccgcccaagctcgacccgtcgcaggtggtggaggtgttcgtccgtgtgaccggcggcgaggtcggcgcacgtcttcgctggcccccaagatcggcccgctcggtctttcccccaagaagatcggagaggacatcgccaaggagacggccaaggactggaagggcctccgcgtcaccgtcaagctcaccgtccaga

SEQ ID NO: 11350 - DNA, 287 bp, Zea mays
gcacagagtctttgaggtttgcctagctgatcttcagggcgacgaggatcaagcttacaggaaaatcaggctccgtgctgaagatgtgcagggcaggaatgtgctcacaaacttttggggtatgaattttaccactgataaactgagatccctagtgaagaagtggcagacattaatcgaagcccatgttgatgtcaagacaaccgacaactacatgttgcgtttgttctgcatcggcttcacgaagaggcgcccaaaccaggtcaagagaacctgctatgctcagg

SEQ ID NO: 11351 - DNA, 283 bp, Zea mays
cggacgctgggcactcaacacagcacaggcagctcgagagagagagagagagaaagatgtcgtggttcgggcaccaccaccacaaccagccggctcccccggcgtcgggccccaaccaggtgttcaagatcttctgccgcgccaacgagaactactgcctggccgtccgcgacggcgccgtcgtgctggccccggtcaaccccaaggacgagcaccagcactggtacaaggacatgcgcttcagcacccgggtcaaggacgaggaaggcatgccggcgttcgc

SEQ ID NO: 11352 - DNA, 276 bp, Zea mays
agaggttaagttatctcagtatatttcagcattggagaagctgacagcattgagagtgttacaacaggcctcttgtattttccagtcgatgaagattgatatgctctcaagaatgattccgttctttgacttttttgttgtggagaagatttctgttgatgctgtgagacgcaattttgttgctataaaagttaaccatttatcaggagctgttcattttggtactgtggacatagaatctgatggcttaagtgatcaccttagtgttgcagcgga

SEQ ID NO: 11353 - DNA, 262 bp, Zea mays
  unsure (1)..(262): unsure at all n locations
cggacgcgtggtctgacgcgtgggttgtgagcgtaaagctgagctcctggcaaatcctcaggagggagtggttcacccctagctttatgtttggtgtcgccacttcgtcattcctnatgtgaggcgcttggaactaaggtggtctgggtccaagcacttgggacgtcttctgccacatatatccggagtggatagcgtactgtagcactgtggatgttggagcgaactcctactacctgtatagagaggttgtcatattgct

SEQ ID NO: 11354 - DNA, 279 bp, Zea mays
gctccgtccagcgcgtccacctcccaaacccctactcccccaggaagcaatggcttcccccacccagggccaggtcatcacctgcaaagcggcggtggcgtacgagccgaacaagccactcgtgatcgaggacgtgcaggtggcgccgccgcaggcggcgaggtccgcgtcaagatcctcttcaccgcgctctgccacaccgaccactacacctggagcggcaaggatcctgagggtctttttccttgcattcttggccacgaagctgctggaattgtg

SEQ ID NO: 11355 - DNA, 266 bp, Zea mays
agttctgtatgtcgatatcgatatccaccatggcgatggagtggaggaggctttctacacaacagacagggttatgactgtctcgttccacaagtttggtgattaattcccaggaacaggggatatccgtgacattgggcactcaaaagggaagtactactccctgaatgtccctctagatgatgggattgatgatgaaagctaccagccccttttaaagccaatcatgggcaaagttatggaggtttccgccctgtgcagtgtgc

SEQ ID NO: 11356 - DNA, 280 bp, Zea mays
aggatgatggcttcctctagtcctcagcgtgcagcgggcgccgccgtcgccggcgtgctgctggtggcggctgcagcactgtgctcgtgctgcgccatggcgcatctgaccgcggactactacgactgcacatgccctgacgcctacaacatcgtgaagcaggtcctgatcgaagcgcacaagtccgacgtgcgcatctacgccagcctcacccgcctccacttccacgactgcttcgtccagggctgcgatggctcggtgctcctggacgccgttccgg

SEQ ID NO: 11357 - DNA, 282 bp, Zea mays
cacacactcgggtaaagctatctcgagctagctagctgctgtaaccgttgccatggccaaaatggtattgctctgcgtgctcgtctccttcctcctgatgcccttggcctccctagccctgacgcaggacttctgcgtcgccgacctgacctgcagcgacacgccggctgggtacccgtgcaagtccagcgtcaccgccaacgacttctacttccacggcctggccggccagggcaaaataaacccactcatcaaggccgccgtcaccccggccttcgtggg

SEQ ID NO: 11358 - DNA, 294 bp, Zea mays
cccacgcgtccgtgaggctgttaccatcattgaaacccctcctcttgtcattgttgggctcgtggcatatgtgaagactcctcgtggcctccgcacactcaactctgtttgggcccaacatcttagcgaagaagtgaggagaaggttctacaagaactggtgcaagagcaagaagaaggctttcacaaagtatgctctcaaatatgaaaatgatgctggcaagaaggaaattcagctgcagcttgagaagatgaagaaatatgcttctgttatccgtgtcattgctcataccca

SEQ ID NO: 11359 - DNA, 294 bp, Zea mays
gtcgcctgcgccatcgccaagctcggcggatcctccgccttcgtaggcaagttcggcgacgacgagttcgggcacatgctggtgaacatcctgaagcagaacaacgtgaactcggaggggtgcctgttcgacaagcacgcgcggacggcgctggccttcgtgacgctcaagcacgacggggagcgcgagttcatgttctacaggaacccgagcgcggacatgctgctgacggaggcggatctggacctgggcctggtgcggcgcgccagggtgttccactacggctccatctcg

SEQ ID NO: 11360 - DNA, 293 bp, Zea mays
ttccacgacgtcggcctcggcggcatcggctacgaggtcacccgctacctctacgccacctgcaacgacctcaagttccccaacttcggcatcaagacggccgccaacgccaagatgtggagcgagtccggcacgttcatcgggtacgtggccgtgtccaccgacgaggagacggcgcggctcggccgcagggacatcgccgtggcgtggcgcggcaccatcacccgcctcgagtgggtggccgatctgacggccaaccagatccccctgcgcgagacgggcgtcccctgccc

SEQ ID NO: 11361 - DNA, 291 bp, Zea mays
cccacgcgtccgcgtcgagcagctgagaaagtgtttcctccactggatttcacccagcaacccccatgccaggagttgatggcaaaagatcttcatggcaatgagtggaaattccgtcacatctttcgtggccagccaaagcggcatcttctaactacaggttggagtgtctttgtaagtgcaaagagactcgttgctggcgactctgtcctttttatctggaatgacaataaccagcttctgctgggaattcgtcgtgcaaatcggccacaaactgtcatgccatcttca

SEQ ID NO: 11362 - DNA, 292 bp, Zea mays
gctgctataaaaccctccgcctccaccggcggctcgccaaactccgtttcgaattctagggttttgctgctctccgaccccgagctccgatagccgcagcatcaggcgcggcccccctcgcgtgtgaccgagatggcgctgccgaatcaggggaccgttgattaccccagcttcaagctcgtcatcgtcggcgatggtggaactggtaaaactacatttgtgaagaggcatctcactggagagtttgagaagaaatatgaaccaaccattggtgtggaagttcatccgatgg

SEQ ID NO: 11363 - DNA, 280 bp, Zea mays
agacagtcggtgcaggctttgaggtcacagacggagagagattaccgttggctgtaaaagagttaggaagctgtgatttgtacccacagagcttgaagcataatcctaatggacggttcgttgttgtatgtggagatggtgagtacataatttatactgccctggcctggaggaataggtcatttggatctgcactggaatttgtttggtcatcagaaggagaatatgcaattagggaaagtacatcaagaataaagattttcagtaaatcatttcagga

SEQ ID NO: 11364 - DNA, 292 bp, Zea mays
cactacccggcgctcgcgcggctttctttcccaactccgacgaaggctagctacaccaccttgtgcgggctcgtctccatcgcccgccacccgctccgtcgtcgtcgtcaccgccgcgccgatcccgaatcgaatggggagcctggcgtccgagaggaaggtggtcgggtgggccgccagggacgccaccggacacctctccccctactcctacaccctcaggaacacaggccctgaagatgtggtggtgaaggtgctctactgcgggatctgccacacggacatccaccag

SEQ ID NO: 11365 - DNA, 291 bp, Zea mays
cggacgcgtgggcggacgcgtacggatgctcagacagtgttcgataagatgccaagaagaaacactattacatggacttcaatgatctctggatatgctgtcagtggctgacgtgaagaagctgtcttgttgttccgcaagatgaagatgcgcagagtatttgttaaccaccttactattgttagtctccttagtgcttgtggctctatgcagtcaatttatcatggaaaagaacttcatgcccagataataaagaattgtatggaagagaatctccagattgggagtacg

SEQ ID NO: 11366 - DNA, 293 bp, Zea mays
gccacgcgtccgaattactgaggtcgttgcagttagttctcaagctcgacgcacgggtagcagatgcgtattgtgagaacatcacacaggaggttgcacggctcgtcaaagcaaatgcggcacatataaagtcacagatgggctggagaacagtaatattgctgctctccattacagcacgccatccagatgcttccgaagtcggttttgaggctatcgtgttcatcatgacagagggggctcacctttcactagcgaactatggcttctgcatcgatgcggcacggcagttt

SEQ ID NO: 11367 - DNA, 291 bp, Zea mays
cgtgactggtagcaagatcctccgcatcctcaaggcccatgggttggcgccggagatcccggaggatctctacttcctcattaagaaggccgtggcgattaggaagcatctggagaggaacaggaaggacaaggactccaaattcagactcattcttgttgagagcaggatccaccgccttgcccgctactacaagcgtaccaagaagctcccacccacctggaagtacgagtcaaccacggcgagcactctggtggcctaagtgatatcctctgatggcttggtctttag

SEQ ID NO: 11368 - DNA, 275 bp, Zea mays
cttctcgttctcggtgtgctagactgggatgattgcttgaatgagaaatcagcatgggatacattggcttggtttgcagttctggttggaatggcaggacaactcactaacctgggaattgtttcctggatgtcaaactgtgttgccaagctgcttcagtcgttctcactgagttggccagtggcattttgtgttctggaggcctcctacattctgatccactacctatatgcaagccagactggacatgttggagccttatacactgcatatct

SEQ ID NO: 11369 - DNA, 285 bp, Zea mays
gttctagatcgcgagccgccgccctttttttttttttttttttttttttttttttttttttttttttttttttttttttaggctgaaccttcaccattttattttactcaggcagagtgttgtgccctttgcatcacggtattccattcagttacaggtgaattaataccgctgtgtaccggcaaccggatttacttaaagaagccaaatttgtatcgctgccaattccacaaacagaatttgcagacttttaatcaccagactgggaacaaacaatggaccgac

SEQ ID NO: 11370 - DNA, 287 bp, Zea mays
cccacgcgtccggactcccagacttgcatgcaagttaatgcctacataaatcgatcattagatgctgaggctgatcttcgagtacctattgaagcagaaatgtctgaagatacggctgatgatgatatctcttccagagctgggaatctagttgagagcatgaccgctgatttggctggtgaagtgacgtctgctgctggacctgtacgcttggaggatctgcagagaattctgagtgcaatacagtcatcaggtgctgcagctgaccctgatgctggagtaggact

SEQ ID NO: 11371 - DNA, 287 bp, Zea mays
cacttcgccgccgccgctttcgagatctccgggtggagcaagcgaggaaaggcagcagccatgtcgctccgcgtgctgaaccctaacgccgaggtgctcaacaagtcggcagcgctgcacatgaacatcaacgccgccaagggcctccaggacgtgctcaagaccaacctcggccccaagggcaccatcaagatgcttgtgggtggagctggtgacctgaagctgacgaaggatgggaacaccctcttgaaggaaatgcaaattcagaacccaactgcaatcatgat

SEQ ID NO: 11372 - DNA, 286 bp, Zea mays
gtgacaacatgattgagaggtccaccaaccttgactggtacaaaggcccaaccctgcttgaggctcttgaccagatcaccgagcccaagagaccctcggacaagcccctgcgtctccccctccaggatgtgtacaagattggtggtattggaactgtgccagttggtcgtgtggagactggtgtcatcaagcctggtatggttgtcacctttggtccaactggcctgactactgaggtgaagtctgttgagatgcaccatgaggctcttcaggaggcccttcctgg

SEQ ID NO: 11373 - DNA, 283 bp, Zea mays
cattaagctagctagcatgattgaagtggctgcaaagaaaggcgctcgcgatctcaacctgcaaggcaaactcatgaaccagatcgagtggctccctgattcaattggaaagctcactggacttgtcacccttgacatttcggagaatcggatcttggccttgccggaagcaattgggatgctttcttctttggccaagcttgaccttcacgctaacagaattgctcagcttcccgagtcgattggggatctttccaacctgatatatctcgaccttaggggc

SEQ ID NO: 11374 - DNA, 281 bp, Zea mays
acttgctgctgtgaagtactcccgtgggacgttcatctttcctggtgcacagccagccccccacaggagcttctctgaggaagttgctgcacttaaccgctactttggcggcctgaaatctggtggtaatgcttatgtgattggagatccagcaagacctggacagaagtggcacgtcttctacgccactgagtacccagagcaaccaatggttaaccttgagatgtgcatgactggtctggacaagaagaaagcttctgtctttttcaagactaatgctg

SEQ ID NO: 11375 - DNA, 282 bp, Zea mays
caccagccgccgccatgtcgaagcgaggcaggggaggttcggcggggaacaagttccgcatgtcgctgggtctgccggttgccgcgacggtgaactgcgcggacaacacgggcgccaagaacctctacatcatctccgtcaagggcatcaagggccgcctcaaccgcctcccgtccgcctgcgttggcgacatggtcatggccaccgtcaagaaggggaagcccgacctcaggaagaaggtgatgcccgccgtcatcgtccgccagcgcaagccgtggcgcc

SEQ ID NO: 11376 - DNA, 280 bp, Zea mays
gttgctgctgcggtgctgtcggccaaccgaaacttcgaggggcgtgtgaaccctctcactcgggctaactaccttgcctcgccgcctctggttgttgcctatgctcttgccggcactgttgacattgactttgagaaagagcccattggagttggaaagggtggtaaggaagttttcttgagggacatatggccttcaaaccaagagatcgatgaggttgtggagtccagcgtgcagactcacctgttcaagaaagtgtacgactcaatcatggaacgta

SEQ ID NO: 11377 - DNA, 283 bp, Zea mays
gtcagtgctgagatgctcgtcaaccttggtgttccctgggtcattcttggacactctgaaaggagagctctgctgggagaatcaaatgaatttgttggagacaaggttgcgtatgccctgtctcagggactaaaggtcattgcatgtgttggtgagacccttgagcagagggaggctgggtctaccatggatgttgttgctgcacaaacaaaagcaattgctgagaagatcaaggactggagcaacgtagttgttgcctatgaaccagtttgggctattggaa

SEQ ID NO: 11378 - DNA, 320 bp, Zea mays
gacgttccagctctactcgtccaagaaccccaacgtgttcttcgcccggaagcagaaccggtacgggccaatcttcaagacgcacatcctgggctgcccctgcgtgatggtgtccagcccggaggcggcgcgcttcgtgctcgtcacgcaggcccacctcttcaagcccaccttcccggcgagcaaggagcgcatgctggggccgcagcagtcttcttccagcagggcgactaccacgcccacctccgccgcctcgtctcccgggctttctcccccgaggccatccgcggctccgtgcaggccatcgaggccatcgcgct

SEQ ID NO: 11379 - DNA, 315 bp, Zea mays
acgcaatcgacatcccctcgcctaccccagctctacccgcgacgaagcatcaccaggaaggatgacgggctcaatggatctcccggccaagggcgggttcagcttcgacctgtgccgccgcaacagtatgctggagaagaacgggctcaaactcccgggattcaggaagaccggaacaaccatcgtcggcctcgtctttcaggatggggttgttcttggggcagacacaagagcaactgaggggcctatagttgctgataagaattgtgagaagatccactttatggcgccaaacatttattgttgtggagcagg

SEQ ID NO: 11380 - DNA, 311 bp, Zea mays
cggacgcgtgggcggacgcgtgggcggacgcgtggggcgtgcttgacaggctttcacctgagcaagtccttcactgcaacacagaggagcaatgcattgagatcgtgaagcttcttccagcaacccaggctgcacttcttcattgggtcgttgagctcatggctgatgttgttgaggaagaggagtcgaataagatgaatgcaagaaatgttgccatggtttttgcaccaaatatgacacagatgtccgatcctctgacagcactgatgcatgctgttcaagtgatgaacttgctcaaaaccttaattctc

SEQ ID NO: 11381 - DNA, 312 bp, Zea mays
cagacgcgtgggctgcggttctgccgtctacgcctccaatttggcctctctcccttgcaagtttaagcttcaccttcaaccatgggtaaggagaagtcccaactcaacattgtggtcattggccacgtcgactctggcaagtcgaccaccaccggccacctgatctacaagcttggaggcattgacaagcgtgtaatagagaggtttgagaaggaggctgctgagatgaacaagcggtccttcaagtatgcttgggtgctcgacaagctcaaggctgagcgtgagaggggtatcaccattgatattgctctg

SEQ ID NO: 11382 - DNA, 315 bp, Zea mays
acaaagtgccggatacactgccccagaagtggacatgaccggtcagtacaccctcaagagtgatgtctacagctttggagttgtcatgcttgaactattgacaggacgtagaccatttgacagctctagacccaggtcagagcagtcacttgtgcggtgggcaacaccccagctgcatgacatcgacgcattggacaggatggtcgatcctgcactcaagggtctatacccagccaaatctctatcccgatttgctgatgtccttgccctgtgtgtccagcctgaaccagaattcaggccaccaatgtcagaggt

SEQ ID NO: 11383 - DNA, 318 bp, Zea mays
ctacagcgacgtcgagaactccgagcacaagttcgtgctgaaggacaagaagaagccgatcatcttctcgatggcgcgtctcgaccgcgtgaagaacatgacaggcctggtcgagatgtacggcaagaacgcgcgcctgagggagctggcgaacctcgtgatcgttgccggtgaccacggcaaggagtccaaggacagggaggagcaggcggagttcaagaagatgtacagcctcatcgacgagtacaagttgaagggccatatccggtggatctcggcgcagatgaaccgcgtccgcaacggggagctgtaccgcta

SEQ ID NO: 11384 - DNA, 251 bp, Zea mays
actggctgtgaagaagcatatcatagtaaaagataccaggagacagagagatcgtgatgctaatgaagctaaaaatacaaaggctgtggggaaaatatcatttattgatcttgctggaagtgagcgtggtgctgatactactgataatgatagacagacaaggattgagggagcagagataaataaaagtctgttagctcttaaggaatgcattcgagctcttgataatgatcagatacacattcctttca

SEQ ID NO: 11385 - DNA, 307 bp, Zea mays
tcatgcgtgctgttcttatggctggtgcttacccaatggtagggaaaatgctccctcctcgcaaaaatgctagaaaatcagttctggaaacagcgagtggtgccaaagttcgtctgcacccacactcctgcaactttaacctatctttcagtaaatcttctgggaatccactgctgatatacgatgagatcactcgaggtgatggtggaatgtatataaaaaattcttcagttgttgggtcatatcctttgcttctaatagctgcagaaatggttgttgctccacctgatgatgatagtgatgaaga

SEQ ID NO: 11386 - DNA, 308 bp, Zea mays
tggacctacaccttgactttgcttctgctcaacatggacaagccaagttaaaggaatatgccaagagctctttgttgtctgatggaaactacaatacagacaagatcaatggttcaaaccctgatgactatgagaaatttgagaaagggataatgcactatgggtgtccacattatagaaggagatgccgcataagagctccttgctgcaatgaaatttttgattgccgacactgccacaatgaaactaagaattccattaaaattgataacatgaagaggcatgaacttccacgccatgaagtgcag

SEQ ID NO: 11387 - DNA, 301 bp, Zea mays
gggttttgctgctctccgaccccgagctccgaagccgcagcatcaggcgaggcccccctcgcgtgtgaccgagatggcgctgccgaatcaggggaccgttgattaccccagcttcaagctcgtcatcgtcggcgatggtggaactggtaaaactacatttgtgaagaggcatctcactggagagtttgagaagaaatatgaaccaaccattggtgtggaagttcatccgttggatttcaccactaactgtggtaagatcaggttctactgctgggataccgcagtgcaagagaagtttggt

SEQ ID NO: 11388 - DNA, 303 bp, Zea mays
cccacgcgtccgctgcggatacacctcttctgacagggcagcgtgtactggatgcactattcccctcagttctgggaggcacttgtgctattccaggggcatttggttgtggtaaaactgtcattagtcaggcactttccaagtactccaattctgaagctgtggtttatgtgggctgtggtgaacgaggaaatgagatggctgaggttctcatggacttcccccagttgacgatgacattgcctgatggccgtgaggagtcagtcatgaagagaacaaccttggtggctaacacatcaaata

SEQ ID NO: 11389 - DNA, 296 bp, Zea mays
gcattaccagcccgcacgctaagaagctggctaagcagcacagggtggaccttgccaagattactggcaccgggccgtacggtcgaattacgccggcagatattgaggcggctgccggaatcaagccgaagtcagagcccactcctgctgctgctgctgcgccaccacctgtggccgcgccttcagttggtgctgtgcctcaggcagcagtgctgcgccggttcctggcgcgactgttgttccattcactaccatgcaggctgcagtgagcaagaacatggtggagagcctggcag

SEQ ID NO: 11390 - DNA, 303 bp, Zea mays
cccgtccttctccttcccatcggctccacacaaccagaaggttcttcgcttcactctgccctgcgccgccgccaacgctgcagccgcagttgccgcaggcgggaacttggacgtgctactcgcgactgctctcatctgttcccgcgtaggattcgttcacaatggcccgtgtgtatgtcggcaacttggatgcacgcgtgacttccggggaactcgaagatgagttccgtgtgtttggagttctgcgaagtgtttgggtcgcacgcaaaccacctggttttgcatttattgattttgacgaca

SEQ ID NO: 11391 - DNA, 302 bp, Zea mays
cagaaggagaacaacttcaagcaggctggcgagagatatcgttccttcgaccctgcaaggcaagaccggttcatccagcgatgggttgacgcactgacagaccctcgcgtgacccatgaacaccgtaccatttggatctcctactggtcccagtgcgacgccgctcttggccagaagctggcttctaggctgaacctgaagccgagcatgtaagatcgacgaggaagaaagcaggcaccggtggccaaggatgcaacgcaacatggagcgtgtgatgtttacaccaatataattgaataaac

SEQ ID NO: 11392 - DNA, 305 bp, Zea mays
aagtcttggcgctggtattgaaagtcttgttgcacagagcagtttgagagatctgcttttgcaatgctgcatggatgaagcagctgatgttcgacaaagtgcccttgcccttcttggagacctttctagggtttgcccaatacatttgcatccacgtcttcaagaatttcttactgttgcagcaaagcaactgaaccctcagtctgtgaaggatgcggtatcagtagctaacaatgcctgttgggctattggagaattagcaatcaagattggcaaagaaatagcacctgtggtgatcaccgttg

SEQ ID NO: 11393 - DNA, 307 bp, Zea mays
gtaagatggggagagaagcagcgttataagacacgagtagttgagaaatcacctggtgaagaggccggtataaaatcagcaactgttgaactagagggaagatatgcttatggctatctctctggcgagaaagggacacacaggattgtccgtcaatcaccatttaatgctaaagggcttcggcagacaagctttgctggtgttgaggttatgcctcttctaccagaggaatccatggctgtggacatacctgaagaggacctggagataagcttcacaagagctggaggtaaaggaggccagaacg

SEQ ID NO: 11394 - DNA, 312 bp, Zea mays
cccctccctcgctagggttttcgtccccgcgccgccgcgctcccggatcccaccgaaacaaccatggccggcggtcccgcggcggtgtcgttcctgaccaacatcgcgaaggtggctgcggggctcggagccgcggcctcgctcgcctccgcgtcgctctacaccgtcgacggcggcgagcgcgccgtcatcttcgaccgtttccgcggggtgctcccggagaccgtcggcgagggcacccatttcctcgtgccctggctgcagaagcccttcatcttcgacatccgcacgcgcccgcacaacttctcctcc

SEQ ID NO: 11395 - DNA, 293 bp, Zea mays
cggacgcgtggagactggatgctgcttatcgtgtgttggacgagatggggagggctggatttcctcctgacattgtcacgtataattgctttcttaatgtgctatgtagtcttcgaaatgctgatgatgcacttgaactctgtgagaggatgatagaggcacactgtgagcccagtgttcatacctataatatgctgatgatgatgttcttcgagatgggagaggcacatagagcattagatatatggcttgagatggacaaaagaggatgtcaacgtgctatcgatacctac

SEQ ID NO: 11396 - DNA, 297 bp, Zea mays
ctgcaattgaacatgcacatatacgggatgtggattataaccccaagaagcaaaacattgttgcaacagcagaagaggaatttggaattcgcttgtgggatctcagaatgcttaagtatcctctaaaagatctccctgggcactcacattggacatgggctgttcggcacaatcctgcgtatgatgagctccttctgagtgctggaacagattcaactgtaaatttatggttggctaaagttagcagtgacgatcctgaatctgatagcccttctgctttatccaataggcaagaag

SEQ ID NO: 11397 - DNA, 299 bp, Zea mays
atcctctcctgtgggcgctccctctccccggcccccaaatcaccgcgcctccctcgccacgcctcacagggccggttgcgtacgagaaaggagaaaggaaggaggggaggcggtcgtcgggcgagatgagcgactccttctgccccgactgcaagaagcatacggaggtggcgttcgaccactcggcgggggacatggtgtgcaccgagtgcagcctcgtcctcgaggcgcactccgtcgacgagacctccgagtggcgcaccttcgcgaacgagtccaacgacaacgaccccgtccgt

SEQ ID NO: 11398 - DNA, 299 bp, Zea mays
gcccgtccaagcccttcgccggcgctaggatctcggggtctctccacatgaccatccagaccgccgtcctcatcgagaccctcaccgcgctcggcgccgaggtccgctggtgctcctgcaacatcttctccacgcaggaccacgccgccgccgccatcgcgcgcgactcggccgccgtgttcgcctggatagggggagaccctcgaggagtactggtggtgcaccgagcgctgcctcgactggtgcgaggcgggcggccccgacctcatcgtcgacgacggcggcgacgcacgctgctc

SEQ ID NO: 11399 - DNA, 298 bp, Zea mays
atttggattctgcagattctctaataaggctgacaacagtcatgtcctatttataactgtgatggaaggcgattatggaaaaatagtgtcttggaatactacctcatggacgagaaccggatcaaagaaaataactcgtgaggcaatttcagcttttgctgtgtcacccaacggtgctcttcttgcaattggaacaatagaaggaagcatcatcgtagttggctcaaaagacatgcggacacttgtaacagttaaaaaggctcatcttggtattgttactacgctgaccttctctcag

SEQ ID NO: 11400 - DNA, 299 bp, Zea mays
gttgccaaagaattccctcccctagccgccgccgccgctcgtctccctgagaggtgccgggaccgaggaactggccgagttctaggtagagaatcggttttgcttgtctcagcacggggtctgctgcgtctggtggtggtgaaggggagaaattcgtgagatctgttccggatcaggcgtgcgagctcgggaatcaggggtttcacacatagctccgtcgatttgaatttgatgtactaatggagtctaagggtggcaaaaagtctagcagtagtcgttccatgatgtatgaagctccc

SEQ ID NO: 11401 - DNA, 136 bp, Zea mays
cccacgcgtccgcgcaacaggcaagcaagaagagagccgatcgaccgagagctagcacgcgatggcgaggtcttccaagatgatggtggcggcagctctgctggccttcgccctggccgtgtcgaccgccgaggcg

SEQ ID NO: 11402 - DNA, 338 bp, Zea mays
cgaacctatgaacttcgaccccagctcactggtctacagcgatgtgatcaggagggtcctggcaggcttctctccttcggacttctcggtcgcagttaccatctttggtggccgtgggttcgccaaatcatgggcgacgggtgcagacatcgattcctacatgtgcggtgatcctgtagagcaagagcttcctggtggcggtctgctgatgtaccagagctttactgctgttccctctggctctgtatcgccgaggtcgaccttgcagacggatggctggagcagcgatggaatggagatggcctcaaatgacgagatgtgtattggctgctggaatg

SEQ ID NO: 11403 - DNA, 339 bp, Zea mays
cggacggtgggccggtgatgaacttcggcatcttgatagttgggtgaaggagaacaagctggaccagctacaatttgctcggcagaaactgacatattgcctatctgtctgctgctgctaccgtattttcttctgaattgtctgacgctcgcatttcatgggccaaaaatggtgtcctcacaactgtggttgatgacttcttcgatgttggtggatcaaaagaagaattagaaaacctgatagcactagttgagaaatggcatgcgcaccatgcagttgagttctattcggaacaggtgaaaatagtattttctgctatttatacaacagtgaaccatc

SEQ ID NO: 11404 - DNA, 337 bp, Zea mays
aggaccccaacaagcctaagagggctcccagcgctttcttcgtgttcatggaggaatttcgcaaggagttcaaggagaagaaccctaagaacaagtctgtcgctgcggtggggaaagctgctggcgacaggtggaaatccctgagcgagtcggacaaggctccctatgtagccaaggctaacaagctcaagctcgagtacaacaaggccatcgctgcctacaacaagggcgagagcactgcagctaagaaggctcctgccaaggaggaagaggaggaagatgaagaggagtctgacaagtccaagtcggaggtcaatgacgaggatgatgaagaggg

SEQ ID NO: 11405 - DNA, 337 bp, Zea mays
ataacatctcagaatgcttcaacaattggattaaagattacaaagatctcccagtcgctgatctaatggataagattagggagaaaattatggagaagatttatacaaggcaagagatagccaatcgaatggaagggcgtatcctacaaagtgtgatacgtgagttgaacatgaagagcagaggattgcactatgaaatcgtgaagagtggactgttgtcagctgagatatcaggaataacaaaagaagggaagaattggagagttgcagctgacattaagaaaagaacttgtggatgtggacagtggcagatttctggaaaaccttgcactcatgc

SEQ ID NO: 11406 - DNA, 333 bp, Zea mays
tgcccgtcgtcgtatcccccggtccgccggtcacctcgacaaacggcgaagggcggcaaaatgctgcagtgcatctttctcctctccgattccggggaggtgatggtggagaagcagatggcggcgcactgcgtggaccgcgctatctgcgcctggttctgggactacgtcgtcgcccacgccgccggcgatccttccaaagtcttacaggttgtggtgtcaccaacgcattacttgtttcaaatctatcgcaatggtgtaacgttcttggcatgcacccaagtggagatggccccactgatggcagttgagtttctctctcgcgtggctgat

SEQ ID NO: 11407 - DNA, 330 bp, Zea mays
cactccagaaccccaaatccagttccgttccaatcgccgagaagggcagcaaaggggagaaaaaaaaaggaaatctatggcggcggccggcggcgagaacagcggcgctggcgagggcgaaggcgagttctacctgcgctactacgtgggacacaagggcaagttcgggcacgagttcctcgagttcgagttccgccccgacggcaagctccgctacgccaacaactccaactacaagaacgacaccatgatccgcaaggaggtcttcgtctcgccctccgtcctccgcgcagccaggaggatcatccaggagtccgacatcatgaagga

SEQ ID NO: 11408 - DNA, 328 bp, Zea mays
gctgcatttcctcttctgaagggagtcgttgcgacaactgatgttgtggaagcgtgcactggcgtgaatgtggccgtcatggttggtggattccccaggaaggagggaatggaaaggaaagatgttatgtctaaaaatgtttcaatctacaaaacccaagcatctgctcttgaagcccatgcggcccccaactgcaaggttctggtggttgccaacccagcgaacaccaatgctcttatcttgaaagaatttgctccatcaattcctgataggaacgttacttgcctgacccggctggaccacaacagggctcttggccagatttctg

SEQ ID NO: 11409 - DNA, 327 bp, Zea mays
cccacgcgtccgaatcatgcttccatgtctggttggattcgtgaaagggatccaacaagactcctccattatgagggaggtggttccagaacatcatccacagatattgtgtgccccatgtatatgcgtgtctgggatgttgttaagatagcaaaagatccatctgaaacaaggcctctaattctttgcgaatattcacatgctatgggaaacagtaatgggaatattgatgcgtattggatggccatagacaacacttttggactccaaggaggttttatatgggactgggctgatcagggtttactgaaggaggactcagatggg

SEQ ID NO: 11410 - DNA, 329 bp, Zea mays
cccacgcgtccgcctttctgtgtctattgaggatgtgcgtgatctagaggagctgcaagctgttgaagcatttagacaagcactactcttggatgagctgatgcctgcaagacacgatgactatcatatgatgctgagatttctaaaagcaaggaaatttgatatcgacaaagcaaagcaaatgtggatggatatgcttcattggcggagggagtatggcactgatacgattttggaggacttcgattacactgagttggacactgttttgcaatattatcctcatggttatcatggagttgacaaagaggggagacccgtttatattg

SEQ ID NO: 11411 - DNA, 331 bp, Zea mays
gccacaccgacctgcacgtcatcaagaacgactggcgaaacgccatgtacccagttgtcccggggcacgagatcgtgggcgtggtgaccggcgtcggcggcggcgtcacgcggttcaaggccggcgacacggtcggcgtgggctacttcgtggggtcctgccgctcctgcgacagctgcggcaagggggacgacaactactgcgcggggatcgtgctcacctccaacggcgtcgaccacgcgcacggcggcgcgcccaccagggggggattctccgacgtcctggtcgcgaacgagcactacgtggtccacgtccccgacggcctggcgct

SEQ ID NO: 11412 - DNA, 321 bp, Zea mays
atatgacaaatgcttatcattcgcctgccaggccggtcatccatattttgggcccacagtatggatgaccttcctggcaggcaaatcataagcatttgtcacttagccatcccagtgcggcagtcacccacggtggcgcactcctcggcgagccccgaacctgcagcagcgtggagcccaggactgctatgagcttcgtcaccgttctcgttggtggagttgacgacggcgtcgacctcgaggttccacggatggcctcgccagaggtagatcttcgagttgatctcgtaatcgacggggaaccgcgacgcgccacggccc

SEQ ID NO: 11413 - DNA, 330 bp, Zea mays
catcgaccttcaagtctcgctacgtagcagtgcaataaaaaaagcagccgcaatggcgagcagcaccatggccctctcctccacggccttcgccggcaaggccgtgaacgtgccgtcgtcgtccgccttcggcgaagcccgcgtgacgatgcgtaagacggcggggaaggccaagccggcggcggcgtccgggagcccgtggtacggccccgaccgcgtgctgtacctgggcccactgtccggcgagccgccgagctacctgacgggcgagttcccgggcctctacggctgggacaccgcggggctgtcggcggacccggagacgttcgc

SEQ ID NO: 11414 - DNA, 318 bp, Zea mays
cccacgcgtccggggagatgtacttataggtcttccttccagtggtgttcattctaacgggttctctcttgttagaagagtactggagaaaagtggactttctttggatgatcagctcccaagaaatgatggcataacaactacggttggtgaagctctaatggcaccaaccttcatctatgttaagcaggtgcttgagattattagcaaaggtggtgtgaaaggactagcccacatcactggtggtggctttactgacaatatcccaagagtattcccctccggatgcggggcaaaaatttttactgggtcatggga

SEQ ID NO: 11415 - DNA, 311 bp, Zea mays
cccacgcgtccgtttagctttcctccctccctcctctctttctctcctctaacaagaacttagtcccggcagttcagatcctaagttgctgaccttgctgctgcatgttggagatagatttgctgcttctaagttggaaataccatgagtccaccgagtgtgatggggcagtttggggacacgacctacaccaaggtttttgttgggggactcgcgtgggaaacccagaaggagactatgagcaagtatttcgagcagtttggagagatcctggaggctgttgtcatcactgacaagaacactggcagatc

SEQ ID NO: 11416 - DNA, 317 bp, Zea mays
tggagctctacgagtggaccaaggtcgacatctctgatgaggcccagaaggagcgtgtcaatgccatgatcgaggaccaggaaccctttgagggcgaggccttgcttgacgcgaaatgcttcaagtgagtgtgctttatccagagctgtttagccctcgaattggatgtctatgttgatctggtatatcttgctatgaactggttaaggtttgtgctggtttgagaatttttgtttaccttctcatcatttaagtgtttcgccgtaacaattttggtcatgtttttgaaagcctgtttgtattcgcgtcgtagttgg

SEQ ID NO: 11417 - DNA, 318 bp, Zea mays
catcaactcgcaaaacccacagtcctgtccctacatctgcgtccagtcttatcctcttccttcgcggttgccgccgtcggcgacgacgaggatgtcgtagtcggggattgcctcgtgttcgacgacgacgctttcgaggaaccggacctggacctcccctcgtccccgtggccgtcggctagcgcctcacgccacggccggaggtcggaggcaggcgagagcgacagcctggtgccggagaggtggaggcatgccgaggaggagatcaacctgacgaagaaggataagcgccgcatcgcgcacgggctgcggttcggg

SEQ ID NO: 11418 - DNA, 309 bp, Zea mays
cgctacgtcatgaataatgagccttactgcctgaatttaattgatacaccagggcatgttgatttctcgtacgaggtttcccgctctctagctgcctgtgagggcgcacttcttgttgttgatgcttctcacggtgttgaagctcagacgttagcgaatgtgtaccttgcattggaaaacaaccttgaaatcataccggttctaaataaaatagatcttcctggtgctgaacctgatcgtgtcgcacaggaaattgaagagataattggattggactgtcgtgatgcaattcggtgttcagcaaaggaa

SEQ ID NO: 11419 - DNA, 315 bp, Zea mays
cccaggacaaaaatgcgctaacccaaccgggaactcgctcaccgagccatacattgttgcccacaacctcctccgagctcacgctgagactgtccatgagtacaacaagcattacagaggtaacaaggacgcacagatagggattgcattcgacgtgatgggccgtgtgccatatgacaatatgtttctcgacggccaggcccaagaaaggtccattgattataacctaggatggttcatggagccggtagttcgcggcgactaccctttctccatgagatcattgatcaaggatcggctaccctacttcaccga

SEQ ID NO: 11420 - DNA, 314 bp, Zea mays
cggacgcgtgggtcctggcaccacaaaaccttgtcctggtgctcctcccttttctccacctcctccatacaaccctacaacccctgtgcaatcaccaggaagtaacttttccagtactggagcaattgctggtggagtggctgctggtgcagccttgctatttgctattcctgcaattagttttgcctattggcggcgcaggaaaccacaagaacatttctttgatgtacctgccgaggaagatccagaggtgcatcttggccagcttaaaagattttcactacgagaattacaagttgcaacagatggcttca

SEQ ID NO: 11421 - DNA, 322 bp, Zea mays
cgagcccgcggcgaccaggccgctcaagatcggcgttgtgctctccggtggacaggcgccgggcggccacaatgtcatctgcggcatctttgactatctacaggcgcgtgcaaaaggcagcaccttgtatggatttaagggaggcccagctgggatcatgaagtgcaagtatgtagaactcacttcagactttgtgtatccctacagaaatcagggtggatttgatatgatctgcagtggaagggacaagattgaaacaccggagcagtttaagcaagctgaagacacggccaacaagcttgatttggatggacttgttgtc

SEQ ID NO: 11422 - DNA, 250 bp, Zea mays
agacattggagcgaattcgtaccatatgtacaaaacggatgtcagattgctgaaggaaatgggcatggacgcatataggttctctatctcttggcctagaatactgcctatgggaacggtcgaagggggtattaagcaggatggcatcgattactacagaaggctcatcaacttgttgctagaggatggcatagagccatatgtaacaaatttccactgggatgtccctcaagcactagaagagaagtac

SEQ ID NO: 11423 - DNA, 233 bp, Zea mays
ggatttgttcagttctgctatgagccaatcaagcaaatcatcaagacctgcatgaatgaccagaaggagaaattgtggcccatgctgcaaaagctcaatgttaccatgaaggctgatgagaaggagttgattggcaaagccttgatgaagcgttgtatgcaacgtggcttcaactagcactgccctgcttgagatgatgatattccaccttccttccccagcaaaggctcaaa

SEQ ID NO: 11424 - DNA, 230 bp, Zea mays
ccaaacaccacggaaaaaacaatgttgcattcctctgcctgtttatgcttggtaaagttgaagattgcatacagttgcttgtagacagcaaccgtatacctgaagctgcagtactggcgcgttcatatcttcctatcaaagtaccacagatagtggcaatttggagagacgacctgagttaaattaatccataagctgcagagtctctatcagatccttctgaatatcca

SEQ ID NO: 11425 - DNA, 233 bp, Zea mays
cccacgcgtccgcccacgcgtccgcccacgcgtccgctctttcccaaatccaccgccggctcggctcgcccatcttcgcgccaagcaccgaatctccgatggcccgcacgaagcagacggcgcgcaagtcgacgggcggcaaggcgccccgcaagcagctggccaccaaggcggcgcgcaagtcggcgccggcaaccggtggcgtgaagaagcctcaccgcttccgccccggc

SEQ ID NO: 11426 - DNA, 235 bp, Zea mays
gggaaaagataatacaggaattcaaagatggctacaccaaggttcttatatcaactgatgttcttgctcgatgttttgaccaagcacaggttaacctcgtcatcaactacgacatgccaatcaaatttggtacaagagatgaacctgattatgaggtgtacttgcacagaattggcagagctgggcgctttggccggaaaggtgctgtgttcaacttgctgtgtggtcaaaccga

SEQ ID NO: 11427 - DNA, 248 bp, Zea mays
atctcctcgcatttccttgcaaccgattgccttcccccctcccaacccaagaccgatggcgcccaaggccgagaagaagcccgcggcgaagaagccggcggaggaggagcccgcggcggagaagacgaccgccgggaagaagcccaaggcggagaagcggatccccgctggcaagtccgccggcaaggagggcggcgagggcaagcgtggcaagaagaagggcaagaagagcgtggagacgtacaaga

SEQ ID NO: 11428 - DNA, 252 bp, Zea mays
ggatattctgactgggtttaaaatgcatgcaaggtgctggcaatcaatctactgcatgccaccacgaccttgtttcaagggttctgcaccaatcaatctttccgatcgtcttaatcaggttctccgttgggctcttgggtcagtggaaattctgcttagtagacattgtcctatctggtatggttacaatggacgattgaagcttttggagaggctggcttacatcaacactattgtatatccaatcacatc

SEQ ID NO: 11429 - DNA, 250 bp, Zea mays
cccgacaagctgtgcgaccaggtgtcggacgccgtgcttgacgcatgcctcgcgcaggaccccgacagcaaggtggcctgcgagacctgcaccaagaccaacatggtgatggtgttcggcgagatcacgaccaaggcgaccgtggactacgagaagatcgtgcgcgacacctgccgcgagatcgggttcacctccgacgacgtgggcctcgacgccgaccgctgcaaggtgctggtgaacatcgagcagc

SEQ ID NO: 11430 - DNA, 242 bp, Zea mays
agcaagctcaaaccctaaccgccggcgacgccagcacgatggcccgctacgaccgcgcgatcaccgtcttctcccccgacggccacctcttccaggtcgagtacgccctggaggccgtccgcacgggcaacgccgccgtcggcgtccgctgcacggacaccgtcgtcctcggtgtggagaagaagtcaacccccaagctccaggactccaggtccgtgcgcaagatcgcgtgcctggacacc

SEQ ID NO: 11431 - DNA, 195 bp, Zea mays
gtcttgccaaggttgatgatgtagatgccgtcggtgcggcgcgggttatcgttgccatcgagaacccgcaggacatcatcgtccagtccgcccgcccctatggccagcgtgctgtcctcaagttcgctcagtacactggcgctcatgccatcgctgggaagcacaccctggtaacttcactaaccagcttcagac

SEQ ID NO: 11432 - DNA, 237 bp, Zea mays
gcagccaacaaccagctgtccacaagaacgtcgattgagagggtcttctgggcaagctttgaagaccttcccaacgccctcaagtcatgcttcctctacttggctgctttccccaagggcaccttcctgtctactggcagtatagtgcggttgtggatggccgagggattcattaggccacagaagggcaagaccatcgaggagatgggccacgactatttcaaggagctggccttg

SEQ ID NO: 11433 - DNA, 223 bp, Zea mays
  unsure (1)..(223): unsure at all n locations
gctctctgaaggaactccattaagccaagcagctaccttttttgcgaattcggatccagacatgcccgctgctcctgtacctgctgctttggtacatgattgggccttgcagcatatagcttcagcattagaatttatggcagagaagactgtggcaaaagaanacagccaacataatgcatttgatcctgatgtcacaatgtctgatgctgtcacgaataca

SEQ ID NO: 11434 - DNA, 220 bp, Zea mays
gtacactgtctcagaatggagcaggacttcttcacacaacatgtggaacaccaaattatgttgctcctgaggtgctaggtagcgatggatatgacggacctgcagcagacatttggtcatgtggtgtcattctctatgctttaatggctggttaccttccctttgaggatcatgaccttccaagtttgtatgaaaagatcactgcagctaagtactcatg

SEQ ID NO: 11435 - DNA, 332 bp, Zea mays
attccgcattcgttccaactcctgagcactttctcctcgtccccgacaagccaatcgaagccgagatacggccatggactccaccggcaccggagcagggggtaatgggaagaagggagcggccgggcgcaaggtcggcgggccaaggaagaagtcggtgtcgaggtccgtgaaggccgggctccagttccccgtcggccgcatcgggcgctacttgaagaagggccgctacgcgcacgtagtcggcaccggcgcccccgtctacctcgccgctgtcctcgaatacctcgccgctgaggttctggagctcgccggtaatgctgccagggaca

SEQ ID NO: 11436 - DNA, 333 bp, Zea mays
cctagtggtgctgggaaaagcacagtggtacaacttctagcacggtattatgagccaactcaaggttccatcactgtcgcaggagaagacatccgtgtatttgacaaaagggaatggtctcgagtagtatctctagtcaatcaggatccggtcctattctccgtgtctgttggagaaaatattgcttatggtctcccagatgatgttgtctctaaggatgagataataaaagctgctaaagctgccaatgctcatgaattcatcatctctcttccacaggggtatgatactcttgttggagagcgaggtagtctcctaagtgggggacaaagg

SEQ ID NO: 11437 - DNA, 333 bp, Zea mays
cccgcactccgcccctcccccgcgggaaggctccgttcgtcgttctcgcccgcggcggcggccacggctgcatcggtcggctgcctcgggtccttctccggcctcgcgcccgtctcgaatctcctctccctcggcgctgagaactcaagctttgagcatcggttgtttggtattgatgcccgtggaaggatagttgcgatgcgacatgggagacgcgttcctaaacttaacatgcctccggatcaaaggaaagcgctgttgcgtgggcttaccacacagctgctgaagcatgggaggataaagactacaaagccaagggcaaaggcaatgagg

SEQ ID NO: 11438 - DNA, 330 bp, Zea mays
ccgcgctgcaggggcgacgcaaggccgagcgctcctcgatccagatccaaggtaggagatggctctcacgagaattggcctcgccggcctcgcggtcatgggacagaaccttgccctcaacatcgcggagaaagggttccccatctcggtctacaacaggacaacctccaaggttgatgagaccgtgcagcgtgccaaggtcgaaggaaacctcccagtgtttggtttccacgaccccgcgtccttcgtgagctccatccagaagccccgtgtcgtcatcatgctcgtcaaggctggggcgccggtggaccagaccattgccacgctcgc

SEQ ID NO: 11439 - DNA, 335 bp, Zea mays
gtcgcttccagccgccgccgccgcgtccgcctcgcccagcgcacagccgccgcagcacatcgctatctcgatctcagccatggcggaggtggagcagcaacaggacacgccgaagctgttcaaccgctggaccttcgatgatgtccaggtgaacgacatctcgctgaacgactacctcgctgtgaacgcgacgaagcacgcgatgtacctgccgcacaccgcggggcgttactccaagaagcggttccgcaaggcgcagtgcccgatcgtcgagcgcctcacaaactccctcatgatgcacgggcgcaacaacggcaagaaggtcatggctgtcc

SEQ ID NO: 11440 - DNA, 328 bp, Zea mays
cccacgcgtccgccgaagctgtgcctcgtaccatttcgatccaatggcgccgacgtcgaagctgtcgacgggcatcaagcgcgcttcgcggtcgcacgcgtaccatcgccgtgggctgtgggccatcaaggccaagatctgcggcgccttccccaaggccgacaaggccgccgccgccgtggaacccaagttctaccctgccgacgacgtcaagccccgcgttcccagcacccgcaagcctaagcctaccaagctcaggtcgagcatcacgcctgggacggtgctgatcctcctcgcagggcgcttcatggggaagagagtggtgttt

SEQ ID NO: 11441 - DNA, 325 bp, Zea mays
gcggagagaccgaagaagcgggagagatggctcgtaccaagcagactgctcgcaagtccacgggagggaaggctcccaggaagcagcttgccaccaaggctgcccgtaagtctgcccccaccactggtggagtgaagaagcctcaccgctaccgccctggaactgttgcactccgtgagatccgcaagtaccagaagagcactgagctgctgatcaggaagctgcccttccagaggctcgttagggaaattgcacaggacttcaagactgatttgcgtttccagagccatgcggtgcttgctctccaggaggctgctgaggcata

SEQ ID NO: 11442 - DNA, 332 bp, Zea mays
gatcggtacaaggatcaccgctgtgcctgcgcgtgctgcttcaccgaatcgagtcagatcctgtccgaatccgagctaagggatggcaaccggtagtgaagcctcgaaggcagctgaggctgtggttgactggcataaacacgacagcaagatgatgctccatgcggtgtaccgtgttggggatctggaccgcacaatcaagtactacacggaatgctttgggatgaaactgctgaggaaaagggatgttcctgatgagaagtacaccaatgccttccttggctttgggccagagaacaccaactttgcagttgaattgacatacaactatg

SEQ ID NO: 11443 - DNA, 328 bp, Zea mays
cccacgcgtccgcagcctctttgtgtatccccacaaggttgttctgaagacctgtgggacgacgaagctgctgctcgccattcctcgcatccttgagcttgctgcagggctgtcactgcctcttctttcagcgaagtactctcgtgggaccttcatcttccccggcgcgcagccgcgccacaccgcagcttctcggaggaggtatctgtgctgaacgctttctttggtaacctcaagtccggtggcaatgcctacctgatcggtgaaccgttcaagcccaacaagaagtggcatgtctactacgccacagaggagcctgagcgtccta

SEQ ID NO: 11444 - DNA, 327 bp, Zea mays
caaacgcgccattgacgcgcactcgtagtcttgactcttgcgtgcttccctcgtcttctcggacgttccgttccatcgccatggcggaccagcttagcgaggagcagattgccgagttcaaggaagctttcagcctcttcgacaaggacggcgacggttgcatcacaaccaaggagctcggaaccgtgatgcggtctctcgggcagaaccccaccgaggcggagctgcaggacatgatcgccgaggtggacagcaacggcagcggcaccatcgacgagcaggagttcctgggcctgatggcgcgcaagatgagggacgcggagtcgg

SEQ ID NO: 11445 - DNA, 329 bp, Zea mays
  unsure (1)..(329): unsure at all n locations
gaaagaagggagcggccgggcgcaaggtcggcgggccaaggaagaagtcggtgtcgaggtccgtgaaggctgggctccagttccccgtcggccgcatcgggcgctacttgaagaagggccgctacgcgcagtngtcggcaccggcgcccccgtctacctcgccgctgtcctcgaatacctcgccgctgaggttctggagctcgccggtaatgctgccagggacaacaagaagactcgcattattccgcgccacgtgcttctggcgatccggaacgacgaggagctcgggaagctgctgggcggcgtgaccatcgctcacggaggtgtgc

SEQ ID NO: 11446 - DNA, 265 bp, Zea mays
gggaggcagtaacatggcaatctcagcttcttcatcttcctctgcaatatcctcaataggcgcctcttcactgcctattggactgtaaatgttgctccgtccacttaattggaaatagagatagctggcatacgccacaagcataatacaactactgaaccttgaaagtgcaacctctgatgccccttgacgcacttctgaatgagtgaaatgaagaacggcaggaaacatcaatcccatgacagccactagttctagatcgcga

SEQ ID NO: 11447 - DNA, 325 bp, Zea mays
gggaaagccagatttgtccctgaaattcgttcaacaagttttgccgaagaatcaagatcagaatttcatatatggcatgcttgccttccctttgcttgagcttggacggatggatgaagctgagagagctgctcgaagaggcttggctataaacaagaatgacttctggtcacagcataatttgtgccatgtttttcagcaggaatgtcgtttcagagaagctactgagttcatggaatcatgttctccgtcatgggaggcatgcacatcatttctgttaactcacaactggtggcatgtagctgtttgttacttagaagctgag

SEQ ID NO: 11448 - DNA, 325 bp, Zea mays
cccgccgccgcggcggccatggtggaccgcatgctccgcctgctcgcctcctacgacgtcgtccggtgccagatggaggaccgggacggccggtacgagcgccgctactccgccgcgcccgtctgcacatggctcacccccaacgaggacggcgtgtccatggccgccctcgcgctcatgaaccaggacaaggtcctcatggagagctggtactatctcaaggacgcggtgctggacggcggcatcccgttcaacaaggcgtacgggatgacggcgttcgagtaccacggcacggactcgcgcttcaaccgcgtgttcaacgagg

SEQ ID NO: 11449 - DNA, 319 bp, Zea mays
ggacgagctgttcgacaagtgccgcgtccggcccaaggacgtgggcgtgctggttgtcaactgcagcctcttcaacccgacgcgatccctgtccgccatgatcgtcaaccactacaagatgcgcggcaacatcctgagctacaacctgggcggcatgggctgcatcgcgggcgtcatcgccatcgatctggcccgcgacatgctccaggccagctgcgctggcctggccgtggtggtcagcacggaggccgtctccttcacgtggtaccccgggaagctgcgctccatgctcatcccgaacgccttcttccgggcgggc

SEQ ID NO: 11450 - DNA, 321 bp, Zea mays
cgcacaccagcacctgccctcctcgccgtcgccgcctccctccgcgcgaccgatctaccctccgccgccaccatgtcgctgatcgccggggaggacttccagcatatcctgcgtttgctgaacaccaacgtggatgggaagcagaagatcatgttcgccatgacctcaatcaagggtgtcgggcgccgcttctccaacatcgtctgcaagaaggccgacatcgacatgaacaagagggccggcgagctgacgcctgatgagctggagcgcctgatgacggtcgtggccaaccctaggcagttcaaggtgccggactggttc

SEQ ID NO: 11451 - DNA, 320 bp, Zea mays
acacagaagcggcggcggcggacaaacgcaggcgaaggcgagggtgtgagggaaggagcaccagccatggtgcacgtcaacttctaccgcaactatggtaagacgttcaagaaaccaaggcgtccttatgagaaggagcgtcttgatgctgaactgaagctggttggtgagtatgggctgaggtgcaagcgtgagctttggagggtccagtatgcactgagcaggatccgtaatgctgcaaggcacttgctcacccttgacgagaagaacccccgtcgtatctttgagggtgaggcacttcttcgccgcatgaaccgcta

SEQ ID NO: 11452 - DNA, 320 bp, Zea mays
aaatccagtttgttctgctggtgggttagctgtgcttaaggttcttgacaaggagaaacgccaggcacattgtgctgatgttggatctcacttgttggagcgtctaaaatcgcttcaggagaagcacgaaatcataggtgatgttagaggaaggggactgatgcttggggtggaactcgttacgggcagaaaggagaagacccctgccaagtcagaaaccattgaactgtttgagaagctcagagatctcggggtactagttggaaagggcggtctgcatggtaacgtcttcagaataaaaccaccgatgtgcttttcga

SEQ ID NO: 11453 - DNA, 320 bp, Zea mays
cccaaggccccaactacccccagtctcggaagagaactatccagaagcgcaagactccaaagccgtcgccttcctatccatcccttcctcgccacgggggtcgcctgagatcacataaacaatggtgaaggctgttgctgtgcttggtagcagcgatggtgtcaagggcaccatctttttcacccaagtgggagatggccctaccactgtcaccggaagtgtctctggcctcaagcctggcctccatgggtttcatgtgcatgcgcttggtgacaccaccaatggctgcatgtcaactggaccacactacaatcctgcga

SEQ ID NO: 11454 - DNA, 322 bp, Zea mays
gggcatccgctgcatcatccgcatggagaactagatttcgctgtctagtttgtgatctggcctgggcttggggttaataaaagaggtaatgctagcctgccctttcgatgaggaggtacatacacgctggcgatggaccgcgcttgtgtgtcgcgttcagtttggcttttgccaagcagtatggtagcttcccgtgtcggtaattatatggtatgaaccatcaccttttggctctacatggtatgaacgtaagatacaaattccaactacctctagctcgcttgtgtggtatctgtatcagtattcatgtgtctgtttgctt

SEQ ID NO: 11455 - DNA, 318 bp, Zea mays
cccacgcgtccgcggacgcgtgggcccacgcgtccgccctttgcaagtatagtctctctgctaagcgacggacttcaagctagtctcggcggctctagaagacgatgggcttaggtcgacgtgatctagagcggcgctggcggcggcgagttcgctgccaaggactacacggaccctcccccggcgccgctgatcgacgcggcggagctggggtcctggtcgctgtaccgcgccgtgatcgccgagttcatcgccacgctgctgttcctgtacatcacggtggccaccgtgatcgggtacaagcaccagacggacgcg

SEQ ID NO: 11456 - DNA, 316 bp, Zea mays
agatcaacgactaccagaagagccggttcgtgaaccgcgtcgtggcctccatgttcaacaccgtcgccggcaagaagatcgccgtcctcggcttcgccttcaagaaagacaccggtgacaccagggagaccccggccattgacgtctgcaagggcctgctgggcgacaaggcccagatcagcatctacgacccccaggtgacggaggaccagatccagcgggacctggccatgaacaagttcgactgggaccacccgatgcacctgcaaccgacgagccccacggccattaagcaggtgagctgcgtgtgggacgc

SEQ ID NO: 11457 - DNA, 276 bp, Zea mays
gtctgcccgcatcttcgtcgacgagtgcggcctcaacggcctcctcacccccgagcagttcctcgaggagcgcgagagcatgctccaagcgctcttcccatcctgtaccaagctgccaggagtactacgtttggtgcatcatcttcatgccaacggagtaccaatggctgttgcgacaggatcccataaacgccattttgcactgaagacccagaatcaccaggaaatgttttccctgatgcatcacgttgtcatgggtgatgatccggaggtgaa

SEQ ID NO: 11458 - DNA, 272 bp, Zea mays
gaagccgagaagatggtgctgaagacggaactctgccgcttcagtggccagaagatctatcctgggaaaggcatccggtttattcgtgctgattctcaggttttcctttttgccaactcgaaatgcaagcgctacttccacaaccgcctgaagcctgcaaagcttacctggacagcaatgtacaggaagcagcacaagaaggacatccatgctgaagctgtcaagaagaggcgccgcgccaccaagaagccatactcgaggtccattgtggg

SEQ ID NO: 11459 - DNA, 280 bp, Zea mays
gcaccatatacctgcagcaagtccgtgacggcaagggcccccgtgctttcctcggcgagaagctgtgcagcgagtcgagcttccgggtgaaggagatcaacgagcggtccaagcggaggcaggcggacgggcagagcagcaaggtgagcccaagcaagtcgcagagccagggcacgctggagcggatggcgcacacgacggtgcacgtgtggacggggcgggcgaacccggcgacgtgcagcgcggagcaaggcggcgtggtggggcacgacggcaagcc

SEQ ID NO: 11460 - DNA, 279 bp, Zea mays
atctcatgccatgtctgaaatgaatggtgtatattgctctacgaggccaattcgtataggacctgcgactcccagaagatcttcaggtgattctggctcctcgactcctggtcattcagatggtgattcttctaacagaacggtatatgttggtgggcttgaccccaatgtcagtgaagatgaactgagaaaagcctttgccaaatatgatcttgcctctgtgaaaattcctctaggaaagcaatgtggctttgttcaatttgttagcagaactgatgc

SEQ ID NO: 11461 - DNA, 273 bp, Zea mays
attagagggagcgccctgcccaagcaaagagaaaccgcggcgcgagaagatggaggaagggcagacgggcgagcaggatgagagagatcatcagcatccacatcggccaggccgggatccaggtcggcaacgcctgctgggagctctactgcctcgagcacggcatcgagcccgatggcaccatgcccagtgatacctcggttggcgtcgcacatgatgccttcaacacgttcttcagcgagaccggttctggcaagcatgtgccgagggcca

SEQ ID NO: 11462 - DNA, 261 bp, Zea mays
ggaccctacaatacgataagatggaaccccaaaggacgatttgttgtattagcaggttttggcaatttgcctggtgatatggcattctgggattattcagaaaaaaaattggtagcgataacaaatgccgaatgttctgtcacaagtgaatggtcccctgatggtcgtcattttatgactgctacaacagctccgaggcttcaaatagaccattgtataaaaatatttgaccaccacggatctctgcagtttaagaagatg

SEQ ID NO: 11463 - DNA, 283 bp, Zea mays
ccgttagactaggttaggctagggtgtcgaccagctcgcggaaatggtggccttcaggttccatcagtaccaggtggtggggcgcgcgctgccgacgcccggcgacgagcaccccaagatctaccgcatgaagctctgggccaccaacgaagtccgcgccaagagcaagttctggtacttcctgaggaagttgaagaaggttaagaagagcaacggtcaggtcctggccatcaacgagatcttcgagcgtaacccgacgacgatcaagaactacggcatctgg

SEQ ID NO: 11464 - DNA, 281 bp, Zea mays
cccacgcgtccggctcgttcgatctgtgcagcagatctgaggtcccgggcgaccgtgaagcagcttcaatcgtcggcatggcgctcgtattgcatagtggggctggaaacaagaatgccttcaaagcacttattgctgcagaatacagtgggatcaaggttgagttgaccaaggattttgagatgggtgtctccaacaagacccctgagtttcttaagatgaacccccttgggaaggttcctgttctggagactcctgatggccctgtttttgagagtaat

SEQ ID NO: 11465 - DNA, 273 bp, Zea mays
cccacgcgtccgattccttctcccagccgtcgagctgcccaacccagagcaccagcagccctcaccttcttcctctcggccggtccttcaaacgagcccgctcgtcttggagccgccgccggtctcgttctggacgaacgttcaaggagattgcatttgtggatgctctaatggagtcgaaaggtggcaagaagtctagtagtagtagtagtaatttcatgtacgaagctccccttggctacaagatcgaggacgttcgcccagccggaggaa

SEQ ID NO: 11466 - DNA, 272 bp, Zea mays
agaacctctaaaatttcccccactcgccagtcgcagcagcacctgtagcagccatggacgccagcggagcggtagcaaggggaagaagggggcggccgggcgcaaggcaggcggccccaggaagaagtcggtgacgcggtccgtcaaggccgggctgcagttccccgtcggccggatcgggcgctacctcaagaagggccggtacgcgcagctgtgggcactggcgcccccgtctacctcgccgccgttctggagtactcgccgccgaggtt

SEQ ID NO: 11467 - DNA, 270 bp, Zea mays
gatcatcatatgaacttagttgatggggatgtcagttggaataaggcagataaatttggcagcaggccagatgagggatccttgcaatttttacaaaaacgtagtcacaatattggttccaaaagcaggaggttcttaatcgatgctgaagatgccatggaactaaagcttacctgggaagaggctcaagagttgttgcgccctgctcccactgcaaaaccaactgttgtgatgattgaggactatgaatttgaagaatatgatgaaccc

SEQ ID NO: 11468 - DNA, 90 bp, Zea mays
gcgtgttatgcaaacgtggctaccagccagcactggacttcttgagatgatgatattccaacttccttccccggcaaaggctcaaaagta

SEQ ID NO: 11469 - DNA, 254 bp, Zea mays
cggacgcgtggtcgcggaacgagacgttcgagaagctggggacgctaggcacgtcggcgaacctgctggtgtacctgacgcaggtgttccacatgcggacgtacgacgcggcgacgctactcaacgggctcaacggcaccaccagcctcgcccccatcatcggcgccttcctctccgacgcctacctcggccgctacctcgcgctcggcatcgcctcggtcgcctccctcatcggcatgttcctgctgacgatg

SEQ ID NO: 11470 - DNA, 264 bp, Zea mays
gaaatttcagttctcaatctacaaaaggtcttatcagagatgataatcgaagtgaagcatttgttttcatgatatcaactagagcaggtggtgtggggcttaatctcattggtgccgatactgttatattttatgaacaagattggaatcctcaagctgacaaacaggctctacagcgcgctcaccgcattggacagctgaatcatgtcttgtcaataaatttggtgtcacagcgcacaattgaagaggtcataatgcgaagag

SEQ ID NO: 11471 - DNA, 265 bp, Zea mays
caagatccaagaggagcttgacattgatgtgcttgtgcatggagagccagagagaaatgacatggttgagtacttcggtgagcaattatctggttttgcgttcactgccaacggatgggtgcaatcctatggatcacgctgtgtgaagccacccattatctatggtgatgtcagccggccgaaccccatgactgttttctggtccaagatggcacagagcatgacccctcgtcccatgaagggaatgttgactggtccggtcaca

SEQ ID NO: 11472 - DNA, 264 bp, Zea mays
gattatttctgctgcatatcttgctagccattttcttaattattgcctcatagcctgtttgtgtgcagggggataaaaatataattaaatttgatggtgatcataattctccaagacctcaatcatattatgattcagtttctatattcttctacaaatctttgcatcctcctctgctgcctgcagcacgatcaaagcttcatatgggagcatttaaagttggtaacataaccaatgagaatttcttctttgaaatcatcaatg

SEQ ID NO: 11473 - DNA, 235 bp, Zea mays
gcagagaatccccaagcaaacaaacagggtagaggtagagggagaggagaggagacgagaggtgaggagaggttgggtctgggacaccatggctccgatgaagctgtacggggcggtgatgtcgtggaacgtgacgaggtgcgcaacggcgctggaggaggctggctccgactacgagatcgtgcccatcaacttcgccaccgccgagcacaagagccccgagcacctcgtccgc

SEQ ID NO: 11474 - DNA, 214 bp, Zea mays
ggccactaaaataaaagaattcatagtggaaatgaaagttctttgcaaggttcatcatgctagtctgaattgattggctatgcaggtggcaaggatgagcttttcctggtttatgagtactcccaaaatggttcactcaaaaatcatctacatgatcctgaaagaaaagggtgttcaacaccttcatggatccttcggggccaaaatgcacctg

SEQ ID NO: 11475 - DNA, 252 bp, Zea mays
cggacgcgtggcgcggtatgatctctcataagcatgaacgtgccctgcaacataacgtcgggaaatcggtatccagtgccggacaaatctgctcccgtttacagtacggtcggtgatggaggcaaccaggaaggacttgcttcaaggttttataacccccagccggattactcagcgttcagggaggccagctatggtcactcagttttacagctgaaaaacaggacccatgctatctaccagtggaataga

SEQ ID NO: 11476 - DNA, 274 bp, Zea mays
ctcacgcgtccgcggacggtgggctgcaacaccctcgaggtacctccattcgcagtcggccgtgtcctcggagccgcgggagatggcggatcaggagaccgtagctgtggttgaggatcacaaccccggttcttggggaaccgatggacctgatgactgccctgcagctcgtcatgaagaagtcaggtgctcacgatggccttgtgaagggtcttcgtgaggctgccaaagccatcgagaagcatgccgctcagctctgcgtgcttgccgagga

SEQ ID NO: 11477 - DNA, 310 bp, Zea mays
gacgcctcgtggaccgcatcgcacgcctcaccgcccgaccaccgcactgcttcctccgccgaggcctcttcttcgcccaccgtgatttgaacgagatactggatttgtatgagaacgggcagaagttctacctctacacggggagggggccctcgtcggaggccctgcacctcggccacctcatccccttcatgttcacaaaatacttgcaggaggcttttaaggtgcccctagttatacaactgactgacgatgagaagtacttgtggaaaaacttgactattcaggaaagtaaaaggcctgcccgtga

SEQ ID NO: 11478 - DNA, 305 bp, Zea mays
cggtgacgcggcccagcggacggtctccgctaggtgggtcccatccaggttagcggtggcgaggccggcggcaggaaggcgtgcctagaggagcttgatacaaccaacatgctccttcgccagcgcatcgtcttcctgggttccccggtggatgatacaagtgctgatctcattatcagccaactcctactattggatgcagaggaccagactaaagatattaaattgtttatcaactcacctggaggctctataacagcagggatgggagtatatgatgctatgaaattttgcaaagctgatgt

SEQ ID NO: 11479 - DNA, 308 bp, Zea mays
ggcccgctcgccattcttgtcaagatcatccacgaatgtcatccttcctcggcgggtgaacggagaggaaaacagcacaccgaacaacaagtgcacggcggtggaaatagcttccatatcagttgacaagaaccagatgccagatgtctcttacgcgatcacccactacaggttgcttgtggaacagcttgaaagagttgatctgagcgtgtcggagaacagcgttaagttggccttctggattaacgtttacaattcgcttatcatgcatgcgtatctggcatatgggattccaaacagctctctga

SEQ ID NO: 11480 - DNA, 306 bp, Zea mays
cccacgcgtccgcaaggatcgatcggatcatccggcgctcccttggatcacaaggcatcccattgcctgctgtcgagcccgtgccggaatctagtgtctccaaggtggaggacaggtctgcagaggacaaagaaagatggtggaagaaggggttgaaagccatctcggaggggaagctggccgttgtccttttggccggtggtcagggtactcgactgggaagctcagatcctaagggatgtttcaatatcggacttccatcaggaaagtcacttttccagctccaagctgaaaggattctgtgcg

SEQ ID NO: 11481 - DNA, 309 bp, Zea mays
aacacatctcctcgcatttcttcccatccgatccccccttcgcaaccaaaaccccaactcgccccgcatcgatggcgcccaaggccgagaagaaacccgcggcgaagaagccggcggaggaggagcccgcggccgagaaggcgcccgccgggaagaagccgaacggaggaagcgggtccccgctggcaagtccgctgccaaggaaggcggcgagggcaagaggggcaagaagaagggcaagaagagcgtggagacctacaagatctacatcttcaaggtgctgaagcaggtgcacccggacattggcat

SEQ ID NO: 11482 - DNA, 308 bp, Zea mays
tggcccaggtgtctatggtgtcaaggctgaagcatgaaaatgttgtcgagttgcttggttactgtgctgatgggacactccgcgtccttgcttatgagttcgctacaatgggttcccttcatgatatgcttcatggaaggaaaggggttaaaggggctcaacccggtccagtcttatcgtggtcgcaacgtgtgaagatagcggttggggcagcgaaaggcctcgagtatcttcatgagaaagcgcagcgccatatcatacaccgagacatcaagtctagcaacgtccttcttttcgatgacgatgta

SEQ ID NO: 11483 - DNA, 312 bp, Zea mays
cccacgcgtccgggcggacgtaaggcgaaggagtagcagcagcaggcggcgccgacttagcggctccccatctcgagcttgccaccatggctagaggattgaagaagcatttgaagaggctcaatgcccccaagcattggatgctggacaagcttggcggagcttttgctcccaagccatcttctggacctcacaagtctagggagtgcctgccactgatcctcatcatcaggaacaggctcaagtatgctcttacataccgtgaggtcatttccatcctgatgcaacgccatgtacttgttgatggcaagg

SEQ ID NO: 11484 - DNA, 308 bp, Zea mays
gccgccgccgccgcgtccgcctcgcccagcgcacagccgccgcagcacatcgctatctcgatctcagccatggcggaggtggagcagcaacaggacacgccgaagctgttcaaccgctggaccttcgatgatgtccaggtgaacgacatctcgctgaacgactacctcgctgtgaacgcgacgaagcacgcgatgtacctgccgcacaccgcggggcgttactccaagaagcggttccgcaaggcgcagtgcccgatcgtcgagcgcctcacaaactccctcatgatgcacgggcgcaacaacggcaa

SEQ ID NO: 11485 - DNA, 306 bp, Zea mays
gcggcggacacggaggcgataggaggaggagcagcagcagcaggcggcgccgacggagcggcatcccactcagtgcttgcaaccatgggtaggggattgaagaagcacttgaagatgctcaatgcgcccaagcattggatgctcgacaagcttggcggagcttttgctcccaagccatcttctggacctcacaagtccagggagtgccttcctctgatcctcatcatcaggcacaggctcaagtatgctctgaactaccgtgaggtcatttctatcctgatgcaacgccatgtacttgttgatggc

SEQ ID NO: 11486 - DNA, 303 bp, Zea mays
cagcttcgtctctctcgccggcgcggcaactatcatcacttcattagctcatccaatctattccgatgacgaccgtgcccacgccacagcaggtgggtactcacgggcacggctcgcaccccgcgcgatcggcgccttgctggagtttgccccagcctcctcctccctccgcttcgccgtgcaccgctgccgcactgctcgcctagaggtgaaggcatctggaaacacgtttggaaactactttcaggttgcaacttatggtgaatctcatgggggtggtgttggctgtgttatcagtggttg

SEQ ID NO: 11487 - DNA, 302 bp, Zea mays
ggaccgtggaatttgagttgatatcacctgttcctcttgaacctgggcaaagatttgcgattagggaaggagagctctgtgatatcaactcaaaattcgcagttacattgtccccgggcaaaaccatcttcatctccccaagcagctcaacccttccagtgacatcagctgtcctgaagtagaattgggggctgtaatttgtgacaaaggcagtgtgccggccaccttcatcctttgtcaggacatatatttccgcctcgaactttttgcatgtcttcagactaccaggtttgcacaccacc

SEQ ID NO: 11488 - DNA, 289 bp, Zea mays
agccgccgccgctgctcatctcacatccctcgagaagacgcctgctcctcgccgatcgatacgatggccgtcttctccgacctccacaccgccgacggcctcaagtccctcgaggctcacctcgccggcaaaacctatgtgtctggtgactccattactaaggatgacattaaggtcttcgccgcggtgccgtcgaagcctggcgctgagtttcctaatgccgcccgctggtacgagaccgtctctgcggctgtagcctcaagattccctggtaaggctgttggtgtaa

SEQ ID NO: 11489 - DNA, 304 bp, Zea mays
cttgcggggcggtggccaacatcgtcaaatcctcgctcggccccgttggtctcgacaagatgctagtggacgatattggtgatgttacaatcactaatgatggagcaaccatacttaagatgctggaagttgagcatccagccgccaaggttcttgttgagttggctgagctccaagatcgtgaggtaggagatggaactacttccgttgtcatcatagcggcagagttactcaagagaggcaatgatcttgtgaagaataagatccatccaacctctataatcagtggctacaggcttgctat

SEQ ID NO: 11490 - DNA, 304 bp, Zea mays
  unsure (1)..(304): unsure at all n locations
cacaggattagcagcttctccgtgctgctgcgtctcctcctcatcgtcctctccagtgtccagctcggccatggcgttcaccgtctccttctcccccgccaacgttcagatgctccaggctaggagntggcacggccacgccacctttggaagctgttccgccgtgccaagagccgggccaaggctgcgctccacggccgtccgggtcagcagcgagcaggaggcggcggcggccgtcagggcgccgtccgggaggaccatcgaggagtgcgaggccgacgccgtcgctgggaagttccctgct

SEQ ID NO: 11491 - DNA, 302 bp, Zea mays
cacgttcacggtagcgagagttatcgtcgtcggcggtgaagatggtgtcgctgaagctgcagaagcggctcgccgctagcgtcctcaagtgtgggaaaggcaaagtctggcttgaccccaatgaagtcagcgagatctccatggctaactcccgccagaacatccggaagttggttaaggatgggtttatcatcaggaagcctcagaaggttcactctaggtcccgtgcaagaagggcacatgaggccaagcagaagggaaggcactctggatacggcaagcgcaggggtaccagggaggct

SEQ ID NO: 11492 - DNA, 302 bp, Zea mays
gaagatgcatttattcgtgtaaggaataaggtgaaagtcccactttatggctgtgattgttatgcttatgctcttctggcttctggttttgtggatattgttgttgaatctggtttgaagccatatgatttcctctcgctggtacctgtcattgaaggagctggagggtcaataactgattggagaggggacaagctccattggcctgttactgcagaatcacggcccacaagttttaacgtggtagcagctggggatgcccgtgtccacaaagaggcccttgatgcgttgcggtggcgcta

SEQ ID NO: 11493 - DNA, 307 bp, Zea mays
  unsure (1)..(307): unsure at all n locations
atttcgcattcgtccaaactcgtgagcactttctcctcgtccccgacaagccactcgaagccgagatacggccatggactccaccggcaccggagcagcggggaagggaaagaagggagcggccgggcgcaaggtcggcgggccaaggaagaagtcggtgtcgaggtccgtgaaggctgggctccagttccccgtcggccgcatcgggcgctacttgaagaagggccgctacgcgcagtgntcaggcaccggcgcccccgtctacctcgccgctgtcctcgaatacctcgccgctgaggttctggag

SEQ ID NO: 11494 - DNA, 306 bp, Zea mays
  unsure (1)..(306): unsure at all n locations
cggaccgtggcggnacgcgatgggatttgctctcgcaaaattggaaggatctagtgaagaaagcacgagcaaaacaagcccaaccaaatgagtacagctctgggacttttacactgtccaacctgggtatgtctggtgtagatcggtttgatgcaatccttccacctggccagggagctattatggctgttggagcctcgaaacctacagttgtggctgataaagatggtttctttagcgtcaagagcaaaatgctggtcaatgtcactgctgatcacaggattgtatatggggctgatttggcag

SEQ ID NO: 11495 - DNA, 302 bp, Zea mays
ccactaccagagcatgcgcgttgccgcgacccgaaccgccgccgccgccgccgctcaccctccgagcgccttcctgctcctcctcgtactcctcggttgcgcgtccctcgcgatcggaggagcagccatggccggccacgtcctcggcggcgtgaaggagaacccagccgcggccaacagcgccgagtccgacgggctcggccgcttcgccgtcgacgagcacaacaggcgcgagaacgcgctgctggagttcgtgcgcgtggtggaggccaaggagcaggtggtggccggcacgctgcacc

SEQ ID NO: 11496 - DNA, 300 bp, Zea mays
gtatgtcaaagttgatgacaagaagcttgccattggaacgctctctatcgacaaatacccacagatacaattcgatttggttttcaataaagagtttgagctgtcacacacatcgaaaactaccagtgtatttttctctggttacaaggttgagcagccaattgagggagatgaaatggatcttgattctgaggatgaagaggaggagctaaacattccagtaatcaaggaaaatggcaaaggtgatgggaaggaggagcagaaaaatcaagagaaggcagtagctgctacagcttcaaa

SEQ ID NO: 11497 - DNA, 300 bp, Zea mays
gttcccgaggacatggtcaagcgccgctccgaggtcgtctccaggctcatgtcgctcgacgaggccgcagccacgctcgtcgccttcctcgagaacccgcagctcgtgcaggatctcaggcccgacaaacagtacgacatccacatgctccaggagagataccagattggtcctgaccagattgaagctctgtatcagtatgccaaatttcagtttgagtgtggtaactactcctgggctgctgagtacctgtaccagtatcgtgctttgtgcacagatactgagcgaagtgtgagtgcc

SEQ ID NO: 11498 - DNA, 301 bp, Zea mays
ggacgcgtggcgtgacgcgtgggctaggagcgcctgatgacggtcgtggccaaccctaggcaattcaaggtgccggacagtttcctcaacagtaagaaggattacaaggacggcaggttctcgcaggtcgtctccaacgcccttgatatgaagctcagggacgaccttgagaggctcaagaagatcaggaaccaccgtggtctgcgtcactactggggcctccgcgtccgtggccagcacaccaagactactggcaggcgtggaaagaccgttggtgtctccaagaagcgatgagctctat

SEQ ID NO: 11499 - DNA, 298 bp, Zea mays
atcatcatccgtttgtgtggtttcatgcagggtcttattgggcaatatgctgttcctatactagaagagaagtccgtctggggaactgatgctccaactcggattgcttacatggatacccaggacgtagctcgactaacgtttatagctatgcggaatgaaaaggccaacaagaaactcatgacctttgctggcccacgagcttggacaactcaagaggtgattactttgtgtgagaggttagctgggcaagatgccaatgtaaccactgtacctgttgcagtcttgagatttactc

SEQ ID NO: 11500 - DNA, 291 bp, Zea mays
ctgtgtgacatatatcaccatgcgatctctgatgagttttcagtggctcgcgacttgcttttaatgagtcatttgcaagatggtattcagctcatggacatatcatcgcagattttattcaacagagtcatggcccagttagggctgtgtgctttcagggctggtttgataaatgaagcccatggttgcttgactgagctctattctactgggaaggtgaaagaattgcttgcacaaggtgtgcaacaaagccgataccatgaaaaaactcccgaacaggaaagacttgag

SEQ ID NO: 11501 - DNA, 305 bp, Zea mays
gatccatcaattgacaaaagtattcagcatgcattggtggttggagactacaaaggggcggttaaccagtgtctttctgctaatcgtatagctgatgctttggttatagcccatgccggtggttctgctctctgggaaagcacaagaaatcattatcttaaaaacagtatctcaccttacttaaaggttgtctccgctatggtgggcaatgatttaatgagttttgtaagtacctggccactaagttcatggaaggaaactcttgctctgctctgcacgtttgcccagaaagaggagtggcatgt

SEQ ID NO: 11502 - DNA, 305 bp, Zea mays
  unsure (1)..(305): unsure at all n locations
gctccatatgtgatacctcagggtgacacactaagattttctcattgtgtcccgcattatttgatgagcggaactgaaaaagaaggcattccagaaggatctcttgaacttgatcctgcagcgcttccctccaacttggaagaggcttttccttctgctaacccagaatgcagttctgtaagaagtaaggagcataactccaaacatgctggtttgtccagtgaagattgcaaagaaaccatgaatgtggggcagcggcaacagacaaaatctgtgaatgcagggatcgctacaanaacaccaaa

SEQ ID NO: 11503 - DNA, 298 bp, Zea mays
gctgattaaaagtaagcttttggaagaaggcacagctgtgttgtatagtgagccggagaagaaggtcatgtctagatctggtgatgaatgtgttgttgccctcactgatcagtggtatataacttatggcgaggctgaatggaagcagaaggcagtcaaatgtttggaccgcatgaatacattctcaactgaaacccgcaatggttttgaacatacgctgggctggctgaaccagtgggcttgttcacgttcatttggactcggtactcgaattccatgggatgagcagttccttgta

SEQ ID NO: 11504 - DNA, 305 bp, Zea mays
ggaagacctgtgtcgctgccacagactgcagctggaagcagatcgcggaccggtgatgtgcctgtacagggagacgccggacggctcaaccatcgaggacagggagacggtgctcgtgtggaactacgaggacgcggaccccgacttcgggtcgtgccaggccaaggagctcgtcgaccaccttgagagcgtgctcgcgaacgagcctgtgtcggtgaaagacacgcctcactcagttgaagtgaaaccgcagtgaagcctcgatcctccatctcccatcttctttgcattgggaaatagaccag

SEQ ID NO: 11505 - DNA, 295 bp, Zea mays
cctaggtttttgattttagccgccgccgctgctcatctcacatccctcgagaagacgcctgctcctcgccgatcgatacgatggccgtcttctccgacctccacaccgccgacggcctcaagtccctcgaggctcacctcgccggcaaaacctatgtgtctggtgactccattactaaggatgacattaaggtcttcgccgcggtgccgtcgaagcctggcgctgagtttcctaatgccgcccgctggtacgagaccgtctctgcggctgtagcctcaagattccctggtaaggc

SEQ ID NO: 11506 - DNA, 292 bp, Zea mays
gggacttaggaggttttccaccttggttgctcaccatagaaccagcccttaaactgcgatcatcagattcgtcctatctctccttggtggagagatggtggggagtactacttctgaaagtggcaccattattatacaataatggaggtccagttattatggttcagattgaaaatgaatttggttcttttggagatgataagaattaccttcatcaccttgttcaactggccaggagatatcttggaaacgacattattctttatacaactgatgggggcgccttgggtaa

SEQ ID NO: 11507 - DNA, 293 bp, Zea mays
gatgaagtagatcgtgttctacaaggtagactacccaaatatgaggatgtaaaggagctgaagtacttgatgcgctgtataaatgagtctatgcggctgtatccacaccctcctgtgctgttacggcgtgcaatagttgatgatgttcttcctggaaactataaggttaaggctggtcaagatattatgatatctgtgtacaatatacataggtctccggaggtctgggatagagcagatgagttcattccagagaggtttgatttagagggacctgttccaaatgagtcaaa

SEQ ID NO: 11508 - DNA, 303 bp, Zea mays
gatggttatccgtgcttaccacaactcaagaggagaccaccaccgcgatgtctgcatcattcctgtctcagcacacggcacgaaccctgcaagtgctgctatggttggaatgaagattgttgctgttggaactgatgccaagggtaacataaacatcgaggaattgaggaaagctgcagaagcaaacaaggacaacttggctgctctgatggttacctacccttcaactcacggagtctatgaagaaggccttgatgagatctgcaagatcattcatgaaaatggcggacaagtctacatgga

SEQ ID NO: 11509 - DNA, 295 bp, Zea mays
ctacgaccaggcaagcactccgctccaccagagccgcctcgcctgtctgtccgagccacacacataccgtagcgcgcgtcccgaggtcggcggagagggtcgggaggagggaatggcggtggtgggcgtcctcgcgctgcagggatcctacaacgagcacatggccgcgctgaggaggatcggagtgaagggggtggatgtgcgcaagccggagcagctcctcggcatcgactcgctcatcatccccggtggcgagagcaccaccatggccaagctcgccaactaccacaacctg

SEQ ID NO: 11510 - DNA, 290 bp, Zea mays
gctatagaagatgtcagggatgctgaagaagagcaagcagtgaactcgtttcgggaggttttgtttgctaggggcttgctaccagtcaagcatgataattaccacacgatgcttagatttttaaaagcaaggaagttcgattttgaaaaagcagcacagatgtgggcggacatgctgcagtggagaaaggagttcggtacagacacaatttttgaagattttgaatttcatgaactagaggaggtcctgcaatattatcctcatggttaccatggggttgacaaggaagg

SEQ ID NO: 11511 - DNA, 289 bp, Zea mays
cccacgcgtccgaaagaaagcctgcgaattgggccttgaggtgaagccatgggtaaagacaagccttacccctggatctgtggttgctaccgagtacttgaaacatagtggccttcaagattatctgaaccagcaagggttccatgtcgctgcgcatggctgcgccacttgtgtgggcaactctggtgacctggatggatctgtatccgctgctatcacagaaaatgatatcgttgctgctgcggtgctgtcggccaaccgaaacttcgaggggcgtgtgaaccctctc

SEQ ID NO: 11512 - DNA, 289 bp, Zea mays
tcccgttccatttccccatctcccagatccaattcgcgagttctccctcctctgccgccatggcgctctctgtggagaagacctcgtctggacgggagtacaaggtcaaggatctctcgcaggcggacttcggccgcctcgagattgagctggccgaggtcgaaatgcccggcctcatggcgtgccgcgccgagttcggcccgtccaagcccttcgccggcgctaggatctcggggtctctccacatgaccatccagaccgccgtcctcatcgagaccctcaccgcgct

SEQ ID NO: 11513 - DNA, 287 bp, Zea mays
ctcaaggaggccctcctcctcgcgctcgccgaagcaccacggcggctgccacctcacgtcgcccctcgacgttgccctcaagctcgcggcgtacaagactttctctgaccactcgcccgtgctccagttcaccaacttcaccgcgacacaggcacttatcgacgaaattgcccgcagcacatcgtcctgcatccatgtcatcgattttgatcttggtgttggaggccagtgggcttctttcttgcaggagctcgcacaccgccgtggcgcaggcggtgcggctctgc

SEQ ID NO: 11514 - DNA, 288 bp, Zea mays
ggagaaaaagctctatgatgaagtgaaggctggtgagattatgaagcttgagtatcagaggaaggttgctttgttaaatagacaaaagaaacacaatgctgccattgaggttcttgagaaaacgaaagctgcggtaacccacttacatactagatacatagttgatatgcaatcaatggattcaactgtgtcagaaattcagtatctccgtgataaccaactgtacccaagactattggatcttactgaccggatggcaaaaatgtgggaggacatgaagatacatca

SEQ ID NO: 11515 - DNA, 296 bp, Zea mays
gcggcgccgcacgtgacgaggaggcggagtagagtggccggactacctcgacacctccactgcaaccatgggtatctcacgtgattcgatgcacaagcgccgggccaccggtggaaagcagaagacgtggcgcaagaagcgaaagtatgagcttggccgccagcctgctaacaccaaactgtctagcaataagacagtgaggagggtccgtgtccgtggaggcaacgtgaagtggagggctctccgattggatacaggtaactactcgtggggaagtgaggctcttacccgcaaga

SEQ ID NO: 11516 - DNA, 309 bp, Zea mays
gattgcatgctcagtaccactgctacattccccaaaatcagctgctcctggcctctaaggtttaagcgcaatgatgttgttgtaagagcaatatcggaagagtgtggcccgcatggtcttcccattgatctcagaggtaaaagggcattcattgctggagttgctgatgataatggctatggatgggcaattgcgaaggcacttgctgcggctggtgctgaaattcttgtgggtacatgggtgccggcacttaacatatttgagacaagtctgaggcgtggaaagtttgatgaatcacggaagctgcca

SEQ ID NO: 11517 - DNA, 309 bp, Zea mays
gagaactcgacgggggattccaccaatttaggacgttcaaagtgtgcctttgaaacattggcatctcccacaaagacaataaagaacatgctgactgttcctagttcccctttgtcaccagccaccggtggttcagtcaagattgtgcaaatgacaccagtaacttctgccatgacgacagctaagtggcttcgtgaggtgatatcttcattgccagataagccttcatctaagcttcagcagtttctgtcatcatgcgatagggatttgacaaatgctgtcacagaaagggtcagcatagttttggaa

SEQ ID NO: 11518 - DNA, 313 bp, Zea mays
cgagaccgtggtgggagatcgaataggttccctcttttttgctacaattggttgtggagcgcaagttgaggccttagaaggatctgagactcaaaagattagtgtttgctccaccaataatccagttgacgcctcattctttgaatcctttgaagcatcacactccaagcgtgatttaactagctccattgcagagaaacttggtgtccgagctcttcctgttagaatggatagccaagcaaaatatggtgccctagcacgtggtgatggtgccatttttctgcgcatcccgcacaaaagttacatagaaaca

SEQ ID NO: 11519 - DNA, 317 bp, Zea mays
gaaatatccatcgcatggtgtgacaaataccatagtttgtaactatgatggtaaagagctacccaaagttcttgggatgaattcggttgacagagtattgctggatgctccctgcacaggaactgggaccatttggaaggatctacaaattaaaacatcaaaggacattgaagacatcaggaactgtgcctttgtccaaaagcaattgctgctagctgctattgatttggttgatgccaactccaaaactggtggttacattgtttactcaacgtgttcgataatgattccagagaacgaggcagtaattgactatg

SEQ ID NO: 11520 - DNA, 306 bp, Zea mays
gggagctcatatctaatgcctctgatgctggataagattaggttcctttcccttactgataaggaagttctgggtgaaagggacactgcaaagcttgagattcagattaagttggacaaagagaagaaaatcctctccattcgggataggggtattggtatgaccaaggaagatcttattaagaaccttggaacgattgctaaatctggcacttcaggaacaggagctgctcgagtctcttgtcgaagctgatacgagaaggcaggaaagagctaaaaagatggaagaaaagaaagtgtatctgca

SEQ ID NO: 11521 - DNA, 303 bp, Zea mays
cggacgcgtggcgaccggcggcggcggcgaggtgatggcgatggacccggacgcggtggcgaaagcttcgtggagcactactaccggacgactgacaccaaccgcgcggcgctggtggggctgtatcaggagacctccatgctcaccttcgagggccagaagttccagggcccatccgccattgccggcaagctcggatctcttcccttccaggcctgcgagcaccagatcgtcaccgtcgactgccagccgtcggggccccagggaggcatgctcgtcttcgtctccggttccatccgcacc

SEQ ID NO: 11522 - DNA, 305 bp, Zea mays
gtctctcggccaggtctccctctccccggctctccgccttcctcttccagtccccgcgcgcgagatcgccgccccgtgtgggccctagatcccgatggcctcgcgccgccgcaccctgctcaaggtcatcatcctcggcgatagtggggttgggaagacttccttgatgaaccaatatgtgaacaagaagttcagcaatcagtacaaggctacgatcggcgcggatttcctcaccaaggaggtgcagttcgaggacaggctcttcactctgcaaatatgggacactgctggccaggaaaggtttc

SEQ ID NO: 11523 - DNA, 310 bp, Zea mays
gctcatttctgcatccccctcccgccgcgccgcctcaccgccgccggagaagatgggtcgcgtgatccgcgcgcagatcaagggtgcggggtccgtgttcaagtcccacacccaccaccgcaagggccccgcccgcttccgctccctcgacttcggcgagcgcaacgggtacctcaagggcgtcgtcaccgacgtcatccacgaccccggccgtggcgcgccgctcgccaaggtcactttccgccacccattcaggtacaagcaccagaaggagctctttgtcgcagccgagggcatgtacacgggccag

SEQ ID NO: 11524 - DNA, 300 bp, Zea mays
gcccaacctacaccaacctcaacaggcttgtctcccaggtcatctcatccctgacggcttccctgaggttcgatggtgctctgaacgttgatgtgaacgagttccagaccaacctggtgccctacccgaggatccacttcatgctttcgtcctacgctccagtcatttctgctgagaaggcctaccacgagcagctgtccgtggccgaaatcaccaacagcgccttcgagccatcctccatgatggccaagtgcgacccccgccatggcaagtacatggcatgctgcctcatgtaccgtg

SEQ ID NO: 11525 - DNA, 297 bp, Zea mays
gaactgatgattcgatattacttgcacaacaatgattacctggaaatctgtcgttgttacaagtctatttatgatatcccagcaataaaggaagatccaaccaagtggataccgattcttaggaagatctgttggtacttggtgctagcacctcatgatcctatgcaatcgagccttctcaatgctacactagaggataaaaacctttcagaaatcccaaatttcaggttattgctgaagcagctggttaccatggaggtcatccagtggacagcattgtgggaattctctaagcac

SEQ ID NO: 11526 - DNA, 301 bp, Zea mays
gagacttgaggatctgttcacgggacgtccttacgacatgcttgatgccgctctctctgataccatctcaaggttccccatagacattcagccattcagggacatgattgaagggatgaggagtgatcttaggaagacaaggtataacaacttcgacgagctctacatgtactgctactatgttgctggaactgtcgggttaatgagcgtacctgtgatgggcatcgcaaccgagtctaaagcaacaactgaaagcgtatacagtgctgccttggctctgggaattgcgaaccaactcacg

SEQ ID NO: 11527 - DNA, 307 bp, Zea mays
gctttgaatcgcctctcagaaccgagatcctcaaaacccttctcccccctcccggatcgagtgcttgagctccgaccaaatctcgcagcggctgcaattccgagcccgaagagcggatcaggcgaggacgacgccttcgattctgatctgcggtcggcgcgacctagagagaaccggagatgcagcagggcgacggcacggaggcgcaggtgacgtgggaggaccagcagaacatcaaccgcttcggtcgcctcaacaaccgcctccacgagctccaggacgagatcaagctcgcgaaggagacgaa

SEQ ID NO: 11528 - DNA, 312 bp, Zea mays
cccacgcgtccgagccgtcgcatcctccatgcccggcatgagatactccattgcaagcacctacaattttgtcaccgacttgatggacagccatctagtggctgggctccgggtggtcgacagggcatgctgcggatcgggaaaactgaacgccgcggtcatgtgcgcccagccaaacacgacttactgttcggatcgcgacgactacatgttctgggacatgctacatcctacgcaggcaacaaatgaacgtggggtggtcgccatcttctacggcccgcaggagtacgcggatcccatcaactttgcaca

SEQ ID NO: 11529 - DNA, 311 bp, Zea mays
gcgacatcaccatcttcatcggcgactggtacaacaagaaccacacggatctgaggaagatgctggacaaggggaaggacctcgggattcccgacggcgtgctgataaacggcaagggcccgtaccggtacaacgacagcctcgtgccgcccggcatcgagtacgagaccttcaatgtgcatccgggcaggacgtaccgcatccgggtgcacaacgtggggacgtcgacgagcctcaacttccggatccaggggcacagcatggtgctggtggagacggagggctcctacacgtcgcagcagaactacacg

SEQ ID NO: 11530 - DNA, 308 bp, Zea mays
agcgaacagtgagaaaagtctgcagaaggcagttgcgaaccagcccgtcagtgttgcaattgaggctggtggcagagcatttcagctctacaactcgggtatcttcacaggaacctgtggaacagcgttggaccatggtgtcacggccgtcggctacggcacagagaacggcaaggactactggatcgtgaagaactcttggggcagcagctggggcgagtccggctacgtcaggatggagcgcaacatcaaggcgtccagcggcaagtgtggtatcgccgttgagccgtcgtaccctctgaagaagg

SEQ ID NO: 11531 - DNA, 306 bp, Zea mays
ggacctgggctatggtgctgcttctggcacaactgtatctcatgtgtctgatattgtagggccggatggtctggtctacgactgttgagttctctcacaggagtggaagagaccttgtcaacatggcaaagaagaggaccaatgtgatccccattattgaggatgccaggcatccggcaaggtaccggatgttggttggcatggttgatgttatcttctctgatgttgcacagccagaccaggctaggatcttagcacttaatgcttcatacttcttgaagaacggtggccactttgtcatttcaa

SEQ ID NO: 11532 - DNA, 309 bp, Zea mays
ccgacccatcactctctgctcgcgcactctcacctgcccgcgccgtattcgaccgccgccaagatgaacaaggagaggctcatgaagatggccggcgccgtccgcaccggcggcaagggcaccatgcgcaggaagaagaaggctgtacacaagacggtcaccacggacgacaagaggctgcagggcactctcaagagagtaggggtcaacaccatccctgcaatcgaggaggtgaacatattcaaggacgatctcgtcatccagttcttgaaccccaaagtgcaagcttccatcgcggcaaacacatgg

SEQ ID NO: 11533 - DNA, 304 bp, Zea mays
cctcttcacgtctttacaaactgttcaagggctcagaatggaagaacatcgccttgaggacagccttcactttccctggcagtgtgtttgctatttttttcttcttgaatgctcttatctgggggcaaaagtcctcaggtgctgttccattcaccaccatgtttgctcttgtcctcctttggttcggtatttcagtacctttggtttttgttggaagcttccttggcttcaagaaacctaccattgaagatccagtgaagacaaacaagataccaaggcagatccctgagcaggcctggtacat

SEQ ID NO: 11534 - DNA, 303 bp, Zea mays
gcgagctggaggtgatccactcccgctgggccatgctcggcgcgctcggctgcgtcttccccgagctgctctcccgcaacggcgtcaagttcggcgaggccgtctggttcaaggccggctcccagatcttcagcgagggcgggctggactaccttggcaaccccagcctgatccacgcgcagagcatcctcgccatctgggcctgccaggtcgtgctcatgggcgccgtcgagggctaccgtattgccggcgggccgctcggcgaggtcgtcgacccgctgtaccctggcggcagcatcgacc

SEQ ID NO: 11535 - DNA, 302 bp, Zea mays
gcgcctgcctctacgaggtggcctacggcgacggctcctacaccgtgggcgacttcgccaccgagacgctcacgctgggggactccaccccggtcggcaacgtcgccatcgggtgcggccacgacaacgagggcctcttcgtcggcgccgcggggctgctggcgctgggcggcgggccgctctccttcccgtcccagatctccgcgtccaccttctcctactgcctcgtggaccgcgactccccggccgcgtccacgctccagttcggcgacggcgccgccgaggcgggcaccgtgacggcg

SEQ ID NO: 11536 - DNA, 304 bp, Zea mays
ggcaaaagaagtgatcggtaaaaggatagctgagctcgtttctgctttgaaacaaggggctgagctgtcggagtacacacttcggttgatcgggtcagaccttgagcactacatccgcaaactgctgtacgacggggtgatcaagtacaacatgaggtccagagtcctcaatttcagcatgggcaagcctcgcatcaagttcaacagcaaccagataccagaaaagatatagaatgtacttatccaacatcctgaaaagaatggtttctctccattcgattaccgagcaagatgtatactctgc

SEQ ID NO: 11537 - DNA, 303 bp, Zea mays
cacagcttgccatcgacctgaacgctcagggtctggctcgctatgccatcatctgccaggagaatggtctggtgccaattgttgagcctgagatccttgttgatggccctcatgacattgatcgctgcgcttacgtcactgagaccgtccttgctgcctgctacaaggcgctcaacgagcaccatgtcctcctggagggtaccctcctgaagcccaacatggtgactccaggctccgactccaagaaggtgacccctgaggtgattgctgagtacaccgtccgtaccctccagaggaccgtcc

SEQ ID NO: 11538 - DNA, 303 bp, Zea mays
ggcgaagaaggaccccgagcacgcgcacaggcacaagatcacggaggaggtcgctgccgcggcggccgtcggcgccggcggctacgtattccacgagcaccacgagaagaagaaggaccacaaggacgccgaggaggccagcggcgagaagaagcaccaccacctcttcggctgaccgtagtaccggccggcgcgcgaccgagctagctagctccggcgcatgcagtacagaattaaacaggtgtgtggttgtgcaacgccacagcttgcgcccgcaatggcactcgtctccgcctcctcgtc

SEQ ID NO: 11539 - DNA, 300 bp, Zea mays
cgcctgctctccctcgcccccccagtcccccaccccctgctcacccacccgtcccctcctgctcgcccatggctcccatcgctgtcggcgacgccctccccgacggccagctcgggtggttcgacgagaacgaccagctgcagcaggtctccgtccacgcgctcgccgccggcaagaaggtcatcctcttcggcgtccccggcgccttcaccccgacctgcagcaaccagcatgtgccaggcttcatcacacaggctgagcagctcaaagccaagggtgtagacgagatcctgcttatca

SEQ ID NO: 11540 - DNA, 300 bp, Zea mays
cggacgcgtggtaagagaaattctataagaaggtaaccaatctaccggagccttttccccatgatcttgttgagaagttagaagaatacatgtataaacttgaagggcaactcgtggacttgtcttccttattgtatgaccaccggctggtcgatgcatatcaaaacagtaccgatatcctgcaaagcactatttttacacaacagtatgtggaacgtgttctagctaacgagagagacaagatgaaatgctgtagcattgaatatagtcatccaaagcagtcatcccaggcttttgtct

SEQ ID NO: 11541 - DNA, 297 bp, Zea mays
catatttcgagtagcgtagcaccctagtgtgtcactgtggacagcctcagtcacccattcacatctctaccctagtgcgcttcccttataaaacctagctcctcaagctccagacgcagtcggccgccgcagaccgggagtagccgacgcgccgtcactgaatcctcagatcacggctagccgtaatcacgacactctgctgactcccggcgagcagtgtaacattttccttcagccatgggcaaggagaagactcacatcaacattgtggtcattggacatgtcgactctggcaag

SEQ ID NO: 11542 - DNA, 299 bp, Zea mays
cccacgcgtccgtgagtgtttactacccgtatacggaaaccgacaagagactcactgccttccatcctgaaatcgaggagctcatctacagcgacgtcgagaactccgagcacaagttcgtgctgaaggacaagaagaagccgatcatcttctcgatggcgcgtctcgaccgcgtgaagaacatgacaggcctggtcgagatgtacggcaagaacgcgcgcctgagggagctggcgaacctcgtgatcgttgccggtgaccacggcaaggagtccaaggacagggaggagcaggcggag

SEQ ID NO: 11543 - DNA, 299 bp, Zea mays
gctgctgctcgcggcggccacggcgacgacgacgacgacgaccactacagcaaagcatgagcatccgtcgccgacgccgtggccggagcgtttccacgcggtgctgttcacgaacctgaccaactacacggaagcctccacgggcccgccgctgcgcgtgacggacctctactacgactggccgcggcggcggaacctgaacctggtgcggcaccagctgtcggccgacccgctgtacgacgtggagtggaacaacggcaccggcttctacttcgactccaaggcgtgccgcgtggagc

SEQ ID NO: 11544 - DNA, 306 bp, Zea mays
gccaaccacatccagtccaccccatccccctcgaccccgacaaccccgagtcccgacccgatggcgcccaaggccgagaagaagccagcggagaagaagccggcggccgaggagaaggcggagaagacgaccgcaggcaagaagcccaagtccgagaagcgcctgcccgcctcgaagtcctccggcaaggagggcggcgagaagaaggggaagaagaaggccaagaagagcgtggagacctacaaaatctacatcttcgaggtcctaaagcaggtgcaccccgacatcggcatctcctccaaggcc

SEQ ID NO: 11545 - DNA, 299 bp, Zea mays
aaacgaagctacctcatggatcttctgcatgcacaaaaggctaatggcacacatggaaagcacgctcttacattggtctttgtggagacaaagaggggggctgatgcctggaggactggctttttagaaatggatttcctgcaactagcattcatggagacaggacacaacaggaaagggagcatgcccttaggtccttcaagagcggagcaactcccatccttgtggcgagctatgttgctgctcgtggtcttgacataccacatgttgcccatgtgattaattttgacctccctaat

SEQ ID NO: 11546 - DNA, 298 bp, Zea mays
attgcaatcaaagaaactgagaagagctacaatgctttcatgttcagagacgccctgaagtctgggttctatgacctccaattggctagagatgagtacaggctctcttgtggtgcagcaggcatgaaccgtgatctgttgtggcgatttatggatgtccagaccaggcttatcacccccatttgcccacactatgctgagcacgtgtggcagaagatcatgaagaaagaaggctttgcaataaaagctggctggccagccgcggacaccccggatcccacactgagaattgcaaata

SEQ ID NO: 11547 - DNA, 303 bp, Zea mays
gcgagcagcagcagcttctggggcaaccggctcgccacctactccgcgccgcagcctggggtaaggtttatggtcaagatatgcccaattgaaatgagacttaagagatgggagcgaaagaagtgtaaaccaaacagtcttcctgtgctgcacaagatgcatgttaggatcggggacacggtacaggttattgcaggccgtgagaaaggaaaggttggagaagtcacacgccttttcaagcacaacagcacggtgatcgtgaaggacctgaacttgaagtcgaagcacaagaaaggcacagac

SEQ ID NO: 11548 - DNA, 300 bp, Zea mays
agcggaccctcaagctcgtgcgacgacctctgaggccaagtgcctcaagcgcggagtcaaagaggtagtcaagagcattcgccgcgggaacaaagggttgtgtgtgattgctggaaatatttctcctattgatgtgattacacacgttccaatactatgtgaggaatctaatgttccttacatatatgttccatcaaaagaggatcttgcgaccgcgggaaccactaagaggccaacttgttgcgtcctggttctgaccaaaccaaacaagggggagctcagtgacgaggtgaaggataa

SEQ ID NO: 11549 - DNA, 303 bp, Zea mays
ccttaccaacgcaatagtgctgaatccactctcagcaatcatgtatggtactagagcatctgtgtttataaaaatgaagaaaccagctgctgccattcgtgatgccaatgctgctctagagatcaacccagactctgcaaaaggctataaaactcgtggaatggcatatgccatgcttggcaaatgggaggaagctgctcatgatctgcacacagcatctaacatggattacgacgaggagatcaatgctgtgctcaagaaggtggagcctaatgctcacaagatagtggaacatcgcaggaa

SEQ ID NO: 11550 - DNA, 301 bp, Zea mays
tggaaaaatagtgacaccatttcgtattgtcaagaacttgcgctgcatttctcgcactttccgaaattcaagacaagaagatgcacacgagttaatggttaatttgcttgaatccatgcataaatgctgtttaccttctggggtatcgactgagtctcaaagtgcttatgacaaaagcttagttcacaaaatatttggtggccgccttagaagtcaggtcaaatgcacacgttgcttacattgctccaataaatttgatcctttcttggatctcagtcttgagattgccaaggccacgact

SEQ ID NO: 11551 - DNA, 302 bp, Zea mays
tcctccggtggaagggaaacccgcgccggagaggctgcgcggtcggtgatggcgcgggtcccgacgtcgggacggacgtcatcatcgtcggcgccggagtggctggatctgcgctggcgtacacgctcggaaaggatggccgccgggtgcatgtcatcgagagggatctgacagaacctgacagaattgtgggcgagctgttgcaacctggaggttacttgaaattaattgagttaggcctccaagattgtgtggaagaaattgatgcccaacgtgtgcttggttacgcattattcaaagat

SEQ ID NO: 11552 - DNA, 306 bp, Zea mays
aaaaccctagccctcgcgccgccgcctcctccgccacccagcgctcgagctcctcgcgtcctgcgagcgcgctccgcaacgtcaccatgaagttcaacatcgcgaacccttccaccgggtgccaaaagaagctggaaatcgatgacgaccagaagctgcgtgccttttatgaccgaaggatatcccaggaggtcagtggtgatgctctgggtgaggagttcaagggttatgtcttcaagatcatgggtggatgtgataagcaaggcttcccaatgaagcaaggagttttgacttctggtcgtgttc

SEQ ID NO: 11553 - DNA, 297 bp, Zea mays
tccgcaacaaggttgccggcttcaacacccacctgatgcgccgcatccagcggggccccgtccgtggcatctcgctcaagctgcaggaagaggagcgggaggccgcatggacttcgtcccggagaagtcagcgctcgcagtcgaagagatccgcgtcgacaaggagaccatggagatgctcgcagcacttggcatggccgatctcccgggcgtagagcgccaggctgaggtctccagcgtctaccggctatgggcgcccgcagtatggaggtccccgccgtgaccgcgtctaggttc

SEQ ID NO: 11554 - DNA, 297 bp, Zea mays
cgacaaggtcaatccaaggttgggcttcaacgtcgagctgaaatttgacgacagtcttgaatacaccgaggaagagctcactcgcatcctccaggccatccttaaggtggttttcgagtacgccaaggacaggcctatacttttctccagttttcagcccgacgctgcgcagtcagtgcgcaaattgcaaggcacataccctgtctacttcttgacgaacggagggacggagctatacgccgacgtgaggaggaactcgctggaggaggccgtcaagctgtgccttgccggtggcct

SEQ ID NO: 11555 - DNA, 297 bp, Zea mays
gtcctggtaaaggcgagccatactcagatgaagctattgctttgatgaggagaaggatactacagcgtgatgtggagatagaggttgaagcagttgacagaacaggaacattcataggttcgttgtgggagtccaagaccaacatgggctctgtacttctggaagctgggctggcgaactgagttcttttggcttggataggatgtcagatgctcatgtcctaacaagagctgaacagtttgcgaacgaacaaaagattaagatatgggagaactatgtcgagggtgagaatgcttc

SEQ ID NO: 11556 - DNA, 298 bp, Zea mays
attgttcccttctgcaaggggcttgatgtcattcagcaagcacaatctggtacaggaaagacagcaaccttctgttctgggatcttgcagcagcttgactatggtctggttgaatgccaggccctggttcttgctcccacccgtgagcttgcacagcaaattgagaaagttatgcgcgcacttggtgactaccttggtgttaaagtccatgcatgcgttggaggaacatctgttcgtgaggaccaaaggattctcgccagtggtgtgcatgttgttgttggtacacctggtcgtgtgt

SEQ ID NO: 11557 - DNA, 299 bp, Zea mays
cgcacgtgaagagagagctttctcagacggactcgacgtatgactctgagaagttggcagagagaattgcaaagctttctggtggagttgctgtggttaaggttggagcatcgaccgaggcagagctagaggaccgcaagctccgcatagaggacgcgaagaatgcgacttttgcagcaatagaggaaggtattgttccaggaggcggtgcagcatatgttcatctatcgacattcgtaccggctatcaaggagacgttggatgatcctgaggagcgcctaggtgctgatatcattcag

SEQ ID NO: 11558 - DNA, 292 bp, Zea mays
aagagaagcttgcatatatagctcttgactatgagcaagagttggagactgccaagaacagctcctcagttgaaaagagctatgagctgcctgatggccaagtaatcaccatcggcgcagagagattcaggtgccccgaggtcctcttccagccatccatgattggtatggaggctgctggaatccatgagacaacatacaattcaatcatgaagtgtgatgtggatatcaggaaggacctctacggcaacattgtgctcagtggaggttcgactatgttccccggtatcgc

SEQ ID NO: 11559 - DNA, 290 bp, Zea mays
gcgccggcttccccgtcctccaggacaagtaccctcgccgctacaaggcattcctctactgcaacacggcgagcttcatggcatccgtggccctcatcgtgctccttctcaaccctaacctgtacgggccaggcatcaattgctacgcgctctttgtctgcatggtggcgggcatgttcagcctcatcggcgcctacgctgctggaagctccctgcacctgcggacctccatcgtcctcttactgctggttcttgcggtttttgcggccgtgttatacgtgaccatcaag

SEQ ID NO: 11560 - DNA, 290 bp, Zea mays
agaaacgatacggttaatagatagcgaagaagggcagcaccaccagtagcagcagccatgcccgctcgcgctcgatggcgactcctcgcgctgccgctcgcgctcttactcgttgccgggtcggcgcatggcctcgtaaagccggaggagccgcggcgcccaagccccccgtccccaaggccatatcggacctgagggacgcgatcgtgaaggggctgggattccaggccgaggggctcaaggtgtccgggttcgacgtgcgagacgcgctcgtggggcacgcggtggcg

SEQ ID NO: 11561 - DNA, 287 bp, Zea mays
agctcgatctactactactactagctggtacacatactagccagcctgccagccagcttgccatggcgcccaccgtgatgatggcctcgtcggcaaccgccgtcgccccgttccagggtctcaagtccgccgccagcctccccgtcgcccgccgcagcaccaggagcctcggcaacgtcagcaacggcggaaggatccggtgcatgcaggtgtggccggcctacggcaacaagaagttcgagacgctgtcgtacctgccgccgctgtcgacggacgacctgctgaag

SEQ ID NO: 11562 - DNA, 293 bp, Zea mays
aagaaagaggacaattttcagagtcacatggataatcaacaactaattatcaaggacataagaatattgtcgcgatcatgtgaaaatgatatgtatgcacttcaaatgcagtggagaaatgagatctctaacttaggatctgggttaaaatgtttggttgatgctgctgaaaattatcataaagtcttggcggagaaccaaaagttatttaatgaagtgcaagaactaaaaggtaatataagagtatattgtcgtgtgaggccatttctttcgggtcaagacaaaaagtctac

SEQ ID NO: 11563 - DNA, 291 bp, Zea mays
ggcttctcctccccctcttatcaagtcctcctcgggttagggttccttagggttttgtggaggggcgatggcggcggctgatgtggagtaccgttgcttcgtcggcggacttgcctgggccaccagcaacgagtcgctggagaatgccttcgcctcctacggcgagatcctcgactccaaggtcatcaccgaccgggagacggggaggtcccgcggcttcggcttcgttaccttctcctccgagaactccatgctcgacgctatcgagaacatgaacggcaaggagctcga

SEQ ID NO: 11564 - DNA, 294 bp, Zea mays
gtgaaggacatggtcatggacacggagaagagggacctgctcgccgagcgcgcggagggctgctcatgtccctcaagcagcggttccccgggctcactcagacgagcttggacatgagcaagatccagtacaacaaggacgtgggcaaatcgatcctcgagagctactcgagggtcctggagagcctggcctccaacatcatcgcgcggatcgacgacctgctcaacgtcgacgagctgagcaagcaaccagctgacagcatcccgtccgccggagcggacgcgaaggttgcgt

SEQ ID NO: 11565 - DNA, 290 bp, Zea mays
cccacgcgtccggttctttctgctgctgatgcttccccggtctcagctatcgggtttgagggctatgagaagcgccttgagatcacattctctgaggcacctgtctttgtggaccctcatgggcgtggtttgcgtgccctctccagggcccagattgactctgttctggatcttgcacggtgcacaattgtgtccgagctctccaacaaggatttcgactcatatgtcctctctgagtcaagcttgtctatctatcctctgaagattgtcatcaagacctgtggcactac

SEQ ID NO: 11566 - DNA, 295 bp, Zea mays
cccacgcgtccgcggcgaaggacacggcattccttagcgtatcccagaagaaggtgcaggcggcgtcgctgtcggtgagaacgcgggtggcgacgacggcgcctgtcgccacgccggggtccagcacggcggccaaggatgggaagaagaccgtgcggcagggcgtggtggtgatcacgggcgcgtcgtcggggttgggcctggcggcggccaaggcgctggcggagaccggcaagtggcacgtggtgatggcctgccgcgacttcctcaaggcggccaaggcggccaagggcgc

SEQ ID NO: 11567 - DNA, 296 bp, Zea mays
accaagcagaccacagcaagaagcgtagtcgtcgccggaaggaaaggcgcggacaagatgtcgtggcaggcgtacgtcgatgagcacctgatgtgcgagatcgaaggacaacatctcagcgccgccgccatcgtcggtcacgacggcagcgcttgggcgcagtccgagagcttccccgagttaaagcctgaggaggttgctggtatcataaaggactttgatgaacctggtactcttgcaccaactggtcttttcgttggaggtacaaagtacatggtgatccaaggtgaacctgg

SEQ ID NO: 11568 - DNA, 292 bp, Zea mays
ccgcttccttcaagccaaatcaacccctataggatgattataataattcggctagtggttttgtgtttcttcttccactaccgagtgatgcatccggtgcctgatgcatttgctctatggctcatatctgtgatctgtgaaatttggtttgccatgtcttggattcttgaccagtttccaaagtggtttccgatcgagagggaaacctatcttgaccggctgagtttaaggtttgacaaggaagggcatccttctcaactcgcccctgttgatttccttgtcagtacggttg

SEQ ID NO: 11569 - DNA, 327 bp, Zea mays
cgctcctctcttcgcccctgccggcgtcgaggccgaagcgaaggcgagcatgcatcacgaccccaaccccttcgacgagggcagcgccgaggacaaccccttctcaaatggaggagccggagcggcaagcagcagtacggcttccggccgactgagcccgtcgggttcggcggcgctagcaggggcgacgccgtcgttgacgtcccgctcgagaccatgggggactctcggagcaaggtgaaggagctctcgtcgtgggaatcagatctgaagcggcgagaggcggatatcaagaggagggaagaggcgctgaagaatgctggcgtg

SEQ ID NO: 11570 - DNA, 326 bp, Zea mays
cccacgcgtccgcgagacaccgagcacgtactaccagcaagatggtggcgtctcccagattcaagcccatcgaggagtgctgctcggaggggcggtcggagcagacggtggccgccgacctggacggcacgctgctcatctccaggagcgcgttcccctactacctcctcgtggctctcgaggccggcagcgtcctccgcgccgcgctgctgctcctgtccgtgccgttcgtctacgtcacctacgccttcttctccgagtcgctggccatcagcacgctggtgtacatctccgtggcggggctcaaggtgcgcacatcgagatgg

SEQ ID NO: 11571 - DNA, 325 bp, Zea mays
ctgtctgtgcgaaggcgaccattccttcttcgctccttcgccgccgctatggttaagtactcgcaggagccgggcaaccctaccaaatcggccaaggccatgggaagggacctgagggtccacttcaagaacacaagggagacagcttttgcgcttcgcaagctgcctttgaccaaggctaagcgataccttgaggatgttattgctcacaagcaggcaattcccttccggagatactgtggaggtgttggtcgcaccgcacaagcaaagtctcgccactccaatgggcagggtcgctggcctgttaagtcagccaggttcatat

SEQ ID NO: 11572 - DNA, 322 bp, Zea mays
gaccagaagtgactctgagaactttgaaattcctagtgtagttataaaagaactcagtgaggctgtgtctgcagctgagaggttactctcaaagttattgaactttgatcttttcatccgcagcataaacggtgaaaaaatcacttctttgctaagaagaacgctcaaatcaaatttcccccttcagtcaaaggattgtcttgcggcatgcctcattaagctagaatccagagctggcttatcaggagatcatggtgttagtagtatagatatggagataactatctatgagactattccaaggctaattgagcaaatgatg

SEQ ID NO: 11573 - DNA, 249 bp, Zea mays
ggttgcttccgaccttcccaagctagtagaaggtttgaagcgtctggcgaagtccgatcctatggttctgtgtacaatggaagaatctggtgagcatatcattgctggagctggtgagcttcatcttgagatttgcctgaaggatctgcaagaggacttcatgggaggtgctgaaattattgtttctcctcctgttgtgtccttccgtgaaaccgttcttgagaagtcctgccgcactgtcatgagcaa

SEQ ID NO: 11574 - DNA, 326 bp, Zea mays
ctcaagcttggcatccacgaggactcgcagaacaggaccaagatcgccgagcttctgagataccactccaccaagagtggtgatgagctgaccagcctcaaggactacgtgaccaggatgaaggagggacagaatgacatatactatatcactggtgagagcaagaaggcagtggagaactcccccttccttgagaagctgaagaagaggggctatgaggttctgtacatggttgatgccattgacgagtatgctgttggtcagctcaaggagtttgagggcaagaagcttgtctctgccaccaaggagggtctgaagcttgatga

SEQ ID NO: 11575 - DNA, 321 bp, Zea mays
gattggtctttaccaggccctttcaaatgtagcaaatgaggggctattgacagaaggatttttctggattccatcactgggaggtcctacaacaattgcagctcggcaaagtggttctggaattacatggctcttcccatttgtggatggtcatcctccgctaggctggcatgacacgatatgctaccttgtattgcctgtgctacttgttgcttctcagtatgtatctatggagatcatgaagccacctcagagcgatgacccatcacagaagaacacaatgctcattttgaaatttcttccatttatgattggctggtt

SEQ ID NO: 11576 - DNA, 208 bp, Zea mays
gcgagggcgcggcggcggccacggacaagcagcggttcaagacgctgccggcgtcggaagcgctgccgcggggccaggccatcggcgggtacatcttcgaccgcacaaacgacaccatggacgagaacctcaggagggagccgttcgggctgccgtccaggtacagggactctgtgcgtgctatccgcccgggaatgcccctcttcct

SEQ ID NO: 11577 - DNA, 147 bp, Zea mays
agaacccgccggcgcacggcggcgtgcaccagcccaccttcaagatcttctgcatagccgacgaggggtactgcctcaccgtccgctacggcaacgtggtgcctggccccggcaacccgcgcgacgagcaccagcactggtacaagg

SEQ ID NO: 11578 - DNA, 329 bp, Zea mays
cttttgttgaagctcttgaccagctgatgcctggatttgatcctgaaattgcaaaattagcccagagagttcttatcaatcctcggaaaattgactatcacactggtgtttttgcaagcaagattactcctgcaaaggatggaaaacctgtgctcatcgagcttattgatgcaaagacaaaggagcacaaagaaacccttgaggttgacgcagcccttatagctacaggaagggcgccattcaccaaagggcttggcttggaaaacatcaatgttgttacacaacgtggttttgtgcctgttgatgaacggatgcgagtcatggatgca

SEQ ID NO: 11579 - DNA, 319 bp, Zea mays
cccacgcgtccgcccacgcgtccggggatattggcactgtttatttggctgagttagtgggctcagactgcatgttcgcattgaaggttatggacatcgagtacctcataagcagaaagaaaatgctcagagcacaaactgagagggagatactgcaaatgctcgaccacccattccttccaaccctgtattctcatttcacgacggacaacctttcttgtctggtaatggagttttgccctggtggtgacctacatgttcttaggcagaagcaacctaccaaaaccttttcggaagcagctgcaagattttatgtcgc

SEQ ID NO: 11580 - DNA, 240 bp, Zea mays
gagagagcaaagtgatttgctgtctcctggcgatcgttgctcgtgaggcctagtgatggcagatgctagctcaaggactgacacctcaattgttttagacgacaacgacaagaatcataggatggagaatcgaagtggtgcggttgtaccttctaattcttcagataggtccgacaggtctgataaacctttggaccaaaagacaatgcgacggcttgcccaaaatcgtgaggcagcaag

SEQ ID NO: 11581 - DNA, 320 bp, Zea mays
  unsure (1)..(320): unsure at all n locations
gagcggcgccggcctacaaccgttttcgtgctcacacacccaaaccttagtcgcgatcaggccccaaggactcgagatgaagtcgagggcacggtccaccgccggcgactccaggctctcggtgaggaagaccaaggctgagaaggacccaaacaagcccaagaggcctccgagcgcgttcttcgtcttcatggaggagttcaggaaggactacaaggagaagcaccccaatgtgaagcaagtctccctgattggcaaggctggtggtgacaagtggaagtccctgtctgatgccgagaaggctcnctacgtgtctaagg

SEQ ID NO: 11582 - DNA, 318 bp, Zea mays
gttctgaagtcactctctttcctctttgagtatattggtgagatgggtaaagattacatatatgctgtcactcccttacttgaagatgctttaatggatagagatctggttcaccggcagactgctgcatctgctgttaagcacatggctctaggtgttgctggcttgggttgtgaggatgctcttgttcatctgcttaactatgtttggcccaacatatttgagacatctccccacgttataaatgctgtcatggaggcaattgagggtatgagggttgcgctaggtgcagctgtgattttgaattattgcctgcaa

SEQ ID NO: 11583 - DNA, 321 bp, Zea mays
gcagcaaccaaggtacctggtggttggcatttagatggacaaaaacgctggataggtaacagcacttttgcagatgtcctcatcattttggctaggaatgcagatacaaaccaactaaatggatttattgtaaagaaaggagctcctggtctaaaagccacaaaaattgaaaataaaattggactcagaatggttcaaaatggagacataattctaaataaagtatttgtccctgaggaagacagattaacaggcatcaattcatttcaggatataaacaaggtcctcgctatgtctcgaattatggtggcatggcaacca

SEQ ID NO: 11584 - DNA, 319 bp, Zea mays
aaaacccgccactctcagatccgcacagcgacgccgccagccagacccgatcccctccctcgctagggttttcgtccccgcgccgccgcgctcccggatcccaccgaaacaaccatggccggcggtcccgcggcggtgtcgttcctgaccaacatcgcgaaggtggctgcggggctcggagccgcggcctcgctcgcctccgcgtcgctctacaccgtcgacggcggcgagcgcgccgtcatcttcgaccgtttccgcggggtgctcccggagaccgtcggcgagggcacccatttcctcgtgccctggctgcagaagc

SEQ ID NO: 11585 - DNA, 314 bp, Zea mays
gcacttgctagatatgccgaccttctaaattcaccgaagaaggcttctctggttgcattagcttcttatgcttcagatcctgctgaggctgatcgtctgaggttcttggcctctgctgctggcaaggatgagtatgcccaatgggttgtggcaagtcagagaagcctgttggaagtcatggcagagttcccttcggcaaagcctccactaggagtcttctttgcagctgttgcccctcgacttcaaccaagatattattctatttcatcttcacctagtatggcaccaaccaggattcatgtcacatgtgcgct

SEQ ID NO: 11586 - DNA, 313 bp, Zea mays
cggacgcgtgggcggacgcgtgggcacggccctaactaaaccctagctaagggaagggaaacaagaccatggatgcctccaagctccgcgagcttcgcgacttcgtcgaggcgtgcaagaagaatccttcgctcctcgccgaccccaacctctccttcttccgggattacctccagagtttgggtgccaaaattcccgccgccgcaccctctttcgaaagtcccaagagatcttccatggacgacattgatgacgacggtgatgacgacgacgatttggatatgagggatcccactcctgagcgagacgagct

SEQ ID NO: 11587 - DNA, 309 bp, Zea mays
atatgaagtcctggagagaggttcttccacttcagaactgtattactcttgtgattacactgggcatgtttgagatggcattgtggtattttgagtatgctgaatttaatgagactggagtacggccaaaaggcatcacattttgggctgtcacgtttgggactgtcaagaggacggctgctgaagttattgttctcattgtctcaatgggatatggtgttgtcacgcctactttgggtggcttgacatcaaaagtggtcatgcttggaggaacattctttctagcaacagaaattcttgaattggtag

SEQ ID NO: 11588 - DNA, 312 bp, Zea mays
tccccttccgcgtctgtctggcctctggggcttctaggttagcgcgtgccaccaccatggccgaggaggtccaggctccactttccgccaccatggccgaggaggtccaggctccactttccgccaccatggcgaaggaggcccagtcgccgccgtccgcaaccatagcggaggcgacggcgccgccgcagctcgtattatttaactcctttacgaagagggaggagccattccagccccgggtagaggggaaggtagggatgtacgtctgtggcgtcactccctacgactttagccacatcggccacgcgc

SEQ ID NO: 11589 - DNA, 311 bp, Zea mays
cttatctatttgtgcagtcacggccatttggagtctctctcctaattgctggacatgatgagaatggacctagcctgtactacaccgacccatctggtactttttggcaatgcaacgcgaaggcaattggatctggctctgaaggagctgatagctccttgcaggagcagtacaacaaggagctggcccttgaggaggcggagaccatagccctttctatcctgaagcaggttatggaggagaaggtgaccccaaacaacgtcgatattgccaaggttgctcccaagtaccacctctacacccctgccgag

SEQ ID NO: 11590 - DNA, 307 bp, Zea mays
cggaccgtggggccctccacctttatcgccgccgcctccgccgccgttgctgtgttccgtctcttcgccgatggcttcggccaagttcggtgctgcccagcaggtggagaaccgaggcgcgctgtccaaaaggtcacgtaacgacgtgtctgtaagggagggggactggaattgtcctcagtgtggtaatgtcaacttcagttttagaaatgtttgcatccgtggagcctgtggtgcaccccgtccatcaccgagtccaagtccaagaatgatgccaggacctcctgcttctggatatgaccggtca

SEQ ID NO: 11591 - DNA, 312 bp, Zea mays
  unsure (1)..(312): unsure at all n locations
cggacgcgtgggcggacgcgtggggccaaggaagaagtcggtgtcgaggtccgtgaaggccgggctccagttccccgtcggccgcatcgggcgctacttgaagaagggccgctacgcgcactngtcggcaccggcgcccccgtctacctcgccgctgtcctcgaatacctcgccgctgaggttctggagctcgctggtaatgctgccagggacaacaagaagactcgcattattccgcgccacgtgcttctggcgatccggaacgacgaggagcttgggaagctgttgggcggcgtgaccatcgctcacggc

SEQ ID NO: 11592 - DNA, 314 bp, Zea mays
gcgaaggcgaccattccttcttcgctccttcgccgccgctatggttaagtactcgcaggagccgggcaaccctaccaaatcggccaaggccatgggaagggacctgagggtccacttcaagaacacaagggagacagcttttgcgcttcgcaagctgcctttgaccaaggctaagcgataccttgaggatgttattgctcacaagcaggcaattcccttccggagatactgtggaggtgttggtcgcaccgcacaagcaaagtctcgccactccaatgggcagggtcgctggcctgttaagtcagccaggttca

SEQ ID NO: 11593 - DNA, 246 bp, Zea mays
cccacgcgtccgccaggatttcatcatggttgattctgttcatgacaatattgtgctgaacaagtgtatcaaggacatccttgcactaatcaaaccagtagaggatgatagaagcaagcggttatccacaattcaggagctggaaaattgtatccattctcttgcatctctgtcaggtgctgctgtcaaaccgtttgggtcatttgtatcagatctttactcaaaatcaggtgacttagatttgtc

SEQ ID NO: 11594 - DNA, 318 bp, Zea mays
cccacgcgtccggaccaggtgcgctggcactaccactgggccagcccgctccactacgccaacaccccccaagtctgcaacttcaagttttctcgggactgccacaattctcgtggccagcaagggatgtgcgtcgtcggggctatcaacaactacacggaccagctctacagctacggccagaagacttcgtataacctgacggagagcctgatgttcctggcacacttcgtcggcgacgtccaccagccgctgcacgtaggcttcgaagatgacgagggcggtaacaccatcaccgtccactggtaccggaggaaa

SEQ ID NO: 11595 - DNA, 303 bp, Zea mays
  unsure (1)..(303): unsure at all n locations
cgtgaccgtggcggnacgcgtgggcggacgcgtggtgcaccgcttcagccacgcgacgtcgccgctctcgaacgtcttcaggaaacttgcctactagctggaccttcgactcctacattgcttactactgcaaccacccgctgtacaccccagtgagtgatctgcagatgaagattgggtttggttttggggtcgtctgccaggtcgcgaacttctactgccacatcctgctgcggaacctcaggagcccaagcggcagcggcgggtaccagatctcccgcggtttcttgttcaacatcgtga

SEQ ID NO: 11596 - DNA, 295 bp, Zea mays
ggaagctaaatgaatgtttggacttcatttcttccaaacaactacatcgtggtggaattgattcaccttcaatgcgctctggggctcagtctgatgacattgtaattaaggcaacaggtggtggagcattcaagtatgcagatgtcttcaaggaaagattgggagtcagccttgaaaaggaagatgaaatggactgtcttgtggctggagcaaactttttgcttaaggctatacgtcatgaagcttttacacacatggatggccagaagcaatatgttcagattgatcagaatga

SEQ ID NO: 11597 - DNA, 301 bp, Zea mays
caaccaacaagcaaaaattccccaatcctctcgtctccgcggcgaagatgtcggggcgcggcaagggcggcaagggcctgggcaagggcggcgcgaagtcaccggaaggtgctgcgcgacaacatccaggggatcacgaagccggcgatccggaggctggcgcggcggggcggcgtgaagcgcatctcggggctcatctacgaggagacccgcggcgtgctcaagatcttcctggagaacgtcattcgcgacgccgtcacctacaccgagcacgcgcgccgtaagaccgtcaccgccatgg

SEQ ID NO: 11598 - DNA, 302 bp, Zea mays
cccacgcgtccgcccacgcgtccgcccacgcgtccgcccacgcgtccggataatcttgagattgatgctagtaatgggaactgtcttgaagctcatgcatttcttcaactcctggcaacctttggtatttctgctgaatataatgaagatgacctgtgcaaattgcttccatatgtcagtcgtcgtcgtcagacacctgaactttgtcgattgcttgggttgtcacagaaaatgccaggtgtcattgaagttctggtgaaaagtggaagaactattgatgcaattaatttagcttacgtgtt

SEQ ID NO: 11599 - DNA, 303 bp, Zea mays
attcgatccaactcctgagcactttctcctcgtccccgacaagccaatcgaagccgagatacggccatggactccaccggcaccggagcagggggtaaggggaagaagggagcggccgggcgcaaggtcggcgggccaaggaagaagtcggtgtcgaggtccgtgaaggccgggctccagttccccgtcggccgcatcgggcgctacttgaagaagggccgctacgcgcagtgctcggcaccggcgcccccgtctacctcgccgctgtcctcgaatacctcgccgctgaggttctggagctcg

SEQ ID NO: 11600 - DNA, 300 bp, Zea mays
ggaagctaaatgaatgtttggacttcatttcttccaaacaactacatcgtggtggaattgattcaccttcaagtcgctctggggctcagtctgatgacattgtaattaaggcaacaggtggtggagcattcaagtatgcagatgtcttcaaggaaagattgggagtcagccttgaaaaggaagatgaaatggactgtcttgtggctggagcaaactttttgcttaaggctatacgtcatgaagcttttacacacatggatggccagaagcaatatgttcagattgatcagaatgacttgt

SEQ ID NO: 11601 - DNA, 303 bp, Zea mays
tccgaatccgagctaagggatggcaaccggtagtgaagcctcgaaggcagctgaggctgtggttgactggcataaacacgacagcaagaggatgctccatgcggtttaccgtgttggggatctggaccgcacaatcaagtactacacggaatgctttgggatgaaactgctgaggaaaagggatgttcctgatgagaagtacaccaatgccttccttggctttgggccagagaacaccaactttgcagttgaattgacatacaactatggcgttgacaagtatgacattggaacgggctttgg

SEQ ID NO: 11602 - DNA, 300 bp, Zea mays
atcatgtgatctcaattttggtgatgactactgcttcagtacgaaggagttatggtccatcatctttccttctgattctgaaaggattgttatctctgaaacgcgaaatatgaatgaggttgttcatacccaagctaagacaattggtgatcatgatgtgatgtacaagtacttgtcaaagaatttagtttttgttgctactttgtctcctaaagctgctggtgatattggatctgtgctacctgaagaagcttcacttgttgcatatcttattgatgcagtcactggacgcatacttca

SEQ ID NO: 11603 - DNA, 297 bp, Zea mays
ccccggcgggcctgatagcagcggcggtggcgcacgcgttcggctgttcgtggcggtgtcggtgggcgcgaacatctccggcgggcacgtgaacccggccgtgaccttcggcgccttcgtgggcggcaacatcaccctgttccgagggctcctgtactgggtggcgcactgctaggggtccaccgtggcgtgcttcctgctccgcttctcgacgggcgggcaggccacgggcaccttcgggctgacgggcgtgtcggtgtgggaggcgctggtgctggagatcgtgatgaccttcgg

SEQ ID NO: 11604 - DNA, 298 bp, Zea mays
gtttgctggtttcaagaaggatgacaagcagctggatgctgatatccatcgcaagtacatctatggtggccatgttgctgactacatgaggaacctcgctgaagaggagccagagaagtaccggtctcacttcagtgagtacattaagaagggaattgaggctgatgacatggaagctctgtacaagaaggtccatgctgccatccgtgctgatccttctgtggtcaagtcaaccaagcagccaccaaaggagcacaagaggtacaaccccaagaaactgacgtacgagcagaggaag

SEQ ID NO: 11605 - DNA, 296 bp, Zea mays
gggatggcaagtgccgccagcgacaggtgtcatgcagcgcggccggggatgctgtggcggccccgaagcggaagaaggaggcgggctcatgaagacgctgtggctcggctcgctcttcggcctctggtacctgttcaacatctacttcaacatctataacaagcaggtactcaaggttttcccataccctataaacatcacagaagttcaatttgctgtcggaactgtagcagctctgttcatgtggatcactggtattattaagaggccaaagatttctggagcacagcttgtag

SEQ ID NO: 11606 - DNA, 297 bp, Zea mays
gctccttcctccccctatctagctagccttcccgttcctgcatcgcggcggagatgggcgcctccaccacgccgctcgcctcggcggcggcgctgcttctgctgctgctcgcgccgctcgccgcggcgcggacagcatgtcgatcgtctcctacggcgagcggacagggaggaggcgcggcggatgtacgccgagtggatcgcggcgcacggccggacctacaacgccgtcggcgaggaggagcgcaggttcgaggtgttcagggacaacctccgctacgtcgacgcccacaacgcc

SEQ ID NO: 11607 - DNA, 298 bp, Zea mays
  unsure (1)..(298): unsure at all n locations
cggacgctggncctacggtttcaccgtgtacccatccccccaggtgtccacatccgtggttgagccatacaacagtgtcctgtccaccaactctctcctcgagcacactgatgttgctgtcctgctcgacaatgaggccatctatgacatctgccgccgctcccttgacattgagcgcccaacctacaccaacctcaacaggcttgtctcccaggtcatctcatccctgacggcttcctgaggttcgatggtgctctgaacgttgatgtgaacgagttccagaccaacctggtgccct

SEQ ID NO: 11608 - DNA, 297 bp, Zea mays
gtcgtacgcgtacgcgtgcgcgaacggcgatcggtgactctgacggagaacgcggctgggactcggccagcacggcattcgcgtgaactgcgtctcacccgcgggggtcgccacgccgctgaccatgaggtacatgggcctcgaggcggaggcgttggagcaggcaatggagggcatggccaacctcaagggcgtgggcgcactgcaggtgcacgacgtcgccgccgccgtgctcttcctggccagcgatgacgcgaggtacatcagcggccacaacctgttcgtcgacggcgggat

SEQ ID NO: 11609 - DNA, 299 bp, Zea mays
ctcctatccactgcggcctggacgcgtgcgagagacttgaccaagcagcagcagcagggatggcgcctctgaagctgtacgggatgccgctgtcccccaacgtggtgcgcgtggccaccgtgctcaacgagaagggcctcgacttcgagatcgtccccgtcgacctcaccaccggcgcccacaagcagcccgacttcctcgccctcaaccctttcggccagatcccggctctcgtcgacggagacgaagtcctcttcgagtcccgtgcgatcaaccggtacatcgccagcaagtacgcg

SEQ ID NO: 11610 - DNA, 303 bp, Zea mays
cccacgcgtccgctctgctcctctcaccctcacgctccaaggcggcggcgccatgcacggcggaggcgcggcctcgcccgatgccgccatatgcatctccccagaagctgggcccatcgtcggggtcgcccccgccaggatcagggtcgaaaactgctacgtgttcaagagccggctgcaggagtatgctcagagggttggcattccaaccccggagtaccacacgctgaaagaaggcccatctcatgaacctgtcttcaagtccacagtgttcgttaataataccaagtatgagtcgctgcc

SEQ ID NO: 11611 - DNA, 295 bp, Zea mays
ccaagaaacacacagaagcgaggagcactacttgttggttggattctcttcagtctagcagctagtccagttaagtttcagacacacatggggagcattggcagaggcacggccaactgcgccaccgtgccgcagccgccgccgtcgacagggaagctcatcacgatcctgagcatcgatggcggcggcatccgcggccttatcccggcgaccatcattgcgtacctcgaggccaagctccaggagctggacggcccggacgctcggatcgccgactacttcgatgtgattgccg

SEQ ID NO: 11612 - DNA, 293 bp, Zea mays
ctatggagtgcatgttgataatggtcgtgttggtgggcaagcaaagaaaactctacgagagataattgagaagtataatttggatgttagtattaccccaaaccaaaatcttattttatgtgggattgatcaagcgtggagagaacccataactacagctcttgcacaagctggcctgctggaaccgaaggatgtcgaccccctgaatttaactgccatggcatgccctgccttgccactgtgccctttggcacaaacagaagctgaacgggggatcttacccattcttaaac

SEQ ID NO: 11613 - DNA, 293 bp, Zea mays
ctttgagccactgacagttgaggatgtatcaaatgtccttgatttagagcgcccagatggtataatcgtgcaatttggagggcaaactcctctaaagcttgcgctacctattcaacagtacatagaggagaacgaaatggtgtctgcttcaggcactgggaatgttaagatatggggaacatcaccagattccattgatgcttctgaggacagaagaagatttaatgcaattctcgaggagcttcaaattgaacagccaaagggagggattgcaagaagtgagtctgatgcct

SEQ ID NO: 11614 - DNA, 293 bp, Zea mays
tggaaattcatcgctcagccatggcaatggaagtgaaattggacgctatcttggttgggctatggcaataatttttatgggtgggcgccttccccagattttgttaaacgtgagacttcacaaagtccgaacatttacttttcatgatttctcttgcagaaaattgttaaacatgagacttcacaatgtccgaacatttacttttcatgatttctcttgcagaaaatttacatttaaaaaagatttatcttggccgcgtttgtttcgttggaattgaattccattctaataat

SEQ ID NO: 11615 - DNA, 293 bp, Zea mays
cgccgcatcgccgccgccggaagcgcctccctcgatccagatccaggagatatgcctcgcaatgatgatcgctatgggaatacacgcttgtatgttggaagattgtctccccgcacccgttctcgtgacctagaataccttttcagcaaatatgggagaattcgagaagtggagttgaagcgtgactatgcattcattgaattcagtgacccccgtgatgctgatgatgcacagtacaacctagatggcagggacgtcgatggaagccgcattattgttgaatttgctaaagg

SEQ ID NO: 11616 - DNA, 296 bp, Zea mays
tttcccgcaggagcttccaatgctggaagtggtgctggtggtggaccacttgattttcttagaaacaatccacagtttcaagcagttcgggaaatggtccatacaaatccacaaattttgcagcctatgctcgctgagttgagcaagcagaatcctcaaattctaaggttgattgaggagaatcatgatgagtttcttcagttactaaatgagccctttgaaggcggagagggggatttcttagaccaacctgaggaggatgaaatgcctcacgccattagtgttacaccagagga

SEQ ID NO: 11617 - DNA, 93 bp, Zea mays
cgcacacgtccgaccacgcgtccgagcaaattcctccaaacgagccctaccgggtgatactaggccatgtaagggtcaagctgtacaacacac

SEQ ID NO: 11618 - DNA, 311 bp, Zea mays
gatggacagggatctgaaggcacatagaaatattgattgtgaattcagtggtacaacagcagtcacagtaatcaagcagggacaaaatcttataattggcaacttgggagattctagagctgtcttgggcacaagaggtgaacataatcagctagttgctcttcagctgacagtggacctcaaacctagtatcccgagtgaagcagaacgaattaggcaacaaagtggcagagtattttctcttccagatgaaccagacgttgttcgtgtgtggcttccaactttcaacttgccagggttggccatggcaa

SEQ ID NO: 11619 - DNA, 309 bp, Zea mays
cttcgtgctcgtgtacaccgtcttctccgccaccgaccccaagcgcaacgcccgcgactcccacgtcccggttctggctcccctccccatcggcttcgccgtgttcatggtccacctggccaccatccccgtcaccggcaccggcatcaacccggccaggagcctgggcgccgccgtcgtctacaacaaggacaagccatgggatgaccactggattttctgggtgggcccgctcctgggcgctgccatcgcggccttctaccaccagtacatcctccgggcgggcgccatcaaggctctcggctcctt

SEQ ID NO: 11620 - DNA, 309 bp, Zea mays
cagataaggaagacgaggagggcaggatgtcgcaccgtaagttcgagcacccgaggcacggctccctcggcttccttcccaggaagcgctcctcccgtcaccgcggcaaggtgaagtcattccctagggatgaccccaagaagccttgccatctcactgccttccttggctacaaggctggcatgactcacattgtccgtgaggttgagaagccaggtatcaaactccataagaaggaaacttgtgaggctgttaccatcattgaaacccctcctcttgtcattgttgggctcgtggcatatgtgaaga

SEQ ID NO: 11621 - DNA, 126 bp, Zea mays
caccacgaggcttcaggaggctcttcctggtgacaatgttggcttcaacgtgaagaacgttgctgtcaaggatctcaagcgtgggtttgtggcctccaactccaaggatgaccctgccaaggaggg

SEQ ID NO: 11622 - DNA, 307 bp, Zea mays
gccgtcgggtgcatgtcatcgagagggatctgacagaacctgacagaattgtgggcgagctgttgcaacctgggggttacttgaaattaattgagctgggcctccaagattgtgtggaagaaattgaatgcccaacgcgtgcttggttacgcattattcaaagatggaaggaacacaaagcttgcttatcccctggagaagttccattctgatgttgctggtaggagctttcacaatgggaggtttatacagaggatgcgtcaaaaagctgcgtctttgcccaatgtccaattagagcaaggaactg

SEQ ID NO: 11623 - DNA, 130 bp, Zea mays
cccacgcgtccgatccaggacaaggagggcatccctccggaccagcagcggctcatttttgccggcaagcagctcgaggacgggcgcacgctggccgactacaacattcagaaagagagcaccctccact

SEQ ID NO: 11624 - DNA, 304 bp, Zea mays
caagaggaagggaaagcattactcgatgaggacttctatgaagataagaaaatccttctcaggggataccagagatcaatggtcaaatcaatgagcctggcagcaaaagttccacattttcattatctagaggagataaattgtgattctcttgtgcaactaaaaaccacatttcaaaatgagaacaaggatcaaactatcaagcacactttccttccgttcctcataaagtcactttctatggcactgagtaaataccctatgttgaacagttctttcattgaggaaactaacgaagttgtgt

SEQ ID NO: 11625 - DNA, 301 bp, Zea mays
ctcagcttggcgatgttctgatagatggtgtgaatctcaaggagttccagttgaggtggatcagaagtaaaatcggccttgtcagccaggagccggtcctttttgctgccagcataaaggagaacatagcttatggcaaagacaacgcgacggatcaggaaatcagagctgctgctgagcttgccaatgctgccaaattcatagataaaatgcctcagggttttgatacttccgttggtgagcatgggacacagctttctggtgggcagaagcaaagaattgcgattgcaagggctattct

SEQ ID NO: 11626 - DNA, 301 bp, Zea mays
atcatcgtagcggttatgttgctgtattggggaagccaaatgttggcaagagcacacttattaaccaaatggttggtcagaaactttcaattgtaacagataaaccgcaaacgacaagacatcgcattcttggtatatgttctgaaccagagtaccagattatactttatgacactcctggtgttattaaaaaggagatgcataagctggacagtatgatgatgaagaatgttaggagcgctatcggcagtgcggactgtgtgcttgttgttgctgatgcttgcaaaactcctgaaaagat

SEQ ID NO: 11627 - DNA, 301 bp, Zea mays
cgctcgaacacacaccgaagagagagacagagcgagagaggatggcgtccctggcgcacacgtcgcgggcctaccgtgcccccctctatccggcgcgtcgcgccgtcgccccgcggcgcagaggcggcctccgtcggcgcttgtgtgcggtacctatgcgctgaccaaggacgagcgggagcgggagcggatgcgccaggtgttcgacgacgcctccgagcgctgccgcaccgcgcccatggagggcgtcgccttctcccccgacgacctcgacaccgccgtcgagtccaccgacatagac

SEQ ID NO: 11628 - DNA, 301 bp, Zea mays
  unsure (1)..(301): unsure at all n locations
cggacggtgggcggacgcgtgggcggacgcgtgggggggaagaagaaggccaagaagagcgtggagacctacaaaatctacatcttcaaggtcctaaagcaggtgcaacccgacatcgngatctcctccaaacccatgtccatcatgaactccttcatcaacgacatcttcgagaagctcgccggcgaggccgctaagctcgcccggtacaacaagaagcccaccatcacctcccgcgagatccagacctccgtgcgcctcgtcctcccaggagagctcgccaaacacgccgtctccgagg

SEQ ID NO: 11629 - DNA, 304 bp, Zea mays
cgcctctcgagtctcgtccacccgtcatcctcctagctcctctactcgccagtcgccatgggcaagattaagatcggaatcaacggcttcggaaggatcggcaggctcgtggccagggtcgcactccagagcgaggatgtcgagctcgtcgccgtcaacgaccccttcatcaccacggactacatgacctacatgttcaagtacgacaccgtccacggccactggaagcacagcgacatcacactcaaggactccaagacccttctcttcggtgacaagccggtcaccgtctttggcatcagga

SEQ ID NO: 11630 - DNA, 297 bp, Zea mays
cgcctacatcaacaccaccatctacccgctcacgtccctcccgctcctcatttactgtatcctgcctgccatctgcctgctcacggggaagttcatcatcccagagatcagcaacttcgctagtatctggttcatctctctcttcatctcgatcttcgccacgggtatcctggagatgaggtggagcggcgtgggcatcgacgagtggtggaggaacgagcagttctgggtcatcggaggcatctccgcccacctcttcgccgtcttccagggcctcctcaaggtgcttgccggcat

SEQ ID NO: 11631 - DNA, 293 bp, Zea mays
cacacactcgggtaaagctatctcgagctagctagctgctgtaaccgttgccatggccaaaatggtattgctctgcgtgctcgtctccttcctcctgatgcccttggcctccctagccctgacgcaggacttctgcgtcgccgacctgacctgcagcgacacgccggctgggtacccgtgcaagtccagcgtcaccgccaacgacttctacttccacggcctggccggccagggcaaaataaacccactcatcaaggccgccgtcaccccggccttcgtgggccagttcccgg

SEQ ID NO: 11632 - DNA, 298 bp, Zea mays
cagacgcgtgggccggcgtccccctgtgccgccccgcacttccgcccgacggccgtgcgggccgctatccgggcgcaggcgtccgccgtcgaggcgcccgccacggccaaagcgaagaaggagtccaagaagcaggaggagggcgtcgtcaccaacctatacaagcccaaggagccgtacgtcggcaggtgcctcctcaacaccaagatcaccggcgacgacgcgccgggggagacgtggcacatggtcttcagcaccgaaggcaagatcccgtacagagaaggccagtccatcggcg

SEQ ID NO: 11633 - DNA, 297 bp, Zea mays
gagggagagattggagggaggcccctgcccaaggcaagagaaaccgcggcgcgcggagcgggaggaagggcagacgcagacgcagacgggcgaacaagatgagggagatcatcagcatccacatcggccaggccgggatccaggtcggcaacgcctgctgggagctctactgcctcgagcacggcatcgagcacgatggcaccatgcccagtgattcctcggttggcgtcgcacatgatgccttcaacacgttcttcagcgagactggttccggcaagcatgtgcccagggccatct

SEQ ID NO: 11634 - DNA, 295 bp, Zea mays
ctactcctccagtcggcaggaaaggaacccctctctacctcggaggctcggacagagtgaacgcgccacccgccccggcgagcattgtccgctgccgcgcgccaccttccgctcacgggtgcatttgatccgtcgcggccgcctacacgatgtccaagtcgggagcgctggatcttgcttctggcctcggagggaagatcaacaaggtggaagtcaagtcggccgtcgatgagtatgagaaatatcatggatactatggtgggaaggaggaagcaaggaagtccaactatactga

SEQ ID NO: 11635 - DNA, 293 bp, Zea mays
cgcggacagagcgagcagccggcaccggacctccaaggagcgcaccgcggaggccagcgaagatgcccgggctcacggcaccgtccgactacgcggaggagccgccgcgtcacccggccctcaagatcaactccaaggagccattcaatgctgagcctcagcgatcagagctagtcgcatcttacatcaccccagtggatttcttctacaagaggaatcatggacccatccctaaagtcgaggacctctcaagatacgctgtttccatttctggtctcgtcaacaagtccatt

SEQ ID NO: 11636 - DNA, 289 bp, Zea mays
gatgatccgaaggtgcgctcccagatcctctctcaggagtttgggtgggacaaggacctggccaagaagatttggtgttttggacctgagaccactggcccgaacatggttgtagatatgtgcaagggagtgcagtatctcaatgaaatcaaggattctgttgtggctggtttccagtgggcatcaaaggagggtgcactggctgaggagaacatgcgtggaatttgctttgaggtatgtgatgtcgttcttcatgctgatgctatccacaggggtggtggtcaggtca

SEQ ID NO: 11637 - DNA, 294 bp, Zea mays
caagttttggtgagcggcggaaggctgtacttcaggacattgccatcgtcacaggtgctgagttcctagcaaaagatcttggtttgttggttgaaaatgctacagaggaacaacttggcacagcaaggaaagtcacgatacatcagactacaacaaccctcatagcagatgcagccagtaaagatgagatccaggcgaggattgcacaactgaagaaggagcttgctgagactgattcagtttatgatactgagaaattggctgagagaattgctaagcttgccggtggtgttg

SEQ ID NO: 11638 - DNA, 232 bp, Zea mays
aggaggacctccgtgagctgtgcgagccgttgggagaaatatatgaggtgaggttgaccaaggataaggacacaaaggagaacaaggggttcgcctttgtcaccttcatggacaaggaggctgctcacgcgccatcgaggatgtgcaagacagggagttcaaggggaggactttgcggtgctctctgtcgcaggcaaagcacaggctgtttgttgggaatgtgcccaagggg

SEQ ID NO: 11639 - DNA, 299 bp, Zea mays
caaacacatcatcctagagaacaacgagaacaagcctgtcacgaacagccgtgacactcaagagatacacctagaacaaggccttcagatgctcaagatatttagggagcatgtcagcaagacgtccatcttggatgacttcgccttctatgagagtcgccagaagctgatgcaggataagaggtcgaaacagcagcaggtccaaaagcaggtctgggacagtaggacccccatttctgtcactggaagcgagcaacagcaggaagctgctaatgggaagcccaatccgtctgtaccaa

SEQ ID NO: 11640 - DNA, 322 bp, Zea mays
cacagccaccgccgccatggccgcctccagccgccctctcgtctccgtgaaagccctggagggcgacatggtcacggacgcccccggcatcgccttaccgcccgtcttcggggcaccgatccgcccggacgtggtccgcttcacccacaagctgctgtcctgcaacaagcgccaccttacgcagtctcccgccgcgctggccaccagacgtcggccgagtcctggggtacgggccgcgctgtgtcccgtatcccccgcgtccccggcggcggcacccatcgcgccggccagggagcattcggcaacatgtgccgcggcggac

SEQ ID NO: 11641 - DNA, 315 bp, Zea mays
ggccaagctagtcaagggctcatcaggtgtgaacttggtagccggtctttcacaatgtcttgcattatctttggatattgcccatttattaatggatcaagaaaccaaccaatatggaagtccctggccctttgcgctgctttttgatcttcagttgagtttgtaaaaggttcataccagttgaagtcaagaactatcccgaccttgcctttctgagttgcctggtatttattgcggtatcttgcaactgcagtagcatgagataggagaatgttatgaacaacaatgtaaggttctgtcgatgagttcccaccg

SEQ ID NO: 11642 - DNA, 317 bp, Zea mays
gttgtgaacaaccggcaatatcgagggaagcttgagaggaaagctgtcctcaaagctatttgtgctggttttgaggaaactacagaaccaaatgtttgcctgagtgatgatatagagacaaatgagtgtctgaatgacaacgggggctgctggcaagacaaatctgctaatgtaacagcctgtagggacaccttccgtggtagagtgtgtgaatgccccactttcaatggcgtacaatttaaaggcgatggctacagcaattgtgaacctgctggaccaggaaaatgcttgataaaccatggaggatgttggcatga

SEQ ID NO: 11643 - DNA, 322 bp, Zea mays
cacagacaagtggtttccaaagccaagtgtgtgtactagcaaccagctagctcgggcggcacaggcagccatcatgtcggaggagaagcaccaccacttcttcaaccaccacaagaaggacgaggagcagcccgccggcgagtacgggtactccgagaccgaggtggtcaccgccaccggcgagggcgagtacgagaggctcaagaaggaggagaaggagcacaagcacaagcagcacctcggcgacgccggcgccatcggcgccggcgccttcgcactctacgagaagcacgaggcgaagaaggaccccgagcacgcgcac

SEQ ID NO: 11644 - DNA, 323 bp, Zea mays
ctgctccatccactgggaggattcacaaaagcagatgatgtgcctcttagttggagaatgaagcaacatgagaaggttcttgaggaaggcgtcctcaacccagaatcaactgttgttgcgatctttccctctccaatgcattatgctgggccaactgaggtgcagtggcatgctaaggctcgtattaatgctggtgcaaatttctatattgttggaagggatcctgctggtatgagccatcccacggagaaaagggacctctatgatgctgaccacgggaagaaggttttgagcatggctcctggcctcgagaggctcaacat

SEQ ID NO: 11645 - DNA, 315 bp, Zea mays
gaagtttcagatcctcgcatcgtccgcaccttatcctctcgactttacagtacctgctctcagctcctccctatctcaatggcatccgcgaatgccatctccaccgcctccctcctccggcccctctctcagggcagggcgacgaggtcacagcggttcgtggtgcgtgcgaagccaaagacattgcctttgaccagaaatccagggcagcgctgcaggccggcgtcgagaagctggcaaacgccgtcggtgtcaccctcgggccacgagggaggaatgtggtgctcgatgagtacggcaaccccaaagttgtga

SEQ ID NO: 11646 - DNA, 316 bp, Zea mays
catcgtcgccctcaaattcgttccgtccaggcaaggaagaaatcgagcagccaaggagaggagaagatggctcgtacgaagcagaccgcccgcaagtccaccggaggcaaggccccgcgcaacagctcgccaccaaggcggcgaggaagtctgcgccgacgaccggcggcgtgaagaagccccacaggtacaggcccgggacggtggctctgcgcgagactcgcaagtaccagaagagcacggagctgctgactcggaagttgcccttccagcgcctggtccgtgagatcgctcaggacttcaagacggatctgcg

SEQ ID NO: 11647 - DNA, 193 bp, Zea mays
gaccatgcttgttctgcatattcatatgtatctgtgccactttatgacacacttggcccagatgctgttcaattcattgtgaaccatgcagcggtggaagttatattctgtgtgcctcaaactctaagcactctgttaagttttatagttcaaatgccatgtgttcggcttatagtggtagttggcggagatg

SEQ ID NO: 11648 - DNA, 313 bp, Zea mays
cgagtttacaactttaacatgtattcctggagttatcatgtataagggtgctaaaatccagcttctagatctcccagggatcatcgaaggtgctaaagatggaaagggcagaggaagacaggttatcagcacagctaggacatgcaatgttattttgattgttcttgatgccataaaaccaataactcacaagcgtcttattgagaaggagcttgaaggatttggcattaggttgaacaaaacaccacccaatttgactttcagaagaaaggacaagggtggaatcaacttcacatcaacagtgacgaacaca

SEQ ID NO: 11649 - DNA, 313 bp, Zea mays
tccagacccaatggagcttgttcgtgggaaatctgctagggttgttggagacctcatgactgttctaaccctctgtaaaggccttccacaggcctacaaccgtgaccttcaggaagacaaggaacccttgtttgatagtgtgaaagctgtattaggaatgcttgaagtatgcacagagtttgctcaaaatatctcttttaattcaaaaagaatacaaagttcacttccagctggttatctggatgcaacgacgctggcggattatctcgtgaagaagggagtccctttcagaacttctcacgagatagttgga

SEQ ID NO: 11650 - DNA, 305 bp, Zea mays
caatgaccaaattgtgacggatctaaggctatggtgccgtgatgctattgacaagattttgattcgtatcaagcagcttcaggtgtctctggttattttggcttcaaaatatgttgacttaatagtcccaggttatacccatctgcaaagggcgcacctgttctgctgccacatcttctcttatcatatgttgaacagttggagcgtgatgctggtcggctggtcaactgcagggagcgaatgaatttctgtcctcttggtgcttgtgctttggctggaactggacttcccattgataggtttca

SEQ ID NO: 11651 - DNA, 306 bp, Zea mays
gcaagtaccagaagagcacggagctgctgatccgcaagctgccgttccagcgcctggtgcgtgagatcgcccaggacttcaagaccgaccttcgcttctagagctccgccgtcgccgcgctgcaggaggcgtccgaggcctacctcgtcggtctcttcgaggacaccaacctctgcgccattcacgccaagcgcgtcaccatcatgcccaaggacatccagctcgcccgccgtatccgtgtggagagggcctaggcgtcgtggcggtggaggtcgaagtagtagtcgcagtttctgtcatcaccgt

SEQ ID NO: 11652 - DNA, 307 bp, Zea mays
cccacgcgtccggctgctctccgaccccgagctccgaaggccgcagcatcaggcgaggcccccctcgcgtgtgaccgagatggcgctgccgaatcaggggaccgttgattaccccagcttcaagctcgtcatcgtcggcgatggtggaactggtaaaactacatttgtgaagaggcatctcactggagagtttgagaagaaatatgaaccaaccattggtgtggaagttcatccgttggatttcaccactaactgtggtaagatcaggctctactgctgggataccgcagggcaagagaagtttggt

SEQ ID NO: 11653 - DNA, 312 bp, Zea mays
atccgggggtgggtagtttctagggttttcgcggcgaagggaaatggggctgcacgacgagatggggttcagccgcccgagcaagatccaggcgatcaccctgcccatgatcctcacgccgccctacaaggacctcgtcgcgcaggcgcacaacggttctggcaagaccacctgtttcgtcctcggcatgctcagccgcgtcgacccgcaacacaagataccccaggctatctgcatttgccccaccagggagcttgcgcacagtaataaggcagttctcatgaggatgggcaagtttactggcattacatg

SEQ ID NO: 11654 - DNA, 306 bp, Zea mays
atttaagtcggaggttgctgtttggcataagctcagccaccctaatgttacaaagtttgttggtgcatctatggggaccacagaccttaagattccatcaaacaattccaatggtgctgcacgtacaaatttgccagcaagagcatgttgtgttgtggtagagtatcttgctggaggaactttgaagcaatatttgataaagaatagccgacggaagcttgcttataaagttgtggtccagcttgcattggatttggccagaggattgagctatctgcactccagaaagattgtacatcgggatgt

SEQ ID NO: 11655 - DNA, 305 bp, Zea mays
catttgttcccatctctggttttgagggtgacaacatgattgagaggtccaccaaccttgactggtacaaaggcccaaccctgcttgaggctcttgaccagatcaccgagcccaagagaccctcggacaagcccctgcgtctccccctccaggatgtgtacaagattggtggtattggaactgtgccagttggtcgtgtggagactggtgtcatcaagcctggtatggttgtcacctttggtccaactggcctgactactgaggtgaagtctgttgagatgcaccatgaggctcttcaggaggcc

SEQ ID NO: 11656 - DNA, 306 bp, Zea mays
aggagttgttatgatgagggtaagcgtgtagcagagacattgatgttcgactatcacaggcagcatggcattgaaatccggattgccaggattttcaacacctacgggcctaggatgaacattgatgatggccgtgttgttagcaacttcattgctcaggctgtgcgcggtgagcccctgactgtccagaggccaggaacacagactaggagtttctgctatgttgccgatatggttgatggtcttattaagctgatgaatggaaacagcactggaccgattaacttggggaaccaggtgaattca

SEQ ID NO: 11657 - DNA, 315 bp, Zea mays
  unsure (1)..(315): unsure at all n locations
cgcttccagccgccgccgccgcgtccgcctcgcccagcgcacagccgccgcagcacatcgctatctcgatctcagccatggcggaggtggagcagcaacaggacacgccgaagctgttcaaccgctggaccttcgatgatgtccaggtgaacgacatctcgctgaacgactacctccgctgtgaacgcgacgaagcacgcgtatgtacctgccgcacaccgcggggcgttactccaagaagcggttcccgcaaggcgcagtgcccgnatcgtcgagcgcctcacaaactccctcatgatgcacgggcgcaacaac

SEQ ID NO: 11658 - DNA, 268 bp, Zea mays
ggcgtggtcacgctcacgcaggacgacgatggacctacaactgtgaatgtccgtatcactggacttacccctggacttcatggcttccacctccacgagtttggtgatactaccaatgggtgcatatcgacaggaccacattttaatccaaacaatctgacacacggtgcaccaagaagacgaagtccgtcatgcgggtgacctgggaaacattgttgcaaatgctgagggcatagccgaggcaaacccattgttgactacccagatt

SEQ ID NO: 11659 - DNA, 260 bp, Zea mays
agctgcgccgctctcaccttcaccggcgacgggcattcacaagtagtgatctcttgactaacggcgtagtggtgactaaagagccttgacaatgagcagcataggcacaggttatgatctgtctgtcaccaccttctctcctgatggccgcgtctttcaggtcgagtatgccacaaaagctgtcgacaacagcgggactgttgttgggatcaagtgcaaagatggcattgttctgggtggtcgagaagctggtaacctca

SEQ ID NO: 11660 - DNA, 166 bp, Zea mays
cctcagtcctcagtccctcacacactcactatacactgctctgctgcagcaagaaggaagaagctagcgcctccctagctctcgttgtcagcaatggccacaaccgcggcgtcaagcctcctcaagtcctccttcgcgggctcccggctcccttcggccacgcgca

SEQ ID NO: 11661 - DNA, 294 bp, Zea mays
ggaccgtgggtcggcgcagtacgtgatgcggcgcgtggctccgcggcgggtgtggccgccgatcgcgttcggggcgtccatggcgtgctggacacgagcacgtgagccgcaccatctgcctcaccatctgccgccaccaccgcgtctgggaccgcctcttcaggatccttcaccaggaacagggtgcggacgttcctgatcgaggcgttcatgtgccacacgcacaacgcggcgttggcacacgcatgcacaacatcatctgcggcacgcggggcggatgggcgcgtacctgga

SEQ ID NO: 11662 - DNA, 256 bp, Zea mays
  unsure (1)..(256): unsure at all n locations
cggacgcgtggcttatccagtttgatggggtgtcctcaaacccagatgatctagtaattgttataggggctactaataaacctcaagaattggatgatgctgttcttcgaaggctggtaaaaagaatatatgtgccactacctgatccaaatgtacgaaggttacttctgaacaaatcagctcaaaggacaatcattcaaactgtcgaaccatgattttgaaagacttgctgtggagaccganagggctattctgg

SEQ ID NO: 11663 - DNA, 295 bp, Zea mays
gcctgctgttgctggcttcctcatgcagaaggcacttgactaccttgttggagctgttgccaacccaaagaagccatttgccgctattgttggtggatccaaggtctcaagtaagattggtgtcattgagtcgttgctggcgaaggtcgatatcctcatccttggtgcgtggtatgatctacacattttacaaggcacaaggatattctgttggaaaatctctcgtggaagaggattaaacttgagctcgcaacttctcttattgagaaggcgaggcaaagggggtttctctttt

SEQ ID NO: 11664 - DNA, 293 bp, Zea mays
gcaaccttcaggatgtgtcgctgtccaataattttcttcaagggcccaaaccaaactttacagctaagactgtggatttgaaatcagggaacgggttctgtcgagaagactctgggccatgcgatccgctggtgaccactctgcttgaggtggctttaggtttttggatacccattgcagcttgcgaagtgggcaggaaacaacccgtgcgatccatggcctggtatttcctcgcatcaaaatggatgtgactcaaatcaaattgcctcgccagaacttgtcgggaattattt

SEQ ID NO: 11665 - DNA, 293 bp, Zea mays
  unsure (1)..(293): unsure at all n locations
attttggacagtatggagaaatagttgattcggtgataatgaaggataggcacacatctcagccacggggttttggcttcattacatactctgaccctgctgttgttgataaagtgatagaggacaatcatgttatcaatggaaagcaagttgaaattaagagaaccataccaaaaggttcggtgcaatctagctctaaggatttcaagactaaaaagatatttgttggtggggcttccgtcaacactnacagaagacgaattcaagagtttctngcaagatatgggactgtg

SEQ ID NO: 11666 - DNA, 291 bp, Zea mays
  unsure (1)..(291): unsure at all n locations
cggaccgtggnaacaagcttgggcttatgagtttcagtgccaacctccaaggttctcttggtcagctagattgcagagaaaaaggacagatacaggactcttcggatgaaaccctggatacgcaatcttgtcacgaggtccttggctatcctgccaagtttgatcggtgtcaattattggtggttcttcagcagctggccagttgattatcattgcatcgatgatactgtcattttgaactcccttttgctttagttccactccttaaattcacagcagaaaacaaagatg

SEQ ID NO: 11667 - DNA, 242 bp, Zea mays
ccttcacctgctgattgctgtgccgctccgctccgctccggtggcatctgcatctgcatctccatccctcgatctgtcttctctcagggtggaataagcgtgacaatggaggctccacccgtggcgctgttcgacaccctcaaggcagccaaaccgttcttcttcgttggctggtcccaacgtgattgaatcggaggagcacgtcctgaagatggccaaacacatcaaagccaattacgacc

SEQ ID NO: 11668 - DNA, 296 bp, Zea mays
gctgaagctgcatgccagcaaaggctttcctttgctgaagtggaactagaagagttaaggaccaaagtagatgcatctgaacagatatgttgtggaacttaaggaggcaataagaattaaagaggctgaaggagacgcctatatttcctatatcgagacagttggtccagcatatgaagacatgcaaacgcaaaatcagcatcttcttcaacagcttactgatagagatgacttttaacataaagctagtatcagatagtgtgaagatgaacaagcttgtagtcccttctctctga

SEQ ID NO: 11669 - DNA, 305 bp, Zea mays
cccactcgtccgcccacgcgtccggttttgttgttctcgatgatggtgttgagtccggtgaagattttgatgaaaaatcaggccacccttcagatcctgcagacagcaggagctgtgatactggcgcctcatgcaaatgttggttgaagaagcatatgacatgcttgtataaccaagcaaaggaaacaaatgctatctggtctgtggtggttgcagctgcactagttggtattgtgatttttgggacgttggcacaaagataaattgcaccttaaccagcttaagtagcgctctggctcagcagt

SEQ ID NO: 11670 - DNA, 293 bp, Zea mays
ggaaggagtctgaatactctggccattctattcctgttggtggtcttgcttactatgtaactgccccatcaagtttggctgatgtccttgcaaatccattccatgcactgttttatgtggtcttcatgctgtcagcctgtgctctgttctcaaagacatggatttgaagtttctggttcatcagcaaaggatgttgctaagcagctcaaggaacaacaaatggtgatgccaggtccatcggtgagtcgtaacttgcagaaggaacttaaccgatacatccccactgccgctgc

SEQ ID NO: 11671 - DNA, 298 bp, Zea mays
  unsure (1)..(298): unsure at all n locations
cggacgcgtggcgcagctcaggatcgtctcatacctcggcgaaaatgagagagatcttgcacatccagggagggcaatgtggcaaccagatcggtgccaagttctgggaggtcgtgtgtgacgaacacggcattgacactacaggtcggtacactggcacttctggaccttcagttggagcgcgtcaatgtctactacaatgaggcctcctgtggccgctttgtgccccgtgcttggttctcatggaccctagagcctgngtacaatggacagtgtccgcactggaccctatgggcag

SEQ ID NO: 11672 - DNA, 292 bp, Zea mays
  unsure (1)..(292): unsure at all n locations
gagaagaaggctactgaacgtcctccagaaagagaaaaaaaattagatgctccccatccccgcatgcagtttgatgatgtgcataaggtggagaaagcaaaaaaacgtgcggtagtcaaccaatcagaagctcgaaacagagttgaactgttcaggcatctatcctcagtatgtgcatggcactcagcttcctgacctcgagtcaaaattctttcaattagaaccaatgccatccttctgtatactnngttggtctccaatatttgtctggtgaagtatctggtggtaatga

SEQ ID NO: 11673 - DNA, 290 bp, Zea mays
  unsure (1)..(290): unsure at all n locations
gaacagctgcgggaaaggctggtttggtgacagctagaaaatcattcaagatacacgcactttcaaagataatgatactgcacttgaagaggttcagttatggaaatcatgggagcactaaagtctataagccactccactttccatccgtactggttctttagtcgtgatctgctgagctcaccatcacaagagggtagaaaatacgagcttgttgcaaccatcacttcatcatngggagggacccctacagggggcactacaccgctcacgcaaagcatggcaagggc

SEQ ID NO: 11674 - DNA, 285 bp, Zea mays
tgaccagcctcaaggattatgtgaccaggatgaaggagggccagaacgacatcttctacatcactggtgagagcaagaaggctgtggagaactccccgttccttgagaagctgaagaagaggggctatgaggtgctgttcatggtggatgccattgacgaggtattctattggacagctgaaggagtttgagggcaagaagctcgtctctgccaccaaggagggcctggaagctggacgagagtgaagatgagaagaagcgcaggaggagtcaaggagagtttga

SEQ ID NO: 11675 - DNA, 294 bp, Zea mays
agacattccaacgagctctgggtggcggcgttaatcgagataatttgatactagagattaatggcctaaggttagcctacagccttcaacatgcagattgtgctggagctgtgttctattctgtcatgaagagtgcattactggctgcacaatctagtaattgatactcttttgaagacaactgctgatgcacttggcaagtggaaggatcttttgcgcaattacacccaagactagttgatgtaacagatggagatacttttaaactttgaggaaatgtgtcaagagaccaca

SEQ ID NO: 11676 - DNA, 291 bp, Zea mays
agctcatgtcgtccacgtacatggtcgcgctgtgccaggccgtggacctgcgccacctcgaggagaacctcaagagcgccgtcaagagctgcgtgatggcggtggccaggaaggtgctgaccaccagcctcggcggcgacctccacagcgcgcgcttcagcgaagaaggccctgctcaccgccatcgaccgcgaggcggtgtacgggtactacgacgacccctgcagcgcacaactcgcccctgatgaagaagatccgggccgtgctggtggacacgccctcgcacggcag

SEQ ID NO: 11677 - DNA, 315 bp, Zea mays
cccacgcgtccggacgaggggcgaccgccgcaacacaaatccacacgcccgccgccaccgccgccatacggacccactcctcctttgccctggtgcgagcaggcttcggcagcaaaccccgcagactgctcccggacgagggagaacgcgcggggctgggctagccgctacccgctagccaggggaccggggcggaggcagcgaggaggtacgtatggacaagtacgaggcggtgcgggacatcgggtcggggaacttcggggtggcgcggctgatgcgcaaccgcgagactcgagagctcgtcgccgtcaagtg

SEQ ID NO: 11678 - DNA, 314 bp, Zea mays
gcagacttcccggctggcgcaggaggagatcaagctcaagttcatcgacacatcatccaaatttgggcacggtcgcttccagactaccgatgagaagcagaggttctttggcaagctcaaggcgtaaggtgctgcacggtcgcttccagactaccgatgagaagcagaggttctttggcaagctcaaggcgtaaggtgctgcggtgcagcgacaagtcccatttctcaaaatcatcaaactgtgatacttttgtttgtaaccttgctgtactaagttttgtagccggatggtttgggagcatggtccggtcttc

SEQ ID NO: 11679 - DNA, 310 bp, Zea mays
ctgcaggctactgatgcaagtgaaatcagccttgatgagatcaaggatcgggctcgctaggcatcatcatgatcatgcatcatggacttggcctactactgtggatttgtatgccattatagacttggtgctgtgaaagactgcttgatgatttgcgggtttgttgctgtgtaaaaaaaggtcccatggctcccagaagaccatgaaggttcggatctatcatgtaattccttgttatctgccaattatgtatggactatggacatgtgttgcgctgttcaacttactactacaaataagtaatcgataa

SEQ ID NO: 11680 - DNA, 309 bp, Zea mays
atcaggcactaaaggaagctggtgcaattgtgcctacttcatatgaagctcttgaaagtgcaattaaggaaacatttgacaaactgtttgaggaaggaaaaatttctcctgttactgaaattacaccgtctctcattcctgaggaccttaaaactgcaatcaagagtgggaaggtccgagctcctacccacatcatctccactatttctgatgacagaggcgatgaaccatgctatgctggtgtccctatgtctacaattattgaacagggttatggagttggtgatgttatttctcttttgtggttca

SEQ ID NO: 11681 - DNA, 306 bp, Zea mays
gatcagtctgtcatagtatgggataagcagacttttaagcttttggaagaactgaagggccacgaggcaccagttagttctgtccggatgctctcaggagaacgtgtccttattgcatcccatgatggtactgtgaagatgtgggatgtccggactgatacttgtgttgttaccgtgggtcgttgccaaagtgctgttctctgtatggaatatgatgattccactgggattctggcggctgctggaagagatatcacggcacatgtctgggatattcgctccagcaagcagatgttcaagcttcaa

SEQ ID NO: 11682 - DNA, 310 bp, Zea mays
gaaggacatcactcccatgggtggcttcccccactatggtatcgtgaagggtgactacctgatgatcaagggatgctgtgtgggtccaaagaagagggtggtgaccctccgccagtccctcctgaagcagacttcccggctggcgctggaggagatcaagctcaagttcatcgacacatcgtccaaatttgggcacggtcgcttccagactaccgatgagaagcagaggttctttggtaagctcaaggcgtaaggtgctgcggtgcagcgaaagtcccatttgtcaaaatcatcaaactgtgaaaccttt

SEQ ID NO: 11683 - DNA, 302 bp, Zea mays
gcatattgggtgctgtgggaaagagcagtagcttgcagggtggggaggcagtaagcagcatgggcattggcggaggatggcagttggcgtggaaatggaccgagagagagggcgaagatgggcaaaaggaaggtggcttccagcgtatttacttgcatgaggagggcgtacaaggcaacaggggttctatattgtcattaccaggcggggatgttcctcctggtggtgagttcatccaggctgcagctcttgtgagccaaccagctctttactctaaggaactgctggagcaacgtgctgct

SEQ ID NO: 11684 - DNA, 305 bp, Zea mays
cggacggtgggcgagacgcgtgggtgcagttgtgctgcctatgttaaagccaggaagcaactgagcgtgcatgaggtgccaaacatattaacagttgtacttaaaagattatcagtcaggaaaatatggcaagatcaacaaatgtgttactttccctgatatgtttgacatggttccttttgtgactgggtctggtgacaatccccctctttatttcttgtatgccgtggttgtacatgtggatacagaaaatgcatcattctctgggcactatatatcatatgtcaaagatatgcagggtacat

SEQ ID NO: 11685 - DNA, 305 bp, Zea mays
aaatgatcatggccacaaatcgacctgatgttctggacccggcgctcctgcgtcctggacgtttagataggaagattgaaattccgctacccaacgagcaatcaagaatggaagttctaaaaatccatgcagccggtatcgccaagcatggggagattgattatgaagcagtcgtgaaactagctgaaggtttcaatggggctgatcttcggaacgtgtgcaccgaagctggcatggctgcaattcgtgcagagagagattacgtagtccacgaagacttcatgaaggctgtgaggaagctaaat

SEQ ID NO: 11686 - DNA, 306 bp, Zea mays
cggacgctgggttcctctgctccctctccgcttctctccactatcctaccaggcaccactcgcatcgtgtgctcagtcagatccccgtcccgcatttacaaaggccaggttagttggcattgaagacgatgactgcttctgcagctgctggtgtgcagatggtggctgcacgcccttgcatttcggcctcgccaggaattcttaccgcacgggtttctaggactgattgcatgctcagtaccactgctacattccccaaaatcagctgctcctggcctctaaggtttaagcgcaatgatgttgttg

SEQ ID NO: 11687 - DNA, 299 bp, Zea mays
cacacagttcccatataggcagccatcggctacacagcctcgcctccgtaagcagagtgtgtcgttgcggaggcaggaagagagacgacggcagccatggcgacctccttccaggggacgaccaccaagtgcaccgcctgcgacaagactgtgtaccttgtggacaagctcaccgccgacaaccgcatctaccacaaggcctgcttccgcagccaccactgcaagggcaccctcaagctcgccaactacaactccttcgagggagtgctctactgcaggcctcacttcgaccagctgtt

SEQ ID NO: 11688 - DNA, 299 bp, Zea mays
caaaggagagccagccaaatcttccacctcctccatttccagccccgtccccacaccagctcgcgtaacctcctccccatggctggaggcggcggcgcaggcgcaggctcgtcgtccggcggcggcggaggggcggcagggagggcgactgggactgcggcagctgcgtgaaccgcaactacgccttccgctcgctttgcaaccgctgcaagcatccgcgcctcctcgtcgaccccaacaccccgcgcgactccaagtggctaccccgcgccggggactggatctgcaccgcagcaact

SEQ ID NO: 11689 - DNA, 297 bp, Zea mays
ctagcatcgttgggcgtcctcgtcacaccggtgtcatggtagggatggggcagaaggatgcatatgttggtgatgaggcacagtccaagagaggtattctcacgctcaagtacccgattgagcacggtattgtaagcaactgggatgacatggagaaaatctggcatcacactttctacaatgagctccgtgttgccccggaggagcaccctgtgttgcttactgaggctcctttgaacccaaaggccaacagggagaagatgacccagattatgttcgagactttcaatgttcctg

SEQ ID NO: 11690 - DNA, 297 bp, Zea mays
aacaccaccatctacccgctcacgtccctcccgctcctcatttactgtatcctgcctgccatctgcctgctcacggggaagttcatcatcccagagatcagcaacttcgctagtatctggatcatctctctcttcatctcgatcttcgccacgggtatcctggagatgaggtggagcagcgtgggcatcgacgagtggtggaggaacgagcagttctgggtcatcggaagcatctacgcccacctcttcgccgtcttccagggcctcctcaaggtgcttgccggcatcgacacccac

SEQ ID NO: 11691 - DNA, 264 bp, Zea mays
gagatcataccaactgcacttgttccacaaatgtggatgaaacgatgatgacaaagcagtggttatccagacattgctgttcgttgcaggtatcaacaccctcctgcagagtttctttggtagcatgtagcctgcagtgatcggcgggtcatacacctttgttctgcctaccatttcgatcatccttgctggacgttatgctaatgaacctaatccacatattaaatttctccgcatcatgcgtgggacacaaggtgcgttgat

SEQ ID NO: 11692 - DNA, 335 bp, Zea mays
caaagaccgtgaaggctgggctccagtaccccgtcggccgcatcgggcgctacttgaagaagggccgctacgcgcagctgtcggcaccggcgcccccgtctacctcgccgctgtcctcgaatacctcgccgctgaggttctggagctcgccggtaatgctgccagggacaacaagaagactcgcattattccgcgccacgtgcttctggcgatccggaacgacgaggagctcgggaagctgctgggcggcgtgaccatcgctcacggaggtgtgctccccaatatcaaccctgttctgctgcccaagcagacggcggagaaggcgtccagtggcg

SEQ ID NO: 11693 - DNA, 330 bp, Zea mays
cagcaggcggcgccgagtagcggctccccatctcgagcttgccaccatggctagaggattgaagaagcatttgaagaggctcaatgcccccaagcattggatgctggacaagcttggcggagcttttgctcccaagccatcttctggacctcacaagtctagggagtgcctgccactgatcctcatcatcaggaacaggctcaagtatgctcttacataccgtgaggtcatttccatcctgatgcaacgccatgtacttgttgatggcaaggtcaggacagacaagacctaccctgctgggttcatggatgtcatttccatccccaagac

SEQ ID NO: 11694 - DNA, 122 bp, Zea mays
atggactttgccttcccgtacctgttgcagttcattcgtgaatacactagcaaggtggatgatttagtgaaggacaagattgagtcgcagaaggaagaaagagccaaagagaaggaggagaa

SEQ ID NO: 11695 - DNA, 210 bp, Zea mays
gagggtttatcttcgtctgtagtcgtctcgtgtccgtatgtatcgtttcgtgttcgttgttgttgttgcccatctgtgtttttgaccgcaagctcgctcctctgatgttgttagtgatgtctacaatcgtccaatcccgagcctgcattgagctccaccgtttatcttatctggctatacctaaaaaaaaaaaaaaaaaaaaagaaaaag

SEQ ID NO: 11696 - DNA, 337 bp, Zea mays
  unsure (1)..(337): unsure at all n locations
cctccatgcgacgattagttgttgccaccggaggtgtgctgttatccgaccaattaactggagatatatgaagaggggcctatctgtttggttagatgtgcccttggatgctcttgctaggcgtattgctaaagtgggaactgcctctcgtcctcttctggaccaaccatctggtgatccgtacgcaatggccttttctaagctcagcatgcttgcacagcaaaggggtgatgcttatgcaaatgcagatgtaagggtttctctggaagagattgcatgtanacaaggtcatgatgatgtctctaagctgacacctactgatattgcaattgagtca

SEQ ID NO: 11697 - DNA, 113 bp, Zea mays
ctgcgcttacgtcactgagaccgtccttgctgcctgctacaaggcgctcaacgagcaccatgtcctcctggagggtaccctcctgaagcccaacatggtgactccaggctccg

SEQ ID NO: 11698 - DNA, 332 bp, Zea mays
cggacgcgtgggcaggagttcaagcaactcaacatccatgcatgggaagcttttgaaaaggggcaggatatccatatgcaagcagccccatctcaagcagaactgaagtataagagtttcaagatcaagaaagaaatgttgaagtctgaacataaggataaaattatggagaagtatgggaatgctgcgtccgaagatgcaattcctcgggagctgctgcttgggcaaagtgaaaaagagattgagtatgaccgtactggtcgaataatcaaaggacaggatgtatctcttcccaagagcaaatatgaagaggatgtgttcattaataatca

SEQ ID NO: 11699 - DNA, 328 bp, Zea mays
  unsure (1)..(328): unsure at all n locations
cggacggtgggcggacgcgtgggccgcgcccgactcccgttgctgcgtgcggcggcccgactagtcgcgccgcgctgcgcttggcttgattgatncggccgggctaggggtgttgcaagacctcgtggcgagagcgggcgggtgcgcggtcatcgacggcggcttcgccacgcagctagaggcgctcggcgccgacatcaacgacccgctctggagcgccgcttgcctcatcaccaggccgcacctcgtcaaggaggttcatatgcagtatcttgaagctggtgcggacgtcatcatttcatcatcttaccaggcaacaatcccgggt

SEQ ID NO: 11700 - DNA, 316 bp, Zea mays
  unsure (1)..(316): unsure at all n locations
agggtcaatcatgtgtccaccacaggctagtggttggtgatggctttgtgactatgacaaagggtgaaagtattagaagtttctttgagcatgctgatgaggccgaggaagaggatgaagatgatgacatggacagggatggaaatgattttgatggtgatggtgcccatccacagaagcatgccaagagccctgaactggcaagagaatttcttttggatgctgctgctgtgatattcaaagaacaggttgagaaggccttcagggaaggtacggcacagcaanatgcacatagtaatttttaggtcctttgctc

SEQ ID NO: 11701 - DNA, 323 bp, Zea mays
agaaaattcaagttcgaagaaccacgtcgtgaacagatagatgaactaaagattgatttgtttaagcatttccgagaagatgtaagcctgcgattatggaactcagactttaagaggcaaatcgatggtattgaattgctacaaaaggcacttccttcaagttggaaagaagtgattgaacttcttgacatattattaaggtggtttgtcttacgtttttgtgaatctaacacaacatgtttgttgaaggttcttgactttcttcctgagctttttgatattttaaaagaccagtcatacatgttgacagaagctgaagctgc

SEQ ID NO: 11702 - DNA, 326 bp, Zea mays
gtgcaaggtaacaggcggccaccatggtgaagggacgcacggaacagcgcgtcaagatctacgtccggagcaccatcctcggatacaagaagtccaagtcgaaccagtacgagaccacgtcgctcgttcagatcgaaggggtgaacaccaaggaggacgtcgcgtggtacgctggcaagcgcatggcgtacatctacaaggctaagaccaagagcagcgagacccgctacaggtgcatctggggcaaggtcacccgcccgcacggcaactcgggcgtcgtccgcgccaagttcaagtccaacctcccgcctgagtccatggggcgc

SEQ ID NO: 11703 - DNA, 324 bp, Zea mays
cacacgcgtccgcaacatcaaatccctcccatctcttcacctccgcagccgtctctgctctccaagatcgcgatggcgtcagaaaagaagcagtcgaacccgatgcgggagatcaaggtgcagaagctcgtgctcaatatctccgttggagagagtggagatcgactcacccgcgccgccaaggtgttggagcagttgagtgggcagtctccggttttctccaaggcaaggtatactgtgaggtctttcggtattcgtcgtaatgagaagattgcatgctacgttacggtcaggggtgagaaggcaatgcagcttcttgagagt

SEQ ID NO: 11704 - DNA, 271 bp, Zea mays
gacgacgacgggcggcagcaccttgcggtaatcaggggtgctacacgggcggccaatggcggcggcggcggcggctgccggcggatggtccggggtcatacccgccacggtgcacgtccaagtgcggcgactgcagcccctggtacccggtgcacgtggccctgccgccgggcgtgcacgtcaccaccgagtactacccggaggcgtggaggcgccagtggggcacacgcctctacatgccatgagcgcagtccgagcaagcagacggcca

SEQ ID NO: 11705 - DNA, 335 bp, Zea mays
cgcccaccgccgtcgccgcccaaccgcagtaaggaggaaggagcaggaagatgccggcggggcacgggctgcggtcgcggacccgcgacctgttcgcgcggcccttccgcaagaaggggtacatcccactcaccacgtacctgcgcacctacaagatcggcgactacgtcgacgtcaaggttaacggcgccgtgcacaagggcatgccgcacaagttctaccacggccgcaccgggagcgtctggaacgtcaccaagcgcgccatcggcgtcgagatcaacaagcaggttaatggccgcatcatcaggaagcggatccatgtccgcgtggagcat

SEQ ID NO: 11706 - DNA, 315 bp, Zea mays
cccacgcgtccgattccgcatccccggctgaggcagcagcggcggcgccggcagcggcaccggctcaccagcgataccaggaagaatggggaggtacagtcccgcgtacagccccccgaggagaggacatggcggcaggggaaggagcccacctcccaggagaggatatggcggtggccgtggtgaccatggctctgtcagcctcctggtccgcaacattccattgagatgcaggcctgaggaactacgtgtccctttcgaacggttcggccctgttcgggatgtttacctgccaagagattatcacactgggga

SEQ ID NO: 11707 - DNA, 322 bp, Zea mays
cagaccgtgggtccgcatctactgcaaggccgacgaagggttcagcgccacggtccgcaacggcgccgtgtgcctcgcgcccaccaacccgcgcgacgagtaccagacactggatcaaggacatgcgccacagcaacagcgtcaaggacgaggaagggtacccggccttcgcgctcgtcaacagggtcaccggcgaggccatcaagcactcccagggcgagggccacccggtcaagctggtgccctacaaccccggctaccaggacgagtcggtgctgtggacggagagccgcgacgtcggccacggcttccgctgcgtccg

SEQ ID NO: 11708 - DNA, 316 bp, Zea mays
cctgccttgtgccttcccttcccttgcttcgcttattgccggcacatcacatcggcaggcgagggacggagcgagcagggaagcccatccaccagccagccaccgcgttcctgagaagcgaggagcgagaaaagagaagagcggccatgttctggcacggggtcgcggaccggctgacggggaagaacaaggaggcgtggagcgagggcaagatccgcggcacggtgaggctggtcaagaaggaggtgctggacgtcggcgacttcaacgcctcgctcctcgacggcgtccacaggatcctcggctgggacgacgg

SEQ ID NO: 11709 - DNA, 311 bp, Zea mays
ggcggcgttcaaggggtcggcgccgatcaatctatcggaccgtctcaaccaggtgctccggtgggcgctggggtccgtcgagatcttcatcagccggcacagccccctgctgtacggctacaagaacggcaacctcaagtggctggagcgcttcgcctacatcaacaccaccatctaccccttcacctcgctcccgctgctcgcctactgcaccctccccgccgtctgcctcctcaccggcaagttcatcatgccgtcgattagcacgttcgccagcctcttcttcatcgccctcttcatgtccatcttcg

SEQ ID NO: 11710 - DNA, 314 bp, Zea mays
cggacatctacttggacaagttcgacagccagtaccacttctcttgccagttcacagctgaccttattgccatgaaccacactgatttcatcatcaccagcacattccaagaaatcgcgggaagcaaggacaccgtggggcagtacgagtcccacatcgcgttcactcttcctgggctctaccgtgtcgtccatggcatcgatgttttcgatcccaagttcaacattgtctcccctggagcagacatgagtgtttactacccgtatacggaaaccgacaagagactcactgccttccatcctgaaatcgaggag

SEQ ID NO: 11711 - DNA, 352 bp, Zea mays
ggtggacccaatggtcctggctttccccttggttttggtcaatctagggccaagtttcagatggaacccaacactggtgttacatttgatgatgttgctggtgtcgatgaagcgaacaagacttcatggaagtggttgagttcttgaagaaacccgaaaggttcactgctgttggtgctcgcattcctaagggtgtactgcttgtcggtcctcctgggacgggtaaaactttgcttgccaaggcaattgcaggagaggctggcgtgccatttttctcaatttcaggttctgagtttgtggagatgtttgttggtgttggtgcttccagagttcgtgacctttttaagaaggc

SEQ ID NO: 11712 - DNA, 352 bp, Zea mays
cccacgcgtccggtcgacgacgaatacatcatcgttggatctgccaacatcaaccagcgctcaatggatgggggcagggactcggagatcgccatgggcgcgtaccagccgtgccacctgaacaccaaaggccaggtcgcccggggtcaggtccacggcttccggatgtcgctgtggtacgagcacctcggcatgctacacgacgatttcctcaacccgggaagcctggagtgtgttcggagggtaaaccagatggcagacaggtattgggacctctacgctggtgacagcctcgacgccgacctccttgggcacctactcaggtacccagtcaccgtcacgaaggagggca

SEQ ID NO: 11713 - DNA, 354 bp, Zea mays
gagagtttgaccaccatgctacttgtgttgtctcaagatatgagacagtggatacttactatcgccggtgcagtagtgctagttacgtcggaaatgtgtcagttcccttgctttgtatcaatgctttggatgatcctctttgcacaagggaggctattccttgggatgaatgcagggccaataagaacattgttttagcaactactccaaatggtggtcatcttgcattctttcaaggactaactgcgcggagactatggtgggttggagctacttctgagttcctttctgctcttcatgacagctcctacatgcataggcagaaggcaaatgatcatgttttgctctcgtctt

SEQ ID NO: 11714 - DNA, 357 bp, Zea mays
cgctcatgcacgcgctcaccgagctcgagaacgccttccacgcactcgccaccgacgacgagttccagaaagaacttgacggtattctcaaggactacgttggacgtgagagccccctttacttcgcggaccctgacggagcactacaagcgcgctgatggcacaggcccgctcatctacctcaagagggaggacctcaaccacacgggcgcccacaagatcaacaatgctgtggcgcaggccctgctcgccaagcgacttgggaagcagcgcatcattgccgagacaggggctggccagcacggtgtcgccaccgccaccgtgtgcgcccgtttcgggctgcagtgcatcatctac

SEQ ID NO: 11715 - DNA, 355 bp, Zea mays
gaaaaggactcgaccacgtgatcgatctcggagggctggaccagcaccagaagctaatgcagagattcaagcaaacttagaccagaggcgacgaatgataactcatgcaaatgcaaagagtaaaagtgagaagtttcctcctccgcatcaggatggaggtacgggtaatccgcttggatcctatcatcatatggagcctatgttcgagcaccaggatgcttccttcagtacagtagtccccatagagaaggggacctcacaaacatggtccgggccgttgtttgatccagcagctctcgggcagtcgaggcggaagaagcaaactaccctagatgctaaggctgctgcttactca

SEQ ID NO: 11716 - DNA, 353 bp, Zea mays
cctctcctctgccgccgtcaccgccccttccttcgccgcaccagcgccagccgcgccgtggtcagaaggaggtccttcaccgtgcgcgcctcacatcgcaaggccaccggcaccgccgccgtggcaatggctgccagcgccctgcttgccggcggtgccatggcccaggaggtgctgctgggcgcaggcgacggcgggctcgtcttcgagcccagccagttcaccgtcaaggccggcgacaccatcacattcaagaacaacgccggcttcccgcacaacgtcgtcttcgacgaagacgaggtgccgagcggcgtcgacgccaccaagatctcgcaggaggagtacctcaacgc

SEQ ID NO: 11717 - DNA, 348 bp, Zea mays
atcatcgtagcggttatgttgctgtattggggaagccaaatgttggcaagagcacacttattaaccaaatggttggtcagaaactttcaattgtaacagataaaccgcaaacgacaagacatcgcattcttggtatatgttctgaaccagagtaccagattatactttatgacactcctggtgttattaaaaaggagatgcataagctggacagtatgatgatgaagaatgttaggagcgctatcggcagtgcggactgtgtgcttgttgttgctgatgcttgcaaaactcctgaaaagattgatgaaatgcttgaagaaggtgttggaaacaaagatattggacttc

SEQ ID NO: 11718 - DNA, 352 bp, Zea mays
cccagcgccggcagtcgccgtcatcgatcgatcgccggaaaactaacccctaacgatgtctggagccggcgaggaggacaagaagcccgcggagggcggcgcccacatcaaccttaaggtcaagggacaggatggcaatgaggtgttctttcgcataaagaggtccacccagctgaagaagctgatgaacgcttattgtgaccgccagtctgtggacatgaatgccattgcgttcctgtttgatggccgcagcttcgcggcgagcagacccctgatgagctggagatggaggacggcgacgagatcgacgccatgcttcaccagaccggaggcagcgttcctagcaccacct

SEQ ID NO: 11719 - DNA, 345 bp, Zea mays
cgtgccgcgccgagttcggcccgtccaagcccttcgccggcgctaggatctcggggtctctccacatgaccatccagaccgccgtcctcatcgagaccctcaccgcgctcggcgccgaggtccgctggtgctcctgcaacatcttctccacgcaggaccacgccgccgccgccatcgcgcgcgactcggccgccgtgttcgcctggaagggggagaccctcgaggagtactggtggtgcaccgagcgctgcctcgactggggcgaggcgggcggccccgacctcatcgtcgacgacggcggcgacgcacgctgctcatccacgagggtgtcaaggccgaggagga

SEQ ID NO: 11720 - DNA, 352 bp, Zea mays
gcagcgacttggttggccgagcgcgcaccggtcagggaaaaactttggcttttgtcttgcccatattggagtctttggttaatggggcaaacaaggcatctagacggactgaacatggcaggaccccaagtgttctcgttctactaccaacaagagagctggccaatcaggtgcacgctgactttgagttttatggtgcaacatttgggctctctgcatgttgtgtgtatgggggatcaccttatcgtcctcaagaaatggcattgagaagaggtgtggatattgttgttggaactcctggtcgtgtcaaggatttcattgttaaaggaactctcaatttgaaatgcttgaa

SEQ ID NO: 11721 - DNA, 352 bp, Zea mays
ggacggtggtcaggcaattactacactgcctgaaaacttcaaaccacacagagcagtgaagaagatttttgagctgcgtgcagctatgatagaatagtggtcaaggaattgattgggctgttgccgaagccctggcctttgcaacacttatagtggaaggcaatcatgttaggctaagtggacaggatgtggaaagaggaactttcagccatcggcatgcagttctgcatgatcaggaaactggagcaaagtactgcccacttgaccatgttgcaatgaatcaaaatgaggagctatttactgttagcaacagttcactttcagagtttgctgttcttgggtttgaattggg

SEQ ID NO: 11722 - DNA, 355 bp, Zea mays
cacttcaagtgtctgaaggggatggtgatgagccagctacggaacacgagcaaggtcatcgccaaccatgggattattgccaaggacgatatggcgaacttcgcgctcatgggtggtggagcaggcctcctgaggggaaacagcgtgaacgcgttcagccagcctcacaacatttggaggcctcaaagagggcttcctgagcgtgcagtgtctgttcttcgctcatggctgtttgagcacttcttgcatccgtatccaactgatagtgacaagcagatgctggctaaacagacagggttaacaaggaaccaggtgtccaattggttcatcaacgcaagggtgcgtctctggaagc

SEQ ID NO: 11723 - DNA, 305 bp, Zea mays
cagttcaagtgtctgaaggggatggtgatgagccagctacggaacacgagcaaggtcatcgccaaccatgggattattgccaaggacgatatggcagtattcgcgctcatgggtggtggagcaggcctcctgaggggaaacagcgtgaacgcgttcaggcagcctcacgacatttggacgcctcaaagtaggcttcctgagcgtgcagtgtccgttcttcgatcatggctgtctgagcacttcttgcatccgtatccaactgatagtgacaagcagatgctggctaaacagacagggttaacaag

SEQ ID NO: 11724 - DNA, 351 bp, Zea mays
ctgactggaaaaaccataaccctggaggttgagagctcggacaccatcgacaatgtgaaggcgaagatccaggacaaggagggcatccccccggaccagcagcgtctgatcttcgccggcaaacagctggaggatggccgcaccctagcagactacaacatccaaaaggagagcaccctccaccttgtgctccgtctccgtggtggtcagtaagtcatgggtcgtttaagctgccgatgtgcctgcgtcgtctggtgccctctccatatggaggttgtcgaagtatctgctgttcgtgtcagtgttggtttaataatggaccggttgtgttgtgtgtgcgtactacccaga

SEQ ID NO: 11725 - DNA, 341 bp, Zea mays
tcaagttaccccatgcttctggcaaggcgcacagcagaacaagatccctgccgctcgcggaacttctggtccagttgccagcgttgcagaagctgcttctcaggcttatttactgccagcctgaaggtgcagcctgcacaaactacctcgtacaatatgcgctggctcttgttttgaaggaaagtttcaagatatactgctcaatcaatgatggcatcattaaccttgttgacatgtattttgagatgccgaagtatgatgcaatcaaggcccttgaaatctataaacgagctggtcagcaggcagaaaaactctctaacttctatgaccactgcaaactt

SEQ ID NO: 11726 - DNA, 351 bp, Zea mays
gggcgccgcacgccgaccccgccctcgtctggatccggcgggaacgggtgcgaagaaaataaaaccatttgggtcggtgacctccagtactggatggatgaaaactacctacataactgcttcgggcccagcggcgaggtggttacaataaaagttatccgcaataggcaaacaggacagtcagaggggtatggatttgttgagttcttttctcatgcatcagcagagaaagctcttcagaattttactggtcatgtgatgccaaacactgaccggccatttaaattgaactgggcatcgtatagcatgggtgaaaagcgatctgaagtggcttctgatcactcgatattt

SEQ ID NO: 11727 - DNA, 351 bp, Zea mays
tgagaacattctttatggcaagcctgatgcgacaatggcggaggtcgaggctgcggctacttcagctaatgcccatagcttcattgctctccttcctaatggctacaacactcatgtgggagatagggggcttcagctctccggtggtcagaagcaacgcatcgccatcgcccgcgcgatgctgaagaacccgaagctcctgctactagacgaggccaccagcgcactcgacgctggttcggagagcatcgtccaagaagccctcgaccggttgatggtcggcaggaccaccgtcgtggttgcccacaggctatcgaccataaggtgtgtcgacatgatcgcggtgatcca

SEQ ID NO: 11728 - DNA, 345 bp, Zea mays
ctgtgatggacaagatctccgagaagttccacggcggggactcctcgtcgtcgtctgactcggacgacgagaagaagaaggggtcttcctcggcgtcggcgacggaggccatgaaagccaagatctaccgcctcttcggccgcgagatgcccgtccactctgtactcggcggcggcaagcccgccgatcttgtcctatggaggaacaagaagatctcaggcggggtactcgctggtgccacggccatctggctcctgttcgaggttatggagtaccatctcctcaccttggtgtgccactgtctcatcgtctcgctggccatcctgttcctgtggtccaacgcct

SEQ ID NO: 11729 - DNA, 353 bp, Zea mays
cgaccgcggattccccctcggccgccgcgcgcccgcacccgcacccgcgatgatgaactgcgccggaggcgagaccccgtggaggacttcctgatctccggcgccgtcgacgacgaagatctagccatcttctgcgacggaggacttgggattgagggtgtcaatggagatgcttgtggatttgagcagtctaatttgggcaaaaggagtagagatgaaccatgttcatctggtctaaaatccaaagcttgtcgtgaaaaaatgaggagggacaagctgaatgacaggtacctggaattaagttcggttatgaatcctggaaaacaagcaaagttggataaagccaatatctt

SEQ ID NO: 11730 - DNA, 355 bp, Zea mays
cttccgccgcgagccgggacaccgtcgccgccggccgcccgctgtccgacgcgcagagcctcgtgtccaagcgtggcaagttcaagctcggattcttccgtccagggtttggctcgagatggggaaggcaaagagcaagggccctaaattcgcggcggtgaagaagattatcaccaagaaaaccatcaataaatacaaggaggatgtgctgaaccacaagaagaaggacgtggacaaggagaaactcggccggaatgtgccgcaggtttcgtcggcgttgttcttcagctacaacacagcattggggccgccgtatcgggtgattgtggataccaacttcatcaatttctcgata

SEQ ID NO: 11731 - DNA, 355 bp, Zea mays
ggacaccttcacgggctacggcgtggaggggaacgtccctgagaacaggttccggagctacggcgccggcggcaacgctggcgtcgacaccttcaagaattaccgcgacgacggcaacgtcggcgacgacaggttcacctcctacgccaagggcgcaaacggcggcgcggcggagttccagagctacggcaactcggccaacccgggcagcaccatcttcaagggctacggcgagggcaccaaccccaaccaccacattgggttcaaggagtacgccggcgagaacaacaccttcaacggctatgctaagagcggtgtggacttcaaggggtacacaacaccaccgtcctcagct

SEQ ID NO: 11732 - DNA, 336 bp, Zea mays
cggacgcgtgggttatgagagtcatgctttcaagtccaagtttgaatcatggccagtgggtaatgctactgggagccctggcgcagaggaaagtcggggaaaagttgcagctttattgaagcaacaaggtgttgatctcaaaggagctgcaaaaagcaccaccccagtaaatgaggaagttcctcctttgcttgaaggcggtggaaagcttgaggtatggtgtgttgatggcaacgctaagactgctctgccaaaagaggatattggaaagttttacagtggagactgttatatcattctctatacgtatcattcgggcgacaagaaagaagaata

SEQ ID NO: 11733 - DNA, 310 bp, Zea mays
cccacgcgtccgcaatttctcgcgctcctaccgccgccgcttcgttctctaaccttggctcccgctccctccgcacgagcatctcaacaccgccttgaggaccccccaactcgccggctgcagccatggtgaaatattcgacggagccaaccaaacccaccaagtcaaccaaggccatgggccgtgacctacgtgttcacttcaagaaacaccgtgagacagcttttgccctcaggaagttgtcactcaccaaggcgaaaaggtaccttgcagatgtgattgcccacaagcaggccatcccgttccgcag

SEQ ID NO: 11734 - DNA, 323 bp, Zea mays
gttttatagagttgcccctgtgcttttctgtaatagtgcgcatgatccagaggatagagaaagaggataaatgattatggaaatagatttctagtataaaatttattgcagaaattgtttaattcttagaaaattcatatgaagttcaaattaatctattccagttgcaataattttgttttaatattgttcatcatctagtacctttgtttagccataaaaattgaattaatgttattcacttgatttagtctatactaagcacttaataacttcgaaaattcataactcctccgttttaactccgatttaatccgttcaag

SEQ ID NO: 11735 - DNA, 328 bp, Zea mays
actgtccgtcgtggttgccgcgcagcagaattgccctgccgacctcgacagcaaatgcgacggtggcgcgcctgatgactgggagggggaattcttccccggcgtcccgaaaatcaagtatgagggtccaacaagcaagaaccctcttgcttataagtggtataacaaggaggaagtcattctcggaaagaagatgaaggactggatgcgcttcagtgttgcgttctggcacacgttccgtggtactggtgctgatccttttggtgcgcctacaaaggtttggccttgggaggacggcacaaattcgttggccatggctaagagaaga

SEQ ID NO: 11736 - DNA, 323 bp, Zea mays
ggacgcgtggcaaaggctttagctccatttatgctcgaggattatcggaaagtaacgatgggtcagagaggtgaggaaaagcaatatacttacgaagatattcttaggtgtatgaagaaagtcacaccaatggacttgaagcagactgttcaagtagataaagaccttgtgatccgtgcctattatgctggacatgttataggggctgccatgatttatgcaaaagttggggatgctgctatggtatacactggggattacaatatgacaccagatagacatcttggggccgcacagattgatcgtctgaagttggatgtatt

SEQ ID NO: 11737 - DNA, 245 bp, Zea mays
caccacgaggcttcaggaggctcttcctggtgacaatgttggcttcaacgtgaagaacgttgctgtcaaggatctcaagcgtgggtttgtggcctccaactccaaggatgaccctgccaaggaggctgccagcttcacctcccaggtcatcatcatgaaccaccctgggcagattggcaacggctatgccccagtgctggactgccacacctcccacattgctgtcaagtttgctgagctcatta

SEQ ID NO: 11738 - DNA, 312 bp, Zea mays
cggacgcgtggcgtgacgcgtgggcctagctagagccattgctagcaacattgatgctaattttttgaaggtggtgtcaagtgctatcaagctgtaaatacaagctgctgaaagtgcacgcttaattcgtgaaatgtttaactatgcacgtgagcatcagccatgcatcattttcatggatgaaattgatgccattggtggccgaagatttagtgagggcacaagtgcagatcgtgagattcagaggacattgatggagcttctaaatcagttagatggattcgatgagcttgggaaggtgaaaatgatcat

SEQ ID NO: 11739 - DNA, 314 bp, Zea mays
cccatctcctgctgctgcttgggtggtggatctgaagaccatcaacctggcggctatctgcacgccggcggactacaacacgcgccccctcgacaccatctacagcaacttcatcgatgcactcccagtggtcaagtactgctccgagaacagcaagcgtctcatccacttctccacgtgcgaggtctatggcaagaccatcggcagcttcctccccaaagaccacccgctccgcaaggaacctgaattttatgttctgaaagaagatgagtcaccctgtatttttggtccaatcgtgaaacaacgatggtcct

SEQ ID NO: 11740 - DNA, 326 bp, Zea mays
ggcacacgaaggtggacgggcgcgggacgcgcatccggatgcctgcaatttgcgcggctcgggtgttccagctgacaagggagctggggcacaagacggacggcgagacgatcgaatggctgctgcacagcgagccgcagtggtggcggccacgggcacgggcaccatcccggccaacttcacctcgctcaacatctctctccgctcctcgggctcttccttctccatcccagcgcacctccgtgcggccggcccacgcttcggcagcgcgcagggggacccgtgggagcgcgtcgtgggagtgggactcgggttcggcgccgcgc

SEQ ID NO: 11741 - DNA, 310 bp, Zea mays
gaaaggagctaaagttattattgatgcaaacacaggccgttccaggggctatggatttgtcaggtttggagactacaacgacaaatctcatgccatgtctgaaatgaatggtgtatattgctctacgaggccaattcgtataggacctgcgactcccagaagatcttcaggtgattctggctcctcgactcctggtcattcagatggtgattcttctaacagaacggtatatgttggtgggcttgaccccaatgtcagtgaagatgaactgagaaaagcctttgccaaatatgatcttgcctccgtgaaa

SEQ ID NO: 11742 - DNA, 323 bp, Zea mays
cccacgcgtccgcccacgcgtccgaacagactgatgcatggagaaaggtggttgatgctgttcatgccaagggagctatctttttctgccaactatggcatgtaggccgagcttctcaccaagtatatcagccgggtgctgctgctccgatatcctcaactgataagccaatatcatcaagatggaggatactgatgcccgatggatcctatggcaagtatccaactccgaggcgcctagccacatccgagataccagaaattgttgagcaataccgtcaagcagccataaacgccatcaaagcaggtttcgatggcatcgag

SEQ ID NO: 11743 - DNA, 325 bp, Zea mays
ctcaacacagcacaggcagctcgagagagagagagagagaaagatgtcgtggttcgggcaccaccaccacaaccagccggctcccccggcgtcgggccccaaccaggtgttcaagatcttctgccgcgccaacgagaactactgcctggccgtccgcgaggcgccgtcgtgctggccccggtcaaccccaaggacgaccaccagcactggtacaaggacatgcgcttcagcacccgggtcaaggacgaggaaggcatgccggcgttcgcgctcgtcaacaaggccacggggctcgcaatcaagcactccctcggccagtcccacc

SEQ ID NO: 11744 - DNA, 320 bp, Zea mays
cagaggagctggaggaagaggcacacagaccgcctaacctaccaaatctcaaaaggaggatatccgaaattgtacgagtgctctcaaacttcagcaaactgaggcagaaagatgttccgcgaaaagattatatcaatcaactgaaaactgacgtcatgtcatactacggatataatgattttcttgttgaagcgttaattgagatgttcccagctgttgagcttgttgagttactggaagcctttgagaaaagaccgcctgagtgcttgcggacaaatacactgaagagccggaggagggatcttgctgctgctcttata

SEQ ID NO: 11745 - DNA, 306 bp, Zea mays
attgatattgccctgtggaagttcgagaccaccaagtactactgcactgttattgatgccccgggacaccgtgacttcatcaagaatatgatcactggcacttcccaagctgactgtgctgttcttatcattgactcaaccactggtggttttgaggctggtatctccaaggatggccagacccgtgagcatgctctccttgctttcacacttggtgtgaagcagatgatttgctgctgcaacaagatggatgctactacacccaagtattcaaaggcccgttatgatgagattgtgaaggaagtc

SEQ ID NO: 11746 - DNA, 296 bp, Zea mays
gcagacagttgctgttggagtcatcaagagtgtggagaagaaggacccgaccggcgccaaggttaccaaggcagctgccaaaaagaaatgatgcaacctgtcgttaatcctgtatctgcttttgcaatacctgacttgtcactccaacccgaagttttgtatgcggttgttactgttattgtgtactgttaagctctgctgcagcgtgccctgttgtttgggtagcgtcaacgtcgagcgccactttcgggtgtgcctttgtctgctatcagtagcggccaaaattgaaagctctc

SEQ ID NO: 11747 - DNA, 313 bp, Zea mays
actccactcatcttttctcgtttagaacctctaaaatttcccccactcgccagtcgcagcagcacctgtagcagccatggacgccagcggagcggtagcaaggggaagacgggggcggccgggcgcaaggcaggcggccccaggaagaagtcggtgacgcggtccgtcaaggccgggctgcagttccccgtcggccggatcgggcgctacctcaagaagggccggtacgcgcacgcgtgcggcactggcgcccccgtctacctcgccgccgttctggagtacctcgccgccgaggttctggcgttggcaggga

SEQ ID NO: 11748 - DNA, 275 bp, Zea mays
ggcaaacggtggctgtcggagtcatcaagagtgtggagaagaaggacccaactggagccaaggtgacgaaggctgctgccaagaagaaatgatctatctggctggtgctgtgcttgcttgttggttacctcgtggaagcttaaaaatatctcgtcttgttgacatccttgcagttgtcgcgtgaacaagtaatctatgatggcaatgtttgcctggtcatgaagtattattactttcgttgaaaccgtgatgctattaagacttaatttttttat

SEQ ID NO: 11749 - DNA, 308 bp, Zea mays
ctcctgagcagcttgcttctgctttgtggtggtttatgagtccactgaagcatatcggtgtgccagtgcctgagataatacttacattactactctcattgaggtttatcaatttagtatttgatgaggttcgcaactcagctctagcgattgtagcacgccggataagttggaaaaagctgacagctatggaaactatagatattttcttcagctatgtccaacggatatttaaaaatatatttgatcatgcggagagaatatccaaggccatggtagctcgaggatttcgtggtaatccaatcaat

SEQ ID NO: 11750 - DNA, 324 bp, Zea mays
gctggttgctaaaggaaccaatagaacatcaaggcttcaaataacaacgaacaaaaaaggagttgtttggcttgatcaagtatcactcatgcctgaagacacatacaagggacatggtttccgcacagaacttatatccatgcttttggatttgaaaccacgattcttgagatttcctggaggttgttttgtagaaggtgactggctaagaaatgcattcatggagagagtcaattggtccatgggaagagaggcctggacacttcggggatgtttggcattactggactgatgatgggcttggatattatgagttccttcagc

SEQ ID NO: 11751 - DNA, 321 bp, Zea mays
ggcgacgatggccgcttcttcctgccacgggcaacttctcctgtttctcctcgtggccgtcgcgtcggcctgcctcggctccgcggcaggcatcaagccggatctggagagggctacacgatcgctggccgcgtcaagatcgatggcatgagcgtgaagggctttggtcttgcaacaaagacatcaaacacaaaagtgatacttaatggcggccagagggttacatttgccaggccagacggctactttgcattccacaacgtgccagctggaactcatctgattgaggtctcctcaattggttacttcttttccccagtt

SEQ ID NO: 11752 - DNA, 318 bp, Zea mays
ggtgtcaagattagaatcattgatacacctggccttcgacctaacgtgatggaccagggatcaaacagaaagattcttgctgctgtcaagaactataccaagaaatgtccgccagatattgttctatatgtggatcgtctggatagtctgagccgtgatctcaatgatttgcctcttctgaagactattactgctgttcttggctcatccatatggttcaatgccattgttgcactgacacatgctgcctcagctcctcctgaaggcctcaatggtgctcccatgacatatgaggtcttgatggctcagagatcccac

SEQ ID NO: 11753 - DNA, 313 bp, Zea mays
cccacgcgtccgctttgcgaccgcggcaccaatgccagggtccagaagggcttcgtcgtcaaagacgccggcgggccgcagtggttctcgccaacaccgccgccaacgggcaggagctcgtcgcacgacgcgcacgttctcccgggctccggcgtgggggagcaagccggcaacgccatgagggactacgccatgtcggatccgaagcgacggccaccatcgtgttcgccgggacgaaggtcggcgtcaaccgtctcccgtcgtcgcggcattctcctcccgtggccccaacactgtgacgtcgagcgtcctg

SEQ ID NO: 11754 - DNA, 307 bp, Zea mays
acgatgtcgggcttgacgctgaccactgcaaggtgcttgtgaacattgagcagcagtcccctgatattgctcagggtgtgcacggccacttcaccaagcgccccgaggagattggagctggtgaccaggggcacatgtttgggtatgcgactgacgagacccctgagctgatgcccctcagccatgtccttgccaccaagcttggtgctcgtctcacagaggttcgcaagaatggaacctgcccctggctcaggcccgatgggaagacccaggtgacagtggagtaccgcaacgagggtggcgccat

SEQ ID NO: 11755 - DNA, 313 bp, Zea mays
agaagccgttcccgacatacgtgctgtacctcgtcgtcatcatagcaatgacagagctgatcggcatggtggagatcaagtgggcaggcctcacgctgctggactggatccgcaacgagcagttctacatcatcggggcgacagccgtgtacccgttagcgacgctgcacatcgtgctgaagctagtccttcgcgggaacggcgtttcgttcaagctgacggcgaacaggctaagagcaccgtgaacgagaagtacgctgagatgtacgtggtgcagtggacgccactgctgatccccacaatagcggtgatc

SEQ ID NO: 11756 - DNA, 312 bp, Zea mays
gaaccgtgcacccttgtaatggatttggaaggaactgatggaagggagaggggagaggatgacacagcatttgagaagcaaagtgcattgtttgctttggccgtttcagacattgtgttgattaatatgtggtgtcatgacattggtagagaacaggctgcaaacaagcctcttttgaagactgttttccaggtcatgatgaggttgttcagtcctcgtaaaacaacattgttgtttgtcattcgtgacaaatcaaggacacccctagaaaatcttgaaccaattttaagggaagacattcagaagatatgg

SEQ ID NO: 11757 - DNA, 321 bp, Zea mays
acagccttgagaaggaactaacgaaattgtgggaaaagatgagatgtcacgatgtgagcaaagaggagaggtccaaggcagtaagtcaggctatccataaaatggatgggaaatatttggacattgccacatcacatgttactgcacgtgttcttcaaacatgtgtaaagtggtgctcggagtcagagagggatgctatctttgatgttctacagccacatttgcttactctttcttgcaagaaatatgccgtttttcttgtaaagaagcttatagaactcgcctctaaaaaacagtttgccagtttcatatcttcccttc

SEQ ID NO: 11758 - DNA, 341 bp, Zea mays
gtacgagctgtccaaggtacccaccgtgagcgtggccatcgtggagcagtccgtgtccccgggcggcggcgcgtggctgggcgggcagctgttctcggccatggtggtgcgcaggccggcgcacctgttcctggacgagctgggcgtgggctacgacgaggccgaggactacgtggtggtcaagcacgcggcgctgttcacgtccaccgtgatgagccggctcctggcgcggcccaacgtgaagctgttcaacgccgtggcggtggaggacctgatcgtacggcgggggcgcgtcggcggcgtggtcaccaactgggcgctcgtgtccatgaaccacgaca

SEQ ID NO: 11759 - DNA, 341 bp, Zea mays
gcggtgatggagaacgggtccgccgtggcggtgaagcggctcaaggacgtggacctcccggagcctgagttccgggagcgcatcgcggtcataggcgcagtgcagcacgagctggtggtgcccctccgcgcctactacttcagcaaggacgagaagctcctcgtctacgactacatgtccatgggcagcctctccgccctgctgcacgggaaccgcgcctccggccggacgccgctggactgggagacgcggtcggcggtcgcgctggcggcggctcgcagcgtggcgcacatccactccacggggcccacggcgtcgcacggcaacatcaagtcctccaa

SEQ ID NO: 11760 - DNA, 341 bp, Zea mays
agcacaagtacgagcagatccagcagcacgcgtcgtcggagtcggacccgtcgtcgcaggtgtcgcaggtgttcgagaagtcgctgcagtacgtgaagcgcttcagccgctacaagaaccccgacgccgtgcgccaggtccgcgagacgctgagccgctacggcctcgccgagttcgagctctgcacgctcggcaacctctgccccgacaccagcggcgaggccaccgcgctcgtcccctccctcaagtccggcggcaggttcgtcggcgaccccggggacgagaagatcgagaagatgctcaacgacctctccctcatcaagaagttcgagtagagcggg

SEQ ID NO: 11761 - DNA, 339 bp, Zea mays
cttctggcctttccagccgccaagccttctagaagcttcaagagctcgattcgatcggaaccctcgccatggccgacgaggcgaaggcgaagggtaacgcggcgttctcggccggccgcttcgaggaggcggcgcggcacttcacggacgccatcgcgcttgccccagacaaccacgtcctctactccaaccggtcggcggcgctcgcctcgctccaccgctactccgatgctctcgccgacgcgcagaagaccgtcgacctcaagcccgactggggcaagggctactcccgcctcggcgcggcgcacctcggcctcggcgacgcggccagcgccgtcg

SEQ ID NO: 11762 - DNA, 339 bp, Zea mays
acgacagagcaggtcaatggtgctatggctagttgccaagctttgaagttggatgctctggttatcattggaggtgtcacttccaacactgatgctgctcaacttgccgagacatttgctgaggcaaagtgtgcaacaaaggttgtaggtgttcctgtaactttaaatggggaccttaagaaccagtttgttgagacaaccgttggctttgacaccatatgcaaggtgaacgcacaacttatcagcaatgtatgcactgatgctctatctgctgagaagtattactactttattcgcctgatgggacgcaaggcttctcatgtggcattggaatgtgct

SEQ ID NO: 11763 - DNA, 338 bp, Zea mays
ctcacgcgtccgcggaccgtggcgacgtggctgtgatggaagcggtgctaagccaggtacagaggcaacgacatgtaaaacatgtggatggtcagggcatggtggtctactccacaagaacaccactcggaatattccagcaagtctccacctgcaatacctgtggtggcaccggtgaattctccacgccttgcaacacctgttcgggcgatggccgagtgcgaaggacaaagaggatcagtctaaaggttcctgccggagtggattctggaagcatgctgagggttcggtctgagggtaatgctggccggagaggaggccctcctggggacctttat

SEQ ID NO: 11764 - DNA, 287 bp, Zea mays
ctactgttggtgaccgtgttccttatgtaataattaaagcagcaaaaggggcaaaggcatatgagacatcagaagatccgatttatgtgttggacactattatatgcatctgctcctcaatactagattctcgtgggaaatgagcgtgccggttgaactcgatcattgagtggcgactcgcggaacgctgcaaagagttgcttcatggaagccacaccagatctgtttcaatctcaactccttccaatagcgggataacgaaattcgcaaagtgacgattaacttgc

SEQ ID NO: 11765 - DNA, 345 bp, Zea mays
gtcctgtcctgccctggcagcgttcacgtactcgccggagctgcacgacgtggtggaggtgacgagggccggctacgatgcctgctccagcgccaacaacatctccgccttccgcaccggcaacgacgccgtgcccctcaccgccgtcggcacccgctacttcctctgcggcctcacgggccactgcggcaacggcatgaagatccgcgtcgacgtcgtcgccgccgcggcctcgccgtccgcgccgggccccgccgctgccgccgcggcgccgccgacgacctcgtcgccctgcaacgtcggagtcgtcgccgcctcgctactactgcttctgctgcacgccgt

SEQ ID NO: 11766 - DNA, 342 bp, Zea mays
ccattattgaggatgccaggcatccggcaaggtaccggatgttggttggcatggttgatgttatcttctctgatgttgcacagccagaccaggctaggatcttagcacttaatgcttcatacttcttgaagaacggtggccactttgtcatttcaatcaaggctaactgcatcgactccaccctgcctgctgaggccgtgtttgcagcggaagtggagaagctcaaggcggatcagttcaagcccgcggagcaggtgacgttggagccctacgagcgtgaccatgcatgtgttgtgggtgggtacagggtgcccaagaagcagaaggccacctcttaggatc

SEQ ID NO: 11767 - DNA, 339 bp, Zea mays
atggctacatatggtgttctacctgctgctaatattccaccgccttatgcactggcctctatatcatctgttcaatttgattgttatggacagcggtttgccactgctgcattagatggtaccatttgtacatggcaagttgaggtgggtggaagaagcaatgtccatcctacagagtcatctatatgctttgacagccacgcctcggatgttgcctatgtgtctgcaagtagatcagttattgcttctgctggatatagttcaaatggttcaaatgttgttatatgggacacactgtctccaccagctacatctcaaacatctatcatgtgtcatgaa

SEQ ID NO: 11768 - DNA, 347 bp, Zea mays
agcgccgccgcccttggctgggtcttcactcagtccttcgccggcgacgagcgtccacctggtgtctactgaactgagcagacagtagcaagagccactatgctgttcttctcctacttcaaggagctcgtggggaaggaggtgacggtggaactcaagaatgacctggcgatccgcgggacgctccactcggtagaccagtacctcaacatcaagctggaaaacacacgcgttgtcgaccaggacaagtatccccacatgctgtcagtgcggaactgcttcatccggggctcggtggtgcggtacgtgctgctcccgcaggacggcgtggacgtggacatcctgca

SEQ ID NO: 11769 - DNA, 338 bp, Zea mays
cccacgcgtccgcccacgcgtccggaaagacgtgccaatgtcggggacgttcttaaggttaagccattggcagctttagcaatgattgatgagggagagcttgactggaaaattgtggccatttctttggatgacccgaaagcatctcttgtgaacgacgtggatgatgttgagaagcattttccggggacactgactgccatcagagactggttcagagactacaagatacctgatggaaagcctgccaacaaatttggtctcggcaacaagcccgcaagcaaggaatacgccctgaaggtcattcaagagaccaacgaatcatgggagaaattggt

SEQ ID NO: 11770 - DNA, 341 bp, Zea mays
cggtttctgatcagcgaacatgggaaccgcggcgtcgccctgctgctcctcgcggcggtgctgctcctccaggcgctcctccccgcgtcgtcggagggcctggtgcgggtcgcgctgaagaagctgcccgtcgaccagaacggccgcgtcgccgcgcgcctctccgccgaggagaggcagcgcctcctcctccgcggctccaacgctctgggctcaggcggcgacgacgactccgacgtcatcgcgctcaagaactacatgaacgcgcagtactttggggagatcggcgtcggctcgccgcagcagaagttcaccgtcatcttcgacaccggcagttccaa

SEQ ID NO: 11771 - DNA, 340 bp, Zea mays
caaggccacacacacacacacaccactaggctaggttagccttttaatcgtcgtcgagaagcaagaagggcgcgcacgcaagcaggcaagcaagaagagagccgatcgaccgagagctagcacgcgatggcgaggtcttccaagatgatggtagcggcagctctgctggccttggccctggccgtgtcgaccgccgaggcgaggaacatcaagaccacgacgacggagaagaaggacgacgcggtggtgcagccgcagaccttcccgcccttcgaccgcctcggcggcggcgcgtccccggcgttcggcggcctccccggcggcagcattcctggcagca

SEQ ID NO: 11772 - DNA, 335 bp, Zea mays
gccggccggtcggcctcccaaaccctagcgagccgagcgagagagaaactagacgccatgttcgggtacaggaaggcggacccggacctcgaggccggcgggtcctcgctgctgtacccggggatgacggagagtcccgaactgcggtgggcgttcgtccgcaagatctacgtcatcctcacggtccagctcgccatgacggcagccgtctcggccttcgtcgtcaaggtgcccgccgtctccaattttttcgtctcctccaacgccgggatcgcgctctacatcttcctcatcgtcctgcccttcatcgtgctgtgccctctgcactactacca

SEQ ID NO: 11773 - DNA, 339 bp, Zea mays
ggcaaacgcggctgcgagcgcggcgcccctctcccactccccagcagccgccagcccgcacacccctccctcgcgcgctcagggtttcggaatggaagccgaggcggcggccaagaggacgcgggacagcggggaggacgccgccgcggcaggggatctccgccgtcatcccgggatggttctccgagatcagccccatgtggcccggtgaggcgcactctttgaaggtggacaaggtgctgttccaagggaagtcagactaccaaagcgttatggtctttcagtcctctacgtacgggaaggtgctcgtccacgatggagttattcaggtgacggaga

SEQ ID NO: 11774 - DNA, 395 bp, Zea mays
actctaatagccatatagaactggtagctgcagtacggtcggaattccggtcaccacgcgtccgggacctggtgttgttggagatgtcttcagagaaccaacctcaccgaagctgctctgtgtcatgattggcgatggggttcagattttggatatggcaattgttaccattttctttgccgcatttggcttcatgtctcctgcatcgagaggaatgttgttgacagggatgatagtcttttatatgttacttggaattgtgtctgggtatgctgctgtcaggctctggaggactttaaaaggaacgtccgagggatggaggtctgtctcctggtcaactgcttgtttcttccctggcattgtcttcattgtcctcactgtgttaaacttcatgc

SEQ ID NO: 11775 - DNA, 291 bp, Zea mays
tggaggtgccggccgtgcctgtgccggccaaggacccggggaaggagcagctgctggtgatcgagggcatcgagtacgacccccaggcgaacaataagttcgacgtcgccatcaacgtgcccgcggacaaagcgttgcaggtaggcgcacagtacaaggagtacgccggaagcttcgccgtcgtgccgggctccggcgccgggaagacgcggaaagtgaagctctccctgtgcatcaccgaagtgctgttcgatatcgacgctgacggcgataaaaccgtcgacgtcgtta

SEQ ID NO: 11776 - DNA, 334 bp, Zea mays
gctcctgagaaatggagactagtgaaggctcatggaacagctgtgggtctcccatctgatgatgacatgggcaacagtgaagttggtcacaatgcacttggtgctggtcggattttcgcccaaggtgctaagcttgttgatcaagctcttgcctcaggaaagatttatgatggagatgggttcaactacatcaaagaatcttttgaaaatggtactcttcaccttattgggttgttgagtgatggtggtgtccactcccgccttgaccaactacagttacttctgaaaggtgtcagtgagagaggagcaaaaaaaattcgtgtgcacatcctta

SEQ ID NO: 11777 - DNA, 339 bp, Zea mays
cccacgcgtccggaccgctcctctccgcttccaagatgtcgaagcgaggacgtggaggttctgctggtaacaagttccggatgtcactgggtctaccagtggcagccactgtgaactgtgctgataacactggagccaagaacctttacatcatttctgtgaagggaatcaaggggcgccttaacaggcttccttctgcctgtgttggtgacatggttatggcaactgtgaagaagggaaagcctgaccttaggaaacaggtgatgccagctgtcattgtgaggcagcgcaagccatggcgccgaaaggatggtgtctacatgtactttgaagacaatg

SEQ ID NO: 11778 - DNA, 344 bp, Zea mays
attttacaaggcacaaggatattctgttggaaaatctctcgtggaagaggataaacttgagctcgcaacttctcttattgagaaggcgaaggcaaagggggtttctcttttgcttcccactgatattgtagtagcggacaagtttgcagctgatgctgagagcaagattgtccctgccactgctatccctgatgactggatgggtcttgatgttggccctgatgccaccaaaacattcaacgaagcattggacaccaccaagactgttatttggaacggccccatgggagtgtttgagttcgagaagtttgcagctggcactgaggcgattgccaagaagctag

SEQ ID NO: 11779 - DNA, 319 bp, Zea mays
acattactgagggacagatatacattgataggcagctccataacagacagatttatccacctattaatgtcctgccatctctttcacgattgatgaagagtgctattggtgagggcatgacacgtcgagaccattcggatgtatctaatcagctttatgccaactatgctattggaaaggatgttcaggccatgaaggctgtcgttggagaggaggcactctcgtctgaggatctgctttacttagagttccttgacaagtttgagaggaagtttgtgacacaaggagcatatgacacacggaacatcttccagtcact

SEQ ID NO: 11780 - DNA, 302 bp, Zea mays
gaggatgcacagggaacctatgtagaaggaataaaagaagaagtagttctgtcaccaggacacgctctttcatttattgcagccggtgaagaacatcggcatgttggctctaacaacttcaacttatttagcagccgaagtcatactattttcacattgatgattgaaagcagcgcccgtggtgatgagtatgatggggccatgtattcacagcttaatttgattgatctagctggttctgagagctccaagacagagactacagggttaagaagaagggaaaggtcatacattaataagag

SEQ ID NO: 11781 - DNA, 302 bp, Zea mays
cccaacaccacctcgcctgcgatcttcgtagcctccgtcgcgtcgagcatcgatcatgtcggcctactgcggaaagtacaaggatgagctcatcaagaatgctgcctacattggcacccccggcaagggtatccttgctgctgatgagtccactggcaccattggcaagcgcctttccagcatcaatgtcgagaacgttgaggagaaccgccgtgccctccgtgagctcctattctgctgccctggtgctctccagtacatcagcggtgtgatcctcttcgaggagaccctgtaccagaaga

SEQ ID NO: 11782 - DNA, 313 bp, Zea mays
ctccccagcaatccctagcagaagccttccatcctcactcgctcgatggcccgcacgaagcagacggcgaggaagtccaccggcggcaaggcgccgaggaagcagctggcgactaaggcggcccgcaagtctgcccctgcgaccggcggagtgaagaagccccaccgcttccgccccggcaccgtcgcgctccgggagatccgcaagtaccagaagagcacggagctgctgatccgcaagctgccgttccagcgcctggtgcgggagatcgcgcaggacttcaagaccgacctacgcttccagagctctgctg

SEQ ID NO: 11783 - DNA, 295 bp, Zea mays
cccacgcgtccgtgcgctgcttccacggaggcgcaggaggagaaggggaggttcctgttcgcagactcattccgcagaagagtattctttaactatgagaagaggatacggcttctcagccctcctgagaagatatgtgagtacttcgcttctgtgaggaacccagaaggggaagtttacatgttgcctggggacttgatgagagcagtagtccctgtttttcctccatcagagtccaccatagttcgtgaaggaagattaacaagggagcggaccctggagagttgcattgtgc

SEQ ID NO: 11784 - DNA, 308 bp, Zea mays
gggtgatggtcattgagccttcaataatgcacgttccagttactgatggagcacatcaacgagataacatcttacaacggtggtgaccaagggtacctgaatgagatattcacatggtggcaccggattccaaagcacatgaatttcctgaagcatttctgggagggtgatgaggacgaagtgaaggcgaagaagactcggctgttcggcgccaacccaccgatcctctacgttctccactacttggggcggaagcatggctgtgcttcgggactacgattgcaactggacgtcgagatcttgcggga

SEQ ID NO: 11785 - DNA, 304 bp, Zea mays
gagtgatggtcattgagtcttcaataagcacgttccagttactgatggagcagatcaacgagataacatcttacaacggaggtgaccaatggtacctgaatgagatattcacatggtggcaccggaatccaaagcacatgaatttcctgaagcatttctgggagggtgatgaggacgaagtgaaggcgaagaagactcggctgttcggcgccaacccaccgatcctctacgttctccactacttggggcggaagcatggctgtgcttccgggactacgattgcaactggaacgtcgagatcttg

SEQ ID NO: 11786 - DNA, 305 bp, Zea mays
tctcctcgcatttccttgcaaccgattgccttcccccctcccaacccaagaccgatggcgcccaaggccgagaagaagcccgcggcgaagaagccggcggaggaggagcccgcggcggagaagacgaccgccgggaagaagcccaaggcggagaagcggatccccgctggcaagtccgccggcaaggagggcggcgagggcaagcgtggcaagaagaagggcaagaagagcgtggagacgtacaagatctacatcttcaaggtgctgaagcaggtgcacccggacatcggcatctcctccaaggc

SEQ ID NO: 11787 - DNA, 302 bp, Zea mays
caagagactcgtagagctgaggcacttaagatggaaattattccaaaccccaaggaagttgatggtgtgaaagtccttcaactcgaaaccgcagctggtgcagctattcggttcttcgacaaagcgattggaattaatgttccccgctcaaggtttctcccagtgaaggctacatctgatctgttgcttgtgcagtctgatctttacaccttggttgatggctttgtcatccgcaacccatccagagcgaatccagctaacccttcaattgagcttggacctgagttcaagaaggttgccaa

SEQ ID NO: 11788 - DNA, 303 bp, Zea mays
caccttacggaaagcggacggggttcgtgccgcgacggccggaggacttcggggatggcggcgcctttccggagatccacgtcgcgcagtatccgctcggcatgggacgccgtgatgataagggcggatccaagatccttgcgctcaccgtcgacgcacacggcagcgtcgccttcgacgccgtcgtcaagcagggggagaacgcaggcaagatcgtctactctaagcatagcgacctcgtgccgaagatagccactgccgattcccaggcgacgtcggacgacgacgaggagcagaagcaga

SEQ ID NO: 11789 - DNA, 305 bp, Zea mays
tgcttgagtagcgacgcgtagagcaatggcgtcgctgtcgtgcgcctccacgctgccctggacccccgcctcctacccgcggccctcggcggggcgctgcctcacggcctctcgccgggctccgtcgctggtcatcgtcgcccaggggaaggtcaagaagtaccgccaggtcatattgacagacgacatagaagaggtggggaagaaaggggatacactgaaggtgcgagctggattctaccgcaacttcctccttcccaagggcaaggctacacttctgaccccagaagtcctcaaggaaatgc

SEQ ID NO: 11790 - DNA, 307 bp, Zea mays
atcactcatccacagctcgcagccgtattcctgtctcgtatcctctctcgccgctccgatggcccgcacgaagcaaacagcaaggaagtcgaccggcggcaaggccccccggaagcagctggccactaaggctgcgcgcaagtcggccccggccaccggcggcgtgaagaagccccaccgcttccgccccggcaccgtcgcgctccgcgagatccgcaagtaccagaagagcactgagctgctcatccgcaatctccccttccagcgcctcgtccgcgagatcgcgcaggacttcaagactgatctg

SEQ ID NO: 11791 - DNA, 306 bp, Zea mays
tgatgtaaaaccacttatcatcaatcagcctgagggtccaagttttcgaattaatggctattttgtggaatggcagaagtggaacttccgtattggcttcacccccaaagagggtttggttatctattctgttgcttatgttgatggtagccgtggacgtagacctatagcacataggctgagctttgttgagatggttgttccttatggagatccaagtgaaccacattatcgcaagaatgcatttgatgctggagaagatggacttggaaaaaatgctcattctcttaagaagggatgcgattg

SEQ ID NO: 11792 - DNA, 303 bp, Zea mays
cctgaagaaggttggatacaacctgataagatccacttcgttccaatctctggttttgaaggtgacaacatgattgagaggtccaccaaccttgactggtacaagggcccaaccctacttgaggctctggacttgatcaatgagccaaagaggccttcagacaagcccctgcgtctcccccttcaggatgtgtacaagattggtggtattggaactgtccctgttggacgtgttgagactggtgtcattaagcctggtatggttgttacttttgggcctactggtcttactactgaggttaag

SEQ ID NO: 11793 - DNA, 300 bp, Zea mays
cccacgcgtccgcccacgcgtccgccacgcgtccgcccacgcgtccgagcaaagcaaagcttgagaggcttttctcaaaaacgcgccgtcgccgtttctaccccctttttctttgagaaaattcgtccgcgagatctttagtttcagaccccgtgtggattagtcgctgtcacgatcgaagcggggcgccaattgcggtggccaccacctccaatccactccccgcggtggcctcgccgagctgttcttgctccgtcctccctccaactccaagatttgtttcgcacccgattcctgagc

SEQ ID NO: 11794 - DNA, 304 bp, Zea mays
tcccacgcgtccgctcacgcgtccgcggacgcgtggggaacgacaagtctgtcaaggaccttgtcatgcttctgttcgagacggcgctgctcacctcgggcttcagccttgacgaccccaacactttcggcagccgcatccaccgcatgctcaagctgggcctcagcatcgacgaggacgaggctccggaggccgacaccgacatgcctcctctggaggatgacgctggcgagagcaagatggaggaggtggactagtctggctatcgtgtcttaatttgtgtgtgtgcgtgtgttttttttta

SEQ ID NO: 11795 - DNA, 298 bp, Zea mays
aagaagggagcgaatgaagcgacgaagaccctgaataggggcatatcggagtttgtagtgatggcggcggacacagagcctctcgagatcctgctccacctccccttgttagctgaggataagaacgtgccatatgtgtttgttccatcgaagcaagctcttggccgtgcttgtggtgtgacaagaccggttattgcttgctcagtgaccagtaatgagggtagccagctgaaactacagatacagggtctcaaggactccattgagaagcttctcatctgatctgccgaagaccttt

SEQ ID NO: 11796 - DNA, 301 bp, Zea mays
gcttggcaggattcggcaccccaacatcgtgtccctgctgggcttttgtgttcacgaggggaatcactacattgtttatgagctcatggagaagggatccctggacacacagctgcatggggcctcacatggatcagcgctgacctggcatatccggatgaagatcgcactcgacatggccaggggattagaatacctccatgagcactgcagtccaccagtgatccatagggatctgaagtcatctaacatacttttagattctgacttcaatgctaagatttcagattttggtcttgca

SEQ ID NO: 11797 - DNA, 301 bp, Zea mays
cccacgcgtccggcctgcctgcctgcaaaaaggagtttgtcatggcgtctaagcgcatcctcaaggagctgaaggacctgcagaaggacccccccacatcatgcagtgcaggtcctgctggtgaggacatgtttcattggcaagcaacaattatgggaccacctgacagtccctatgctggtggtgtttttttagtgaacattcatttcccgccagattaccccttcaaacctccaaaggtttctttcaagacaaaggtcttccatcctaatatcaacagcaatggaagtatatgccttga

SEQ ID NO: 11798 - DNA, 316 bp, Zea mays
gagatatcgagaagcatggaaaaagatttgtgacattagcaggagtgaatttgacttggtctacaaacgcctaaatgtggtgcttgaagaaaagggggagagtttctataatccttatattcctcaagtgttggaggaattgagtagcaaaggcttgatcaaggagagtgagggtgccagagttatatttattcaaggtcatcagatccccttgatagtggttaagagtgatggtggcttcaactatgcctcgactgacttggctgccctttggtatcggctcaatgttgagcaggcagagtggatcatatacgtg

SEQ ID NO: 11799 - DNA, 302 bp, Zea mays
gccatcagcagctagcgcgctcctcgagcccagcagagaaaggccggcctacccactctctctctctctctctccagtctccaccggcagcgctaatcgtaatagccatgggctccaccgccggcgacgtggccgcggtggtggacgaggaggcgtgcatgtacgcgatgcagctggcgtcgtcgtccatcctgcccatgacgctgaagaacgccatcgagctgggcctgctggaggtgctgcagaaggatgccggctgcggcaaggcggcgctggcgctcgatgaggtggtggcgcggatg

SEQ ID NO: 11800 - DNA, 313 bp, Zea mays
ggcagggcacgctggggccgcgacgcgctccagctctgggacaagatgagggagctaaagctacccgccgatagcatcctctgcaacacgctgctgagcatgtgcgcggacgtggggctcgtggccgaggccgagcagctcttcaacgagatgaaggatccggagtgccgcgacgtcccaaagccggacaagtggagctacacggccatgatcaatatctacgggagcaacggggacacagacagtgcgctccagctgttcgcggaaatgctgaagggcgggatagagcccaacataatgagctacaccattg

SEQ ID NO: 11801 - DNA, 312 bp, Zea mays
ccgctcgccaactacacgttcggcaccaaggagcccaagatggagaaggacacctccgtcgccgaccgcctcgcccgtatgaaggtcaactacatgaaagaaggaatgcgtacaagtgttgaagcaatcctattggtgcaagagcacaaccatcctcacatactgctcctgcaaatcggtaatacattctgcaaacttcctggtggacggttgaagcctggagaaaatgaaatcgagggtttgaaaagaaagttatgcagcaaacttgctgtgaactcgccttcctttccacctaactggcaggttggagag

SEQ ID NO: 11802 - DNA, 307 bp, Zea mays
atcacatacagtataccatatgcaatggctgctagtcgtgttgaaaatctcggtcttggccaaggcctagcaatgggtattctcaatttagctattgtcataccacaggttattgtgtcacttggcagtggcccatgggatcagctgtttggcggtggaaatgcacccgcttttgcggtggcagccggtgcatctttcatcggtgggctggtggctattctggggcttcctcgggcacgcattgcatcctcgtcctccaggaggagaggcgggacacaccgataagtctgctcatttaccattacag

SEQ ID NO: 11803 - DNA, 306 bp, Zea mays
caagatggtacagagctccagagctctgtggatccttcttttcaaagtatacaccggccattgacatttggagcattggatgcatctttgctgaggtgttaacagggaaacctttgtttcctggtaaaaatgttgtccatcagttagacttaatgactgaccttctaggcacgccatcgatggatacgatttctcgggtccggaatgagaaagcaaggaggtatctaagtagcatgagaaagaaagagacaatttcgttctcacaaaagtttccgaatgcagatcctttagccttggatcttttgc

SEQ ID NO: 11804 - DNA, 305 bp, Zea mays
cccacgcgtccgcccacgcgtccgcccacgcgtccgcccacgcgtccgcggaggtcaagcccgccctgaccaacatggtctccgctgctaagctcattcgcacccagctcgacagcgccaagtgagcacctttttttgcctttttcgtttccgaggagggcgtcgtcgatgccaatttgtttccaataaacagggctccccccctgtgcccgccgttctgttgtgctccgtctgtggttaggttactagttttcttgatctcgcccccacgcggtacctgttttactatctgtttggtggtttct

SEQ ID NO: 11805 - DNA, 308 bp, Zea mays
cacagagctgcagcagcatcagctgccacctcctgcctctcctccttccttcctgcctgcataggttgttgctacacgtatatattctgaagaagagatcgagatgaccagcgtgtggaagaccaaggttctgcctggcctcaacaagatctttgacaaggatggcaagaaggctgcagctgcaggcttcttgaagtccttcaacaaggaggagattgacaaggagattgaggacaagaagacagagctggagcccaaggtcgtggaggcctacgaagcatctcctcctgaggtcaaggctctgttca

SEQ ID NO: 11806 - DNA, 306 bp, Zea mays
agactacctccataggcaaggacatattcatcgtgatgtgaaggcaggtaatatccttattgataatcctggtgtagtcaagctcggggactttggtgtctctgcttgcatgtttgatagaggcgatagacaaagggctaggaatacatttgttggaacaccatgctggatggcaccagaagttctccagcctggaactggatataatttcaaagctgatatatggtcgtttggaataactgcactagagctggcacatggacatgctcccttttcgaagtaccctcccatgaaggttcttctcat

SEQ ID NO: 11807 - DNA, 304 bp, Zea mays
ggccaacttttcccccatcaacttaagcttttcagttgtctctagtccgagtcttggcattaggtacttcacttaactttgagaataatcgtcttcgccgttttttctgtattttgcatcaggtacttttcctaacagaaggagggacatcgaaacaccacgatccaaggaggaactcgtttgacgacgccgtccgggtatgcctagagtacgatctgcacgggatcgtgtcagaagcgagaggcgttctcaagaacccatccgcggtcgccagagcacaagaatctaacctcgcgcttctcac

SEQ ID NO: 11808 - DNA, 303 bp, Zea mays
cccacgcgtccggagagacgggaggaagcggattccatccacaccgtcgtgcaccacttttccccgcacccaccacgcggcgccgcccgagcacgaccatggcgtcgccgtccatccccgccgctctccgccacccgcacctccccgccgatggaggacttcttttccactcgtccggcgacccaaccgcgcgctcctcgctctcgttcaggataggagacatgacaatgagaaggtgtcagacaggtcctggtcctgttttggctgcaaggagtcctggtttgggcaacgttgacaatctcc

SEQ ID NO: 11809 - DNA, 298 bp, Zea mays
gagcaaggccacacacacacacacaccactaggctaggttagccttttaatcgtcgtcgagaagcaagaagggcgcgcacgcaagcaggcaagcaagaagagagccgatcgacccgaggctagcacgcgatggcgaggtcttccaagatgatggtggcggcagtctgctggccttggccctggccgtgtcgaccgccgaggcgaggaacatcaagaccacgacgacggagaagaaggacgacgcggtggtgcagccgcagaccttcgcgcccttcgaccgcgtcggcggcggcgcgtc

SEQ ID NO: 11810 - DNA, 281 bp, Zea mays
ggataagctgtgcaataggtttgctggagtaaacgatgtcagacagtgggagtatatttcttattgcctttctcagctaaccttcactgaaaagggcctgaaaaaactcattgataattttaagatgtttgaacatgcattgtctgaagattctgtgatgaaccacttcagaagcgtaatatcaaagtgcaagaagtttgcgaaacctgagctaaaaatttgcattgaggaatttgaggagaaacttagcaaggttcatcaggaaaagaaagaacaggagg

SEQ ID NO: 11811 - DNA, 296 bp, Zea mays
atatctccccgcgtccgctagccctagccgccgtccgccgacttcatcgtcgccgtcgtctagacctcttcacgcactggaaagcttaaagtccgacatcaatggcgaacatcatcctgatctcatcatgtgccggaagcagcctggcatcgcgattggccgcctttgcgagaaatgtgatggcaagtgtgttgtctgcgactcgtacgtgcgcccatgtacgcttgtccgggtctgcgacgagtgcaattatggttccttccagggaaggtgtgtgatctgtggaggagtcggca

SEQ ID NO: 11812 - DNA, 296 bp, Zea mays
cttggttcagaggtcactgttgttgaatttgccccggatatagtaccatcaatggatggcgaggtcaggaagcagttccaacgcatgctagaaaaacagaaattcaagttcatgctcaagacaaaggttgttgggtgtgataccagtggagatggcgtaaagctgacactggagcctgcagctggtggtgagcagaccatccttgaagcagatgttgttcttgtctctgctggcagaagcccatttacttctgggattgggcttgaaactcttggtgttgagacagacaaggctgg

SEQ ID NO: 11813 - DNA, 297 bp, Zea mays
ccgacttctcgcaggagctccgctgcttccagaccgtcacctgccatcaggcggtggtgaacaatctggatgacgcgcacgagcagatcgacacggccattgccacggcactgagggagagcaagcccgtgtacctcagcatcagctgcaacctccctgggctgcctcatcctaccttcagccgcgacccagtgcccttcttcctcacccccaggacgagcaacaagatggggctagaggctgcagtggaggcaactgtcgaattcctgaacaaggcggtgaagccagtccttgtcg

SEQ ID NO: 11814 - DNA, 296 bp, Zea mays
cggattgccgcgtgctaataagaggtcgtggcagcatcaaagatccagcacgggaggaaatgatgcgagggaagccaggatatgagcatctgaatgaacctctccatatattggttgaggcagagctacctgttgacatcattgatgctcggctgatgcaagcccgcgagatccttcaagatctgctaaagcctgtggatgaatcccaggacttcttcaagaagcagcagctccgggagctcgcgatgcttaatggcaccctgcgtgaggaagggatgcagaggttcggttcagcg

SEQ ID NO: 11815 - DNA, 293 bp, Zea mays
gagcacatggctgctatgggagtcttcttccttttgcaggttttcttcttcttggactgggtaaaatacctgctaaacgatgccagactgttcaagtcattccttcgaattacccttacatgtgtgattactgttggcaccctggctcttggtattggtactgcatctggttacatctctccttggacaggacgattttactccctgctagatcctacctatgcaaaggaccatataccaatcatcgcatctgtttctgagcatcaaccaacagcatggtcatctttcatgtt

SEQ ID NO: 11816 - DNA, 294 bp, Zea mays
ctagggtttttgattttagccgccgccgctgctcatctcacatccctcgagaagacgcctgctcctcgccgatcgatacgatggccgtcttctccgacctccacaccgccgacggcctcaagtccctcgaggctcacctcgccggcaaaacctatgtgtctggtgactccattactaaggatgacattaaggtcttcgccgcggtgccgtcgaagcctggcgctgagtttcctaatgccgcccgctggtacgagaccgtctctgcggctgtagcctcaagattccctggtaagg

SEQ ID NO: 11817 - DNA, 293 bp, Zea mays
gtgaaaaggaatctacatttgctgctggtagaagcaggcgtgttgaagtggagcgtacattgactgactcacagcgtgatgaatttgaggacatgctgcgagctttgacattagagaagaaccagataaaagacgccatgggatttgccttggataatgctgatgcagctggcgagattgttgaggttcttacagaatccttgacactcaaggagacgtctattccaacaaaggttgctcggcttatgctagtgtctgacatccttcataacagtagcgctcctgtgaagaac

SEQ ID NO: 11818 - DNA, 294 bp, Zea mays
agatgttctactcgcagttcatcttggccaagaagggccccctcgggaccatatggattgccgcacacttggagcggaactgcggaagaaccaggtcgcggacacggacatcggcgtctcgatagattccatcatattccctgacgttccaatcgcacttcggttatcaagtcatcttatgttaggcgtggtcagaatctattctcggaaggtcaactacctattccatgactgcagcgaactgttgctgaagataaaacaagctttcaggtccactgctgttgatctacctcc

SEQ ID NO: 11819 - DNA, 315 bp, Zea mays
tggggagtcctttcatgtgcttcccaagaagtgcgagatttgtacaaccttttggaacatgagtttctacctctggatcttgcatcaaaagtgcagccacttcttttgaagatttcaaagattggagggaagctttcatcagcttcttctgttcctgaggtcaagttatctcagtacatttcagcattggagaagctgacaacattgagagtgctacaacaggcctcttgtatttttaaatccataaagattgatatgctctcaagaatgattccattctttgacttctctgtcgtggagaagatttctgttgat

SEQ ID NO: 11820 - DNA, 261 bp, Zea mays
gtttgtcctaccaccaccgctcaccgcggtttggctttctcccctcttctgcaccacttctcgctccggattccggattccctctgctctttccctaacgaaggtagccatggcggggagaggtaaggcgatcggctcaggcgccgccaagaaggccacgtccaggagctccaaggctggcctccagttccccgtgggaaggatcgccaggtatctcaaggccggcaagtatgccgagagagtcggccgcgggggccctgt

SEQ ID NO: 11821 - DNA, 308 bp, Zea mays
cgtatcttgactaagagttttacctcagagttccctcatattgagaggtacttctggaccatggttaaccagccaaacttcaaaaaggtcattggtgacgtgaagcaggcagaagctgtgccacttgttgcaaagaagactgctccggccaaagagcagaagcctaaggaagccaaaaaggaggtcccgaagcctaaggaagctgagaaaccagcagaggaagaggaggctccaaagcctaagccaaagaatccccttgatttgcttcctccgagcaagttgattcttgacgattggaagaggctgta

SEQ ID NO: 11822 - DNA, 305 bp, Zea mays
ccgcgggagggctatgaagttaaggacaaaacggccagaatggaagtcccttatgcctctacaactgagcagattgagcaggaaatctgccatgcgtttctttttgttcccaaaagttcagtcagctggtcaaacgccagatgataccccagtttatcttaacgtgtatgatttgacaccaatgaatggctatatatattgggcaggcctgggcatatttcactcaggagttgaagttcatggtgttgaatatgcattcggagctcacgacttccccaccagtggggtctttgaggtagaacctc

SEQ ID NO: 11823 - DNA, 304 bp, Zea mays
aaatcacctcagggcctttccaatgaccactgccagtattttctttttcagttgctccgaggactcaaatatctccattcagcagaaatactccacagagacctaaaacctggaaacctgctggtgaatgcaaattgtgatctgaagatatgtgattttggtctcgcacgtacaaacagtagcaaaggccagttcatgactgaatacgtcgtcacccgctggtacagagctcctgagctgctcctctgctgcgacaactacggcacatccatagacgtctggtctgttgggtgcatctttgctg

SEQ ID NO: 11824 - DNA, 307 bp, Zea mays
cgcaccagtattcctgtctcgtatcctctctcgccgctccgatggcccgcacgaagcaaacagcaaggaagtcgaccggcggcaaggccccccggaagcagctggccactaaggctgcgcgcaagtcggccccggccaccggcggcgtgaagaagccccaccgcttccgccccggcaccgtcgcgctccgcgagatccgcaagtaccagaagagcactgagctgctcatccgcaatctccccttccagcgcctcgtccgcgagatcgcgcaggacttcaagactgatctgaggttccagtcctccgc

SEQ ID NO: 11825 - DNA, 304 bp, Zea mays
gcctgactatgcaacctgtgtgaagatctccactgatgcttccatcaaggagatgattcctcctggtgctctggtcatgctcactcccctcattgttggaaccctcttcggtgttgagactctctctggtgttcttgccggtgccctggtttctggagtgcagattgccatctctgcttccaacaccggtggtgcatgggacaatgctaagaagtacattgaggctggtgccagcgagcatgccaggaccctcggccccaagggatctgactgccacaaggctgctgtgataggtgacaccatt

SEQ ID NO: 11826 - DNA, 307 bp, Zea mays
cggacgcgtggggtcatccgcgccgccaccaagtccatcgagcgagaggtcaactcggtcaacgacaaccctgtcatcgacgtccaccgtggcaaggcgctgcaccgcggcaacttccagggcaccccgatcggcgtgtccatggacaacgcccgcctcgccgtcgccaacatcggcaagctcatgttcgcccagttctccgagctggtcaacgagttctacaacaacgggctgacctccaacctggcgggcagccgcaacccgagcctggactacgggttcaagggcaccgagatcgccatggcgt

SEQ ID NO: 11827 - DNA, 305 bp, Zea mays
cggacggtgggcggacgcgtgggcggacgcgtgggccgccgccgacaacagcgtagtgtagtgtagttccggagagggttggggagagtagtagtgatccggcatgtcgacggaagaggctgttgtggctgaggtcccggtgaccgaggtgccagcggaggtcccggcggcccaggtggccgaggcgcccaaggcgaagaaggcgcccaaggagaagaaggcgcctaaggagaagaagctttccgcggcgaagaagccggcggcgcaccctccctacgctgagatgattgtagaggcgatcgctg

SEQ ID NO: 11828 - DNA, 302 bp, Zea mays
cggacggtgggcttccagcttctgccatccaagattcaggttggagtcttctctgctaccatgccacctgaagcccttgagattacccgcaagttcatgaaacaaccagtgagaattcttgtgaagagagacgagctgacccttgagggtatcaagcagttctatgtgaatgtggacaaggaagactggaagctggacacactgagtgacctgtatgagaccctggccattacccagagtgtcatctttgtcaacacccgccgcaaagtggactggctcactgacaagatgaggagcaggga

SEQ ID NO: 11829 - DNA, 307 bp, Zea mays
gtttggtgaggaaatgaagaaaaacgctcaagctgcaggagttactgctcattactacgaggatgagactgctcctactggcacatgtgctgtatgtgttgttggtggtgaaaggtcattgattgcaaatctgtcagcggcaaactgttacaaatctgagcatctaaagagaccagagaactgggcactagttgaaaaggcaaaatacatctacattgctggatttttccttacagtgtcgcctgattctatccagctagttgctgagcatgctgcagcaaataacaaggtgttcctgatgaacctc

SEQ ID NO: 11830 - DNA, 315 bp, Zea mays
ctcacttcatataccactccctaggaggacccagcaacacacacagccgagctttgtttaggcaagatgaacaggaagccaggagactgggactgcagggcgtgccagcacctcaacttcagccgccgagacatatgccagcgctgcagcgagccacgtggagttgctgatcgtggcggcggaggaggaggaggcgactacgccagcttcggtggccgcggtggctcctccttcggcggcggctttggcgctgctggctccgacgtccgccctggtgactggtactgctcctgcggcgcgcacaacttcgccagc

SEQ ID NO: 11831 - DNA, 99 bp, Zea mays
gggtgccctccctcctcgagcgagatctgtctggtcacagatctatctgacaaaatggtgaagatctgctgcatcggtgctggctatgtccgtggccca

SEQ ID NO: 11832 - DNA, 301 bp, Zea mays
cggacggtgggcgctacgtgtacaagcgccgcactgatggtatctacattattaaccttggaaagacctgggacaagcttcagttggccgccagggtcatcgtcgccattgagaaccgcagacattatcgtgcagtctgctaggccctatggccagagggctgtcctcaagtttgcgcagtacactggtgcccatgccattgctggcaggcacactcctggtacattcaccaaccagttgcaaacctccttcagtgagccacgccttcttatcctgactgacccgaggactgatcatcagc

SEQ ID NO: 11833 - DNA, 298 bp, Zea mays
gtgtgtgctgtagcatgggctcctaacattggcagaccatatgagattatcgcagttgcaacctgcaaaggaattgcaatctggcatataggtttgaacgctgacgctgatggtggaccttcgatgcagaacgttgctttacttaatggccacgatggcgaggtgtggcaactggaatgggacatgggcggtatgacactcgcatcaaccggaggagatggcatggttaagctatggcaggctaatttggatggagtttggcatgagcaggctgttcttgactgcagtggatcacatg

SEQ ID NO: 11834 - DNA, 293 bp, Zea mays
  unsure (1)..(293): unsure at all n locations
ctcaaaccacgggatgctacattggtttgagtataagaccctacgatcccatatcatgagaagaccactcatgagatgggatcgaaggttcttatactcagaccacgggatgctacattggtcagtggtgctaacgncactggagtttatggtttcaaagggacttctaagtaccagctctctgtagctatcaaggatgttagtggccataggaatggtgaatataccagtgccacgggaagtgtcgactctgattctgtgctgtgtagaaactgtaagcgccatatagccag

SEQ ID NO: 11835 - DNA, 297 bp, Zea mays
atgggcttatcagcatgcagcatattatctcagtctgatgcctttaaaagcttcttggagaagtctacaaaattatctgaagaatgtagtcttagcaaagaaattgttgaaggaaagactgttgcctcggtacctgctactggatatgatacaggggcaattaatattaacatgaatgagttgctagtacaaagatctacttactcaatggcccctgttatgcctacaccaatgaagagtacctggagccctgctgatccttccgtggatccacttttttggagcaactttgttttg

SEQ ID NO: 11836 - DNA, 299 bp, Zea mays
gcgggatagagcaaggccacacacacacacacaccactagtaggctagcctagccttttagtcgtcgaggaggagcaagaagggcgcgcacgcaagcaggcaagcaagaagagagccgatcgaccgagagctagcacgcgatggcgaggtcttccaagatgatggtggcggcagctctgctggccttggccctggccgtgtcgaccgccgaggcgaggaacatcaagaccacgacgacggagaagaaggacgacgcggtggtgcagccgcagaccttcccgcccttcgaccgcctcggc

SEQ ID NO: 11837 - DNA, 301 bp, Zea mays
ctagactctagagtacatccgagggggaagcgagcagatcgatggcgatggctgagaaggtgaaggagaagatgctgatgctccgcagcagcgacaaccaggagttcgaggtgaaggagtcggtggcgatgcaatcgatgaccctcaagaaaatggtcgaggacggctgcgccgacaaaggcatcccgctccccaacgtcacctcccacatcctcgacaaggtcatcgagtattgcaacaagcacgccgagccgaccgggccgggcgacgcggccggcaccaccaacaggtccgccgagga

SEQ ID NO: 11838 - DNA, 300 bp, Zea mays
cttcaatcaccaattgcccttccaaaggctgttaagaaccccacagaactggatggattgaggaaggcgcatattcgagatggtgccgctgttgtacagtaccttgcttggctggataatcagatgcaggagaactatggagcttctggttatttcagtgagataaaagggtcgcataaaaatgaacatttagcaaccaaacttactgaggtgtctgtgagtgacaaacttgaaggcttccgtgcaacaaaagagaactttaaaggtttgagttttcctacaatttcatctgtgggacca

SEQ ID NO: 11839 - DNA, 302 bp, Zea mays
cccacgcgtccgcccatggtcacaaattgaaaaactgaagcaagatctgagtcatgagaagaatctaaattcagatcttcgtctgcacattcaaaagatgcaggaatccaactctgagctgcttttggctgtgaaagatcttgatgagtcgttggataaaaaaaacagagagatttccattttgcaagaggatacacaggaggcagaatatgagcatgcgctgtcaaatgtgcacaactccggacagaaattagccttatctgaaacgagttcataccaagagaaggaagatgagcttatgc

SEQ ID NO: 11840 - DNA, 276 bp, Zea mays
  unsure (1)..(276): unsure at all n locations
cccacgcgtccgcacagccaccgccgccatggcagcctccagccgccctctcgtctccgtgaaagccctggagggcgacatggtcacggacgcccccggcatcgccttgccgcccgtcttcggtgcgccgatccgcccggacgtggtccgcttcacccacaagctgctgtcctgcaacaagcgccagccttacgcagtctcccgccgcgctgggcaccagacgtcggccgagtcctgnggtacaggccgcgctgtgtcccgtatccccgggtcccg

SEQ ID NO: 11841 - DNA, 289 bp, Zea mays
gtctgctcgcatttcctcccaatccatcccgcctccaaacccgaactccaagtcgccccgcatcgatggcgcccaaggccgagaagaagcccgcggcgaagaagccggcggaggaggagcccgctgccgagaaggcgccggccgggaagaagcccaaggcggagaagcgtgtcccagcaggcaagtccgccggcaaggagggcggcgagggaaagatgggccggaagaagggcaagaagaacgtggagacctacaagatctacatcttcaaggtgctgaagcaagtgca

SEQ ID NO: 11842 - DNA, 296 bp, Zea mays
ctggtgatccttctaagctcagcatgaaggctgcatttgggaaggtttggcggttggaagaaactggaggtagtattattggtggaaccatcaagacaattcaggagaggagcaagaatccaaaaccaccgagggatgcccgccttccgaagccaaaagggcagacagttgcatctttcaggaagggtcttgccatgcttccaaatgccattacatccagcttgggtagtaaagtcaaactatcatggaaactcacgagcattacaaaatcagatgacaagggatatgttttggag

SEQ ID NO: 11843 - DNA, 292 bp, Zea mays
ctgagaagtactgggactgggaattggctaatgaaacgaagcccatatggatgaggaatccaaaggaagttgagaaaactgagtacaatgaattctacaagaagacatttaatgagtttctggatccgcttgcttacactcacttcaccactgagggagaggtggaatttcggagtgttctctatgtcccagggatggcgcctcttagtaatgaggagataatgaatccaaagaccaaaaacatccgattgtatgtcaaaagagtgttcatatcagatgattttgatggcga

SEQ ID NO: 11844 - DNA, 293 bp, Zea mays
cattaagcctggtatggttgttacttttgggcctactggtcttactactgaggttaagtccgttgagatgcaccatgaggctctccaggaggcccttcccggtgacaatgttggcttcaacgtgaagaatgttgctgtgaaggatctgaagcgtgggtatgtggcctccaactccaaggatgaccctgccaaggaggctgctagctttacctcccaggtcatcatcatgaaccaccctggccagattggcaatggctatgccccagttctggactgccacacctcacacattg

SEQ ID NO: 11845 - DNA, 295 bp, Zea mays
gggccacctcctcaccagtagcaactacaacgacaacgagaagaagaccaccggcgggaggaacggatacggcgccaaactcactaacctcttctccactgagttcgtcatcgagaccgccgatgggcgtcgccagaagaagtacaagcaggttttctatgagaacatggggaagaagtcagagccccagattaccaagtgcaagcagggcgagaactggaccagggtcactttcaagcctgatcttgccaagttcaacatgacccatctcgaagatgatgttgtacccctcatg

SEQ ID NO: 11846 - DNA, 290 bp, Zea mays
acagcagttggcgcgcaccaaaaccctaccctccctctgctctcagccgccaacgccatgggctccaccgccgctgcctccgtgctcccggtgtccgccggctccggcgagaacctcgtcctcatcctcgactacggctcgcagtacacgcacctcatcacccgccgcgtgcgccagctcggcgtcctctccctctgcgtgtccggcacggcgccgctcgcctccctggagggcctccgcccacgcgccgtcatcctctccggcgggccccactcagtccacgcccccgg

SEQ ID NO: 11847 - DNA, 296 bp, Zea mays
gccacgaacaaaagcgcatcgatctcgctgtcgtcactcctcgtcacccagccacgaacagaggcaccacccagcatggccctgcaggcggcgctcctcccatccaccctctcatccgtccccaagaagtgcagcctcgccgtcgcggcgaaggacacggcattccttagcgtatcccagaagaaggtgcaggcggcgtcgctgtcggtgagaacgcgggtggcgacgacggcgcctgtggccacgccggggtccagcacggcggccaaggatgggaagaagaccgtgcggcaggg

SEQ ID NO: 11848 - DNA, 291 bp, Zea mays
cccacgcgtccggaaagctgttgctgaatggactgcaaaggccatgacagggactgttccgtttgaggaggcgctggcagccaggctgtctttaatcaagccatctctctcccaggtggaggagtgcctggagaagaggccaccaaggatttctcctggaatggctgatttggttaataagctaaaatccaataatattgacgtgttccttgtgtcaggaggcttccgacaaatgatcaagccagtagcatttgagcttggtattcctcctgaaaacatcactgcaaacca

SEQ ID NO: 11849 - DNA, 295 bp, Zea mays
tgcgttaatcatgaaactggagtggttgacccgaagaagttcagcgttctgggtaactggcagcgtgattactcaatggaatacatcctaacccatctcaagaaagagatgacatcgccacagaaccgcaagctagttcagcctccggaagggacattcttctaaagatggcagcaactcatgtccatccatggtgactcggaaacagcttccgcacctggttcctatattttatatatttagtctgatctcccagttatctgtaaaccaccgagatcgagtgcaagcagacttg

SEQ ID NO: 11850 - DNA, 296 bp, Zea mays
tgatcttcaagacaaactccaccaaaatatctgccggaagaggacactcgttgctattggcacccatgatctggacactctgcaaggacccttctcatatgaggctctaccaccgaatgaaatcaattttgtcccattaaagcaggagaaaagcttcagagccgataaactgatggaattctataaatcagacatgaaactgaagaaattcttgcatataattgagaattctccagtgtacccagttatctatgatagcaacaggactgtattatcattacctcctatcattaatg

SEQ ID NO: 11851 - DNA, 299 bp, Zea mays
ccgcggtggggccgcgggcaggagacccccggcgaggacccgctgctcaccagcaagtacgccgtcggctacgtcaccgggctgcagggcgcagtgtccggcgccggcgccctcaaggtcgccgcatgctgcaagcactacaccgcctacgacgtcgacaactggaagggcgtcgagcgctacaccttcgacgccgtggtgtcgcagcaggacctggacgacacgttccagcccccgttcaagagctgcgtggtggacggcaacgtggacagcgtcatgtgctcctacaaccaggtcaa

SEQ ID NO: 11852 - DNA, 299 bp, Zea mays
gaggattcgattattctgttcgctctcgcccaagtcatcgtctggtcgtcgcccgcagaggcgcagacgcccaaaaccggaaggtgcgccatggccgcgtcggatctggagagcaaggccaaggaggccttcgtcgacgacgacttcgagctggccaccgagctctacagccaggccatcgacgccgggcccgccaccgccgacctctatgccgaccgcgcccaggcgcacatcaagctcggcaactacactgaggctgtggcggatgctaacaaagcaattgagcttgattctatgat

SEQ ID NO: 11853 - DNA, 296 bp, Zea mays
ccgaaatcaaggtagcgtacaccgctgcagtttctagagccctctctgccactcgtgatcccactagtcacaatgcctgcactcgccaagcccgcctcccgcaccgccaagcccgccgcggctccgaagccgaaacctgccgacgccaagccgaacgggccaccgctggtgcctcacacccgccttacttcgagatggtcaaggaggctatcacggcgctcaaggagaggaccggctccagctcgcaagcgatcgccaagtatgtgggggacaagcacggcgcgtctctgccggcc

SEQ ID NO: 11854 - DNA, 294 bp, Zea mays
cgacctggcgagtggcggacgtaaggcgaaggagtagcagcagcaggcggcgccgagtagcggctccccatctagagcttgccaccatggctagaggattgaagaagcatttgaagaggctcaatgcccccaagcattggatgctggacaagcttggcggagcttttgctcccaagccatcttctggacctcacaagtctagggagtgcctgccactgatcctcatcatcaggaacaggctcaagtatgctcttacataccgtgaggtcatttccatcctgatgcaacgccatg

SEQ ID NO: 11855 - DNA, 297 bp, Zea mays
gccgccgacaacagcgtagtgtagtgtagttccggagagggttggggagagtagtagtgatccgcaatgtcgacggaggaggctgttgtggctgaggtcccggtgaccgacgtgccagcggaggtcccggcggcccaggtggccgaggcgcccaaggcgaagaaggcgcccaaggagaagaaggcgcctaaggagaagaagccgtccgcgcgcgaagaagccggccgcgcaccctccctacgctgagatgattgtagaggcgatcgctgccctcacggagaggaacgggtcgagctc

SEQ ID NO: 11856 - DNA, 296 bp, Zea mays
ggccacagtcaaggagccggacacaccgaagcggagcacctgaggccgattggaacgctatgtttgcagagtacgagaagaagtatgcagatgatgcagcaaccttgaaaagtatcatcacgggggagttacccactggctgggttgatgctcttcctaaatacactccagagagcccaggagatgccaccaggaacctctcccagcagtgcctgaacgcgcttgctaatgttgtgcctggtcttattggaggcagtgctgatcttgcatcctccaacatgactctgctgaagatg

SEQ ID NO: 11857 - DNA, 300 bp, Zea mays
gtcatggggaaatcaaaggatctggtgaaggtacacccgaagcaaatatgttgttgatatagataagagcattgatatcacaaagatcacaccttcaacaagagtcgctcttcgtaatgatagctatatgctccatctgatcctaccaagcaaagttgatccattggtcaatctcatgaaagttgagaaggttcctgattctacatatgatatgattggaggccttgaccagcaaattaaagagatcaaagaggtcattgagcttccaatcaaacatccggaactatttgagagccttgg

SEQ ID NO: 11858 - DNA, 300 bp, Zea mays
gatccccgctcgggttgccatggcggaccagctcaccgacgaacagatcgccgagttcaaggaggccttcagcctcttcgacaaggacggcgacggctgcatcaccaccaaggaacttggcactgtgatgcgctcattggggcagaaccctactgaggctgagcttcaggacatgatcaatgaggttgatgctgatggcaatggaaccatcgactttcctgagtttctcaacctgatggcgcgcaagatgaaggacaccgactccgaggaggagctcaaggaggccttccgtgtgttcga

SEQ ID NO: 11859 - DNA, 300 bp, Zea mays
gaaggcatcagcgtgctgcaatgtgggcataccatccatttggagtgcatgaacgagatgagagcacaccatcacttctcatgcccagtgtgctcgaggtccgcctgctacatgtcggccacatggcggaagctcgacgaggaggtcgcggccacgccgatgcctgacatctaccagaagcacatggtgtggatcctgtgcaacgactgcagcgcgacctcgagcgtgcggttccacgtgctggggcacaagtgcccgcgtgcagctcgtacaacacccgggagacgaaggctgcgtgcc

SEQ ID NO: 11860 - DNA, 291 bp, Zea mays
aaaaacctagccatcccaggttgctccggccgcatccccgccgaccgccgacgatgcctcccaaggccaagaaggacgctgcgccgtctgagcgccccatccttggacgcttctcctcccacctcaagatcgggatcgttgggttgccaaatgttggcaaatcaacttttttcaacatagtaacgaagttggctatcccagctgagaattttcctttctgtaccatcgaaccaaatgaagcacgggtgaatgttccagatgaacggtttgattggctttgcaaactttaca

SEQ ID NO: 11861 - DNA, 290 bp, Zea mays
ggctaagaatgcagaagaggaagagctccccgttgaggagcgtaacctcttgtcggtcgcatacaagaatgtgattggggctcgccgtgcttcatggcgcattgtctcttctattgaacagaaggaggagtcccgtaagaacgaagagcatgtgaaccttatcaaggaataccgtgcgaagatcgaggctgaactgagcaatatctgtgatggcatcctgaagctgcttgactcccacctagtgccttcttctactgctgctgaatcaaaggtcttctacctcaagatga

SEQ ID NO: 11862 - DNA, 297 bp, Zea mays
aggaaaaggacattgatcccctgaccgataaagatgggaactcacatgtctgcaaagtttgtttcgaatctgcagccgctgcagtattgcttccttgccggcatttctgcttgtgcaagccttgctcgcttgcctgctcggagtgccctctgtgccgcacaagaatcgcagacaggataatcaccttcacgtgagctgcgttctagcttcaggtcattctgaagcacacatcctcttgtaaaatcttcaatggtatatgtttctctttttccttagcaaagaaggtgccttttatgt

SEQ ID NO: 11863 - DNA, 299 bp, Zea mays
tccacagcgacacccgaccccgccgtcgtgatgaggccggcgctgctcaagtccacggccgagctcctccgccgcagccgcggctacgcctcctcggccaacccggagcggaaggtggccatcctgggcgctgcgggcggcatcgggcagccgctctccctcctcatgaagctcaacccgctcgtctcctccctctccctctatgatatcgccgggacccccggcgtcgcggccgacgtctcccacatcaactcccccgccctggtgaaggggttcatgggggacgaccagctcgggga

SEQ ID NO: 11864 - DNA, 295 bp, Zea mays
ggcaattgctctagaccctaattatgcccggaactatagaagatttgctactggtggtttagcaggccaagtacttgtgctgacaaagaagtcttggggaggttaccacaacaaggttttgcgtgatggtgaaaggccaatccattcgatgaagtggagggcggatcttcttgcttgggctaatgatgcaggggtcaaagtgcatgatatgagaacagacaaagggatcgcattcatagagagaccaaaaggcattcctcgaccagagttcttgcttccccacctagtctggcag

SEQ ID NO: 11865 - DNA, 299 bp, Zea mays
gccggcctttgcccccacgacctcttccagctcacgaaaatggatcttggtccttgttctaagattcactcgcttcaactgcggaaagattatgaagaagcgaaacaaagggaacagagaattttgacagagaactcgaggatatgatagaaaggctcattgtggagtgcgacaggaaaattcagagggccctgaaacgacttgcggatgacgatgccaaggctgctattgcgatatccgtctcggaggttactctgacggatgacatactgcagctgtcgaaacagattcaggaaaaa

SEQ ID NO: 11866 - DNA, 302 bp, Zea mays
  unsure (1)..(302): unsure at all n locations
cccacgcgtccgcaaaggagaaaatttcgtagcaataaataaataaataaaattaataaaagaaaggtggcgtagaggataggaggagaaccaaggttgcgtctcgaaggttcttgcctcgttgggaagggatggcgtcggaggtggaggacgaggcggcgacgcgnatgctcgccaacggtgcagccgacgtccgccggatgagggaccaggcgaaggcaattctgtccacgcaggccgtcaggatcgccaccaaggccgagcagcatgagcgcttcatctttaaggtcacacacttgctg

SEQ ID NO: 11867 - DNA, 284 bp, Zea mays
ctgctttgtactacaagaacaaggagatggaagatacctttaacatagtgcctacgagtgctgtaagtggtgaaggtattcctgatttgcttctgttactggttcaatggactcagaagacaatggaagaaaaactcacttttgttgatgaagtccagtgtactgtactggaagtcaaggttgttgaaggccatggtactacaattgatgttgttttggtcaatggtatactccatgaaggagatcaaatagttgtttgtggcatgcagggacccattgtaaca

SEQ ID NO: 11868 - DNA, 284 bp, Zea mays
gcgcaagacagcggcgaaggcaaagccggcggcgagctccggcagcccgtggtacggccccgaacgcgtgctctacctgggcccgctgtccggcgcgcccccgagctacctgacggtcgagttcccgggcgactacggctgggacaccgcggggctgtcggcggacccggagacgttcgccaagaaccgggagctggaggtcatccactcccgctgggccatgctgggcgcgttgggctgcgtgttcccggagctgctcgcccgcaacggcgtcaagttcggcg

SEQ ID NO: 11869 - DNA, 291 bp, Zea mays
gcagggtcgtgctgggccttctcgacggtggcggtggtcgaaggcatctaccagatccggacggggaagctggtgtccctgtcggagcaggagctggtggactgcgacacgctggacgacggctgcgacggcggcatcagctaccgcgcgctgcggtggatcgcctccaacggcggcatcaccacggaggccgactacccgtacacgggcaccacggacgcctgcaacagggccaagctctcccacaacgcggtcagcatcgccgggctccggcgcgtggccacccggcga

SEQ ID NO: 11870 - DNA, 293 bp, Zea mays
atccgaattcccaggcaggcaggtcggcgaggagggcaggaagaccgaagaccgagccgtgcgggggctcgggacgggaacgggacaggaccccaaaatctcagatccttcctgcccgcccgcccgtgcccgtcgacgcgtcgttcttgccggccgcgcctcacctccgccctctcctcctccagggggatcggatacgccacaggctgcgcgatggtgctgtgggtcttcggctacggctccctcatctggaaccccggcttcgacttcgacgacaaaatcctcggcttcat

SEQ ID NO: 11871 - DNA, 292 bp, Zea mays
cccacgcgtccgccggcagccgcaaacgccttcgccgtcgcgtcccgctcctccgcccgcccgacgcgacccctaggacctggagacagaggtcggcatggctgccgcagtggtcgacgacgctggtatggacgccgtccagaagcgcctcatgttcgaagacgaatgcattttggtggacgagcaggacaatgttgttggccatgagtcaaagtacaactgccatttgatggaaaagattgattctgagaatctgctacatagggcattcagtgtgttccttttcaactca

SEQ ID NO: 11872 - DNA, 265 bp, Zea mays
gaactgcagcataaaatatagcaacaatcagtcaagctacctcgcctcatggtaatataacatcttgaacaaccataatacaaaatgaaatgcagttctgtcacgacaacatcgcattcataagcaataccacccatctagtacctagcaagcatcaccacacgaacctcaaactgacgagtactaacagcgatacaaggaatatcatatctgtaccaagcactgcggagaatgacttaggtctcttcctcttcttcctcctcct

SEQ ID NO: 11873 - DNA, 299 bp, Zea mays
ggacgatctggatgacgaccgcttcctcgagaagtacaggaagatgaggctcgcagactagagggaagccgcaaaagccccgcgatttggtactatacttcccatcactggctccgacttcgtgcgggaggtatcgcaggcacaatcagatgtttgggttgtggtcttcctctacaaggatgggatacctgaatgtggattgcttcagaattgtttggaagaattggctactaggtatccagcgacgaagtttgttaaaattatctccacagactgcatccccaactacccagatagga

SEQ ID NO: 11874 - DNA, 308 bp, Zea mays
cacctcgccttcccttccccaccagcccccgtctctctctctctctctctgtctctctctcgtagccgcgtccatctcgcagcagcaagcaagcgcgaccaaatggcgcctctaggagacggcggactgctgccgcggcggcgtccaacaacctggtggtgtcgttcggcgagatgctgatcgacttcgtccccgacgtggccgggctgtcgctggccgagtcgggcggcttcgtcaaggcacccggcggcgcgcccgccaacgtcgcctgcgccatcgccaagctcggcggaatctccgccttcgta

SEQ ID NO: 11875 - DNA, 311 bp, Zea mays
gtggtggggacccgtcccctcctgtcttcagatctcctgtagatgggcttgaggacatcatggataatcaagtgatatgctcaatctacaagcttccagatccacacaagcacatcgctcgtccaccagctggtgttatcatacccaagaagagtgtagaagccggtgatctgaaaccaccaccagtgctgtggcatgaagacagcggtaggaggcctcatgataacaaccaccggaggccttatgataacagcaacaggcaaaacccatcaggagctctatctggccgccaactcggggaagctgcccat

SEQ ID NO: 11876 - DNA, 312 bp, Zea mays
cctcaattgacaagaagattgggctgactgataagatcacgacaggcacttccttggttagcgggaaggtgaaggagatggaccagaagttccaggtctccgacaagaccaagtccgcactcgctgccgccgagcagaaggtgagcagtgccgggtctgccatcatgaagaacaggtatgtcttcaccggcgcgtcatgggtcaccagcgcgttcaacaaggtcgccaagaccgccacggacgtcgggacgatgaccaaggagaagatggccgccgaggagcatcacaagggctccggcccgtcttctggcg

SEQ ID NO: 11877 - DNA, 310 bp, Zea mays
  unsure (1)..(310): unsure at all n locations
ctcgtttagaacctctaaaatttcccccactcgccagtcgcagcagcacctgtagcagccatggacgccagcggagcggtagcatggggaagaagggggcggccgggcgcaaggcaggcggccccaggaagaagtcggtgacgcggtccgtcaaggccgggctgcagttccccgtcggccggatcgggcgctacctcaagaagggccggtacgcgcacgcgntaggcactggcgcccccgtctacctcgccgccgtcctggagtacctcgccgccgaggttctggagttggcagggaacgcggcgaaaga

SEQ ID NO: 11878 - DNA, 307 bp, Zea mays
gaaggttatgagcgtcccaacgagggtgctgttgttgaagtcaaaattatcggaaagcttcaggatggcgcggtgtttacaaagaaggggcatgacgaagagccatttaaattcaagaccgatgaagaggaagttattgccggtcttgatcgtgctgtgttgaacatgaagaagggcgaggttgctcttgtcacaattcctcctgaatatgcatttggttcaactgagtcaaagcaggatcttgctgttgttccacctaacagcacagtaatatatgaagttgagcttatttcatttgtgaaggaca

SEQ ID NO: 11879 - DNA, 306 bp, Zea mays
ccctcatcgcttcgcgctgtccaccgacgaatcttccccagctgagttaatcggggactggtcgtgtgcggagatgttggtgctcttcgagacccccgcggggttcgccctattcaaggtgctcgacgaggggaagctcgacaaggtcgaggatctatggaaggagttcacgacgtcggactcagcgagaaaggtggtcgagctgaaggctttcaacaagtttgagaacacatctgatgccctatccgcggcaaccctgattattgatagcaagcctagcaagggtctgcgcaagttcttgcagaa

SEQ ID NO: 11880 - DNA, 148 bp, Zea mays
ctgctgctgtgtgtgtttccaatggagaggaaccatagagtatatactcgaaatatcccagccattaaccatcagagaactattgagtagctggctaataagtagttctcaggtggttaatggttgggttaatgcgagtatatactct

SEQ ID NO: 11881 - DNA, 303 bp, Zea mays
tgaggaggaagacgccggagagacgggaagctatgtttttgcacaggagtgtctggaccggctgtcaattgctgttggtggtaatacgattctgtccgtggcagctgagttgctcccatcgtttttctcctctgaagattggaagagacgccacgcggcactagtgaccatagctcagattgcagagggctctgctaagatgatgattaagaatctggagcaggttgttgggatggtgctgaattctttccaggaccctcacccacgggtgaggtgggcagcaattaatgcaatagggcagct

SEQ ID NO: 11882 - DNA, 304 bp, Zea mays
cccacgcgtccggtcaatttggacatgcgttcatacttaaaatttttaagttgggtgcctgctgctctcaaaatgcctgaggatgagttgattagccatgccggtctggattcagctgtgtatctgaggatttacttggtcggacttaaaatatttgctccaatctcagttctagctttcattgttcttgtccctgttaattggaccaatgatactctgcaattctcgaagttagagcacagcaatgttgataagctttcaatatcaaacataccagttggatcaaaaaggtttatagcccact

SEQ ID NO: 11883 - DNA, 304 bp, Zea mays
ctgacggtgggccggcgtccccctgttccgccccgcacttccgcccgagggccgtgcgggccgctatccggtcgcacgcgtccgccgtcgatgcgcccgccacggccataggcgaagaaggagtccaagaagcaggatgagggcgtcgtcaccaacctatactagcccaaggagccgtacgtcggcaggtgcctcctcaacaccaagatcaccggctacgacgcgccgggggagacgtggcacatggtcttcagcaccgaagtcaagatcccgtacagagaaggccagtccatcggcgtcatcg

SEQ ID NO: 11884 - DNA, 305 bp, Zea mays
gcgagaagaccagaaggtgagaagagagagagagagtgtgtgtgatcggtacaaggatcaccgctgtgcctgcgcgtgctgcttcaccgaatcgagtcagatcctgtccgaatccgagctaagggatggcaaccggtagtgaagcctcgaaggcagctgaggctgtggttgactggcataaacacgacagcaagaggatgctccatgcggtttaccgtgttggggatctggaccgcacaatcaagtactacacggaatgctttgggatgaaactgctgaggaaaagggatgttcctgatgagaag

SEQ ID NO: 11885 - DNA, 302 bp, Zea mays
gggggtcaaggcgcccggccaccagatcctcaccatctgcaagtcgctcgtcgccggcgggtacaggcggagtgtctcgtactgctgttgctccacttgaacgattgaaaatattgcttcaggttcaaaatccgcacagcatcaagtacaatggtactgttcagggtctcaagtatatctggagaacagagggcctccgtggacttttcaagggcaatggtaccaattgtgcaaggattgttccaaattctgccgtgaagttttttagctacgagcaggcgtcaaagggaattctgtgggcc

SEQ ID NO: 11886 - DNA, 298 bp, Zea mays
aagttacattgcaccagctggccagtacaacctgcaggacacagtgctagaattggaatttcagggcataaaaaagaaatttaccatgcttcagacatggcctgtgcgttcaccaaggcctgttgcatcgaagcttgctgcggatacacctcttctgacagggcagcgtgtactggatgcactattcccctcggttctgggaggcacttgtgctattccaggagcatttggctgtggtaaaactgtcattagtcaggcactttccaagtactccaattccgaagctgtggtttatgtg

SEQ ID NO: 11887 - DNA, 298 bp, Zea mays
cccacgcgtccgctttaatctccttccaaatctgaacgtaaatgagctaattaaagcctttgcagtgaaaactaacgacatgatgttggtgatatacctgtcttctctgatccggagcgtcattgcgcttcacaatttaatcaacaataagatgctaaacaaggagcacgagaaggccgaggattcgaaaccaaccgccattcctactgctgccggaagctaaacgtgcttttgatcactgattggattggtggctaagaaaagggaagaaacttgtgatgacatgttagcacggttg

SEQ ID NO: 11888 - DNA, 97 bp, Zea mays
ggtgggttggcttctcctccccctccggttcgggttcgggttcgtgaggttctccggggttcggtttcgtgggtgggcggatcgagatgacggcgtc

SEQ ID NO: 11889 - DNA, 294 bp, Zea mays
gaatggcccgcacgacacagacggcgcgcaagtcgaccggcggcaaggcgccgcggaagcagctggccaccaaggcggcgcgcaagtcggccccggccacgggcggcgtgaagaagccgcaccgcttccgccccggcatcgtcgcgctccgcgagatccgcaagtaccagaagagcacggagctgctcatccgcaagctccccttccagcgcctcgtccgcgagatcgcgcaggacttcaagacggacctgcggttccagtcgtcggcggtggcggcgctgcaggaggccgcgg

SEQ ID NO: 11890 - DNA, 295 bp, Zea mays
gagcaatctgcaagtacgctgctcgcaaaaacaagccagagctgttgagggaaggaaacctcgaggaggcagcaatggtggatgtttggatcgaggtggaggctaaccagtacaccgctgcactgaatcccatcctcttccaggtcctcatcagtcctatgcttgggggaaccaccgaccagaaagttgtggatgagaaccttgagaagctgaagaaggtgctagaggtgtacgaggcacgcctgaccaagtgcaagtaccttgctggagacttcctcagcctcgccgacctgaa

SEQ ID NO: 11891 - DNA, 295 bp, Zea mays
cgcggtgcggctgctcgagcccatcaaggaggagttccccaccctctcctatgccgatttctaccagcttgccggagttgtggccgtcgaggtcaccggtgggcctgagatccccttccaccccggcagggaggacaagcctcagccgccacctgagggccgtcttcctgatgccaccaagggttctgaccacctgaggcaagtctttggcaagcagatgggtttgagtgatcaggacattgttgccctctctggtggccacaccttgggaaggtgccacaaagagcggtctggt

SEQ ID NO: 11892 - DNA, 304 bp, Zea mays
cttagctgctgctggtggtggtggtggcctgggcctggctgctgtgtctgtatcgatgtgtccgtattttctccatctcgtctgcatacgctgcaattggtaaggagctagctggcctttcatgtcttccatgctgccatagccatacggccggccggaaggcaggataccccatcgctcgctgcacatgcatgtatgccgcatggggatacatgttcatcatcagcagcacagtggctctgtatcccccatcccaatccgatcttatataggaggaggaggaggagcagcagcagcagcagcc

SEQ ID NO: 11893 - DNA, 309 bp, Zea mays
atcgcttcacgtccgctacataccggcgaggagacgaaaggagggagttttgagaagcataaatggctcctaaagccgctcctgtcaagaagggtgatgccaaggcccaggccttgaaggtggccaaggctgtgaagtctggggcaggcaagaagaagaccaagaagattcgcacatctgtaacatttcaccagcccaagaccctgaagaaggccagggacccgaagtacccaagaatcagcactactggaagaaacaagcttgatcagtaccaaatcctcaagtaccccctcaccacagaatctgcaa

SEQ ID NO: 11894 - DNA, 307 bp, Zea mays
ctctgatgggttgcaaaacttggcttcagctacaataacagtttctggcacatcaaattggacaaaagtggagcagaagctggttgctaaaggaaccaatagaacatcaaggcttcaaataacaacgaacaaaaaaggagttgtttggcttgatcaagtatcactcatgcctgaagacacatacaagggacatggtttccgcacagaacttatatccatgcttttggatttgaaaccacgattcttgagatttcctggaggttgttttgtagaaggtgactggctaagaaatgcattcagatggaga

SEQ ID NO: 11895 - DNA, 305 bp, Zea mays
tctcattctcatccccgacccccgcaccgcagcgtaaaccctagtccccggcggcgaccttgcggcctccgctgcgctctgactggtgcgcgtttagacgaggagctgcggcggccaagaccaatcgaccatggctacccgtatccagtttgagaacaactgtgaaattggtgttttctccaagctgacaaatgcttactgtctggtagcgattggagggtcagagaacttctacagtgcctttgaggctgagcttgcagatgccatccctgtggtcaagacctctattggtggcactagaataa

SEQ ID NO: 11896 - DNA, 309 bp, Zea mays
cttgacccttatggatcaccatctatatttctagactcagctgtacaggctgttgctgatggcggtttattgatgtgcactgccactgatatggcagttctttgtggtgccaatggagaagtttgttactctaagtatggttcattcccaaccaagggcaagtattgtcatgaaatggctttgagaattctcctagccagtattgagagccatgcgaatcggtacaagcgatatattgtgcctgttctctctgtgttcatggatttttatatccgtgtttttgttcgagtattcacttctgcaagtgaa

SEQ ID NO: 11897 - DNA, 309 bp, Zea mays
gacacaacacaactcgtaggcagcgagcgtctctcctcttcctctcccacgcaccgcgccaaggaaggcagagagagatcgccgctcctcttctctccgtcggtggtgcggttgaccgccctcctcgagcgagatctcgctgcagtccctcgagatctggtcacagatctatccgacaagatggtgaagatctgctgcatcggtgctggctatgtcggtggcccaaccatggcggtcattgccctcaagtgcccagacattgaggttgtcgttgttgacatctccaagccccgcattgaggcatggaac

SEQ ID NO: 11898 - DNA, 317 bp, Zea mays
cccttccctccctccctctccccgcgggccgccagaggcaatttcgccctcgattcgaccccgattcgtccgcccgcgaccgggattccctccgccaagcgcggatctgaacgctgcgctccgtgtcgccgctcgaactcgccatgaactgggccaaatccaagggcgccgccaaggccgatgccaagctggcggtgaagagcaagggggcggagaagcccgccaagggcaggaaagggaaggccggcaaggaccccaacaagcctaagagggctcccagcgctttcttcgtgttcatggaggaatttcgcaaggag

SEQ ID NO: 11899 - DNA, 302 bp, Zea mays
ggcaaaggaagtgcattgctgttcttactaccagaagaactgaagtttctaatttacctgaaggcggccaaggttaccctgacggaatatgagttcaatcagaagaatgtgccaaatttgcaatcgcagcctgagaatattgttggtgagaattactttctgaaccagtctgccaaagaagcctacagatcctacgttttggcatatgactctcactctatgaaagacatttttaatgtccatcaacttgatctgcagaaagtagctgcgtcattcggtttcaagaatcccccgaaagtgaa

SEQ ID NO: 11900 - DNA, 300 bp, Zea mays
cccacgcgtccggaatgctttgaggcgtaccacagagacttactccaaagtgaccagattcttttttatatgcaactatatcagcaggataatagaaccacttgcatcaagatgtgcaaagtttaggttcaagcctctttcagaagaagtgatgagtagtcgcattatgcatatatgcaatgaagaaggcctcaatcttaatgctcaggcgatgtccacactgagtgtcatttctcaaggtgatcttcgtcgtgctataacctaccttcagagtgcagctcgcttatttggatcttctat

SEQ ID NO: 11901 - DNA, 298 bp, Zea mays
agatgacaactttgctattgtgtttgctgctatgggagtgaacatggaaacagctcaattcttcaaacgtgattttgaagagaatggttccatggagcgggtcaccctttttctgaatctggctaacgaccccaccattgaacgtattatcacccctcggattgctctaacaacagcggaatatttggcatatgaatgtgggaagcatgtacttgttatcttgacagatatgagctcttatgcagatgcacttcgtgaggtttctgcagcccgagaagaggtgccaggtaggcgtggt

SEQ ID NO: 11902 - DNA, 294 bp, Zea mays
cggcgatgttttcaggcctccgtcaaactcagactggctctgtgtttatgttggcaccggtgtgcaattctttggcatgctgcttgtcactatggtatttgcggttcttggcttcctttctccatcgaacaggggtggactgatgacagccatgctcctgctctgggtgttcatggggttgcttgctggctactcttcttcacgtctttacaaactgttcaagggctcagaatggaagaacatcgccttgaggacagccttcactttccctggcagtgtgtttgctattttttt

SEQ ID NO: 11903 - DNA, 297 bp, Zea mays
accggatattccagtagtgcaggtatctgaggaccttgttgtgaatgtttcacgggcattacggaatgacatcaacagagcgcttcacttgttccgtgagatcgcaatggggcatgatctgaagaagtttttgggtgtgatcgtgggtctgtgggttctctccggagttggaagcagctgtgacttcctcacgttgacatacattgccgtcctgatgctccacacggtgccaatcttgtacgacaagtaccaggacaaggtggaccatgtcgctggaagggcacacaccgaggccct

SEQ ID NO: 11904 - DNA, 300 bp, Zea mays
cggacgcgtggcgtgacgcgtgggggttaaaaaataatatggctgacatatccccaaatggtcgcttcatagctgctgcggctttagttgctgatgtacaggtgtgggagatagtttactcgaaggatggttcagtgaaggaggttaataaagttatgcaactcaagggtcataagagtgctgttacttgcttgtgctttgctcccaattctgagcaaattattactgcatccaaagatggttccattcgagtatggaacattaatgtaagataccaccttgatgaggatccaaaaacct

SEQ ID NO: 11905 - DNA, 299 bp, Zea mays
cggaccgtggcggacgcttgggttgtggcccatgctgcaaaagctcaatgttaccatgaaggctgatgagaaggagttgattagtaaagctttgatgactcgtgttatgcaaacgtggcttccagctagcactgctctgcttgagatgatgatattccaccttccttccccagcaaaggctcaaaagtatcgtgtggagaacttgtacgagggaccccttgatgatgtgtatgcaactgctatcagaaactgtgatccagagggtcctcttatgctgtatgtttcaaagatgattcctg

SEQ ID NO: 11906 - DNA, 298 bp, Zea mays
gtgaattgggacacctcaaaagtgagggataagcttagacgtgacattgaggctcatgtagcttcagttcgggctgctaaattgtctgaactttgtgcgaaatatgaggcacaacttaccaaagctctggtggaacagttgaatctcttctagattcagccagtgaagacacgtggccagctattagaaagcttcttcaacgcgagacaaaaactgctgttttaggtcttgaatctgctgtgtcagcttttgaactcgatgaagcaactgagaaagaactgcttgcgaacgtggagaa

SEQ ID NO: 11907 - DNA, 300 bp, Zea mays
caccgttgtttcgtgcttgattaccatcctataatccccagagggtttgaacaagtcacttgttgtgaatagtgcgatcactcttgtgaggcttagctgggtctgtccatacatcgtggcccctcatatggagcatttcatgcaagcatggtgcagtgacttgtgcacgatcagagatggttttgagagagatgtcgcgtttcatggactgtgtgcaatggtggcatgaaaccctacaggagccgctggttcattagcttacatctgccaggcctgtgcaagttggactgagataaatag

SEQ ID NO: 11908 - DNA, 302 bp, Zea mays
ctacatcaaaatgccaagcaataggatcgaatccttcacaagggtcgatcctaccacacgagctggttctgaagtgaaatatggcacatacagtaaccagatgccaaactcctatttgccagttcttgtgcattatgagaataaccgcccattatgctgttgttgaggagcttgtacgcaaggtggagatttctcactggggaaacatccaaatcaccgagcagtataaactgaaacacggtggtgctcgtcacaaaggagtcttttccaggcttgagtatcaatctaggccatctatcagt

SEQ ID NO: 11909 - DNA, 306 bp, Zea mays
agtgagatctccatggcaaactcccgccagaatatccggaagttggttaaggatgggtttatcatcaagaagcctcataagatccactctagatcccgtgcaagaagggcacatgacgccaagcaaaagggacgccactcaggatatggtaagcgtaggggtaccagggaggctaggctacccaccaaggttctgtggatgaggaggatgcgtgtgctgaggcgccttctccgcaagtatcgtgaggccaagaagattgacaagcacatgtatcatgacatgtacatgaaggtcaaaggtaacgcc

SEQ ID NO: 11910 - DNA, 297 bp, Zea mays
ccattctcagccgccgccaatcccttcccgtgctccgcaaccgctgagtgagaagaagagatggccggcaagggcgatggcccggctatcggcatcgatctcggcacgacgtactcttgcgtcggcgtgtggcagcacgaccgcgtcgagatcattgccaacgaccagggtaaccgcaccacgccctcgtacgtcgccttcaccgactccgagcgcctcatcggagatgcggccaagaaccaggtcgccatgaaccccatcaacaccgtctttgatgccaagcgtctcatcggcagg

SEQ ID NO: 11911 - DNA, 294 bp, Zea mays
cggaccgtggatatcacacacgtaatcccatcccattccgcccgcaacagcagcaccaccggtgggaagaagaagatgaagaaggccacttcgctctccgagctgggcttcgacgccggcgacgccgtcgtcgggcttcttccgccctgtgtccggcgactcgtcgacgccgacgtcgcagcaccaccggcggaggctgaccaaggtgtcggtcatcggcgcgggcaacgtggggatggccatcgcgcagaccatcctcacgcgcgacctggccgacgagatcgcgctggtgga

SEQ ID NO: 11912 - DNA, 293 bp, Zea mays
  unsure (1)..(293): unsure at all n locations
cttggcgnggagcctattcttgatggcgtagtgtatggcaacctaatgaaagggtattttctcaagggcatggagaaggaggccatggattgctatgcagaggtgcttggagagggttccaaggtgaggttcggtgctgtgagctacaacatggtgcttgatgcacttgggaggaatgggaggttggatgatgcactcaacctgtttgatagaatgtgcatggagcatgacccgcccaggacaatcactgtgaaccttgggagctttaatgtgatggttgatgcatactgccg

SEQ ID NO: 11913 - DNA, 293 bp, Zea mays
cgcgacgccatccaccccactgcgctcgctgatcgcctcctcgcctcgctcgggcccagcttcctcggacccgttgccatcctccgcgtctggagcttctgcctcttctacgtcatggccgagctctggggcagtgtcgtcatatccgtccttttctgggggtttgcaaatcagattactacagttgaagaggccaaagagttctacccgctgtttggccttggtgccaatgtggccctcatcttctctgggcgcacggtgaaatatttctcaaacatgaggaagaatttggg

SEQ ID NO: 11914 - DNA, 293 bp, Zea mays
acgcgtggtccgtaacccgccgccgcgggaggagctgccggagccactcaggaacgtgatgctggagtacggcgcggcggtgacgactgctggcgcggttcgtgttcgagctgctgtccgagtccctcggcatgcccagcgaccacctgtacgagatggagtgcacgcagaacctgaacgtggtgtgccagtactacccgccgtgcccggagccgcaccgcaccgtgggcgtcaagaggcacacggaccctggcttcttcaccatcctcctgcaggacggcatgggcggcctg

SEQ ID NO: 11915 - DNA, 295 bp, Zea mays
gggatccttcatgctgaagagaaggattacaagactgcttacagctacttcttcgaagcatttgaagctttcagttcactggaagatcccaaggctatcttcagcttgaagtacatgcttctgtgcaagataatggtcaaccaagctgatgatgttgcaggaatcatctcatcgaaggctggcctcaagtatctgggtcctgatgttgatgctatgaaagctgtggccgatgcctactccaaaaggtctctgaagtacttcgaaactgctctccgtgattacaaagctcagctgg

SEQ ID NO: 11916 - DNA, 304 bp, Zea mays
gacagtcaatacaaaggtagctggttccacatatactgtcactggaatcattgaggttcttgacaacactacactgaggatcactgaattgccaatccgccgttggactcaggattacaaagattatcttgagagtttggctccagatactaagaacaaggacaaagtaccattcatagaggatgtcacatgtcaaggtgataatgaagatgtttacattcagttcacattaagtgagaaaaatatgaatatagctatggaagaaggactagtgaagaagtttaagctgacaacaacaattggg

SEQ ID NO: 11917 - DNA, 306 bp, Zea mays
gttctgatgatcaaaagaaaggcacacaacttttggaagtctatgctattgaaatacaaatgtacactgaaacaaagaataataaaaagcttaaggaattgtatcaaagggctctttccatcaaatcagcgatacctcatccaagaatcatgggtataattcgcgagtgtggtggaaagatgcatatggctgagaggcagtgggctgaggctgcgactgatttctttgaagctttcaagaactacgatgaagcaggcaatccacgcagaatccaatgcctaaaatatcttgtccttgccaatatgt

SEQ ID NO: 11918 - DNA, 299 bp, Zea mays
gtaccaaggtgcatacaagatatccaagggtttgcttgacaagtatggcccggatagggttctcgatactccgatcactgaggcgggcttcactggcattggtgttggtgccgcttaccatggtcttcgacctattgtagagttcatgacatttaacttttcgatgcaggcaattgatcacataattaattcagctgccaagtcgaactacatgtctgctgggcagatatctgttcctattgtctttaggggtccaaatggtgctgctgctggagttggtgcccaacactcacagtgct

SEQ ID NO: 11919 - DNA, 202 bp, Zea mays
gggatggggaaatttcttcccccacggggatgtaaacggggaaaatttctcccccgacgggtaaacggggatagggatggggaagcattccccatccccgttccccgcgtggacccgttaaacttacatgtgacgatgttttcatataatagttaatgataaaaaataaataattatcttgccaagagatcactagttgtac

SEQ ID NO: 11920 - DNA, 301 bp, Zea mays
cagtattgagagccatgcgaatcggtacaagcgatatattgtgcctgttctctctgtgttcatggatttttatatccgtgtttttgttcgagtattcacttctgcaagtgaaataaagaatacacctctaaaactttcttacatatatcagtgtgttggctgcgactcttttcatcttcaatgtcttgcgaggactgttccgaagaagaataatggtgtgaagcatgcacctgctattggacctgttgttcctcaagagtgcagtgattgtggaaagaaatttaatgtaggtgggccaata

SEQ ID NO: 11921 - DNA, 300 bp, Zea mays
cccacgcgtccggggtgatgctgttattatatacctaccaatgttgctggagcttcccattgccatgcttgcctgtgcccgcattggtgccgttcactcggttgtgtttgctggcttctcagcagattcgctagctcaaaggattgtcgattgcaagcctaagcttgtcatcacgtgcaatgctgtgaagcggggagtcaagcccatctttctcaaagatatagtggatgcagctttggttgaaagtgagaagaatggagtctctgtaggtctctgtttgacgtatgaaaaccagtcagc

SEQ ID NO: 11922 - DNA, 306 bp, Zea mays
gagagaggaagacgagaggcagcgaaggaaacagtagttcttcagttaggagggcacaggaggaggaagatggcgtcgaagaggatccagaaggagctcaaggatcttcagaaggaccctcccacctcgtgcagtgcaggtcctgttggtgaagatatattccactggcaggcaacaataatgggtccatctgatagcccatattctggtggagttttcctagttacaatccattttcctcccgattatcctttcaaaccaccaaaggtggcattccgcaccaaggtgttccatccaaacatcaac

SEQ ID NO: 11923 - DNA, 307 bp, Zea mays
cccacgcgtccgggctagaggggctcatcaagatggccgatctgaccataaacctggccgcgatctgcacgccggccgactacaacactcgcccactcgacaccatctacagcaacttcatcgacgcactcccagtggtcaagtactgctccgagaacagcaagcgtctcatccacttctccacctgcgaggtctacggcaagaccatcggcagcttcctccccaaagaccacccgctccgcaaggagcctgaattttatgttcttaaagaagatgagtcgccctgtatttttggtccaatcgtgaa

SEQ ID NO: 11924 - DNA, 307 bp, Zea mays
ggtggagggatgcacgatccctttgacatattccagtcattctttggtggtggaagcccttttggaggtggtggcagcagtaggggcagaaggcagcgaaggggagaggatgtggttcatcctctaaaggtttctctggaggatttgtacaatggcacatcaaagaagctctctctgtcccgcagtgtcctctgctccaagtgcaatggtaagggttcaaagtctggagcttcatcgaggtgtgctggttgccaaggttctggctttaaggtccaaatccggcagttggggcctggaatgatccagc

SEQ ID NO: 11925 - DNA, 300 bp, Zea mays
gctggagcagttcaaggctgaggccctgcggatgcagccctgtcaatgcaggcttatgatgtctactccgagaggacgagggaggtcttgctggaagcatcagagaagctgaagatacaggcagacaaagcacagaaggacctgagcgtggtagctaccgaaattggtcaggagggacaggaatatctgatgatggcagctcggaactccccagactcgatcaaggatatcacaacaacgttcagggctcttggaaaattgaattggccatcagagtatgaggattatcatgtgggcatt

SEQ ID NO: 11926 - DNA, 293 bp, Zea mays
ctctatcacttaaggttgaggacctttctaggatgtacaggctcttctccaaaatcagccgcggtctggagcctatttctaacatgtttaaaacgcatgttacaaatgagggcacagccttggtcaagcaagcagaagattctgctagcaataagaagccagaaaagaaggatatagttggcatgcaggagcaggtctttgtgtggaaaatcatcgagctgcatgaccaatatgtagcttatgtgacagaatgtttccagggacatacactcttccataaggcacttaaagaa

SEQ ID NO: 11927 - DNA, 295 bp, Zea mays
ggcaattatggataaatgtggggatactgatgattgtgtttcaacttctgaagctgctgaacaagcagcaaaacttccagaagtgaacattaataatcttccagtccctggcgaagttgaattcataaatggtggtcctccgtgtcagggattctctgggatgaatagattcaaccaaagcccatggagtaaagttcagtgtgagatgattctagcattcctctcattcgctgagtatttccgtcccagattctttctgttagaaaatgttcggaactttgtttccttcaacaaa

SEQ ID NO: 11928 - DNA, 297 bp, Zea mays
acgggactgccgttaaggtcgaggcgtccgccgcgaaccacgagtccccgcccgcgcccgcgccggtcccggccttccgcgacgccaggtgggtcaacggcacctgggacctcaccaagttcgacaagggcggcggcgtcgactgggacgccgtcatcgacgccgaggccaggagaaggaaatggctcgaagactacccggatgcgacgagcacagacgatgccgtcgtcttcgacacctccattatcccgtggtgggcatggatgaagcggttccaccttcctgaagccgagaagc

SEQ ID NO: 11929 - DNA, 300 bp, Zea mays
  unsure (1)..(300): unsure at all n locations
cggnacgcgtggcgtggtggaccgccggcgctacactacctgagcggcccgtacggagacaccacctttaccaaggttttcagctggcggccttgcctgggagacgcgaagcagggccttcgcgcgcactttgaggtctatggggacatcctcgaggccgttgtcatcaccgaccgcgccacgggccgctccaagggctacggattcgtaaccttccgggacccagagtcagcgaggatggcctgcatggacccatacccagtgatcgacggccggcgtgctaattgcaaccttgccatc

SEQ ID NO: 11930 - DNA, 292 bp, Zea mays
atcgcacgaggtccgggaccggggacgggagcgaaaatgacagataagatttactactggcatacagggtatgtaggccatttgaaggaaaggaagatcaaggaccagatggagaaagacccaactgaagtgattcgcaaagctgtgctgcgcatgcttccccgcaacaaactgcgtgatgatagggatcgcaagctgcggatattttctggaattgagcatccattccatgaccgccctcttgaagcttttgtgatgccaccacggcaagtacgggagatgcgaccccgtg

SEQ ID NO: 11931 - DNA, 299 bp, Zea mays
aacagcatggcatgcagtgaacactgatagtatgttcactgtctactacaagccaaggactagtccagctgaatttgtggtttcgcgagataggtactatgaatcactgaaacgaaattattcaatagggatgagatttaagatgagatttgaaggtgaagaggcagcagagcaaagattcactggcacaatagttggaataggtgcttctgatccatctggttgggctgactcaaaatggcgttcccttaaggtgagatgggatgaaccttcttctatttctcgtcctgaaagagttt

SEQ ID NO: 11932 - DNA, 300 bp, Zea mays
cccacgcgtccgcctcccaacaccacctcgccgcgatctccgtagcctccgtcgcgtcgagcatcgatcatgtcggcctactgcggaaagtacaaggatgagctcatcaagaatgctgcctacattggcacccctggcaagggtatccttgctgctgatgagtccactggcaccattggcaagcgcctttccagcatcaatgtcgagaacgttgaggagaaccgccgtgccctccgtgagctcctattctgctgccctggtgctctccagtacatcagcggtgtgatcctcttcgaggag

SEQ ID NO: 11933 - DNA, 291 bp, Zea mays
cccacgcgtccgcccacgcgtccgcggaaatagcactcctgtatcgagtcctaggttttttaacaggagacactccactggacagtcaactccagacagggctgggccatcggatattcagtctttctcagactccctgaagtcccgcttaaatgccgtctctatgaagtacaaagaatctattacaaagagtactcgagggtggaaggagagattgttttcacgtaattcatccgtggcggatcttggttctgaagtgagaagagaagttaatgctggaattgcgtccgt

SEQ ID NO: 11934 - DNA, 290 bp, Zea mays
cagcttccacgaatctccccgccgccctcaattcccctctgcgccgcgccctcaattcccctcggcgccgcgcctcctcccctcgcttcggtcctcggttagttaaccatccaggttctgtcaagatgtctgatagccatgagactgacaggaacattgagatttggaaaattaagaaactgatcaaggcattggaatcagccagaggcaatggcacaagcatgatctctctaatcatgcctccacgtgatcaggttgctcgagtggctaagatgttaggtgatgaatat

SEQ ID NO: 11935 - DNA, 293 bp, Zea mays
ctcagctcccatatccgctcccctacctctccagcatcctcccgtctccgtcgtctcgtctccgctcctcacctcgccagccatgggcaagatcaagatcggaatcaacggtttcggaaggatcggcaggctcgtggccagggtcgccctgcagagcgaggatgtcgagctcgtcgccgtcaacgaccccttcatcaccacggattacatgacgtacatgttcaagtacgacaccgtgcacggccaatggaagcacagcgacatcgccctcaaggactccaagacgcttctct

SEQ ID NO: 11936 - DNA, 292 bp, Zea mays
ggacctggggcaaaagcaaccaaaatagttgacagctaccaaggaatggttaagggctatagcggtgttttccgacttagagaagccacatcaacctgggatgcagattcaccaattatccagagggaaccatgggaacacatcaaagatgaaaatattagaaaggcagcagcatcattcatgggtgagatatggcaagttcctccaatgttttctgccattaaggttggcggtgaaaagatgtatgacaaagcaaggaagggtgaaacagtagagctttcaccaagacgta

SEQ ID NO: 11937 - DNA, 293 bp, Zea mays
ctttgctatagtgagaaatggcacacagcttgcagaatacacacagccttatattgagtcagggcttgtgatagtagtgccggtgaaacatgtaacttcaagtgcgtgggctttccttgaacctttcacattggagatgtggtgtgtcacagttgctctttttattttggtgggcatagtagtgtggcttcttgaacatcgtactaatgaggaatttcgagggtctccaaggcgacaagtcataacaatgttatggtttagcttctcaacaatgttcttttcacacagagaga

SEQ ID NO: 11938 - DNA, 295 bp, Zea mays
atgatttgctgctgcaacaagatggatgcaaccactccgaaatactccaaggcacgttatgatgagattgtgaaggaagtctcatcctacctcaagaaagttgggtacaaccctgataagattgccttcgttcccatttctggttttgagggcgacaacatgattgagaggtccaccaaccttgattggtacaaaggcccaaccctgcttgaggctcttgaccagatcaccgagcccaagaggcctttcggaaaagcccctggtctgccctccaagatgtgtacaagattggtgg

SEQ ID NO: 11939 - DNA, 290 bp, Zea mays
gggcgcgaacatctccggcatggcacgtgaaccctgccgtgaccttcggcgccttcgtgggcggcaacatcagcctgttccgggggctcctgtactgggtggcgcactgcctggggtccaccgtggcgtgcttcctgctccgcttctcgacgggcgggcagggccacgggcaccttcgggctgacgcgcgtgtcggtgtgggaggcgctggtgctggagatcgtgatgaccttcgggctggtgtacacggtggacgccacggcggttggacccgaagaagggcagcctgg

SEQ ID NO: 11940 - DNA, 306 bp, Zea mays
tctggttccagaaccggagtgccgcgataagcagcggaaggagtcttcgcggcttcaggctgtgaacagaaagttgacggcaatgaacaagcttctcatggaagagaatgagcggcttcagaagcaagtctctcagttggttcatgaaaacgcgcacatgcggcagcagctgcagaatacttcattggccaatgacacaagctgtgaatcaaatgtcactacccctccaaaccctataagggacgcaagtaacccttctggactccttgcgattgcagaggagaccttcacagagttcctctcaaa

SEQ ID NO: 11941 - DNA, 307 bp, Zea mays
cccacgcgtccgggccgctcctctccgcttccaagatgtcgaagcgaggacgtggaggttctgctggtaacaagttccggatgtcactgggtctaccagtggcagccactgtgaactgtgctgataacactggagccaagaacctttacatcatttctgtgaagggaatcaaggggcgccttaacaggcttccttctgcctgtgttggtgacatggttatggcaactgtgaagaagggaaagcctgaacttaggaagaaggtgatgccagctgtcattgtgaggcagcgcaagccatggcgccgaaa

SEQ ID NO: 11942 - DNA, 302 bp, Zea mays
acaggattagcagcttctccgtgctgctgcgtctcctcctcatcgtcctctccagtgtccagctcggccatggcgttcaccgtctccttctcccccgccaacgttcagatgctccaggctaggagtggccacggccacgccacctttggaagctgttccgccgtgccaagagccgggccaaggctgcgctccacggccgtccgggtcagcagcgagcaggaggcggcggcggccgtcaaggcgccgtccgggaggaccatcgaggagtgcgaggccgacgccgtcgctgggaagttccctgc

SEQ ID NO: 11943 - DNA, 305 bp, Zea mays
gttcctaagaccaagaagacgtactgcaagaacaaagagtgcaagaagcacacactccacaaggtgactcagtataagaagggcaaggatagcctgtctgcccagggaaagcgccgttatgaccgcaagcagtcaggatatggtggtcagaccaagcctgtcttccacaagaaggccaagaccaccaagaagattgttctgaagctgcagtgccagagctgcaagcactactcacagcacgccatcaagagatgcaagcattttgagattggtggagacaagaagggcaagggcacatctctttt

SEQ ID NO: 11944 - DNA, 301 bp, Zea mays
tggaattccttacgcctttgctccctgtatagcggtctgtagagatccaagatggggacgttgctatgagagctacagtgaggatccaaaggttgtccagtcactgacttcactcatctctggcctgcacagtgacgctcctgcggattccgcgggaaggccgtatgttgggggaagtaagaaggttgctgcatgcgcgaacatctatgtcggtgatggtggaacgcataacggaatcaacgagaacaacacgatcatcgacacacacgggctgctgagcatccatatgcctccttactac

SEQ ID NO: 11945 - DNA, 301 bp, Zea mays
ttctgtccttaattcccgtgtttctcgtccgtctccgctcctccgcaaccccttcccctcctccgccgaagcctctcctccggccgccgaaaccctagcctccgccgctgccgtcatggcaagcagcaacgtctcgaccgtttacatctctgtcattgatgacgtcatctccaaggtccgcgaggatttcatcacctacggagtcggtgacgccgtcctaaacgagctccaggctctctgggagatgaaaatgctacactgtggcgcgatctcggggaacatagaccgaaccaaggctgct

SEQ ID NO: 11946 - DNA, 299 bp, Zea mays
ctattcttcagtgcttggcatttacccggccacttacggcatatcttttagaaggatatcattcacaaaattgttctaaaactgaatggtgcttcatgtgtgagttggaaaaggtcttgatagagggcaaacaaggaaaatctccagtatcacctactggaatactatatcatttgaatgagattggggtcagttttggccagggcgatgaagaggatgcccatgaatttatgaggtatgcaattgataatatgcaatctgctagcatggaggaagccaagaaaaatggtatccagcag

SEQ ID NO: 11947 - DNA, 297 bp, Zea mays
aacgatgaaaattcagatgttcggcaggctgctgtctatggtgtgggtgtatgtgccgagtttggtggtcatgtttttcgccctctagtaggagaggccttatcaaaattaaacaatgttataaggcatcctgatgcacgacttcctgataatatcatggcatatgacaatgctgtttcggcgcttggaaaaatatgccaatttcatcgggatggtattgatgcagctcagcctggcttagctgcttgcctataaaagacgacaaggttgaagctaaagttgtacatggacagcttt

SEQ ID NO: 11948 - DNA, 292 bp, Zea mays
cttacttgtaactggctacgctactttaagaatgacagagacaggagagatttgatcacatgtggatctgcagctggtgtggcggctgccttccgtgcacctgttggcggtgttctgtttgctcttgaagaagcagcatcatggtggcgaagtgctcttttgtggagaacattctttacaactgctgttgttgcggtggtattgagggggctgattgagttctgtcgtagtggaaaatgtggtctctttgggcaaggtggattgatcatgtttgatctcagttcaactgttg

SEQ ID NO: 11949 - DNA, 287 bp, Zea mays
cccacgcgtccgcggacgcgtgggtcttgccaactattgtcaagctttttgcctccaatgaccgagctatccgagcatgtcttttgcaccacatagatcaacttggggaaactatgtctgctcaaactgttgatgaacaagtttttcctcatgtagcaactggattttccgatactgatggtactatccgtgaactgacattaaagtcaatgctcatattagcaccaaaactatctcagcgtacaatctcaggatctctcttgaaatatctctctaagctacaggtg

SEQ ID NO: 11950 - DNA, 298 bp, Zea mays
gacatggtggtgatattggcagtggtgtggaatgctggagggggtactaccaaagtctacgtgctacacaaatgggattgtctttaaatattgatatttcagcaactgcattttacaaggctcaaccgattttggaatttgcaattgagtacctcaacatacgtgacacctcaaggcgtttgtctgaccaggatcgcttaaaactgaagaaagtcctcaaaggagtacgtgttgtggcaacacatcgtcgtgatatagccatacattacaagattactgggataacctcacttccctt

SEQ ID NO: 11951 - DNA, 300 bp, Zea mays
cccgcataccctcgaaagctcgaaagatcccgcggcgcacagccacccttctctcctctccgctcccaatcttatcgtcgcctccctcgaagtcgccgctgccttcattccaccatggcgcttcacgccccggtccacgtgatgaaggactcgctgaagcgggagtctggcgcgaaggttcaccaagccaacatccaggcggccaaggctgttgctgacatcattcgcacgacattgggtcccagatccatgctgaaaatgcttctggacgctggtggaagtattgtggttactaatgat

SEQ ID NO: 11952 - DNA, 113 bp, Zea mays
gcaaaggcaatccagtgatcggcactatgaacgacctcatgaccaagtccttcatgagctacgtcgacctgaagaaggcggcgatgaaggacctggaagcggcgggcgacggg

SEQ ID NO: 11953 - DNA, 290 bp, Zea mays
cccacgcgtccggaagagaagaaaccttgccggcggtacaacgacgggaactctgacgagcttgccctggaagttttctgcccggtgtttggcgcatcacagcaaccaattagcaagcagcaggagtccatctcctccgtcaccaagatcggactatggggcggacagggagggtcggcacaggacatcacggcagagcagccaccacggcgtctgcacagcatcaccgtccgcgctggcgttgccgtcgactccatcgagttcacctacaccgacgacgctgggcagag

SEQ ID NO: 11954 - DNA, 291 bp, Zea mays
agcgctgcagcttcatcacgccctactctgaccccctgtatgtggcgtaccacgacgaggagtggggagtgcccgtgcacgacgacgagttgctgttcgagatgctcacactgtcgggcgtgcaagtcggggccgactggacttccatcctcaagaaaagacacgtctacagggaggcgttttccggcttcgacgtggatgcggtcgccaagtacaccgagaagcagatggcgtcgctgagcgccgactacgggctggatttgggcaccgtcagaggaatcgtcaacaacg

SEQ ID NO: 11955 - DNA, 108 bp, Zea mays
gctctcgctcttgatttgtctcatcgacgcatcagttgggctgcaggcttagagctggaaggaataatttgactagagaaatggggcagtgttgtagcagagctcccg

SEQ ID NO: 11956 - DNA, 169 bp, Zea mays
cccacgcgtccgcccacgcgtccgagtgaaagcaagaatgatagtgctgtgcctgatagagcaaagtacaatagagatgacttccctgttcagtacgatgctgcaaagttctttgtcattaaatcgtacagcgaggatgacatccacaagagcgtaaagtaccatgtgt

SEQ ID NO: 11957 - DNA, 252 bp, Zea mays
cccacgcgtccgcgaagacaagatcaactttgcagtgttcccatctctccaaggtggccctcacaaccaccagattgctgcacttgctgttgctctacagcaaactatgtcgcctggcttcaaggcctatgcaaagcaagtgaaggccaatgctgttgcaattggaaactatctcatgagcaagggctacaagatggtgactgatggaactgagaaccaccttgttctctgggatctccgcccccttggctt

SEQ ID NO: 11958 - DNA, 144 bp, Zea mays
cggacgcgtggatccaagtctgagggggttgagtttactgtgaaagatggctacttttgtcctgccctggccaaagctgtcaaaaccatgaaaaaggcagagcaggtgctccttacagtaaagccacaatatggatttggtgag

SEQ ID NO: 11959 - DNA, 302 bp, Zea mays
actggctacaaggttgagcagccattcgaggaagatgaaatggatcttgattctgaagatgaagacgaggagcgggatgttccagtagtcaaggaaaatggcaaagctgatgggaagaaacagaaaagtcaagaaaaggcagttgctgcaccttcaaaatcaagtccggattccaagaagagcaaggatgacgatgattctgatgaggacgagactgatgattctgatgaggatgagacggacgattctgatgagggtttatcttctgaagaaggcgatgatgattcaagtgatgaagatga

SEQ ID NO: 11960 - DNA, 248 bp, Zea mays
ccgaggaggagcacaggaagttcctggacgggctaaggcagctgggcaagggggactggaggggcatctccaagggcttcgtcaccaccaggacggcgacgcaggtggccagccacgcccagaagtacttcctccggcagaccaaccccggcatgaagaagcgccgggcgagcctcttcgacgtcggtatcgcggactacaaggacaaccaggtgccaggccctcagagcatcgtcgctgccaaaccg

SEQ ID NO: 11961 - DNA, 300 bp, Zea mays
tctcactcccgtgtcgtgtctagcgccgacgggttgctaccggagccggccagcggccacgatgcctacaatgcacgcgcttcgcctatgcccgctgctctccaccatccgatccacaccaccgcgggccactgccgcagcccgccaggcgcgctcttcgtcgcccgctgctcctccgccgggacgccgtcagccgcccaggcgctcaagatcagttcaatcccgaccaagccagttgaggggcagaagactgggactagtggcctgaggaaaaaggtgaaagtattccagcaggagaac

SEQ ID NO: 11962 - DNA, 300 bp, Zea mays
gtgccgcaaatacgcctttggcaagatgcttgtggtaggctctgagccccctttcaaggtcaaggggctctggctcttcaggggctcagaaattcccaagtttgtcatggacgaagtctatgacatggagctttatgagtggaccaaggttgacctctctgatgaggcacagaaggagcgggtcaatgccatgattgaggaccaggagccattcgagggcgaggccttgctggatgcaaaatgcttcaagtgaggaaagagtttttgggtccaattctaaaacagccatggatgatagct

SEQ ID NO: 11963 - DNA, 295 bp, Zea mays
tggaaaacatgaaacctgagcagaaggacatttacttcattgctgcagatagtatgagcagtgccataaatgctcctttcttagagagactaacagaaaaagactatgaggttctacttttggtcgaccctatggatgaattggctatccagaatctgagctcctacaaggataagaaatttgtggacattagcaaggaagatttggatttaggtgataacaatgaggaaagagagaaggagataaagcaggagttcagccaagcctgtgactggataaagaatcgcttgggtga

SEQ ID NO: 11964 - DNA, 297 bp, Zea mays
acattgtaaaactacttgatattgtcagagatgatgaatcaaagacacctagtctgatctttgaacatgtcaacaacactgacttcaaagtactctaccctgcgttatctgattatgatgtcagatactatatttttgaattattgaaggcactagattactgtcattcacgtggtataatgcaccgagatgtcaaaccccacaatgtcatgattgaccatgaaaaacgtcagcttcgtcttattgattggggtcttgcagagttctatcatcccaagatggaatacaatgctagag

SEQ ID NO: 11965 - DNA, 296 bp, Zea mays
cggacgcgtggctccggcgagctagggtttgcccccccgcctcgccaccccacggctcccgccatccttggatctccagccatgtacggcggagacgaggtttcggcaatcgtcatagatgtgggctcttacagctgcaaggcgggctacgcaggcgacgacacccccaaggccgtcttcccatcggttgttggttcaattgaacaaactgaagacacagatgaccccaagccagagaaggaagctgactctgcatcagattctaagaacggtgccaagcccatggatgtggacaa

SEQ ID NO: 11966 - DNA, 213 bp, Zea mays
gcggagagattattgacgcgcgcataatgaaagatcagagtggtcactcaaagggatatggttttgtgcggtttgcaaagagggattatgctaatactgccaaaaggcaaaagaatggtattgaggttcaaggaaagaggcttgtggttgagctttcaatggatcaagatacagttttctttggaaatctttgcaaagagtggactttagaag

SEQ ID NO: 11967 - DNA, 296 bp, Zea mays
cccacgcgtccgcggttctgacaccgtcacctttatgttcgagtcgcccaagcaagataagattgcggatttcgagatgaaactgatggatattgatagcgagcacctcggaatcccggattccgagtaccaggccatcgtccgcatgccttcttctgagtttatgaggatctgcaaggaccttagcagcatcggagacactgtcgttatctcggtaaccaaggagggcgtgaagttctccacatctggagaaattgggagtgcgaacattgtttgcaggcagaaccaaactattg

SEQ ID NO: 11968 - DNA, 190 bp, Zea mays
caatgggtttggcaggatcggaaggctggtggccagggtggccctgcagagcgacgacgtcgagctcgtcgccgtgaacgaccccttcatcagcaccgattacatgacctacatgttcaagtatgacactgtgcacggacagtggaagcaccatgaggtcaaggtgaaggactccaagacccttctcttt

SEQ ID NO: 11969 - DNA, 141 bp, Zea mays
cccacgcgtccgccggctactcccgcggcaccggcctcggcgccgagatcatcggcaccttcgtgctcgtctacaccgtcttctccgccaccgaccccaagcgcatcgcccgcgactcccacgtcccggttctggctcccc

SEQ ID NO: 11970 - DNA, 294 bp, Zea mays
ctgtgatttctgagccggtactagttaacatccacaagaacgtagctatcaatgggaaggctgcagatgccagtgatagggcacggcaacaagatccgcagagccaaagcgttgttgagtccagatcatcggctccagctgctcagctgggagaagatcaagctgcagcgaaggcacaggcagcctttcgtggttacctggcacgaaggtcattccgtgcattaaaaggtatcgtaagactccaggcgctgattcgagggtatcttgtaaggaggcaggctgtatcaacccttc

SEQ ID NO: 11971 - DNA, 289 bp, Zea mays
ggagaagcagccgccgttgctgctgccgcgtccacagaatggggggtttcgtgaagacccataagaccaatgcgtatttcaaacgtttccaagtgaaattcaagagaaggcgggctggcaagacagactacagggccaggataaggctgattaaccaagacaaaaacaagtacaacacacccaaatacagatttgttgtgcgatttaccaacaaggacatcactgcacaaatcatatctgctagtatagcgggtgatatggttcttgcttctgcctactctcatgagtt

SEQ ID NO: 11972 - DNA, 287 bp, Zea mays
cgtctttgcattgtcatcaacagtgcattagctggtgaagaggcagaaaaggcttcattcggcttctttgaccgcaatgagaaatatgtcgaatgccttctgtcggtgaacaggaaagtaaatgcagatggtgttgtcactggagtgttctgtttcatccatgttcctagtgatgacctgcagcatgcgctacatgtgcagcaagcctctgagcagacagcacaaagaaagttgaaggctttctcgtacatgcgacatgccatcaacaaacctctctcaggtatgct

SEQ ID NO: 11973 - DNA, 289 bp, Zea mays
gaaggatctgacggtgaggaggaggtcttcatcgacgaggaggacatcatccacgagataaccatcgacgaagaagatctccccgaccgcgacgaagaagatgacgacgtcggcgacgggattggtagggttgattcagaagacatcattgatgattctacgtactcatttcttggccacaaagatgaagtcttcactgttgcatgcagtcctacagatgcatcacttgtggcttctggaggcaaagatgataggggatttctgtggaggatcggatcagatgagggtg

SEQ ID NO: 11974 - DNA, 290 bp, Zea mays
gcaagttctccgaccccgagctccagagtgatctcgcgtccttcccgttccgtgtcacggagggccccgatggatttcccttggtacatgtgcggttcctgggcgaggagcggacttttacccccacccagctgcttgccatggtgctgtccaatctgaagggcattgctgaggggaaccttaagactgcggttgttgattgctgcattggcatccctgtgtacttcagtgatttgcagcgcagggctgttcttgatgctgctactattgcaggcctcacgccgttgcag

SEQ ID NO: 11975 - DNA, 289 bp, Zea mays
cattggtacgaaattcactggccagtttggtgaccttattgctgaccttgctattgatgctactacaacagcaggtgttgaccttggtcagggtatgcgtgaagttgatatcaagaaatacattaaagttgaaaaggttcctggtggtcagttggaggattctagagtccttaaaggagttatgatcaataaggatgtcgtggctcctgggaaaatgaggagaaagatagtaaacccccgtatcatcctgttggactgccctgttgagtataagaaaggagaaaatcag

SEQ ID NO: 11976 - DNA, 133 bp, Zea mays
gctgatgttccgttcttggcaccctacaaaaccaagatcattgatgttatcgagaagggagagaagcagcccaacatcactattggcattctggtctccgttgtcgtcgtgttcgttaccgttctcttcaaga

SEQ ID NO: 11977 - DNA, 292 bp, Zea mays
cccacgcgtccgcctcccaacaccacctcgccgcgatctccgtagcctccgtcgcgtcgagcatcgatcatgtcggcctactgcggaaagtacaaggatgagctcatcaagaatgctgcctacattggcacccctggcaagggtatccttgctgctgatgagtccactggcaccattggcaagcgcctttccagcatcaatgtcgagaacgttgaggagaaccgccgtgccctccgtgagctcctattctgctgccctggtgctctccagtacatcagcggtgtgatcctct

SEQ ID NO: 11978 - DNA, 296 bp, Zea mays
cccacgcgtccggtacttggaagggagaaacgcaatgaagttcttgccgccatttatatggttcgttctgatgtcagcttgactgtccggcaggctgcgttacatgtctggaagacgattgtagcaaatactccaagaactctgaaagagataatgccagtacttatggacacacttatttcgtctcttgcatcatcttcctccgaaagacgtcaggttgctggaagatcacttggtgagcttgtaaggaagcttggtgaaagagttttgccctcaattattccaatcctgtcaca

SEQ ID NO: 11979 - DNA, 176 bp, Zea mays
gggacaaccacctctgtggtccttgctcaggggctgattgctgagggtgttaaggtcgtagcagctggtgctaatcctgttcagattactcgtggtattgagaaaacagctaaagcactagttgaagaactacggaagttgtctaaggaggttgaagatagtgagcttgcagatgt

SEQ ID NO: 11980 - DNA, 323 bp, Zea mays
cggacgcgtggctagggaacaagttccaggctgacagtcgggtgaagagcgataagacgggcatgttcgacttcggggtgatcctgcttgaggtactgtccgggaagaccatcacgtccatgtatgaagtggagatactgaaagaactgcttgcatgggcgattgccgacgaggaccgggtgaggaggaggagcttcgcagaccccacggtgagcaaagggtgctcggacgagtcgctgaggacggtcatggagatctgtcagaggtgcctggcgaaggaggcgtcgcagcggccctcggtggaggacgtgctgtggaacctg

SEQ ID NO: 11981 - DNA, 324 bp, Zea mays
gatgttgatagttgttcggttgaaatcaagaacaatgtctatttgttctcaaccggtgataatttagcattagagagtacagttgctgaattgaagctgattatgattcagatccgaatgtcattgctgaacatctctaatgagactaacgctgaagaagagaaagaagaattatcaggaatacattgtgagaagctagcaattgcttttgcaatttcaaattcccctcctttcagaagcatacggataataaagaccttaaggatgtgtagccattgtcacatctttgccaagctagtttcagaaaaatacgagcggcagata

SEQ ID NO: 11982 - DNA, 313 bp, Zea mays
  unsure (1)..(313): unsure at all n locations
gcagcgacttggttggccgagcgcgcaccggtcagggaaaaactttggcttttgtcttgcccatattggagtctttggttaatggggcaaacaaggcatctagacggactgaacatggcaggaccccaagtgttctcgttctactanccacaagagagctcgccaatcaggtgcacgctgactttgagttttatggtgcaacatttgggctctctgcatgttgtgtgtatgggggatcaccttatcgtcctcaagaaatggcattgagaagaggtgtggatattgttgttggaactcctggtcgtgtcaagga

SEQ ID NO: 11983 - DNA, 315 bp, Zea mays
cccacgcgtccgcggaccgtgggcgcgtacgagctgtccaaggaccccaccgtgagcgtcgccatcgtggagcagtccgtgtccccgggcggcggcgcgttgctgtgcgggcagcatgttctcggccatggtggtgcgcaggccggcgcacctgttcctggacgagctgggcgtgggctacgacgaggccgaggactacgtggtggtcaagcacgcggcgctgttcacgtccaccgtgatgagccggctcctggcgcggcccaacgtgaagctgttcaacgccgtggcggtggaggacctgatcgtgcggcgggg

SEQ ID NO: 11984 - DNA, 325 bp, Zea mays
aagactctaaaggccgtcgccttcccattcttcctcgccgcgggggtcgcctgagatcacataaacaatggtgaaggctgttgctgtgcttggtagcagcgatggtgtcaagggcaccatctttttcacccaagatggagatggccctaccgctgtcaccggaagtgtctctggcctcaagcctggcctccatgggttccatgtacatgcacttggtgacaccaccaatggatgcatgtcaactggaccacactacaatcctgcgagcaaggagcatggggcaccagaagatgagaaccgccatgctggtgatcttggaaacgtg

SEQ ID NO: 11985 - DNA, 328 bp, Zea mays
tcgactcagcgtggcagctcctgatcgccaacttcaccgagttccagctcgccaccgtcgtcaccttcctgctccacgagaccgtcttcttcctctccggcctcccctccctcctcttcgagcgcttcggactcttcgccaagtacaagatccagaagaagagcaacacctctgcttaccaaaacagatgtgtcttgcgcctcattctctaccatgtatgtgtgaacctgcctgtcatgattttctcgtatcctgccttcaaattcatgggtctcaggagctctcttcctttgccacattggtcggttgttgtatctcaagttctttt

SEQ ID NO: 11986 - DNA, 331 bp, Zea mays
gtgatctcgaggagcagcgagcggtgagcactgaagatgccaaggagtttgccgagaaggagaacctcttcttcctggagacctctgcgctccaggcaacaaacgtagagagtgcttttcaaactgtcttgacagagatattcaagatccacagcaagaagaacatggtgtcggagccgaagagcaatggagctgccccagcgatgccggggacaaaggtccttgtcccaggtccggcgcaggaaatcccaaagagcaagtgctgcagttccatgtgatgcttctacgtttggtgctgggtgggttgaaaataaattcacgcaacattgtt

SEQ ID NO: 11987 - DNA, 298 bp, Zea mays
  unsure (1)..(298): unsure at all n locations
gaacagttgtatcgaaatctgatggtgttgagttcactgtgagagatggcgtattctgccctgccatatcaaaggctgtcaagactatgaagaaaaacgagaaggcccacctcactgtcatgccacaatatggctttggtgtgaaaggtagacaggcatctggagaagaagcttctgtgcctcctaacgcgacattgcacattgatcttcaagtggtgtctggaggacagtcactgagttaggcagtgacaaagagatccttaagaagatccttaaggnaggcgaaggctatgattgt

SEQ ID NO: 11988 - DNA, 314 bp, Zea mays
cgaggagattgaagggagtggcgatgaggaggcgatcggcgatagggagggcgatgaggacgggggtgacgagaagggaggaggcgagctgggagaagaggatgatgcccatgaggaagaagatacggtcgatcagaatgacacgagtggaccagttgatccttctaattttttctcttcttcggatcgggcatcatttcatgcaaattcattccttgagcttaacttgtctcgtccgctagtgcgagcttgtgaagcacttggctaccagaaaccaactccgattcaggctgcttgcattcctctggcattaa

SEQ ID NO: 11989 - DNA, 315 bp, Zea mays
  unsure (1)..(315): unsure at all n locations
ctcgactctcctctctcgcatccgcagcctctcgagctctactccatcccctcgatctcgaagcgcacagcagcagtcaggcggccatggacgcgagcgcaccgngagccggcgggaaggcgaagaagggcgcggccgggcgcaaggccggcgggccgaggaagaagtcggtgacgaggtccgtcaaggccgggctgcagtttcccgtcggccgcatcgggcggtacctgaagaagggccggtacgcgcacgcgtcggcacgggcgcccccgtctacctggccgccgtcctcgagtacctggccgccgaggtgct

SEQ ID NO: 11990 - DNA, 133 bp, Zea mays
cccgtcctgtccttcccttacccggcggcttaaaccctagttctcactcccatcgccgcttcagctccgccgcagcagatggagttctggggtctcgaggtcaagcctggttccactgttaagtgtgagcctg

SEQ ID NO: 11991 - DNA, 325 bp, Zea mays
accgctatgagtcagcaaggcaagaaggagcgtatgatgaatctgaaaggagaagagaaatggcaaagaactcccttgagagatacacacattattatgaacgatgggcagccaatcagtcgtcgaggcaaaaggcactgggggaccttcaaagcctacagaatgacaagcttgaaaggttaagtgacatacaaagtcaacctgagtcacagctgaagttcattgtagaggcatggttacagattgttgaatgcagaagggtattgaagtggacttatgcctatggattttacctgccagagcatgagcatgccaaaagacagtt

SEQ ID NO: 11992 - DNA, 311 bp, Zea mays
taatccagcccatttcgaactctctctagacgcttcctcggtctctctgttcaccgccgccccgtaccatactcctcttcgcgccgtagaaatggcgctgccgaatcagcagggcgtggattaccccagcttcaagctcgtcatcgttggcgacggtggaactggtaaaaccacatttgtgaaaaggcatcttactggcgagtttgagaagagatatgaggccaccattggtgttgaagttcaccctctggattttagcactaactgttgcaaaattcgcttttattgctgggacactgctgggccagaaa

SEQ ID NO: 11993 - DNA, 313 bp, Zea mays
ccgtgacttcatcaagaacatgatcactggtacctcccaggctgactgtgctgtccttatcattgactccaccactggtggttttgaggctggtatctccaaggatggccagacccgtgaacatgctctccttgcgttcacccttggagtgaagcagatgatttgctgctgcaacaagatggatgcaaccactcccaaatactccaaggcacgttatgaagagattgtgaaggaagtctcatcctacctcaagaaagttgggtacaaccctgataagattgcctttgttcccatttctggttttgagggcgac

SEQ ID NO: 11994 - DNA, 312 bp, Zea mays
ctgtgctatataacaagcatgatagtctgaatgggcaaagaattgtgatgttctcttacggcagtggtttgacatccactatgttttcattgaggctaaacaatggccagcatcccttcagcctatcaaacattgcttcagttcttgatgtcaccgagaagcttcagtcaagacatgagactttgcctgacaaattcgttgagacactgaagctgatggaacaccgatacggcgcaaaggacttcgagacgagcagagacacgagcctactgcagccgggcgcattctacctcaccaaggtcgactccatgt

SEQ ID NO: 11995 - DNA, 309 bp, Zea mays
ggacctgcgactcccagaagatcttcaggtgattctggctcctcgactcctggtcattcagatggtgattcttctaacagaacggtatatgttggtgggcttgaccccaatgtcagtgaagatgaactgagaaaagcctttgccaaatatgatcttgcctctgtgaaaattcccctaggaaagcaatgtggctttgttcaatttgttagcagaactgatgctgaagaagcactacaaggattaaatggatcactcattggaaagcaggcagttcgcctttcatgggtccgcagcccatcgcataagcag

SEQ ID NO: 11996 - DNA, 239 bp, Zea mays
tgcattttatccttcctggtgctctgtccacctctctcgctctgggccgccgccgccgccctaagccacgtgctgaggctttcgttggtctcttcgccggcgacgagcacccagcagttctgtagaaatggctgatggtgaggacatccagcctcttgtctgcgacaatggcactggaatggtcaaggctggttttgctggcgatgatgcaccaagggcggttttccctagcattgttg

SEQ ID NO: 11997 - DNA, 294 bp, Zea mays
ggcggcggcggagcaaacgcaggcgaaggcgagggtgtgagggaaggagcaccagccatggtgcacgtcaacttctaccgcaactatggtaagacgttcaagaaaccaaggcgtccttatgagaaggagcgtcttgatgctgaactgaagctggttggtgagtatgggctgaggtgcaagcgtgagctttggagggtccagtatgcactgagcaggatccgtaatgctgcaaggcacttggtcacccttgacgagaagaacccccgtcgtatctttgagggtgaggcacttctt

SEQ ID NO: 11998 - DNA, 188 bp, Zea mays
gccattcgtccggtcaagtcctcctcggggttaaggttccttagggttttgtggaggtgcgatggcggcggctgatgtggagtaccgttgcttcgtatgctgacttgcctggtccagcagcgacgagtcgctggagaatcccttcgcctcgtacggcgagatcctcgagtccaaggtcatcaccgacc

SEQ ID NO: 11999 - DNA, 202 bp, Zea mays
gatttccacaggtccgcggtgctgctgatgtcaagtcaccagaaacaattcttgaacatgatcgtatcatttggcttggggatttgaattaccggatcgctctttcgtactgctcagctaaagctcttgttgaaatgcatagctggaagcaactgttggagaaagatcagctacggatagaacggagatgtgggcgtgtttt

SEQ ID NO: 12000 - DNA, 285 bp, Zea mays
gccgcgacctctcggcgaaaccctaacctaccttagaccccgccgccgccgccgcccaagggagagagagacttgcacatcaaagggcgtccgatggggaagaagaagaagcgcgtcgataaggtcttctgctagtactgcgaccgcgagttcgacgacgagaagatcctcgtccagcaccagaaggccaagcagttcaagtgccacgtatgccacaagaagctctccaccgcgtctggcatggccatacacgtcgtccaggtccacaaagagtccgtgaccagg

SEQ ID NO: 12001 - DNA, 170 bp, Zea mays
ctcaatttcaggttctgagtttgtggagatgtttgttggtgttggtgcttccagagttcgtgacctttttaagaaggccaaggagaatgctccttgcatagtgtttgttgatgaaattgatgctgttggaaggcaaagaggtacaggtattggtggtggaatgatgaaag

SEQ ID NO: 12002 - DNA, 278 bp, Zea mays
cgacctggtgtgaacaacgtccaagtgtttgctggctatgttctacatattggctcatttacaaaaggttcgaaggttttgtctcttggagatactgtgatatgcaaggttgattacaaccggcgcacactgattgctccaaatcatacgtgtacccacatgttgaactttgctctaagggaagtacttggtgatcatgttgaccagaagggttcaattgttctaccagagaagctaagatttgatttctctcatggaagacctgtccagcctgaaga

SEQ ID NO: 12003 - DNA, 265 bp, Zea mays
aacccaaactcttgggcttgtcacgagtgctggtttccctgctggaaagtacctctttgctggtgttgtggatggacgcaacatctgggctgatgatcttgctacatctctcagcactctccagtctcttgaggctgttgttgggaaggacaagcttgtcgtatcaacttcctgctcgctcatgcacaccgctgtggatcttgtgaacgagactaagcttgacagcgagattaagtcttggcttgcttttgctgcccagaaagtt

SEQ ID NO: 12004 - DNA, 292 bp, Zea mays
gcaggacttctgcgtcgccgacctgacctgcagcgacacgccggcggggtaccgtgcaagtccagcgtcaccgccaacgacttctagttccacggcctggccggccagggcaaaataaacccactcatcaaggccgccgtgaccccggccttcgtgggccagttcccgggcgtcaacgggcttggcatctctgcggccaggctcgacatcgaggtgggcggcgtcgtgccgctgcacacccacccggcgggctcagagctcctcttcgtgacccagggcaccgtcgccgccg

SEQ ID NO: 12005 - DNA, 291 bp, Zea mays
gcagcttggagcaaatctctagagtatatggcaatcaggctgtagttgtcagtattgatcctcgacgggtatatgtcaaaagtcaagaagatgtgccatttaaaactgtaaaggtgtccactaaaggtccatcgggagaagaatatgcatggtaccagtgcacagtgaatggtggacgtgatagccgagctataggagcatatgaactagcgaaagctgtggaagaattgggcgcaggagagatagttcctaagtgcattgattgtgatggccaaggttgtggatttgaca

SEQ ID NO: 12006 - DNA, 289 bp, Zea mays
gtggttctttctgtgtacagcctgcttgcatcgaacctacttcagcttgtatccagcctgcgtgcttcctccccaaattcttcggtcagaagagcaagaagaagactcgaaaggcaaggtctgagctgggacataacgccggcaccctgcccgagcttgttgccgagccaacatcagctcggtcgatgtcatttgtcgggacccatgaatagttggcccctgaaatcatcaaaggcgaagggcacggaagcgctgtcgactggtggaccttcggcatcttcctgcatga

SEQ ID NO: 12007 - DNA, 287 bp, Zea mays
tgaagatggaaagtacatcatattgggcatctatgaaggttgtgaccctgtcaacaaattatactattgtgaaatttcttctgttcctcaaggaatagagggctttagagggacacaggatttgcttccgtttgtcaagcttattgacaattttgatgctcaatatcaagttgtggccaatgatggtgatgaatttacatttttgaccaataaaagtgcccctaagaataagctggtaagggtaaatatcagaaatccagagctgtggactgatgttctctcagagc

SEQ ID NO: 12008 - DNA, 290 bp, Zea mays
gccctttccactcggtccacttcgtcgccggcccgtggggcgccgccgccgccaaggcgctcgtcgtcgcggacgccactaagaaggccgtagccgtcctcaagggcgcgtctgaggtcgagggcgtgttgacgctcacgcaggacgacgatggacctacaactgtgaatgtccgtatcactggacttacccctggacttcatggcttccacctccacgagtttggtgatactaccaatgggtgcatatcgacaggaccacattttaatccaaacaatctgacacacggt

SEQ ID NO: 12009 - DNA, 129 bp, Zea mays
gtcaccgccacgacaaccccgccgcaatgctgtcgaggggtccccgcctttgcccggggagctccagacctgtcctctcctcttctggggcgtgtcgtataaggtgtgggtcccatctattctctcaag

SEQ ID NO: 12010 - DNA, 234 bp, Zea mays
gataggaagaacagaataaacatggatttccagaactttgtgaacaaggttaacgaccactggtcgcaaccacagttcaaggggcttgacctggagtttgatgtcccccttagagagcttgggttccatggtgtcccatataaagcttctgctttcattattccaagttctacatgtttggttgaggtgattgagacccccttccttgtggtgagcgtgagcgagatagagatt

SEQ ID NO: 12011 - DNA, 288 bp, Zea mays
ctgcaacatggttcttgagaatgttcgtgagatgtggaccgaggtaccgaagaccggtaaaggcaagaagaaggctctcccggtgaacaaggacaggttcataagcaagatgttcctccgcggggattcggtcatcatcgtcctcaggaacccgaaatgagtaccctgtacacgtagagagtctgtttgctagcagtacgttgtgctattgggtgtaaggtgtatgccaaatgctcaaagcatgggagtgtaagtcgcggcagaattcgctatgtgtgttgatggtgg

SEQ ID NO: 12012 - DNA, 287 bp, Zea mays
aaaattatctgatggaggaacaaaaaaggaaccgaagaaacaatctggtggctcaaaatcgaagacagctgaggctgacattacagttgcaaagttggatattagagtggggcttatcagaaaagcagagaagcatccagatgctgattccctttacgtggaggagattgatgttggagatgacgcgccgagaacagtagtcagtggccttgttaaattcatacctcttgaagaaatgcagagccggaaagtttgcgtgctctgcaatctgaaaccggtggcaatgc

SEQ ID NO: 12013 - DNA, 282 bp, Zea mays
gtccggtctttccgttacccggcggctttaaaccctagttcccattccatcttcgtttccgctccgccgccgtcgatggagttctggggtctcgaggtcaaacctggatccactgtcaagtgtgagcctggacatggctttatcctgcacgtttcccaggctgcccttggggaatcaaagaaaagtgacagtgccttaatgtatgtcaaagttgatgacaagaagcttgccattggaacgctctctatcgacaaatacccacagatacaattcgatttggtt

SEQ ID NO: 12014 - DNA, 138 bp, Zea mays
agagactcaggcttaggtcacgagcacaaaggataagcagtcagctgcttgcaagccgaaagcttatgccatgggaaatccctaaaagggactggtttcctcctagcttcatctttgggtgcgccaccgcagcatacc

SEQ ID NO: 12015 - DNA, 319 bp, Zea mays
ctggttcagaacaatttaaatttggaggttatctatggtgatacagattctatcatgatacatactggacttgatgacatctccagggcaaaagcaattgcaggaaaggttattcaggaggtgaacaaaaagtaccgttgtctggagattgatcttgatggcatatacaagagaatgttacttcttaaaaagaagaaatatgctgctattaaagtagcactggatggcagcttacgagagaacattgaacgcaaggggctcgatatggtcagacgtgattggagtttgctgtcaaaagacattggagatttttgtctta

SEQ ID NO: 12016 - DNA, 320 bp, Zea mays
cggacgcgtgggcgccagcaagagcatgagcgtgggcatgatcgaccactacctcaacaagaacactaacaacgacgtcgtcaagagctacttcaacaagtccgtcggcagcaggccggccaacaacaacaccaccacaaccgtcaagaagaactccgccgcccaccacgacaagaagcacaagaactccggcaacggcgccggcgtcgacaagaggttcaagagcctgccggcggcggaggcgctgcccaggggcgaggccatcggcggctacatcttcgtctgcaacaacgacaccatggaggagaacctcaagaggc

SEQ ID NO: 12017 - DNA, 315 bp, Zea mays
ggcaaaggtgtttctgttgagaatatctcttctcagctttcaccttgggcatctgcactctttgagtttttgcccccttttatcaggaagcagctactactacatcctgaatctgatgattcagctcaactttcccagattgagactgaaaagctgctagcccagttagttgagactgagatgaacagacgtttgaaggagggcacttacaaaggaaagaagtttaatgcaatctgtcacttctttggctaccaagctaggggagcactgccttcaaagtttgattgcgattatgcctacgttttggggcatgtg

SEQ ID NO: 12018 - DNA, 311 bp, Zea mays
ggctttgatgtctacgtcaatatggtgctggaggacgtcaccgagtatgaatacactgctgaagggcgccgtattacaaaacttgaccagatcctcctgaacggcaacaacatagccattttggttcctggtggttcaccacctgatgtgtaatgaacttttgcttcccagagtatcattcgtggtgaaggcagccccgtgaactttgcaccttatattttttaatcattggatgtttcctcatctcggatgtgtttctcctgttcatgattataccgaagtttattgttaactctgtcagcatggaatct

SEQ ID NO: 12019 - DNA, 312 bp, Zea mays
aggtgctgcaagaatggcgggagcaggcgggcctgccgctcggctcctggtggctgcacctgctgctgctgttcgcggcgcgcggcctcacctaccagttctggttcagctacggcaacatgctcttcttcacccgccgccgccgcgtcgtcgccgacggcgtcgacttccgccagatcgacgccgagtgggactgggacaactttctcgtgctgcaaacgctgattggggccacggtggtcaacagcccactgctcccgggcctgctgcagctctgcctgtgggacccgcgcgggtgggccgtcgccctgc

SEQ ID NO: 12020 - DNA, 311 bp, Zea mays
cggacgcgtggtctccgcctcccgcttacctctttggctctagtctatccccctctcgtttcttcctgtgagcgacactggtggagctgcgccgctctctaccttcaccggcgacgggcattcacaagtagtgatctcttgactaacggcgtagtggtgactaaagagccttgacaatgagcagcataggcacaggttatgatctgtctgtcaccaccttctctcctgatggccgcgtctttcaggtcgagtatgccacaaaagctgtcgacaacagcgggactgttgttgggatcaagtgcaaagatggc

SEQ ID NO: 12021 - DNA, 317 bp, Zea mays
catcccggaggacctcttccacgcgcccaggctggagaccgtgcacctctactccaacaagctcacgggccccgtgccggactcggtggccagggcgccctcgctcgtcgagctccgcctcttcgcaaacagcctcaacggcgcgctgcccgccgacctcggcaagaacgcgccgctcgtgtgcctcgacgtttccgacaactccatctccggcgagatcccccggggtgtatgcgaccgcggcgagcttgaggagctgctcatgctcgacaaccacctgtcgggacacatccccgaggggctcgcccgctgccgga

SEQ ID NO: 12022 - DNA, 316 bp, Zea mays
cttctgaaagaagctatccatgttataagctgtggctatgaggacaagactgaatggggaactgagatcgggtggatctacggttctgtgacagaagacattctcaccggatttaagatgcacgcgcgaggctggcggtcgatctactgcatgcccaagcggccagctttcaaggggtctgcccccatcaatctttcggaccgtctgaaccaggtgctccggtgggctcttgggtccgtggagatcctcttcagccggcactgccccctgtggtacggctacggagggcggctcaagttcctggagagattcgcgt

SEQ ID NO: 12023 - DNA, 313 bp, Zea mays
tgcatttcaagttgctaggaaggctcagggctcagtggggaaggggagagaaacgactgcagttgaaatgaagaagggtgactggttgtgcactaactgtaacttcttaaattttgctcgcaatcgtcactgtctcgaatgcaaagcagatggaccaaagaagatagaagcggccgtggatgcaatgaaaatgggcgattggatctgcacacagtgtcagtttatgaacttctctcgcaacaagatatgttttaaatgtgaagaacctcacccgaagaggcaactcaatcctggagagtgggagtgcccctca

SEQ ID NO: 12024 - DNA, 314 bp, Zea mays
cggacgcgtgggcggacgcgtgggcaaggactcaaaacttctgcacccacttttgataaacctgctgacgatggatacaactggcggaagtatggccagaaggcagttaagggtctcgagtatccaaggagttactacaaatgtacccacacgagttgtccagttaagaaaaaagtggagcgctcagcagaaggacacatcactcaaataatttatagaggtcagcacaaccaccagcgtccaccaaaaaggaggtccaaagatggtggtggtccactaaatgaagcagatgttcttcatgagaatgaagacat

SEQ ID NO: 12025 - DNA, 304 bp, Zea mays
ggcaaacgcggctgctagctcggcgcccctctcccactccgactccccagccgccgccagcccgcacacccctccctcgcgcgctcagggtttcggaatggaagccgaggcggcggccaagaggacgcgggatagcggggaggacgccgccgcggcggggatctccgccgtcatcccgggatggttctccgagatcagccccatgtggcccggtgaggcgcactctttgaaggtggagaaggtgctgttccaagggaagtcagactaccaaaaccttatggtctttcagtcctctacgtacggg

SEQ ID NO: 12026 - DNA, 309 bp, Zea mays
gttcccacaaagacagctcttcaggaggcatactcaactcccatcttcccactggatattctcgctgagagacctccagagaagaagtttgaatgggctaagaggcttgtgatgaaatacgggtcacttgtgtctgttgtctcttttgttggactgtttatctaccttgtcgcgagcccgtcgaagagcagctcaaaggcaagcaagaagagacgctgatctacttataggtcgcagttgacggtgtagctggtggttttgcctggaggaactcttggtagtttgagctgtgcgaaagcttttaagttt

SEQ ID NO: 12027 - DNA, 308 bp, Zea mays
gcagttatggctcttggttttgttctgtacaatgagcccgagcagactccaagaattgtatccctgctctctgaatcatacaacccacatgttcgctatggtgcagccttagctgttgggatatcatgtgcagggtctggattaagtgatgcaatttccttgttggagcctcttacatcagatgttgttgactttgtgcgtcagggagctctcattgccatggcaatggtaatgatccaaacgaatgaatcctttgattctcgtgttggagcatttaggcgtcagttggagaagatcattcttgacaa

SEQ ID NO: 12028 - DNA, 308 bp, Zea mays
ggatttgcccagaacttttcctggtcatcctgctttagatgaggatggaagaaatgctttgagacgcttgcttatagcttatgctaaacacaacccatcagttggttactgccaggcaatgaacttttttgctggtctcttgcttctattgatgccggaggagaatgcattttggacattggttgggattatggatgactattttgatggctacttttctgaagaaatgattgagtcacaggtggaccagcttgttttagaggagttagttcgagagaagttccctaaattagcaaatcacctggatt

SEQ ID NO: 12029 - DNA, 307 bp, Zea mays
gaagcccaaggccgagaagcggctccccgcgggcaagtccgcaggcaaggagggtggcgagaagaaggggaagaagaaggcaaagaagtcggtggagacgtacaagatctacatcttcaaggtgctgaagcaggtgcacccggacattggcatctcgtccaaggccatgtccatcatgaactccttcatcaacgacatcttcgagaagctggcggcggaggcggccaagctggcgcggtacaacaagaagcctaccattacgtcccgcgagatccagacctccgtccgcctcgtccttcccggcgag

SEQ ID NO: 12030 - DNA, 305 bp, Zea mays
cccacgcgtccgcccctctaaatcgatcctcgctccacggccatggtgaggatgaagcaggtaaagatttcggtaaagaaggacgtggattcgtacacaatccgcggcaccaacaaggtcgtccatgtgggcgactgcgtgctgatgcgggcgtcggactcggacaagcagccgtatgtggcgcgggtggagaagatggaggccgacggacgcggcatcgtgcgggtgcaggtgcgctggtactaccgccccgaggaatccaagggcggtcgccggcagttccactgcgccaaggagcttttcct

SEQ ID NO: 12031 - DNA, 305 bp, Zea mays
cttattctccaaacaatggatggaaggaggaggaaaatgcatttcaaagaagacgtaagtgggacaagaggatgctagaatttgttcaacacgtggataaacccttaatctggtgtggggacttgaatgtcagtcatgaagaaatcgacgtcagccatcctgatttctttagcagcgctaagctgaatggatacaccccacccaataaagaggactgtggacagccaggattcaccccagcagagagacggcgttttggcaacatattattccaaggaaagctggtagatgcttacaggcacctg

SEQ ID NO: 12032 - DNA, 305 bp, Zea mays
  unsure (1)..(305): unsure at all n locations
cggacgcgtggngaaacaaacacactcgaaggcagcgaacccgagccttcccttccctccaatcgatcacccgcttcgatccgctagctagctagcagcgcgatgagcttccctcaccgtgtccacgaagaccgcggcggccggcggcaacaagcagcgcgagggcgcggaggtcatcacgggcgcggaggcctgcttcgcgcactccaagcagatgctccaggcgctgggcttcccgggcggcgtgatgccgctgcgggggctggaggagtgcggctgggtgcgcgagaccgggttcgtgtgga

SEQ ID NO: 12033 - DNA, 302 bp, Zea mays
cgtttcgaagcctcgcgagccccgacgatggccaccaccgcggtgtcggtcgacgagaagctcgataagcttcgcgccgaggtcgccaagctcgaccagatcagcgagaacgagaagtccgggttcatcagcctcgtgtcacggtacctcagtggggaggcggacagatcgagtggagcaagatccagacccctacggatgacgtggtggtgccctacgataccgtcgcgtcgcctcccgaagatctcgaggagacgaagaagctgctggataagctcgttgtgctcaagcttaacggaggg

SEQ ID NO: 12034 - DNA, 301 bp, Zea mays
ggcttaacttgagcaagaatgatcttgttggattcatccctgcggagtttggtaatttgagaagtgtcatggagattgatttatcctataatcatcttggtggtctgattcctcaagaacttggaatgctgcaaaacctgatgttgctaaaactggaaaacaacaatataactggcgatgtctcttctctgatgaactgcttcagcctcaatatcttaaatgtgtcatacaataatttggctggtgctgtccctactgacaacaacttcacacggttttcacatgacagctttttaggtaa

SEQ ID NO: 12035 - DNA, 302 bp, Zea mays
cggacgcgtgggcgagctcgagcagcagccatggatggcgaggaggttggcaggaggggtattcctactctgctgaagccgtcttcctcctccagcgacggcagtccggggaacaagagcacatcgcttctgacgtcactcagctcataggatggacgccgctggtcgaattgaagcgaatcgccagcgaggctgggatcgatgcgcggatcgtcggcaagatggaggcttaccagccactttgctccatcaaggaccgctctgctttgagaatgatagaggatgctgaggagacgggattg

SEQ ID NO: 12036 - DNA, 300 bp, Zea mays
cccacgcgtccgcccacgcgtccgggcgaaggagtagcagcagcaggcggcgccgagtagcggctccccatctcgagcttgccaccatggctagaggattgaagaagcatttgaagaggctcaatgcccccaagcattggatgctggacaagcttggcggagcttttgctcccaagccatcttctggacctcacaagtctagggagtgcctgccactgattctcatcatcaggaacaggctcaagtatgctcctacataccgtgaggtcatttccatcctgatgcaacgccatgtacttg

SEQ ID NO: 12037 - DNA, 298 bp, Zea mays
ttccgttctcaaaccaacctaggcaattcgccgcagcctctcaccctcgcgagtcccgacctcccgcagccgccgcacagatggcacccaaggcggagaagaagccggcggccaagaagcccgcggaggaggagcccgcgacagagaaggtggagaaggctccggcggggaagaagcccaaggccgagaagcgcctcccggcgggcaagtccaaggagggcggcgagggcaagaaggggaaaaagaaggcgaagaagtccgtggagacctacaagatctacatcttcaaggtgctgaa

SEQ ID NO: 12038 - DNA, 257 bp, Zea mays
gctggatgctgatatccatcgcaagtacatctatggtggccatgttgctgactacatgaggaacctcgctgaagaggagccagagaagtaccagtctcacttcagtgagtacattaagaacgggattgaggctgatgacatgggagctctgtaccagaaggtccatgctgccatccgtgctgatccttccgtggtcaagtccaacaagcagccacccaaagagccccagaggtaccaccccaagaaactgacatacg

SEQ ID NO: 12039 - DNA, 286 bp, Zea mays
ctccttcaaggacatcatgaagctgtacgagggcgggatccagctgcccaaaataccagccctcgaggacctgcggaacagttcccactcgagctcgtcaacgatgtcctcccggtcggcggcgactacctcctcaagctccccatgccgcagatcatcaaagaggacaagacaggttggatgacagatgaggagtttggacgggagattctcgccggcgtgaaccccatgctcgtcaagcgtctcacggatgtcctccgagaagcagtcttgacccgagcaagta

SEQ ID NO: 12040 - DNA, 247 bp, Zea mays
gtgacgcgagcacgagcatccatcgtttccccttcttccccatcgcgtgccctcggcgcaaccatcttccattgcggaccaagttcagggacgagcaaattcgcggagttcaagtaggcttcaagctcctcgataaagatggcgacggctgcatcactaacaagaagcttgaactgtgatgcgctccctggccagaatcccactgagcagagctgcagacatgatcacgagttgatgctgatggcat

SEQ ID NO: 12041 - DNA, 156 bp, Zea mays
cggacgcgtgggcggacgcgtgggggcatgcatcttattgtaagttttggagtttgttgttgcacacgcaacgatggaccgcctgtgatatctttaataaatgtacccgcagataccaatgagataaaaagaacgcatggctattgtattattaag

SEQ ID NO: 12042 - DNA, 296 bp, Zea mays
gaggtacaaccccaagaagctgacatatgagcagaggaaggccagcctcattgaaaggctcaaccaactcaactcctccggtggtgctgatgacgacgatgaagacgacgagtaaaagtaaatgccatcgaagtagtgctaactccattcagcgatcagcaattgtgtactgtcctatgcggggacctgtagtactgcaataaggatttttgtttaagttttgcgaggtgaacaaaacctgttctgttagtttcgagcttgagctctcaatgtttactctttacattgagatgctg

SEQ ID NO: 12043 - DNA, 294 bp, Zea mays
ccaccacctccacctcgtcgtctcccaccaccgccgagcgcgagccctagcccgatctagccggcggcaggcaccagatcccgccgcccgccgcgtcccgggacgcgccccgccgaatccgccgctcctcgcactgcaacacgcccggaccacggtgcatttgatccgtcccggccgcctacacgatgtccaagtcgggagcgctggatcttgcttctggcctcggagggaagatcaacaaggtggaagtcaagtcggccgtcgatgagtatgagaaatatcatggatactatg

SEQ ID NO: 12044 - DNA, 280 bp, Zea mays
  unsure (1)..(280): unsure at all n locations
nccacgcgtccgcggacgctggcgaccgtggggtgagctcagaggttgaagtgatcctaaacaacgtgagattagtcgcattggctcgagcccgggggaatgtcctttttaaggcaggcaagttacctgaggcgtcgctagcctatggtgaagggctgaaatatgagccttctaatccagtgctatactgcaaccgggcagcttgctggttaaagctgggtcggtgggcaaaagctgttgaggactgcagcgaggccctaagagtccagcctaactacac

SEQ ID NO: 12045 - DNA, 286 bp, Zea mays
gtgacgcgtctcccacacggccgccgcccttgccttcgtgcgttccccgcgtagagtttagggttttgtcgccgccatggcgatcctctcggcgctcgccaccgaagtgttcatccccgtcgccgccgtcatcggcatcgccttcgccgtcgtgcagtgggtgctcgtgtcgcgggtgaagctctccccggctgcagccgcgtccggcggcagcaagaacggctacggcgactacctcatcgatgaggaggaggggctcaacgaccacaacgtcgtcgtcaagtgc

SEQ ID NO: 12046 - DNA, 291 bp, Zea mays
atgcccctcagccatgtccttgccaccaagctaggtgctcgtctcaccgaggtccgcaagaacggaacctgcccctggctcaggcctgatgggaagacccaggtgacagtcgagtaccgcaatgagggtggtgccatggtccccatccgtgtccacaccgtcctcatctccacccagcacgacgagacagtgaccaatgatgagatcgctgctgacctgaaggagcatgtcatcaagcctgtcatccctgagcagtaccttgacgagaagaccatcttccaccttaaccca

SEQ ID NO: 12047 - DNA, 291 bp, Zea mays
ctcacccgttgcctccaaactcatttctcccgagcgccgccgcgagcctctgttccagcttcgttcatggcttccctcaccggatccgctctctcctttgcgaggcccgtcaaggcaatcagcattaagtctgtctctttctctggtctaaggaaggataatgtagccttccgcttgcagccagtgccacaaagattcgctgtctgctgtcctgctaaaaaggagactgtggatcgggtttgtgatattgtcaagaagcagcttgcacttcctgagggcactgaggtctgt

SEQ ID NO: 12048 - DNA, 281 bp, Zea mays
cccacgcgtccgcggaccgtggcgcgtctcccacacggccgccgccctcgccttcgtgcgttccccgcgtagagtttagggttttgtcgccgccatggcgatcctctcggcgctcgccaccgaggtgctcatccccgtcggcgccgtcatcggcatcgccttcgccgtcgtgcagtgggtgctcgtgtcgcgggtgaagctctccccggctgcagccgcgtccggcggcagcaagaacggctacggcgactacctcatcgaggatgaggaggggctcacga

SEQ ID NO: 12049 - DNA, 294 bp, Zea mays
tttcccaagggaaccataccagagcggcagagccttcccctccgctccccagtcccacccgcaccctagccctcagcaaaccctaaccgctcgtcgccatgaaggacacctcgttcaaggccaccggcgccaagcgcaagaaggtcggcggcgccaagcgcgggctcacccccttcttcgcgtttttggctgagtttaggccgcagtacctggagaagcaccctgagctcaagggcgtaaaggaggtgagcaaggcggctggggagaagtggcgctctatgtcggatgaggaga

SEQ ID NO: 12050 - DNA, 291 bp, Zea mays
gcctcgacttcgagatcgtccccgtcgacctcaccaccggcgcccacaagcagcccgacttcctcgccctcaaccctttcggccagatcccggctctcgtcgacggagacgaatcctcttcgagtcccgtgcgatcaaccggtacatcgccagcaagtacgcgtcggagggcacggacctgctccccgcgacggcgtcggcggcgaacgtggaggtgtggctagaggtggagtcgcaccacttctacccgaacgcgtcgccgctggtgttccagctgctcgtgaggccgct

SEQ ID NO: 12051 - DNA, 209 bp, Zea mays
agaagggcctcctgtatcctctcacttccctcagtcctcgtccgtctgctccctcctctctctacctagctctagctagccttcctgtagcgcggcagagatggctgcccctgcctccaacacgggggcggcggcggcacgctgctgctgctgctcgtcctgtcgctcgccgcggcggcggacatgtcgatcgtgtctacggggagcgc

SEQ ID NO: 12052 - DNA, 286 bp, Zea mays
cacttagctgctgctggtggtggtggtggcctgggcctggctgctgtgtctgtatcgatgtgtccgtattttctccatctcgtctgcatacgctgcaattggtaaggagctagctggcctttcgtgtcttccatgctgccatagccatacggccggccggaaggcaggataccccatcgctcgctgcacatgcatgtatgccgcatggggatacatgttcatcatcagcagcacagtggctctgtatcccccatcccaatccgatcttatataggaggaggaggag

SEQ ID NO: 12053 - DNA, 282 bp, Zea mays
  unsure (1)..(282): unsure at all n locations
cggacgcgtggcttggaagcaacaaggaagcagcgttgcgagcgcgtgacgcgtgacctgaaggtgacgcgggtgttctcgacgctggtggaggagatgaaggcgatcggcatcatagcggcgggcggcggcggcggcgaggcgtcgcagtgcacggacgtgatggcccccgtggcgcagtcggagcgcacccggtggtgctgctgatgggcggcgngatgggcgccggcaagagcacggtgctcgaggagctcaagcaggaggcattctggaccaacgcgg

SEQ ID NO: 12054 - DNA, 287 bp, Zea mays
gaaaattctctcagataagttgaataggatcgaaaaccctaatccgtctccctcctatcgcactcgcgtctctttcctattcgcgccgccgccgctgctgcaagcgccagctcgccgtcgtccgaatagtacactctaacgccgccatggggcgtatgcacagccgcgggaagggtatctcgtcgtcggcgctgccgtacaagaggacgcctcctacctggctgaagaccgccgcctccgacgtggaggagatgatcacaaaggcagcgaagaagggacagatgccg

SEQ ID NO: 12055 - DNA, 286 bp, Zea mays
cccacgcgtccgaaaagtgacggttcatggtatggctcttgggctgtttgtttcacgtacggcacttggtttggtgtgaagggactaattgctgctggtagaacatttgagagcagtcctgcaatcagaaaggcatgcggctttctgttatcaaaagagcttccttccggtggctggggagaaagctatttatcgtctcaagaccaggtttacaccaatctcaaaggcaaccgagctcatgcagcgaacactggttgggccatgctggcgctgattgatgcaggac

SEQ ID NO: 12056 - DNA, 287 bp, Zea mays
agaacaaggtcttcagccctgaggagatcagtgccatgattcttggcaagatgaaggatactgctgaggcgtaccttggcaagaagatcaacgatgctgtcgtcactgtccctgcatacttcaatgatgcgcagaggcaggcaaccaaggatgctggtgtcattgccggcctcaatgttgctaggatcatcaatgagccaactgctgctgctattgcctatggtttggacaagaacggtggcgagaagaacatccttgtctttgaccttggtggtggtacttttgat

SEQ ID NO: 12057 - DNA, 317 bp, Zea mays
cacctcggtgcggcgcgtcgttcggacacggagatacagcggcgattccggcgatggagtacgtgaaccccctcaccggcttccgcgtcgacggccgactgcccaacgagatgcggcaactcaagggcgaggtcggcgtcgttgcgcgcgcagacgggtcggcgctgttcgagatgggcaacaccagagtcatcgccgccgtctacggcccgcgagaggttcagaacaaaggtcagcaagtaaacagcaaggaggctttggttcgttgtgagtacaggatggcagagtttagtacaggagatcggaggagaaaaccg

SEQ ID NO: 12058 - DNA, 315 bp, Zea mays
agcaagcaagcagcgagtacatacatactaggcagccaggcagccatggcgcccaccgtgatgatggcctcgtcggccaccgccgtcgctccgttccaggggctcaagtccacgccagcctccccgtcgcccgccgctcctccagaagcctcggcaacgtcagcaacggcggaaggatccggtgcatgcaggtgtggccggcctacggcaacaagaagttcgagacgctgtcgtacctgccgccgctgtcgacggacgacctgctgaagcaggtggactacctgctgcgcaacggctggataccctgcctcgagt

SEQ ID NO: 12059 - DNA, 311 bp, Zea mays
cttagaggagaacattgatgatgagaaattgcgtgaactctttgctgagtatggcaatattacttcctgcaagttatgcgggattcgaatggtgtcagcagaggttctggatttgttgctttcaaatctgctgaagatgctaaccgagctcttacggagatgaatggcaaaatggttggaagcaagcccctttatgtagctcttgcgcacgtataagaagacagaaaggcaaagctacaggcacaattttcacaaatgcgtcctgttgcaatggcgccttcagtaggtcctcgcatgcccatgtttccacc

SEQ ID NO: 12060 - DNA, 309 bp, Zea mays
ggcagcgcagatgaaggcgttcttcgatgccactggtgggctctggagggagcagagccttgccggcaagcctgccggcgtcttcttctgcactggatcccagggtggtggccaggagacgacagcgttgacagcgatcacccagttgacgcaccacggcatggtgttcgtgcctgtgggctacaccttcggcgccaagctgttcggcatggaccaggttcagggcggcagctcctacggcgccggcacgttcgccgccgacggctcgaggtggccgagcgaggtggagctggagcacgccttccacca

SEQ ID NO: 12061 - DNA, 309 bp, Zea mays
gccagttctgggccgtatataccaaggtaaggagccaccacaatttgttgctcttttccagcccatggttatcttgaagggtggatcggatctggatacaagaagctcatagaatgaataggtgctatgggtgagacttatactactgaaggcatagctctaattcgagtatctgagacatctatctacaacaacaagactcttcaagtagatgcggtagcaacgtctttaagctcaacggagtctttcgtactgcaatctggaaatgctatgtttacatggtttggcaattctagcacatatgagcaa

SEQ ID NO: 12062 - DNA, 118 bp, Zea mays
acaacttgtatcgtcatacagctctgcagtctagctttagctgcaacatggtggctatacttgatgggcagccaaaattgatgggactgaaagatattcttcaggcatttcttgactt

SEQ ID NO: 12063 - DNA, 312 bp, Zea mays
  unsure (1)..(312): unsure at all n locations
cccacgcgtccgcgaattacgattcccaatccagcaaaccctaccagccttttgcaaactcagagagggacccgatggcacccaaggcggagaagaagccggcggcgaagaagcccgcagaggaggagcccgcggccccggcggagaaggcccccgctgggaagaagccgaagganatgaagcggctcccggcgggaaaatccgccggcaaggaaggcggtgttgacaagaaggggcggaagaaggccaagaagagcgtggagacgtacaagatctacatcttcaaggtgctgaagcaggtgcacccggaca

SEQ ID NO: 12064 - DNA, 303 bp, Zea mays
atcacaccagagcttaccaatgtggccagtatctggttcatggcgcttttcatctgcatctcagtgaccggcatcctggaaatgagatggagcggcgtggccatcgacgactggtggagaaacgagcagttctgggtcatccgggggcgtttccgcgcacctcttcgcggtgttccaaggccttctcaaggtcctcgctggcatcgacacgagcttcacggtgacatccaagggcggggacgacgaggagttctcggagctgtacacgttcaaatggacaccctgttgatacaccgaccacct

SEQ ID NO: 12065 - DNA, 307 bp, Zea mays
aagttaggctagggttcgaccagctagcggaaatggtggccttcaggttccatcagtaccaggtggtggggcgcgcgctgccgacgcccggcgatgagcaccccaagatctaccgcatgaagctctgggccaccaacgaggtccgcgccaagagcaagttctggtacttcttgaggaagttgaagaaggttaagaagagcaacggccaggtcctggccatcaacgagatctttgagcgtaacccgacgacaatcaagaactacggcatctggctgcgctaccagagcagaaccggctaccacaacat

SEQ ID NO: 12066 - DNA, 307 bp, Zea mays
atatggatcacttggtctgtttaacaaatacaatgagataccatcagtcatggctattaagattgcctgctgcttcttgtctgtaattttgatatgggaaattccgggggtattcgaactattgtgggccccctttacgtttctactaggttataaagatccatcaccatccaaggcacacttacccctgctacatgaatggcatttccgatctggcctcgatcgatacatatggattattggaatgatttatgcttacttccatcctaatgttgaaagatggatggagaagctggaagaatctgag

SEQ ID NO: 12067 - DNA, 300 bp, Zea mays
gtccgtgatcatcctggaatgattcaggttttccttggtcaaagtggtggccatgatgtggaaggaaatgagctgcctcgattggtttatgtttcaagagaaaaacggccaggctacaaccatcacaagaaggctggtgctatgaatgcattggtccgagtctctgctgtactaactaatgctccttatttgctgaacttggattgtgatcactatatcaataatagtaaggctataaaggagcaatgtgttttatgatggatctttgcttggaaagaaagtttgctatgtgcagtttcc

SEQ ID NO: 12068 - DNA, 313 bp, Zea mays
gaactactccggacgggaagcacctccaatcccctcgcccccacggaccctcgccgccggggaagcgccgctcgctcaggaggacagccatggcgccggagccggaggatgatcttatgaacgagaagaatccccgcccgctcgacgaggacgacatcgcgctcctcaaaacctatgggcttgggccgtactcgactagcattaagaaggtcgagaaggagatcaaggaaatggccaagaaaatcaatgacctttgtggtataaaggagtctgatacagggttggctccacctagccagtgggatttggtttc

SEQ ID NO: 12069 - DNA, 307 bp, Zea mays
ctctaggttttttgattttagccgccgccgctgctcatctcacatccctcgagaagacgcctgctcctcgccgatcgatacgatggccgtcttctccgacctccacaccgccgacggcctcaagtccctcgaggctcacctcgccggcaaaacctatgtgtctggtgactccattactaaggatgacattaaggtcttcgccgcggtgccgtcgaagcctggcgctgagtttcctaatgccgcccgctggtacgagaccgtctctgcggctgtagcctcaagattccctggtaaggctgttggtgta

SEQ ID NO: 12070 - DNA, 114 bp, Zea mays
gtcggtgctgtggacggagagcggcgacgtgggcaagggcttccgctgcatccgcatggtgaacaacatccgcctcaacttcgacgccttccacggcgacaagggccacggcgg

SEQ ID NO: 12071 - DNA, 303 bp, Zea mays
cccacgcgtccgggcgaaaggcacgcgccgccgctgccgcgcgagcctctccgtccccatcgccgcgcagatggatccgtcgtcggagcccctgtacgcgcaggtcgagccgtacgactccgggttcctcaaggtctccgatgtccacaccatctactacgagcagaccgggaacccgcagggccatgcggcggtgtttctccacggcggtcccggagccggcacgtcgcccggcaacaggaggttctttgacccgcagttctacaggatcgttctgtttgaccagaggggtgcaggcagaag

SEQ ID NO: 12072 - DNA, 303 bp, Zea mays
ggcaacgagagtcaggatggaacaatcgagttaaacagaggtcctagatctggccgtttcaagaaccagaaattgtacggccatactgtcactattgctgtgaaagggcagagccttccttctggtgaaagcaaggatgatagtgccgtgcctgatagagcacagttcaatagagacgatttccctgttcagtatgatgctgcaaagttctttgtcattaaatcgtacagtgaggatgacatccacaagagtgtaaaatacaatgtgtgggcaagcacaaccaatggaaacaagaagctcgat

SEQ ID NO: 12073 - DNA, 301 bp, Zea mays
cccaaacaagcaaccaccgcctccccgatctcgtcgagaggaagcccaatcccgaaaccgccgccctattccaatggcgcccaaggccgagaagaagcccgccgccaagaagcctgcggaggaggagccggcggcgtagaaggccacggcggggaagaagcccaaggccgagaagcggctccccgcgggcaagtccgcaggcaaggagggtggcgagaagaaggggaagaagaaggcaaagaagtcggtggagacgtacaagatctacatcttcaaggtgctgaagcaggtgcacccggac

SEQ ID NO: 12074 - DNA, 306 bp, Zea mays
cttccagggtctcctgaaggtgcttgctggtatcgacacgagcttcactgtcacctctaaggccactgacgaagaaggtgattttgccgagctctacatgttcaagtggacaacgcttctgatcccaccaaccactaattttgatcatcaacctggtcggcgtggtcgctggcatttcctacgcaatcaatagcggttaccagtcatggggacctcttttcgggaagctcttctttgcgttctgggtgattgtccacctgtaccccttcctcaagggcctcatggggaagcagaaccgcacgccga

SEQ ID NO: 12075 - DNA, 308 bp, Zea mays
cccacgcgtccgtcggcgacgactgggtggccgtagctgcctccatacgcctggtgccctggtcttcttcgggccattcgccggccgcgagcaccaccaagtacgcccacctcatgaaggctagagcttcccaggtagagaaacagtttctccgtactctagcagatggcaaggataaagcctaagcaattgctaatccaaagcaaaacaaagaaggctccatctcgaatcagctactctactatcatcacatggaacttgattgtcatattggttgtgctatctctctatgctacctacagccattg

SEQ ID NO: 12076 - DNA, 302 bp, Zea mays
atcaccgccgcgacgacgatggcagcctcgctccaagccgcggccaccctgatgcagccggccaagatcggcggccgggcgccctttgcctcgctgccgtcccgcccgtcgtcgcaactcgcctgcagggcgttcggcgtcgacgccggcgccgccaggatcacgtgctccctgcaggacgtcgccagcaggtgcgtcgacgccgcgaagtcgccggcttcgcgctcgccacctcggcgctcctcgtctcgggcgcgacgcggagggcacgcccaagaggctgacctacgacgagatccaga

SEQ ID NO: 12077 - DNA, 300 bp, Zea mays
ggaccggggtggccgagatgctcaacaaaacgagttgattgtgaagcgctatatgtccaaaggagatctgtatgtgcatgccgagttgcatggagcttccagtactataatcaagaatcacaaacctgacactcctattccaccattaacattaaaccaagcaggatgcttcactgtttgccacagcaaagcatgggattcaaaaattgttacaagtgcttggtgggtgtatccacatcaagttagcaagacagctcctactggcgagtaccttactgttggtagttttatgatccgtgg

SEQ ID NO: 12078 - DNA, 298 bp, Zea mays
gaaagtgggtcacccaaggtcctgttgatgtagacattggtgccaatccatccgccgagggtggtgaggacgaaagcgttgatgacacagccgtgaaggtggttgatattgttgacacattccgtctacaggagcaacctccttttgacaagaaatcatttgtttcttacattaaaaaatacatcaagaatctcactgctgtgttggagccagagaaagcggatgagttcaaaaagggtgtcgagggtgcaacctagtttctccttagcaagctgaaggaccttcaattttttgttgg

SEQ ID NO: 12079 - DNA, 296 bp, Zea mays
agtgttccagctctccaggaagagctacaaaccaccaaagaagccactcactgaaaaggagattgatgtgctatgtgatgagtgggagccagagccactatgccctccaatcaatgagggggccaaaatagatgctccaacattggaaagtgccgctggaccacatacgaatgttgatggtaaagaagttgtgaactttgcatcagcaaactacctcggtttaattggcaacgaaaagattattgattcttgcatcagttcattggagaaatatggtgttggttcttgtggtccac

SEQ ID NO: 12080 - DNA, 299 bp, Zea mays
ctctctctaccgtccgataccccaagcaccagcgcggcggcggcgaccatggctgtcggaaagaacaagaggatctccaagggaaagaagggtggcaagaaaaagaccgtcgaccctttctctaagaaggattggtatgacatcaaggcaccgtcggtgttcagtgtgcgcaacatcgggaagactctcgtatccaggacacagggtaccaggattgcttctgagggtctgaagcacagagtctttgaggtttgcctagctgatcttcagggcgacgaggatcaagcttacaggaaaat

SEQ ID NO: 12081 - DNA, 296 bp, Zea mays
atcacaaccacaacacctcgcctcgtcagatcgacctggaagaagggagcagaagccaaccggctcgtccgcccgttgcctgtcgtcgctatggccgccgtggaggtgtgcgtgaaggccgccgcgggtaacccgacacgctcggcgattgcccgttctcgcagagggtgctgctcacgctggaggagaagaaggtcccgtacgaggtgaagctcgtcgacctcggcaacaagcccgaatggtttctgaacatcagcccagagggtaaggtgcctttgttcaacggtggagatggc

SEQ ID NO: 12082 - DNA, 296 bp, Zea mays
ctgatggtgaggacatccagcctcttgtctgcgacaatggcactggaatggtcaaggctggttttgctggcgatgatgcaccaagggcggttttccctagcattgttggccgtcctcgccacactggtgtcatggtagggatgggacagaaggacgcatatgttggcgatgaggcacagtccaagagaggtattcttacgctcaagtacccgattgagcacggtattgtgagcaactgggatgacatggagaaaatctggcatcatactttctacaacgagcttcgtgttgcccca

SEQ ID NO: 12083 - DNA, 238 bp, Zea mays
gctcccatatccgctcccctacctctccagcatctcccgtctccgtcgtctcgtctctgctcctcacctcgccgccagccatgggcaagatcaagatcggaatcaacggtttcggaaagatcggcaggctcgtggccagggatcgcctgcagagcgaggatgtcgagctcgtccgcgtcaacgaccccttcaataacaaggaataacatgactacaatgttccagtacgacaacgtgc

SEQ ID NO: 12084 - DNA, 325 bp, Zea mays
cggacgcgtgggcggacgcgtgggcattcacaaaaagggtggaactgttctcggatcaactcgaggaggtcatgacaccgtgaagatagtatgcagtaatcaagatcgtgagcctaatcaagtctaagtaattggtggtgacggtaatcagaggggtgctggagtgatattcgaagagttagaagacgcgggctccaagtttctgttgctggcaatccaaagactaatgataatgacatccctgtaattgacgagtcatttggtttcgacacagcagttgaggaagctcaacgtgcaataaatgctgctcatgtggaagctgtaa

SEQ ID NO: 12085 - DNA, 326 bp, Zea mays
cccacgcgtccgcgccggggcctcaggggcgactcggtggtgctcatgggcaagaacacgctcatcaggcgctgcatcaaggtctacgccgagaagaccggcaaccacacctttgacccgctcatggacctgctcgtcggcaacgttggcctcatcttcaccaagggagacctcaaggaggtgcgcgaggaggtcgccaagtacaaggttggggctcctgctcgtgttggtctggttgctcctgttgatgttgtcgtgccccctggcaacactgggctggatcctcccagacctctttcttccaggtgcttaacatccccaccaag

SEQ ID NO: 12086 - DNA, 324 bp, Zea mays
ggaagtctgagattgagtactacgccatgctggccaaagttagcgtgcaccatttccacggaaacaatgttgatcttggcactgcctgcggcaagtactacagggtgtgctgcctcagtatcatcgacccaggtgactcggacatcatcagtaccacccctggcacccagtgagccagccccggcacccattgcagctgcttcggctttctcaagatgagatgagatgtagcgctccggccctaatgtccgtttcccttttttaacctttagctatgtaattttgctaccatgtgtccatctaacatactgatagtacctctta

SEQ ID NO: 12087 - DNA, 324 bp, Zea mays
aagaaaaatgctgttgtttccgaggagaagaagaggctcgtcgcttaccatgaggctggccatgcccttgtcggcgccctcatgccagagtatgatccagtagccaagatttccatcatccctcgtggccaggctggtggactcacattctttgctccaagcgaagaaaggctagaatctggattgtacagcaggagctatcttgagaaccaaatggctgtagcccttggtggcagggttgctgaggaggtgatctttggccaagacaacgtgacaacaggagcttccaacgacttcatgcaagtgtcgcgtgtcgcaaagcag

SEQ ID NO: 12088 - DNA, 334 bp, Zea mays
ctggcatccgcagagagcttgttccgtccaggcaaccaaaaagcaagttgccccgccgcgcagaggaagaagagagcagaggaggatggctcgtacgaagcagaccgcccgcaagtccacgggaggcaaggccccccgcaagcagctcgccaccaaggcggcgaggaagtcggcgccgacgaccggcggcgtgaagaagccccacaggtacaggcccggaaccgtggcgctgcgcgagatccgcaagtaccagaagagcacggagctgctgatccgcaagcatgccttccagcgcctggtgcgcgagatcgcgcaggacttcaagacagacctc

SEQ ID NO: 12089 - DNA, 304 bp, Zea mays
gggccgccgccgcggatggccacaagcctggccccgtgccattcttcgccgcggggattagttcggtgcttcaccccaagaacccatttgctccaacattgcattttaactaccgttactttgagacggatgcaccaaaagatgcacctggtgcaccaagacaatggtggttcggcggtggtactgacttgactccttcatacatcattgaagaggacgtgaagcatttccattctgttcaaaagcaagcatgtgataaatttgatccaagttttcacccaagattcaaaaaatggtgtgatga

SEQ ID NO: 12090 - DNA, 324 bp, Zea mays
caccacccacatctcagttcaccccggcgtcgtcctcttcccccggcgctactctcccgctccacgttccaaaggaaagatggcgtcccatattgttggataccctcgcatgggccccaagagagagctcaagtttgccttggagtctttctgggatgggaagagcagcgccgatgatttagagaaagttgcctctgacctcaggtctagcatctggaagcaaatgtcagaagctgggatcaagtacattcccagcaacaccttctcgtactatgaccaggtccttgataccacggccatgcttggtgctgtcccagagcgcta

SEQ ID NO: 12091 - DNA, 324 bp, Zea mays
gttctagatcgcgagcagccgcccttttttttttttttttttttttttataaacgcgatacatatacattatacaatgcggccaaagtagggcaattaataaatagatagacgaacccaacgactgatgaacaacagaacgaatctgaacgcaaggtacaaactactagtttattcgccaagatacatagactggcaaactcattttcctagtacctactgatcaacacgaaatcgtcatcatctagaacctgggcctccttctgccccacgaaattttcccgtccaattgactccacaatccggacgaactcggccctctttt

SEQ ID NO: 12092 - DNA, 322 bp, Zea mays
gtcttgttggtggtcgtgctcatctcgttcgccccccttattaccactagtgcagcagcaggtgtcaacgccacgagatctgctggtaggcagcagaagcagaagcagaagccgctggcgcctgccctcatcgtgttcggcgactccatcgtggaccccggcaacaacaacgacatccacaccatcatcaaggccgacttcccgccctacggcaccgacttccagaaccacagagccacgggaaggttctgcaacggcaggataccaaccgacttcatcgcctcccagctcggcatcaaggagcttctgccgccctacctca

SEQ ID NO: 12093 - DNA, 318 bp, Zea mays
gaacaagtggatccctggatgggcaacaaaggttggttatcaaaggaagatttgcaccaaaaaatttcgaagcgatacttaggagatatatcaatgaatatgtcatatgcaatggttgcaagaatccggataccattctttctaaagagaacaggttgttcttcctccgatgcgagcagtgtggttcgtcgaggtctgttgctcccatcaaggctggattcgttgcccaagtgggccgtcgtaaggctggatcttaagctacctactacttgcctgaagtcgcttcccgatgaagacaatgcaaactagtttgctggt

SEQ ID NO: 12094 - DNA, 137 bp, Zea mays
gttggcttctcctccccctccggttcgggttcgggttcgtgaggttctccggggttcggtttcgtgggtgatcggatcgagatggcggcgtcggatgttgagtagcgctgcttcgtcggcagcctcgcctggtccac

SEQ ID NO: 12095 - DNA, 321 bp, Zea mays
gcggcgaaaagagggaaaagaaagccagcgagacggaaaggggaagatgagccggagcctggggatcccggtgaagttgctccatgaggcagcgggtcacgtggtgacggtggagctcaagaccggcgaagtgtaccgggggtcattggtcgagtgcgaggataactggaattgccagctcgagaacataaccttcactgccaaggatgggaaggtttcgcagctggagcacgtcttcatcagaggaagcagagtgagatttatgattatacctgatatgctcaagaacgctcccatgttcaagcgcttggaagcgaggat

SEQ ID NO: 12096 - DNA, 318 bp, Zea mays
ggaacggagagctggaaaaggcaggaaagacccggcttttgaccccaagtaccctgttgagggcaatggcggccacctccgaggaagcaatcaagcagttctcggcgctcatggagcagctagaggagccgctaaagagcacattccagaatgtgcatcaaggaaatctgagagggactttgatgcgttttctgaaggctagagaatggagtgtgcctaaagcttataaaatgctaatggattgcttaaactggagagtacagaatgagattgacatcgtgttagctaaacccattctgccatctgatatatatagag

SEQ ID NO: 12097 - DNA, 314 bp, Zea mays
aggtggtgaagaaggccgcggcggggcgtcgcggcgggggcggccccaagaagaagccggtctctcgctccgtgaaggccggcctccagttccccgtatgccgtatcggccgctacctcaagcagggtcgctactcccagcgtgtcggcatcggcgcccccgtctacctcgctgccgtcctcgagtacctcgccgccgagctcctcgagttggcggggaacgcagcgcgggacaacaagaagaaccggatcatcccgcggcacgtactgctggcgatccgcaacgacgaggagctcgggaagctactggccggc

SEQ ID NO: 12098 - DNA, 317 bp, Zea mays
cacacacagacaagtggtttccaaagccaagtgtgtgtactagcaaccagctagctcgggcggcagcaggcagccatcatgtcggaggagaagcaccaccacttcttcaaccaccacaagaaggacgaggagcagcccgccggcgagtacgggtactccgagaccgaggtggtcaccgccaccggcgagggcgagtacgagaggtacaagaaggaggagaaggagcacaagcacaagcagcacctcggcgaggccggcgccatcgccgccggcgccttcgcactctacgagaagcacgaggcgaagaaggaccccga

SEQ ID NO: 12099 - DNA, 315 bp, Zea mays
ccttcttatccccacctccctcgcggatcactcgccgccgccgccggctgcagccatcgccgtgatgctgtccctgtcgagggcgatcgggaggcggctcttctcgtccgccgaggccgcgtcgacggctgcggtgaggacggcgcagaacccgctcgaggagttcttcgaggtcgagcggacaccgaggagggcaagcctcctccccactacggtcgcagctggaaggcttctgaactgcgactaaaatcttgggatgaccttcagaaattgtggtatgttcttctaaaggaaaagaacatgctaatgacacag

SEQ ID NO: 12100 - DNA, 315 bp, Zea mays
gcaagagcgacagacagagagagagagagaccgacgcgccggcagatcccaagttcaccggatacggggaagagggcgaccgaagcggcgatgggtttcatcatggacttcgcggagaatctgatcctccgtctgatggaggacccggacaagcgcgaccaggttcggcgggagcatgtctacaagatgaaggagcggtgcgagcgcactaaggcggcgtggagcctccctctgcgcccctacggcttctggaccttcgaccgcttcaactcgcagctctcctgggatgcccagatcagccaggccgccggccgt

SEQ ID NO: 12101 - DNA, 310 bp, Zea mays
caagacttatgatcttaatttcaaggaggagaacaacgatggctcaaacaaaatttcaggcgacagctgaaagacctgtacaagtcctttgtttctgagtaccctatcgagtcgatcgaagacccatttgatcaggatgactggagcacttatgccaaactcactgatgagattggacagaaagtgcagattgtaggagatgatcttctcgttaccaaccccaccagggtcgccaaggccatcaatgagaagacctgcaatgctctcctcttgaaggtgaaccaaatcgggtctgtgaccgagagtatcg

SEQ ID NO: 12102 - DNA, 299 bp, Zea mays
acctacaccaacctcaacaggcttgtgtcccaggtcatctcatccctgactgcttccctgaggttcgatggtgctctgaacgttgatgtgaacgagttccagaccaacctggtgccctaccctaggatccacttcatgctttcgtcctacgctccagtcatttctgctgagaaggcctaccacgagcagctgtccgtggccgaaatcaccaacagcgccttcgagccatcctccatgatggccaagtgcgacccccgccatggcaagtacatggcatgctgcctcatgtaccgtggtga

SEQ ID NO: 12103 - DNA, 290 bp, Zea mays
ggaccgtggtcaggaagcaattcgagtgattgacattattctgaggcagcactcagctaagcagggttgcctattagtaatgcaatcgttcttccacaataatccttccaattttgttgacctgggtggtggtgtagtgggatgtagagggttccattctagttttcgtgcaacccagactggactttcactcaatatcgatgtgtccaccacaatgatagtgaaacctggtcctgtcattgactttctgattgccaatcagaaagttagtgatccaagcatgattgatt

SEQ ID NO: 12104 - DNA, 292 bp, Zea mays
ctagaagattgtccgcaacaagcgcaaatgtgttactgtggtgaagggacttgaattgtttggtgtaaagctgagtgatgcttcaaagaagcttgggaagaagtttgcaaccggagcttctgttgttaagggcccgaccgagaaggaacagattgacgtgcaaggggacatatcatatgatattgtggagttcattacagatacatggcctgatgtacctgagtcggccattttcttcattgaagatggaaggaaggttcctgccgcttgatgtcattatgaggcgcaggac

SEQ ID NO: 12105 - DNA, 291 bp, Zea mays
cccacgcgtccgccggtggccgccggcgcgggaccgtcgcctgcgctgccacgcccgtcccccggaggtcgctgctcctctccaccgctgccgcagtgcggcgctgcagccggatcaggtggctggaacgaggccgttgatgctgaccaggagcgaggccagcgccgtggcaaagcccatgaccttggccgacgaggcagtctcgtgggcgaagaaagacaaccgccgcctcctccacgtcgtctaccgggtcggcgacctctacaagacgatcaagttctacaccgagtg

SEQ ID NO: 12106 - DNA, 288 bp, Zea mays
ggacctggccgctgtggatcttgtgaacgagactaagcttgacagcgagattaagtcttggcttgcttttgctgcccagaaggttgttgaggttgatgctcttgctaaggcattggctggtcaaaaggatgaggcttacttcgcagcaaatgctgcagctcaggcctcgaggaaatcctcaccccgtgtgaccaatgaagaagtccagaaggctgctgctgctctcaagggctctgaccaccgccgtgcgaccaacgttagtggtagattggatgcccagcagaagaa

SEQ ID NO: 12107 - DNA, 292 bp, Zea mays
gcttccgagatctctccccacctcccggtccgctagcagatagcgggggccagagagatcgagatccggaggcgctacgccacccatcagcgtctgcggcaatggcgggcacggtgacggtcccggggtcgtcgaaaccctccacgccgctgctcaaggacgagctcgacatcgtgatcccgacgatccgcaacctcgacttcctcgagatgtggaggcccttcttccagccctaccacctcatcatcgtgcaggacggcgacccgaccaagaccatcaaggtccccgaggg

SEQ ID NO: 12108 - DNA, 299 bp, Zea mays
atcggcatcgatctcggcacgacgtactcttgcgtcggcgtctggcagcacgaccgtgtcgagatcatcgccaacgaccagggtaaccgcaccacaccctcgtacgtcgccttcaccgactccgagcgcctcatcggagatgcggccaagaaccaggtcgccatgaaccccatcaacaccgtctttgatgccaagcgtctcattggcaggaggtttagtgatgcctctgtccagagtgatattaagctgtggcccttcaaggtcattccagggcccggtgagaagccaatgatagttgt

SEQ ID NO: 12109 - DNA, 294 bp, Zea mays
gccttcccaagagaagcctgtcctccaggattcgtaaaccctccctgctggtaattcgtaggatatgagcttactggaaaaaacaagggcaacggcgcttcatgtactacgaattaccagcagggagcgtttacgagtcctgaagccttcccaagagaagcctgtcctccaggatttgtgtctggagagaaccagggtaacgacactccatggtatatgagcagcaaacagatggcgtttacgagtcctacgaccaaccctagagtaggtccgcctaggtatggacaggaaaac

SEQ ID NO: 12110 - DNA, 289 bp, Zea mays
ggctggtcaaaaggatgaggcttacttcgcagcaaatgctgctgctcaggcctcgaggaaatcctcaccccgtgtgaccaatgaagaagtccagaaggctgctgctgctctcaagggctctgaccaccgccgtgggaccaacgttagtgctagattggatgcccagcagaagaagcttaacctccccatccttcccaccactacaatcggttcgttcccacaaaccgttgagctcaggagggtccgccgtgagtacaaggcaaaaaagatctctgaggaggaatacgtc

SEQ ID NO: 12111 - DNA, 288 bp, Zea mays
gacatagcgtccgcgacctggcgaagggttcaccaagccaacatccaggcggccaaggctgtcgctgacatcatacgcactacattgggtcccagatccatgcagcaaatgcttctggatgctagtggaggtattgtggttactaatgatggtaatgccattttgagggaaatagacattgcacaccctgctgccaagtctatgatcgaactaagtcgtacacaggatgaagaagttggtgatggcactacatctgtcattgttctagctggagagatgctacatgtt

SEQ ID NO: 12112 - DNA, 286 bp, Zea mays
cagacctggcgtgcccgaccccaacgcccccggtcgagccaccgccgccgcctcctgctgctaccccacccccttcgtccagagccaagtgcccgctgaacgcgctcaagttcggcgtgtgcgccgatgtgctcggcctcgtcaaaggcgaggttggcaaggtgcctgccgagccatgctgtaccctcatcaaaggccttgcggacttcgaggccgccgtctgcctctgcacggccatcaaggccaacgtgctcggcgtcgtcgtcgatgtccccatcaagctcag

SEQ ID NO: 12113 - DNA, 288 bp, Zea mays
gccgctgctggtgagcgcaatcagaaggaggaaggtcgagaagccacccgtctggctcatgaggcaggccgggaggtacatgaagagctaccaattgctctgcgagcggtatccttgttccgtgaaagatcagaaaatgtcgacctagttgttgagatctctttgcaaccatggaaggttttcaagcctgatggagtcatcttgttctcggacatccttactccacttcctgggatgaacataccttttgacattgtgaagggaaaaggtccagtgatctatgatcca

SEQ ID NO: 12114 - DNA, 298 bp, Zea mays
cccacgcgtccgctaagcttgacagcgagattaagtcttggcttgcttttgctgcccagaaggttgttgaggttgatgctcttgctaaggcattggctggtcaaaaggatgaggcttacttcgcagcaaatgctgcagctcaggcctcgaggaaatcctcaccccgtgtgaccaatgaagaagtccagaaggctgctgctgctctcaagggctctgaccaccgccgtgcgaccaacgttagtgctagattggatgcccagcagaagaagcttaacctccccatccttcccaccactac

SEQ ID NO: 12115 - DNA, 290 bp, Zea mays
cgagggactccgcagctccttcgaccaggccggcgtcgtcgaggtcgccgaggttatttacaacaaagagactggccagagccgtgggtttggctttgttaccatgagcactattgaggaagctgataaagccattgagatgttcaaccgctatgacattagtgggaggcttctgaatgtaaacagggcatctcctaggggcactcgcatggaaaggcctccgagacaatttgcgcctgctttcagagcttatgttggcaacttgccatggcaagctgatgactctaggc

SEQ ID NO: 12116 - DNA, 290 bp, Zea mays
  unsure (1)..(290): unsure at all n locations
cggacgcgtggcggnacgcgttggcgactgagacgcgatccccttctcctgcactgccgtcctccgtcgctgcgatgcctcggtataactgtgactactgcgacacctacctgacccatgactcgccatctgtccggaaacaacataatgctggatacaaacacaaggcgaatgttcgaacctactatcagcaatttgaggagcagcaaactcaaagtttaattgatcaaagaatcaaggagcatcttggacaagctgcagctttccaagcaggtgcccctttcaaccaa

SEQ ID NO: 12117 - DNA, 286 bp, Zea mays
gcttccagagccccccgccgccgctgcgccctcctctcggtcctgccgtccgtcgaggtaaaaggacagcatggtgagggtcagcgtgctcaatgatgctctcaagtccatgtacaatgctgaaaagatagggaaacgtcaggtcatgatcaggccgtcatccaaggtgatcatcaagttcctgacggtcatgcagcgccatggttacattggcgagttcgagtacgtggatgaccacagagctgggaagatcgtggtggagctgaatggaagactgaataaatgt

SEQ ID NO: 12118 - DNA, 285 bp, Zea mays
gagtttttgaaatgtctacacatctacagccaagagattatcacgagaagtgaactgaagaacttggtgaatgatatactccagcattatccagatcttatggaagggtttaatgaattcttggaacattgtgaaaatatagatggatttcttgctggtgtcttcaacaaacgcccaacaacaaggattgttaaaactgaggataaagaaaaggatagatcgggacacggaggacagggatagagatcgggaaaaggaaagagagaaggaacgagaaagactcga

SEQ ID NO: 12119 - DNA, 283 bp, Zea mays
cgcggtctgctcgttcgatctgtgcagcagatctgaggtcccgggcgaccgtgaagcagcttcaatcgtcggcatggcgctcgtattgcatagtggggctggaaacaagaatgccttcaaagcacttattgctgcagaatacagtgggatcaaggttgagttgaccaaggattttgagatgggtgtctccaacaagacccctgagtttcttaagatgaacccccttgggaaggttcctgttctggagactcctgatggccctgtttttgagagtaatgctatc

SEQ ID NO: 12120 - DNA, 285 bp, Zea mays
cagctcccatatccgctcccctacctctccagcatctcccgtctccgtcgtctcgtctctgctcctcacctcgccgccagccatgggcaagatcaagatcggaatcaacggtttcggaaggatcggcaggctcgtggccagggtcgccctgcagagcgaggatgtcgagctcgtcgccgtcaacgaccccttcatcaccacggattacatgacctacatgttcaagtacgacaccgtgcacggccaatggaagcacagcgacatcaccctcaaggactccaagac

SEQ ID NO: 12121 - DNA, 284 bp, Zea mays
atttttgtatgatggtgggctttgtcaggatggtaaagtcattggcatcactcagcctcggagagttgcagctgttacagtagcaaagcgtgtagcgaggaatgcaatgaccatattggcaaaaaggttggatactccatcagatttgatgattccacatccaatgcaacaaggattaaatacatgactgatggtttgcttctgagggaagcacttttggatccactcttatctaagtacagtgttatagttgttgatgaggctcatgaaagaactgttcatac

SEQ ID NO: 12122 - DNA, 306 bp, Zea mays
gtgcccaagtccggtttcaacctcatgttggacagtttttagccgcagctgctgaaaacgtggtttccatatttgacattgagacacatgggaaaaaatacactctacagggccataacactgatgtgcagtcagtgtgctgggacaacaatggggaatatattgcatctgtcagtcaggacctagttaaggtttggtcaatgtcaactggggattgcatttatgagcttagttccaatggaaacaagttccattcttgcgtgttccacccgagctattccaatctcttggttattggaggctacc

SEQ ID NO: 12123 - DNA, 307 bp, Zea mays
ggtgttctttatgttgatgaaataaatctattggatgatggcataagcaatctacttctgaatgtcttgacggagggagttaacattgtggaaagagagggcattagctttcgccatccctgcaaaccacttctaattgctacttacaatccagaggaaggatctgtacgtgaacacttgcttgatcgtattgcagttaatttaagtgctgatcttccaatgagttttgatgaccgcgttgaagcagtggatattgcaacacggtttcaggagtctaggcaagaagttttcaaattggtggaagaaa

SEQ ID NO: 12124 - DNA, 289 bp, Zea mays
gccgtgcgctcgaacgaactccacacgaaattatccgcgtaaagttggggagcagcgaacccgtagcgcgcgccccggatccctccacggggggcaatggcctcgtcggcgttcctgcccgagctgggcacgcaggtggtggtgcccgtcgcggccgtggtaggcatcgcgttcgcggtgctgcagtgggtgctggtctccaaggtgaagctctcccccgagccgcgccgcggagacggctccgccgggaagagcggcgccggcgccggcgcagcgtagtacctcatcg

SEQ ID NO: 12125 - DNA, 298 bp, Zea mays
ctcaagtctacacaactcggcttattttccttataattcgcaccagattacagttcaaaagcctccaacaattccaaacaagagcaaataaaagataaggctcggcctcaacatcaaaacttcctatcgcacacctggcgctgtatggtttggtgatcaggaaagaacagccatcacgtcagacgccctgagcacgatgtactcaccgtcctcgcccttgaactcacttcccgcatacttggaatacatcacgttgcttccaggagtgatcgacagaggattcctgctgccgtcctcg

SEQ ID NO: 12126 - DNA, 305 bp, Zea mays
acaattttcaacaatgttggaggttacgagggattatttcttggtggcccaaggccaacctgggtttttgtttgtcgacagcgatttcgggtgcatccacagttatgcgacggtccaattgtagcctttactgttctccacaatgtcaattgttgccgtggccttatttatgtgacatctcagggttttctgaagatatgtcagttgccatctgcatataactatgacaactactggcctgttcaaaaggtccccttgcatggcactccacatcaggtcacatattatggagagcagtcacttta

SEQ ID NO: 12127 - DNA, 304 bp, Zea mays
cacctctcaatctttccgatcgtcttcaccaggttcttcggtgggctcttggttcaattgaaattttcttcagcaaccactgccctctctggtatgggtatggtggtggactaaagttcctggaaaggttttcgtacattaactccatcgtatacccttggacatctatcccgctcttggcctattgcacattgcctgccatctgcttgctgacagggaaatttatcacgccagagcttaacaatgttgccagcctgtggttcatgtcacttttcatctgcatttttgctacgagcatcctgga

SEQ ID NO: 12128 - DNA, 305 bp, Zea mays
gactcctcgtggcctccgcacactcaactctgtttgggcccaacatcttagcgaagaagtgaggagaaggttctacaagaactggtgcaagagcaagaagaaggctttcacaaagtatgctctcaaatatgaaaatgatgctggcaagaaggaaattcagctgcagcttgagaagatgaagaaatatgcttctgttatccgtgtcattgctcatacccagattaggaagatgaagggtttgaagcagaagaaggctcacctgatggagattcaggtcaatggtggtaccattgctgacaaggtgg

SEQ ID NO: 12129 - DNA, 305 bp, Zea mays
cccacgcgtccggcggcgccgtcgacgggccgatgatgcacacacctatggcggcatgtccaataccttcaagctgctaatcgtcctcggcttacttgtctgctccattgcgtttgctgccatggcgatcttgaaggcccggtcactgaagaaagccagcgaggcacgcgcttggaggctcactgcgttccagcgcctcgagttcacctgcgacgacgtgctagacagtctgaaggaggagaacatcatcggcaaaggtggagccgggatcgtgtacaaggggacgatgccggacggtgagcatg

SEQ ID NO: 12130 - DNA, 302 bp, Zea mays
ggacgcggcatcagccaagtgtaaagagtgcgaagaagcagtagcaaaaggattccattctcgtgttcttggagtggtccatcgatcgagctccgtgagagagatagcaagcaatggcgacagcagggaaggtgatcaagtgcagagccgccgtggcgtgggaggccggcaagccgctgtccatcgaggaggtggaggtggcgccgccgcaggccatggaggtgcgtatcaagatcctctacaccgcgctctgccacaccgacgtctacttctgggaggccaaggggcaaaccccggtgttc

SEQ ID NO: 12131 - DNA, 305 bp, Zea mays
ggcaatgcttcagcacttcctgaaccttctgcagtttctgcattaccacagctgcaagagctttacctaagacgaatgaaactccatgaatttcctaatggtttgctgggcctaaaactgcttaggattcttgacctgagtcagaatcaccttacaactgtgccggagggcatcaagaatttcactgcactcattgagcttgatctgtctgacaacaatataacagcactcccagcggactggagttgcttgaagctaacctgcaagtgctgaaactggatggaaatccgctaagaagcataaga

SEQ ID NO: 12132 - DNA, 308 bp, Zea mays
ctattgataatgacatccctgtaattgacaagtcatttggtttcgacacagcagttgaggaggctcaacgtgcaataaatgctgctcatgtggaagctgtaagtgctgagaatggtataggtcttgtcaagctaatgggccggcacagtggttttatcgcacattatgctaccctcgctagcagggacgtggattgctgcttgatcccagaatcaccattctatctggaaggtgaaggcggactttttagatatatagaaagacgtttgaaggacaatggtcatatggttatcgttgtcgcggagggt

SEQ ID NO: 12133 - DNA, 303 bp, Zea mays
gaaagatctaccagtttgtgagttggcagacaagatcagggaggaaatcatggagttgtttcacaggaagaggaggataggacagagactgcaaggtcggatactgccatctgtggttcatatccttcatgctaggactagaggtttaggacacttgacagtgaagaaagtcgacaattatgtcgcagaggtgagggataataatcatgtgcattctaagcacatagtgaatgttgatttgagacaatgttcatgcaacgaatggcagcatacagggaaaccatgtcaccacgcactttgttt

SEQ ID NO: 12134 - DNA, 302 bp, Zea mays
caacgaagcaacagttgtacgtcatggcgctcgagcccctccgccatgggctggtgtcgctgctcgtgctgctgctgctgctggttcacgcggccagcacggcgcggcgcgcgacttgcacctggagatggtgaccacctccgccgcgacggcgcgcgccgtgccgtcgtgtgcgagctggcgactcggggtggagaccaacaacatccgggactggtacagcatcccctcggagtgccggggctacgtccgcgactacatgtacggcgacctgttcaggcaggactgcgcggtggtggcac

SEQ ID NO: 12135 - DNA, 304 bp, Zea mays
cccacgcgtccgcccacgcgtccgcgagctcgagccctcgcccgctcagtcacaaagcctcagatctcagtcgcctgcgccgccgcttcgttcgtgtggaggggagaagacaggaaatggcggcgactgagggcgtgctcttggggatgggcaaccccctcctcgacatctccgccgtcgtcgatgacgccttcctgacaaagtatgacatcaagctgaacaatgctattctcgctgaggagaagcacttgcctatgtatgacgagttggctagcaagagcaatgttgaatatattgccggagg

SEQ ID NO: 12136 - DNA, 234 bp, Zea mays
actgatgaggtctatggagaagctgatgaagatgctgtggttggtagtcgtgacgcctcacagctgcttccaacaggtgcgtattcggctacgaaagctggggctgagatgcgtgtggtggcatatgggagatcttatggtcttcctgggataaccactcggggcaacaacgtgtatgggccggatcagttccctgagaggcttattcgcaagtgcattcttttggccatgaga

SEQ ID NO: 12137 - DNA, 301 bp, Zea mays
ccggagttggcaaaatattttgtccgaagtgtggcaatggtggcaccttaaggaaggtctcagtaacagttggtgaaaacgggatcactatggcttcacggcgcccacgtgttacacttcgaggcacaaaattttcgctcccaatgcctcaaggaggaagagatgccataactaagaaccccattctacgcgaggaccagcttcctcagaaggttcttcatcctaaattgaagaagtccagcaaggcggatgatttcttgggcgttgaggacatattctcgcacagtggtgataagaaggc

SEQ ID NO: 12138 - DNA, 302 bp, Zea mays
aacaatgataacattatcagcttgattgcacaaaaccgccaagtgatcatgcctcttgtcgttccagcgctagagcagaacattcagaatcactggaaccaggcggtcctgaatctgaccgtgaatgtcaagaaaatgttatctgagatggacgacgatctcttctcgtcatgcctggccaagtacaaggacgaaaaagaaaaacgcgtgtcgctagaagcgaactgaggacttacgtgggagaagctcgagtcagctgcagctttccagccagtgactggccatacagccgtcctagtagg

SEQ ID NO: 12139 - DNA, 303 bp, Zea mays
atcaaggaataccgtgcgaagatcgaggctgaactgagcaatatctgtgatggcatcctgaagctgcttgactcccacctagtgccttcttctactgctgctgaatcaaaggtcttctacctcaagatgaagggtgactatcacaggtatcttgcggaatttaagactggtcctgagaggaaggaatctgctgagagcacgatgatggcctacaaggctgctcaggacattgcgctggctgagctggcacctacccatccgataaggcttgggcttgctcttaacttctcagtgttctattat

SEQ ID NO: 12140 - DNA, 305 bp, Zea mays
ggacgctgggaaacttgccattggaaccctctctgttgacaagaacccacacatacaatttgatctggtttatcgataaagagtttgagctgtcgcacacatcagaaactaccagcgtcttcttcactggctacaaggttgagcagccattcgaggaagatgaaatggatcttgattctgaagatgaagacgaggagcgggatgttccagtagtcaaggaaaatggcaaagctgatgggaagaaacagaaaagtcaagaaaaggcagttgctgcaccttcaaaatcaagtccggattccaagaag

SEQ ID NO: 12141 - DNA, 307 bp, Zea mays
gagcgtcagatcccgatcccgatccagcgaggcggcgaccctccctcctccccttgcttcgctcgtccagccctgaccacccgcatccccgtcagtcatggcagcggcagcaggcggaggcgcggtgcgtgcgctgtcccagaaggagcaggacatacagatgatgctcgccgccgacgtccaccttggcaccaagaactgcgatttccagatggagcgctatgcctttaagcgccgcaccgacggcatctacatcatcaaccttggcaagacatgggagaaactgcagcttgcagcgagggttatc

SEQ ID NO: 12142 - DNA, 293 bp, Zea mays
  unsure (1)..(293): unsure at all n locations
gtgccctttgcgagtgtagtgtctctgctaagcgaaggggcttcaaggctagtctcggcggctctagaagacgatgggcaagggcgacgtgatcgagagcggcgctggcggcggcgagttcgctgccaaggactacacgggcgtcccccggcgccgctgatcgaccggcnactggggtcctggtcgctgtaccgcgccgtgatggccgagttcatcgccacgctgctgttcctgtacatcacggtggccaccgtgatggggtacaaggaccagacggacgcgtcggcgtcggg

SEQ ID NO: 12143 - DNA, 300 bp, Zea mays
caatccgtgtgcatttcagattgataggggaagaagaccaggaattccacacccaacttgtcaatgggttccagtcactcaccgctgagctatctcactatatccctgctatactctccgagctatgatagaactgtagcaagccagaaattaggtagcatgtgaatggttgttcattcattcagttgcaggttcccaccaaatgtccatatttccagctttggttgtatagttctaggaaccggaaattaactagtcttcgaagttctgtaccgtattgcagaaccgattcctgatttt

SEQ ID NO: 12144 - DNA, 300 bp, Zea mays
attcgtccaaactcgtgagcactttctcctcgtccccgacaagccactcgaagccgagatacggccatggactccaccggcaccggagcagcggggaagggaaagaagggagcggccgggcgcaaggtcggcgggccaaggaagaagtcggtgtcgaggtccgtgaaggctgggctccagttccccgtcggccgcatcgggcgctacttgaagaagggccgctacgcgcagctgtcggcaccggcgcccccgtctacctcgccgctgtcctcgaatacctcgccgctgaggttctggagc

SEQ ID NO: 12145 - DNA, 296 bp, Zea mays
caccttcccaaaaaaatcccccattttcttcgaggcgaggagagcgtgaaagacagggcaccggcagcgacgatgtcggggcgcggcaagggcggcaaaggtctgggcaagggcggacaaagcgccaccgtaagtgctccgtgacaacatccagggcatcaccaagcccgcgatccgtagctggctcggaggggcggcgtgaagcgcatttcggggcttatctacgaggagacccgcggcgtcctcaagatcttcctcgagaacgtcatccgcgacgccgtcacctacaccgagca

SEQ ID NO: 12146 - DNA, 300 bp, Zea mays
gcgcagagaatccccaagcaaacaaacagggtagatggagacgagatgagaggagaagagaggttgggtctgggacaccatggctccgatgaagctgtacggggcggtgatgtcgtggaacgtgacgaggtgcgcaacggcgctgggaggaggctggctccgactacgagatcgtgcccatcaacttcgccaccgccgagcacaagagccccgagcacctcgtccgcaacccgtttggtcaggttccagctctgcaggatggtgacttgtacctcttcgaatcacgagcaatctgcaagt

SEQ ID NO: 12147 - DNA, 297 bp, Zea mays
cacgacttccgtccgagtctgagctcatctccacgcgccgccgccgccgctcgacgcccaccgcgcaccatggcggaacagactgagaaggctttcctcaagcagcctaaggtgttcctcagctcaaagaaatctggcaagggtaagaagccaggcaagggtggcaatcgattttggaagagcattggccttggtttcaagactcccagggaagcaattgaagggacctacattgacaagaaatgtccattcactggaaccgtttctatcagaggcagaattattgctggaacatgc

SEQ ID NO: 12148 - DNA, 291 bp, Zea mays
gcatcaaacaccggaatctagtcagccttcgagggtactcgttgtcacctgttgggaactcctcttttatgattatatggagagtggcagcttatgggatgttttacatggaggctcgtccaagaagaacaaacttgactgggtgactcgcctacggatcgctcttggtgcagctcaaggcctcgcttaccttcaccatgactgcaggccacgaataattcaccgggacgtaagatcaaagaatatactcctcgacagagattatgaggcgcatcttacagacttcggcat

SEQ ID NO: 12149 - DNA, 301 bp, Zea mays
cccgttcacagttcaccccacttgctctctttctccccagtagcaacgaccgcgcgtcctccgccgccgcactaaaccctactccatgtacccaggtctgcgtcgggcccttgccggcgatgagaacccgtcagttccaaagatggctcgtcgtggattgatggaacaggacttaagcaaactggatgtgacgaagcttcaccccctgtcacctgaagttatctcacgccaagcaacaatcaatatgggtaccattggccatgtggctcatggaaagtccactgttgttaaagctatatct

SEQ ID NO: 12150 - DNA, 309 bp, Zea mays
cacacacactcgggtaaagctatctcgagctagctagctgctgtaaccgttgccatggccaaaatggtattgctctgcgtgctcgtctccttcctcctgatgcccttggcctccctagccctgacgcaggacttctgcgtcgccgacctgacctgcagcgacacgccggctgggtacccgtgcaagtccagcgtcaccgccaacgacttctacttccacggcctggccggccagggcaaaataaacccactcatcaaggccgccgtcaccccggccttcgtgggccagttcccgggcgtcaacgggctt

SEQ ID NO: 12151 - DNA, 309 bp, Zea mays
ctgcgatgaccacgacagggttgaggagattccagaaaatttccctttcaaaatcagcgacgagaaggggacgaatgcagttacccttaaaagaacatatcagggtgagcagattgactgtgtgggttcacatgcccagccttgtcactggagatgagcctgatcatgaccgtgatggtgaggatgaggacacggcgggagatgacaatgacgaagatgaaggccagaagcctgaacagtcaagcattcctctcacagtcactatatccaagggtgacggtcctgttcttgaattcacctgcactgcct

SEQ ID NO: 12152 - DNA, 310 bp, Zea mays
gtctccgtcgtctcgtctccgctcctcacctcgccagccatgggcaagatcaagatcggaatcaacggtttcggaaggatcggcaggctcgtggccagggtcgccctgcagagcgaggatgtcgagctcgtcgccgtcaacgaccccttcatcaccacggattacatgacgtacatgttcaagtacgacaccgtgcacggccaatggaagcacagcgacatcgccctcaaggactccaagacgcttctcttcggcgagaagccggtcaccgtctttggcatcaggaaccccgaggagatcccgtggggtg

SEQ ID NO: 12153 - DNA, 315 bp, Zea mays
ggggaagaccatcactttggaggtggagtcctcggacaccattgacaatgtgaaggccaagatccaggacaaggagggcattcccccggaccagcagcggctcatcttcgccggcaagcagctcgaggacggtcgcaccctcgccgactacaacattcagaaggagtccaccctccacctggtgctccgcctccgcggtggcgccaagaagcgtaagaagaagacgtacaccaagcccaagaagatcaagcacaagcacaagaaggtgaagctctccgtgctgcagttctataaggtggacgacgccacaggcaa

SEQ ID NO: 12154 - DNA, 313 bp, Zea mays
cggacgcgtgggggcggcggcggcgacgacttcgaccgcctcgaccacgaccagctcctgtccatgttctccgacgtcgacgtctccgtctccggcagcgcaggggagagggcgcagctcatggacccggggggtgcggacgacggggtggcggactcgtcgccggctgccgcggacggcgtcgctgagcccaaaagggtcaagaggatattggcaaacaggcagtcggctcagaggtcacgagtgaggaagctgcagtacatctcggagcttgaacggagcgtcaccagtctccagatggaggtgtcagcgc

SEQ ID NO: 12155 - DNA, 313 bp, Zea mays
gcgcaagttactgatgggtggatttgctgaagtgcaatcttctgctgcaaactcgcaggatagcgtgcaatctgttacagttaaggcaaagaaggctagctggagcatgggctcttcttttccccttaagaaaacaacgaaagcccttcccaagattcaaattgacgacgactctgatctgattgatgaagacagtctcttgactgaggaggacctgaagaaaccacaacttccagttgttggggactgtgaggtgggggcagcaaagaaagcatgcaagaactgtacttgtggcagggctgaggccgaggag

SEQ ID NO: 12156 - DNA, 314 bp, Zea mays
  unsure (1)..(314): unsure at all n locations
ctccctctccgaaatcaaggtagcgtacaccgctgcagtttctagagccctctctgccactcgtgatcccactagtcacaatgcctgccctcgccaagcccgcctcccgcaccgccaagcccgccgcggctccgaagccgaagcctgccgccgccaagccgaagganccaccgctggtgcctcccacccgccttacttcgagatgatcaaggaggctatcacggcgctcaaggagaggaccggctccagctcgcaagcgatcgccaagtatgtgggggacaagcacggcgcgtctctgccggccaacttcaaga

SEQ ID NO: 12157 - DNA, 304 bp, Zea mays
gctgcctaccgcgcgtctcgtcccttcgctgccgctctatctatctcggccggagccatgggcggcggtggcgcggcgctgctgctgctggtgatgtgggcgggcgtggcgtcggcggccgtgtacgaggtaggcggcacgattgggtggaccgtcatgggcaaccccgactacgccgcctgggccagctccaagcagatcgtcatcggcgacaccgttgtgttcacgtataacaagcagttccacaacgtgctggcggtgagcaaggcggactacaagaactgcatcgccaccaagccgacgg

SEQ ID NO: 12158 - DNA, 305 bp, Zea mays
cccacgcgtccgcccacgcgtccggtcagctgctgggctccctttagatcaccctataatgacaacagcagaattttggacgtcacatgagtgtcttcttctaccttatgagcaagcgctcactcgtgaggattccaccacgggcctctattatgactgctctgcccacttcctatgggtcggagagcgcactcgccagcttgatggtgctcacgttgagttccttcgaggcattgccaaccctcttggtatcaaggttagtgacaagatggacccagcagaacttgtgcggttgattgatatat

SEQ ID NO: 12159 - DNA, 308 bp, Zea mays
gtctcgagtaatatcaaatttagtaatgtatatgtgaagaatctgtcagatactgttactgatgatgagttgaaggagatgtttggaaaatatggaaccataactagtgctgttgttatgcgggatagcgatggaaaatccaggtgttttggatttgtcaattttgaaaatgcagatgctgctgctcaggctgttcaagagttgaatggcaagatattcaatgataaggaactgtatgttggaagagcacagaagaagtctgaaagagagatggagttgaaggagaaatttgaaaagaatgttcaaga

SEQ ID NO: 12160 - DNA, 311 bp, Zea mays
gccacagccacagcatcacgtccactcattagcaaggtagcccgtgctgcacctgcctgccagccgcagctgtcctgcctttgccttcccatagcatagccatggacatttggaagtccaaggtgttgcccaagatcaagctcgtcttcgtcaagagcgccggcaaggccgccgccgccgccgccgagctcgtcaagtccttcgacgagtccaaggaggggatcgatggcgagttccaggagaagaaggctgatctccagcccaaggtcgtcgagatctacgagtctgcccctgcaccactcaaggtcctg

SEQ ID NO: 12161 - DNA, 303 bp, Zea mays
ggatgaggaagccagaagagatcacaaaggaagaatatgctgccttctacaaaagcttgacaaatgactgggaggagcatctggctgtgaagcacttctctgtggagggtcagctggagttcaaggctgttctctttgttcctaagagggccccatttgatctcttcgacacaaggaagaagcaaaacaacatcaagctctatgtgcgcagggtgtttatcatggacaactgtgaggaactgatccctgagtggctgagttttgttaagggtattgttgactctgaggaccttcccctcaata

SEQ ID NO: 12162 - DNA, 302 bp, Zea mays
gcgaggagaagaatgaaatgatcctggtctatgattacatggctcatggtactctccgcgagcacctgtacaagacccagaagccacctcttacctggaggcagcgtttggatatctgcattggtgcagctcgtgggcttcactaccttcacactggtgcaaagcacaccatcatccaccgggatgtgaagacaacaaacatccttctggatgagaaatgggttgccaaggtttcagattttggtctgtccaagactggcccatctatggaccatactcatgtgagcacagttgtcaaaggc

SEQ ID NO: 12163 - DNA, 301 bp, Zea mays
cccacgcgtccggaaccagcggctcaacgtcgtgccgaggtgacgatgctcggcgtcatgaaggcccggctcgtcggcgcgacccgcggccaccgctgctgaagaagaagtccgacgcgctgacggtccagttccgcgccatcctcaagaagatcgtcgccgccaaggagtcgatgggcgagacgatgcgcgcctcctccttctccctcgccgaggccaagtacgtcgctggcgacggcgtccgccacgtcatcctccagtccgtccgcgcggcatccgtccgcgtccgctcccaccagga

SEQ ID NO: 12164 - DNA, 301 bp, Zea mays
atttccatatttttgttggtgatttaagttctgaagtgaatgatgcaactctttatgcctgtttctcagcatatccttcttgttctgatgctcgagtcatgtgggacaacaaaactggacgctccaggggttatggttttgtctccttccgtaatcaacaggaagctgaaactgctataactgaaatgactggaaaatggcttggaagcagacaaataaggtgcaactgggcaacaaagaacaattcggaagagaaaccagaaactgacaatcataacgcagtcatactaacaaatggtag

SEQ ID NO: 12165 - DNA, 300 bp, Zea mays
  unsure (1)..(300): unsure at all n locations
acgggatttgccaagnatacaaacttgtnctcagtgtcgatgacaagaagggacattcctgccttgtcatcgacactgagaacaagtttgtatccacgggatttgccaaggaaattgcaagggttgcccaggggaaatattattacctccctaatgcttcagatgctgtaatttctgctgacnccaagaccgccctgacagacttgaagagctcatgattttgcagcagcggcacccgttttctgtaccttttgatagggatggtgaaccttcattcatgcagtaatttttgcgtaggcc

SEQ ID NO: 12166 - DNA, 302 bp, Zea mays
gaacgccagtgttgggttcggtggctcatgcttccagaaggacatcctgaacctggtgtacatctgcgagtgcaagacctgcccgaggtggccaactactggaagcaggtgatcaagatcaacgactaccagaagagccggttcgtgaaccgcgtcgtggcctccatgttcaacaccgtcgccggcaagaagatcgccgtcctcggcttcgccttcaagaaagacaccggtgacaccagggagaccccggccattgacgtctgcaagggcctgctgggcgacaaggcccagatcagcatcta

SEQ ID NO: 12167 - DNA, 301 bp, Zea mays
ggagaggagaggttgggtctgggacaccatggctccgatgaagctgtacggggcggtgatgtcgtggaacgtgacgaggtgcgcaacggcgctggaggaggctggctccgactacgagatcgtgcccatcaacttcgccaccgccgagcacaagagccccgagcacctcgtccgcaacccgtttggtcaggttccagctctgcaggatggtgacttgtacctcttcgaatcacgcgcaatctgcaagtacgctgctcgcaaaaacaagccagagctgttgagggaaggaaacctcgaggag

SEQ ID NO: 12168 - DNA, 299 bp, Zea mays
ggacgctgggtccggccaggcccttggtgcgcttcgctggctcgcctcgctccagcgccagtgccagtacctcgccatcctctgctccaactctctccctgcccgcgaccacgccgcgatcacgccggttggttggtggagcatgctgaagctggcgcagcggatgacggacaacttctgcgccggtgtgtgtgcgtcggcggcgcagaagtggcggcgcctggacgagtggcgcacggcgagggaggagacgctgctgggaacggcggatcagcagccgcgggcgagggcgaggagaa

SEQ ID NO: 12169 - DNA, 296 bp, Zea mays
aacgccactgccactgttgcatccctagaccgccagtatggcctgagcgaaaagatcagtctcggaagggccattgtcggcagcaaggtcaaggaggtggacgagcggtaccaggtctcagaactcaccaagtccgccttggctgccgccgagcagaaagccagcgtcgcgggctccgctatactgagcaaccagtatgtctcggctggtgcctcgtggctaacaagcgcgttcgatatggtaacgaaggcagcgggcgacatgacctcgatggccaaagataaggtggagagggc

SEQ ID NO: 12170 - DNA, 293 bp, Zea mays
ggcttctcctccccctccggttcgggttcgggttcgtgaggttctccggggttcggtttcgtgggtgggcggatcgagatggcggcgtcggatgttgagtaccgctgcttcgtcggcagcctcgcctgggccacggacgaccactccctccacaacgccttcagcacctacggcgaggtcctcgagtccaagatcatcctcgatcggtagacgcagaggtcccgcggcttcggcttcgtcaccttctccacggaggatgcgatgcggaacccatcgagggcatgaacggcaag

SEQ ID NO: 12171 - DNA, 296 bp, Zea mays
agggtaccaggattgcctctgatggtctgaagcacagagtctttgaggtttgtctagctgatcttcagggtgacgaggatcaggcttacaggaaaatcaggctccgtgctgaagatgtgcaaggcaggaatgtgctcacaaacttctggggcatgaattttaccaccgataagctcagatctctagtaaagaagtggcagacattgattgaagcccatgttgatgtcaagacaaccgacaactacatgctgcgtttgttctgcattggttttaccaagaggcgcccaaaccaggtc

SEQ ID NO: 12172 - DNA, 294 bp, Zea mays
cccacgcgtccggcggcgccgcacgggccatgatgcacacacctatggcggcatgtccaataccttcaagctgctaatcgtcctcggcttacttgtctgctccattgcgtttgctgccatggcgatcttgaaggcccggtcactgaagaaagccagcgaggcacgcgcttggaggctcactgcgttccagcgcctcgagttcacctgcgacgacgtgctagacagtctgaaggaggagaacatcatcggcaaaggtggagccgggatcgtgtacaaggggacgatgccggacgg

SEQ ID NO: 12173 - DNA, 289 bp, Zea mays
tcgacgcgtggcgtgacgcgtgggtgcgcctctacatttcttctctctctgctcctccgcctccgcctgatccatccaagacagggatcgcactgtcggactcactggagcaccacttcgaatcgaaggccgacgctggggcgtccaagacctacccgcagcaggctggcaccgtccgtaagaacggcttcatcgtcatcaagaaccgtccctgcaaggttgtggaggtttctacctccaagactggtaagcatggccacgccaaatgccactttgtcgccatagacat

SEQ ID NO: 12174 - DNA, 290 bp, Zea mays
gagaaatagcgttttgtgctatcacagctgatgagcaagttaaaggctatggaacaagattaatgaatcatttgaaacaacatgcacgggatgctgatgggctcacacatttcttaacctatgctgataacaatgctgttggctattttgtaaagcagggtttcacaaaggagatcacattggacaaagaaagatggcaagggtacattaaagattatgacggaggaatattgatggagtgtaaaattgacccaaagctgccatatgttgatgtggcaacaatgattcga

SEQ ID NO: 12175 - DNA, 145 bp, Zea mays
atcaacgcggatggtactctgttgtttatagtccctgctgctaaccacccttgttgctggtgctgctggagaggcattgtacctgtccatgcatatatgatatatatatgttgtaacgttgtgaaagcaaacaatcttgggtacc

SEQ ID NO: 12176 - DNA, 285 bp, Zea mays
tctcgagacaaattggatatgccctggttcccatgattgctaggggtgttatgcttggtgcagaccagcctgttagtctgcacatgcttgacattccgccagcagctgaagcccttaatggtgttaagatggagttggttgatgctgcgtttcctcttctgaagggagttgttgctacaactgatgttgtggaagcctgcactggggtcaatgtgggcgtcatggttggtggaatccccaggaaggagggaatggaaaggcaagatgttatgtcgaaaaatgttt

SEQ ID NO: 12177 - DNA, 289 bp, Zea mays
gccaccgccacctctccgggctcgaggaggccgttctcaagaacatcgacgcctgccgcgagctgtccgccattacgcgcacctctctcggcccgaacggaatgaacaaaatggttatcaatcacttggacaagctgtttgtcacaaacgatgctgccaccattgtgaatgagctcgaagttcagcaccctgccgctaagattctggtactggctggtagggctcaacaggaggagattggggatggggccaatctcaccatatcgtttgccggtgaactgcttgagaa

SEQ ID NO: 12178 - DNA, 290 bp, Zea mays
cacacagatagagcgattataaaagcgtatgacaaaacagaccaagctattctgtcacatactccagatctgggacaaggtggctccactgctgtaaccgccattcttgtgaacggcaggcagttatgggtagctaatgttggcgattcaagagctgttcttttgaaaggtggtgagcccatacagatgtcgatagaccatgatccgaatgttgagcgcagtgtaatcgaaaataggggtggttttgtttcaaatatgccaggagatgttccccgagtatgtggtcagtt

SEQ ID NO: 12179 - DNA, 291 bp, Zea mays
ctagaatgaaactcctgagacatgtttcttttgttgattgcccgggacacgacattctcatggctacaatgcttaatggagctgctatcatggatggagctcttcttttgatcgcagcaaatgaaagttgtccacagccccagacatcagagcatcttgctgctgttgaaatcatgcgtcttcaacatatcatcattctgcagaacaagatcgatcttatccaggaaagcgcacgctagaatcagcatggagcaatccaaaaattcatccagggaacaatagctgaaggtg

SEQ ID NO: 12180 - DNA, 310 bp, Zea mays
cggacgcgtgggtcagccccgccgctaccagacggcgcgcggcaagcaccgcatcgtcgaccgcggcatcgagttcgaccaggtcgaccgggagcgcggctcggacgaccagatcatcctcaacggcctgctcttctacgttggctacctggcgatccacagcgcgaggcgcatgtcagcgtggaggtcggacggcgccgtggcgatggcgctgctccacgccgggcccgttgagttcctctactactggttccaccgggcgctgcaccaccacttcctctactcgcgctaccactcgcaccaccactcc

SEQ ID NO: 12181 - DNA, 310 bp, Zea mays
cggacgcgtgggcggacgcgtgggcgcggtctgctcgttcgatctgtgcagcagatctgaggtcccgggcgaccgtgaagcagcttcaatcgtcggcatggcgctcgtattgcctagtggggctggaaacaagaatgccttcaaagcacttattgctgcagaatacagtgggatcaaggttgagttgaccaaggattttgagatgggtgtctccaacaagacccctgagtttcttaagatgaacccccttgggaaggttcctgttctggagactcctgatggccctgtttttgagagtaatgctatcgca

SEQ ID NO: 12182 - DNA, 306 bp, Zea mays
ggaaacttcttggagagagagagagagagagagacggccccgcagcggcggaggcggagatgggggcgtcggatctagaccggcagatcgagcagctgaagcggtgcgagccgctcacggaggcggaggtcaaggcactgtgcctcaaggccatggagatcctcatcgaggagagtaacgtgcagcgcgtcgacgcccccgtcaccatttgtggagacatacatggacagttctatgacatgaaggagctgttcaaagttggaggtgactgcccaaagacaaactatttgttccttggggattttg

SEQ ID NO: 12183 - DNA, 304 bp, Zea mays
aaaagactttcgagtttgtcaggggccatatgacccttttctgattagtgcttgggaagactatgatgcgaaacgtggatctgaaaatgaccatccaaaggagtttacaagggaacagtgctacattgtccttgttctagctgatggtggcactgatcctgaaagttttgctctagttgagtataatgaggttccacagtttactggttcaagttactgcttccttagcagtagctgaaagtgcttgtgaatttgaacatcgagatctgcactggggtaacattcttttggctccagaggaaac

SEQ ID NO: 12184 - DNA, 308 bp, Zea mays
atccatctattctccagtccacccattccattccactaccgacgcccagaattcacgcgaacgcacacgcacccacacgacacatccagatgatgcttagggtttccccgtccccggccgccgcggtgccaacccagctctccggtgcgcccgcgacccctgctcccgtcgtcagggtggcggcgccgcgcggagtcgcctcgccgtccgctggcgccgcgtgcagggccgcgggcaaggggaaggaggtgctcagcggggtcgtgttccagcccttcgaggagatcaagggggagctcgccctcgtg

SEQ ID NO: 12185 - DNA, 307 bp, Zea mays
cagaagcaggggctagacgcggatcggcgagcatgacgcgcggcggcggcggcgggatgatggacgatgaagagagggtgggccatgcggagatcccgaccagtttcggtcccgagctgcgcgcctgcctccgatgccgcctcgtcaagacctacgaccagttcagggagaacggctgcgaaaactgcccgtttctagagatggacagagagcacgacaacgtcgtcaactgcaccacccccaacttcactggaattatctctctgatggaccccagtaggagctgggcagcccgttggttgagaat

SEQ ID NO: 12186 - DNA, 313 bp, Zea mays
ccaatggcatccaagcatcagatttattttttattttctggcaacattcaagatagaacttgctcgcggcggtgtttccctccgtcgctttaaataccttcgtcgcctccacaagtccacagcatctcaagccaccatcgaccttcaagtctcgctacgtagcagtgcaataaaaaaagcagccgcaatggcgagcagcaccatggccctctcctccacggccttcgccggcaaggccgtgaacgtgccgtcgtcgtccgccttcggcgaggcccgcgtgacgatgcgcaagacggcggcgaaggccaagcca

SEQ ID NO: 12187 - DNA, 316 bp, Zea mays
ggaggccgacggcgtggaggtgcgcgtgcgccaggtgtccaacagcttcccgctgggcgcgtgcatcatgcgcaccaacatggacaacgaggatttcgtggacttcttcaccaagaacttcaactgggcggtgttcggcaacgagctcaagtggtactggacggagccgcagcgcgggcagttcaactacagcgacgccgacgacctgctccgcctctgctccgaccacggcatgtgcgtgcgcgggcactgcatcttctgggaggtggacaacgccgtgcagcagtgggtgaagacgctgtccaccgacgacctg

SEQ ID NO: 12188 - DNA, 311 bp, Zea mays
cggacgcgtgggcggacgcgtggggccaaagggtctttagctgcagaggagcaggcaagcaaggccaatgcactggctattgagctcaagaagcagaccgagaacgctcaagaaggatattacagaacaaaaaattaaaaaagcagctctggaggctagggctggcaatgctgataagaaggtgcaagagctaaatatgaagctggagaagctccagaggacaagcagtgatcaaaagcgcaggattcagaagactgaacatgctcttaaagctgctgaggaggagctgatgaaggctcagttggaaacaa

SEQ ID NO: 12189 - DNA, 304 bp, Zea mays
ccaccatttgttatagttctgccacctccaaatgtgactggagctcttcacatcggtcatgcacttacagtggctatagaggatgctatgatacgatggcgtcggatgtcaggctacaatgctctgtgggtccctggagtggaccatgctggcattgctacacaggttgttgtagagaagaagcttatgcgtgaaaggaagttgacaaggcatgacatagggcgtgaaaaatttgtttctgaagtactcaaatggaaagatcaatatggtggtaccatattgaatcaattgcgccggcttgggg

SEQ ID NO: 12190 - DNA, 300 bp, Zea mays
cggacgcgtgggtcaaaggagcaattagaagaacgactgcttcttgccattcatgaagctagtgaaggttttggctttggttgattggttcctcgggaggttgtaaagcgtgcactgggtcattggttttctgcttgacatgtacagattttgaaggcaattgagatggtcagtgctatgcataacatagatcgatccattggtctttttaggagtgctcatgctgcagtagggatctaatttattattccggatagtcgatgagtatgtcgatcgggttgggtacagtagtagagctct

SEQ ID NO: 12191 - DNA, 299 bp, Zea mays
gtgaccgagatcgaccccatctgtgccctccaggctctgatggagggtcttcaggtccttcccttggaggacgttgtctctgaagctgacatcttcgtgaccaccactggcaacaaggatatcatcatggttgaccacatgaggaagatgaagaacaatgccattgtctgcatcattggccactttgacaatgaaattgatatgctcggccttgagacctaccctggcgtcaagcgcatcaccatcaagccccagactgaccgctgggtgttccccgagaccaacactggcatcattgt

SEQ ID NO: 12192 - DNA, 299 bp, Zea mays
agaatttgggtcctggagtggatggttgggcaatttcgttgaaggccatgatgagcatagtggttgtactgggtcttgtcatcaccggtatctattggggagtgaacaagtttgttattgataactcatctgtgcccgtggttgagcggaaaaagaaggacaagccaaagctcagcatgggtgagagcatgaaggttctgttgtcatctcggtatgtgagggatcttgctacattggttgttgcttatggaataagcattaaccttgtcgaggtgacatggaaatcaaaactgaaagca

SEQ ID NO: 12193 - DNA, 150 bp, Zea mays
  unsure (1)..(150): unsure at all n locations
atttcgatctcatttgaaatcaacccatcctcgtttcctccgtctagcagcctctcaccctcatggccaagatcaagatcgggatcaatgggtttggcaggatcggaaggctggtggccagggagngcctgcagagcgacgacgtcgagc

SEQ ID NO: 12194 - DNA, 301 bp, Zea mays
gtatccgtcaatgacacagtttgccacttctcaccgcttgcaaccgatgatgccgttctggaagaaaatgacatggttaaaattgatatgggctgtcatattgatggctttattgctgtggtggcacatacacatgtaattacaaatgggcctgtcacaggaagggctggtgatgtgcttgctgctgccaacacagcagcagaagtcgcaatgcggcttgtgagacctgggaagaaaaataaggatgttactgaagcaattcagaaagttgctgctgcttatgattgcaaaattgtggaag

SEQ ID NO: 12195 - DNA, 300 bp, Zea mays
ggaaaggatggagaaaaaagctgaagattacagaaatagtttgcaacaagaagcacaagtaaaagctcaagcattacgctttgaggacgaattagctagaaaaagaatgcagacagagcatgctgcacagaggcaacaggatgctgaacttgtgaagatgcaagaggcatctgccctcagaagagaagaagctaggcgtgcaacagaacagaagattttggaagaaatgatacggactgagaaggaaaaggctgaaatagatcaggaagtaaacagagctaaagctttagcagaagcaga

SEQ ID NO: 12196 - DNA, 296 bp, Zea mays
gctcagcatccgacgacgggacttgcacgatggatgctgctcttatgcctctgctcgtcgtctccctcgtcctctgcctgctggcggctgccccagcggcgtccgcggcgcgggccttcttcgtcttcggcgactccctcgtcgactacggcaacaacaactacctgctgaccacggcgcgcgccgacgcgcccccctacggcatcgacttccccacgcaccaagccacgggccgcttctccaacgggctcaacatccccgacatcatcagcgagcacctcggggccgaacctgcg

SEQ ID NO: 12197 - DNA, 295 bp, Zea mays
ggtttaaggctacagttaatttcaacggggagatgttcgagagcccagtgttttgttccactctgcggcaggcggagcatgcggcagctgaggtagcactcaatgagttatcaaagacggggccttcgtcgacgctggctgccagagttctggatgaaaccgggatatacaagaatcttcttcaagaaactgctcatcgagctggtctaaaactccccatctatactactattagatctgggccaggtcatacgcctgtgttcgcatgcacagtggagttggcaggataggcatt

SEQ ID NO: 12198 - DNA, 294 bp, Zea mays
cggacgcgtgggcggacgcgtgggattcaatgcaccagcaatgtatgttgctatccaagctgtcctttccctgtatgccagcggtcgcactacaggtattgtgcacgattctggtgatggtgtgacccacaccgtgccaatctacgagggatacgcgctccctcatgccattcttaggctggatcttgctggccgtgatctgactgactgcctaatgaagatcctcacggaaaggggttattccttcaccacgacggcagaacgggaaatcgtgagagacataaaggagaagct

SEQ ID NO: 12199 - DNA, 303 bp, Zea mays
ctcgtcgtcaagggcaccccgccgccgccgcccaagaagggccacccgggcgtcctcttcgtctgcaaccaccgcaccgtgctcgaccccgtcgaggtggccgtggcgctgcgccgcaaggtcagctgcgtcacctacagcatctccaagttctccgagctcatctcgcccatcaaggccgtcgcgctgtcgcgggagcgcgacaaggacgccgagaacatccgccgcctgctggaggagggcgacctggtcatctgccccgagggcaccacctgccgcgagcccttcctgctgcgcttcagg

SEQ ID NO: 12200 - DNA, 321 bp, Zea mays
cgaaccgctgccagtccaaaccctacggccgccgccagcatcaagctccccgaccaaaccctactcgtaccccgccgccgccgcagccgcagccgcggccacaccagcaagcagaactagcagccatgccgcccaaattggacccctctcaggtggtggaggtcttcgtccgcgtgacgggaggcgaggtcggcgcggcgtcgtcgctggcccccaagatcggcccgctcggtctctccccgaagaagatcggcgaggacatcgccaaggagaccgccaaggactggaagggcctccgcgtcaccgtcaagctcaccgtgc

SEQ ID NO: 12201 - DNA, 317 bp, Zea mays
aaaatccaggtgttttggatttgtcaattttgaaaatgcagatgctgctgctcaggctgttcaagagttgaatggcaagatattcaatgataaggaactgtatgttggaagagcacagaagaagtctgaaagagagatggagttgaaggagaaatttgaaaagaatgttcaagaggtagctgagaagttccaaaacacaaacttgtatttgaagaacttagaggagaacattgatgatgagaaattgcgtgaactctttgctgagtatggcaatattacttcctgcaaggttatgcgggattcgaatggtgtcagca

SEQ ID NO: 12202 - DNA, 314 bp, Zea mays
cgacaacctgaacctgacgatcccggcgcccgggccgagcgtgatccagtcggtgtgcggaccgccaagtgcgtggtggtcctcatctccggcaggccgctggtggtggagccgtacctgggcgacatggacgcgctggtggcggcgtggctgccagggtcggaggggcagggcgtggcggacgtgctgttcggcgactacgggttcacggggaagctgccgcggacgtggttcaagtcggtggaccagctgcccatgaacgtgggcgacgcgcactacgacccgctcttcccgttcggcttcgggctcaccac

SEQ ID NO: 12203 - DNA, 316 bp, Zea mays
cggacatgatcacccacgccgacaccgacgtggtgatcgtgggcgccgggtccgcgggcctgtcctgcgcgtacgagctgtccaaggaccccaccgtgagcgtcgccatcgtggagcagtccgtgtcaccgggcggcggcgcgacgctgggcgggcagctgttctcggccatggtggtgcgcaggccggcgcacctgttcctggacgagctgggcgtgggctacgacgaggccgaggactacgtggtggtcaagcacgcggcgctgttcacgtccaccgtgatgagccggctcctggcgcggcccaacgtgaagct

SEQ ID NO: 12204 - DNA, 318 bp, Zea mays
gctcatcaccgacgatggtgccacggctaacacaagcaagcaagcaagtcactgagtagctagcagtatataccaccataaaaacaacacacacacacacgtgcgctaataagctaagcttaaggcggtagcgtagctcctctcgatctccggctcggacggacgacgttgccatggctgctcaactgcatcacgcactatacgagctgctgcacgaagcagcagcagcgcaacgagctctgctgctcgcgatccccttctccctgctgctcctgccgctcctgctccgctacctcgcggcgtcgacggcgtcggcgt

SEQ ID NO: 12205 - DNA, 314 bp, Zea mays
cccacgcgtccgcggaagttccccttcttctgcagtgacagagagtacataattgctcgccggatatggaaactggggggcgcctattattgtgtcacaaagggtataccatgctcgtccattccacggcgcaacaaacctcgaagagttgatctgtattattcaagctggtgcatccgtgcagtggaatccaggagagggaacggagggtcgacagcttgtgaggtgctcttgttccaccacgaggacatgggcatcccgtacgagatcgcaaagctcggtatccggcaagggatgtggggatgcgtgaagag

SEQ ID NO: 12206 - DNA, 315 bp, Zea mays
atcttcgagaagctgaaatggctcctaaagctgctcctgccaagaagggtgatgccaagacccaggccttgaaggttgccaaggctgtgaagtctggggcagccaagaagaagaccaagaagatccgcacgtctgtgacatttcaccgccccacgaccctgaagaaggctagggaccccaagtacccacgaatcagcactaccggaaggaacaagcttgatcagtaccaaattctcaagtacccccttaccacagaatcagcgatgaagaagattgaagataacaacactctggtcttcattgttgacctcaagg

SEQ ID NO: 12207 - DNA, 306 bp, Zea mays
gcaaccacagcgtcctgctggtagacgtgctggtggaatgcagcagcccatgccaatgggtggtcagcaacaggtgttccctagaggtggtcgtggctatcgctatcctactggacgtggaatgcctgatcctggcatgcacagtgttggtgctgtgatgccaccttcatatgagatgggagggatgccaatgagagaagctgccccccaacctgttccaattggggcgctaccactgcacttgctaacgcccaccagatcagcagagacttatgcttggtgagaactgtatcccttgttgacagc

SEQ ID NO: 12208 - DNA, 313 bp, Zea mays
gcgagagatccaatggcggcggcggaggggcagtgggtgctcatggcaacggggcggacgccgaccaacattgcggtgatcaagtactgggggaagcgggacgaggcgctcatcctccccatcaacgacagcatcagcgtaacgctcgaccccgaccatctctccgccaccaccactgtcgccgtcagcccctcattcccttccgaccgcatgtggctcaatggcaaggagatctcgctattaggaggaaggtttcagagctgcctcagagaaatcagaaagcgtgctcgtgactttgaggacaaggagaagg

SEQ ID NO: 12209 - DNA, 313 bp, Zea mays
cgcagttcccccgcgcccgagacgcaaccccgcgccaggagtaagtttgttcttttatcgatattatcgatatggcgagggaggagaatgtctacatggccaagctggctgagcaggccgaaaggtatgaagagatggttgagtatatggagaaggtggctaagactgtagatgtggaagagctcactgttgaggagcgtaacctcttgtcggtcgcatacaagaatgtgattggggctcgccgtgcttcatggcgcattgtctcttctattgaacagaaggaggagtcccgtaagaacgaagagcatgtgaa

SEQ ID NO: 12210 - DNA, 313 bp, Zea mays
gtcaccgacgtcatccacgaccccggccgtggcgcgccgctcgccaaggtcactttccgccacccattcaggtacaagcaccagaaggagctctttgtcgcagccgagggcatgtacacgggccagttcgtctactgcggtcgccgcgccaccctctccatcggcaacgtgctgcccctccgcgggatccctgagggtgccgtcgtctgcaacgtcgagcaccacgtcggtgaccgcggtgtcttcgccagggcctctggggactacgccattgtgatcagccacaaccctgacaacggcacatcgaggatta

SEQ ID NO: 12211 - DNA, 314 bp, Zea mays
agcggatccccgctggcaagtccgccggcaaggagggcggcgagggcaagcgtggcaagaagaagggcaagaagagcgtggagacgtacaagatctacatcttcaaggtgctgaagcaggtgcacccggacatcggcatctcctccaaggccatgtccatcatgaactccttcatcaacgacatcttcgagaagctggccggcgaggccgccaagctcgcgcgctacaacaagaagcccaccatcacctcccgcgagatccagacctccgtgcgcctcgtgctccccggcgagctcgccaagcacgccgtctct

SEQ ID NO: 12212 - DNA, 315 bp, Zea mays
cttcgtgttcggtgactccctcgtggacaacggcaacaacaactacctgatgacgacggcgcgcgccgacgcgccgccctacgggatcgacttccccacgcacatggccacggggaggttctccaacgggctgaacatcccggacatcatcagcgagcacctcggctcccagcccgcgctgccgtacctgagccccgacctccgcggcgcccagctcctggtcggcgccaacttcgcgtccgccggcgtcggcatcctcaacgacaccggcatacagttcgtgaacatcatcaggatcggacagcagctgcgcaa

SEQ ID NO: 12213 - DNA, 290 bp, Zea mays
cgcgacgcgtgggcgctctcgctctcagacgactgggccgccgccgcttggtgctgaggctttggttggtctcttcggcggcgacgagcagccatcagcagttctgtagatatggctgatggtgaggacattcagcctcttgtcttcgacaatggcaccggaatggtcaaggctggttttgctggcgacgatgcaccaatggcggtttttcctagcattgttggccgtcctcgccacactggtgtcatggtagggatgggacagaaggatgcatatgttggcgatgaggc

SEQ ID NO: 12214 - DNA, 314 bp, Zea mays
gcgacgtggtggtggtgggcggcgggcccggagggtacgtggcggcgatcaaggccgcgcactgagggctcaagaccacctgcatcgagaagaggggcactctcggcgggacctgcctcaacgtcggatgcatcccattcaaggctcttttgcattcatcacatatgtatcatgaagcaaagagttcttttgcacaccatggagttaagttttcaaatctggaagtggacctcccagccatgatggctcagaaagacaaagctgtggcaggactaacaaagggaattgaagggctctttaaaaagaacaaggtg

SEQ ID NO: 12215 - DNA, 316 bp, Zea mays
cggacggtgggcgcgacgcgtgggctgtggatgaggaggatgcgcgtgctgaggcgcctgctccgcaagtaccgcgaggccaagaagatcgacaagcacatgtcccacgatatgtccatgaaggtcaaaggtaactcgttcaagaacaagagggtgcttatggagagcatccacaagtccaaggctgagaaggccagggagaagacgctctccgatcagttcgaggccaggcgcgccaagagcaaggcgagtcgcgagaggaagaatgctaggagggaagagaggctggcccagggcccaagagaaataccaccac

SEQ ID NO: 12216 - DNA, 311 bp, Zea mays
tgattgcagtcattcctcccccaagtccatagagtgatagagaatggaggataatctaccagttaatgtccgggaatatcaagaacttgctaagaaagcactaccaaagatgcactatgattatatcaacggaggagcagaagatgaatatacactgagggagaatattgcagcatatagaagaattctgttacggccacgagtccttatagatgtgagccagatagacatgtcaacaagcttattaggatataatatgccatcgccaataattgtcgcacctacaggggcacacaaattagccaatcccg

SEQ ID NO: 12217 - DNA, 308 bp, Zea mays
cccacgcgtccggatggaactagaacatggaggcatgctgttaatgtgaaccttgttgctgtcattgatggtactcgcattgcaagtcaaataatgcgaaaccaaaagaagcccggtgtcataataaacattggttcagcggcaggtctttatcctatgttcctcgatcccgtatatagtgcggcaaaagggggtgtggttatgtttacaagatcactttctccattgaaacgccatggtgttcgtgtcaatgtgctctgcccagagtttgtccaaaccaatatggcggaacaaatgagccgcaaagt

SEQ ID NO: 12218 - DNA, 301 bp, Zea mays
ggaaacctctcaaaccctagccgcctcctgcaagtttcagagctcaggaatctgcgccatggcgagtgagacggagaccttcgcatttcaggctgagatcaaccagctgctctcactcatcatcaacaccttctactccaacaaggagatcttcctccgcgagcttatctccaactcttccgatgcgctggacaagatcaggttcgagagtctcactgacaagagcaagctcgatgcgcacctgagcttttcatccaccttgtcccagacaaggccacgaacacgctctcaatcatcgaca

SEQ ID NO: 12219 - DNA, 309 bp, Zea mays
catttggaagtccaaggtgttgcccaagatcaagctcgtcttcgtcaagagcgccggcaagaaggccgccgccgccgccgagctcgtcaagtccttcgacgagtccaaggaggggatcgatggcgagttccaggagaagaaggctgatctccagcccaaggtcgtcgagatctacgagtctgcccctgcaccactcaaggtcctgatcaaggagaggagcaaggtgtccgggatcaagaagaactccgccgcaatcaccaagttcttcgaggagctggccaagatcgaattccctggagccaagcaagt

SEQ ID NO: 12220 - DNA, 307 bp, Zea mays
cttaccgaatccacgttcgagaaggaggtcggaaaggaccgcggcgccctcgtcgagttctacgccccctggtgtggtcactgcaagaagcttgctcctgagtatgaaagacttggtgcaagttttaagaaagctaaatctgtcttgattgctaaggttgattgtgatgagcacaagagtttgtgcagcaagtatggagtttccgggtatccaacaatccaatggttcccgaaaggatccttggagcccaaaaagtatgaaggacaacgcactgcagaagcccttgctgaatttctcaatactgaag

SEQ ID NO: 12221 - DNA, 309 bp, Zea mays
  unsure (1)..(309): unsure at all n locations
gtccagagcgggtccagcccagttcatcctccacctgctccgccggctgctcttcttctcccctctcgctatatccccggggacctcacagccacatctctccactgctccgtccagcgcgtccacctcccaaacccctactcccccaggaagcaatggcttcccccacccagggccaggtcatcacctgcaaagcggcggtggcgtacgagccgaacaagccgctcgtgatcgaggacgtgcaggtggcgccgccgcaggctggcganggtccgcgtcaagatcctcttcaccgcgctctgccacacc

SEQ ID NO: 12222 - DNA, 307 bp, Zea mays
ggtgagggcctccctgctgacgtcgtccaggatatgttcagcaattcccaatggtcaacacaagaaggcgtaggactaagcacatgcaggaagatcctcaaattgatgggtggcgaggtccaatacatcagagagtcagagcggagtttcttcctcatcgtcctcgagcagccccaacctcgtccagcagctggtagagaaatcgtctgatatgttaagatccgtgctgaccccacctaactttctcggccgattacataacttagccccctgataagagggtgcctaatttacgagaagcctggaa

SEQ ID NO: 12223 - DNA, 308 bp, Zea mays
ggtttaaggctacagttaatttcaacggggagatgttcgagagcccagtgttttgttccactctgcggcaggcggagcatgcggcagctgaggtagcactcaatgagttatcaaagagggggccttcgtcgacgctggctgccaaagttctggatgaaaccgggatatacaagaatcttcttcaagaaactgctcatcgagctggtctaaaactccccatctatactactattagatctgggccaggtcatacgcctgtgttcgcatgcacagtggagttggcaggaaaggcatttactggcaatcct

SEQ ID NO: 12224 - DNA, 310 bp, Zea mays
ggcgttcaagcggttcggcgcgcggctgaccgagatcgagaaacgcgtggaggccatgaacaaggacccgcgcttcaagaaccgctacagcgcggcccagttcccctacaccctgctcttccccaacacctccgacaagggcgataacaccggcgtcaccgccaagggcatccccaacagcatttccatctgattcgatcgagtcctggccagcgtttcacccaaaaaagcagagctagcggtgattcccgtatgtcatccgtttcattttttacatgaatgagaagcgtggtaataaaaaggtttgtag

SEQ ID NO: 12225 - DNA, 311 bp, Zea mays
cccacgcgtccggtttcctttctcaattgcattgtcatggaaacaagactcgcagaacagtgcaccccaacagacccttgtatttccaaaggggaatgtaattcccagcattaaagctctaaccttctataaatccagtacatttgaagttgatgttttgtatgtggacacatgcgactcgcaaattccacagaagataagcacttacacaattggacctttccaaccctccaaaggtgagagggccaaactgaaagttaaagtgcgtctcaacatccacgggattgtcacagttgattcagctatgatgc

SEQ ID NO: 12226 - DNA, 327 bp, Zea mays
gtgaagaacaggcaggtcaaagccaagcaggttactttccacaggaagaagaatctgcagtactatgaaatttctgccaagagcaactacaactttgagaaacctttcctgtacctcgcaaggaagctggctggtgatccgaaccttcactttgttgaagctgttgctcttaagcctccggaagttaccatcgacatggctatgcagcagcagcatgaagctgagcttgctgcagcagctgcacaacctcttcctgatgacgatgatgatctgattgagtagaaaggatcatgagtcttgaacttgagcaggagttgtgccttgcgt

SEQ ID NO: 12227 - DNA, 220 bp, Zea mays
cggacgcgtgggggaatatcactggcaaccccagggctctccggaggctgaggaccgcttgtgagagggcgaagaggactctgtcttccactgcccagaccacgattgaaattgactcgctgtatgagggcatcgacttctactccaccatcacccgtgccaggtttgaggagctcaacatggacctgttcaggaagtgcatggaagctgtatgagagtg

SEQ ID NO: 12228 - DNA, 327 bp, Zea mays
aagaggccttcagacaagcccctgcgtctcccccttcaggatgtgtacaagattggtggtattggaactgtccctgttggacgtgttgagactggtgtcattaagcctggtatggttgttacttttgggcctactggtcttactactgaggttaagtccgttgagatgcaccatgaggctctccaggaggcccttcccggtgacaatgttggcttcaacgtgaagaatgttgctgtgaaggatctgaagcgtgggtatgtagcctccaactccaaggatgaccctgccaaggaggctgctagctttacctcccaggtcatcatcatg

SEQ ID NO: 12229 - DNA, 327 bp, Zea mays
ctttttctgaatctggctaatgatcccaccattgaacgtattatcacccctcggattgctctaacaacagcagaatatttggcatatgaatgtgggaagcatgtacttgtcatcttgacagatatgagctcttatgcagacgcacttcgtgaggtttctgcagcccgagaagaggtgccaggtaggcgtggttatcctggatatatgtatactgatctggcaacaatatatgagcgtgctgggcgtattgaaggaagaacagggtccattacccaaattcctattctgacaatgcctaatgatgatatcacacacccaactccggac

SEQ ID NO: 12230 - DNA, 321 bp, Zea mays
ctcaactcccaaggtccctttttttttctcgatctggaagcgccgcagtagcagccatggacgtgagcggagcaggcggtaaggcgaagaagggcgcggcggggcgcaaggccggcgggccgacgaagaagtcggtgtcgcggtcctccagggccgggctgcagttccccgtcagccgcgtcgggcggtacctcaaaaagggccggtacgcgcagtagtaggcacgggtgcccccgtctacctcgccgccgtcctggagtacctcgcggccgaggtgctcgagctcgccggcaacgcggcaagggacaacaagaagacgcg

SEQ ID NO: 12231 - DNA, 313 bp, Zea mays
cgggcgaccgtgaagcagcttcaatcgtcggcatggcgctcgtattgcatagtggggctggaaacaagaatgccttcaaagcacttattgctgcagaatacagtgggatcaaggttgagttgaccaaggattttgagatgggtgtctccaacaagacccctgagtttcttaagatgaacccccttgggaaggttcctgttctggagactcctgatggccctgtttttgagagtaatgctatcgcacgctatgttgctcgcttgaaggatgacaaccctctttttgggtcttcccgtattgaacaagcccacgt

SEQ ID NO: 12232 - DNA, 315 bp, Zea mays
gccgctgcctctcgtttctcttttcaataatcaagatgagccgtggtggtagtgccggtggtggtcaaagttctctgggttatctctttggaagcagtgagccccccaaaccagcagtggcaccagctgcaagtactccacctgtagaaaaaccatctgctgcaaagactgatgcagccaagcaggttgctgctggagttaccagccaaaccaataactaccacagggctgatggtcagaacactggcaacttccttacggaccgtccttcaaccaaggtccacgctgctcctggcggtggctcttccctgggct

SEQ ID NO: 12233 - DNA, 135 bp, Zea mays
caacgagaagagcggcggcgcgggcggacaaggagcaggcggaggaggagctgtgccaagccacaatgggtatctcacgcgactcgatgcacaagcgccgtgccatcggtggaaagcagaactcctggaggaaga

SEQ ID NO: 12234 - DNA, 129 bp, Zea mays
cagcagattgcctctgtgaaaattatacggaacaagcagactgggcactcagaaggttatggttttattgagttttactctcaagccgctgcagaacatactctgatgaacttcaatgggcagatgatg

SEQ ID NO: 12235 - DNA, 129 bp, Zea mays
cagggaatgggaattcctgtaggcaaacttgctctatacactgctcttggaggagttcgtccatcagcttgtttgcctatcacaatcgatgttggcacaaataatgagaaactgcttaatgatgagttt

SEQ ID NO: 12236 - DNA, 300 bp, Zea mays
cagcctgccgcacacgcacgacgccagaatgttctacttcttcttcgaatcgaggggcaagaagaaggaggacgaccccgtcgtgatctggctcaccggagggcccggctgcagcagcgagctggccgtcttctacgagaatgggcccttcaccattgccaacaacatgtcgcttgtctggaacaaattcggttgggacacgatctcaaatatcatatttgttgatcagccaaccggaactggctttagctacagctctgatgatcgtgatactcgtcatgatgagattggtgtcagcaa

SEQ ID NO: 12237 - DNA, 298 bp, Zea mays
tgcaattccctggttgtattgttctcatcattagcctcctgaaatcagagtccattcttgcctgcgacagccacaggtcttctgcgtaacattacgtcagttcacatatataggaagatggctggtgagagtggagcaatggaagaaatcattaatcttctctgtaaatctacaataacccccaagattctagagcagtgtttgtgtaccatttggaacttttctattgatgaaaaatggaggtacaaggttctgaagagcgatgtcctaatgaagattgttggttacctggatgaag

SEQ ID NO: 12238 - DNA, 290 bp, Zea mays
gcaccgtcctcttcgactgcggcatccaccccgcgtactccggcatggcggcgctgccctacttcgacgagatcgacccgtccgccatagacgtcctcctcatcacccactttcacttggaccatgccgcctcgcttccgtacttcttggagaagaccacgttcaagggccgggtgtttatgacccacgccacaaaggctatttacaagctgctgctctcggattatgtcaaagtcagcaaagtgtccgtggaggatatgttgtatgatgagagtgacattgctcgctcc

SEQ ID NO: 12239 - DNA, 297 bp, Zea mays
ccacgcgtccgctgtgatagatacttggaagtggtatgtccaacaaaatgtgggatgcccttgtggaacatgcaaagacttgtgtcttaagtgggaaatattacatatactattctgatgagagcagaagtattggtgctattttcaataacatctatgcattctgtgggttgatttctggcgaacagttctattcatccgagagtcttgatgatagccaaaagctgtttgctgatgcattggtaaagaaagcatatgataactggatatatgtcattgaatatgatggcaaaggtc

SEQ ID NO: 12240 - DNA, 292 bp, Zea mays
gtgcccttgatggaattggtggccatagttccaatgtttgtggaggactttggtgaagggcgcccttggtgtaatcttattgactgttgtagatgatgaagttgcaagttaatgtatttgagtacttcgactcacgtcagcttattgtttgtggcaaccatttccgcagaattcgagaagtggagttgaagcgtgactatgcattcattgaattcagtgacccccgtgatgctgatgatgcacagtacaacctagatggcagggacgtcgatggaagccgcattattgttga

SEQ ID NO: 12241 - DNA, 287 bp, Zea mays
cccacgcgtccgagatcttaactgggaagcctttatttcctggaaaaaatgtggtccaccagttagatttgatgactgatctcttgggtactccatcacttgatacagtttccaggattcggaatgagaaggcaaggaggtacttgagtagcatgaggaaaaaacagccagtaccatttactgaaaagtttcctaaagcagatcctgctgcactcaaacttttgcagaggcttttggcatttgatcccaaggataggccaactgctgaagaggcattggctgatccg

SEQ ID NO: 12242 - DNA, 287 bp, Zea mays
gggcaacgagaaggtgcaggacctgcttctgcttgacgtcactcctctctctctgggtctggagactgccggaggagtgatgaccgtccttatcccgaggaacaccaccatccccaccaagaaggagcaggtgttctccacctactcggacaaccagcctggtgtgttgatccaggtgtacgagggtgagaggacccggacccgcgacaacaacctgcttgggaagttcgagctctccggcatcccaccggctcctcgtggtgtcccccagatcacggtctgcttcg

SEQ ID NO: 12243 - DNA, 288 bp, Zea mays
caaggcctctggacagtctgaggaagacatgctgcagtgcttcattgattccaagtacaagaatgggcgccccaccaccgagggtgaggtaaccgggctacttatcgcagcgctctttgctggacagcataccagctcaatcacctcaacctggactggagcgtacatgcttcgcttcaagcagtactttgcagaagccgtagaggagcagaaggatatcatgagacggcatggcgacaagatcgatcatgacatcctggcagagatggatgtcctctaccggtgcat

SEQ ID NO: 12244 - DNA, 287 bp, Zea mays
acaaagcttgcttatcccctgagagaagttccattctgatgttgctggtaggagctttcacaatgtggacgtttatacagaggatgcgtcaaaaagctgcgtctttgcccaatgtccaattatagcaaggaactgttacctcagttcttgaagaaaatggtactgttgaatgtgttcaatacgaaaccaagtcaggtgaagaactaaaggcttatgcgcccttggcgattgcatgtgatggctgcttttcgaatctacgacgcgcgctttgctctccaaaggttgat

SEQ ID NO: 12245 - DNA, 281 bp, Zea mays
gaaaagttagcagtcaaggttgacaaacttggaaaagaatcccttatcaactctgcaaaaactagcatgtcttcgaaattgattaatagtgacagtgatttctttgcaactttggttgttgaggcagttcaagccgtgaagactacaaatgccaagggagacgtgaaatatccaatcaagagcatcaatattttgaaagctcatggtaaaagcgccaaggatagttatctgttgaatggctatgcactaaacacaggccgtgcagctcaaggaatgcctac

SEQ ID NO: 12246 - DNA, 277 bp, Zea mays
ccacaggatcctctgcgccaccgcaaccgtgtgaccgcccgtaccgccggcgatcccgatccgccgacccgtcccagccccgctcgcagccatgtcgccgtcggagccgacgcgggaggagagcgtgtacatggccaagcttgcggacaggcggagcggtacgaggagatggtcgagttcatggagcgcgtcgccggtacgccgggagcgccggcggcggggaggagctctcggtggaggagcgcaacctgctgtccgtcgcctacaagaacgtcat

SEQ ID NO: 12247 - DNA, 256 bp, Zea mays
ctttggtcctagtggccttactactgaggtgaagtctgttgaaatgcaccatgaggctctccaggaggcccttcctggtgacaatgttggcttcaatgttaagaatgttgctgtgaaggatctgaagcgtgggtatgtggcctccaactctaaggatgaccctgccaaggaggctgctagcttcacatcccaggtcatcatcatgaaccaccctgggcagattggcaacggctatgccccagtgctggactgccac

SEQ ID NO: 12248 - DNA, 281 bp, Zea mays
tgtctgtctgtcgctctcgctctcagacgactgggccgccgccgcttggtgctgaggctttggttggtctcttcggcggcgacgagcacccaccagcagttctgtagaaatggctgatggtgaggacatccagcctcttgtctgcgacaatggcaccggaatggtcaaggctggttttgctggcgacgatgcaccaagggcggtttttcctagcattgttggccgtcctcgccacactggtgtcatggtagggatgggacagaaggatgcatatgttggcg

SEQ ID NO: 12249 - DNA, 280 bp, Zea mays
cccacgcgtccgctctctagggtttttgattttagccgccgccgctgctcatctcacatccctcgagaagacgcctgctcctcgccgatcgatacgatggccgtcttctccgacctccacaccgccgacggcctcaagtccctcgaggctcacctcgccggcaaaacctatgtgtctggtgactccattactaaggatgacattaaggtcttcgccgcggtgccgtcgaagcctggcgctgagtttcctaatgccgcccgctggtacgagaccgtctctg

SEQ ID NO: 12250 - DNA, 280 bp, Zea mays
cacacacaagacacaaccccactcacccggcagggaggccctcttcgtcggcggaggccatggtttccctcaagccgcagaagaggctcgccgcgggagtcctaaaatgtggcaaggggaaggtgtggcttgaccccaacgaggtctacgagatctcgatggctaactcgcgtcagaacattcgtaagctggtgaaggatggattcataattaagaagccacagaaaatccactcaaggtcccgggcaaggagggcccatgaggccaagcagaaggggag

SEQ ID NO: 12251 - DNA, 279 bp, Zea mays
cgctggtcctgtcctacaaccagctcacgggccccatcccgcgcgacgacgcgcgcgacgagatcaacaccgtcgacctctcccacaacaggctcaccggcgacccctcccacctgttcgccgccggccggcccatcggcaaggtggacctgtcgtggaactacctcgacttcgacctcagcaggctggtgttcccgccggagctcacgtacctggacctgtcccacaacctcatccgcggcaccgtgccgctgtcgctggagcgcctgtccacgctgc

SEQ ID NO: 12252 - DNA, 276 bp, Zea mays
ctgggcttggttctctcctcctggagcgcctgtctgttgactatggcaagaagtccaagctcggtttcaccgtgtacccatccccccaggtgtccacatccgtggttgagccatacaacagtgtcctgtccacccactctctcctcgagcacactgatgttgctgtcctgctcgacaatgaggccatctatgacatctgccgccgctcccttgacattgagcgcccaacctacaccaacctcaacaggcttgtctcccaggtcatctcatccctga

SEQ ID NO: 12253 - DNA, 274 bp, Zea mays
cgccgagttcatcgccacgctgctgttcctgtacatcacggtggccaccgtgatcgggtacaagcaccagacggacgcgtcggcgtcgggcgccgaccggcgtgcggcggcgtgggcgtgctgggcatcgcctgggccttcggcggcatgatcttcgtcctcgtctactgcaccgccggcatctcggggggccacatcaaccccgccgtcaccttcggcctcttcctggcgcgcaaggtctccctggtgcgcgcgctgctctacatcgtggcgc

SEQ ID NO: 12254 - DNA, 275 bp, Zea mays
cccacgcgtccggaagctgtggacaaggtcattgttccggatttccatccaaaagagggtgttaagatagagacagatgagaaggctactagcctatcctctgcgtccgttgatgatgctgccgtcattgaagagcttattgcaaagctgcaagcaatttctaaaacattgtcaccaggattccgtatgaaccctatacagtttgagaaggatgatgataccaatttccatatggacttgattgctggttttgctaacatgcgggccaggaacta

SEQ ID NO: 12255 - DNA, 302 bp, Zea mays
attggggagaaaacaaaggctcaagatcgtattgctggtgcacacttctttagtcctgcgcatgtgatgccacttctggaaatagttcgtactcagcacacttcaccacaagttgttgttgacttgctggatgttgggaagaagattaaaaagacaccaatagtcgtcgggaactgtactggctttgcagttaataggatgttctttccatacactcaatcagcactcttttatgttgatcttggtatggatgtttataagattgatcgtgcttgtaccaaatttggaatgcctatgggtcc

SEQ ID NO: 12256 - DNA, 302 bp, Zea mays
cggacgcgtggcgtaatgaggaaatgctcggtctggggcaaggctccatctaagattgttgcctcttatcagactacaaagggagaaactaaaaccagatcttctcttgacttctggatggtggggcttgtcacgtcacttccactatgtcccagagatactatctgcatttttctggactgttccagctcttttcaatcacttcctaccatacttctacgtgatctttctgactatattattgtttgaccgagcaaagagggatgatgaccggtgctcatcaaagtacgggaagtactgga

SEQ ID NO: 12257 - DNA, 301 bp, Zea mays
ctcctgcatatgctttgggtgaaattgatgaaggtgctccaggtgctgatatcgagaaggccggaatcgtaaatcaacagaaactagagaagaaatttgggcagtcttctgtttttgtcgcatcaacacttcttgagaacggagggaccctgaagagcgcaagtccagcttctcttctgaaggaagctatacatgttatcagctgcggctacgaagacaagaccgactggggaaaagagattggctggatttacggatcgatcacagaggatatcttgactggatttaagatgcactgcca

SEQ ID NO: 12258 - DNA, 299 bp, Zea mays
ttgatcatcaagctcttccccgcctcatgaatctgttgacgcagaaccacaagaaaagcattaagaaagaggcatgctggactatttcaaatattactgctggaaacaaagatcagatacaggctgtcataagtgccggtatcatcgctcctttgttgcaactgcttcaaacagcagagtttgatatcaagaaggaggctgcttgggccatctcaaatgctacctctggtggttctcatgagcaaatcaagtacttggtgtctgagggctgcatcaagccattgtgtgaccttcttgtc

SEQ ID NO: 12259 - DNA, 298 bp, Zea mays
cccacgcgtccgcggacgcgtggcaagtccacctccaagtgcgccaccgtcggcatccagggcatcgcctggtccttcggcggcatgatcttcgccctcgtctactgcaccgccggcatctccggcgggcacatcaacccggcggtgaccttcgggctgttcctggcgaggaagttgtccctcaccagggcggtgttttacatcatcatgcagtgcctgggcgccatctgcggcgcgggcgtcgtcaaggggttccagcaggggctgtacatgggcaacggcggcggcgccaacgtcg

SEQ ID NO: 12260 - DNA, 300 bp, Zea mays
gacgtggtcaaggacaaggcggcgctggtcaccggcgggggatccggcatctgctttgagatcgccgcccagctcgcgcgccacggcgcgcaggtcgctatcatgggccgccgccgggaggtcctcgacaaggccgtcgccgcgctccggtcccagggcctccgggctgttggtttcgatggagatgtccgcaaccaggaggacgcggccagagtgcttgctgcaacagttgcacattttggcaagctcgacattcttgtcaacggtgcagctggcaacttccttgcttccccggaggat

SEQ ID NO: 12261 - DNA, 301 bp, Zea mays
gggaagcaaagcacaagaggtggccgccgcagtccgcaccccctccccaatcacgccacccgacaccgcgctccgcagtttcgtagtcgctgctaggcttccggcgagatggacgtggtgaaggcggcgcagttgtcggggcggacgctggaacgggtagtggtgcatcccttggtgctgctcagcatcgtcgaccactacaaccgcgtcgcccgcgacacccgcaagcgcgtcgtcggcgtcctcctcggcacctcatcccgcgggtccgtcgatgtcaccaactcctacgccgtgccgt

SEQ ID NO: 12262 - DNA, 301 bp, Zea mays
acggaaaaggatgaatttgttgtgctggctaccgatggggtttgggacgtgctatcaaatgatgaagttgttaatactgtcagccgagtcacatctcgggcctctgcagcacgatttttagtcgaatcagctcaccgtgcttggcgaactcggttccccacttctaaagttgatgattgtgctgctgtctgcctattcctgaacacaaatgaagaaagtgaatcttcgagttccttggccaacaatttggcagatgctgtacaagttagcactgctcagtgctccaaaactatccaggtga

SEQ ID NO: 12263 - DNA, 298 bp, Zea mays
gaaggatatcactggcaaccccagggctctccggaggctgaggaccgcttgtgagagggcgaagaggactctgtcttccactgcccagaccacgattgagattgactcgctgtatgagggcatcgacttctactccaccatcacccgtgccaggtttgaggagctcaacatggacctgttcaggaagtgcatggagcctgttgagaagtgcctgagggatgccaagatggacaagagcaccgtccatgacgttgtacttgttggtggctccactaggatcccagtgtgcagcaactgc

SEQ ID NO: 12264 - DNA, 299 bp, Zea mays
tctgctctcccccacctcccggtccggcagcagagagcgggggtgcagagagatcgagatccggaggccgcgagtgggagcgccaccaccagcgactgcggcaatggcgggcacggtgacggtcccggggtcgtcgaccccctccacgccgctgctcaaggacgagctcgacatcgtgatcccgacgatccgcaacctcgacttcctggagatgtggcggcccttcttccagccctaccacctcatcatcgtgcaggacggcgacccgaccaagaccatcaaggtgcccgagggcttcg

SEQ ID NO: 12265 - DNA, 293 bp, Zea mays
ccgcagtctatcatggaaacaagctcaactgggacaaacatacctcagtttgttcatggcatggcgtaaaatgctcagaagatcagtcacaagtttttgaattgagggtaccggctgctggtcttatcggagtaatttctccaaacactcttggcaagctttattctcttcaagtactgagcctgcggtctaatcgattgaccggaagtcttccagctgatgtggcctcccttccgtctttacgttccatatacctacagcacaatgaactttcaggagggttgccttcttcc

SEQ ID NO: 12266 - DNA, 281 bp, Zea mays
ccagccgccaccaggtgcagagtctttcgtcatctcttctccggcgaagaacccccagtcgcccaccagatcacttgttaaactttggttgaggggtgatggcggtttctttcgcaaacctcaactccgaggcagggcttaaaaagcttgatgagtaccttctcactcgcagctacatcactggctaccaagcttccaaggatgacttgggtgtctacacttcgttttcggctgctccctcggccaagtatatcaacgtagcaagggtggtttaaccacat

SEQ ID NO: 12267 - DNA, 298 bp, Zea mays
gaggcatgcaactcttaggataactgcttcagaggaaaatgcgcttatggagcttctaagctttatgtatagcggcaagttgacgacaaaccagccaactgtcctgctggatatattgatgatcgctgacaaatttgaggttggttcctgtatgcggcactgcagtcaattgcttagaaatttgcctatgaccacagagtctgcactgctctatctggatctaccttcaagcatttcaatggctgctgcagttcagccattgacggacaccgccaaggaattccttgccaacaaatac

SEQ ID NO: 12268 - DNA, 295 bp, Zea mays
gcacgacctcacggcgctgatggcggcgcactgtgaccgccacctggtgttccccctgctggagttcctccaggagcggcactctactcggagtcggagatcctggaggccaagatccgcctcctcagcggcaccaacatggtcgactacgccatggacatccacaagtccctctacggcaccgacgacgtgcccgaggacatggtgaagcgccgcgccgaggtcgtctccaggctcaggtcgctcgaggaggccgcagccccgctcgtcgccttcctccagaacccgcagctcg

SEQ ID NO: 12269 - DNA, 284 bp, Zea mays
cccttttcaagtatagtctctctgctaagcgaaggtagcttcgaagctagtctcggcggctctagaagacgatgggcaacgacgacgtgatcgagagcggcgctggcggcggcgagttcgctgccaaggactacacggaccctcccccggcgccgctgatcgacgcggcggactggggtcctggtcgctgtaccgctccgtgatcgccgagttcatcgccacgctgctgttcctgtacatcacggtggccaccgtgatcgggtacaagcaccagacggacgcgt

SEQ ID NO: 12270 - DNA, 287 bp, Zea mays
ttgatccttatgttaaatgtcggtctccaccaaagatacttgtcatcttgaatcctcgatctggacatggtagatctagcaaagtttttcatggaaaagtggaacccatatttaagcttgcaggtttcaagatggaagtggtaaaaactacacatgctgggcatgcaaaatctcttgtatcaactattgattttagtacctgtcctgatggtattgtatgtgtgggtggtgatgggattgtaaatgaggtcctcaatggtcttctatgcagagatgatcaaaatatg

SEQ ID NO: 12271 - DNA, 288 bp, Zea mays
gcgggagcagctcgttgcgctgctccgcacggcggcggaggcgagccccgccacgatggcggccgtccgccgcgccgttgaggccgaccctgccagcaggaagctcttcgtccacggtctcggatggggtgccggcgccgaggacctccgctccgccttctcacgcttcggcgagctcgaggactgccgcgtcatctctgacaagcaatctggtagatccaagggctacgggttcgtcctcttccgctcccgccgctctgcgctccgcgccctcaaccgccctcagct

SEQ ID NO: 12272 - DNA, 286 bp, Zea mays
cagccacctctgggcgcatgaggcgtacggagtggaaccagacataatgaccttagcgaagcactggccaacggcattcccatcggcgttgtcctggtgaaggagaagatcgccgcagccataaactacggcgaccacggcacgacgtttggcggcgggcctctcgcctgccagaccgcgataacggtgttcgacaagatcacgagacccggtttcctggccgaggtgtcgaggaaaggggagagcttcaagcagctgctccgcgccaagctgagcgggaaccgca

SEQ ID NO: 12273 - DNA, 296 bp, Zea mays
ctttaaccaagttaatatgctgtatggcacgctcacagaattctgcacacctgagagctgcccgacaatgacagctggcccaaagtatgagtacagatgggctgatggtgtgcagataaagaaacccatagaggtatcagcaccaaaatatatggagtatctgatggattggattgaaggccagcttgacgatgaatccatatttcctcaaaaacttggcacaccattcccaccaaacttcaaggaagtagtgaagacaatattcaagcgcttgtttcgtgtttatgcccacatct

SEQ ID NO: 12274 - DNA, 292 bp, Zea mays
aagaaaggtgaacggcaaaggttactacatttatgagaagggtgggaagccaaagccagatcctagtgttaagcatgttatcgaggagtaccgaaagcacgcaaacacaatgcctggtggaaagcctgttactttaacggatcaagatattttggagatgattttcttcccagttgtgaatgaggcatgcagggttatggatgaaaatgttgtaattcgagcttctgatcttgatattgcttctgttcttggaatgggctttcctaaatacaggggtggtcttgtcttctgg

SEQ ID NO: 12275 - DNA, 292 bp, Zea mays
ctattttcgagggcccctatatcgatccggcttaaaggaatcactaatgatacaaaggatccttctgtggatactttccggacaacaacattgcatatgctcaagcactttggtgttcctctggatggtttcaatctaaatattgacagccgtggatctcctcctcttggtggtggtgaggtgtttctccgggttcgcaatataaatagcacattgacggcagcaaattgggtagatgaaggtatggtgaagaggataaggggtgtttcgttctccactagagtatctccac

SEQ ID NO: 12276 - DNA, 293 bp, Zea mays
ccattaatgacgactcttggccaacagaagtgtttgagcttgtcactggagagaaatcgaagacattggaaaggcttgaccctggtgccactgcttcacacacatatgtcctggagaccaaaacacagggcaggttccagggttcaccagctatcattacataccgtgttcccacaaagacagctcttcaggaggcatactcaactcccatcttcccactggatattctcgctgagagacctccagagaagaagtttgaatgggctaagaggcttgtgatgaaatacgggtca

SEQ ID NO: 12277 - DNA, 287 bp, Zea mays
gacaagacctaccctgctgggttcatggatgtcatttccatccctaagacaatggagaactacaggctgctttatgacaccaagggccgcttccgtcttcacccaatcagggatgaggatgccaagttcaagctctgcaaggtgaggtccgttcagtttggccagaagggcatcccctacctgaacacctacgacggccgtaccatccgctaccccgacccgctcatcaaggccaacgacaccatcaagatcgatctggagaccaacaagatcatggacttcatcaa

SEQ ID NO: 12278 - DNA, 290 bp, Zea mays
  unsure (1)..(290): unsure at all n locations
gcaaacaccgcgaaccgcccccgctcccaaacccgaccgagcaaagcgcaaagccccccaaccgcggatcaatccgcagcatcgatggcgcccaaggcggagaaaaagccggcggcgaagaagcccgcggaggaggagcccgcgaccgagaaggcggagaaggctccggcagggaagaagccgaacgcnagaaacgcctccccgcgggcaagtccggcgccggcgagggcaagaagggcaagaagaaagccaagaagagcgtggagacctacaagatctacatcttcaag

SEQ ID NO: 12279 - DNA, 285 bp, Zea mays
atcaggggtttcacacatagcttcgtcgatttgaatttgatgtactaatggagtctaagggtggcaaaaagtctagcagtagtcgttctatgatgtatgaagctccccttggctacagcattgaggacgttcgacctgccggaggcgtgaagaagttccagtctgctgcttactccaactgcgcgaagaagccatcctgatatcccttttggcttcctcattctagtagtttaggatttcttttctgacactttgattctggccaatctctctggcctgctgctt

SEQ ID NO: 12280 - DNA, 287 bp, Zea mays
cttggcggctgcggcggacacggaggcgaaggaggaggagcagcagcagcaggcggcgccgaggagcggcatcccactcagtgcttgcaaccatggctaggggaatgaagaagcacttgaagaggctcaatgcgcccaagcattggatgctcgacaagcttggcggagcttttgctcccaagccatcttctggacctcacaagtccagggagtgccttcctctgatcctcatcatcaggaacaggctcaagtatgctctgaactaccgtgaggtcatttctatcctg

SEQ ID NO: 12281 - DNA, 292 bp, Zea mays
gagggtcattgatgattgcagcggttccgaacatcatgggctggcttgcaatctccttcgcgaaacacacttcgtttctgtacatgggacgattgcttgaaggatttggtgtcggtgtcatttcctatgtggtaccggtatacatagcagagatatctcctcagaacatgagaggagctcttggcgctgtgaacccgttgtctgcaacatttggtgtcatgtttgtctatgtgcttggcttcttttttccttggaggcttcttgcattaataggaacgttgccctgcttatt

SEQ ID NO: 12282 - DNA, 289 bp, Zea mays
gaggtgcggagggacttttgctcgctggacaagtacgtgtgggcgttcgtgaacaacaagccgctgtcgccgagctacaagtacagccggaagatcccggtgaagacgtccaagtcggagtccatcagcaaggacatggtccggcgcggcttccgcttcgtcggccccactgtcatccactccttcatggaggcggtcgggctcaccaacgaccacctcgtctcgtgcccgcgccaccgcgtctgctccgccgccgcccgcgtaaataactgattctgctgacgaccac

SEQ ID NO: 12283 - DNA, 284 bp, Zea mays
cagagttgttatgatgagggtaagcgtgtagcagagacgctgatgttcgactatcacaggcagcatggcattggtaatacttcatcttgcacttaaactgtaatattagctcatagccctctttattgtgtgataactctaggcttatgatttgtcctcagcaatatttataatctatgtctgtagaaatccgaattgccaggattttcaacacctatgggccaaggatgaacattgacgatggccgtgttgttagcaacttcattgctcaggctgtgcggtaa

SEQ ID NO: 12284 - DNA, 283 bp, Zea mays
caaacattgaggtctccttcaaagtttataggccgcagtgatactctaccacatgttgatgcacggtatccagccatactattcaaacagcagcttactgcatgtgtcgaaaagatctttgggcagctcagagataatctaaaaaaggaaatatcacctcttcttaatgtttgcattcaggctccaaagtcaacacgtgggcaatctggaaaagcatccaagtcatctggagttggtgcccacccagcatcgaactccaactgggacaatatcgtcaatttcc

SEQ ID NO: 12285 - DNA, 282 bp, Zea mays
ccactcatcttttctcgtttagaacctctaaaatttcccccactcgccagtcgcagcagcacctgtagcagccatggacgccagcggaccggtagcaaggggaagaagggggcggccgggcgcaaggcaggcggccccaggaagaagtcggtgacgcggtccgtcaaggccgggctgcagttccccgtcggccggatcgggcgctacttcaagaagggccggtacgcgcacgcgtgaggcactggcgcccccgtctacctcgccgccgttctggagtacctc

SEQ ID NO: 12286 - DNA, 283 bp, Zea mays
ggagacaaccaaaaagaagacaagggttgtgacagacacgctaaatccaatatggaaccagacatttgatttcatggtagaagatgcactgcatgatttgctcatggtggaagtatgggaccatgatacatttggaaaggattacatagggaggtgcatcttgacactgacgagagttatactcgaaggtgaattccaagatacctttgtcttgcaaggtgccaaatcgggaaaactaaacttgcatttcaagtggacgccacagccaatctatcgtgatcgt

SEQ ID NO: 12287 - DNA, 282 bp, Zea mays
cggacgcgtgggactggcgaggcaaaagcgcaaacgcgaccacagacagagcgcgcttcaaggccttttttttttgagataacaaggaggagaggaggagaacgcggtcacgatcacctgggtgaaggcgaggcagatcttcgacagccgcggcaaccccaccgtcgaggtggacgtgggcctcagcgacggcagctacgcgaggggggccgtacccagcggcgcatccactggaatatatgaggccttggagttgagggatggaggatctgattatcttgg

SEQ ID NO: 12288 - DNA, 288 bp, Zea mays
attcccgagtctccagccaaccgcatccagtccacccccatccccctcgaccccgacaaacccgacccgatggcgcccaaggccgagaagaagccagcggagaagaagccggcggccgaggagaaggcggagaagacgaccgcagtaagaagcccaagtccgagaagcgcctgccggcctcgaagtcctccggcaaggagggcggcgagaagaaggggaagaagaaggccaagaagagcgtggagacctacaaaatctacatcttcaaggtcctgaagcaggtgcacc

SEQ ID NO: 12289 - DNA, 282 bp, Zea mays
aaaccctagccctcgcaccgccgcctcctccgccacccagcgctcgaactcctcgcgtcctgcgagcgcgctccgcaacgtcaccatgaagttcaacatcgcgaacccttccaccgggtgccaaaagaagctggaaatcgatgacgaccagaagctgcgtgccttttatgaccgaagaatatcccaggaggacagtggtgatgctctgggtgatgagttcaagggttatgtcttcaagatcatgggtggatgtgataagcaaggcttcccaatgaagcaagg

SEQ ID NO: 12290 - DNA, 283 bp, Zea mays
gaagctccgtagctaaattcaaatattacaaacacaaaagtggagtgcagaaccaaaatggctgcctcgaccgtccttctcgttgcttttctagcattggtcacttctcatgccattgcctctgatcctagcccgctccaagacttctgtgttgccgacaaagactctccagtgaaggtgaatggatttgtttgcaaagaccctatggctgtgaacgctgacgacttcttcaaggctgcaaaacttgatcagccaagggacaccaccaaaagcaaggtgggat

SEQ ID NO: 12291 - DNA, 279 bp, Zea mays
catcaagcctggtatggtagtcacctttggtccaaccggcctgactaccgaggtgaagtctgttgagatgcaccacgaggcacttcaggaggctcttccgggtgacaatgttggcttcaacgtgaagaatgttgctgtcaaggatctgaagcgtgggtttgtggcctccaactccaaggatgaccctgccaaggaggctgccagcttcacctcccaggtcatcatcatgaaccaccctgggcagattggcaacggctatgcccctgtgctggactgcca

SEQ ID NO: 12292 - DNA, 278 bp, Zea mays
ttaagcctggtcactttcagggcaattcctacgatatagtttctgctttccagtgctatggagaatatgttagtggttcaatcactgatgagcaaagaaagaatgtgctccgcaattcatgtccaggggcaggtgcctgtggtggtatgtacacagcaaacactatggcatctgctattgagacattgggcatgagccttccatacagttcttcgacacctgctgaagacccgctaaagctagaagagtgccgtcttgctgggaagtatcttctagag

SEQ ID NO: 12293 - DNA, 220 bp, Zea mays
ggacacgatgccttccccttcctccgcccactggctgagcctcgtcgggagcatctggctgcagaccgtcaacgggccgaacgcggacttccccgtgtactcgtcgcagctcaaggagctgaagcacatcacgcaggtgcagctcaacttcctggcgttcgcgtcggacgcgggcaagctcttcgggtggttctccggggtggcggcgctgtacctgccg

SEQ ID NO: 12294 - DNA, 188 bp, Zea mays
gctcaagtatctgcccaagctgatcagtggggagcatatcggggcactggcgatgagtgaacccaactctggctctgatgtcgtcagcatgaagtgcaaagctgagaaagtggacggtggctatgtccttaatgggaataagatgtggtgcaccaatggcccgtctgctcagacactggttgtttacg

SEQ ID NO: 12295 - DNA, 229 bp, Zea mays
ccagaaggtgagaagagagagagagagtgtgtgtgatcggtacaaggatcaccgctgtgcctgcgcgtgctgcttcaccgaatcgagtcagatcctgtccgaatccgagctaagggatggcaaccggtagtgaagcctcgaaggcagctgaggctgtggttgactggcataaacacgacagcaagaggatgctccatgcggtttaccgtgttggggatctggaccgcac

SEQ ID NO: 12296 - DNA, 182 bp, Zea mays
gcctgctcctggcgcgccccaacgtgaagctgttcaacgccgtggccgtggaggacctcatcgtcaggggagggcgcgtcggcggcgtcgtcaccaactgggcgctcgtgtccatgaaccacgacacgcagtcctgcatggaccccaacgtcatggaggccaaggtcgtggtcagctcctgc

SEQ ID NO: 12297 - DNA, 178 bp, Zea mays
ggctttcattgcaggcctcgcgtctccagtggcagggcaagagaaaggagaggatggcgtcgccgataccgcgcgagtgggtcgggctgcagcagtttccggcggctacacagaccaagctgcacgaactcctcggcaaactcaaggaggaggatgtgagcacattaacaattctggt

SEQ ID NO: 12298 - DNA, 307 bp, Zea mays
ggatctgcaggaggacttcatgggtggtgctgaaattattgtttccccacccgtcgtctccttccgtgaaacggttcttgagaagtcctgccgtactgtcatgagcaagtctcccaacaagcacaaccgtctgtacatggaagcgcgccccttggaggagggtctcgctgaggccatcgatgacggccgtattggcccacgtgatgatccgaaggtgcgctcccagatcctctctcaggagtttgggtgggacaaggacctggccaagaagatttggtgttttggacctgagaccactggcccgaac

SEQ ID NO: 12299 - DNA, 306 bp, Zea mays
tcttgaacagagggtggatgtaaagatgaagtcaaaaaagatgatggattgcttgaatagatttcatgttgctctgccaaagcctcgtgacaacaaggagaggcctgtttgcatccctctggctgttctggaagctagggctaatgctgctgcaaaggaaaagaagcttgagaaggacattgagaatgagaatggaggtgctggggtctattctgcaagtctcaagaaacattatattttggccaatgatgaatggaaggaggatattcttccagagatactggatggtcacaatgttgccgattt

SEQ ID NO: 12300 - DNA, 306 bp, Zea mays
aaccataccagcggcgccgcaggctgacgaggaggcggagtagagtggccggactacctcgacacctccactgcaaccatgggtatctcacgtgattcgatgcacaagcgccgggccaccgtggaaagcagaagacgtggcgcaagaagcgaaagtatgagcttggccgccagcctgctaacaccaaactgtctagcaataagacagtgaggagggtccgtgtccgtggaggcaacgtgaagtggagggctctccgattggatacaggtaactactcgtggggaagtgaggctcttacccgcaaga

SEQ ID NO: 12301 - DNA, 303 bp, Zea mays
gcaaggactccgccaagaagacggccaagaagtcccgcgtcaagtgcttcatcaagctcgtcaacttcacgcacctcatgcccacccgctacaccctcgacgtcgacttcaaggacgtcgcatcgggcgggcccgacgcgctctccacccgggacaagaaggtcgaagcctgcacagccgccaaggcgcgcctcgaggagaggttcaagaccggcaagaacaggtggttctttaccagactccgcttctagacgtcgggcgtccctcatagtgtctgatttagttgtcaatttcttgtacctg

SEQ ID NO: 12302 - DNA, 256 bp, Zea mays
ccaatgtggccctcatcttctctgggcgcacggtgaaatatttctcaaacatgaggaagaatttgggtcctggagtggatggttgggcaatttcgttgaaggccatgatgagcatagtggttgtactgggtcttgtcatcaccggtatctattggggagtgaacaagtttgttattgataactcatctgtgcccgtggttgagcggaaaaagaaggacaagccaaagctcagcatgggtgagagcatgaagttctg

SEQ ID NO: 12303 - DNA, 271 bp, Zea mays
aaatttgataagggagagtagattggggaaagtgtatttggcagaacttcctgaaggcaaattactggaagttatgaagattgataatgctaatggaagaataccagtagatgactttctagagttggttgctcgtatatcagatattagacaccctaacattcttgaattagttggatattgtgctgaatatgaacagcggttactcgtgtataactactacagtaggaaaacattacatgatgtactacatgaacggggagatctagat

SEQ ID NO: 12304 - DNA, 264 bp, Zea mays
gctatctcgagctagctagctgctgtaaccgttgccatggccaaaatggtattgctctgcgtgctcgtctcctcctcctgatgcccttggcctccctagccctgacgcaggacttctgcgtcgccgacctgaccttcagcgacacgccggctgggtacccgtgcaagtccagcgtcaccgccaacgacttctacttccacggcctggccggcccaggcaaaataaacccactcatcaaggccgccgtcaccccggccttcgtgg

SEQ ID NO: 12305 - DNA, 302 bp, Zea mays
cccacgcgtccgagattatgcggtaaaagctgctcatgtggagcttgctgagaggatgcgaaagagagatccagctactgcacctactgttggtgaccgtgttccttatgtaataattagagcagcaaaaggggcaaaggcatatgagaaatcagaagatccgatttatgttttggacaataatatacccattgatcctcaatactaccttgagaaccaaattagcaagccacttttgaggatctttgagccaattctgaagaatgccagcaaagagttgcttcatggaagccacaccagat

SEQ ID NO: 12306 - DNA, 302 bp, Zea mays
cggacgcgtgggcggacgcgtgggcaaagatggcagtgccgctgctgacgcagaagatcgtgaagaagcgggtcaagcagttcaagaggccacacctcgaccgctacaagtgcctcaagccaagctggcgtaggcccaagggtattgactcccgcgtcaggcggaagttcaagggatgcaccttgatgcccaacattggatacggctctgacaagaagacgaggcactaccttcccaacaagttcaagaagtttgtcgttcacaacgtctctgagctggagctgctgttgatgcacaacagg

SEQ ID NO: 12307 - DNA, 295 bp, Zea mays
aggatattcagcttgatatcaatataagagtgtttgatggagccgaccctatggagctgcatgtttatgattttaaaggacctggtgtaaccttatcaatgtacaatagcgatgagtttattaggccttttgctaagtcctccatggatatggctctttcaaaaaagtcgtctcttcatctcagcaccaagaatacaatcatcaagaagtatgacgacaggcatggatcatctatgtttctacaagctcgcggtcacatttattaggccttttgctaagttcatggatatggctc

SEQ ID NO: 12308 - DNA, 302 bp, Zea mays
gttcttggtaccccaacgcgcgaggaaatccgatgtatgaatccaaactacaccgagtttagatttcctcagatcaaagctcacccatggcacaagattttccacaagcggatgcctccagaagctatagatctcgcttcacgcttgctccagtattcaccaaatctaagatgcactgctcttgaagcgtgtgcacatccattctttgacgatttgcgagaaccacatgcgaggttgccaaatggacggccatttcctccactgttcaactttaaacaggaactagcaaatgcctccccaga

SEQ ID NO: 12309 - DNA, 233 bp, Zea mays
cttcctactttgtggagtggatccctaacaatgtgaagtcgagtgtgtgcgacatcccacccatcggcctgaagatgtcctccacattcatcggcaactcgacctccatccaggagatgttccgccgcgtcagcgagcagttcactgccatgttcaggaggaaggccttcttgcattggtacacgggtgagggcatggatgagatggagttcactgagggagagagtaacatg

SEQ ID NO: 12310 - DNA, 310 bp, Zea mays
cccacgcgtccggagtttgctgaggtcttcaatggacacatatttgtgaatgaaaagggtgctcaatttaaagctttcgtggaatatgcaccatcacaacaggttcccaagtcaaatgtcaagaaggatggccgtgaagggactgttacgaaagatcctgagtacttggagtttcttgagtttatttcaaagcctactgagcatctgcctagtgctgaaattcagcttgaaaggaaagaagccgaaagggcagctgctggaaaggaggcacctgttgtgacacctcttatgatgtatgtccgccagcaaa

SEQ ID NO: 12311 - DNA, 307 bp, Zea mays
agcctggtatggttgttacttttgggcctactggtcttactactgaggttaagtccgttgagatgcaccatgaggctctccaggaggcccttcccggtgacaatgttggcttcaacgtgaagaatgttgctgtgaaggatctgaagcgtgggtatgtggcctccaactccaaggatgaccctgccaaggaggctgctagctttacctcccaggtcatcatcatgaaccaccctggccagattggcaatggctatgccccagttctggactgccacacctcacacattgctgtcaagtttgctgagct

SEQ ID NO: 12312 - DNA, 308 bp, Zea mays
cccacgcgtccgatcatctgacagattttctacatccgcactgatggaaaggatacctagtagatggccacggcctacatggcatgctccttggaagaactatcgggtcatcagtggtcacttgggatgggttcgatctattgcatttgatccagcgaatgaatggttctgcactggttctgccgataggacaataaagatatgggatcttgcatcaggaaccctgaagcttacactgactggtcatattgagcaaattcgtggacttgctgtcagccaacgtcacacttatttattttctgctggtg

SEQ ID NO: 12313 - DNA, 309 bp, Zea mays
tgggcatccaatcagacatcgaggcagaaggcccaagcagatctgctaaaagcggaaaaggaccagattgcaaatttaactgacattttcgggataccagagacccagcttaagttcataatcgaagcttggtcacagattatagaatgcaggcgagtgttgaaatggacatatgcttatggctactatctggatgataagatcaagagtgaattttttgagtatctgcaaggtgaggctgagtctggtttggaacgcctgcatcagtgcgctgagaaagacttgcaaaattttttgccgtctgtgaaa

SEQ ID NO: 12314 - DNA, 310 bp, Zea mays
ccaaccaacaagcaaaaattccccaatcctctcgtctccgcggcgaagatgtcggggcgcggcaagggcggcaagggcctgggcaagggcggcgcgaagtacaccggaaggtgctgcgcgacaacatccaggggatcacgaagccggcgatccggaggctggcgcggcggggcggcgtgaagcgcatctcggggctcatctacgaggagacccgcggcgtgctcaagatcttcctggagaacgtcatccgcgacgccgtcacctacaccgagcacgcgcgccgtaagaccgtcaccgccatggacgtcgt

SEQ ID NO: 12315 - DNA, 301 bp, Zea mays
gattattctttctccccgcgtgctctctatctctcccctctttctctccctctgcccgacgactaggccgccgccgccaccgccccgccgccgccgccgccgtgcccaggtctttgtcggtccttgtccggcaacgagcaccctacagatggctgggaggcacaccattattctgatgcagccatctcaaaatagggcttctagaacatttatggattacaattcgattaatcatgcattggatggaatctgtgggctttatgaaaggaaaattagggatatcaacccaatgatcccaaac

SEQ ID NO: 12316 - DNA, 307 bp, Zea mays
cgcagatcatcgatggcaaggccatcgccgccgacgtccgccgcgaggtcgccgccgatgtggccgcgctctcgtcggcccacggactcgtgccggggctggccgtggtcatcgtggggagcaggaaggactcgcagacgtacgtgaacatgaagcgcaaggcgtgcgccgaggtcggcatctgctccatcgacgtcgacctcccggaggacatctccgagaccgcgctcgtcgccgaggttcatcgcctcaacgctgaccccgccgtgcacgggatccttgtccagcttccacttcctaagcatat

SEQ ID NO: 12317 - DNA, 305 bp, Zea mays
agtcttttcactagaagaaggacctggacagctctttaaggcacttgctgtatttgcactgagggacatcaacctcacaaagattgaaagtcgtccacacaaggaaaggcctcttcgggtatctgatgactgttcctcactcttaaagaactttgattaccttttttatgttgaccttgaagcatcaatggctgatccaaagactcagaatgctcttggaaatctgaaggagtttgcaacatttttaagagttcttggaagctatcctacagatgtgaatgaaccttagattgaaagtactgcag

SEQ ID NO: 12318 - DNA, 303 bp, Zea mays
cccacgcgtccgcgatatcaaacgatcggtctgtgaagatatatgatgttgtaaactatgacatgatgttcatgatacgtctctcatttgttcctggggctattgagtgggttcatcgagaaggagatgttaaaccaaaacttgccgttagtgaccgaaatacacctttcgttcacatatttgatacccattctggttcaaatgacccaatcatgtccaaagagattcatggtggccctgtcaaagttatgaaatataaccacattcatgatgttgttatatctgctgatgccaaaggactgt

SEQ ID NO: 12319 - DNA, 304 bp, Zea mays
caagcggtcattcaagtatgcctgggtgcttgacaagctcaaggccgagcgtgagacaggtatcacaattgatattgctctgtggaagttcgagaccaccaagtactactgcactgtcattgatgcccctggacaccgtgacttcatcaagaatatgattactggcacttcccaagctgactgcgctgttcttatcattgactccaccactggtggttttgaggctggtatctccaaggatggacagacccgtgagcatgctctccttgctttcacgcttggagtgaagcagatgatttgctgt

SEQ ID NO: 12320 - DNA, 305 bp, Zea mays
caacacacaggtcttcgccgacttggatctcgtctcggcctccggcacagagtttgcgcaagaagacgacaacggcgatgaggacgatgacggctccgacgatgatgaggaaagcgactttgacgaggacttcaacgacgtggagggtgtgttttcggttgatgaggacgacgaagatgacggagaggaggaggaggacgacgacgacgaggacctaccaagctggtccaaccttgagaccgtgaattcctgccatccactgtactttgcaaggatgatcgtagagactgcaaccaagtctagca

SEQ ID NO: 12321 - DNA, 294 bp, Zea mays
cacgcaaggtccgggagctgcgacgggctagaccacttgaccatcctgcggatttgtatgatttccatgtctatactgattctaagactttgtttaacatgaggagcacatttgacagaacatctcgtagtggacctaaggcttttgtgagcgagtacgctgtctggagaagtgacgcgggtagaggcagtcttcttgcttcgttggctgaagctgctttcctcactggtctggagaagaacagtgatatcgttcagatggcaagttacgctccactcttcgtgaacgacaatg

SEQ ID NO: 12322 - DNA, 302 bp, Zea mays
gtcctcggtatagcgagaagccttgctcatctccacaggcatgatattatccactacaatctgaaatcaagcaacatcctgctcgacggatcaggcgaggcaaaggtaggagattatgggctagcgaactgcttccaatgctggaccgctacgtcttaagtagcaaggtgcagagcgcgcttgggtacatggctccagagtttgcgtgcaggaccgtgaagatcacggagaaatgcgacgtgtacgggttcggcgtccttatcctcgagatcctgacagggaggacgcccgtggagtacatg

SEQ ID NO: 12323 - DNA, 304 bp, Zea mays
atcagaagccgccgaggggaggcgccgacgccgagtttttgctccatcccgcatccaccgccagaatgtttctcacgaggacggagtacgaccgcggggtgaacaccttctcgccggaggggcggctgttccaggtcgagtacgccatcgaggccatcaagttgggatccactgcgatcgggttgaaaacaaaggatggtgttgtccttgctgttgagaaacgtgtgacctcgccactgctggaaccaagcagtgtggaaaaaatcatggaaattgatgagcacataggctgtgccatgagtgg

SEQ ID NO: 12324 - DNA, 305 bp, Zea mays
ggtgaccatgtcatcattggccagtgcaggcccctgtcaaaaactgtgaggttcaatgtcgttaaagtcattccagctggatccgcagctgctggaaagaaggccttcacagcagcctgagtttatagactatgttccatgagtagtctatagaatgatgtctttttaattcaaaagaaatctctcttctaggctggtgcttttcgactataatttggagattgttccaatgtccgtgcaatcatctgaacatgttactacttattgtaccttgtcgtgcaaagttttgctaagatctctattgt

SEQ ID NO: 12325 - DNA, 299 bp, Zea mays
caactttctgttcctcaaaattttttactgtgcctgcctaagagcataggagatttgcgcaatatgtcagtactcaatgtatctgaaaacaaactaaaggaacttccagaatcaattggaggttgcagttccctggaagaatttcaagccaatggaaatgctattgaagatgtgccagcgtcaatttgcaacctagtttgcctgaaatccttatcactgaacggcaacaaaattcgtcagcttccacaaaacttactgaaagactgcacggctcttcagagtttatccctgcacgacaa

SEQ ID NO: 12326 - DNA, 297 bp, Zea mays
ctctgaggaggaatacgtcactgccatcaaggaggaaatcaacaaggtcgttaagcttcaagaagagcttgacattgatgtgcttgtgcatggcgagcctgagagaaacgatatggttgagtacttcggtgagcagctctccggttttgcgttcactgccaatggctgggtgcagtcttatgggtcaaggtgcgtcaagcctccgatcatctacggtgacgtgagccgccccaaccccatgaccgttttctggtcgaaacggcacagagcatgacgtctcgcccaatgaaggggatg

SEQ ID NO: 12327 - DNA, 298 bp, Zea mays
gcccttgttctctgcgactctgcccggccggtctccgaggcgggcggagggaaccagagagcaaggcgaggagcgcggaagggctgacggaaggggcggcggggcatggctcgccggccggcgtcgtgggagcagggcggcgacgagtacgactatctcttcaaggtcgtgctcatcggcgactctggcgtggggaagtccaacctgctctcccgcttcaccaagaacaccttcgccctcgactccaagtccaccatcggcgttgagttcgccacgcgcacactccaggtggagaaca

SEQ ID NO: 12328 - DNA, 300 bp, Zea mays
gttgagggagcaggcggaggcgggagactttatgctgcaaccgcgaagaaggacaaagaatctgtccagatacttctgaatgcgaaaacagaggagttgtcgaggaagacatcagagtgcgggaggttgcaggagaagagccttgcattagccaaagagcttgcggcgctgaagctgtccgcagacatgaaccttcaggaggaagaaatcatgaagtttgcttcacttggtaaccagggaaacctgcagaatgctgttgatgttttaaagagatcacttgctattcggaacaagagctac

SEQ ID NO: 12329 - DNA, 299 bp, Zea mays
gctgtataaatgagtctatgcggctgtatccacaccctcctgtgctgttacggcgtgcaatagttgatgatgttcttcctggaaactataaggttaaggctggtcaagatattatgatatctgtgtacaatatacataggtccccggaggtctgggatagagcagatgagttcattccagagaggtttgatttagagggacctgttccaaatgagtcaaacacagatttcaggtttattccattcagtgggggtcctcggaaatgtgctggagatcaattcgctctcctagaagcaata

SEQ ID NO: 12330 - DNA, 310 bp, Zea mays
aactgggggagagtcaatttatgggtccaaatttgaggacgagaattttgttttaaagcatgagaggaaaggaatgctttcaatggctaattctggtcccaacacaaatggttctcagtttttcatcactactacacggacacctcatttagacgggaaacatgttgtttttggtagagtgatgaaaggcatgggggtagttcgctctattgagcatgtttctgtcggagaagctgactgccccactcttgaagttaaaattgttgattgtggggagcttcctgaaggtgctgatgatggagttgtaaac

SEQ ID NO: 12331 - DNA, 314 bp, Zea mays
gtgatacagcaatagccgttcaccctgaggatgaaaggtataaacatctgcatggaagatacgcatccaccccttcaatggccgaagactcaaaataatctgtgatgctgagttagttgatcccacttttggtactggggctgtcaagattacccctgcccatgatccaaatgactttgaagttggaaagcggcataaccttgaattcatcaatatcttcacagacgatggaaaaataaatagcaatggaggtgcaaaatttgatggaatgccaaggttcaccgctcgagttgctgttattgaggcgcctgaag

SEQ ID NO: 12332 - DNA, 314 bp, Zea mays
ggttgttcatggatttggtcatggagttctgcgtaggacggacccacggtatctatgccaaagggagtttgccctgaagtatctgccagaggatccgcttttccaactgctgtccaagttatatgaggtcgtgcctccgatcctcactgagctgggaaaggtcaagaacccatggcccaatgttgacgctcacagtggactcttgctgaaccactttggactatctgaaacacggtatcacactgtcttgttcggtgtttcgagaagcatgggggtaggatcccagctcatctgggaccgtgcccttggcctgc

SEQ ID NO: 12333 - DNA, 315 bp, Zea mays
atgcaataatgaccttcccccagaactatcccaacagcccgccatcagtaagatttacttctgagatgtggcatccgaatgtttatcctgatggacgtgtttgcatttctattcttcatccacctggtgaagatcccaatggttatgagcttgcaagcgaacgatggacaccagtgcacacggttgaaagtatagttctgagcatcatttcgatgctctctagtccaaatgacgagtctccagcgaatatcgaagctgccaaggattggagagaaaagcgggatgagttcaagaaaaaggtaaggcaatgtgtcc

SEQ ID NO: 12334 - DNA, 314 bp, Zea mays
ctatagaccacagccagtcagccacatcactagctatctgtgcagaggcaatggcgtccaaggttgagctggtggtggaggtcaagtccccggctgacaagctgtgggcggcgctgcgtgactcgacggagctgttccccaagatcttccccgagcagtacaagagcatcgagaccgtcgagggcgacggcaagtcggccggcaccgtccgcctcctcaagtacaccgaggcggtgccgatgctgacgttcgccaaggagaagcttgagacggcggacgacgagaacaaggtggtgtcgtacagcgtggtggac

SEQ ID NO: 12335 - DNA, 317 bp, Zea mays
cggacgcgtgggcggacgcgtgggtgtgaacaagaaagaacagtctgcactgcgagctgtcatcaagtgtgttgaggatcgtaaactagaagctgagtttccactggagggacttcggaagcaacttgaagaactagagaaagccaagaccgagaagaagaaggcagcatcaagcgctaccagtggcggcagcggcggccctgcaaccaagcgcatccgtgcgagcactggaggcccaatgcctcctgccaaggcaggtcttctcactaacaatgcttgcgtgtcttctctcccagctcccaccacattgacccagt

SEQ ID NO: 12336 - DNA, 313 bp, Zea mays
ttcaatgtgaatcgtgttgataacatggtgatccaagcaatatttctgctggatacacttgacaaggacatcaattccttctccatgagagtcagggaatggttctcatggcacttccctgagcttgtcaagattgtgaatgacaattacctttatgccaagcttgctaagtttattgtgaacaaatctgatttggcggaaaaagatatcccagctttggctgatatagttggtgatgaggacaaggctaaagaaattgttgaagcagcaaaggcttcaatgggccaggatctgtcaccagttgatttgatca

SEQ ID NO: 12337 - DNA, 310 bp, Zea mays
cgaggagcagacgatccttcccgacctcgaagcctaccccccttccagctgcggccatggcgaccgtcatgcagaagatcaaggacatcgaggacgagatggcaaggacacagaagaataaagccactgctcaccatcttggtcttcttaaggctaaacttgcaaaattgcggcgggagttgctcactccaacatccaaaggtggtggtggtgcaggtgaaggatttgatgtgacgaagagtggagatgcacgtgttggtttagttggctttccttcggttgggaaatcaacattgttgaacaagctaac

SEQ ID NO: 12338 - DNA, 307 bp, Zea mays
caagaagctccagactggagtcaataagcttgcagacctagtcggagttacactcggaccaaagggaaggaatgttgttttggagagcaagtatggttctcctaaaattgttaacgatggtgttacagttgccagagaggttgagctggaggaccctgtggagaacattggtgctaaattggtcaggcaagcagcagctaagaccaatgatctagctggagatgggacaaccacctctgtggttcttgctcaggggctgatcgctgagggtgttaacgttgtggcagctggtgctaatcctgttcag

SEQ ID NO: 12339 - DNA, 309 bp, Zea mays
cctgccacaacctcctcttcgccaccaccttcaacagctacggcggcctcaaggtgctgttcccgggcctgctggccaacgtggccagcggcggcgagaagctccacgagcggctggtggccgagatccgcggcgccgtggccgacgccggcggcaaggtcaccctcgcggcggtggagaggatggagctggccaagtcggtggtgtgggagtcgctgcgcctggacccgcccgtcaagttccagtacgggcacgccaagaaggacctgctggtggagagccacgacgcggtgttccaggtgaggaagg

SEQ ID NO: 12340 - DNA, 310 bp, Zea mays
gacaattcgtgaaaatactgaaggagaatatagtggtcttgagcatcaggttgtgagaggtgttgtagaaagtttgaaaattattacccgccaagcaagtttgagagtggcagaatatgcttttcattatgccaaggccaatggccgggaaagggtctctgcgattcacaaggccaatattatgaggaagacagatggtcttttcctcaagtgttgccgtgaagtggctgagacgtaccctgaaattcaatacgaggaggtcattattgacaattgttgtatgacgcttgtgaagaatcctggtcttttt

SEQ ID NO: 12341 - DNA, 309 bp, Zea mays
atcgatcttcctggactgacaaaggtcgctgtagaggggcaaccagaatctattgttcaagatattgaaaacatggttcgagcttatgttgacaagccaaattgcatcatcttggctatctccccagctaaccaagatattgcaacgtcagatgctatcaagcttgctagggatgttgatccttcaggtgacaggacttttggagtcttaacaaagcttgatttaatggacaagggtaccaatgctgttgatgtgcttgaagggaggcaatatcgcttacaacacccctgggttggaattgtcaatcgc

SEQ ID NO: 12342 - DNA, 310 bp, Zea mays
acaaattttaggcagacgaaccaagaacaatccctgcttgattggagagcctggtgttggaaaaactgcaattgctgaaggacttgctcagcgcatttctacaggcgatgtacctgaaacaatagaagggaaaaaggtcataacccttgacatgggacttcttgttgctggcacaaagtaccgtggagaattcgaagaaagattaaagaagctgatggaggaaataaagcaaagtgatgagataatactctttattgatgaagttcacactctgataggagcaggagcagcggaaggtgctatagatgct

SEQ ID NO: 12343 - DNA, 307 bp, Zea mays
ccactcgctcggcccgcccctcccgtcgtccccgttcgaaggtgcggcaccggcagggagcgatttgattcgacatgaatcccgagtacgactaccttttcaaacttctgcttattggtgattctggtgttgggaaatcatgcttgcttctcagatttgcagacgattcttatttggacagctatatcagcacaattggggttgatttcaaaattcgcacagtggagcaagatgggaagaccataaaacttcaaatttgggatactgctgggcaagagcgcttcaggacaatcactagcagctacta

SEQ ID NO: 12344 - DNA, 309 bp, Zea mays
ctatcaccttgcttgccctgcttcaccaatcttctacaagcacaaccctgttaagaccatcaagacaaatgttattggtaccctgaacatgctaggacttgcaaagagagttggagctaggattttgttgacatcaacctctgaagtttatggtgatccacttgagcatcctcaaactgaggcctactggggcaatgttaacccgattggtgttaggagttgttatgatgagggtaagcgtgtagcagagacgctgatgttcgactatcacaggcagcatggcattgaaatccggattgccaggatttt

SEQ ID NO: 12345 - DNA, 176 bp, Zea mays
cactggatcaaggacatgcgccacagcaacagcgtcaaggacgaggaagggtacccggccttcgcgctcgtcaacagggtcaccggcgaggccatcaagcactcccagggcgagggccacccggtcaagctggtgccctacaaccccggctaccaggacgagtcggtgctgtggac

SEQ ID NO: 12346 - DNA, 314 bp, Zea mays
gaacaaattgcgtcatgtggtggaattaatacaatggcctccttgatcattaaacattttccctcatttgatttctccatggacagtaacaatcaaatgaaagaaagagtatcctctggtgatctgtcgtcttcccagaacagcaagtcactccaaatcaaaactaagcaattgcgagcctatgaacttgattttctggtcgccatattgggattgcttgtcaaccttgtggagaaggataaccttaatagggtacgacttgcgaatgcccgtgtttctgtcaatctatctcaaagtccagatactgaagaggt

SEQ ID NO: 12347 - DNA, 305 bp, Zea mays
gccgccgaatccgagactccgatctcgggttcaccgcagcgcacagagcagccccgactcccggcccgatccgcgctctcctctccgtcgcttcagtcatggcaggaatggcacctgagggttctcagttcgatgctaagcactatgattctaagatgcaggagctgctgagcaccggtgagactgaggagttcttcacttcatatgatgaagtttttgagagttttgatgatatgggcctccaagagaatcttctgagaggcatttatgcttatggttttgagaagccatctgcaattcagcag

SEQ ID NO: 12348 - DNA, 300 bp, Zea mays
atacgccataatcaaggagcttgatgagccagttaccttaaatgatgggacagtggtcctgcagtttgaagtgagacttcagaatggccttgaatgtggaggtgcctacattaagtacatccgccctcaggatgctggatgggatgccaaggagtttgataatgagactccatacactattatgtttggtccagataaatgtgggtcaaccaacaaggttcatttcatccttaagcacaagaatcctaagactggaaagtatgttgagcatcacctcaaattcccaccttctgtcccata

SEQ ID NO: 12349 - DNA, 302 bp, Zea mays
gaagataattgcaagccaaggcaccgcttcatgtcatcatatgaacagaaagtccaaagttgggataagaggtatcaatacctactttttgctgcagacccctatgaaatcattgcattcaagataccaagtacagagattgacaaatcagcgagcaaattcttctcttactgggatcctgacaagaaggaatacctgctgcaattgtacttcaagccaaggccgccagaaggtagtaaaccaccaccagctcctcctggaactttgcctaatgggactggggctcctggtgctccaccaag

SEQ ID NO: 12350 - DNA, 303 bp, Zea mays
gcagggagagaaaacctcgccgtcaatgtcagcgttcgttcccaagggcgctagggtttaaccccccaactgttcggtctctctctctccccgaatccaattcagcgtcatctagtccgggagcctgcgacatggggtacctccaggaggcccgggagaatcacgtcaagaagaaggtcgaggaagctctgaggagcaaaatgaaacaaaaggctcttcaggaatgtgatttctattgttcaaaatatgctgagtgtgcacgaggaagaacattttctgtggtatggcaatgccgcaaacaag

SEQ ID NO: 12351 - DNA, 301 bp, Zea mays
cggacgcgtggatcaggaaatgtgttcgggaactacttccaggttgcaacctatggcgaatcccatggagggggtgttggttgcgttatcagtggctgcccacccagaattcctctcactgaggcagacatgcaagtagaactcgatagaagacgtccgggtcaaagtagaattacaaccccaagaaaggagactgatacatgcaaaattctatcagggacacatgatgggatgactactggtacaccaattcacgtctttgtcccaaacacagatcaaaggggtggtgattacagtgaaa

SEQ ID NO: 12352 - DNA, 302 bp, Zea mays
ctgctgcaaagaaggcgatttcttcttcctaccaatgtcaactccatagtgagtgaggtaccactgcttgaatggggcagcatcaacttgcacaatggagttgacattggtaggaagaagaaaacccctgctgcaaagaaggataatgctgagggacaagaggttgaggcagcagctgaggaaacgaaaaagagcaaccatgtcacgaggaagcttgagaagcgcaaggagggacgtacccttgacccacacactgaggagcaatttggcagtggacggttgctggcatgcatttcttcccg

SEQ ID NO: 12353 - DNA, 302 bp, Zea mays
catttccaagctcctcctcgcgattccaatccacgcacgcctcctccgcttccgcctcgctcaggcttatagtcagtgatggaacacaaggaggcgggctgccagcagccggagggcccaatcctatgcatcaataactgcggcttcttcggcagtgctgcgacgatgaacatgtgctccaagtgccacaaggagatgataacgaagcaggagcaggcccagctggctgcctcctccatcgatagcattgtcaatggcggtgacggcgggaaaggacctgtaattgctgcatctgtaaatgc

SEQ ID NO: 12354 - DNA, 290 bp, Zea mays
ggacactttgggtgcccttgcattggcgacagaaccacctacaaaccatcttatggagagacccccagtagggagaagggagccattggtaacaaatatcatgtggagaaacttgattatcatggctatgtttcaagtttcagtcctccttagtctcaacttcaagggaataagcctcctgcagttgaaaaatgatgatccagcacatgcagataaagtgaaaaataccttcatattcaacacatttgttctctgccaggtgttcaacgagttcaattcacgtaaaccag

SEQ ID NO: 12355 - DNA, 289 bp, Zea mays
gcgatctggttgtttatctggatgaaccccgagcacagcaggttgtagcatcctgttgcctggtaggcatcgctagtccagtaggtgaagagcctagtgttgttgtccccatacaggtctgggctaacctgcgacccttcggcggtgagcaaggttaccgcgatggcggcggccgtcagggcgcaggtggagaccgaggagagggcagccagagaggtcaagaggaaggcggaggaggccgagaggaaggctgcggccgaggcgcagaaggctgacatggaggcggcga

SEQ ID NO: 12356 - DNA, 289 bp, Zea mays
cccacgcgtccgggacatgagaaggaaagccaggctaagattaagcgctacatgacaatgatggattccatgactgatgcagagcttgacagcacaaatcctaagctgatgactgaatcacggatcattcggattgcacgggggtctggtcgtcctgtcagggatgtcatcgacatgctggaagagtataagcggcttgctaaaatctggggcaagatgaagggtctcaagatcccaaagaaaggggagatgagtgcactgtcccgcaacatgaatgttcagcacatga

SEQ ID NO: 12357 - DNA, 291 bp, Zea mays
gaagcgcaagaagaagacgtacaccaagcccaagaagatcaagcacaagcacaagaaggtgaagctcgcagtgctgcagttctacaaggtggacgacgccaccggcaaggtgacccgcctccgcaaggagtgccccaacaccgagtgcggtgcgggtgtcttcatggccaaccacttcgaccgccactactgcggcaagtgcggcctcacctacgtctacaatcagaaggcgtaatcccatgcgccgctttgcttcacccgcctacctatcaagcattcacctgttggtta

SEQ ID NO: 12358 - DNA, 285 bp, Zea mays
ccactccctaggaggacccagcaacacacacagccgagctttgtttaggcaagatgaacaggaagccaggagactgggactgcagggcgtgccagcacctcaacttcagccgccgagacatatgccagcgctgcagcgagccacgtggagttgctgatcgtggcggcggaggaggaggaggcgactacgccagcttcggtggccgcggtggctcctccttcggcggcggctttggcgctgctggctccgacgtccgccctggtgactggtactgctcctgcggcg

SEQ ID NO: 12359 - DNA, 283 bp, Zea mays
ccctactccatgtacccaggtctgcgtcgggcccttgccggcgatgagaacccgtcagttccaaagatggctcgtcgtggattgatggaacaggacttaagcaaactggatgtgacgaagcttcaccccctgtcacctgaagttatctcacgccaagcaacaatcaatatgggtaccattggccatgtggctcatggaaagtccactgttgttaaagctatatctggtgttcagactgttcggttcaagaatgagctggaacgtaacattactataaagctgg

SEQ ID NO: 12360 - DNA, 287 bp, Zea mays
cccacgcgtccggtgagcctggaaacctacaaggggaaggtcctccttgttgttaacgtcgcctccaaatgtgggttcacggagaccaattacacgcagctgacggagctttatcagaagtacagggacaaagacttcgagatattggcattcccttgcaatcagttcttgcgacaggagccaggtactgatcagcagatacaagactttgcttgcaccagatttaaagctgaatacccagtttttcagaatgtgcgcgtaaacggaccatatgcggcgccggttta

SEQ ID NO: 12361 - DNA, 281 bp, Zea mays
tcattggcatatcgtggacgagcaatcgtttccgctcgaaatatcttcctacccaaagttgtggaacggcgcttactcttattcagagagatatacagttgatgatgcactcgacatcgtacagtatgctgaaaaaagaggcgtgaatgtcttggctgagattgatgtacctggccatgctctttcatggggtgtcggatatccatcattgtggccatcagctacatgcaaagaaccgcttgatgtcagcaatgaatttacatttcaactgatcaatggaa

SEQ ID NO: 12362 - DNA, 283 bp, Zea mays
  unsure (1)..(283): unsure at all n locations
tctctcctctcccccccgncccgttcgtctccggcgagctagggtttgcccccccgcctcgccaccccacggctcccgccatccttggatctccagccatgtacggcggagacgaggtttcggcaatcgtcatagatgtgggctcttacagctgcaaggcgggctacgcaggcgacgacacccccaaggccgtcttcccatcggttgttggttcaattgaacaaactgaagacacagatgaccccaagccagagaaggaagctgactctgcatcagattctaa

SEQ ID NO: 12363 - DNA, 285 bp, Zea mays
gcacctgcgacccctgcacctgcaagtgaggatgaccgggtgcagcatgcaggccgtgacgatggaggaagtagctagatcggaaggacacccttcagtatctctagctaaggccctgtttcaatctcgcgagataaactttagcagcttttttttagctacttttagccatttgtaatctaaacaggagagctaatggtgataattgacactaaactttagcacttcaattcatatagctaaagtttagtaggaagctaaagtttatcccgtgagattgaaacg

SEQ ID NO: 12364 - DNA, 285 bp, Zea mays
gtggatccggggcacggggcaggccatggaccgcctcggatccaccatccagggcggcctccgcgtcgaggaacaggtttcaaggcatcgtacaatcatgaatatttttgagaaagagccaaggatccatagagatgtgtttgttgctcccagtgcagcagtcattggggatgttgagattggtcatggatcgtcaatctggtacggatccatattgagaggtgatgtcaacagcattcatattggatctggtactaatatacaagacaattcccttgtacatgt

SEQ ID NO: 12365 - DNA, 283 bp, Zea mays
cccacgcgtccggtgctccaaataagattgacttcctctctctgtcttacacaagacatgcagaagatgtgcggcaggcacgtgagttcctctcgaaattgggtgatcttagccaaactcagatctttgccaaaattgagaatgttgagggcttgaaccattttgatgaaatactggcagaggcagatggtatcattctgtcaagaggaaaccttggaattgaccttccacctgagaaggtctttttgtttcaaaagtctgcgcttcacaagtgcgacatggc

SEQ ID NO: 12366 - DNA, 281 bp, Zea mays
agttggaatgttgttgagaaaaggtacagaaagtatgaactcttaaatatattggagttcagtagctcaaggagacggatgtccgtgatagtcaaagaaccagagggaaggatattacttctcagcaagggtgctgatagtgtgatgttcaaaaggcttgcaccaaatggaagaaaatatgaagaagaaacaagaagacacataaatgagtattctgactctggtctaagaaccttggttctagcataccgtgtcttagatgagaaagagtacaaggaatt

SEQ ID NO: 12367 - DNA, 279 bp, Zea mays
ccgatccgaagctgtgcctcgtaccatttcgatccaatggcgccgacgtcgaagctgtcgacgggcatcaagcgcgcttcgcggtcgcacgcgtaccatcgccgtgggctgtaggccatcaaggccaagaacggcggcgccttccccaaggccgacaaggccgccgccgccgtggaacccaagttctaccctgccgacgacgtcaagccccgcgttcccagcacccgcatacctaagcctaccaagctcaggtcgagcatcacgcctgggacggtgctg

SEQ ID NO: 12368 - DNA, 277 bp, Zea mays
ctcaaccaggaaattgttagagccctagcaagagaaggaataccatctgttgggatgtcaccatttgcttgtgggtggtctacccaacaaagaaaacttgcatcagcaaatgcttctcaaataattcagtcactccatgcaggttttgtcccagttttgcatggtgatgcagttcttgatgaattattggactgtaccatattgagtggggatgtcattatacgacatcttgcacagcttctaagtccgaaatatgtagtatttctgatgtccatgg

SEQ ID NO: 12369 - DNA, 280 bp, Zea mays
cactcacctatctcgcagcgcccgagcaatcgccacgcccacgccccaatggaagacagcgccaccaatggccatggggttgtgacggctgtcccggcctcgtggaacttcgagccaaacgagaccctcctgggtcttccggcgctctcggttcgcggcgtgctgaccagagtcatggccgggatgttgcccgacggtgggcgggcggtggtccggttgggcagcggcgacccgacagcgttcccgtgcttccggacggtgccagagagcgtggacgccg

SEQ ID NO: 12370 - DNA, 283 bp, Zea mays
caaatagcgaaaccctagcccaaactcgaccgcctctgctataagtagctccactctctctcctccaagcctaccccagccgccgccgccgccaccgccaccgccaccgccacctgccccagcgcgccgccgccgcagccaccatgggtcgcgtccgcaccaagaccgtgaagaagacctccaggcaggtgatcgagaagtactactcccgcatgaccctcgacttccacaccaacaagaaggtgctggaggaggtctcgattctgccctcgaagcgcctccg

SEQ ID NO: 12371 - DNA, 262 bp, Zea mays
gcaatgggtgccattatcgcggactattttcactgcgacctctttttcctggatcaagtgagccagatgaactttacaaaatctgtagcattattggcactccaaatcagcgtacttggcctgaaacggggggaaccttgggcccaagggggggtctagcatctatgggttttcagttccctcagtgtgaaggtgtacatctttcggaagtggttcctttagcaagcaaagatgcagtgaatcttatctcgtggctttgctc

SEQ ID NO: 12372 - DNA, 267 bp, Zea mays
ctgcggcggagcacggcaggcgaaggaggaggagcagcagcagcaggcggcgccgagccagcggcatcccactcagtgcttgcaaccatggctaggggattgaagaagcacttgaagaggctcaatgcggcctcccccaaaacggccgacttttggggcctgctcgacaagcttggcggagcttttgctcccaagccatcttctggacctcacaagtccagggagtgccttcctctgatcctcatcatcaggaacaggctcaagtat

SEQ ID NO: 12373 - DNA, 263 bp, Zea mays
agttgctgcagatttacttactgaagctggtagtgaccgtgtcattgtatgtgatattcattctacgcaagcgttggggtacttcgatattcctgtggatcatatatatggacagcctgtgatctctatgcggggaattttgaagacggctgtggttgtgcaagacgatatctgaagatcttgtggttgtttctcctgatgtgggtggcgttgttagagcacgtgcattcgctaagaaattattgaatgcacgtttagctatt

SEQ ID NO: 12374 - DNA, 263 bp, Zea mays
  unsure (1)..(263): unsure at all n locations
caactctatcatccgaggtgtctccacggtcatggtctcctactccagctggaacggagtgnagatgcacgcgaaccatttcctggtcacggattttctcaagaacaagctcaagtttaggggtcttgttggggtcgggaatttttttcccggcgtctggtgagggcattgatcggatcactactcctcctcacgccaactactcttactcaattgaggctggtgttggtgctggaattgacatgatcatggttccattcaga

SEQ ID NO: 12375 - DNA, 261 bp, Zea mays
catcctcgccttcgcggccagggacagcgtcgtgctcaccggcggcctcggctacaaggtgccgtccggacgccgtgacggccggatatccaatgccacgcaggccctgaacgagctgcccccggacacccctttttgccttttgcccgaggtttgtcacccaactcgtcgacaacttcgcctccaagaacctcagcctcgaggacatggttgtcctctccggcgcacacaccatcggagtctcgcactgcagcagcttcg

SEQ ID NO: 12376 - DNA, 265 bp, Zea mays
aacatggtgatccaagcaatatttctgctggatacacttgacaaggacatcaattccttctccatgagagtcagggaatggttctcatggcacttccctgagcttgtcaagattgtgaatgacaatgtggaaccaccttttttgaaattggggggcccactgtatgactatattgtgaacaaatctgatttggaggaaaaagatatcccagctttggctgatatagttggtgatgaggacaaggctacagagattgttgaagcag

SEQ ID NO: 12377 - DNA, 256 bp, Zea mays
aacgaggccatctatgacatctgccgccgttcccttggcattgagcgcccaacctacaccaacctcaacaggcttgtgtaccaggtcatatcatccctgactgcctccttgaggttcgatggttgggacatacttgttgaagaggccggggcccatgtgggtgcatgtctcttatcctcgcgccttacaagaggatgcacttcatgcatttcctcctatgctccagtcatctctgctgagaaggcctaccatgagc

SEQ ID NO: 12378 - DNA, 256 bp, Zea mays
ccctgacatcgagaccggctgcccgaccccggtccggcgatccctctgcacccctttctttgcgctgccagccccaatctctcgcatccctgtcaaccatggcggcgtcacaggcggaggccggcccggggctcggtcggccggggcggctgtcccagaaggagcaggacatacagatgatgctcgcggccgacgtccacgtcggcaccaagaactgcgatttccagatggagcggtatgtctttaagcgtcgcac

SEQ ID NO: 12379 - DNA, 117 bp, Zea mays
cggacggtggtcggcacgcgtgggtcaagatgaagggtgattactacagataccttgctgagttcaagactggagctgagagaaaggacgacgctgagaacaagatggtggcataca

SEQ ID NO: 12380 - DNA, 283 bp, Zea mays
gccggcgtcagtacccacgcgatccgcggcacggtggtcgcgacgcgtggggccgtctcctcctccgtcccatcactctctgctcgggcactctcacctgcgcgcgccgtcttcgaccgccaccaagatgaccaaggagaggctcattgcagaaaggcaattgggggtccggggggttgttttccgcagaggcggcaagggcaccatgcgcacgaagaagaaggctgtacgcaagacggtcaccacggacgacaagaggctgcagggcactctcaagagagta

SEQ ID NO: 12381 - DNA, 256 bp, Zea mays
ctctgtctgtcgctctcgctctcagacgactgggccgccgccgcttggtgctgaggctttcgttggtctcttcggcggcgacgagcacccaccagcagttctgtagaaatggctgatggatcggcaaagtggaacccaatttggcgcgtttgttcttgtctgcgacaatggcaccggaatggtcaaggctggttttgctggggacgatgcaccaagggcggttttccctagcattgttggccgtcctcgccacact

SEQ ID NO: 12382 - DNA, 256 bp, Zea mays
gcgggcttcatcggctcgcacctcgtagacaagctcatggagaacgagaagcacgaggtcattgttgctgataactttttcactggttcaaaagacaacctgaagaagtggattggctcatcccctctaaaacggcaattcttgttggccttcatccgtcatgatgtcaccgagccgcttcttgtggaagttgaccaaatctatcaccttgcttgccctgcttcaccaatcttctacaagcacaaccctgttaaga

SEQ ID NO: 12383 - DNA, 254 bp, Zea mays
ggcatatgttccgtcgtgaaggcaccaattaccttaatatgaactttaatgcgacgattgaaatagtgacatcaaaggaggtgaagatttgtggtgcccttggtccctgcatttccctaccccgggcccaagggaaacaagaagggagttagctcagttagtgataaggaaattggtgaaggtgggacaaattattggaaaactagttcactgagcagcaaaaccagcattgctttccttttccgagttgattg

SEQ ID NO: 12384 - DNA, 254 bp, Zea mays
ggcatatgttccgtcgtgaaggcaccaattaccttaatatgaactttaatgcgacgattgaaatagtgacatcaaaggaggtgaagatttgtggtgcccttggtccctgcatttcccgttccacaggaccaaggggaacaacgagggctgactcagttagtgataaggaaattggtgaaggtgggacaaattattggaaaactagttcactgagcagcaaaaccagcattgctttccttttccgagttgattgc

SEQ ID NO: 12385 - DNA, 248 bp, Zea mays
catcttttaagatttgccaccaactattctcatagccgtcgtgttggcatcgcaatgggaataccaaggggttctgcaaaaaatgacgctgagcttctggaccttgagacaaaacattcccaagggggttcccccttaaattggtcgtatactatggttgtcacatcattttgaggaagataactttcctcatgtgcagcaggctgaaaacatggcaataaatattgctgatttacttggcaagtcgc

SEQ ID NO: 12386 - DNA, 257 bp, Zea mays
gactagttctagatcgcgagcgagccgctcggatctagactgttttcctttcggctaccatgtcgaatgcgaccgaatttgctgaatggatatgcagcctgcacaagcagcccctgtgcaattgggttcttcggattgggtttgaagttctgaatttcaggcaccacaccattgcagcactatatgtttccaataggtggttctggtctttaccttgtagtagatgaaaatggccagtttagagaagataactttgc

SEQ ID NO: 12387 - DNA, 333 bp, Zea mays
  unsure (1)..(333): unsure at all n locations
tcaggttttgctgctctccgaccccgagctccgaagccgcagcatcaggcgcggcccccctcgcgtgtgaccgagatggcgctgccgaatcaggggaccgttgattaccccagcttcaagctcgtcatcgtcggcgatggtggaactggtaaaactacatttgtgaagaggcatctcactggagagtttgagaagaaatatgaaccaaccattggtgtggaagttcatccgttggatttcaccactaactgtggtaagatcaggttctactgctgggataccgcanggcaagagaagtttggtggcctcagggatggatactatatccatggc

SEQ ID NO: 12388 - DNA, 330 bp, Zea mays
gcttgcctgaggtgtccgtaagcacagctggaactgcagctgagaacattcagcaagtccagcaaagttcgaaagatattcaaagcaagtcccagggcgcttcaacaaggagctgtacaaaggttcataagcaaggagttgcgcttggccggtccgtggacctctctaaattcaccgactacggtgagctcaaagcggaactagacaagatgtttgagttcgagggcgaattggtatctgctaaccggaactggcagatcgtttataccgacaacgagggtgatatgatgcttgtcggagatgacccgtgggaggagttctgcaacatag

SEQ ID NO: 12389 - DNA, 328 bp, Zea mays
ccagccgccaccaggtgcagagtctttcgtcatctcttctccggcgaagaacccccagtcgcccaccagatcacttgttaaactttgttgaggggtgatggcggtttctttcgcaaacctcagctccgaggcagggcttaaaaagcttgatgagtaccttctcactcgcagctacatcactggctaccaagcttccaaggatgacttggctgtctacacttcgttttcgtctgctccctcgtccaagtatatcaacgtagcaaggtggtttaatcacattgatgcgctcgtgaggctgagcggaattactgcagagggccaaggtgtg

SEQ ID NO: 12390 - DNA, 327 bp, Zea mays
ggccgaagtgacacggcgctgccggagaacatgcacaagtggaggatggtcatcgcctacgatggaacaaagttcaaaggttggcagtatcaaccatcaattccaacaatacaatattttctagaggatgcgctgatatgcatcactaagctggatcggaagaaactatgcttagtcggtgcaggcaggactgatacaggtggcacattttactacacccttcagttacagttgcctcagtagtattcattctgcaatgaatggactccttcctcctgagattcgagtcagggaaattagtgcagcacgtcctgaattccatgctcg

SEQ ID NO: 12391 - DNA, 340 bp, Zea mays
ctcaggtgaattgtcccttcttctcgaagggttggaggttggaggagacacttccattgaagagtacatcattggacctgccaccgaggcagccgatgatcttgttactgacggtgataaggaacaaatcacactttatgggcctgaagaaggccagtcatggattgctcgaccttctaagggacccagcatgcttggaagtgtgctttctcttgcatctcgtcatgggagcatggtgaaccagagtgtaccccttatggatccgattgtgacactttttggtagtgtccatgagaatatgcctcaagctggaggaagtatgaggagcacattgtttcca

SEQ ID NO: 12392 - DNA, 336 bp, Zea mays
tgaaaaggtgcttgacctagtcagaatgttctctggtgctaagaagcctattgcatcagtttgtcatggacagttgattttagcggcacaagagtagtcgagaaccgtacctgcacagcatttccggctgttaaaccagttttggttgctgctggtgccaagtgggaagagcctgacacaatggcaaaatgcactgttgatggcaatctcatcacagcagcgacttataattctcatcccgaattcatcagcctatttgtcaaagcactcggaggttcagtggcaggctcagataagagaatactgttcctatgtggggactacatggaggattat

SEQ ID NO: 12393 - DNA, 334 bp, Zea mays
cccacgcgtccgcccacgcgtccgcgtgtatcggctgtcagaacaaccagagtcatatggaaacagttctgtctacacggcaacagattgaatctcgcaatccattagcatttgctcctaaagtcattcatacatctgagcctggtatggacttaggggacttttccaataaaactcctgcttcagctcgtcacaaaaggggatgcaattgcaagaagtcgtcgtgtctaaaaaatactgtgaatgttttcagggcggcgtgggatgctccgtaagttgcagatgcgagggctgtaagaatgcttttggaaaacgggagggggcttctgtgtta

SEQ ID NO: 12394 - DNA, 330 bp, Zea mays
attggcaatgacatgtcaaacataccaccagcaacaggtatagtgtctatcctcaaagcaaaaaagatccagcatgttcgcctgcttgattcagaccatcaaatgttgaatgcccttgcaaatactggaatagaagtgatggttggggttccaaatgatcagctacttcgtgtgggccaatctcgttccacagctgctgattggattaataagaatgtcggtgcttacattccggcgactaacatcacatatattgctgtgggtaatgaggtccttactaccattcccaatgcagcacttgtgctcgtacctgcactgcaattcctccag

SEQ ID NO: 12395 - DNA, 328 bp, Zea mays
aaaagctgatattgtccctggtgttctgttcatcgatgaagttcacatgctagacattgagtgcttctccttcctcaaccgagcattggaaaatgacatggctccgatcctagtaatcgcaacaaacagagggatcacatccattcgtgggacaaactaccgctcgccacacgggatcccgccagacttccttgaccggttactgatcatcacgacgcagccctacacggaggatgagatcaggaagatcctggacatccggtgcgatgaggaggatgtggagatgtccgcggacgccaaggtcctgctcaccaaaatcggcgtggag

SEQ ID NO: 12396 - DNA, 327 bp, Zea mays
tgagcacacaaaccgagaggtacttctatggctaaaacaatgggactccattgtttttggatcccatattcgggctacaggtgatgatgtcttgtctgccttacgtcgacactcttcaaccatccaaaagaatgcaagtaacagaaatttcttttccaagagtaaggggggtcctgttgcaagtcaaactggcacacctctgaatgcacaaagcagcaatccagaaggtttaggtggctccttcagcaaaaagtcatcagttgataatgcaccagaacaaaaggtgttgctattatgcggtccacctgggctcggaaagaccacact

SEQ ID NO: 12397 - DNA, 323 bp, Zea mays
gagagagaacactggcaggatttcgagatgggaggtttaatatattgattgctactgatgtcgctgctcgaggattggatatcccaaatgtagatctggtgatacattttgaattgccaaactcgtcagagttgtttgttcacagatctggccgaactggccgtgctgggaagaagggcactgcaattgtgatgtacaactatgaccaaagtagagctgtacgggtcattgaacgtgacgttggatgcaagtttacagagctgccaaaaattactgttgatggatctgacttgctgagtggtggatttgactccttcggtggc

SEQ ID NO: 12398 - DNA, 327 bp, Zea mays
ccccgctccgcctccactcctcgcgccgctgccgcatctcctctacaggtaagaaggagagaaagagggcgaaatggtgaagcacaacaacgtcatccccaacgggcacttcaagaagcactggcagaactatgtcaagacatggttcaaccagcccgcccgcaagcagaggcgccgcatcgcacgtcaaaagaaggctgtgaagatattcccacgaccaactgctggccctcttcgtcccattgttcaatgccagactctcaagtacaacatgaagtcaagggctgggagaggctttacccttgaggagttgaaggctgcgggcat

SEQ ID NO: 12399 - DNA, 327 bp, Zea mays
cattcaagaaggagatgatgaagagttttagtatgagtgacctggggctgctgacttactatctaggcatccaagtaacacaaaacgagggggtgatctcactgtgtcagagttcttatacactaaaaatcctagagcagacaggtatgaaagggtgtaatccctgtcatgtgcccatggaaaatcggttgaagctgagcaaaaatgacaagacaccttcagtcgacaagacaaagtatagaagtgtaattggaagtctgagatatctggtcaacactagaccagatattgcctactcggttgggatagttagcaggtacatggagg

SEQ ID NO: 12400 - DNA, 105 bp, Zea mays
cgtgacgcgtgtggaaaagcaagaatatgctttttgtcatctcgaagccagatgtgttcaagagcccaaactcggacacctatgtcatattcggcgaggcgaaga

SEQ ID NO: 12401 - DNA, 330 bp, Zea mays
ggttgttctacctgaagggtcaaaggatatcgaagtttcagctccctttccaacacagcagcagcaagaggttaagtattcacaccttgacattgtcggaagaccagttgttgtcttggagaaacctgatgttattccagagcataatttgtatttccaggtttactacagattcaacaacatatccttgctcagagagccgttgatgctgattactggtttcttcctcctgtttgtggcctgtattgtttacatgcgtactgatatgtcaatatccaagagctctccttcctacttggccaagctgcaatgggatgaggtgcaagcaac

SEQ ID NO: 12402 - DNA, 328 bp, Zea mays
cattgacaatgtcaaggccaagatccaggacaaggagggcatcccacccgaccagcagcgcctcatcttcgccggcaagcagctggaggatggccgcaccctggcggattacaacatccagaaggagagcactctccacctggtgctccgcctcaggggtggcatgcagatttttgtgaagacattgactggcaagaccatcaccttggaggtggagagctctgacaccattgacaatgtgaaggccaagatccaggacaaggagggcattcccccagaccagcagcgtctgatctttgcgggcaagcagctggaggatggccgcact

SEQ ID NO: 12403 - DNA, 320 bp, Zea mays
ccttttctgggggtttgcaaatcagattactacagttgaagaggccaaagagttctacccgctgtttggccttggtgccaatgtggccctcatcttctctgggcgcacggtgaaatatttctcaaacatgaggaagaatttgggtcctggagtggatggttgggcaatttcgttgaaggccatgatgagcatagtggttgtactgggtcttgtcatcaccggtatctattggggagtgaacaagtttgttattgataactcatctgtgcccgtggttgagcggaaaaagaaggacaagccaaagctcagcatgggtgaga

SEQ ID NO: 12404 - DNA, 320 bp, Zea mays
actttatgtcagacatagctgatgagtttaagattgttgttgttgaagcaataagatctctgtgcttgaagttccctctgaaatatcgctcattgatgaacttcttgagtaatattctacgggaagagggtggattcgagtataagaaagccatagttgattcaattattatactcattagagatattcctgatgcaaaggaaagcggtttatttcacttatgcgaattcatagaagattgtgaattcacctatttgtccactcagatacttcactttttgggaaatgaaggcccaaaaacatcagatcccagtaaatac

SEQ ID NO: 12405 - DNA, 317 bp, Zea mays
cggacgcgtgggcgctgacgctgttccggctgccggggctgacgggcgccatcccggcctgcctcacggcgctgtcgaacctccagttcctcaccatctcccacaccaacgtgtccggcgccatcccggagtcgctggcgctgctgcgctgcctcgactccgtggacctctccagcaaccggctgacgggcggcatcccggcggcgttcgccgacctgcccagcctccggtcgctggacctccggcacaaccagctgacgggccccatcccggcggggctggtgcaggggcagttccggtcgctggtcctgtcctac

SEQ ID NO: 12406 - DNA, 317 bp, Zea mays
gtacccagagcaaccaatggttaaccttgagatgtgcatgactggtctggacaagaagaaagcttgtgtctttttcaagactaatgctgatgggaacacaacatgtgccaaggaaatgacaaagctctctggcatctctgaaatcatccccgagatggagatctgcgattttgacttcgaaccctgtggctactccatgaatgcgatccatggctctgcattctccacaatccatgtgacgcccgaggacggtttcagctacgccagttacgaggttatgggcttggatgccactgctctgtcttatggtgaccttg

SEQ ID NO: 12407 - DNA, 325 bp, Zea mays
agtgcatcctcgtcaccggctcaacagggtttcttggaaagatccttgtggagaagatactgcgggtgcagcctgacgtgcgcaagatttacctgcttgtacgcgcggtcgacgagccatcagcgaacagcgcgtccaacaagaggtgatagacacggagctgttcggcctgctgagagagaaacacggcaagggcttccagcagttcgtagaggccaaggtcgtcgctttggccggagacatcgtatacgacggcctggggctggaggcagccgtgctggacgcgctggccaaggacgtcgacgtcatcgtcaacatcgcagca

SEQ ID NO: 12408 - DNA, 326 bp, Zea mays
  unsure (1)..(326): unsure at all n locations
gccaggctcagcatgctgggcctcctgggcatcgtcgcctccatcttcaccaccgtggtgctcgtctcgctgctggccctccacggcaacgcccgcaaggtcttctgcggcctcgccgncaccatcttctccatctgcatgtacgcctcgccgctctccatcatgaggctggtgatcaagacgaagagcgtggagttcatgccgttcctgctctccctggccgtgttcctgtgcggcacctcctggttcatctacggcctcctcggccgcgaccccttcattattatcccgaacgggtgcgggagcttcctgggcctgatgcagct

SEQ ID NO: 12409 - DNA, 328 bp, Zea mays
cgtggccagggatcgccctccagagcgaggatgtcgagctcgtcgccgtcaacgaccccttcatcaccacggactacatgacctacatgttcaagtacgacaccgtccacggccactggaagcacagcgacatcacactcaaggactccaagacccttctcttcggtgacaagccggtcaccgtctttggcatcaggaaccctgaggaaatcccgtggggtgaggctggcgctgagtatgtcgtggagtccaccggcgtcttcactgacaaggacaaggctgctgcacatctcaagggtggtgccaagaaggttgttatctctgcccc

SEQ ID NO: 12410 - DNA, 324 bp, Zea mays
atgagaagcgcctcgagatcacgttctctgactcgcctgtctttgaggacccttgtggtcgtggcctgcgcgccctctcccgtgagcagatcgactcgtttctggatctcgcacggtgcaccatagtgtcacagctctccaacgagagcttcgactcatatgttctgtccgagtccagcctctttgtgtatccccacaaggttgttctgaagacctgtgggacgacgaagctgctgctcgccattcctcgcatccttgagcttgctgcagggctgtcactgcctcttctttcagcgaagtactctcgtgggaccttcatcttcc

SEQ ID NO: 12411 - DNA, 326 bp, Zea mays
cggacgcgtgggcattgaatcatgcccacctcctgggagtggaaggacacattcccacaccatcaaaagccatcacaacgtaggtggccttccaaaagatatgaaactaaaacttattgaaccactcaagctcctattcaaggacgaggtgcggaagttggggggtattttgaatgtcccagattcatttttgaagcgacacccatttcctgggcctggtcttgcagtacgtgtcctaggtgatgttacacaaggcaatgctttggaggttcttcgtcaggtggacgagatatttgttcagtctattaaagacgcaggcctgtatt

SEQ ID NO: 12412 - DNA, 324 bp, Zea mays
cggaccgtgggctgctgtcgataatgcataccagtccatacatgaattttcaaagcctttgatcaacatgatgaaggctgcaggttgggatcttgatggggctgccaatgcgatcgaacctggtgtggtttacacaagaagggctcacaagaagtttgcttttgaatcctatatttgccaaagaatgttcagtgggttccaagaggagagcttttctatcaaggattctaacatcagtgtttccaatgaggctttcttccaccaattccttgcagtgcgagccatggatcctctggatgtcctgagccagaaccctgattcagt

SEQ ID NO: 12413 - DNA, 326 bp, Zea mays
cggaccgtgggcgcgtacacaaccccgatccgaatcgtcctcctcgcgagcctcgccgatcccccactcccctcccctcgcttcaagatgcagatctttgtgaagaccctcaccggcaagactatcaccctcgaggtggagtcttctgacaccattgacaatgtcaaggctaagatccaggacaaggagggcatccctcctgaccagcagcgccttatcttcgccggcaagcagcttgaggacggccgcacacttgctgactacaacatccagaaggagtcaacccttcatttggtgctgcgccttaggggaggcatgcagatctt

SEQ ID NO: 12414 - DNA, 330 bp, Zea mays
cacaagtctaagaagggcggcggagtcccgcagccgcacctctcggcggaggcgcggcgcaactctacgcgcccgtgttcaagacctgcgccgctctgctctccaggctgatgaagcacaagcacagctgggtgttcaacaagcccgtagatgcgagcgcgcttggcctgcacgactaccatacaatcatcaccaaacccatggacctcggcacagtcaagtcaaagctaggtgccgggcagtacaagtcaccacgggaatttgcaggtgatgtgcgtctgacgttccagaacgccatgacgtacaaccccaagggccaggacgtgcact

SEQ ID NO: 12415 - DNA, 319 bp, Zea mays
cggcctagtcccaacacctcgccgcgatctccgtagcctccgtcgcgtcgagcatcgatcatgtcggcctactgcggaaagtacaaggatgagctcatcaagaatgctgcctacattggcacccctggcaagggtatccttgctgctgatgagtccactggcaccattggcaagcgcctttccagcatcaatgtcgagaacgttgaggagaaccgccgtgccctccgtgagctcctattctgctgccctggtgctctccagtacatcagcggtgtgatcctcttcgaggagaccctgtaccagaagaccaaggatggca

SEQ ID NO: 12416 - DNA, 321 bp, Zea mays
cgaaaaactcgccagtccccaactcgaacctcagtcaggcagcgtgaggagggagagttcaaggaccgaggcggcgtcgggcgagatgaagcttaacgtcaagaccctcaagggcaccaacttcgagatcgaggcgagccccgatgcatcggttgctgatgtgaagaggatcattgagaccactcaaggtcagagtacctaccgggcggaccagcaaatgctcatataccaagggaaaattctcaaggatgaaaccactttggaaagcaacggagttgctgagaacagcttccttgttataatgttgtccaaggctaaggc

SEQ ID NO: 12417 - DNA, 322 bp, Zea mays
gtaaagaaaccacctcacctcaagaacagctagctgcaaggataaaaaaaaacaaagctgctgatctatatataataattaggctttgcagtgtcttgttttggagagcaaaggatcatcgtcaagtgatggccaagtcaggggcgctagaacttgctcggagcaccggagggtcgcttagcaaggaccaagtcaaatccgccgttgatcagtatgtcaaataccacgacctccatggaggcaaacaagaatcaaggaagtcaaattacaccgatttggcaaacaagtactatgatcttgtcactggcttttacgaatatgg

SEQ ID NO: 12418 - DNA, 318 bp, Zea mays
atgcactaggatatgtttatacatggggcaaaggatactgtggagccttaggccatggtgatgagaatgataaaactagcccagaattgatcagcagcttgaagggccaagttgctgtgcaggtatgtgcaaggaagagaaagacatttgttctcacggacaagggctcagtcgttgcatttggttggatgggcttcgggagcttagggtttcccgaccgaggaccgttggacaaagtaatgaggccccgcgtccttgagagcctgcaggatcactacgtctcacaaataagcacgggactgtaccacactgttgcag

SEQ ID NO: 12419 - DNA, 319 bp, Zea mays
attgactcaaccactggtggttttgaggctggtatctccaaggatggccagacccgtgagcatgctctccttgctttcacacttggtgtgaagcagatgatttgctgctgcaacaagatggatgctactacacccaagtattcaaaggcccgttatgatgagattgtgaaggaagtctcttcctacctgaagaaggttggatacaaccctgataagatccacttcgttccaatctctggttttgaaggtgacaacatgattgagaggtccaccaaccttgactggtacaagggcccaaccctacttgaggctctggact

SEQ ID NO: 12420 - DNA, 319 bp, Zea mays
  unsure (1)..(319): unsure at all n locations
atcccctttgcaagtatagtctctctgctaagcgaagcnacttcaagctagtctcggcggctctagaagacgatgggcaaggacgacgtgatcgagagcggcgctggcggcggcgagttcgctgccaaggactacacggaccctcccccggcgccgctgatcgacgcggcggagctggggtcctggtcgctgtaccgcgccgtgatcgccgagttcatcgccacgctgctgttcctgtacatcacggtggccaccgtgatcgggtacaagcaccagacggacgcgtcggcgtcgggcgccgacgcggcgtgcggcggcg

SEQ ID NO: 12421 - DNA, 323 bp, Zea mays
gtagcctgatccgcttgctcttcaccctcgccgcggccatcggcgcggcctcgctcctcgtcgcctcactccgccgccgcgcgccgcctcccgggcttcccgccaagctcgtcccctcctcccacatggcaggacgcaaccggagtttcgtgctgtggctgcacggcctcggcgactcaggccctgccaacgagcccatccgcaacctcttctccgccccggagttccggctcgccaagtggtcgttcccctccgctccccgcgcccccgtatcatgcaacaatggttttgtcatgccgtcgtggttcgatatccacgagctt

SEQ ID NO: 12422 - DNA, 312 bp, Zea mays
cccacgcgtccgggccgtggcagaggtggacggggatatggccagaaccgtggcttcagtggtgacaatggcagtgacttccagggaggttatggtggcggaggctatggggatggtgctgtaactggtggatctgaaggagaaagggagagagacactcgtcccccgtaccgtggcggaggcagacgtggtggttacaggaatgttgagtttgctgatgactctgagaggccaccacggagaaactatgagcgccacagcgggactggccatggctatgagatgaagcgtgatggcgcagggcgtgggaac

SEQ ID NO: 12423 - DNA, 311 bp, Zea mays
cacaaccacttactctcgtgcgctctccgtgggagcgaggactcgcggccggcgcacggcaggttctcctagatctccggcatcatcagtaacaaatggctgacggtgaggacattcagccccttgtttgtgacaatggaactggcatggtcaaggctggttttgctggtgacgatgcgccaagggctgttttcccaagcattgtcggacgcccccgtcacactggtgtgatggttggcatggggcagaaggatgcgtatgttggtgacgaggcccagtccaagaggggtatcctgactttgaagtaccca

SEQ ID NO: 12424 - DNA, 313 bp, Zea mays
gagtgcttaatcagctactgaccgagatggatggcatgaacgccaagaaaactgtgtttattattggtgctacaaacaggcctgacatcattgatcctgctcttctgaggccagggcgtcttgaccagctgatctacattccactgcctgatgagcagtctaggctccagatcttcaaggcctgcctaaggaagtcccctgtggcaaaggatgtggacctgaatgctcttgctaagtacacacaagggttcagtggagcagatatcacagaaatttgccagcgtgcgtgcaaatatgcaatcagagagaacat

SEQ ID NO: 12425 - DNA, 330 bp, Zea mays
caaaggttcggatgaacaaggttgtccgccagaacctaagggtgaggcttggtgatgtggtttctgtccaccagtgccaggatgtgaaatatgggaagcgtgtccacattcttccaattgatgatacagttgaaggcattacagggaacctgtttgatgccttcttgaaaccatatttcctagaagcatacaggccgttgaggaaaggagaccttttccttgtcagaggaggaatgagaagtgtggaattcaaagtgatagagactgatcctgctgaatattgtatcgttgcgccagatactgaaatattttgtgatggggagcctatta

SEQ ID NO: 12426 - DNA, 329 bp, Zea mays
atccagttattttctcaacgacgataagagaaaacattatttacgcaaggcacatcgcaacagaggctgagataaaggaagctgcaaggatagcaaatgctcaccatttcatcagcagcttgccacatggatatgacacccatgtgggaatgagaggggtcgatctaacacctgggcaaaagcaacggattgccattgctagggtggttttgaagaatgcacctatactgttgttggatgaggccagctctgcaatcgagtctgaatcaagtagagtggtacaagaagctctcgacactctggttatgggtaacaagacaacgattctc

SEQ ID NO: 12427 - DNA, 325 bp, Zea mays
aactgcgccaagtgctgccccaaggacaaggcgatcaagaggtttcaggtgaggaacatcgtggaacaggcggccatcagggacgtccaggaagcatgcgtctatgatggctacgtcctcccgaagctgtacgccaaggtgcaccactgcgtctcgtgcgcgatccacgctcacatcgtccgcgtccgatcccgtgagaagcgcagggaccgcaagccgccggagcgcttcaggcgcagggaggataggcctgctggtggacaaggaggcccccgccctggtcctggtgctgctgctacagctccagctccagcaccggttgctg

SEQ ID NO: 12428 - DNA, 326 bp, Zea mays
gtgagggaccatgtaatggctgccacaagagccctcaacaagggtgatcaccaaaaggctttcagtgtcataaattcgttggagatttggaagcttttgaggaacagagagcatgttcttgagatgttggagcttaagatcaaggaggaagctcttagaacctatctcttttcatactcgtcttcgtacgagtccttaagccttaaccagctcactaccatgtttgatctcagcgagcagcatgcccacagcattgttagcaagatgatgatgcatgaagagcttcatgctagctgggaccagccaacaaagtgcatcgtattcca

SEQ ID NO: 12429 - DNA, 326 bp, Zea mays
gtgcgctgtggcctgtggactctcccctccccaactccggcgaagggagcagaaacgttggcgtgttggttgggtggcgtcggcatggacgaggcaacgaagaagaatgtggaggctacggtgctggagatcctccggggctccgatatggagtccgtgacggagtacaaggtccgcgccgctgccagcgaccgcctcggcatcgacctctccatacccgaccgcaagctcttcgtccgcggcgtcgttgaggaatacctactttcactctcctccaaggaggaggcgaaggcggaggaggagggcgtcactggcagggagagcaa

SEQ ID NO: 12430 - DNA, 326 bp, Zea mays
aaacccatcacaacgtggaactttgtgaaggtttacaaatcagggtccctcgggagatcgctcgacatcaccagattcggcagatactacgaattgcgtgtcgagcacgaactgattatttggactcgaaggccaagtggaggaccctggcaagatcaggctggcagcttgtattcgtcgaccgggaaaacgatgttcttctcctcggcgacgacccgtggcaggagtttgtgaatagcgtagggtgcataaagatcctctcgccgcaagacctgcagcagatggcccgcggcggcggaggtgaccttctgtctgggcctggagcg

SEQ ID NO: 12431 - DNA, 327 bp, Zea mays
cggacgcgtggggaaaggtatgatcgccaatacaatacagaagaggttgaaggtctcctcaacgcagcttctgtaccaatctgcgccttaccaggcaggaatactgtttgcaactgggcccttttgtggatcaacttcttactgaccggagtgtctttgcacacaaatactctgctccagttctgggtttcattgtcctatcttgcttgattgcggtgtctgtgaacttcagtacatttcttgtgatcggaacaacatccccagtgacataccaggtgcttggtcaccttaagacatgtctggttctatcatttggttacactctat

SEQ ID NO: 12432 - DNA, 324 bp, Zea mays
cccacgcgtccgaattactgaggtcgttgcagttagttctcaagctcgacgcacgggtagcagatgcgtattgtgagaacatcacacaggaggttgcacggctcgtcaaagcaaatgcggcacatataaagtcacagatgggctggagaacagtaatattgctgctctccattacagcacgccatccagatgcttccgaagtcggttttgaggctatcgtgttcatcatgacagagggggctcacctttcactagcgaactatggcttctgcatcgatgcggcacggcagtttgccgagtctagagttggtttagctgataggt

SEQ ID NO: 12433 - DNA, 319 bp, Zea mays
cggacggtgggcggacgcgtgtgtagctttcctccctccctcctctctttctctcctctaacaagaacttagtcccggcagttcagatcctaagttgctgagcttgctgctgaatgttggagatagatttgctgcttctaagttggaaataccatgagtccaccgagtgtgatggggcagtttggggacacgacctacaccaaggtttttgttgggggactcgcgtgggaaacccagaaggagactatgaggaagtatttcgagcagtttggagagatcctggaggctgttgtcatcactgacaagaacactggcagat

SEQ ID NO: 12434 - DNA, 321 bp, Zea mays
ctcagagaacgtgccaaggagatccctgatgattattttgtttgtttggttggagacatgattactgaggaagctctaccaacataccagactatgcttaacaccctcgacggtgtcagagatgagacaggtgcaagccccactgcttgggctgtttggacgagggcatggactgctgaggagaacaggcatggtgatcttctcaacaagtacatgtacctcactgggagggtggatatgaggcaaattgagaagacaattcagtatcttattggctctggaatggatcctaggactgaaaataatccttatcttggtttc

SEQ ID NO: 12435 - DNA, 321 bp, Zea mays
cggaccgtgggagatgatgctcgccgccgacgtccacctcggcaccaagaactgcgatttccagatggagcggtatgtctttaagcgtcgcaccgacggcatctacatcatcaacctgggcaagacatgggataagctccagctcgcggcgagggttattgttgccattgagaacccacaagacatcatcgtccagtcggcccgcccctacggccagcgtgctgtcctcaagttcgcgcagtacactggcgcccatgccatcgctgggaggcacacccctggtaccttcaccaatcagctccagacctctttcagcgagcc

SEQ ID NO: 12436 - DNA, 321 bp, Zea mays
caatcgatggccagggttctacatggtggaactggtttcgttcgaataagttgaactatagccgccctcatcttgtggagtttgtggactctgagcaaatcgtcatttcgaacataacatttttaaattcccctgcttggagtatacatccagtgtattgcagcaatgtagtggtccatagtgtcacaattcagacttcattggatgctccacttaatcatggaatcgttccagattcttgctcaaatatgtgcatcgaggacagcagtatcagtgttagccacgacgccatatcactaaaaagcgggtgggacaagcaag

SEQ ID NO: 12437 - DNA, 316 bp, Zea mays
tgacgaaggatgggaacaccctcttgaaggaaatgcaaattcagaacccaactgcaatcatgattgcgaggacggctgtggcacaggatgacacaagtggtgatggcacaacctccactgtgctatttatcggggagctaatgaagcagtccgagcggtgcatcgatgaaggaactcatccaaggttcttggttgatggttttgatgttgctaagagagcgtgtcttgattttctcgataagttcaagacgccagtcgttactggtgatgaacctgacagagataccttaaaaatgatagcaagaacaactcttag

SEQ ID NO: 12438 - DNA, 321 bp, Zea mays
cccacgcgtccgtttgatttgaagattgggtctatagaaggacgagttggtgttcatcatgtggaagagtctcagcaaggaaaaaactttacattcaagtgtccaccgcgatggcaaatgatatatacgctattagctcgttgaactttcatcctgtgcatggtacattcgctactacaggctctgatggaagtttcaacttttgggataaggacagtaagcaaaggctgaaggcttataataggtgtccatcccccatcacatgcagcgcattcaatcatgatggctctatatttgcttacgcggtatgttatgattgga

SEQ ID NO: 12439 - DNA, 320 bp, Zea mays
gaccccgcccgggagggctccctgctcggctggaacgaggcgcgccgcaactggcccgtcttctgggactcgctccagggacgctccccacctcgacggggctaagagtttgtctcggaaacttgggctcttgctcttgcattggtgctgctgtgtaaatccacgtcgatcgctcgagttggggttggggacggggctaggagtttgtggatggaatggattcactgcagtgctcattcggttattcaggaaccatctatggttcggcgccggatgaagagggggcgagaaccccggttgtgactgtgtgtaggcaatat

SEQ ID NO: 12440 - DNA, 319 bp, Zea mays
gaagaggctatcttgcggcaatttctgcatccagttactcctatgtttcattgcttcagcacttccttcctataatgaatcccggtggtgctagcatctctctaacatacattgcatctggaagggcgattcctgggtatggtggtgggatgagttctgctaaagcagctcttgagagtgatacacgggtgcttgcattcgaagctgggcgaaaaggcaaaatcagagttaacaccatatcagcaggccctcttgggagccgagctgctaaggcaattggatttattgagaagatgatagagtactcatatgttaatgc

SEQ ID NO: 12441 - DNA, 317 bp, Zea mays
cttttcaataatcaagatgagccgtggtggtagtgccggtggtggtcaaagttctctgggttatctctttggaagcagtgagccccccaaaccagcagtggcaccagctgcaaatgctccacctgttgagaaaccatctgctgcaaagactgatgcggccaagcaggttgctgctggggttaccagccaaaccaataactaccacagggctgatggtcagaacactggcaacttccttacggaccgtccttcaaccaaggtccacgctgctcctggcggtggctcttccctgggctacctgttcggtggcaactgat

SEQ ID NO: 12442 - DNA, 315 bp, Zea mays
cccacgcgtccgggaggaacaagctgaatgacaggtttcttgaactggggtctgcattagaacctgggaagccagtgaaagctgacaaagctgccatcctaagcgatgctactcgcatggttattcagctccgttcagaatcacagcaactgaaggagactaatggcagcctcgaagaaaagattaaagaactaaaggccgagaaggacgagcttcgcgacgagaagcagaaactgaaactggagaaggagagtctagagcaccagatgaagctgatggcatcggctccagcctacatgccccatccgaccctga

SEQ ID NO: 12443 - DNA, 315 bp, Zea mays
atccgcggcacgaagactaggccacaaaatcgcggtagcaagcagcagacaggtggggaagatgtcgtcgctgcggaatgcgatcccgccgcgcgctcacaaggagcgcgcccagccggaggcgaggaagaagtttgggcttttggagaaacacaaggactatgtcgtccgggcgcgagcttaccacatcaaggaggcaaccatcgctaaactgaaggaaaaggcggcattcacgaatccggatgagttctattttaaaatgctcaacagtaggactgttggtggaattcatagacctaaccctgaagataataa

SEQ ID NO: 12444 - DNA, 314 bp, Zea mays
cggaaaatcaacaaggaaactaataatatgggagatcaggttggcccagttaaagtcgtgcctttgtactccacactgcccccagccatgcagcagaagatttttgaacctgctcctgccccattgaaggaaggaggtcctcctggaaggaaaattgttgtgtccaccaacattgctgaaacatccttaactatagatggcatagtttatgtgatagacccggggttttccaaacagaaagtttacaacccaagaataagggtggaatcccttctggtgtcacccatttctaaggcaagtgctcatcagagagc

SEQ ID NO: 12445 - DNA, 312 bp, Zea mays
ggcgctgggcaggtccgtggaccttaccaagttcaacggctacacggagctggtggcggactggacgagatgttcgacttcaacggcgagctgaaaggctgtagcaaggagtggatggtcgtgtacaccgactacgaaggcgacatgatgctggtcggggacgacccctggaatgagttctgcagcatggtgcacaagatcttcgtgtacacgagggaggaggtccagcgcatgaacccgggcgccctgaactcgaggccggaggacagcggcctcgccaattcgacggagaggggctccgcatctactgct

SEQ ID NO: 12446 - DNA, 229 bp, Zea mays
aaacgtggccaagtttacaagttccttcgctcgcaagggtttgtttcatcatatgacactgctcatcaatacagtgacagcgaagaagatgcacataagtgggtcagtcaccgaaaccatcgagggaacatctgcggagttgatttcatatggcttttaaatcctgataagtgcaggaagcccctgaagaccagctggaatgaagctgtttttggtatcattaagtact

SEQ ID NO: 12447 - DNA, 223 bp, Zea mays
gcgagttattgaatgccttgagacagacaagtgtgagacattccaagattgcattacctgggcccggctgaagtttgaggattatttctccaaccgtgtaaagcagctgacattcacttttcctgaagatgcaatgactagctctggtgctcctttctggtcggctcctaagcggttcccgcgacctctggagttctcatcttctgactcaagtcatcttagc

SEQ ID NO: 12448 - DNA, 208 bp, Zea mays
gccaatgagacaaaacccatatggatgagaaatccaaaggaaattgagaacaccgaatacaatgagttctataagaagacattcaatgagtttttggaccctcttgcccacactcacttcacaactgagggtgaggtggaattcaggagtgttctttatgttccaggcatggcggctcttagtaatgaggagataatgaaccccaaga

SEQ ID NO: 12449 - DNA, 278 bp, Zea mays
ctccgcctcgccgccgcggcaggcaccgccaccaatcttctcttccgccccctcgttcgttcgctcgctcgctcgccaggagatcgactcgaggcgaggccatgaagtacgtgctggtgaccggcggcgtggtgagcgggctcgggaaaggcgtgacggccagcagcatcggcgtcgtgctcaaggcctgcggcctccgcgtcacgtctatcaagatcgatccatacctcaacaccgatgccggaaccatgtcgccattcgagcacggcgaagtgttt

SEQ ID NO: 12450 - DNA, 338 bp, Zea mays
gagtcacttcgccacgaacaaaagcgcatcgatctcgctgtcgtcactcctcgtcacccagccacgaacagaggcaccacccagcatggccctgcaggcggcgctcctcccatccaccctctcatccgtccccaagaagtgcagcctcgccgtcgcggcgaaggacacggcattccttagcgtatcccagaagaaggtgcaggcggcgtcgctgtcggtgagaacgcgggtggcgacgacggcgcctgtggccacgccggggtccagcacggcggccaaggatgggaagaagaccgtgcggcagggcgtggtggtgatcactggcgcgtcgtcggggt

SEQ ID NO: 12451 - DNA, 274 bp, Zea mays
cccacgcgtccggtgccaacgttgtggttgatggtaatactgtcaacctcggcctctgggacactgcaggtcaagaggattacaacagactgagaccactgagctatcgtggagctgatgtttttcttctggctttctcactgatcagtaaggccagctatgagaatgtttcgaagaagtggatacctgaactgaagcattatgcacctggtgtgccaattattctcgtagggacaaagcttgatcttcgagacgacaaccagttctttgtgga

SEQ ID NO: 12452 - DNA, 214 bp, Zea mays
gcaagggctgctgctgagagaggtgctctttctgatgccgtgtcaatccttgaagactgccggaggatactttcagaaactttttcaagcaggagcggggaccggctgtgcatggcccttgatgcagagctaagggagatgcaagagaggatggctaaccggcaacgctacgaggcttcagggaaggcatacctgctgtctggcctcagctcac

SEQ ID NO: 12453 - DNA, 241 bp, Zea mays
cacacgcgtccgcggacgcgtgggtgagaaattgcgtgaactctttgctgagtatggcaatattacttcctgcaaggttatgcgggattcgaatggtgtcagcagaggttctggattagttgctttcaaatctgctgaagatgctaaccgagctcttacggagatgaatggcaaaatggttggaagcaagcccctttatgtagctcttgcgcacgtaaagaagacagaaaggcaagctaca

SEQ ID NO: 12454 - DNA, 174 bp, Zea mays
ccctgctcctccgccttcttcttgatccagccaagccagggatcgccatgtcggactcggaggagcaccacttcgaatcgaaggccgacgccggagcgtccaagacctacccgcagcaggctggcaccgtccgtaagaacggcttcatcgtcatcaagaaccgcccctgcaagg

SEQ ID NO: 12455 - DNA, 172 bp, Zea mays
cgtcgggctcggcgtcaagtgcgccaaggaggtcgccaccgccatccgtggcgccatcatcctggccaagctctcggtcgtgcccgtcaggaggggctactggggaaacaagatcggccagccgcacactgtgccctgcacagtcaccggcaagtgcgggtccgtcaccgtg

SEQ ID NO: 12456 - DNA, 172 bp, Zea mays
cccacgcgtccgcttaacatgctgcttcatcttattggcgatggcggtgagacccttcaggttgctgcgtttcgagccatggttaacattttaacccgtgtgcagcaggagtcatcagatggggctgagagaaatagattccttattaattatgttgattttgcttttgatg

SEQ ID NO: 12457 - DNA, 170 bp, Zea mays
ctcaggaaggcgcattccagtgggttaccatcaattatcttttgggaaaattgggaaagccatactcaaacacagttggagttgttgatttaggaggtggctcagtccaaatggcttatgctatctcagagaaggatgcagcaaaggcacctttagtagcagatggtgaa

SEQ ID NO: 12458 - DNA, 172 bp, Zea mays
cggacgcgtgggcggacgcgtgggccggtgccgggctccgacgcgtacaaggagctggagaagaacccggagaagttcttcgtgcgctccatcaccgcccagttccaacccgtcgtcggcatctcgctgctggagatcctgtccagccactcctccgacgaggtgtacctcg

SEQ ID NO: 12459 - DNA, 166 bp, Zea mays
ccagagttcacaaaaaatcacaagcaagcagtcgcgtgtgtagctcgcaacaatggcgacgaaccccggcctcttcagcgagtggccgtggaagaagctcggcaacttcaagtacctgctgctggcgccgtgggtggcgcacggcggctacctagcggcgaccaag

SEQ ID NO: 12460 - DNA, 167 bp, Zea mays
gcgcgatgtcaccaccacccccgccgagctcgtcaccttcttccgcgacatgtccctcatgcgccgcatggagatcgctgccgactccctctataaggccaagctcatccgcgggttctgccacctctacgacggccaggaggccgtcgccggtaggatggaggccg

SEQ ID NO: 12461 - DNA, 167 bp, Zea mays
cccacgcgtccgagaggatacagaatgccgggacagaggtggtggaggcaaaggctggtgctgggtctgctaccctgtccatggcctacgctgctgccagattcgtcgagtcgtctctccgcgccctggccggtgaccctgatgtttacgagtgcacatttatccag

SEQ ID NO: 12462 - DNA, 164 bp, Zea mays
gatcatggttccattcaggtacacagaattcatcgacgacctgacgacacaagttcagaacaaggtcatccccatgagcagaatcgacgacgccgtctacaggatccttcgtgtcaagttcaccatgggcctgttcgagaacccttaccccgactctagcctcg

SEQ ID NO: 12463 - DNA, 162 bp, Zea mays
ctgacgcgtgggcggacgcgtgggctgacttccctgctacttggggggcaatggaaaagttatatgatgctggcaaagctcgcgctattggtgtgagtaacttctcctcaaagaaattatgtgatttgcttgctgtagctcgtgtacctccagctgttgatc

SEQ ID NO: 12464 - DNA, 164 bp, Zea mays
gcggcgccggcctacaaccgttttcgtgctcacacacccaaaccttagtcgcgatcaggccccaaggactcgagatgaagtcgagggcacggtccaccgccggcgactccaggctctcggtgaggaagaccaaggctgagaaggacccaaacaagcccaagagg

SEQ ID NO: 12465 - DNA, 167 bp, Zea mays
gggatatccgaaccgtgtgtcatcaccgtttaaatcttctagagcaaaaatttaatcttcacttgatggtcaatacggatagagaactgcttgctcagaaagctgcacctcaccgggacttctacaatgttaggaaggttgatactcatgttcatcactcagcatgc

SEQ ID NO: 12466 - DNA, 318 bp, Zea mays
  unsure (1)..(318): unsure at all n locations
cttgtgatcgattcgattaattgggcgttcagacataccgagagaaatatcgcagagactggccttagtctattgttggaaattttgaagaactttgaggcttcaggattccaaaatcaattctacaaaacctactttttgacaattgagcaagagatttttgcagttctcacagacacattccacaaacctggtttcaagcttcatgttttggtgctccaacacttattttatgtggttgatagtctaactgagcctctatgggattcttcatcagtaccatatcgatatacggataatgccacngttgttcgagat

SEQ ID NO: 12467 - DNA, 311 bp, Zea mays
aaaatatccccaaaccctagctcccgatctcgatggcgaaccctcgcgtcttcttcgacatgaccgtcggcggcgccccggcgggccggatcgtgatggagctgtacgccaacgaggtgcccaagaccgcggagaacttccgcgcgctgtgcacgggcgagaagggcgtgggcaagtccgggaagccgctccactacaagggctccaccttccaccgcgtcatccccgagttcatgtgccagggcggcgacttcacacgcggcaacggcaccggcggcgagtccatctacggcgagaagttcccgacgaga

SEQ ID NO: 12468 - DNA, 313 bp, Zea mays
cgcttccagccgccgccgcgtccgcctcgccaagcgcacagccgccgcagcacatcgctctcttgatctcagccatggcggaggtggagcagcaacaggacacgccgaagctcttcaaccgctggaccttcgatgatgtccaggtgaacgacatctcgctgaacgactacctcgctgtgaacgcgacgaagcacgcgatgtacctgccgcacaccgcggggcgctactccaagaagcggttccgcaaggcgcagtgcccgatcgttgagcgccttacaaactccctcatgatgcacgggcgcaacaacggcaa

SEQ ID NO: 12469 - DNA, 311 bp, Zea mays
cggaccgtgggcgtgacgcgtgggatcctatcaaaccaactggccatattcaaatactttatggaaatcttgcaccggaaggttctgtcgcaaaaagtcctggcaaaataggactgttcttctcaggtcccgcattagtttttgagggtgaagaatccatgatcacagctatctcagaaaacccagcgaatttcaagggaaaggtagtagtaatccgaggagaaggaccaaaaggagggccaaggatgcctgatatgttgactccaacaagtgcaataatgggtgctggtctcgggaaggagttcggcctg

SEQ ID NO: 12470 - DNA, 310 bp, Zea mays
gaagccaagagggcggcagagttgctatacgaggctgcgctgatctccagtgggtatactcctgacagtccagcggactgggaggcaagatctacgagatgatgaccatggccctcggcgggagatgggggaggttggagacagaggaggctgaagtcatcgccagcatcgacgacgcggactcgtctgaaggtgccacgaccacgacagaggtagtcgagccctctgaggtcaggacagagagcgacccgtggaaggattagatagttctgtatgcaaggattatgccctggtggtgtatgagcaccgg

SEQ ID NO: 12471 - DNA, 312 bp, Zea mays
ccagagctctaccaaacaggccaggacgtctctcaaatccccagttcagtaactggctaactgtaggagaaggagagagatggagaacggcggcgctaaacgcgacgtccccgacgatgcgaacgagcattgccctggaacacagtctgaggaggcaggcaaggcagatgcctgcgctgggtgccccaaccagcagatttgcgccaccgcccccaaggggcctgatcccgatgtggttgctattgttgagaggttggctactgtgatacacaaattgttagttttgtctggaaagggaggtgttggaaaaac

SEQ ID NO: 12472 - DNA, 308 bp, Zea mays
caaaatggtgtctgcttcaggcactgggaatgttaagatatggggaacatcaccagattccattgatgcttctgaggacagaaaaagatttaatgcaattctcgaagagcttcaaattgaacagccaaagggagggattgcaagaagtgagtctgatgccttggcaatcgcctcagaagtaggttaccctgttgtggtccgtccatcatatgttcttggtggacgggcaatggagattgtgtacaacgacgaaaaactgatcaagtacctcgcaaccgcggtgcaagtagatccagaaaagcctgttt

SEQ ID NO: 12473 - DNA, 307 bp, Zea mays
ctgtacctacctcgcccgcagtagggacctcgtctccgccttctccgagctgatgggccgcgagggcggctgctcccgcgggaagggcggatccatgcatttctataagaaggatgccaatttctacggcgggcacggcatcgtcggcgcgcaggtgcccctcggatgcggcctcgccttcgctcagaagtacaagaaggaggagacggccacgtttgccctctatggtgacggtgcggctaaccagggacagctctttgaggctctcaacatttcggccctctggaagctgcccgccatattggtt

SEQ ID NO: 12474 - DNA, 306 bp, Zea mays
cccacgcgtccgcatccttctgttgatcaatggctgacggtgaggatatccagccacttgtgtgtgacaatggcactggaatggtcaaggctggctttgctggcgatgatgcgcccagagcagtgttccctagtatagtcggccgccctcggcacacgggtgtgatggttggaatgggccagaaggacgcctatgtaggtgacgaggcacagtcaaaaagaggtatcttgaccttgaagtaccccattgagcacggtatcgtgaacaactgggatgatatggagaaaatctggcaccacaccttct

SEQ ID NO: 12475 - DNA, 304 bp, Zea mays
aatcccgtctcgttgctccggtccgctgcgcatcctcaggaatggaacttggcgccaccactgccctctaccctctgcaccgctgcaaaaccatttacctggtcaggcatgcccagggcattcacaatgtcgcgggggagaaggacttcggcgcgtacatgtcacatgaactgttcgatgctcagctcactcctttgggttggaaccaagtcgatggtctgcgtgacatgtgaagaaaagattgaattagttatttcttcccctttactgaggactatgcaaactgcagttagtgtctttggtg

SEQ ID NO: 12476 - DNA, 305 bp, Zea mays
ggaggagaggataccagaatggcgtcgcgaacggcgtccaaggatatcatcgctctgcgaggctccgccgccatcgtcagcgagttcttcggctacgcggcgaacagcatcctctacaaccgcgccgtgtacccgggggagagcttcgccaaggtgaagaagtacgggctcaccatgccgctcacgcaggacgagtgggttaacttcatcactagcgccacctccaagaactcagagtggctgggggcaggaaagctgcaggggatcgtgatggtcataatgagcaaggccaccagcgaggtgat

SEQ ID NO: 12477 - DNA, 306 bp, Zea mays
gcagcaagtagtgaccaggagcgagcagccaaggaaaggagtcaagcaatggagaaggccgtcgacaggcagcgggtcctgctgcggcacctgaaccccgccgcggcggccagccccgccccgcacgccatctccgcaagcgcgtgcgcggcgggggacagcgcggcgtaccaccggaggccggccttcgccgacgacgtcgtcatcgtcgctgcttacaggacggcaatttgcaaggccaagagagggggtttcaaggatacctttgctgaggacctcttggttcctgtcttcaaggctttggta

SEQ ID NO: 12478 - DNA, 306 bp, Zea mays
gtttttgcaagcaagattactcctgcaaaggatggaaaacctgtgctcatcgagcttattgatgcaaagacaaaggagcacaaagaaacccttgaggttgacgcagcccttatagctacaggaagggcgccattcaccaaagggcttggcttggaaaacatcaatgttgttacacaacgtggttttgtgcctgttgatgaacggatgcgagttatggatgcagatggcaatgtggtacccaatttatattgcattggagatgccaatggcaagctcatgcttgcccatgctgccagtgcacaagga

SEQ ID NO: 12479 - DNA, 307 bp, Zea mays
gaatgaatgaataacagaatagaaacacatcgagccgctgggggttgctattctgttattcattcattcacttaaatcatgcgtttctttcgtcttataatccttaagttgatactgcaatccgcctcatgtgaaattgatgtgtcaatctgacaagcacacttgtattctagatgctattatcaagcaagcgaactgggactgctctaaaatgctagagaaagttcggcgtgatattgaagatcatgcactttcaattcgtgaaagcaagctatccgaaatgacaagacacgctaaggacaaacta

SEQ ID NO: 12480 - DNA, 305 bp, Zea mays
gggatattacaagtgctgttgtgatgattggtatggatggtaaatcaaggtgttttggtttcatcaattttgagaatccagatgcagcttcccatgctgttcaggaacttaatggtaagaagataaatgacaaagagtggtatgttggaagagctcagaagaagtcagaaagagagatggaactaaaaaggagatttgagcaaagcttgaaagatgctgctgacaaatatcaaggactgaacttatacctcaagaacttggatgatagcattggagatgatcaactttgtgaattgttctctaac

SEQ ID NO: 12481 - DNA, 305 bp, Zea mays
cacagaattcttctccctccccgtctcctctcgcgctcgcgcgtggtgaggtgaggtggagttccgaccccgaggccgcaatggcgacagcggaggtggtggtggccaacggctcgggcggcgccgacaccaagaccgcgtttaaggagatatacagcaagctcaagcaggagatgctcgaggaccccgccttcgaattcactgacgagtcgctccagtggatcgaccgcatgttggattacaatgtgcttggaggaaagtgcaatcgtgggctatctgttgtcgatagctacaagattttgaag

SEQ ID NO: 12482 - DNA, 303 bp, Zea mays
cccacgcgtccgaccacgcgtccgcggacggtgggtgtaccgctgggccttggcacatctgcaagtacacgcgtctccaatgagctcggcgcagggcagcctgaagcagcaaggctagcagcgcgagttgtggtcatcatgaccttgcgtggaggggtggtgttggcaaccatcatgattctcctgcgcaacatctggggatacgcatacagcagcgaggaggatgtggtggcatacattgccagaatgcttcccatccttgctgtttccttcttcgtcgacggccttaacggttctctttca

SEQ ID NO: 12483 - DNA, 300 bp, Zea mays
aactgatgcggcgcaccttctttctgatgtggcagcatttgccatatcgttattctctctctgggctgctggatgggaagcaacaccgcagcagtcatatgggttcttccggattgagattcttggtgccttggtctccattcagctcatatggctacttgctggcatactggtatatgaggctattgtaaggctcattaacgagagtggcgatgtgcagggctccctcatgtttgctgtgtcggcgtttggactgtttgtcaacattataatggctgtattgctaggccatgaccacgg

SEQ ID NO: 12484 - DNA, 303 bp, Zea mays
cccacgcgtccggaaattatgagaactactattttcctccttcactgcaccacttgagtttgctctacatgggaacaaatgatatgcaaatactgtttccatatgctactgcacttaagaagttagaccttcagtttacattcctttccacagaggatcattgtcagatagttcaacgctgctccaacctggaaaccttagaggtgagggatgtcataggggatcgtggactacaagttgttgcacagacctgcaagaaattgcataggctcagagtagagagaggagatgatgatcaaggag

SEQ ID NO: 12485 - DNA, 302 bp, Zea mays
gaaagcttcaggatggcgcggtgtttacaaagaaggggcatgacgaagagccatttaaattcaagaccgatgaagaggaagttattgccggtcttgatcgtgctgtgttgaacatgaagaagggcgaggttgctcttgtcacaattcctcctgaatatgcatttggttcaactgagtcaaagcaggatcttgctgttgttccacctaacagcacagtaatatatgaagttgagcttatttcatttgtgaaggacaaggagtcgtgggacttgaacaatgaagagaagattgaggctgctggt

SEQ ID NO: 12486 - DNA, 298 bp, Zea mays
cccgcccaccagggtcttcgcccagcgctacgccgccaaccgcaccgccttcttcgaggacttcgccgccgcgatgcagaggctcggcgccgtcggcgtcaagacggggcgccagggcgtcgtcaggcgccgctgcgacgcgctcgactgagtgtcgcgatgcttgttgtgccattgggtcggtcgatcgttgtaaggcttcgaattcgattacgggatatgagaggctcttctttctctgtacttggaaaaaaaaaagaagaagagagaaagggaaaaaaaaaagggcggccgctct

SEQ ID NO: 12487 - DNA, 301 bp, Zea mays
ggaaaacaggaagagatgtctggtggcaggatgttgtgcctgatttcccaactaaatgcgatgtggaatgggttgatgcagaggatccactgtttcttttgtacacaagtggcagcacaggaaagccaaagggtgtgttgcatacaactgggggatatatggtctactctgctacaacatttaagcatgcatttgactacaaaccaacagacatatactggtgcactgcagattgtggctggattactggacatagttatgtgacatatggtccactattgaatggagccacagttcttgt

SEQ ID NO: 12488 - DNA, 282 bp, Zea mays
acgcattccttccatctcccaagacctcctcagacccgagaagcgcactgcggccatggacgccaccggcactggagctggagggaaggcgaagaagggagcggccggtcgcaaggccggcgggccgaggaagaagtcggtgacgaggtccgtgaaggccgggctccagttccccgtcggccgcatcgggcgctacctcaagaaaggccgctacgcgcacgcgtcggcagcggtgccccgtctcctcgcggcgtctggagtactcgcgctgaggcctggagc

SEQ ID NO: 12489 - DNA, 137 bp, Zea mays
ggaatgacgaaattgaggatgacggcaaaagaattgagaacttggtccgtggaattttagctggaaacatttttgatctaggaactgcacagcttgcagaagtttttgctaaagatggcatgtcatttttggcaagt

SEQ ID NO: 12490 - DNA, 319 bp, Zea mays
cccacgcgtccgagcaggctggtgcccgtgtcattgtgaccgagatcgaccccatctgcgccctccaggctctgatggagggtcttcaggtccttcccttggaggacgttgtctcggaagctgacatcttcgtgaccaccactggcaacaaggatatcatcatggttgaccacatgaggaagatgaagaacaatgccattgtctgcaacattggccactttgacaatgaaattgatatgctcggccttgagacctaccctggcgtcaagcgcatcaccatcaagccccagactgaccgctgggtgttcccgagaccaac

SEQ ID NO: 12491 - DNA, 322 bp, Zea mays
ccaggccgcatcgcgatcagtcatctctttccctcccagccttcctcctgcgtctcgctctcgccggaggtcaggcgcaccgccgccgggcgatggacgcctcctaccgccgcgccggcaccgggagcggctccgctccccgctccgtcgaggacatctacaaggactaccgctcccgccgctccgccatcctccgcgccctcacccacgaagttgaggagttctacgcgctgtgcgatccagagaaggagaacctgtgcctgtacggctacgcgaacgaagcgtgggaggtagcgctgccggcggaggaggtgcccacgga

SEQ ID NO: 12492 - DNA, 320 bp, Zea mays
gcggccactacagcgagcgcaaggccgccgagctcaccaggatcatcgtcggcgtcgtcgaggcctgccactccctcggtgtcatgcaccgggacctcaagcccgagaacttcctgctcgtcaacaaggacgatgacctctcgctcaaggccatcgatttcggactctctgtcttcttcaagcctggtcaagttttcaccgatgttgttggtagcccatattatgtagctccagaagttttgttgaaaaattatggaccagcagctgatgtatggacagctggcgtcattctttacattctattaagtggcgtgcctccg

SEQ ID NO: 12493 - DNA, 319 bp, Zea mays
cggaccgtggcgctgacgcgtgggggaagaaggcggacgcggcgtcgcggatcgtcgcggcgctggagacgctggagggcgcgttcaaggactgctccggcgggcgggactacttacgcggcggcgccatcggcttcgtggacgtggtcctcggcagctacctgggctggttcaaggtgttcgagaagatggtcggcgtcagggtcctggacgtggcgaggacgccgctcctcgccgcgtggggggagcgtttcgcggcggcggaagcggccaaggacgtcctgccggatgacgttgataaggtgctcgagttccttca

SEQ ID NO: 12494 - DNA, 316 bp, Zea mays
cgccatcagcagctagcgcgctcctcgagcccagcagagaaaggccggcagcgctaatcgtagtagccatgggctccaccgccggcgacgtggccgcggtggtggacgaggaggcgtgcatgtacgcgatgcagctggcgtcgtcgtccatcctgcccatgacgctgaagaacgccgtcgagctgggcctgctggaggtgctgcagaatgaggcctgcggcggcaaggcggcgctggcgcgcgacgaggtggtggcgcggagtcccggtgcgcccatctaccccgccgccggcgcgccgtggtggaccgcatgctc

SEQ ID NO: 12495 - DNA, 319 bp, Zea mays
atgaagagggccttctaaccaaactcgggagaaaaatggcagaatttccattggatccaccactttccaagatgctactagccagtgttgaccttggatgcagtgatgagatactgactatcatagctatgattcaaacagggaatatattctacaggccacgagaaaaacaagctcaagctgatcaaaagagggctaaattttttcagccagagggagaccaccttactctacttgctgtatatgaggcctggaaggctaagaacttttcagggccctggtgttttgagaactttgttcaatcaagatcattgaggag

SEQ ID NO: 12496 - DNA, 317 bp, Zea mays
  unsure (1)..(317): unsure at all n locations
cggaggcggtggcagcgtcagggagcaggacaggttcctgcccatcgccaacatcagtcgcatcatgaagaaggccatcccggctaacgggaagatcgccaaggacgctaaggagaccgtgcaggagtgcgtctccgagttcatctccttcatcactagcgaacgngtgacaagtgccagagggagaagcggaagaccatcaatggcgacgatctgctgtgggccatggccacgctggggtttgaagactacattgaacccctcaaggtgtacctgcagaagtacagagagatggagggtgatagcaagttaactgc

SEQ ID NO: 12497 - DNA, 316 bp, Zea mays
ggggtttctaaggatagcaatgggggaaatatcgaggttcaacctgaacctattaactatggaaggctggtatcttttggtaaagatgtagcagaagcaccttcttcagagattgagcagatagaatttcgtgatgctgttaaaggtaataatatcgcccattcaaatacgtcatgccgggagatctggacagagtatcacgaattaggatggggtggaataaaggcagtcgcagactacaaagtttacactgctagttctgttgtagaccttcttcattttgttgctccaaggatgatgcagcgtggaaatgttc

SEQ ID NO: 12498 - DNA, 313 bp, Zea mays
gcaaggcgtggacgccgctaggaaagatgatgaggaggagcaggtagtgaatccgtgggaggtgtcggcggggaagggtggcatcgactacgacaagctcgtggaccagttctgctgccagcgcatcgacgacgcgctcgtggaccgcatctcacgcctcaccgtcctaccaccgcactgcttcctccgctgaggtctcttcttcgcccaccgtgatttgtacgatatactggatttgtatgagaacgggcagaagttctacctctacacggggaggtggccctcgtctgaggccctcacctcggccatctca

SEQ ID NO: 12499 - DNA, 313 bp, Zea mays
agaatctgagctcctacaaggataagaaatttgtggacattagcaaggaagatttggatttaggtgataacaatgaggaaagagagaaggagataaagcaggagttcagccaagcctgtgactggataaagaatcgcttgggtgacaaggttgcacgtgttgacatatctaatcgtctcaggtcatcgccatgtgttcttgttgcagcgaagtttggttggtcagccaatatggaaaggctgatgagagcacagtctatgggtgatacagcctctttggatttcatgcgttcgaggaaagtttttgaaataaa

SEQ ID NO: 12500 - DNA, 315 bp, Zea mays
cggacggtgggttgagagtggacaagaaagacatctcttggaagagtgacagagaccacaagtttgggagtgatgtcttccccacgaacttccagaaaggacctcttcaaggtggaaaaatacttaatccaaaaatcccgttgagtgaacaagaggaccttattgtttggatgcggactgcagcgcttccaacattcagaaagctgtatggtaggatatatgttgatctcaaggaaaacgatacaattacagttcagttggagaacaactacaacacctatagcttcagtggcaagaagaagctggtgctttcta

SEQ ID NO: 12501 - DNA, 314 bp, Zea mays
cggacgcgtgggctcaagttgaccttgcaagggaagctgctcatctgagccggtttatctacaacttccgaagtggaaggatgtatctttcccaagacctctctatccacttgttcatcctgctgttttagttgagacttacgagcatggggagagtgtttcacactatgttgatgaccttgaaggacatgatcgaattaaaagtgctctggcccatattggtactcacgcgctcttgaaaatgctactggttgataatttcgtccatgcagatatgcacccatgaaatattttagttcgtgttgcacaaccaa

SEQ ID NO: 12502 - DNA, 312 bp, Zea mays
gtaatttcaaggaaggctttgacaaaataccaattgatctttcgcctattgttccactgcaagcatgttagtcgccagctgtgtgcagcatggcaaatacaacaagcattccggtctgtcaagattctagggacaccaattctgcggtcatcaattctttgtcgtagcatgctcaagtttgtaaatagccttttgcattatctaacatttgaggttcttgaaccaaattggcatctgatgcatgaccgccttcaaacagcaaggagcatcgatgaggttatccagatccatgatttcttcctccagaagtgt

SEQ ID NO: 12503 - DNA, 314 bp, Zea mays
cacccctgctcgccgttgctgcagccgcacaggcgatggatcatgaagaagtgaccgaattcctgggccaggtgcccctcctgcagtgcctcccgggttcctctatccgcataatcgctgaggccgtccaggtcaagaactacgaacctggtgactatgtcgctcgcgaaggtgaacctgtcaatggcctttacatcatagtggatggccaggctgaagtttctgcacctgcgaatgcagaagaagcaaatcgcccagactatgtgttaaataagtacgactactttggttatggaactaatagttctgttcat

SEQ ID NO: 12504 - DNA, 315 bp, Zea mays
tgcttctgcttgacgtcactcctctctctctgggtctggagactgccggaggagtgatgaccgtccttatcccgaggaacaccaccatccccaccaagaaggagcaggtgttctccacctactcggacaaccagcctggtgtgttgatccaggtgtacgatggtgagaggacccggacccgcgacaacaacctgcttgggaagttcgagctctccggcatcccaccggctcctcgtggtgtcccccagatcacggtctgcttcgacatcgacgccaacggcatcctgaacgtgtctgccgaggacaagacgacgg

SEQ ID NO: 12505 - DNA, 271 bp, Zea mays
tcgggaagacaaatcatctgagcctagtcttgaatactggtttaagtgcatcgatcttgatggtaatggtattttaactttcaatgaaatgcaatttttctacgaggagcaattgcaccgaatggagtgcatggcacaagagcctgtgctttttctggacatattatgccagatgattgatatgattggaccagagaatgagagctatttaactctacgggacttaaaacggtgtaaactctcaggaaacatattcaatattcttttcaat

SEQ ID NO: 12506 - DNA, 308 bp, Zea mays
cggatcataagaacggagttgctaagtactctgcgaacgtggagatgtgtaggctcacggagcaagttgtgttctcggacccataccgtgtttccaaatttaatcggtggacctcgccttatctcgacaaagatgctgatgcagttctcgaggatgatgagctcaagttggcagtagctgggctgaaatcgatgtttatcgagagagctcaagctctgattcatggagatctccacactggttctatcatggtgaccgacgttcaactcaagtcattgatccagaatttgggttctatgggccaatgg

SEQ ID NO: 12507 - DNA, 307 bp, Zea mays
cttctctcacatgaaaccaaacagtatccttggtttatctcatggatttcttctgggacatttgcaatcactcggactcgatttcccaaagaacatcagtgtgattgctgtatgccccaagggaatgggtccatccgtccgcagctttatgttcagggcaaggaagtcaatggcgctggcatcaactctagctttgctgtgcaccaggatgttgatggaagggcaactgatgttgctttagcatggtcagttgcacttggttcccccttcacgtttgctactactttggaacaggagtacaagagtg

SEQ ID NO: 12508 - DNA, 306 bp, Zea mays
gattactacagataccttgctgagttcaagactggagctgagagaaaggacgccgctgagaacacgatggtggcatacaaggctgcccaggacattgctctggctgagcttgctccaactcaccctattaggcttggactggcacttaacttctcagtgttctactatgagattctgaactcacctgatcgcgcctgcagtcttgcaaagcaggcttttgacgaggccatctcggaactggacaccctgagcgaggagtcctacaaggacagcactttgatcatgcagctccttcgtgataacttg

SEQ ID NO: 12509 - DNA, 314 bp, Zea mays
agaaggacgagttggtgttcatcatgtggaagagtctcagcaaggaaaaaactttacattcaagtgtcaccgcgatggcaatgatatatacgctattagctcgttgaactttcatcctgtgcatggtacattcgctactacaggctctgatggaagtttcaacttttgggataaggacagtaagcaaaggctgaaggcttataataggtgtccatcccccatcacatgcagcgcattcaatcatgatggctctatatttgcttacgcggtatgttatgattggagcaaaggtgctgagaagcataatccttcta

SEQ ID NO: 12510 - DNA, 311 bp, Zea mays
gtgaagggtggagtgcttctcattggttattcatcatttagaaatttatcccttggaaagcatgtgaaggacaaaaattctgcaaacgaaattacttatgctttgcagtgtgggccagatattcttgtatgtgatgaagcgcatatgataaaaaatagaagggctgacattacacaggctctgaaacaagtaagaacacaaagaagaattgcgttaactggatctccattgcagaataatctgatggaatattattgtatggttgattttgtcagggaaggttttcttgggagtactcatgaattccgaaa

SEQ ID NO: 12511 - DNA, 307 bp, Zea mays
cccacgcgtccggactagttctagaatcgacctagcataatgatatatggtggaactattaagcctggtcactttcagggcaattcctatgatatagtatctgctttccagtgctatggagaatatgttagtggttcaatcactgatgagcaaagaaagaacgtcctccgcaattcatgtccaggagcaggtgcctgtggtggtatgtacacagcaaacactatggcatctgctatcgaaactttgggcatgagtcttccatacagttcttcgacacctgctgaggacccactaaaactagaagaat

SEQ ID NO: 12512 - DNA, 303 bp, Zea mays
gctatttactgttagcaacagttcactttcagagtttgctgttcttgggtttgaattgggttactccatggagaaccctaattcattggtactttgggaagcacaatttggcgattttgccaatggtgcacaagtgatgtttgaccaatttttgagcagcggcgaggcaaaatggttgcggcaaaccggccttgttgttctgttgcctcatggttatgatggccaaggtcctgagcattctagtgcccgcttggagcgcttccttcagatgagtgatgataatccttttgtcatacctgagat

SEQ ID NO: 12513 - DNA, 306 bp, Zea mays
cactcgcattgcattgcattccttcagttcagtagtgtgctctgacagtgagatggcgagcgtgaaggttttcgggtcacccacctcggcggaggtcgcccgcgtgctcatgtgcctcttcgagaaggaggtggagttccagctgatccgcgtcgacgcctaccgcggcaccaagcgcatgccccagtacctcaagctgcagccgcaaggcgaggcgctcaccttcgaggacgagagcctcaccctctccgactccagggggatcctccgccacatctcccacaagtacgcgaacgagggcaaccc

SEQ ID NO: 12514 - DNA, 306 bp, Zea mays
aaaaatctggttcagcaggaaagcaattgaaagaagcgcaaagtataaataaatctctttctgctttggctgatgttattggtgctttatcttctgatggacaacatataccttatcggaaccataagttaacaatgcttatgagtgattctctcggaggcaatgcgaagaccttgatgtttgtgaatgtttcaccagctgagtctaacttggaggagacttacaactcgctaatgtatgcttcacgggttcgttgcattgttaatgatacgagcaagcatgttgccccaaaagaaatcatgaggt

SEQ ID NO: 12515 - DNA, 306 bp, Zea mays
  unsure (1)..(306): unsure at all n locations
cggaccgtggncctagggaaccgtgtctttggtgccctcaagggagctttggatggtggcctggatattcctcacagcgagaagaggtttgctggttacaagaaggatgacaagcagctggatgctgatatccatcgcaagtacatctatggtggccatgttgctgactacatgaggaacctcgctgaagaggagccagagaagtaccagtctcacttcagtgagtacattaagaagggaattgaggctgatgacatggaagctctgtacaagaaggtccatgctgccatccgtgctgatccttct

SEQ ID NO: 12516 - DNA, 306 bp, Zea mays
agaagccgataagtttgccaaggaggacaaagagaagagagatgcaattgacacaaaaaatcaggccgattctgtggtctaccagactgagaagcaactgaaggagcttggcgataaagtccccgctcccgtgaaagagaaggtggatgtgaagctccaggagctcaaagaggcaatatctggtggatcaacacagagtatgaaggatgccatgtctgctttgaaccaggaggtgatgcagattggccaggcaatgtataaccagtctggtgctagtgctgctgggcctactcctggtgctgaggc

SEQ ID NO: 12517 - DNA, 306 bp, Zea mays
cccacgcgtccgcatttacgtatatgcccttgtcccggttcctttccccatccccaactccattatttgcttgatccttgagaagagagaggaagacgagagctagaagcgaaggagaaaagcagttcttcagctaggcaggagggcacaggaaggaggagatggcgtcaaagaggattcagaaggagctcaaggatctgcagaaggaccctcccacctcgtgcagtgcaggtcctgttggtgaagacatgttccactggcaggcaacaataatgggtccatctgatagcccatattctggtggag

SEQ ID NO: 12518 - DNA, 303 bp, Zea mays
ggacgcgtggcagcggaggcagcgtgcctgctcctcaggcgtctgctcagcacgctacccatgaagtatttggccagcgtgctgagcggcggaactcagcgtgcctgctcctcaggcgtctgctcaggcttgggccgccatggtgaccgagatgcagaagggcgctctttctacgcgtctgggtataccgatcatctacggtatcgatgcagtgcaagggcacaacaacgtctacaaagctactattttccctcacaacgtcgggcttggagctaccagggaccctgacctcgttaagagaat

SEQ ID NO: 12519 - DNA, 301 bp, Zea mays
gaattgagaatccaccggagtttgatttgaaaggatcatctttaggccgttctactgataaaattgaaattgacgagaacacaactctgaaggatttggatcttaactattccttttatcttgaaccttcctggcgtgaggctcttcttaaacagattgaaacagacagtgattttttgagaacacagcggataatggattacagcctactgcttggtgtccattatagagctccacagcacttgcggacacgtgcatcttatcaccggagcatggcagcagatagattgactgttgtttc

SEQ ID NO: 12520 - DNA, 301 bp, Zea mays
aggaccgtccgcccacgcgtccgcccacgcgtccgaagagatctcgctattaggaggaaggtttcagagctgcctcagagaaatcagaaagcgagctcgtgactttgaggacaaggcgaagggcgtcaagatcaagaaagaggactgggacaagttgcatgttcacatagcctcgtacaacaacttccccactgctgctggtttggcctcttcggctgctggccttgcctgtttcgttttcacccttggaaagctgatgaatgtgaaagaagattatggagaactttcttcaatagcaagg

SEQ ID NO: 12521 - DNA, 301 bp, Zea mays
  unsure (1)..(301): unsure at all n locations
ggggagagagagaagtgggagacccgcgagacgctgccgtgtagggactagggaccgtagagtaagcgacacgnaggagggagagggggatggccgggatcgggccgatcaggcaggactgggagccggtggttgtgcggaagaaggcacccaccgccgctgccaagcaggatgagaaggccgtcaacgccgcgcgccgctccggcgcggagatcgagaccatgaagaagttcaacgctggtatgaacaaggcggcgtccagcggcacatccctcaacaccaagcgcctcgacgacgacac

SEQ ID NO: 12522 - DNA, 242 bp, Zea mays
cccacgcgtccgcccacgcgtccgctgcacgagagacagacgacgagatggccgatgcggaggacgccgccgccgcgcgccgacgggccgccataaccgactaccgcaagaagctggctcaactgcagggagctcgagtcgcgcgtcggcaccgtgagagacagccttaaaaatgcaaagagggattttaccaagactgaagacgacttgaaatctctgcagagcgtggggcaaataattgg

SEQ ID NO: 12523 - DNA, 238 bp, Zea mays
attgagaggtccaccaaccttgactggtacaaaggcccgaccctgcttgaggctcttgaccagatcaccgagcccaagagaccttcggacaagcccctgcgtctccccctgcaggatgtgtacaagattggtggtattggaactgtaccggttggtcgtgtggagactggtgtcatcaagcctggtatggttgtcaccttcggtccaactggcctgactactgaggtgaagtctgttg

SEQ ID NO: 12524 - DNA, 127 bp, Zea mays
attcgccggcttccagacacactccacgccggtcttgctcgcagcaggggagagagctgaactggcaactgaaaaatacatttccactgaccccagtactagagggctttgtgattctgaagaagaa

SEQ ID NO: 12525 - DNA, 262 bp, Zea mays
ccgggtactaccccacgcgatccgcatcgcgcgtggaccatacgacgacctggtggaagaaaccagcagctctgggtcatcgggggcgtttccgcgcacctcttcgcggtgttccaaggccttctcaaggacctcgctggcatcgacacgagcttcacggtgacatccaaaggcggagacgactaagagttctcggagctgtacacgttcaaatggaccaccctgttgataccaccgagcagccttctcctgctgaacttca

SEQ ID NO: 12526 - DNA, 232 bp, Zea mays
ctcctcagaaacccaccaaccccgtccagccgccggctgtctcggccgccgccgccgccgccgccgccctatcccggtccttcaggcgaaccaggttggtcatggccttcaacaagatcaaggtctccaaccccgtcgtcgagatggacggcgatgagatgaccagggtgttctggaaatctatcaaggacaagcttatattccctttcgtagacctcgacatcaaatattt

SEQ ID NO: 12527 - DNA, 230 bp, Zea mays
gttttgctgctctccgaccccgagctccgaagccgcagcatcaggcgcggcccccctcgcgtgtgaccgagatggcgctgccgaatcaggggaccgttgattaccccagcttcaagctcgtcatcgtcggcaatggtggaactggtaaaactacatttgtgaagaggcatctcactggagagtttgagaagaaatatgaaccaaccattggtgtggaagttcatccgttg

SEQ ID NO: 12528 - DNA, 231 bp, Zea mays
attgccaacgaccagggtaaccgcaccacgccctcgtacgtcgccttcaccgactccgagcgcctcatcggagatgcggccaagaaccaggtcgccatgaaccccatcaacaccgtctttgatgccaagcgtctcatcggcaggaggttcagtgatgcgtctgtccagagtgatatcaagttgtggcccttcaaggtcatttctgggcctggtgagaagccaatgattgtt

SEQ ID NO: 12529 - DNA, 232 bp, Zea mays
gcgagcccaaggggaaactgcatatggagctaacttggaggcacgcctgaaggacaaagactatccgattggccagtccctctcaacgctgggtctctctctgatgaagtggcgccgggaccttgctctgggcgcgaacttgcagtcccagttctccatcggaagggggtcgaagatggcagtgcgacttggtctgaacaacaagctgagcgggcagatcacggtcaggaca

SEQ ID NO: 12530 - DNA, 233 bp, Zea mays
ggcggcgccggcgtgcttgtgatctcaacccaagtcgtgcctccgctccggtcacccgtcgctccacgcaaccatgtcgacgaggaagaccagggagcccaaggaggagaacgtcacccttggacccactgtccgtgaaggagagtatgtctttggtgttgctcacatctttgcatccttcaatgacaccttcattcatatcactgatttgtctgggagggaaactctggttc

SEQ ID NO: 12531 - DNA, 225 bp, Zea mays
ggttcatgcccttttttcagaattgccttggtgccattgacggcacacatgtatccatcactatcgcagaagatagggcccctccatatagaaatagaaaaggaactctttcacacaatgttatggtagtctgcgactttgatctcaattttacatttgtctcgtgtggatgggaagggtcggcatcagacgcaggggtgcttcgatctgctattagcaaaagat

SEQ ID NO: 12532 - DNA, 223 bp, Zea mays
ggaggtggtgtctcttgcagtcagcagaagacactgcactcgacattgtggatgctcctagtgaacttgctctcttcctagctagggcagtgattgatgaagtattaattccgctcaatttggatgaaatcagcattaagcttcggccgaacagcagtggcagccaaactgtccagatggcgcgtgctctactgtcagctcgccattctggtgagcggatact

SEQ ID NO: 12533 - DNA, 227 bp, Zea mays
cggacgcgtgggtatttttgagattgcggagaacaaggaggactacaacaagttctatgaggccttctccaagaacctcaagcttggcatccacgaggaccccacgaacaggaccaagattgctgagctcctgaggtaccactcgaccaagagcggggatgagctgaccagcctcaaggattatgtgaccaggatgaaggagggccagaacgacatcttctacatca

SEQ ID NO: 12534 - DNA, 225 bp, Zea mays
ggctggttttgctggcgatgatgcaccaagggcggttttccctagcattgttggccgtcctcgccacactggtgtcatggtagcgatgggacagaaggacgcatatgttggcgatgaggctcctttgaaacccaaggccaacagggagaagatgacccaaattatgtttgagactttcaatgttcctgccatgtatgttgcaatccaagcggtgctctcactcta

SEQ ID NO: 12535 - DNA, 229 bp, Zea mays
cccacgcgtccggtctggaaagtaaaatcattccctggtggcaaggaatacatgtgcagagcagaatttagtcttcctagcataacagcggaagaaggggccccagaaaagaaggcaccaatacgagtgaaatttgagataccatatttcaccgtatcaggtattcaggtccgttatctgaagataattgacaagagtggttaccaggcactcccctgggttagatata

SEQ ID NO: 12536 - DNA, 300 bp, Zea mays
  unsure (1)..(300): unsure at all n locations
gaaatttctagaccttgacattctaatggagaatgtatcacgagaaacaccactttatgtcatcaatgaaggaagtgaaccccaatatttcactaggttcttcagttgggattcagcaaaatcaataatgcatggtaactcatttgaaaggaggttatctttagtgaaggatggagtanaaccaagagcagataaacccaaaagaaggtcaacaacatcaacacacactggaaggtcgagtgtacctgataaatcccaacgttccagaagcatgtcattcagtcctgatcgtataagagt

SEQ ID NO: 12537 - DNA, 296 bp, Zea mays
ctcaagcacaaagacaccgccaaggtccgcctcgtcatgcgtcaggcgaagacgcttaagatctgcgccaaccatctcgtggtggcgacgactaagatgcaggagcacgcggggagcgacaagtcgtgcgtgtggcagcgctggacttcgccgacgggacgctcaaagaggagatgtttgctatccgttttggatctgtcgagaattgcaagaagttcaaggacactgttgaagagatagctgaacagcaaggaaagagcgaggagaaagacaatgatgaagtctccactgccgct

SEQ ID NO: 12538 - DNA, 255 bp, Zea mays
ctctgcctccgcaggtgcttgctggtatcattacaatctggtagttttagtggttgggcttgacttcctactattcagaaacacagtaccgagaagtctttaggtggggtcaaagatggtgtcgctgaagttgcaaaagcgccttgccgcgagctacctcaagtgtgggaaaggcaggtgtggcttgacccaatgaagttagtgagatttcatggcaacttccgccagataatcggaatttgtaaagatgggtta

SEQ ID NO: 12539 - DNA, 289 bp, Zea mays
gttgttggagctgttggttttcagcaacgacggcttgatattcctggtggtgtggatcctgctgtagcagagataataaggagatgctggcagactgatccaaggatgcggccatcattttcagagatcatggctactttgagaccattgttaaaaaacatgcctgccaaccaacctaccaggaagcgggcacaacaaacagatgattaagaatatattggtcagtatcagctgaagacacaggccaaagagagactgcattggtttgtcttgctcttgccttcccagc

SEQ ID NO: 12540 - DNA, 280 bp, Zea mays
  unsure (1)..(280): unsure at all n locations
caagtgggttgtctggtttatctggaattcaaagtcttgatagcattgaggctcaacagttccaagcatgcctagatgcagtaatgcaaagtcttgcaaaatccatagcatgggatggtgnaggtgcaacatgcctaattgaggttactgtaagtgcgcgcaacaacgaggcagaagctgctaaaattgctcgttcagtagcatcttcttctttggttaaagccgctatatttggaagagacccaaattggggacgaattgcttgctcagttggttattc

SEQ ID NO: 12541 - DNA, 281 bp, Zea mays
cctcaaccctactcccccttcatccgcacgaacgaagcagcgcgagcgagtgagcagacgatccttcccgacctcgaagcctaccccccttccagctgcggccatggcgaccgtcatgcagaagatcaaggacatcgaggacgagatggcaaggacacagaagaataaagccactgctcaccatcttggtcttcttaaggctaaacttgcaaaattgcggcggggattgctcactccaacatccaaaagtggtggtggtgcaagtgaaggatttgatgtga

SEQ ID NO: 12542 - DNA, 285 bp, Zea mays
gaaagtatcaaaacccgagagcaatggaggcggtggggaagagcgtgtgcgtgaccggcgcgggcggcttcatcgcgtcgtggctggtgaagctcctcctctgccggggccaatacaaggtccgcggcaccgtgcgcgaccctggtgctagcaagaatgctcatctcaaggtgctggaaggagctggggaaaggttgcagcttgtcaaggctgatttgttggactacagcagtgttgcttcagcaattgccggctgtgagggtgtcttccatgtagctagccctg

SEQ ID NO: 12543 - DNA, 286 bp, Zea mays
gatggaggtgtacttcgagagatttccagacacagttcagtggagtctattgacatatgtgaaattgatcagctggttattgatatctgcaaggaattcttcccacatttgtctgttggatttgaagatcctcgtgttcaacttcatgttggtgacgctgtggagttcttgagaaatgctcctgaagggacatatgatgctatcattgttgattcatctgacccaatagggcctgctcaggaacttgtggagaagcctttttttgagaccatcgctagagctttga

SEQ ID NO: 12544 - DNA, 282 bp, Zea mays
ctggttggaagtgctctgtcagatccttatctttctttcgcatcatctgtgaatgggttagctgggccactacatggccttgcaaatcaggaagcgcttctatggctcaagtctataattcaggaaacagggagcgacgttacgacagaccaactcaaagactatgtctggcagacactgaagagtggaaaggttgttcatggatttggtcatggagttctgcgtaggacggacccacggtatctatgccaaagggagtttgccctgaagtatttgccagag

SEQ ID NO: 12545 - DNA, 290 bp, Zea mays
atcccttcgtaaacccttctctcttcttcccgcggcctgctcgttctatctgtccagcagacttgaggttccgagcggccggaaaccagcggcaaccgtcggcatggcgctcgtattgcattctggggctggaaacaaaaatgccttcaaggcacttattgctgcagaatacagtggggtcaaggttgagttgaccaaggattttgagatgggtgtctcgaacaagacccctgagtttctaaagatgaacccccttgggaaggttcctgttctggagactcctgatggcc

SEQ ID NO: 12546 - DNA, 308 bp, Zea mays
cagaaaaccctagccgccgccaccgaagcggcctcccaggtaagcaagagcgtccaccccgccgccgccatgaagcgcaatccccgcgtcacgagctctcgccggaagtgccgcaggcgcacttcacggccccgtcctccgtccgccgcgttctcatgtccgccgggctgtcgacggagctccgccacaagtacaacgtgcgctccatcccgatccgcaaggacgacgaggtgcaggtcgtgcgcggcacctacaagggccgtgaggggaaggtggtgcaggtgtaccgccgccgctgggtcatccac

SEQ ID NO: 12547 - DNA, 303 bp, Zea mays
cccacgcgtccgctcgggtaaagctatctcgagctagctagctgctgtaaccgttgccatggccaaaatggtgttgctctgcgtgctcgtctccttcctcctgatgcccttggcctccctagccctgacgcaggacttctgcgtcgccgacctgacctgcagcgacacgccggcggggtaccgtgcaagtccagcgtcaccgccaacgacttctacttccacggcctggccggccagggcaaaataaacccactcatcaaggccgccgtgaccccggccttcgtgggccagttcccgggcgtc

SEQ ID NO: 12548 - DNA, 305 bp, Zea mays
cagaacttgcaaatcagctcgggtgcaaagatccaaatcaccaaggacatcgaagcggactcaaatgccctgactcggccggttgaactagttggaacacctggcagcgttgataaagctgagcagcttattaagagtgtcatagctgaggctgaggctggtggttcccctgccttaatagctagaggatttggaagtggacagcctggatcagagcaatttgagatgacagttcctgataacaaggtcggtctcattatcggaaaaggtggtgagacaattaaaggcatgcagaccaaatctgg

SEQ ID NO: 12549 - DNA, 302 bp, Zea mays
cggacgcgtggtcccaggcaggcaggtcggcgaggagggcaggaagaccgaagaccgagccgtgctggggctcgggacgggaacgggacaggaccccacaatctcagatccttcctgcccgcccgcccgtgcccgtcgacgcgtcgttcttgccggccgcgcctcacctccgccctctcctcctccagggggatcggatacgccacaggctgcgcgatggtgctgtgggtcttcggctacggctccctcatctggaaccccggcttcgacttcgacgacaaaatcctcggcttcatcaaggg

SEQ ID NO: 12550 - DNA, 301 bp, Zea mays
gttcctgtcccccatgagaagtataaagacaaggtgttctatgtttggtttgatgcacctatcggctacgtgtctattacggcatcctatacacctgagtgggagaagtggtggaagaatcctgataatgtagaattgtttcagtttatgggcaaagataatgtgccgtttcacacgatcatgttcccttcaacgctactcggaactggggaaaagtggacaatgatgaaaacgataagtgttactgaatatttgaattatgaagcaggcaaattttccaagagtaaaggtattggagtct

SEQ ID NO: 12551 - DNA, 300 bp, Zea mays
acgagttcaaggccacctacctcggcctacggagcagtgttggcgatggtggtagtggtatcgatgacgacgacgagccggacgaggaggagggctacgagggtgtggacggggcgagcctccccaagtcggtggactggcggacaagggcgcggtgacgggggtaaagaaccagggccagtgcggcagctgctgggccttctccacggtggccgccgtcgagggcatcaaccagatcgtcacgggcaacctcacggcgctgtcggagcaggagctcatcgactgcgacacggacggcaa

SEQ ID NO: 12552 - DNA, 288 bp, Zea mays
ctacccgcgagaaggaacttcttcagttacgcaaagagggacggagaaatgagtatgaacgccacaagcttcaggcacttaatcagcggcagaaattggttttgcaaaggaagaccgaagaggctgctatggctacaaaaaggctgaaagagatattagaagctaggaaatcttccgcccgtgacagttccgctggcagcaatggtacatctcaaggctataatatgggtgagagatcgctgcaaaaatggtttgatcaagagcttgaagttatggtgcatgtgcatg

SEQ ID NO: 12553 - DNA, 300 bp, Zea mays
ctagggttttgctgctctccgaccccgagctccgaagccgcagcatcaggcgcggcccccctcgcgtgtgaccgagatggcgctgccgaatcaggggaccgttgattaccccagcttcaagctcgtcatcgtcggcgatggtggaactggtaaaactacatttgtgaagaggcatctcactggagagtttgagaagaaatatgaaccaaccattggtgtggaagttcatccgttggatttcaccactaactgtggtaagatcaggttctactgctgggataccgcagggcaagagaagtt

SEQ ID NO: 12554 - DNA, 296 bp, Zea mays
accacgcgtccgggaccgtggtgataatgatatagcggttatagacaagtcatttggttttgatactgctgtagaagaagcccagcgtgccattaatgcagctcatgatggaagcttcaagtgctgaaaatggaataggtttagtgaagcttatgggtcgctatagtggatttattgccatgtatgctactcttgcaagcagagatgtggactgctgtttgattcctgagtcacccttttatttggcaggggagggtggactatttgagtatatagataggaggttgaaggagaac

SEQ ID NO: 12555 - DNA, 304 bp, Zea mays
atcaacaggaggtggtgcagcagcttcataaggttcttcgcccattccttcttaggaggctcaagtctgatgtagaaaagggcctacctccaaagaaagaaacaattcttaaagttggaatgtctcagatgcgaaagcagtactatcgtgctctgcttcagaaggatttggaggttattaatgctggtggtgaacgcaagcgattgcttaacattgccatgcagttgcgcaagtgctgcaaccatccatatttattccaaggagctgaacctgggccaccctacacaactggtgaacatctaat

SEQ ID NO: 12556 - DNA, 298 bp, Zea mays
aatgttatcaatgaattatttgcatattattcagcagtcatcaatgcaaaatcaaccacaaaaggttctagttcaagagagagtgagtttgttccacataaaaatacttgtttggtggatgacgaggaggatgaggttgatcttgatgagttgtatgcaacaacaagcaatgacaagaaggtgtcagagttagatttgtatatgagcgaggacctagtgaaggtcaatgacaatgaagcaacatttgatatcctatcatggtggaaagggcaagtcacaaattttcctattctttcta

SEQ ID NO: 12557 - DNA, 295 bp, Zea mays
cccacgcgtccgccgcaacatcgtcaggctgcaggacgtcgtgcacaacgacaagtgcatctacctcgtattcgagtacctcgacctcgacctcaagaagcacatggactcctccacggacttcaagaaccaccgcatagtcaaatccttcctctaccagattctgcggggcatcgcctactgccactcgcaccgcgtgctccaccgcgacctgaagccgcagaacctgctgattgaccgccgcaacaacctcttgaagctcgcggactttggactggcgagggcgttcggcatc

SEQ ID NO: 12558 - DNA, 293 bp, Zea mays
gaagcggagatgctcccgcccgccgcggtgaagacggagccggtggtggatgggctcgacgacgaggtggtgcacaagatcaccaagcaggtggaatactattttagtgacatcaaccttgctactacagaacatctgatgagattcattaccaaggattctgagggatttgtgccaatatcagtaattgctggctttaagaaagtaaaaacttctgtgcgcaataatgtgatgcttgctgcggctctccgaacctcatcaaaacttgttgtaagcgatgacggtaagagagt

SEQ ID NO: 12559 - DNA, 295 bp, Zea mays
caagaaactgcgagattgatgtatgagcaggaaagtggcctgtttgattttagacgaacagaaaactcttctttgttgttggtgatcgacagaagggatgatcctgttacgcctttacttaaccagtggacataccaggctatggttcatgagcttattggaatcgagaacaacaaggtggaccttatgggatttgctaatattcctaaagaccagcaggaggttgttctatcatcggttcaagacgatttttttagagctaacatgtttgagaactttggggaccttggtatga

SEQ ID NO: 12560 - DNA, 297 bp, Zea mays
gtcccttgtttggatatgacttctggtaccagcctcgccacaagacgatgatcagttcgtcatggggagcccctgcagcgttcaggacaggtttcgatcttcaacatgtccaggatggcctgtatggaaggcacctgcatgtgtacgactggcctggcggtgagctcaagcagacacttgatctaggtgacactggactccttccccttgaggtgaggtttttacatgatccatcaaaggacactggctatgttggctgtgctttaacaagcaacatggtgagatttttcaagaccg

SEQ ID NO: 12561 - DNA, 291 bp, Zea mays
gctgtgcagaagatggtttatccctacttgcctgaagagatgaggaacccagattcgttcaagtggatgctgcagaatccaatgtaccggcaacaactacaggatatgctaaagaacatgggtggatctcctgatcaatgggataaccgaatgcttgatcacctgaagaactttgaccttagcagtccagaagtgcggcacagtttgcgcaagttggcatgactcccgaggaagtggtatcgaaaataatggcaaacccagatgtagctgtcgcattccagaacccaaaaa

SEQ ID NO: 12562 - DNA, 281 bp, Zea mays
ctctcagcgagtgctggagagcccactatgtccgccgccggcgcgacctgccggagactgtggaggtgacgctgcgcgccgtcggcccgtcccgtccaaccaccctccgcctccctccgcttatctcggtcgccgagctgcgcggctgcatcgcgcgcgaacgccgtctagcaggcacggaagaagttcgactccgcttgatcctgcgggggaagacgctcccgcaccaagacgacagccatgtcactctccgcgatggggatactcttatagtcgccgtg

SEQ ID NO: 12563 - DNA, 360 bp, Zea mays
cctcctcccactccacggagaagcgaaaccgacctttccccctcccccgcattccacctcgcggagatccagtccagccctagggtttcgccagcgggagccaaactccacgagcgggggaagaggggaaagcagggacgacgagggggcagccatggggcagcagtcgctgatctacgcgttcgtggcccgtggcacggtcatactggccgagtacacggagttcaccggcaacttcaccaccatcgcctcccagtgcctcatgaagctccccgcaagcaacaacaagttcacctacaactgcgacggtcacactttcaattacctcgtggaagacggattcacatactgtgttgttgc

SEQ ID NO: 12564 - DNA, 358 bp, Zea mays
tgctgagggtcagaacaagcttgattatgttcttgccctcaccgctgagaacttcctcgcaaggcggcttcaaacacttgtcttcaaggctggcatggccaagtccattcaccatgctcgtgtcttgacaatttgcctgccaaccctgatgtgacgctgcttgatcaaggtacattggttatcaaggaatggtatgtacattgcggtcattggaagcctcaagggactgcaagagaggaagcgtgctactgctttctcaatcaggcctataaccgatttcaatgaggttacgctgcatttcattcagtgtgttcggatgcatatagagaacattgaattaaaggctggcagtcctgca

SEQ ID NO: 12565 - DNA, 360 bp, Zea mays
accgccacgcgtccgcccacgcgtccggccgagccttgtactgacggcggacaccaagcccaggctgcgagtggacggccgacctccacgagcgtttcgtcgacgccgtggcccagctcggcggacccgagaaagcaacaccaaaaactatcttaaggacaatgggcgtcaagggtcttactctttttcacttgaagagccatcttcagaaatacagattagggaaacaatctggtaaggagggatcagagcaatctaaagatgcatcctatcttctagatgctcaaagtggaatgagcgtgtcccctagagttcctgcccaggatatgaaagaaagccaagaagttaaagaagcactga

SEQ ID NO: 12566 - DNA, 357 bp, Zea mays
ctcgtccccaaacaagcaaccaccgcctccccgatctcgtcgagaggaagcccaatcccgaaaccgccgccctattccaatggcgcccaaggccgagaagaagcccgccgccaagaagcctgcggaggaggagccggcggcggagaaggccacggcggggaagaagcccaaggccgagaagcggctccccgcgggcaagtccgcagcaaggagggtggcgagaagaaggggaagaagaaggcaaagaagtcggtggagacgtacaagatctacatcttcaaggtgctgaagcaggtgcacccggacattggcatctcgtccaaggccatgtccatcatgaactccttcatcaacgac

SEQ ID NO: 12567 - DNA, 307 bp, Zea mays
aagtacttgtacacgctctggtcttcgatgctgagaaggcaaacaagttgaagcaatctcttcccccaggtttgaccgtcgaggaggtctgattggatacatggcaacgccgagttgaactacccaagcttctttatcagtagcagagcatgctactctatgtacttttggaacctaagctattagacctgtcagtgttggatgtctggatcttgcatttttggagaaataccaatttacctcgttcaaggatgcaagtatatttcttgtttaactgcacattactttatatttatgcctgtttcat

SEQ ID NO: 12568 - DNA, 363 bp, Zea mays
caaggatgctgctcctgagctcccccttcgtgtccgtgtcgccgccgccgccgccgctcagctcccatggcgctcgcccggcgctgcggatcgaagcggccaggcagctgacggggcgggtggtgacgaccaaggcggacaagacggtcggggtggaggtggtgcgcctggctccacaccccaagtacaagcgccgggagcgcatcaagaagaagtaccaggcgcacgaccccgacaaccagttcaaggtcggcgacgtcgtcgagctccaaccctcccgtcccatctccaagaccaagcacttcctcgccatcccgctcccgccccgcgacactcgccgcaagtctcagctcctaccgccgc

SEQ ID NO: 12569 - DNA, 358 bp, Zea mays
ttcacgcgtccgcacacgcgtccgcggaccgggcgcccttttttttttagcttttgcgataatagggtgcttagcttagctgtagagtctagaaatagtactcaatttttccacaactgaatgtaatataacaccatcagatgcagcgaagaaacaagaaaaaagctggtggcagtaattccaaaaatcagaattattcttggcttgtagcaccgtttgtcgcctcctccatgggatctgcttctgctgcatctcctttcttgcctttcttcttcttcccaccagccttcttctttgatttcgtccccaaagcaagccatgcctttatctctgcattgtcttcaatggatttggtggg

SEQ ID NO: 12570 - DNA, 396 bp, Zea mays
gagctgagtacggtcggaattccgggcgaccagcgtccgcgcttttggagaaggacgaagacgacgacgagggggcgcgccgcgacggtgagggtggaggacgccggcgatgggaggagcctgccgccgccgtcgccgcgacaggtccctacgccggcggtcggcgcgggccgcggcggcagggcgacatcatagccaagggccacaataactacgagctcatgctgaaccagcatctcggcatcaggcacgaagtaggaaagcaaggcccaattacagttgatctcaagtcatcagcattcgacgccaaggagaaagtatggacaaggttccctccggaaggctcgaaatacactcctccacacagttcgtgcggacttcagatggaaggactac

SEQ ID NO: 12571 - DNA, 357 bp, Zea mays
ccgcagcggaggaggagctgtgccaagccacaatgagtatctcacgcgactcgatgcacaagcgccgtgccaccggtggaaagcagaaggcctggaggaagaagcgaaagtatgagcttggtcgccagccggccaacaccaagttgtcaagcaataagacagtgaggagggtccgtgttcgtggaggtaacgtgaagtggagggctcttcgccttgatactggtaactactcatggggaagtgaagctgttacccgcaagacccgtatcctcgacgtggtctacaatgcatcaaacaatgagcttgtgaggacacaaacccttgtgaagagtgccattgtgcaagttgatgctgccc

SEQ ID NO: 12572 - DNA, 349 bp, Zea mays
tacaaattttgatgagcaactcattggaagcttgtgaaggaaattataactcatatatttgctactcctaaagatcaccgtaaagcaaaacctttccatgaccatgtatttgtcttctccattgtggatggccatgtttggtttcgaaactaccagatttctgttccccacaatgagattgataaagttgataaaggtggtatggataaaatgacacttattgaggttggccccaggttctgtttgaatccaatcaaaatatttggtggtagttttggtggtcctacatggtatgagaacccatactacatttcccccaatcagatccgtgcactagagaagaggcaga

SEQ ID NO: 12573 - DNA, 350 bp, Zea mays
caaagttgctggcgtcttggaaacgaaccgacctgatgctaggatcgccttctaccaggcaaccatcaagcaaggagacttcctgctgaaccgcatccagaagctgtcacgagttatcgacctgtaggggagagcccttcatgcaggacaggagcttgccttggttcctggagtgtacgagcggtgcttgactttcaatgggtctcagttgaagaagcttttagggatatttgtgttctgagaaattgtgttttgcactttttagcctaactacatgaagcccccaaaaaaatttcatggcgttgcttgtagacgtttcttcattgatgaattcatcccttgttttttct

SEQ ID NO: 12574 - DNA, 350 bp, Zea mays
aaagcattgactgctttttcagtgggactacagcggtggcagtgatcaagcaggaacacaatcttataattggcaatttgggggattcaagagctgtcttaggcaccagagatgaaaataaccagcttattgctgttcaattgacagttgatctcaaacctaacattccaagcgaacagcagagaatcaggcaacgcaggggcagaatattcgcgcttcccgaggagccggaggttgctcgtgtttggcttccaaagtacaactctcctggactggccatggctagggcatttggagacttctgtctgaaggaccatggtgtaatttctacgcctgacgtctcctatcac

SEQ ID NO: 12575 - DNA, 379 bp, Zea mays
gctgagtacggtcggaatccgggcgaacaccgccgggacgtgcttcagatcttcaaagcctgtctcaggaagtctcctgtggtcaaggatgttgacttgaatgctctcgccaaatacacccagggtttcagcggtgcagatatcacagagatctgccagcgcgcatgcaagtatgccatcagggagaacatcgagaaggatatcgagagggagaggcgcaggaaagacaaccccgaggctatggaggaagacgaggtagacgacatcgctgagatcaaggctgctcacttcgaggagtccatgaagtacgcccgtcgcagcgtgagtgacgccgacatccgcaagtaccaggccttcgcccagacactccagcagtccc

SEQ ID NO: 12576 - DNA, 351 bp, Zea mays
gaagaagcgaatggatgatgaagctaagaaggcttctcggcttgagcagaagattaagcttctgacacaaggatatcagatacgggctggaaaactgtggtcacaggtccaagatacattcaagcagatggacactgccgcaacagagctcgaatgcttccaagagctgcagaaacaggaacatctcgctgcttcatatcgaatccaaaatttgtctgaagaagtgagtaaacagaaggcactagaaaggaccctccagagccgctacggcgagctggtttctggtttccagaggatccaagaacaggtcgaggagcacaagaggcaactcaaggtacaagaggcggtaga

SEQ ID NO: 12577 - DNA, 401 bp, Zea mays
tgccatgagtagctgcagtacggccggaatccgggcgaccacgcgccgggaccgggcgctcctgtccaccctgccaccgccgacgccgcgccgccgagctcaactgtcaccgtcgctatggcccgtatcaaggtgcacgagctccgggggaagagcaagacggacctgcaggcgcactcaaggagctgaagtctgagctctccgtcctccgcgtaccaaggtcaccggcggcgcacccaacaagctctccaagatcaaggtggtgcgcacctctatcgcgcgcgtgctcacagtgatctcgcagaagcagaagtcggcgttgcgggaggcgtacaagaagaagaacctgctccccctcgacctccgccctaagaagacccgtgccatccgccgccgtctga

SEQ ID NO: 12578 - DNA, 362 bp, Zea mays
  unsure (1)..(362): unsure at all n locations
tcacgngccgggaccgggtttgacgacggaagatggtagagtaacatccactggcaaagttaagctcaacacacatgatgtagcttcaccagaacacatagacaaaggaagtactgccatttcctctgaagctcagcagaatggagagtatccagagaccttcccagcattgagaacttcattcttgaaggcattccgtgtaatggatagggatctcaaattacataaaagcattgactgctttttcagtgggactacagcggtggcagtgatcaagcaggaacacaatcttataattggcaatttgggggattcaagagctgtcttaggcaccagagatgaaaataaccagcttattgctg

SEQ ID NO: 12579 - DNA, 352 bp, Zea mays
cctcgccagccatgggcaagatcaagatcggaatcaacggtttcggaaggatcggcaggctcgtggccagggtcgccctgcagagcgaggatgtcgagctcgtcgccgtcaacgaccccttcatcaccacggattacatgacgtacatgttcaagtacgacaccgtgcacggccaatggaagcacagcgacatcgccctcaaggactccaagacgcttctcttcggcgagaagcggtcaccgtctttggcatcaggaaccccgaggagatcccgtggggtgaagctggtgctgagtatgtcgtggagtccaccggtgtcttcactgacaaggacaaggctgctgcacatctt

SEQ ID NO: 12580 - DNA, 349 bp, Zea mays
cgacgaggcttcgatctgctgctctccgtcggcgtgttggggacttgcaccttatccgaagatgtcttttcggagcatggttcgtgatataagggaaagttttgggaatatatcgaggcggaactttgaggtgagaattcaccacagagggaagtctcttgggtcttcaggtgacttgcaagacaggcctgctgaagttcagcaaagcaggtgggctagccttcctcctgagttgctctgcgatgtgatgaaaaggttggaggaagatgacagtagctggccggatcgcaaggatgttgtttcctgtgcatctgtttgtacaacctggagggatatgtgtaaggatatt

SEQ ID NO: 12581 - DNA, 349 bp, Zea mays
acaagattgtggacttcatcaagtttgatgttggcaacgtcgtcatggtgactggcggaaggaacactggccgcgtgggtgttatcaagaacagggagaagcacaagggcagctttgagaccattcacgtggaggactccctgggccaccagttcgccacccgtatgggcaacgtgttcaccatcggcaagggtaataagccgtgggtgagcctgcccaagggcaagggaatcaagctgagcatcatagaagagcaaaggaagcgggatgccgctgcccaggctgctgccaacgcataaatcctctgaatgtgctgtgttgagagttttttctagttgctctgcaagga

SEQ ID NO: 12582 - DNA, 343 bp, Zea mays
ctgagatatatggtgagttccgctctggaaagactcagttgtgtcacaccctttgtgttacatgtcagcttccactggaccagggtggtggtgaaggaaaggctctatatattgacgcagagggtacattcagaccacaaaggctcttgcagattgctgacaggtttggactgaatggtgctgatgtgttagagaatgtggcttatgccagagcttataatacggatcatcaatctagacttctgctggaacagcttccatgatgatagagaccaggtttgctcttatggttgtagacagtgccacagctctgtacagaactgatttctcaggaagaggggaa

SEQ ID NO: 12583 - DNA, 343 bp, Zea mays
gacgaagaagagggcgaaaccagcagtgccgttgggcgccaactacaggctcatagatatccctgtcagcaactgtctcaacagtaacgtctccaagatatatgtgctaacacagttcaactctgcttcgctcaaccgccacctctcgagggcctatggaaacaacattgccgggtacaagaatgagggattcgttgaggtccttgcagcacaacagagtccagagaatcccaactggtttcagggtactgcagatgccgtgcgtcaatatatgtggctatttgaggagcataatatcatggagttccttattctggctggagatcatctgtaccgtatggat

SEQ ID NO: 12584 - DNA, 345 bp, Zea mays
ggcgctcaccacgagcactaacaaccaagccttgcttgacgctcagctagagctctggcacacatcctttgctttcatcaagtccatggctctcaagtctgcagtggaccttggcatagccgacgccatccacagccacggtagcaacgccaccctgccccagatagtttccagggccgcgctccacccgtccaagatcccctgcctgcgtcgcctcatgcgggtgctcacagccgccggcatcttcagcgccgcccaccgctcgccggacgacggcggcggcgagctcgtctatggactcacaccggcgtctcagctcttggttggcggctcttcaagcctggc

SEQ ID NO: 12585 - DNA, 359 bp, Zea mays
  unsure (1)..(359): unsure at all n locations
ccagtcaccagtctccactctggagtctggaactcccctcatcctccacatctccaccgcatcggaactaggaaggcgaacganaggcgctggcgcggcgcggcacaggatcgagcgatggcggtggcccctcctacggcggcggcgctggagcagctaagcagcagcaagatgttcgacggcttcaatctccgcttccgccaccagagcgccacccttggctgcgccatgactttctccatctacctgcccccgtccccggcgtccaaccttcccgtgctgtactggctctcgggtctcacctgcaccgacgagaatttcatcataaagtccggcgcccagcgcgccgccgctgccca

SEQ ID NO: 12586 - DNA, 347 bp, Zea mays
cactcatcttttctcgtttagaacctctaaaatttcccccactcgccagtcgcagcagcacctgtagcagccatggacgccagcggagcggtagcaaggggaagaagggggcggccgggcgcaaggcaggcggccccaggaagaagtcggtgacgcggtccgtcaaggccgggctgcagttccccgtcggccggatcgggcgctacctcaagaagggccggtacgcgcagacgtgggcactggcgcccccgtctacctcgccgccgtcctggagtacctgccgccgaggttctggagttggcagggaacgcggcgaaagacaacaagaagacgcgcatcatcccgcg

SEQ ID NO: 12587 - DNA, 348 bp, Zea mays
cggcaacctgctcgcctccgtctccgacgacgccttcgacaagctgctgctccagctcctgctgaaggcgtcccaggacaagcggttcgtgtgcgaggaggccgagaaggcgacgcgcgcgatggcggcgtcgattccgccgctgccgctgctgaagaagctcaaggcgtacgtccaccacgccaacctcagggtcagggctaaggccgccgtcgccatctcccactgcgccgcccggatggacatcggcgcgatgaaggagttcgggatgtcggcgctgctgcagctggcggtggagctgctgaacgaccggctgccggatgcgagggaggccgcccgcagcgtggt

SEQ ID NO: 12588 - DNA, 329 bp, Zea mays
gagtcattgtatttcatggagacctctgcactcgagtcgactaacgttgaaaatgcattcgcagaggtcttaactcagatctaccgtattgtgagcaagagagcagttgaagctggcgaagatgcagcatctgggcctggcaagggcgagaagattaacataaaggatgatgtttctgcggtgaagaagggtggctgctgctctagctgacctgccctgctgtattttttttggagctgtggtgatgtagcttatggtacggcatttccagcgaccgagaactggtagtggcattagcagcttctatgttacctagagagtttattgtc

SEQ ID NO: 12589 - DNA, 343 bp, Zea mays
ggagaacgggaagcaggagcggcatctagtggcgacggtggggaagtacagcgtggtgtggaacttcctgcaggtgaagaacagccaccacgagtgctaccagtaccaggaggggctgaagagctgctattgctacaaggtgatccccaaggacgagtccatcgtggccagccgcttcatgcacgacaggtactcggtcagcgactccccggaggctccactggtggtggccacgcccatgaaggtcacttccttcagcatatccagcaggcactaactagcctccttgctccgccccgcaacttcgctgccggccgacgcgttcgcattggctcctcggcct

SEQ ID NO: 12590 - DNA, 303 bp, Zea mays
cggacatttagtcagaggctgagtagaggctttaatgatgctataagtggtttcaatgatgatggttggtccgttatgtgtggagatggcatggaagatgttatcattgcttgcaactcgaagaagatcaggagcagtagcaatcctgctactggttttggagcccctggacctggaggtatcatatgcgctaaagcatcaatgttgctgcagagtgttccaccagcagtccttgttaggttcctgagggaacatcgatctgagtgggcagattataactttgatgcgtattcagcttcagca

SEQ ID NO: 12591 - DNA, 343 bp, Zea mays
caccaatgctggtcttcagcaaatcaatccgcatggtaaactgaagcatatttctctcatgcgcaccaggaattcttagtaacatctttccgccgggtgaatgatctcggaatcctgttgatggccgacaggtgttcaaatcttgaaagtgtatgtcttggtggcttctcccgtgttacagacactggttttagggcaatcattcactcctgttctggtcttcataagcttcgggtttcccatggaagccatctaactgatttggttttccatgacattatagccacttctctttgcctaacccatgtgagtctgaggtggtgcaaactcctaactaatgttg

SEQ ID NO: 12592 - DNA, 331 bp, Zea mays
gcggctgggatctagcacgctagcgagcgagagagacgcacatctatctgtcaagcgacgccgcggcctcgatcagagtcggaggcgaacacccccatggcggcggctggcggcggcgcaggagggaaggtatccttcaagatcatcctcacctccgaccccaagctccctttcaaagtgttcagcgtgcccgaagcggcgccctttaccgcggtgctcaagtacgccgcggaggagttcaaggtcccgccccagaccagcgccatcatcaccaacgatggaattggcatcaacccccagcaaagtgcaggcaacgtgtttctgaaacatg

SEQ ID NO: 12593 - DNA, 344 bp, Zea mays
ccgcaagcaaatcctcctatctccaagcctccaatctgtgaacggtgaaccccaatcgaatgacgccgacggcgagcctcctcctcccggctcccccattcgtctctatctccgatgtgcgccgcctccagctccccccgcgcggcggccaccggcctcgcccctgctggaagggcttggagtgcggctccgtacagacgcggatggtctcttctttcgttgggagcagaacacgccgcagaaacgttatatgtgcttccctgttcggagttggatctcccgaagcactggtcattggagtagtcgccttgttggtgttcggccccaagggtctagcagaggta

SEQ ID NO: 12594 - DNA, 345 bp, Zea mays
gaacaagaggatctccaagggaaagaagggtggcaagaaaaagaccgtcgaccctttctctaagaaggattggtatgacatcaaggcaccgtcggtgttcagtgtgcgcaacatcgggaagactctcgtatccaggacacagggtaccaggattgcttctgagggtctgaagcacagagtctttgaggtttgcctagctgatcttcagggcgacgaggatcaagcttacaggaaaatcaggctccgtgctgaagatgtgcagggcaggaatgtgctcacaaacttttggggtatgaattttaccactgataaactgagatccctagtgaagaagtggcagacatt

SEQ ID NO: 12595 - DNA, 346 bp, Zea mays
cccacgcgtccgcccacgcgtccgtgcaaaacaaaaaccaagagttgatgaaacagattgagatatgccaggaagagaacaaaatcttggatagaatgcaccgccagaaagttgctgaggttgaaaagctcacgcagactgtcagagagctagaagaatctgttcttgctggtggtgcagccgcaaatgctgtcagagactaccagcggaaagttcaggagatgaatgaggaaatgaaaactcttgatcgtgagctagctcgtgcaaaggtttcagcaaatagggttgcagtagtggtggcaaatgagtggaaagatggcgatgataaagtaatgcctgttaaacg

SEQ ID NO: 12596 - DNA, 341 bp, Zea mays
cccacgcgtccggtgcctttccggccatcctctgttcccacaattaatgcaggtgctgaggaaactgagagctggaggtggtttttgaccacagtaaggtctcttcctcagtccactgaacctgaaacttaccagatgattcaggatgaaatggtcagtgccatgcgtgatgataggagcttgggttgttctgaacttagcagatggctaacaatggcacaaataatggcctccagctttggcgagaagagtctttctttggagcactggcagatggtgaaggagcttgagaggcttagaaagcagaggatgcaatgagatgacttaccattagcatgtgt

SEQ ID NO: 12597 - DNA, 340 bp, Zea mays
cttgatatcaagttgggcactaatagtgctgctacagttttgtacttgttctttggactacggttgctgtatattgcatggaaatctgacccaaagggatcccagaagaaggaaatggaagaagtagaagagaagcttgagtcgggtcaagggaaatcaaccatccgtaggttctttgcaagattttgtacaccaatctttttggaggctttcatcttaaccttcttagctgaatggggcgaccggagccaaatagcgacaatcgcgctggcaacacaccagaacgcaatcggagtcgcagtgggagcgtcacttgggcacacggtgtgcacatctctcg

SEQ ID NO: 12598 - DNA, 329 bp, Zea mays
aggcgacggcaagaaggagcaccagttctacctgtggttcgacccggccgccgacttccacacctacaccatcatctggaacgacaagaacgtcatcttcaaggtggacgacctcttcgtgcggtgcttcaagcggtacccggacctggcgtacccgggcgggaagcccatgtcggtgcacgccacgctgtgggacggcagctactgggccacgcagcaggggaaggtgaaggtggactggtccgccgcgcccttcgccgtctcctaccgcggctactccgccgacgcctgcgatcccgacggcgacggccgcccgctctcctgccccg

SEQ ID NO: 12599 - DNA, 339 bp, Zea mays
atcccgttcataactgctggtgatcctgacctggtaaccacatcgaaagcattgaagattctcaattcctgcggttcggatgttatagaggttggcgtaccatactcggatccactggctgatgggccagttattcaggcttctgcaacacgggcgcttaagaaaggcactacacttgattctgtcatagagatgctgaagggggttacacctgagctttcttgccccattgttcttttcacatactataatccaattctgaaacgtggtgtgggaaacttcatgtctactatcaaacaagctggcatacatggacttgtagtgcctgatcttcctttg

SEQ ID NO: 12600 - DNA, 339 bp, Zea mays
cccaactcgccgccgccgctgccaacgccgcctgctgccgcaccgccatgggggcgtacaagtatgtgtcggaactatggaggaggaagcagtcggacgtgatgcgcttcgtgcagcgcgtgcgcatgctgggagtacaggcagcagccgtccatcgtccgcctcaccaggcccacccgccccgacaaggctcgtcgtctcggctacaaggccaagcagggatatgttgtctaccgtgtccgtgtgaagcgtggtggcaggaagaggcctgtgcacaagggtattgtctatggcaagcccaagcaccagggtatcaccagctcaagttccagaggaaca

SEQ ID NO: 12601 - DNA, 336 bp, Zea mays
aagaaatcgagcctcactcgatccatcgcctcgccgcagcacacacgaggccggcggcgccatggccatgaagctggacatgtccgcgctcgagaccaacttcgccaacctgaccgcctccgccggcgacgacacgtacttctccgccgaggcccccgacgtgccgtccatggtgctccccatctgcgacgacttcgacggcttccaggcggccaccaaggatatggtgaagaataagaaggggacgaccacgcttgccttcatcttcgacaagggcgtcatcgtcgccgctgattccagggccagcatgggcggttatatatcctcacaaaccgt

SEQ ID NO: 12602 - DNA, 326 bp, Zea mays
cctacgtcgccatcgcctggctgcgcgtcgtgcccatgcagctcgtgcgctcccgcgtccagctcgccaagatcgccgcgctcagcctcgtcttctgcggctccgtcgtctccggcaacgtctcgctgcgctacctccccgtctccttcaaccaggcggtcggcgccaccacgcccttcttcaccgccgtcttcgcctacgtcatgaccgtcaagcgcgagttctgggtcacctacctcaccctcgtgccgtcgtcacggagtcatcatcgccactgcgccgagctagctttcactgtttggattcacatgtgcatagagaactgc

SEQ ID NO: 12603 - DNA, 334 bp, Zea mays
ccgcctcccccaccgggcacgacgagaagcgctgcagcttcatcacgccctactcaggtagtaaaaccccctgtatgtcgcgtatcacgacgaggagtggggagtgcccgtgcacgacgacgagttgctattcgagatgctcacactgtctggcgtgcaagtcggggccgactggacttccatcctcaagaaaagacacgtctacagggaggcgttctccggcttcaacgtggatgcggtcgccaagtacaccgagaagcagatggcgtcgctgagcgccgactacgggctggatttgggcaccgtcagaggaaccgtcaacaacgcctgccgg

SEQ ID NO: 12604 - DNA, 331 bp, Zea mays
cggaccgtgggctagtgctgatcgtgagattcagcggacgttgatggagctccttaaccaattagatggatttgatgagctaggaaaggtaaaaatgatcatggccacaaatcgacctgatgttctggacccggcgctcctgcgtcctggacgtttagataggaagattgaaattccgctacccaacgagcaatcaagaatggaagttctaaaaatccatgcagccggtatcgccaagcatggggagattgattatgaagcagtcgtgaaactagctgaaggtttcaatggggctgatcttcggaacgtgtgcaccgaagctggcatggct

SEQ ID NO: 12605 - DNA, 337 bp, Zea mays
cagaagccggacgtatgatgtcgtcggtgttcagcggcgatgagacggcccccttcgtcggcttcctcggcgccgccgccgccctcgtcttctcatgcatgggcgccgcgtacgggaccgcgaagagcggcgtcggcgtggcgtcgatgggtgtgatgcggccggagctcgtcatgaagtccatcgtgcccgtggtcatggctggtgtgctcggtatctacgggctcatcatcgccgtcatcatcagcacggggatcaaccccaaggccaagctctactaccgtcttgatggctacgccaccttttcgtccgggcttgcctgtggtctcgctgggct

SEQ ID NO: 12606 - DNA, 339 bp, Zea mays
gcaagtcggtgttcccaagatcgttgtcttcctcaacaagaaggacatggtcgacgacgaggagctgctcgagctcgtcgactcgagtccgcgagctgctcagcaactacgagtacgacggcgacgacgtaccaatcgtcgctggctccgccctcaaggcgctcgaggctctcatggtcaaacttgccctgaagcgcggcagcgatgagtgggtcgactacatcttctcgttggttgataaagtggattcctatattccagtcccgcagaagcagactgtccgtccgttcctgctcgctgttgaagatgtcttctccatcaccggtcgtggtacagttg

SEQ ID NO: 12607 - DNA, 337 bp, Zea mays
cccacgcgtccgcccactcccaggcgccgcacaggtacgtcgccggcgggatagacgacgcgcttcaagaagaaccgcaagaagcgcggccacgtgtccgccgggcacggccgcatcggcaagcaccggaagcatcccggaggtcgcggtaacccggtggcatgcaccaccaagtcatcctcttcgacaagtaccatcccggctacttcggtaaggtcggcatgcgctacttccacaagctccgcaacaagttctactgccccgcggtcaacatcgagcgcctctggtcgatggtgcccgccgaaaaggcgcggaaccgtcggcgacaaggccccgc

SEQ ID NO: 12608 - DNA, 342 bp, Zea mays
ggcagccgaagcgactgtcgcgaggcaaggccatcgtccgccatgacagctctccctctccacctctttcctccccatccccgccgccgcgaggaccaccgcccgcaccctacgctccgtcgtcccctcccaggggatgcgctgctcgatgcgcaagaaggggttgcacccggagatctacgaggacgcgaaggtgtactgcaacggcgagctggtgctggtgacggggggcaccaagccggagtacacggtggacgtgtggtccggaaaccacccctactatgtcggcgacacctcggcgctcgtggtcatggacagccagatcgagaagttccgcaagaa

SEQ ID NO: 12609 - DNA, 341 bp, Zea mays
atgcctttgaggacgcgctcaccgacgagcagctgcgagagaaagttagaatccaagcaaatgatactaaagcagaaggaaacaagctttttggtgctggacaatatgaggaagcattatcacagtatgaaatatcattgcaaattgctgctgagctggaatctgctgagggtatacgtgctgcatgccattctaatcgtgctgtatgcttcttgaaattgggaaaacatgatgagaccattaaagaatgctcaaaagcacttgagctcaatccaacatacctgaaagccctgcttcggagggcagaagcgcatgaaaagcttgaacattatgatgaagct

SEQ ID NO: 12610 - DNA, 339 bp, Zea mays
gcgccatcgcgaggtcatccgcaccgtgcccaaccgcgcctacaacctgtcgttcgccgtcgggacgcccggaacgctgccacggctctatgctggtggaggcgttcgcgggcaacgtcacgcagaaggtgccgttcgattccgccgggaaaggcgggttcaagacggcggcgttcaggttcgtggccggcggcgtccgcacccgcctcaccttctacagctcctactaccacaccaaggtcaccgacggcgtctcgctctgcggccccgtgctggaccaggtcaaggttgtgccggtcaaggcgtagtgaaatgaatcgtgagagcgccgctcctcgt

SEQ ID NO: 12611 - DNA, 337 bp, Zea mays
atggactgaaaggtaaggaatatgggctagcccaactccttcgccattgttacctactttgcgtgctctagttcaggctggtatatgcatggggttatatttatacctgtcacctaaatttccactctcacggtttagtgagcccctatattatgaatggggtttttggcaccgactcttctatcagtacatgtcaggctttaccgctcgttggaaatattactttatatggtcaatttcagaagcctcaattatcatatctggtctaggctttactggttggtcggaatcttctcccccaaaagccaaatgggatcgtgcaaaaaatgttgatgta

SEQ ID NO: 12612 - DNA, 340 bp, Zea mays
cgggactgccgtggtggtgaagaggatcactttgcgcgtggctcggaaggatgcctatctggcagagttagatttgtttgccaaaggattgcatgaaaggctggttcctttcctgggtcactgccttgataaagaagaagaaaaggttcttgtgtataggtttgtccgaaatggtgacttgtcaagtgcactgcacaaaaagtcaagggaggaagatgaaggcttgcaatctttggactggataaagaggttgaagattgcaacgggagtagctgaggctctttgctatctgcatcatgagtgttctccaccgatggttcatagggatgtgcaagccagc

SEQ ID NO: 12613 - DNA, 145 bp, Zea mays
cccacgcgtccggagatattgagaaaataattgcttcaattcctagagaacggcaaacactgttattttctgctactgttccagaagaggtccgccaaatttctcatgtggcaatgaagaaagattataggttcattaacactgt

SEQ ID NO: 12614 - DNA, 338 bp, Zea mays
ctcgggtcaaaccctaagcagggagttgatttatccgctgcagccatgagtaagttgcagtctgagtctgtcaaggatgccatctcccagattgttggggatgccaaggagaagaataggaagttcactgagactgtggaacttcagattggtctgaagaattatgatccacagaaggacaagcgtttcagtggctctgttaagttgccccatatccctcgtcccaagatgaaggtgtgcatgcttggtgatgcccagcatgttgaggaggccgagaagatgggacttgactacatggatgttgaggctctcaagaaaatgaacaagaacaagaagct

SEQ ID NO: 12615 - DNA, 366 bp, Zea mays
tagctgagtacggtcggaatccgggcgaccacgcgccgtaacgcgccgggaccgtggttgctgaaatatgaggcccgtctggaagatggtactgttgtatccaagagctgagggggttgagtttactgtgaaagatggctacttttgtcctgccctggccaaagctgtcaaaaccatgaaaaaggcagagaaggtgctccttacagtaaagccacaatgtgagattccatttcaagatggatttggtgagaagggtagaccagcagctggagaggaaggtgctgtgccgccaaatgcttcgctgctcattgaccttgagttgatttcatggaagactgtcacagaaattggggatgataagaaaat

SEQ ID NO: 12616 - DNA, 336 bp, Zea mays
gcgcttcctccgctatgcaagccccgttccgtcccacgccgaccacacggccattcttgcggcgccggagacccgggtcaccacgctgcccaacggcctgcgcgtggccacggagtcgtccctcgccgcgcgcacggctacggtgggtgtgtggatcgatgcgggcagcaggtacgagaacgaggaggcggccggcgtcgcgcattttgtcgagcacatgctgttcaagggcacagggaagcgtagcacgcgcagctggagcaggagattgaggacatgggtggccacctcaacgcttacacgtcgcgggagcagacgacctactacgccaaggtg

SEQ ID NO: 12617 - DNA, 336 bp, Zea mays
gtcgacgcgtcgttcttgccggccgcgcctcacctccgccctctcctcctccagggggatcggatacgccacaggctgcgcgatggtgctgtgggtcttcggctacggctccctcatctggaaccccggcttcgacttcgacgacaaaatcctcggcttcatcaagggctacaagcgcacctttaatctcgcttgcattgaccacagaggcacaccggagcatccggcgaggacctgcacgcttgaaaccgacgacgaggccatatgctggggaattgcatattgtgtcaagggtggtccagaaaaagagctaaaagcaatgcagtacttggagag

SEQ ID NO: 12618 - DNA, 336 bp, Zea mays
cagacagggtgccgccccatggtgcacacgtacacgcccatcgtgcagggctattgtcgtcagggccagatcgaggaggctaccaacctgattggcttcatggaggaagccggttgtcctcccaatgctgtcacttacaatgttctgataagggcgctgtgtgacgatgccaggttcgctgaggtcgagcaggtgttagcagagattgaaactaagggccacgagctcagtacggttacctataatatatacatggatgctcttggcaagaaaggcatggctaaggaagcactcaagcagtttgaggccttgcaatgtaaagggctgcatcccaca

SEQ ID NO: 12619 - DNA, 336 bp, Zea mays
tgctagaagaatttgacatgcagaaagtaagttggaatccatacaagcattgcttagcattcgtgtctgggaagaaccaggttactgtccaagactttgaggactcagatgctaaagaaccatgcattttaacaaatgatcatcaaacggatgttaaggctgttgagtggagaccaaatagtgggaagatgattgcagttgcctgcaaaggagggatatgcctctggtcggcatcatatcctggcaatgtcccattcatgaaatctggggtcacttcttcctttagtgccttccctagaggttctggtggtcagtggatacttgtggatgttcttc

SEQ ID NO: 12620 - DNA, 333 bp, Zea mays
ctcgccttggatcgatcgttcacaagaagactgcatcagtcttgtgtctgaccactgtcaagaacgaggacaagcttgagttcagcaagatcttggaggctattaaggcgaacttcaatgacaagtttgatgaagtcaggaagaagtggggaggtggcatcatgggctccaagtcgcaggccaagaccaaggccagggaaaagttgctggccaaggaggccgcccagcggatgacgtagattatccactgttgagcttgcccctgtagtttgacgtggaagaaccgatgagcattgtgcactcgtattgtgtttttttgaatctactttcata

SEQ ID NO: 12621 - DNA, 333 bp, Zea mays
gagtgaggagggcaggatgtcgcaccgtaagttcgagcacccgaggcacggctcccttggcttccttcccaggaagcgctcctcccgtcaccgcggcaaggtgaagtcattccctagggatgaccccaagaagccttgccatctcactgccttccttggctacaaggctggcatgactcacattgtccgtgaggttgagaagccaggatccaaactccataagaaggaaacttgtgaggctgttaccatcattgaaacccctcctcttgtcattgttgggctcgtggcatatgtgaagactcctcgtggcctccgcacactcaactctgtttg

SEQ ID NO: 12622 - DNA, 329 bp, Zea mays
cccacgcgtccggagcagctcaagccgtcgctctgcagctcaccgaaagagtgcaaggagtacttcagcaagtccctcttcctggtcggagagatcggggggaacgactacaactacgccttcttcaagggcaagaccctggacgacgccaagacctacgtccccacggtcgccgccgcggtcaccgatgccaccgagaggctgatcaaggccggcgccacgcacctggtggtgccggggaacctgcccatgggctgctcgtcggcgtacctgaccctgcacccgggccgcaacggcagcgactacgacgccgccggttgcctcaggac

SEQ ID NO: 12623 - DNA, 327 bp, Zea mays
ggaccgtggttggccctcagaggggatcctccacatgggcaagacaaatttgtgcagcgttgaaggcggatttgcttgtgctcttgatttggtgcagcatattagagccaagtacggtgattattttggcataactgtagctggttatccagaggcacaccctgatgcgatacaaggcgagggaggtgctacattggaagcatatagcaatgatcttgcgtacttgaagagaaaggttgatgctggtgctgaccttattgttacacaacttttctatgataccgacatctttctcaagtttgtgaatgactgccgccaaattggtat

SEQ ID NO: 12624 - DNA, 332 bp, Zea mays
gctccctcctcctccctgcaaatcctgcagacaccaccgctcgtttttctctccgggacaggagaaaaggggagagagaggtgaggcgcggtgtccgcccgatctgctctgccccgacgcagctgttacgacctcctcagtctcaggagcaagatgggtgccggcggcaggatgaccgagaaggagcgggagaagcaggagcagctcgcccgagctaccggtggcgccgcgatgcagcggtcgccggtggagaagcctccgttcactctgggtcagatcaagaaggccatcccgccacactgcttcgagcgctcggtgctcaagtccttctc

SEQ ID NO: 12625 - DNA, 330 bp, Zea mays
gtgggatccgaggacaggatcgaaaaacatgaaattgagagggcacactgacaatatcagagccttgcttgttgattctacagggaggtattgcctatcgggatcatctgattcaatgataagactatgggatctaggacagcagcgttgtgttcattcttatgctgtgcatactgattctgtttgggcacttgcaagcactcctgcatttggtcatgtctacagtggtggaagagatcaatctgtatacctaacagatttgtccacaagagagagtcttttactctgcacaaatgaataccctgttctacagttgtctctgcaagatga

SEQ ID NO: 12626 - DNA, 330 bp, Zea mays
aaactgggtagcttcctgccttacatgccaacaagcaaagccagaccgatccaagtaccctggtcttcttcaacctctgcccataccaaagacagcttggcataccatttcaatggacttcattgagggattaccacgttctcagcgctatgattgcattttggtggtggtggatttgtttaccaaatatgcacattttgttaccttatcccaccccttctcagccctcacagttgctcagtccttcttcaaacacatatacaaattacatggtctgccatctgcgattgtgtcagatcgtgataaaatcttcacaagccatttttggaa

SEQ ID NO: 12627 - DNA, 331 bp, Zea mays
cccacgcgtccgcccacgcgtccgcccgttgcctccaaactcatttctcccgagcgccgccgctagcctctgttccagcttcgttcatggcttccctcaccggatccgctctctcctttgcgaggcccgtcaaggcaatcagcattaagtctgtctctttctctggtctaaggaaggacaatgtagccttccgcttgcagccagtgccacaaagattcgctgtctgctgtcctgctaaaaaggagactgtggatcgggtttgtgatattgtcaagaagcagcttgcacttcctgagggcactgaggtctgtggctcctctaagtttcaaga

SEQ ID NO: 12628 - DNA, 255 bp, Zea mays
cccatcccactaccacccatctcgtcgtccgccgattcgatccggttcttccaacccaggggctgtgatggcgacgaagaggagcgtgggcaccctcggcgaggcggatctgaaggggaagaaggtgttcgtgcgcgccgacctcaacgtccctctcgacgacgcccagaagatcaccgacgacacccgcatccgcgcctccgtccccaccatcaagttcctcctcgagaagggcgccaaggtcatcctcgccag

SEQ ID NO: 12629 - DNA, 335 bp, Zea mays
agcaaagcttgagaggcttttctcaaaaacgcgccgtcgccgtttcttcccccttttttctttgagaaaattcgcccgcgagatctttagtttcagaccccgtgtggattagtcgctgtcacgatcgaggcggggcgccaattgcggtggccaccacctccaatccactccccgcggtggcctcgccgagctgttcttgctccgtcctccctccaactccaagatttgtttcgcacccgattcctgagcttccgcggcgcttcttgctgaaaagaaagctccgagttcttcagttctggatcgatagagaggcggttcctttgcgggctctgagg

SEQ ID NO: 12630 - DNA, 335 bp, Zea mays
tccagtccttcttcgtaagccttcaaaccgacgaatttgagcaactgcacccagagcgcgatccattgccggggaagaagcaacttgttgcgagcctcctctatggcgagctccgaccatggttccaccaccgcccccaaggacgtgccgggcagctacggcctgccgctggtgggcgccgtgcgcgaccgcctcgacttctactacttccaggggcaggacaagtacttcgagtcccgcgtggagcgctacggctccaccgtggtgcgcatgaacgtgccgccgggccccttcatggcgcgcgacccgcgggtggtggcggtcctggacgccaa

SEQ ID NO: 12631 - DNA, 334 bp, Zea mays
cggacggtgggggtagagttcaagggagaggatgcttgccctgggttgaagaaaggaggctttttgcagaaaataaggaccagcctggtgtatctctgcccagctgagcacatccctccaaaaattgaggtggacctgacaaatcttgatgtcggagatagggtattgatgcatgacattcccgtccatccatcgctcaagttgctgagtaaaaacgagaccatgcccgtctgcaagatcttggcctcaaagccagacgagtaggaggcgctgcaaatacttcagagctgataacattgtacctttaggtggtacagccctccagcagctccgt

SEQ ID NO: 12632 - DNA, 334 bp, Zea mays
ccttgattgtgtttccatgccttctactggcgtacacagggcaggccgcctacataatttccaacaaaacacatgtggctgacgccttctaccgatcaattccagctgccatatactggccggcctttatcatagcaactgctgcagcgattgttgccagtcaagccaccatatccgcaacctactcgatcataaagcaggctcttgcgctgggttgcttcccccgcgtgaagatcgtccacacctcgaagaaattccttggacagatctacatccctgacatcaactggatccttctggttctctgcattgctgtgactgctggattcaagaa

SEQ ID NO: 12633 - DNA, 335 bp, Zea mays
cccacgcgtccgcccacgcgtccgcccacgcgtccgacaaaatcaaaccaatgaatggtatggagcatatcctgttgctgcccgtaatcttcgggaagatgagctaggaggagtgatttttggctgcaaacacaacacaatcggtgaatgcctctctaaacagctgtttggtttgccttcaagccatttctcatatgtgaagaatgtcaaacctggcatgcctctatttctgttcaattatagcgatcgaaaaatgcatggaatttatgaggctgcaagtgctggcaagcttaacattgaccactttgcttggagtgatggtggtagaataaaga

SEQ ID NO: 12634 - DNA, 331 bp, Zea mays
atgaggatgagaagaagggagcagcagtgggcaccatgaaagtgaagacgggagaagaaggtaataagggtgcatcagagcaatcggaggcacagatatttgtgcagatggtagcggcatttggattgaaggataagttcgatgaggagttcttgagaaggctgtttgttgctaatggacggaagagggagcttgctaggattgcatgcgtgcttggatttgaggaaagccttggagatattgttgaggaactaataaagtcagggaatgctatagaggctatatatgttgcccatgaggctgatttgcttgggaaatttccacctgtgcc

SEQ ID NO: 12635 - DNA, 329 bp, Zea mays
gtcgcttccagccgccgccgccgcgtccgcctcgcccagcgcacagccgccgcagcacatcgctatctcgatctcagccatggcggaggtggagcagcaacaggacacgccgaagctgttcaaccgctggaccttcgatgatgtccaggtgaacgacatctcgctgaacgactacctcgctgtgaacgcgacgaagcacgcgatgtacctgccgcacaccgcggggcgttactccaagaagcggttccgcaaggcgcagtgcccgatcgtcgagcgcctcacaaactccctcatgatgcacgggcgcaacaacggcaagaaggtcatgg

SEQ ID NO: 12636 - DNA, 328 bp, Zea mays
cccacgcgtccggcagccgctcactccagccattacccgcagctagcaaacaaatggccaccgtcctgagcagaccccgcgcgccggccttctccttctccctccgcgccgcgccaggacccactaccgtggccatgacccgtggcggtggcgccagctgcaggctgcgcgcgcaggccacctacaacgtgaagctcatcacgccggatggggaggtggagctgcaggtgcccgacgacgtctacatcctggactacgccgaggaggaaggcatcgacctgccctactcctgccgcgcggggtcctgctcctcctgcgccggcaaggt

SEQ ID NO: 12637 - DNA, 328 bp, Zea mays
ctatcactaaaaccgaggactgtgagagtttcttcaactttttcaatcccccgcagtccctgaagatgatgatgacatcgatgaagacactgctgatgagctgcagagtcaaatggagcatgattatgacattgggaccaccataagggataagattatccctcatgcagtttcctggtttactggtgaggctgtgcaaggtgaggattttggtgagttgggcgatgatgatgaagatgatgatgatgaagacgatgacgaagatgatgaggatgaagaagaggatgatgatgaggaagaggatgatgaggaagaaagcaagccagca

SEQ ID NO: 12638 - DNA, 327 bp, Zea mays
  unsure (1)..(327): unsure at all n locations
tccacgcgtccgcggaccgtggngggaagctaagcaacaacttgcagctgatcaacagtccggtgttaacttgaagattgatatagctgatgagctttcaaagattgtgagcttggaggtaaaatataagtgtacaaagcaagaagttgaaagagcagttgtttcctgtgaaggtgatctagaaagggctgatgaggccttgaagacacacaagcaagaatcaactgcagtcccaccaaagcctgagggatctagtgactcaagtgccttgcctaacaagcagcaagttgtacttgcacagaaccctgcaaggctcaaacaaatgga

SEQ ID NO: 12639 - DNA, 328 bp, Zea mays
cccacgcgtccggcgtacgccaagcagggcgccggcccgctccgccccggggtcgatcaggtcgagggcaccgtgaaggccgtcgtcggccccgtctacgaccgtttccacgccgtcccgctcgacctcctcaagttcatcgaccgcacagttggtgagtccgttgaggagatagaccgccgcgtccctccagtggtgaaggaagccccaaccttggcccgctcggctgcgaaggaggttcgccaggccggcctggtgggcacggccactggccttgccaagtcagccatcgcccgcgccgagccaaaggcccgggagctctacaccc

SEQ ID NO: 12640 - DNA, 322 bp, Zea mays
cggacgcgtgggtggagtctaagggtggcaaaaagtctagcagtagtcgttccatgatgtatgaagctccccttggctacagcattgaggacgttcgacctgccggaggcgtgaagaagttccagtctgctgcttactccaactgcgcgaagaagccatcctgatatcccttttggcttcctcattctagtagtttaggatttcttttctgacactttgattctgaccaatctctctggcctgctgcttcctgataatcgaccagttccccagtcttgctccttgcactcctccctcctccatctccagcattgtgttctga

SEQ ID NO: 12641 - DNA, 326 bp, Zea mays
aaacttcacagtggaagctggtgtgactgttatccccttggtcaaggttaaaggttttgtgagtctgtttgcaccagcaaaggacaaaccatcatttgttataccatcaagtgaactacttcgcttttcccacagcatcccatttttcagaacagtgggaaacgagaaggttggtgtcccttgtgggtttcttgaactagataccgtatcgcttcctagtaacctggacgtagcatttccacctgttgatcttgattcatgtgtggctaccaatagaacaatgggcagcgagtctgttgatttgactgacaatactacacctagcc

SEQ ID NO: 12642 - DNA, 328 bp, Zea mays
aatccccaaggcgaggcgttgaaacccttaaccctcttaccacctcgaagcggcgcgaggagggagagtgtgagtggactcaggaggcggcgggcgaaatgaagcttaacgtcaagaccctcaagggcaccaacttcgagatcgaggcgagccccgatgcgtcggttgctgaggtgaagaggatcatcgaaactactcagggtcagagtacctacccagcagaccagcaaatgctcatataccaagggaaaattctgaaggatgagaccactttggaaagcaacggagttgctgagaacagcttccttgttataatgctgtccaaggc

SEQ ID NO: 12643 - DNA, 323 bp, Zea mays
cttcaggcctccaagtgcaagacggaggcgcggatggcgacggcgcggatgaagctgctgcggaaccggagggaagcgcaggtgcgccagatgcgccgcgacattgccgcgctcctccgcgacaaacaggaggataccgcacgcatcagggttgaacatgtaattagggaacagaactttatggcagccaacgagatcattgagctcttctgcgagctgattgttacacgccttcctatcatcgcaaaacagaaggaatgtccagcagacttgaaagaaggtatctgcagtttgatatttgcagctccaaggtgctctgaact

SEQ ID NO: 12644 - DNA, 323 bp, Zea mays
cagacaagtcgctcgcgcgccacaagttcgtcgatgactgcgaggccgccctcaacgagcagatcaacgtggagtacaacgcctcgtatgcataccactccctcttcgcctatttcgaccgcgacaacgtggctctcaaaggatttgccaagttcttcaaggaatccagcgacgaggagagggagcacgctgaaaagctcatggagtaccagaacaaacgtggaggcagggtgaggctccaatcgattgtgacgcctttaaccgagtttgaccaccctgagaaaggagatgctctgtacgctatggagctggctctggccctg

SEQ ID NO: 12645 - DNA, 211 bp, Zea mays
gtaattcttgtccactttcgagaagtcgaggtccacgactctgggcggcgcgtgctctgggttccttatcgggtcgtacagcggggacgccgcgtcggcgaactccggcggcacccgcatcccctccggcacgtcccagctccagaacggcacggcgaacccggggtcgcccaggagcctcgccgcgacgcgctcgaagaagtagaggtag

SEQ ID NO: 12646 - DNA, 324 bp, Zea mays
cggacgcgtgggcggacgcgtgggcgatcccgatccagcgaggcggcgaccctccctcctccccttgcttcgctcgtccagccctgtccacccgcatccccgtcagtcatggcagcggcagcaggcggaggcgcggtgcgtgcgctgtcccagaaggagcaggacatacagatgatgctcgccgccgacgtccaccttggcaccaagaactgcgatttccagatggagcgctatgcctttaagcgccgcaccgacggcatctacatcatcaaccttggcaagacatgggagaaactgcagcttgcagcgagggttatcgttgcc

SEQ ID NO: 12647 - DNA, 324 bp, Zea mays
ctacggcaaagactatggccgcctcgtcgtcatcgtcgatgtggtcgaccagaacagggcacttgtggacgcccctgatatggtcaggtgccagattaacttcaaacggctctcacttactgacatcaagattgacatcaaacgcgttcccaagaagtcaaccctgatcaaggctatggaggaagctgatgtgaagacgaagtgggaaaacagctcatggggcaagaagctgattgtccagaagaggagggctgcgctcagtgactttgacaggttcaaggtcatgctggcaaggatcaagaggggtggtgctatcaggcaaga

SEQ ID NO: 12648 - DNA, 323 bp, Zea mays
cctcaccgcaccgatcatccttgatctggtgctcctggctgagcttagcaccaggatccagctaaaacctgagggaacggacaagttccactccttccacccggtggccaccatccttagctacctcaccaaggcaccactggttccgctagacacaccagtggtgaacgctctggcaaatcagagggcgatgctggagaacatcatgaggggcctgcgttggcctggccccagagaacgacatgatcctggagtacaagtgagcgaagtggtgtggcctgcagctagatatgcaggaggctgcacgaagggaactagagagg

SEQ ID NO: 12649 - DNA, 352 bp, Zea mays
atccgaagtccccagcggcggcgaggcgatggcggcgcctgtgacggtgtacggaccgatgctctcaccagctgtggcccgcgtggcgcctgcctcctggagaaggacgtgccgttccagatcgagccggtggacatgtccaagggcgagcacaagtcgccgtccttcctcaagctccagcccttcggacaggtctctgccttcaaggaccacctcacaaccgtctttgagtcaagggctaattgccgttacatatgcgaccagtatgcggactctggtaatcaggccctcttcggcaagaaagaagacggcgcggttggccgcgctgccattgaacagtggatagagtctg

SEQ ID NO: 12650 - DNA, 346 bp, Zea mays
cgagcggaaggagtcggagggaaccgaaaactcagggtctcgaatttcctaggagcggaggcgatggctgggaagggaggaaaaggattgctcgccgcgaagacgacggcggccaagtcggcggagaaggacaaggggaagaaggcccccatctcacggtcctcccgcgcgggcctccagtttcctgttggacgaatccaccgtcagctgaagcaaaggactcaggcaaatggccgcgttggtgccactgcagccgtctactctgccgccatcctggagtacttgactgccgaggttctggagctggctgggaacgctagcaaggatctgaaggtgaagcgtatca

SEQ ID NO: 12651 - DNA, 331 bp, Zea mays
cctttctggagcagctagggttccgtcctcgatccgatccgccgagtgcacaccacctttccccactccgatcgaatcgatggccgccgagggcgagaagaagatgataaccctcaaaagctccgatggcgaggagttcgaggtggaagatgcggtggcgatggagtcgcagaccatccgccacatgatcgaggatgactgcgccgacaacggcatccctcttcctaacgtcaactccaagatcctatccaaggtaatcgagtactgcaacaagcacgtacatgccgccgcagccgcagccgccgcctcgaaggccggttccgacgacgtg

SEQ ID NO: 12652 - DNA, 335 bp, Zea mays
cccgaacctggttactcaccaggaatccctcgagtccaaggtgaacgagactaaggcaaccgtcaagttccagctcaagaaggttctttgcatgggtgtagccgttggcaattggcgatggaggagaagcagatccagcagaacatccagatgagcgtcaacttccttgtttcccttctgaagaagaactggcagaatgtgagatgcctctacgtcaagagcaccatggggaagccatacagggtgatctaagtatgctcttttgtgaagtctgctaggttctggcaccgaggttttaatgaattaaacttttgttaagagtaagtatttggacg

SEQ ID NO: 12653 - DNA, 345 bp, Zea mays
cggaccgtgtgccggcagcaaaatcctccgcatcctcaaggcccatgggctggcacccgaaaacccggaggacctgtacttcctcatcaagaaggcggtggcgataaggaagcaccttgagaggaacaggaaggacaaagactctaaattcaggctcattcttgtcgagagcaggatccaccgccttgcccgctactacaagcgcacaaagaagcttccacccacgtggaagtacgagtcaaccactgcaagcactctggtggcctaagcgaggagctcagcgtacggcgcttgaagccgagggcattgttggaaatcatttttatgtaccgttttaagagtttg

SEQ ID NO: 12654 - DNA, 380 bp, Zea mays
taagctgagtacggacgaatccgggcgaccacgcgccgggacctgggcccccgcagccccggccagtccatcccctcgctcgctccccaactccagcatgcagatcagatacatccatccattcgcggaccggaaggaaaggaaagggttgaactatgagcgccgtggcggtttcgtcgtcgctgaacccggacgcgccgctcttcatcccggcggcgctgctgcaggtggaggacttctcgccgcagtggtgggacctcatcaccaccactgcctggatccgcgaccactggtcccgcgagcgcgcccacctggacgagatggccgagcagatcgacgcggccggcctcctccccgacgacgaggacctcttctacgac

SEQ ID NO: 12655 - DNA, 344 bp, Zea mays
cactaggtggagcgtgtctccgtggtcttcttcaccgaccacgaggctgctgagaccctaggggggctcgacctggacatcatcgcagtgctccccaccgtcagtgccatcgtcggtcgaggttacagaatgtctctcgagtgtgctagagatgctttgctgcaaaagaccatggacaacaaagaaaatacaagtgaattattttcccgatctcgtgataagctcagagttgatctcatgaatatttctatgactactcttagttgaaaaatactttcccaagacaaggagtactttactaaacttgtgattgatgttgtcttgaggcttaagggtagcaccca

SEQ ID NO: 12656 - DNA, 340 bp, Zea mays
  unsure (1)..(340): unsure at all n locations
ggcaatattacttcctgcaagttatgcgggattcgaatggtgtcagcagaggttctggatttgttgctttcaaatctgctgaagatgctaaccgagctcttacggagatgaatggcaaaatggttggaagcaagcccctttatgtagctcttgcgcacngtaaagaagacagaaaggcaaagctacaggcacaattttcacaaatgcgtcctgttgcaatggcgccttcagtaggtcctcgcatgcccatgtttccacctggtgtccctggagttggtcagcagctgttctatggtcagccaccaccagccttcatcaaccctcaggctggatttgcttt

SEQ ID NO: 12657 - DNA, 343 bp, Zea mays
cccacgcgtccgctttaaccaaaaagcaggtggaatcaactatggcaatgcagaatttacagccgcagcttaaagcaatccagcagagatatgcgggcaaccaggaaaggatacagctagagactgctcggttatacaggcaagctggtgtcaacctttagcaggatgttttccaacattggcaacaatacctgtatggattggtctttaccaggcactttcaaatgtagcaaatgaggggctattgacagaaggatttttctggattccatcactgggtggtcctacaacaattgcagctcggcaaagtggtgctgggatttcgtggctcttcccatttgtg

SEQ ID NO: 12658 - DNA, 341 bp, Zea mays
cggacgcgtggcggacgcgtgggggtcgaaaagctatgtgatctttgccacatcacattgaacaagtaatgctgtcttcggtgacagcagtgcattgtctccgggtggtgtccgcattggcgcgccacaatgacctcgaggggtctactggagaaggatttcgagcagattggggagttcctccaccaggcagtgaccatctgcctgaacatccagaaggagtacggcaagctcctcaaggacttcaacaagggcctggtgaacaacaaggacatcgagaacctcaaggtccaggtggagaagtttgccgactccttcgacatgcctgggttcacgcttga

SEQ ID NO: 12659 - DNA, 334 bp, Zea mays
ggaagtggggttcgttccgtccctgcctccctggtggtggggatggggtggtccgcggggcagtggtggctcgtggccgcgctgtgggtggtggcggcggcggcggcggcggcggagggtgaagtcgtggtcgggtcagcgccgaggcggcaccgtacggtcgatgatgtacatgggcactccacgggactacgagttctacgtggccacgcgcgtcatgatgcagtccctgcgccggctcagcgccgacgccgaccgcgtcgtgatcgcctccctcgacgtcccaccgctctgggtccaggcgctgaaagatgatggtgtaaaggtggtctct

SEQ ID NO: 12660 - DNA, 338 bp, Zea mays
agcttggtaaacaatgacaccaaacagttcatcattagttcagagacaggcgctattagggaggctgaagaccggggtgaccctgtggaaattgcacgtgttattaaagattcagtaaaacagaatctgaaaagatttcacgaggaagcccggcattctttaattagcacccctgaaaggaagttggctctcattattgatggtagatgcctaatgtacgcactggacccaactcttcgtgttgatcttcttggattgagtctaagttgccactctgttatatgctgccgagtttctccgctgcagaaggcacaggttacaagcttagttaggaaggg

SEQ ID NO: 12661 - DNA, 336 bp, Zea mays
gctaaaggtgttgcacttcttgctgtggtgattcttatcctttcaaacgtggcctctaatgttcctacagtcctattgctcggtacaagagtggctgcatcagcggcttcgatttctcatggttcagagaggaaagcctggctcatccttgcatgggtcagcaccgtggctgggaacctcaccctcctaggctctgcggcgaatctgattgtctgcgagcaggccaggcgggcccagttcttcggctacaacctcaccttctggagccacctccggttcggggtcccgtcgaccatcatcgtcacggcgattggtttgctcatcgtcatcagttac

SEQ ID NO: 12662 - DNA, 338 bp, Zea mays
ccgcacgcgaggacatcagggagcttctcaggacgactcactcccaccccatcctggtccgtctaggatggcatgatgctggtacgtatgacaagaatattgaggagtggccacaacgaggtggagctaatggaagtttaagatttgatgttgagttgaaacatggagccaatgctggtctgataaatgctctaaagcttatccaaccaatcaaggacaagtaccctagtatcacttatgcagatttatttcagttggcaagtgctacagcaattgaggaagctggtggcccaaagattccaatgaaatacggacgagttgatgttacaggacctgag

SEQ ID NO: 12663 - DNA, 370 bp, Zea mays
gtagctgatgtacggtcggaattcggtcgaccacggccaggaccggggacgaccaatccacatcatgttcgcctataccaatagcttcgctgagagtatactgaagtcaaatccaagggttctagttgtggccgagaagtcagcagaggtggccatagtggaggagcattttggggctggagaagaaggtggttgctattgggccaatccagtggcagagattatcatcgacgagggcgcaagagtggttcattcatacgtgcaacatcaatcatttgctgcagcacatactaaatggacagtcgtccagcaggatacaactagtaagtatgagtttgttgaggtcagcactggagcaaaattgaacaga

SEQ ID NO: 12664 - DNA, 321 bp, Zea mays
agcccatttacgtatatgcccttgtcccggttcctttccccatccccaactccattatttgcttgatccttgagaagagagaggaagacgagagctagaagcgaaggagaaaagcagttcttcagctaggcaggagggcacaggaaggaggagatggcgtcaaagaggattcagaaggagctcaaggatctgcagaaggaccctcccacctcgtgcagtgcaggtcctgttggtgaagacatgttccactggcaggcaacaataatgggtccatctgatagcccatattctggtggagttttcctagtcacaatccatttt

SEQ ID NO: 12665 - DNA, 339 bp, Zea mays
tgatcgacgaagacgctctggtcagggcgcttgactccggcaaagttgcccaggcggctcttgatgtcttcaccgtggagcccccgcccaaggacagcaagctggtgttgcatgagaatgtcactgtaacaccccaccttggagcaagcactgtcgaggctcaggaaggcgtcgctatcgagattgcggaagccgtggttggtgcgctgagaggggagctcgcagcaaccgctgtgaatgcgcccatggtcccagctgagatcctgtcagagctggctccatatgtttctctggccgagaagctcgggaggctggcggtgcagctcgtggccggcgaga

SEQ ID NO: 12666 - DNA, 341 bp, Zea mays
  unsure (1)..(341): unsure at all n locations
ctctccgctccgacgcgcccgacccaccaccacatccctcatggctgccctcgccgacatcgactcctcggcacttccgncgtccgagtcatccaaaggcaagggcannnnnnnnnnnnnnnnnnnnnnnnnnnnnnnnngcgcggagaagatgtgcggcatctgctatctcgacggccggcgggccatccgcggcgagctcgactgctgcgcccatttcttttgctttgtctgcatcatggcttggggccgcgtcgagtcccgctgtcccttctgcagggcccgcttccacaccatccgccgcccgcccgtcgccggccggttccccgacgagcgaatcg

SEQ ID NO: 12667 - DNA, 359 bp, Zea mays
tggcaccccctaaaagccggatccgggcgccaccgccgcggacggtggcggcaagcactgtcgatcgaggaggtggaggtagcgcctccgcagccatggaggatcgcgtcaagatcctcttcacctcgctctgccacaccgacgtctacttctgggaggccaaggggcagactcccgtgttccctcggatctttggccacgaggctggaggtatcatagagagtgttggagagggtgtgactgacgtagctccgggcgaccatgtccttcctgtgttcactggggagtgcaaggagtgtgcccactgcaagtcggcagagagcaacatgtgtgatctgctcaggatcaacaccgaccgc

SEQ ID NO: 12668 - DNA, 323 bp, Zea mays
cccacgcgtccgttctgaaagcaagagatatttatttgttgaatctggaagcaaaaacacaagctttatattctacctggacatacccaaacagaacaaggaacttgctgttttgacacctcgtgtgtatggcattgatacaacagctagtcatcgtggaaatcatttctttattaagaggcgaagtgatgaattctacaattctgaattggttgcttgtccactggataatgtagctgagaccactatactgctaccacatagagaaagtgtgaaaatacaagacttccagctctttgacaaccatattgctgtatatgagc

SEQ ID NO: 12669 - DNA, 320 bp, Zea mays
accacgcgtccgcggaccgtgggcgtactggacagcgtatgcagacggggactgcaaagggtgcagctacaccgggaccttccgggcagccaagtgccaagcaggctgcggccagccgacccagcgttggtaccatgtgccaaggtcctggctgcagcccagcagaaacctactggtagtcttggaggaactgggtggtggggactcgtcgaagatcgccctagccaagaggtcggtctcgagcgtctgtgccgacgtgtccgaggaccatccgaacatcaagaagtggcagatcgagagctacggcgagcgcgagcaac

SEQ ID NO: 12670 - DNA, 321 bp, Zea mays
ggctactaacctttctagcgcctcagttgatgatgttgctgttattaatgatcttttggcgaaactggaagaatatgccaagggcctgccaccagggttccaaatgaaacctatccaatttgagaaggatgatgatactaattttcacatggatttaatagctgggcttgcaaacatgcgcgcaaggaattacagcattcctgaggttgacaagttgaaggctaagttcatcgccggaaggatcatcccggccatcgcaacttcaacagccatggccacaggtctagtgtgcctggagctgtacaaggtcattgctgggga

SEQ ID NO: 12671 - DNA, 319 bp, Zea mays
ccagctttaacatcattcccagcagcacaggtgctgccaaggctgtcggtaaggttcttcctgaattgaatggcaagctcactggcatgtccttccgggttcccaccgtggatgtgtcagttgttgacctcactgtcagaatcgagaagggggcctcttacgaggaaatcaagaaagctattaaggctgcttctgagggcccactcaagggtattatgggctacgtggaggaggatctggtttccaccgacttcaccggtgacagcaggtcgagcatcttcgacgccaaggccgggattgccctgaacgaccacttcat

SEQ ID NO: 12672 - DNA, 322 bp, Zea mays
cccacgcgtccgcccacgcgtccgccacgcgtccgcaagtctcgctacgtagcagtgcaataaaaaaagcagccgcaatggcgagcagcaccatggccctctcctccacggccttcgccggcaaggccgtgaacgtgccgtcgtcgtccgccttcggcgaggcccgcgtgacgatgcgcaagacggcggggaaggccaagccggcggcggcgtccgggagcccgtggtacggccccgaccgcgtgctgtacctgggcccactgtccggcgagccgccgagctacctgacgggcgagttcccgggcgactacggctgggacac

SEQ ID NO: 12673 - DNA, 318 bp, Zea mays
tgcaggcagcgccatggctgctctcctctctggcctcaccttggtgtccctgtgtttgtgtttgagacactggaggttcagaatgcagtgttgatattttaccccctccggccacatgatttagtcgttttggacggagggagtagacgttattgagtcataataaaatgcaatgtgcacggtgggagactgggaggataggaattatagttgtttattacgactgcttactgcatccagattgtgttgtcccttgtctggtgttgcttctgttgcttgctgcgttgcagtgccggaggtgactccagatttcagaac

SEQ ID NO: 12674 - DNA, 320 bp, Zea mays
ccaccataaccacaacctcttctcccctgtttcctctcgtgcgttctccgcagagcgaggagggctcgcggcagcggcagggtctccggtgtttttgttccagaatctgtagcaaatggctgacggcgaggacatccagccccttgtttgtgacaatggaactggcatggtcaaggctggttttgctggtgacgatgcgccaagggctgttttcccaagcattgttggacgcccacgtcacactggcgtgatggttggcatggggcagaaggatgcgtatgttggcgatgaggctcagtccaagaggggtatcctgactt

SEQ ID NO: 12675 - DNA, 299 bp, Zea mays
agcggctgctgccggcttcgggcttggccacggcgcgcgtttcggcgacagcactggacgtgctgccgctgagatgccccatccggagcaacaacctaaaactaagccggagccccatatgcagccactgccccagccagaacctaaaccgaaacctatgccacatccagagccaaagcctgaacctcaaccaaagcccaaccctgaacctcaaccaatgcccaagcctcaaccagaatccaagaccagagccattgcctacaccgaagcctgaacctaagcccgaacctaagccagag

SEQ ID NO: 12676 - DNA, 318 bp, Zea mays
caaggtaaagaagatctccgaggaggaatacatcagtgccatcaaggaagaaatcagcaaggttgtcaagatccaagaggagcttgacattgatgtgcttgtgcatggagagccagaaagaaatgacatggttgagtacttcggtgagcaattatctggttttgcattcactgccaacggatgggtgcaatcttatggatcacgttgtgtgaagccacccattatctatggcgatgtcagccggccgaaccccatgactgttttctggtccaagacggcacagagcatgaccgctcgtcccatgaagggaatgttgac

SEQ ID NO: 12677 - DNA, 316 bp, Zea mays
cggaccgtggtgtcaaaccgaaaacaatggagccggtgcggaagagcgtgtgcgtgaccggcgctggcggcttcgtcgcgtcggagctggtgaagctcctcctctcccggggccaatacgcggtccgcggcaccgtgcgcgaccctggtgctagcaagaatgcccatctcaaggtgctggaaggagctgaggaaaggttgcagcttctcaaggctgatctgatggactacaacagcattgcatcagcagttgccggctgtgagggtgtcttccatgtagccagtcctgtcctttcccatcgagcctccaaccctga

SEQ ID NO: 12678 - DNA, 315 bp, Zea mays
ggcctctgtcccttgcaagttcaatctcacctccaaccatgggtaaagagaagtcccacatcaacattgtggttattggccacgttgactctggcaagtcgaccaccacaggacacctgatctacaagcttggaggcattgacaagcgtgtgatcgagaggtttgagaaggaggctgctgaaatgaacaagcggtccttcaagtacgcatgggtgctcgacaagctcaaggctgagcgtgagagaggtatcaccattgatatcgctctgtggaagtttgagaccaccaagtactactgcacggtcattgatgccc

SEQ ID NO: 12679 - DNA, 311 bp, Zea mays
aaacagccactcagaacattgcattttttcctgttagccatgttacaatacttgaaaagattagcaacatatatcctgagtaagggtggtttcttctttctcctaattgttttattggtagcttctggaatcttgctcgtcgtttcggatggtctgcataagaagcatgtgcaggaattccttaattatgctaaatttgtgtcgtggtgggtttcattaggtgtggcttcatcaattggactaggttctggtttgcatacatttgtgctgtatctgggtcctcatattgctctgttcactattaaggctgt

SEQ ID NO: 12680 - DNA, 313 bp, Zea mays
cccacgcgtccggtcctcgtcctcgagtggctcccgctcgacctcgccgccgttgtgcgtgacgcgaggaggcgcgcgggcgggggcgagggaggggaaggcatccccgcctcgcaactcaaacggtggatgctgcaggtgcttgagggggtcgccgagtgccaccgcgccggcgtcgtgcaccgtgacctgaagcctgagaacctgctcatctccgaagacggggtgctcaaagtcgccgattttggtcaggctaggatacttcagcagtcagcacctacatttcaagaaatgtacccacacgagcaaagtt

SEQ ID NO: 12681 - DNA, 312 bp, Zea mays
atctaattttcttctcttaattaggaacaaaaatatctaatgtctgcgtccaggttgctgaaactggtcagagtgagtcactctactgtaataactgtaagctctcgatgagccgattattaaggtgctgtccaacatgcccgtttaagctgtgcctaagttgctgtcagaagatacgtgaaggaaacacgtcggacaacacccctgaagataaattcaagaatcggttgattcaacaagagtctgtccatgaggatggcagtattacttgcccttcgattgagctgggtggatgtggtgacgccatgctga

SEQ ID NO: 12682 - DNA, 310 bp, Zea mays
tggacgaggccttcaaatttctgcaggtgatgcggagcaagggctgcttgccggggatcaattttttttctacagctgtggatctggtcgtccgcaagggtgactacctcaacgccgtagccatctggcacatgatggtctctgaagccggcctcgttcccaatttctcaatgtacagcgccatgattggtctccactgcaatgctggtagcatagacgatgctcttgggttgcttgatgaaatgcccctcaacggcgtctttgcaaattctgtcacatacaacaccatactggaaggattcatcaagca

SEQ ID NO: 12683 - DNA, 317 bp, Zea mays
aggaggtggccaactactggaagcaggtgatcaagatcaacgactaccagaagagccggttcgtgaaccgcgtcgtggcctccatgttcaacaccgtcgccggcaagaagatcgccgtcctcggcttcgccttcaagaaagacaccggtgacaccagggagaccccggccattgacgtctgcaagggcctgctgggcgacaaggcccagatcagcatctacgaccctcaggtgacggaggaccagatccagcgggacctggccatgaacaagttcgactgggaccacccgatgcacctgcagccgacgagccccacg

SEQ ID NO: 12684 - DNA, 310 bp, Zea mays
gcccccgtgcagatgggggaggtctcagaggaggagctcagccagtacgacggctccgaccctaagaagccgctcctcatggccatcaagggccagatctacgacgtcacccagagcagaatgttctatggacctggtggaccatacgccctattcgccggcaaagacgccagcagagccctagcgaagatgtccttcgagccacaggatctgaccggcgacatcactggcctaggcccgtttgagctcgatgccctgcaggactgggaatacaagttcatgagcaagtacgtgaaggtgggtactgtca

SEQ ID NO: 12685 - DNA, 306 bp, Zea mays
cttgacaaaaactttccaaagaaagaagttgctcaattcacttgtctgtctgaacgccacattggaacgcaatctggcggcatggatcaggctatatctatcatggcgaaacctggattcgctgagttgatagattttaatccaatccatgcaactgacgtccaactaccttcaggtggtacatttgtgatcgcccattgtttggccgagtccaagaaagcagagacagctgcaacaaattataataaccgcgttgtggagtgtcgcttagcagcgattgttcttgccatcaaacttgggatggat

SEQ ID NO: 12686 - DNA, 306 bp, Zea mays
gaagctccgtagctaaattcaaatattacaaacacaaaagtggagtgcagaaccaaaatggctgcctcgaccgtccttctcgttgcttttctagcattggtcacttctcatgccattgcctctgatcctagcccgctccaagacttctgtgttgccgacaaagactctccagtgaaggtgaatggatttgtttgcaaagaccctatggctgtgaacgctgacgacttcttcaaggctgcaaaacttgatcagccaagggacaccaccaaaagcaaggtgggatccaacgttactttgatcaatgtc

SEQ ID NO: 12687 - DNA, 308 bp, Zea mays
cccacgcgtccgcccacgcgtccgcccacgcgtccgcccacgcgtccgcccacgcgtccgccaccttcatcggcaactctacctccatccaggagatgttccggcgcgtgagcgagcagttcaccgccatgttccgcaggaaggccttcttgcactggtacacgggggagggcatggacgagatggagttcaccgaggccgagagcaacatgaacgacctcgtgtccgagtaccagcagtaccaggacgccaccgccgacgaggagggcgagtacgaggacgaggaggagggagatctccaggactag

SEQ ID NO: 12688 - DNA, 304 bp, Zea mays
gtgaccaagttcctttccttgcagacctcaagcccagtggcaaatatgtcatggaggatctacataagattggtgggacactgcagtcattcattaccttttggagcaaggtcttcttgatggtgattgcatgactgttactgggaaaactctagctgagaatgctaaaatcttccctcctctgtctgaagggcagcaaataattcgaccacttgacaatcctatcaaaccaactggccatattcaaatactttatggaaatcttgcaccggaaggttctgtcgcaaaaataactggcaaagag

SEQ ID NO: 12689 - DNA, 306 bp, Zea mays
cgaaatatcaggctgctcagaagggtaaggtcggaatagtcctggacttcaactggtacgaggctcttacaaactcacctgatgaccaagcagcagcccaaagagccagggacttccacattggctggtttgttgatccattgataaacggacactatccacagataatgcaagatctcgtgaaggagaggctgcccaggttcactcctgagcaggctaaactggtgaagggctcggcagactacatcggtatcaacgagtacacatccagctacatgaaggggcagaagctggtccagctggcgc

SEQ ID NO: 12690 - DNA, 309 bp, Zea mays
cgtccccaaacaagcaaccaccgcctccccgatctcgtcgagaggaagcccaatcccgaaaccgccgccctattccaatggcgcccaaggccgagaagaagcccgccgccaagaagcctgcggaggaggagccggcggcgcagaaggccacggcggggaagaagcccaaggccgagaagcggctccccgcgggcaagtccgcaggcaaggagggtggcgagaagaaggggaagaagaaggcaaagaagtcggtggagacgtacaagatctacatcttcaaggtgctgaagcaggtgcacccggacattg

SEQ ID NO: 12691 - DNA, 306 bp, Zea mays
aaaaataggaagaagggaggtgcagggaaggtttctgtcacaaaaaggtcgaaaagagagggtgaagaacaaaagaaggcatcaccctccaaggataaagattgtgctgaaactaatgggaaaaggaagatgttgactggggataatgccctgatgtgccaccagtgccagaggaatgataaagggagggtggtctggtgtaattcatgcagaaataagcgcttctgtgtgccatgcattgaaagatggtatcctaacttgtcagaagacgaatttgctgcaaaatgcccatattgtcgcaagaac

SEQ ID NO: 12692 - DNA, 307 bp, Zea mays
cccacgcgtccgcccacgcgtccggtttatcagaaaaggagtgcaagagctggaagggacaaggggattggggagagcctggggagaaacctattccaagaaaaggattcctgcactgttcgtcatcaacatctccagtggtgaagttcgacctgtcaagcaaatacctagatcattaagtgttggccaagtgatttgggctccatcatcttcatatagcttggtttttgttgcatggtcatctgacaatgggttccaagggacaccaaggaagcttggtattaaatactgctacaacagaccatgt

SEQ ID NO: 12693 - DNA, 341 bp, Zea mays
atccgaggagctcggctgcgtgttcctgaccggcgagaggctcaagtcccccggcgaggagtgcaacaaggtgttcgtcggcatcagccagggcaagctcgtggaccccatgctcgagtgcctcaaggagtgggacggcaagccgctgcccatcaacgtcaagtaaagaacgccaaggagaagaggagggaggggaggaaatacgtgaaaaaaaataaaacctgtacacgtgtatgtccagatcgtgtgtcgtcgatcgttcttcgttgttgatttttggttgtattgatcgatccgtatgtgtgcgtgcgtgtgtggcgttgctctttcttcttttgtgt

SEQ ID NO: 12694 - DNA, 337 bp, Zea mays
ggaagctggctggtgatccgaaccttcactttgttgaagctgttgctcataagcctccggaagttaccatcgacatggctatgcagcagcagcatgaagctgagcttgctgcagcagctgcacaacctcttcctgatgacgatgatgatctgattgagtagaaaggatcatgagtcttgaacttgagcaggagttgtgccttgcgtgttttaagttgttctagggtgaactcttgagttctcattgtctggatcatctttttctccttggatgtgttgcatcttttgagtgtggaaatggatggtactcctcgccatgaatttgctggctactttat

SEQ ID NO: 12695 - DNA, 340 bp, Zea mays
cagctctcctcatcggcgcacccgagctcgccctctccttcctcatcgaggcccgagtcctgctctgatggcgaccgacgtggctgagactcccgcgccgttggtggatgcggcccctgatgcgcccgcggacaccccggcggcgcctgctgttgacgcgaaccggccaaggccaagaaggccacagcgccgaagaagcgcgccagcccgacccatccgccgtacgccgagatggtctcggaggcgatcgcgtcgctcaaggagaggacggggtccagcagctttgctattgccaagttcttggaggacaagcacaaggacaagctcccgcccaacttcc

SEQ ID NO: 12696 - DNA, 340 bp, Zea mays
cggaccgtgggctagctagcagggggggaaatggctccacttctcgccgcagccatgacccacgctgcccatccagtccttagaagccatctaggacccaacaatgagagtttctcacgacaccacctatcttcttcaccgcaaagcagtaagcgcaagtttaaccttagctttacgccacgatctgcaagagtaggcaatcaaaatggagtccaattgttgagcccttcggaaatccctcgaagggactggttcccctccgacttcatctttggtgccgccacttcagcgtaccaaattgaaggtgcttggaacgaagatggaaagggggaaagcaatt

SEQ ID NO: 12697 - DNA, 339 bp, Zea mays
ccgacagcctcaagctcctccaagatgcggaaccaagctgtaggaggcactgcaaattgatcccaacaagtctgatgcactctggtgcttgggaaatgctcagacttctcatggattcttcactccagacactgcaatggcaaatgagttctttgcgaaggcaactgaatgtttccagaaggctgctgatgtggaacctgcaaatgagctgtacaggaagtcattagacttgtcagcgaaggcacctgaactgcactcggagatccataggcaaatggcttctcaagcggcaacacaagcatcctcagcctctaatccaacgcaatcaaggaagaagaa

SEQ ID NO: 12698 - DNA, 341 bp, Zea mays
caagatctccacagcttttaaacttctatgtggatcttgttagcttagatgctgcatcaaagatacaactaaaaatgttggctgaggaaatgcaagcagttagtaaagggctggaaaaagttcaccttgagtatgatgcttcagaaagggatggtccagtatctgaaatttttcgtgagaaactgaaagagttcaccgacaatgctggagctgatgtgcagtcgttatcttcattgttttctgaagtgggtaaaaaggctgatgcgttgattaagtattttggtgaggatcctgttcgctgcccctttgaacaagtaatctctaccctcttaacatttgta

SEQ ID NO: 12699 - DNA, 130 bp, Zea mays
ctgaccgtgggatcgtcatcctacctcaagaaagttggagtacaaccctgtataagattgccttagtacccatttctggttttgatggcgacaacatgattgagaggtccaccaaccttgactggtacaa

SEQ ID NO: 12700 - DNA, 334 bp, Zea mays
gctactaatagtttctgtcaagattctcttctgggtgagggctcacttggtcgtgtttataaggccgatttcccgaatggaaaggttcttgctgttaaaaagatagatagcgccgcactttctttacaggaagaagacaatttccttgaggctgtatcgagcatgtctcggctaaggcatccaaacatcgtgccattgacaggatattgtgttgaacatgggcaaagacttcttgtctatgagtacattgtaaatggaacgctgcatgatatgttgcacttctctgttgaaataagcaggaagcttacatggaacatccgcgtaaggatagcac

SEQ ID NO: 12701 - DNA, 336 bp, Zea mays
ccatcatctgaagaatcgggtgattcacatgttagtggagagtttgcggcttttattagtgcacttcctcagcaagaagcagaaacttcgaatcaatcatcttcacagaataccagacaaaaaaatttagcaccaactggctgtggttgccccccactgggaaacttccagcctagttctgcttcagccaatgttattgcagtacttcctgatggcttccatggcaaatcaacgtctgggcagccgttgcctttgattgagaggtggaagtcaggaggagcttgtgactgtggcggatgggatgaaggttgcatgctgagtgtcctcactgatggg

SEQ ID NO: 12702 - DNA, 335 bp, Zea mays
atctgcttccagatccccccgccgccgctgcgccctcctctcggtcctgccgtccgtcgaggtaaaaggacagcatggtgagggtcagcgtgctcaatgatgctctcaagtccatgtacaatgctgaaaagatagggaaacgtcaggtcatgatcaggccgtcatccaaggtgatcatcaagttcctgacggtcatgcagcgccatggctacattggcgagttcgagtacgtggatgaccacagagctgggaagatcgtggtggagctgaatggaagactgaataaatgtggtgttattagcccacgttttgatgtaggtgttaaggagatcgag

SEQ ID NO: 12703 - DNA, 334 bp, Zea mays
atagccagcgaacggcagacggaatcgcgcctcccatcctctgctttccccaaaggccagctccaccgcggcggcgccgctcctataaaccgtcagttccctctaggcgcgctttccccgcggcagcctgagcagccagccatgccggggcggcgggcgatcgaggtccggcagctgctgccggccggcggtgacgcgcgacgccgaggtggcgcatgtcgctgctggagaacacgttcagcgggttcgtgcagggcgccggcgccgaagccgtgttcgcggatgggtccctgttcagcccgttcctgttcggcaagttctttgacccagccga

SEQ ID NO: 12704 - DNA, 336 bp, Zea mays
gaacgtgctgtccctgtggtttgacgggctcaagctgctcgtcgtcacgcggggacaagggatgcaggtacttcaccaaggacttcaagggcagcgtgcccggcttcaaggtcgacaccgtcgacaccaccggcgccggcgacgccttcgtcggctcccctcctcgtcaacgtcgccaaggacgactccatcttccacaacgaggagaagctccgcgaggctctcaagttctccaacgcctgcgtggccatctgcaccaccaagaagggcgccatcccggcgctgcccacggtcgcctacgcccaggacctcatcgccaaggccaactagatggcc

SEQ ID NO: 12705 - DNA, 326 bp, Zea mays
cccacgcgtccgatgctgcccactctgcacggaatttgaatcgtctcgaggttcttctgaggtttgaatgtatccaactattagcaggctctatttgctcttgtatttcgggttataaagacattctgaatgccactaagcgaaaaggctctttgccatcgatggttgatccagccagtgagggggccctctttcctgatgtacaattttggaaacaatgtgctgatccagttcttgctcaagatccgttttcttctttgatgtcagcacttttctgtctgcccgttcagtttctgtcatctgctgaattcttcatcccttttgtc

SEQ ID NO: 12706 - DNA, 323 bp, Zea mays
aggaaaaggacattgatccctgaccgataaagatgggaactcacatgtctgcaaagtttgtttcgaatctgcagccgctgcagtattgcttccttgccggcatttctgcttgtgcaagccttgctcgcttgcctgttcggagtgccctctgtgccgcacaagaatcgcagacaggataatcaccttcacgtgagcttcgttctagcttcaggtcattctgaagcatacatcatcttgtaaaatcttcaatggtatatgtttctctttttccttagcaaagaaggtgccttttatgttccttctgtgttgtatcgccattcttt

SEQ ID NO: 12707 - DNA, 331 bp, Zea mays
tgggggggattctccgacgtcctggtcgcgagcgagcactacgtggtccgcgtccccgacggcctggcgctggaccgcaccgcgccgctgctctgcgccggcgtcaccgtgtacagccccatgatgcgccacggcctcaacgagcccggcaagcatctcggcgtcgtcggcctcggcggcctcggccacgtcgccgtcaagttcggcaaggccttcgggatgaaggtcaccgtcatcagcacgtccgccagcaagcgccaggaggccatcgagaacctcggcgcggacgagttcctcatcagccgggacgaggaccagatgaaggcggcga

SEQ ID NO: 12708 - DNA, 342 bp, Zea mays
cggaccgtgggcaggacgcgtgggtttttttttagctggttttcttctaaatatataagaggttcctgtgagtccacatggtagtaaaaactggaatagggacaccccaagttctctgccgtgaaatacaccaatcagaacggctagaggtcatggcaacaatcctgttttgtgcctgagaaggaacccaagttactcgtctgattgcatccattgcagcatcacgataaccatccacagatgcaaaccactgctcagttgctcggaatatagttggttctttagatctccagtcataggggtacttgtgtttgtatggttcctctacaatgagtgaatact

SEQ ID NO: 12709 - DNA, 333 bp, Zea mays
gcgctgttctttttaggccaaagttgatcattgctggtgcaagtgcatatgctcggctatatgattatgaccgtatgcggaagatatgcaacaagcagaaggcaatacttctagcagacatggcacatattagtgggcttgttgcagctggtgttgttccatctccttttgattatgcagatgtagtgactaccactactcacaaatcactccgtgggccacgtggagccatgatcttttacaggaagggagtcaaagaaataaataaacaaggaaaagaggttatgtatgattttgaggacaaaatcaatgctgctgtctttcctggtctgc

SEQ ID NO: 12710 - DNA, 339 bp, Zea mays
cccacgcgtccgtgagactgtggaacttcagattggtctgaagaattatgatccacagaaggacaagcgtttcagtggctctgttaagttgccccatatccctcgtcccaagatgaaggtgtgcatgcttggtgatgcccagcatgttgaggaggccgagaagatgggacttgactacatggatgttgaggctctcaagaaaatgaacaagaacaagaagcttgttaagaggcttgccaagaagtaccatgctttcttggcatcagaggccatcatcaagcagattccccgtctccttggtcctggtctcaacaaggcaggcaagttcccgaccctggt

SEQ ID NO: 12711 - DNA, 338 bp, Zea mays
ctccctacatattggtgatgcatctaaagcgtttcaagtacattgagcagcttggccggtataagaagctttcatacagggttgtattccccatggaactgaagctcagtaattcatccgacgatgtagacactgagtactccctctttgctgtcgtggtccatgtcggaagtggcccgaaccatgggcattatgtaagccttgtcaaaagccacaaccactggttgttcttcgacgatgaaaatgtcgagatggttgaagagcagaccctacaaacattcttcggtacttcacatgaatactcaggcaacacggaccatgggtatatcttgttttac

SEQ ID NO: 12712 - DNA, 336 bp, Zea mays
agccagtcagccacatcactagctatctgtgcagaggcaatggcgtccaaggttgagctggtggtggaggtcaagtccccggctgacaagctgtgggcggcgctgcgtgactcgacggagctgttccccaagatcttccccgagcagtacaagagcatcgagaccgtcgagggcgacggcaagtcggccggcaccgtccgcctcctcaagtacaccgaggcggtgccgatgctgacgttcgccaaggagaagcttgagacggcggacgacgagaacaaggtggtgtcgtacagcgtggtggacggcgagctggcggacttctacaagaacttcaag

SEQ ID NO: 12713 - DNA, 138 bp, Zea mays
ggcgagaagaagatgataaccctcaaaagctccgatggcgaggagttcgaggtggaagaggcggtggcgatggagtcgcagaacatccgccacatgatcgaggatgactgcgccgacaacggcatccctcttcctaac

SEQ ID NO: 12714 - DNA, 137 bp, Zea mays
cggaccgtgggtggacaaggaacgatttattgtcaaggctagcagcggaccacgttatgttgttgcctgcctccgtaaagttgaccaagaaaagttgattgctggtacacgaattgttcctgacatgaccacactta

SEQ ID NO: 12715 - DNA, 336 bp, Zea mays
agatcgatccttgagttgacgaaaacatacacagctgctagctaatcctgccgtgagtgcaatgcatgcaaagatgacgaagcccgcagccatcgttgttgctgctatcgccgtcctctccgtcagcctgctggctgggtcgtcgtgccttgcccttgcgcggcccagcggcgacttctccatcgtgggctactcagaggaggacctgtcgtcgcacgagagcctggcggagctgttcgagcgctggctgtcccgccaccgcagggcgtacgccagcctggaggagaagctccggcggttccaggtgttcaaggacaacctgcaccacatcgacga

SEQ ID NO: 12716 - DNA, 335 bp, Zea mays
tgcaggttgatcctcaggatattgtcatgcttgtcatatcatggcacatgaaagccgccacaatgtgtgaatttactcgtcaggaattcattggtggactgcagtcaattggggtagattcaatcgagaagtttcgtggaaaattaccatcattacgagctgagctaaaagatgacaataaattccgtgatatatacaactttgcattcacttgggcaagggaaaagggtcaaaagtctctctcactggagacttctattggaatgtggcagttgctatttgctgaaaggaactggcctcttctggatcattggtgtcagtttttacaggtcaga

SEQ ID NO: 12717 - DNA, 163 bp, Zea mays
catatgtgaagactcctcgtggcctccgcacactcaactctgtttgggcccaacatcttagtgaagaagtgaggagaagggtctacaagaactggtgcaagagccagaagaaggctttcacaaagtatgctctcaaatatgaaaatgatgctggccagaagga

SEQ ID NO: 12718 - DNA, 331 bp, Zea mays
ctcacatcgtgatcgagacgacccgcgtcctccgcggtccgcgcccgtgcaccatctcgcctcgcattcccgaaagtatctgtattccttgatcaacatgtcgcgggaggagaatgtttatatggccaagctggctgagcaagcagaacggtacgaggaaatggttgaatacatggagaaggtggctaagaccacagatgtgcaagagctcactgttgaggagcgtaaccttctatctgttgccttcaagaatgtgattgcggccccccgtgcctcatggcgcattatctcctccatcgagcagaaagaggagtcccgtaagaatgaggaa

SEQ ID NO: 12719 - DNA, 319 bp, Zea mays
gctaaggaagctccatcgatcctgcgttattttgccggtaattgattgatagatggcgtcggagaagagcaagatcctggtggtcggcggcacggggtacctgggcaggcacgtcgtggcggcgagcgcgcggctgggccaccccacctcggcgctcgtcagggacacggcgccgtccgacccggccaaagcggcgctgctcaagaccttccaggacgccggtgtgacgctcctcaagggcgacctgtacgaccaggctagcctggtgagcgcggtgaagggcgcagacgtggtcatctccgtgctcggatcgatgcag

SEQ ID NO: 12720 - DNA, 327 bp, Zea mays
ggagacgagtctgcggaattatgaaccttcggatgtaccttttgatatttcatctgtttcgaaggaaacaaaatcccaaccccttgcggagaaaaagtctacaggcaagaaatcagcaggtccagcatctgctgtcagtggctctgtttctacagttgatgcttcgtatgagaagcttctttcgtccattccggaattcgctgattttggaaagctttttaagtcatctgcacctgtagaattgactgaagctgagaccgaatactcagtgaatgttgtgaagcatatttttgatcgacatgttgtgctccaatacaactgtaccaa

SEQ ID NO: 12721 - DNA, 301 bp, Zea mays
ctagccagcgctcactccagccattacccgcagctagcaaacaaatggccaccgtccttagcagcccccgcggcgcgggcttcttctttttccttcggggcggggcaaggtccactaccgtgggcatgaaccgtggcgggtgggcaagagcaggctgcgcgcgcaaggcactacaacgtgaagctcatcacgccggagggggaagtggagctgcaaggtgccgacgacgtctacattctggacttacgcgaggaggacagcattgaccttgcctactcctgccgcgcggggtcctgctcct

SEQ ID NO: 12722 - DNA, 337 bp, Zea mays
cccacgcgtccggggcagggagagagcgatagttctgttctactgcaggaagagcagggagcaagatggggtccggatctttcctcaaggtgctggccaataacttcgatgtccttgccgggccactcatatcacttgcttatcctctatatgcttctgttagagctatagagacaaaaaatcctgtagatgatcagcagtggctcacttactgggtgttgtactcatttatcactttgtttgagctaacttttgctccaattatcgagtggcttccattttggtcgtatgcaaagctgttctttaactgctggttggtcttgccttggttcaatgg

SEQ ID NO: 12723 - DNA, 330 bp, Zea mays
gccaggattcctctgctcttcctgtttagggtttccccctctctctgctcctgccggatgcgatggcgattccgccgcggactccttccccgccgccatcgtggtcgcgctctgtaaccgagaccgttcgggggtcccaccagttcaccgtacggggctactccctcgccaagggcatgggccccggccgctacctcgccagcgacgtcttcgccgtcggaggataccactgggccgtctacctctaccccgacggcaagaacgccgaggacaactccaactacgtctccgttttcgtcgccctcgcttccgacggcatcgacgtccgag

SEQ ID NO: 12724 - DNA, 330 bp, Zea mays
cataactgccgcagttaagccatgaatggcaagcatacatatcccgaacccattctctgaggaagacatttatttccgtgaagggcatatattatcaggctgaagttcaaggacaaaagatcacctggctaactccgcatgctcttcagcaagtattaactgatgatgttgatttcaatgtgatgctttcttttctagaattctatgagactcttctaggatttgtgaacttcaaactctatcattcaataaatgtaaattatcctcctattctggatccacgtctggaagctttagctgctgagctctatgcattgtgccgatacatgt

SEQ ID NO: 12725 - DNA, 330 bp, Zea mays
atttgaagctatggttgctgactttggacttgcaaagttcactactgataacaacacccatgtgtcaacaagagtaatgggcactttgggtatttggcacctgagtatgcagcatctggcaagctcacagaaaaatccgatgtattttctttcggagtcatgcttcttgagcttattactgggcggcgaccaattgacacaacccaaacatatatggatgacagcttggttgactgggcaaggccattactgatgagagcgctcgaggatggtgaatatgatgctttggtggatcctcggctcggaaaggacttcaatcctaatgagatg

SEQ ID NO: 12726 - DNA, 326 bp, Zea mays
gtggtctgctcgttcgatctgtgcagcagatctgaggtcccgggcgaccgtgaagcagcttcaatcgtcggcatggcgctcgtattgcatagtggggctggaaacaagaatgccttcaaagcacttattgctgcagaatacagtgggatcaaggttgagttgaccaaggattttgagatgggtgtctccaacaagacccctgagtttcttaagatgaacccccttgggaaggttcctgttctggagactcctgatggccctgtttttgagagtaatgctatcgcacgctatgttgctcgcttgaaggatgacaaccctctttttgg

SEQ ID NO: 12727 - DNA, 309 bp, Zea mays
cgcgacctctgcctgcaggcggactacgcggggtcggtatccgtcgctgcctgccgcgacggcgtgcagtggtcgctctaccccgacggctccgtacgcccgcccgcgtggctcctccttcaatggcagtgcctggctgctgatgccagctggggtgtgacggtgaaactctgcgacggggctggatcgtcttgcgagcgctgggtgttccgcaacgacggcaccatcttcaacaccggcaccgggatggtcttggacgccaggccatctgcgggggctaatgctactgctagccaagtcatcgtgtcg

SEQ ID NO: 12728 - DNA, 328 bp, Zea mays
cccacgcgtccggccgaaccccaaaccctagcttcgctcgttgcagcggcgagccggcgatggcgaagtctctgcgatccaaacgcgagaagcggcttcggacgttgcgccgggagatagcggaccgttctacgacaagaaggaggccgccaagctcgccgcgcaggccgccgccctagctgctgccccgctcccggtccgcgggcccccgccatcccaggatgccggcagctcccgcgcagctagctcggcctcggctatggatgtggagatgtctgatgcagggaacaacaggtctaagaccttcttgaggccacttggcagcatt

SEQ ID NO: 12729 - DNA, 339 bp, Zea mays
acgctgccgcccacgcgtccggtcctgggcgctcatcagccacctccacaccgtcgccgggccgagcatcaccctgcagtaccctctgtacgcgtcggtgtgtgcgatggagagcccgtccaaggcggacgacgagcagtggctgtcctactggatcatacactccttcgtcaccctcctggagatgctcgccgagccgctcctccactgggtacccgtgtggtacccggccaaggtgctgttcgcggcgtggctggcgctgccgcagttcaagggcgcctccttcgtctacgagaagctcgtcagggaacagctccggaactaccgcgccagataccc

SEQ ID NO: 12730 - DNA, 347 bp, Zea mays
gggacgaacactgcgccgcggacgcgtggctattgtgccagagtttacggcaacgaaaaggagattggtttggcgctgaagaagcatatttgaagagggtgtagtgaagcgagaagatctgtttatcacctctaagctatggaatgatcatcatgctcctgaagatgtgcctgagtgcctaaatgacagcctgaatgatttgcagcttgagtacctggatctttatcttatccattggccatttagagtcaagaagggaacaaataccagccctgaaaattttgttacacctgacttccctgctacttggggggcaatggaaaagttatatgatgctggcaaagctc

SEQ ID NO: 12731 - DNA, 331 bp, Zea mays
cccacgcgtccgcgcgtcgcctcctcccttctcccaccccgcagccgccctcgcgtccgtccgtccgtccgttattagggttcggtcgccgccatggcgatcctctcggcgctcgccaccgaggtgctcatccccgtcgccgccgtcatcggcatcgccttcgccgtcgtgcagtgggtggtcgtgtcgcgcgtgaagctctccccggccgcgtgcggcggtggcggcggcaaggccggctacgccgactccctcatcgaggaggaggaggggctcaactgacacaacgtcgtcgtcaagtgcgccgagatccagaacgctatctccgaag

SEQ ID NO: 12732 - DNA, 229 bp, Zea mays
cccacgcgtccggcgcgcgggcgctggccctggcgctcgccgtgattctcgcctgctccgacgtcgccgtcgtcacggctcaggaaaccgagcggatcgaaggaagcgctggtgatgtgttagaagatgaccctgttgggaggctcaaggtctatgtctatgatctccccagcaaatacaacaagaagctgctcaagaaggatcctaggtgcctgaaccatatgtttgc

SEQ ID NO: 12733 - DNA, 320 bp, Zea mays
cggggcaccaccacaaaccagacgcgacgcacgcgcgcaaaatcatccggcggacagggcggaggcaagccagagacgcggcacgcgacgcgtgagggcgaggagcagcggcacgcgggcgcggcgacaccgcgaggacagagcgagacgcagcggcggaggaggggcagaggcgagcgccgcctagagtccctgctaccatggacactttcttcctgtcgcacggctcgcccacgctctccatcgacgacaacatcccggcgcggcacttcttcaagtcgtgggtgccggcgaaggtcgcgggcgaccagcccccgcgc

SEQ ID NO: 12734 - DNA, 314 bp, Zea mays
gttgcaattggaaactatctcatgagcaagggctacaagatggtgactgatggaactgagaaccaccttgttctctgggatctccgcccccttggcttgactggaaacaaggtcgaaaagctatgtgatctttgccacatcacattgaacaagaatgctgtcttcggtgacagcagtgcattgtctccgggtggtgtccgcattggcgcgccagcaatgacctcgaggggtctactggagaaggatttcgagcagattggggagttccccaccaggcagtgaccatctgcctgaacatccagaaggagtacggc

SEQ ID NO: 12735 - DNA, 320 bp, Zea mays
ctgggttcaagtcaccagagcagatttcgcgtatccgaaacaccggtgtcaagccagagattctaaaacgtgttggagaagccatgactactctgccagaaaatttcaagcctcacagggctgtgaagaagatttttgatctacggcgtcatatgatcgatactggagtaggcactgattgggcagttggtgaagcacttgcttttgctactcttataattgacgggaaccatgtcaggttaagtggtcaggatgttgagaggggtacatttagccatcgacactctgtcatccatgaccaagaaactggagagcagtac

SEQ ID NO: 12736 - DNA, 323 bp, Zea mays
acaagatgtgcttcgattgcaacgccaagaacccgacgtgggcgtccgtcacctacggcgtcttcctctgcatcgactgctcggcggcgcaccgcagcctcggcgtccacgtctccttcgtcaggtcaacaaatttggattcatggactccagaacaactgaaaatgatggtctatggcggaaataaccgtgcgcaactttctttaagcagcatggttggacagatggtggaaaaattgaagcaaagtatacttcaagagctgctgacttgtaccgacagttgcttgctaaagacgttgctaaaagctctacagaagatggaa

SEQ ID NO: 12737 - DNA, 322 bp, Zea mays
caaatttccaactgagtttcagggcacagtaactggtgatatgaacaagagaaaagggatcattgttggaaatgagcaggaaggtgacgacaccgttgtagtttgccatgttccgctaaacaatatgtttggatatgcaacagctattcgatcagtgactcaggggaaaggtgaatttacgatggagtacctggagcataatgttgtatcgcaggatgtgcagatgcaactagtgacctcataccaggcggccaagggcacagagtgattcttctttttacagaacaattttgtttgcgaacttttagtggcatcgacttcc

SEQ ID NO: 12738 - DNA, 321 bp, Zea mays
gtgaaggtgaacggttcatggaacgatatgctcctactgcaaaagatcttgcttcccgtgatgttgtttcaagatcaatgacaatggaaattagagaaggacgtggtgtagggccattgaaggaccacatttatttgcatctgaaccatctgccgcctgaggttctcaaagaaaggctccctggcatttctgaaactgctgctatttttgctggtgttgacgtcaccaaggagcccattccagttttgcctactgtgcactacaatatgggtggtacccaacgaactaccatggggaggtagtggatatcaagggtgataa

SEQ ID NO: 12739 - DNA, 323 bp, Zea mays
cgtgaccgtggctcgtcctcaacaaggcgctcgcctgccgacgaccgcgtcgagatctgccagctccccgttctgcgacagcgtcaccctctgccgccgcgtcaagtgaaaacatgccctggcctggcctcccccaccaccgccaccgacggcgccgcgccgcatcctcatttcaatcataatagacgacccgcagcattaattatccaccggcttttttttttggctctttcttgcccctgtaatctttctcctcctcttcttcttgggaattgtcgctgccgtttcgatacgtaaatcacgagatcggtaatacagtaatg

SEQ ID NO: 12740 - DNA, 329 bp, Zea mays
cggacgcgtggcggacgcgtgggtgcgtgaagttgatgctaatcatgacagtaaaatagtggatgatgatcccaaggatgggaatgaaaaagaaaagcatgctgagcttcttgctcttcctcctcatggagctgaagtttatgttggggggctttcctctgatgtatcttctgaagatctcaaacaactatttgaatctgttggagaagttgcagaagtgcgaatgcgaggaaagggggataacaagacatatgcttttattaatttcagaactaaagagatggctttaaaggccatccaaaagttgagcaataaagacctaaagggga

SEQ ID NO: 12741 - DNA, 332 bp, Zea mays
cccacgcgtccggaagattgaaggaagacgaagcacgtaaatacttccagcaactgattaatgctgttgattactgccacagtaggggagtgtatcacagagacttgaagctcgagaatttgctgcttgatgctgcaggaaatctcaaagtttctgactttggtttaagtgctttaaccgagcaagtgaaggctgatggtctgcttcatacaacatgtggaacccccaattatgttgcccctgaggtgatcgaggatggaggctatgatggtgcaactgcagatatctggtcttgcggagtaatcctctttgttcttcttgctggatattta

SEQ ID NO: 12742 - DNA, 356 bp, Zea mays
ccggcggcggcggcggcggcgcacagcggcagcagcatccgaagatggtgaagttcctcaagcccggcaaggccgttatcctcctccagggccgcttcgccggcaggaaggcagttatcgtgcgcgtgttcgaggagggcacccgcgaccgcccctatggccactgcctcgtcgcaggcctcgccaagtacccaaagaaggtgatccgcaaggactccgccaagaagactgcgaagaagtcgcgcgtcaagtgcttcatcaagctcgtcaacttcactcacctcatgcccacccgctacaccctcgacgtcgatttcaaggatgtcgccaccggtgggcccgacgcactctctacc

SEQ ID NO: 12743 - DNA, 154 bp, Zea mays
cgccatcagcagctagcgcgctcctcgagcccagcagagaaaggccggcagcgctaatcgtaatagccgtgggctccaccgccggcgacgtggccgcggtggtggacgaagaagcgtgcatgtacgcgattcagctggcgtcgtcgtccatcct

SEQ ID NO: 12744 - DNA, 351 bp, Zea mays
gtcgccgccacgcttggcatgtggacgccggtggagtagtgtcggcaatcgacaggctccccgtggttcctggtctgatgcaggctgttggaattggatacagcgggtggttcgcgtatcggaacttgctattcaagcctgacagggatgctttctttgcgacggtcagggaggtctacgaggatattatcagcacttaacagatggagcaccaatgcaaagctcatccaaattaagacatccttctagtttgctgctgttcagttgtttttgctgtgatgtatttcagtgtagcatctaatttggtccttaatgtacgtatggataagtaatttggatgttaaatttagt

SEQ ID NO: 12745 - DNA, 354 bp, Zea mays
cccacgcgtccgcccacgcgtccgcccacgcgtccgctttctcctcgtccccgacaagccactcgaagccgagatacggccatggactccaccggcaccggagcagcggggaagggaaagaagggagcggccgggcgcaaggtcggcgggccaaggaagaagtcggtgtcgaggtccgtgaaggctgggctccagttccccgtcggccgcatcgggcgctacttgaagaagggccgctacgcgcacgtgtcggcaccggcgcccccgtctacctcgccgctgtcctcgaatacctcgccgctgaggttctggagctcgccggtaatgctgccagggacaacaagaagactcgca

SEQ ID NO: 12746 - DNA, 295 bp, Zea mays
gaaatattgactgatcctattagagttacagttggtcaagttggtggtgctaatgaagacattaaacaagttgttaatgtaatcccttctgatgctgagaaaatgccttggcgtttggagaaattacctggaatgattgatgatggagatgttcttgtagtcgcttctaagaaggctagagtggatgagatagagagagagttgaatcagagatgattcaggattgcagcacttcatggtgacaaggatcaagcttctcgtatggagactctgcagaagttctaatcttggacgt

SEQ ID NO: 12747 - DNA, 349 bp, Zea mays
cccacgcgtccgtgaattgcaacctgtgcaaattgagcgcttgcgagaggtgtacgtaagcaaagctggaattgcagctgagaacattcagcaagtccagcaaagttcgaaagatattcaaagcaagtcccatggggtatcaacaaggagctgtacaaaggttcataagcaaggagttgcgcttggccggtccgtggacctctctaaattcaccgactacggtgagctcaaagcggaactagacaagatgtttgagttcgagggcgaattggtatctgctaaccggaactggcagatcgtttataccgacaacgagggtgatatgatgcttgtcggagatgacccgtgg

SEQ ID NO: 12748 - DNA, 347 bp, Zea mays
ctgccaattgagtggccaaagagcagggacaaggtatggtacagcaatgttcctcacactaggcttgcagagtacaaggggcatcaaaattgggttaaggtctcaggtgactatctcttgttccctgggggtgggactcagttcaagaatggtgccctccactatattgatactattcagcaggcactacctgatattgcatggggcaaacgaagccgtgtcatattggatgttggttgtggagttgccagctttggaggctacatgtttgatagagatgcgcttaccatgtcttttgctccaaaagatgagcatgaagctcaagtacaatttgcattagaaagggg

SEQ ID NO: 12749 - DNA, 346 bp, Zea mays
tgacattgtcgtcaacggcctgccttccaccgacaccagggaggtgatcggggagatcaggaggtactcgaacgagaggattactgcccccatcatcatctccctcgccaaaggaattgaggcctcgctggatccactcccacggatcataactcccacgcagatgattagcaatgcaactggagttccatcagagcatattccttatcttggcggacctaatattgcttctgaaatttacaaccgagaatatgcaaatgcacgtatttgtggagctgacaaatggagatagccccttgcaaagtttttgaggcagcctcattttattgtgtgggataacagtgat

SEQ ID NO: 12750 - DNA, 350 bp, Zea mays
aaacagcaccgccctctcacatctcctctcccctcgatccatggccgccgccgccgccgccgccgcgccatcccgcaagacggagacctacaccgacaccaagcgccgcgatgacgtgcgcggcgccaatatcgccgcagcgcgcgccgtcgctgacgccgtgcgcacctcgctgggaccccgtggcatggataagatgatctgttcgggcgaccaggcgcaggaggtcatcatcaccaacgacggtgccaccatcctctcccgcatggcgctcctccagctcgccgctcgcatgctcgcggagctatcccgctcccaggacgcctccgctggggacggcaccacgactg

SEQ ID NO: 12751 - DNA, 346 bp, Zea mays
cggaccgtgggcggacgcgtggggtcgaggacgtgcgccgggaggtggagatcatgcgccacctccccaagcatcccaacatcgttacgctcagggatacctacgaggacgacaatgccgtgcacctcgtcatggagctctgtgagggtggggagctcttcgaccgcatcgtggcgcgggggcactacacggaacgcgctgccgccttggtcacacgcactatcgtcgaggtcgtgcagatgtgccataagcatggagtgatgcacagggatctcaaaccagaaaatttcttgtttgcgaacaaaaaagaatcagcagcccttaaggccattgattttggcctgtc

SEQ ID NO: 12752 - DNA, 348 bp, Zea mays
aaatgaacttgatgcgtggcattgatctgaaaaagatcgcggaaaagatgaatggggcctcaggagctgagctcaaggccgtctgcacagaggctggaatgtttgctcttcgtgagagaagggtgcacgttacccaggaggacttcgagatggcagtggccaaggtgatgaagaaagacacggagaagaacatgtccctgcgcaagctctggaagtgaggctcgtgcctacctttcacagccttcccgaagctagtggcagtgccttcatatccatatcttttaccaaagcagtggaatggcgtaacggcatgctctggacaatgttatctcaagttgcgccgcgcat

SEQ ID NO: 12753 - DNA, 345 bp, Zea mays
ccaatagtcgtcgggaactgtactggctttgcagttaataggatgttctttccatacactcaatcagcactcttttatgttgatcttggtatggatgtttataagattgatcgtgcttgtaccaaatttggaatgcctatgggtcctttcagactggcagatctggttggttttggtgtggctgtggccactggtatgcaataccttgaaaatttcccagagagggtctacaaatcaatgctacttcctctgatgatggaggacaatagggcaggtgaagccacccaaaaaggattttacaagtatgagggcaagaggaaagcgactcctgatcctgaaattatg

SEQ ID NO: 12754 - DNA, 353 bp, Zea mays
cccacgcgtccgcctagggtttacgcgcattgtggctcctcacttctgcgccgccacccactacaggtaaggaagaggaggagggcaggatgtcgcaccgtaagttcgagcacccgaggcacggctccctcggcttccttcccaggaagcgctcctcccgccaccgcggcaaggtgaagtcatttcccagggatgaccccaagaagccttgccatctcactgccttccttggctacaaggctggcatgactcacattgtccgtgaggttgagaagccaggatccaaactccataagaaggaaacttgtgaggctgttaccatcattgaaacccctcctcttgtcattgttggg

SEQ ID NO: 12755 - DNA, 383 bp, Zea mays
  unsure (1)..(383): unsure at all n locations
tatgcaggacgtacagatccgggtcgaccacgcgccgcttggtgtttcctgttaacgtgcatcttggccagcacttcactaaaccaccagcacgatattctgagggtgcattgattanaaagctagaagaacttggaattggaaggccatctacttatgcatctataatgaaagtgttactggatcggaagtacgtgacagcaaaaagtcgagttctacaccctgagttccgtggtcgaatggtctcggcattccttttgcaccatttctctgaggtttctgattacaactttacagctaacatggagacagaggtttttaaatatttctcagcctatgttttctgtgcgcttctttgttttcagtttatgccatagttttag

SEQ ID NO: 12756 - DNA, 349 bp, Zea mays
agagccagtatcctcgcattgttaccgaggacttcttgccacttccaagcaaagggaaatctggtaaggatggctggtatcctccaggccatggtgatgtgttcccctctttgaataacagtggaaaactcgacatcttattggctcaaggcaaggagtatgtcttcattgctaactcagacaacttgggtgctatagtcgacatcaagatcctgaaccatctgatcaataaccagaatgaatactgcatggaggttactccaaaaacattggctgatgttaaaggcggtactctcatctcttacgaaggaagagttcagcttttggagattgcccaagtacctgatga

SEQ ID NO: 12757 - DNA, 344 bp, Zea mays
ggcgctgccatccatgagtcttgtggcaaagggtgtgcttcccttctcagcacgtacctcgagtggtgtcacacaaaggccggtgtcagtgactgcttccttggagcacaaaaccagcgatgccagaaggaagttcctaaaacttgcgcttgggaacttggagttggactgcccaccttgttgggcgctaagaaagctctcgctgatgagcaaggcgtctcgtcctcgaggatgtcttattcgaggttccttgagtatcttgacaaggatagagtgaagaaggttgatttgtttgagaatgggacaattgctattgtggaggccatttctcctgagcttggtaa

SEQ ID NO: 12758 - DNA, 341 bp, Zea mays
ggaccgtgggcggacgcgtgggtcaaggaaatggccaagaaaatcaatgacctttgtggtataaaggagtctgatacagggttggctccacctagccagtgggatttggtttcagataaacagatgatgcaagaagaacaaccgttacaagtggcaaggtgtacaaagatcataagccctaatacggatgatgccaaatatgttataaatgtaaaacaaatcgcaaaatttgttgttggactgggggataaagtgtctccaactgacatcgaggaagggatgagggtcggtgttgatcgcaacaagtaccagattcaaatccctcttccaccaaaaattga

SEQ ID NO: 12759 - DNA, 387 bp, Zea mays
cgcctcaggaattgcgggtcgaggacgcgtccggtcgccggcacgcgtggcatgtggagcgccggtggagtagtgtcggcaatcgacaggctccccgtggttcctggtctgatgcaggctgttggaattggatacagcgggtggttcgcgtatcggaacttgctattcaagcctgacagggatgctttctttgcgaaggtcagggaggtctacgaggatattatcagcacttaacagatggagcaccaatgcaaagctcatccaaattaagacatccttctagtttgctgctgttcagttgtttttgctgtgatgtatttcagtgtagcatctaatttggtccttaatgtacgtatggataagtaatttgggtgttaaatttagttt

SEQ ID NO: 12760 - DNA, 342 bp, Zea mays
ctgccgtcccgcaggaagagtgccgtcctcggcgtcgtggcgttgtcctcctccgtcctcgtcctgctccacgccttctctctcccggtcccggcagcctctgcgctctccgtcggcctggcgcggcgccaccggcacgatgccacgcccgggctggccgccggcggctgcgacgtcttcagtggcagctgggtcctcgacggcggtagctcggcctcggcggcgtacaccgggtacaactgcccgctcatcgacgcggagttcaactgccagctctacggccgcacggactccgactacctccggtacctctggaagccggccggatgcgagctaccgagg

SEQ ID NO: 12761 - DNA, 349 bp, Zea mays
gaaacaattgtcaggcggacagaagacggtggtcgcactaacactgattttcgctatccaacgatgtgacccagctccattttatctgttcgacgagatcgatgctgctctggatccacaataccgaacagcagttggaaatatgatccgccgtctagctgacatggctgacactcagttcattgcgaccacattccggccagagattgctaaagtggctgataagatatatgccgtgagacacaagaatagggtgagcaacatcgacgtggtgtccaaggaggaggccctggacttcatcgagcgtgatcagacgtacaatgctagctgaggctgctgctgctgtgta

SEQ ID NO: 12762 - DNA, 168 bp, Zea mays
atttctggatctagcagtcaactgtgcatctgttttatgttgtcgggtttcaccaaaacaaaaggcactggtcaccagattggttaaaattaagaccagtaaaactaccttagctaatggtgaaggagccaatgatgttggtatgctaccagacgctgacattggggt

SEQ ID NO: 12763 - DNA, 330 bp, Zea mays
gcctaccatctgttcagacaagcttgtcgtatcaacttcctgctcgctcatgcacaccgctgtggatcttgtgaacgagactaagcttgacagcgagattaagtcttggcttgcttttgctgcccagaaggttgttgaggttgatgctcttgctaaggcattggctggtcaaaaggatgaggcttacttcgcagcaaatgctgcagctcaggcctcgaggaaatcctcaccccgtgtgaccaatgaagaagtccagaaggctgctgctgctctcaagggctctgaccaacgccgtgcgaccaacgttagtgctagatttgatgcccagca

SEQ ID NO: 12764 - DNA, 338 bp, Zea mays
  unsure (1)..(338): unsure at all n locations
cagcaaaaccctagccgccttcccgtccttttcctttcataaaccccaagccgcgccgcaatagctcgccccctcgttcgccgcctctcctgctcctaccgcagctctccctcaggtttagtgttcgcaatggcggccttcaacaagcttggtggccttctaaggcacagtgctctggtgagcggtatcactggtggctcttctcctgcagtgttcaatgctgcacggcttatgtctaccaagctatttattggtggtcttgactggggtgttgatgacgtgaaactaagagaagcatttagcagctttggagaggttactgaagcganggtgatcac

SEQ ID NO: 12765 - DNA, 339 bp, Zea mays
atctggctccgtggcggtgctagggattgtgaggtaaagcgtgatggcagcgccaccggcgagggcccgagccgactacgactacctcatcaaactgctcctcatcggtgacagcggtgttggaaaaagttgtctcctgttacggttttcagatggatcattcaccactagcttcattaccactattggcattgacttcaagataaggactgtcgagttggatggcaaacggattaagttgcagatctgggacactgcaggccaagaacgtttccgcacgattactactgcttactacaggggagcaatgggcatcttgcttgtgtacgatgtcacaga

SEQ ID NO: 12766 - DNA, 338 bp, Zea mays
cccacgcgtccgttcaagatttggaggcagggaaggacggggtaccgctcgtcgatgctggcatgagggagctgtgggcgacggggtggctgcatgaccggatacgcgtggtggtggcaagcttcttcgtcaaggtcctccagcttccatggcgatggggtatgaagtacttttgggacacgttactggatgctgatcttgagagcgatgcgctgggctggcagtacatcactggctctcttcctgatggccgggagcttgaccgcatcgacaacccccagtttgaaggctacaagttcgacccgcatggggagtacgtccggcggtggattcctgag

SEQ ID NO: 12767 - DNA, 382 bp, Zea mays
cgctgagtacggccggaatcacgggtcgaccacacgtccggacctgatataacatgcaatgacccagaagatatatctcaggacatgtacaggctttgggctattgacaaacccaatattgcacaaccccctcatggatgggaaaggcagattaggataagaggtgaagggggtaccaaatttgctgatgtatactatacctctcctactggaaggaaacttaggtctctggttgaagtcgataggttcctccaagagaatccagagcatgttgcacagggtgtaactttagctcagttttcgttccagatacctagacctctgcggcaggactatgtcaaaaagaaaccgaagttgataaatgcaagtgatgaagccagta

SEQ ID NO: 12768 - DNA, 292 bp, Zea mays
gtttcccaatgtttcttcagagagtgcagcggagcattttgcactctgacattcaatcgaaggcagacaagactcctgttacagttgcggattatggatcacaggtactggtatgtctggtcctgaagaaggaattgccttctcactctttctcaatcatagctgaagaggattcaaaagacttgagagaagatggtgcccaagaaattatagaacacattaccaccctcattaatgaaaccatcgtaaatgatggttcatacaacatgtcgttatctaaggaagatgtgct

SEQ ID NO: 12769 - DNA, 350 bp, Zea mays
atccgcagcctctcgagctctactccatcccctcgatctcgaagcgcacagcagcagtcaggcggccatggacgcgagcgcaccggagccggcgggaaggcgaagaagggcgcggccgggcgcaaggccggcgggccgaggaagaagtcggtgacgaggtccgtcaaggccgggctgcagtttcccgtcggccgcatcgggcggtacctgaagaagggccggtacgcgcagacgtacggcacgggcgcccccgtctacctggccgccgtcctcgagtacatggccgccgaggtgctggagctggccggcaacgctgccaaggacaacaagaagacccgcatcatcccgcg

SEQ ID NO: 12770 - DNA, 350 bp, Zea mays
accgtccgctggttgctccagttgatgttgttgtgccccctggcaacactgggctggatccgtcccagacctctttcttccaggtgcttaacatccccaccaagattaacaagggtacgtggaaattatcacccctgtggagctgatcaagaagggtgaaaaggtgggctcgtccgagtctgccctgctcgccaagctgggtatccgccccttctcgtacggcctccaggtcaccagtgtctacgaggatgggtccgtgttcagccctgaggtgcttgacctttccgaggaggacctgattgagaagtttgccactggtgtctccatggttgcctccctgtcactggcga

SEQ ID NO: 12771 - DNA, 229 bp, Zea mays
atcatggatccagagactaagactacaacacctccagcaaccattacaagctttggtgttgctacccctgtttcaattaccacatcgaccaccccttctggtgctgcaaggagcacacctctgagacctgtgaggatgtctcctggctcccatcagaaatacagcacgccaccaaaaaagggtgagggtgaacttccaactccaatgtccttagagcaagcagtggagg

SEQ ID NO: 12772 - DNA, 337 bp, Zea mays
ctaatcctcttctgctccctccactaccagtccaccaccaccactgctaccatcggttccccaaaccctagccaagggacacggtggccagcgatggacggcgacagagaaggcgctgcggcggtgcaccaccacgcgcgctcccccgaggacgtcttccgcgatttccgcgcgcgccgcgccggcatcgtcaaggcactcaccacggatgtggagaagttctatcagcagtgcgatccagagaaagagaacttgtgcctttatggtttgccaaatgagacttgggaggttactcttccagctgaggaagtacctcctgagcttccagaaccagcac

SEQ ID NO: 12773 - DNA, 338 bp, Zea mays
cccacgcgtccgcccacgcgtccgcccacgcgtccgggccaccgctgctataaaaccctccgcctccaccggcggctcgccaaactccgtttcgaattctagggttttgctgctctccgaccccgagctccgaatgccgcagcatcaggcgcgccccccctcgcgtgtgaccgagatggcgctgccgaatcaggggaccgttgattaccccagcttcaagctcgtcatcgtcggcgatggtggaactggtaaaactacatttgtgaagaggcatctcactggagagtttgagaagaaatatgaaccaaccattggtgtggaagttcatccgttggatt

SEQ ID NO: 12774 - DNA, 335 bp, Zea mays
gcaactccatcggcgggcgcgagatattggcgcggctcaatcagcagcttccccctatcgggaagcctttcctccgctccgcttcctacctcaaggaggccctcctcctcgcgctcaccgacggccaccaaggctccactcacctatcctcccctctcgacgtcgccctcaagctcggtgcatacaagtccttctccgacctctcgcctgtgctccagttcgccaatttcacggccactcaggcgctcctcgacgagatcgcctcaacaacttcatcttgtatccacattattgatttcgaccttggtgttggcggccagtgggcttccttcttg

SEQ ID NO: 12775 - DNA, 332 bp, Zea mays
ctgcatcgtcgcgctctgccgccggcctcagggttctacctccccggcgtcgcgcccaatgacttcgagaagaaagatccacatcctgtgaaagtcaacaagctgacctcaatcaagacacaacttccctactcctactattctctcccattctgcaagccggataccatagttgacagtgcagaaaatctcggtgaagttcttcgtggagatcgcattgaaaactctccctatacgtttgaaatgagggagcctcagatgtgtcaagtagtctgcaagatatctgttggggagaaagaagcaaagcttctcaaggagaagattgaagatga

SEQ ID NO: 12776 - DNA, 280 bp, Zea mays
cacaaattgaagtgaagtttgatattgatgcaaatgggatactctcagttgctgccattgataagggcactggaaagaaacaggacatcaccatcactggtgctagtacgttacctaaggatgaggttgagagaatggtagaagaagccgataagtttgccaaggaggacaaagagaagagagatgcaattgacacaaaaaatcaggccgattctgtggtctaccagactgagaagcaactgaaggagcttggcgataaagtcccgctcccgtgaaagag

SEQ ID NO: 12777 - DNA, 246 bp, Zea mays
gtcgcttccagccgtcgccgccgagtccgcctcgcgcagcgcacgagccgcagcagcacatcgctatctcgatctcagccatggctgaggtggagcagcaacagtacacgccgaagctgttcaaccgctggaccttcgatgatgtccaggtgaacgatatctcgctgaacgactacctcgctgtgaacgcgacgaagcacgcgatgtacctgccgcacaccgcggggcgttactccagaaagcggt

SEQ ID NO: 12778 - DNA, 285 bp, Zea mays
gctctctgaaggaactccattaagccaagcagctaccttttttgcgaattcggatccagacatgcccgctgctcctgtacctgctgctttggtacatgattgggtcttgcagcatatagcttcagcattagaatttatggcagagaagactgtggccaaagcaaacagccaacataatgcatttgatcctgatgtcacaatgtctgatgctgtcacgaatacaagaattcatagcagttcaccaactggcagttctgcaccaaactatcctggatactaccgaaa

SEQ ID NO: 12779 - DNA, 277 bp, Zea mays
accggccccaacctcgaagattccgaagtttccacaccctcaaagcgacgagcatgagttccaccggaggcagcggccgtgggaaggcgaagcagcgaccaagtctgtgtcgcggtcttccaaggctgggctccagttccccgtcggccgcatcgcgcggtacctcaaggccggcaagtacgcggacgcgtaggcgccggggctcccgtgtacctctccgccgtcctcgagtacctcgccgccgaggtgctggagctggccgggaacgctgctcggg

SEQ ID NO: 12780 - DNA, 281 bp, Zea mays
cccacgcgtccgcccacgcgtccgcccacgcgtccgatggtaccaatgttacatcaccaataagcattgtctggaatggcattgaaaagggatctgcagttgaggttttatctgacaaggttgggtttggagtagcttggttttctgctaaggttattgatataaatgaaaataatgcttttgtcagctatgacaaccacaatggaactggtcctcgtgaagaatgggtgccattgagacaagagggggataagccgcctcagatacgtcttgcacaccct

SEQ ID NO: 12781 - DNA, 280 bp, Zea mays
atccatttgcaccgaacagtcaatcagattaaaagtctaggagcaaaggcaggagttgttttgaatccagcgactccactcactgcaattgattatgttcttgatgttgttgacctggtgctgattatgtctgtgaatcctgggtttggtggccagagctttatcgagagtcaagtaaagaaaattgcagaactgagaaggttatgtgcagagaagggagtgaacccctggattgaggttgatggtggtgttggtccgaaaaatgcctacaaggttattg

SEQ ID NO: 12782 - DNA, 146 bp, Zea mays
gggacaccaggaaaatgcagaatttgcgcttgccatgtgtccagcagaaccatatgtcctgtcaagaggaaaaggcaaatttgttgtcctgtggagcatccaagaccacatatctgcccctggggattcctcgtcttctcccggag

SEQ ID NO: 12783 - DNA, 278 bp, Zea mays
gagaagctcaagaagatggcgggtgctgtgcgcactggaggaaagggcagcatgcgcagaagaagaaggcagtccacaagaccgcaaccaccgatgacaagcggcttcagagcacgttgaaaagaattggagtgaacactattcctggtattgaggaggtcaacatcttcaaggatgatattgttatccaattccagaaccctaaagtgcaagcatccattcctgcaaatacatgggtagtcagtggagtaccccagacaaaaagtctacaagacctt

SEQ ID NO: 12784 - DNA, 276 bp, Zea mays
ccaccccgggcaaaggaagagcacccgaggtggggaagcagagtagtcatcacgccttttcggggcaggggagtatgactgtggcctgaggagattaccaaagaagagtatgctgctttctacaagagcttgaccaacgactgggaggagcatcttgccgtgaagcacttctctgttgagggccagcttgagttcaaggctgtactctttgtgccaaagcgggcccccttcgacctctttgacaccaggaagaagcagaacaacatcaagctctat

SEQ ID NO: 12785 - DNA, 277 bp, Zea mays
ccgcaaccgtgtgaccgcccgtgccgccggcgatcccgatccgccgacccgtcccagccccgctcgcagccatgtcgccgtcggagccgacgcgggaggagagcgtgtacatggccaagcttgcggacaggcggacggtacgaggagatggtcgagttcatggagcgcgtcgccgctacgccgggtagcgccggcggcggtggaggagctctcggtggaggagcgcaacctgctgtccgtcgcctacaagaacgtcatcggcgcccgcatgtctcgt

SEQ ID NO: 12786 - DNA, 274 bp, Zea mays
ccgcagttccccgaccacaccgttcctccgagcccaggagcagccccgcgccaggaggaagtttgttcttttaacaatatgtcgagggaggagaatgtttacatggccaagttggctgagcaggctgaaaggtatgaggagatggttgagtatatggagaaggtggctaagactgtagatgtggaagagctcactgttgaggagcgtaaccttctgtctgttgcatacaagaatgtgattggggctcgccgcgcttcatggcgcattgtttctt

SEQ ID NO: 12787 - DNA, 270 bp, Zea mays
  unsure (1)..(270): unsure at all n locations
cacgacgacctgaagggtaccgngctccgccttggtctgccggagccggttcgccggacgccgtgttgtggctgccaccgcaaccaccctggacctgctcccggctaagggcgccaagcgcgggttttctgacgaggcgccgacgccatcgcccggtgcagcttccgggaagggaaagaaggtagcggaagaggaggacgacaagaaggttgcagcgacgccgcagccggtcgcaaaagctcaggtggtgggatggccaccaatccgaag

SEQ ID NO: 12788 - DNA, 269 bp, Zea mays
ggttcatcgtagttatggaagtatgcttgaaggcgaggctgatgaactcaagagggtttttcttgaaggaaatccttatcttcttggattgactatggtcgtttctctattacactccctgtttgattttctggccttcaaaaatgatatccagttctggaacaagaacaagtccatggaaggtctatcggcaaaatctgtggttctgaattttgtgtgtcaactagttgttttcctgtaccttcttgacaatgacacttcatggatga

SEQ ID NO: 12789 - DNA, 271 bp, Zea mays
gccatgatcttcggcggctactccatcgagcaggccaggaaatacgtccccaagatcgtcaacaccatctcgaggggcatcgataaactgatcggcatgggcgcgaccgacatcgtcgtccccggggtgcttcccatcgggtgcttccccatctatctgaccatctaccagagctccaacggcagcgactacgacagtctcggctgcctcaacagcttcaacgacctgtccacgtaccacaacgccctgctccagaagagggtggacgtca

SEQ ID NO: 12790 - DNA, 309 bp, Zea mays
tctcattccactccgacattcacgtgcagctgtcgggagcaggcaatggcgccggatctaagcgaactcgccgccgccgctccagcccgtggcgcctacctcgccggcgtcggtgtcgcggtcctcctcgctgcctccttcctcccagtagccgagtcgtcctgcgtgcgagataactcattggtgagagacataagccaaatgccgcaaagcagctatgggattgaaggattgtcacatataacagttgctggtgcgctcaatcatgggatgaaggaggtggaagtgtggcttcagacaataagtcca

SEQ ID NO: 12791 - DNA, 307 bp, Zea mays
cccacgcgtccggtccactgtccctgtcaagaccgctgaggctattgagaagatcttgacccataacatcaagggcatcaactaccagatcctttccaacccagagttccttgcggagggcactgccattgaggacctgttcaagcctgacagagtgcttatcggtggccgggagacccctgagggcaggaaggccgtccaggctctcaaggatgtgtacgctcactgggttcccgaggacaggatcctcaccaccaacctgtggtctgctgagctctccaagctcgctgccaacgcgttcctggca

SEQ ID NO: 12792 - DNA, 305 bp, Zea mays
aacactttcacgctcaggcgctcagctctagcaatggctgcctccaccatggcgatctcctccacggcgatggccggtacccccatcaaggtgggctccttcggcgagggccgcatcaccatgcgcaagaccgtgggcaagcccaaggtggcggcgtccggcagcccctggtacggccccgaccgcgtcaagtacctcggccccttctccggcgagcccccgagctacctcaccggcgagttccccggcgactacggctgggacaccgccgggctgtccgccgaccccgagaccttcgccaagaa

SEQ ID NO: 12793 - DNA, 308 bp, Zea mays
acaatactcaccaaatctacggtgcactgctttggaggcctgtatgcaccctttcttcgatgagctgagagacccaaacactcgtctacccaatggtcggcctctgccgcctctcttcaacttcagatctcaagagctaaaaggcgttcccccagaagtcatcgatcgccttgtcccagagcactcaagaaggcagagtttgttcatggcgctaaggacctagtttttgccgttctttttgcccccttttttcccaccgtttgccaccttgagggaagcttgtaaagctatagcttctcctttcccct

SEQ ID NO: 12794 - DNA, 306 bp, Zea mays
gattgatcggcatatatcatgactggtgtgaggctttctctacttatccaaggacgtatgatcttatccacgctagcggtcttttcaccttgtataaaaccaagtgcagcatggaagatgttctcctggagatggaccgcatcttgaggcccgaagcgccgtcataatacgggacgacgtagacgtcctgaccaaggtgaacagcctcgctctgggtatgaggtgggacacgaagatggttgatcacgaggatggccccctcgtgcgcgagaagatcttgtatgccgtgaagcaatactgggttgg

SEQ ID NO: 12795 - DNA, 308 bp, Zea mays
gttggagagaatggccttcaagagcacagtgaatcggactcacttacggttagttcgtgaggtagaagccattggaggaaatgtctctgcatcagcttcccgtgaacaaatgagctatacctatgatgcattgaagagctatacaccagaaatggttgaagttctcattgacagtgtgaggaatccagcattcctcgattgggaggtcaaagagcagctccagaacataaaatctgaaatagctgatgcgtctgctaatcctcaaggtctacttctggaggcccttcattcggttggatattccgggg

SEQ ID NO: 12796 - DNA, 309 bp, Zea mays
acagagtctttgaggtttgcctagctgatcttcagggcgacgaggatcaagcttacaggaaaatcaggctccgtgctgaagatgtgcagggcaggaatgtgctcacaaacttttggggtatgaattttaccactgataaactgagatccctagtgaagaagtggcagacattaatcgaagcccatgttgatgtcaagacaaccgacaactacatgttgcgtttgttctgcatcggcttcacgaagaggcgcccaaaccaggtcaagagaacctgctatgctcaggcatcccagatccgtcagatccgcc

SEQ ID NO: 12797 - DNA, 305 bp, Zea mays
cggtcaccgtctttggcatcaggaaccctgaggaaatcccgtggggtgaggctggcgctgagtatgtcgtggagtccaccggcgtcttcactgacaaggacaaggctgctgcacatctcaagggtggtgccaagaaggttgttatctctgccccaagcaaagatgcacccatgtttgttgttggtgtcaatgaggacaagtacacctcggatgttaacattgtttccaatgctagctgcaccacaaactgccttgctccccttgctaaggtcattcatgacaacttcggcattgttgagggtttg

SEQ ID NO: 12798 - DNA, 299 bp, Zea mays
gtatcggcaccgttcttccccgcttctccagtccagctcaccagccgccccccctccgctgctgacactgcgaagtgcgaatcaaagccaccaccgcgcacaaaccatggcaccggtggaggcggacagcaccggcggagggcgttggcgctcgcggcgcacgacgcctccggcgccgtctcccccatccgcatctcgcgaagggacactggagatgacgatgttgccatacagatactgtactgcgggatatgccactctgacctgcacaccatcaagaacgagtggaagaacgccaa

SEQ ID NO: 12799 - DNA, 301 bp, Zea mays
cggacgcgtgggtgttggatcgcaaggtaaaggatcagtccaaaaagcttgcccaagtatgaggcatcacatgaattccagactaagaaaaagcgtcagcaacagcggcaggcagaggaagctgcaaagcgtcaaaaacttaatcatcctccaccacattctcgcttgcctccaatccagcagccagggcaagcacatcctcaaatcaggcctggccagggtatgcacaatgtgcctcctgtggcagctgggccaggccatcactatacaaagccccgaggaccaggaggccctaaccggt

SEQ ID NO: 12800 - DNA, 299 bp, Zea mays
cggacggtgggtatgtcttcatgtttacgagaagtctgccactggtttgatatcatgtgcttggttcccagatggaaagcaattatctggtttagctgatcaaaccttttgcatttgggatttagatggtaaggaagtagattgctggaaagggcagggatcaacaggaacatctgattttgctgtagcaaaagatggaaaccttataataagcatgagcaagcagaacacaattcttctatttgatagggagacaaaacaggagagaataattgaagagggtagtacaattacttcat

SEQ ID NO: 12801 - DNA, 299 bp, Zea mays
aaaggatccttttcttccaattgaattgggtgctggtagcaagcagccaaccaattacttctgcaagacgttgactgcaagtgatacgagtacccatggtggattctctgttccgcgccgagcagctgagaaagtcttccctccattggatttttcacaacagcctccagtgcaagagctggttgcaagagatctgcatgataatgaatggaaatttcgtcatatttttcgtggtcagccaaaaaggcatctactgacgactggttggagtgtttttgtaagcgcgaaaagactagtag

SEQ ID NO: 12802 - DNA, 301 bp, Zea mays
ccacgcgtccgcgccgccgcaagccgtccgccttgcccttcacgaaggcttggtcctcctccttgtatctccactccccccttcacagatccgttcctccagctagggttagcgttcctctgcagcgatggcgatcaagcggactaaggcggagaagaagatcgcgtacgacaagaagctgtgcagcctgctcgatgagtacaccaagctgctcatcgccctggccgacaacgtcggttccaagcagctccaggacatccgccggggcctcaggggcgactcggtggtgctcatggggaag

SEQ ID NO: 12803 - DNA, 67 bp, Zea mays
acgctggcttctcctcccactattaccaagtcctcctcgggttaaggttccttagggttttgtggag

SEQ ID NO: 12804 - DNA, 303 bp, Zea mays
  unsure (1)..(303): unsure at all n locations
agaacttagaggagaacattgatgatgagaaattgcgtgaactctttgctgagtatggcaatattacttcctgcacagttatgcgggattcgaatggtgtcagcagaggttctggatttgttgctttcaaatctgctgaagatgctaaccgagctcttacggagatgaatggcaaaatggttggaagcaagcccctttatgtagctcttgcgcacngtaaagaagacagaaaggcaaagctacaggcacaattttcacaaatgcgtcctgttgcaatggcgccttcagtaggtcctcgcatgc

SEQ ID NO: 12805 - DNA, 282 bp, Zea mays
gaagctgctgaccggcgtgaccatcgcccacggcggcgtgttgcccaacatcaacccggtcctgctgcccaagaagacggcggagaaggcgtccagcggcgggagcaaggaggccaagtcgcccaagaaggccgccaagccccccaagaaggcatagggtttggaggcggatccgatgttgtcatgtgtaggttgtaagcgggcaatgtgattggctgtgtatctgcttcgctcaagttgctttatgtcattcctaatggaataggaaatgccgtgtttctt

SEQ ID NO: 12806 - DNA, 290 bp, Zea mays
cggaccgtggtcgtgctacaagcccggcggcgagcacgttgtgacgcgggagacgttcatgcggcagtcggatgctgcgggggtgttcacgggcgacaacctggcgttccagcgcaagatcctggagcggtccgggctcgggcagggcacctacttccccaaggccgtgctcaactcgccgcccaacccgtgcatggcggatgcccgcgccgatgccgaggccgtcatgttcggcgccatcgaccaggtgctggcgaagacgggcgtccgcgccagggacatcggggtcg

SEQ ID NO: 12807 - DNA, 307 bp, Zea mays
acaatactcaccaaatctacggtgcactgcattggaggcctgtatgcaccctttcttcgatgagctgagagacccaaacactcgtctacccaatggtcggcctctgccgcctctcttcaacttcagatctcaacagctaaaaggcgttaccccataagtcatcgatcgccttgtcccagagcactcaagaaggcagagtttgttcatggcgctaaggacctagtttttgccgttctttttgcccccttttttcccaccgtttgccaccttgagggaagcttgtaaagctatagcttctcctttcccc

SEQ ID NO: 12808 - DNA, 293 bp, Zea mays
gcaccgcaccgttcgcttcctttcgtcaactccactcctcttggccgccgcattacctcctcttcgccgctgccgccaccgctccaccgggcagccatccagccatggatgatgagtacgacgtgatcgtgcttggcacggggctcaaggagtgcatcctcagtggtctcctttccgtcgacggcctcaaggttttgcatatggacagaaacgactactatggaggagattccacctcgctcaaccttaatcagctctggaagaggtttagaggggaagacaagcccccagca

SEQ ID NO: 12809 - DNA, 288 bp, Zea mays
gggacaaatgttattggtacctgaacatgctgggacttgcacagagagttggagctatgattttgttggcatcaacatctgaagtttatggtgatccacttgagcatcctcgaaccgatgcctactggggcaatgttaacgcaattggagctcatgagctgttatgatgatggtaagcgtgtagcatagacgctgatgttcgactatcacaggctgcattgcgttgtaatccgaattgccgatattttcaacgcctatttgccaaggatgatcattgacgatggccgt

SEQ ID NO: 12810 - DNA, 294 bp, Zea mays
aggtagctgagaagttccaaaacacaaacttgtatttgaagaacttagaggagaacattgatgatgagaaattgcgtgaactctttgctgagtatggcaatattacttcctgcaaggttatgcgggattcgaatggtgtcagcagaggttctggatttgttgctttcaaatctgctgaagatgctaaccgagctcttacggagatgaatggcaaaatggttggaagcaagcccctttatgtagctcttgcgcacgtataagaagacagaaaggcaaagctacaggcacaatttt

SEQ ID NO: 12811 - DNA, 292 bp, Zea mays
gctgccaaggccaaggcggcgtccccgtcgtcgtcgccatgcaggcacctccagttcctgtcggcagcgagcccgcggcggcggtagcgggccggcgcacgcgaggtacgggcgcaggtgtccaccaccgagaccgcggcggcggggccggcgaagacgtccaagaagcaggacgaggggctggtcaccaacaagtacaagcccaaggagccgtacgtcgggaggtgcctgtccaacaccaggatcaccggcgacgacgcgccgggggagacgtggcacatggtcttcagca

SEQ ID NO: 12812 - DNA, 293 bp, Zea mays
ggctgcattgcaggcgaaaataatggcataggaaactcttagctcttttacatctgtaatgtccatgcatcacgaattggtcaatatgatgtcattagtagtccactgatcttgtcaagttcaacaccagcatcatccctgaaaattaaggacaagagtcatgccccaggttccatcatttctgtggcacgggaggctgctagaaagagggttgaagaggcatctgcagctgcaaaacgtgctgaaaacttggatgccatattgaaagctgcagagcttgccgcggaagctgt

SEQ ID NO: 12813 - DNA, 293 bp, Zea mays
gtttgaacattcctgtcgttgactactactcttcaaggggaaaagttcacaagataaatgccacgggcactgcagatgaaatatttgaagcagtccgtagctgttttcttccttaaggttatgacgaggctagggtcttccagggaaccttgggatttgtctcttccacgcgcatggattttcggaaaagctactacgcatttcgatcagcatccacggagtttattatgtatggatgtatgtgttccctcagcacattgacatcttgtatatatgcccaaaaatgaatgtga

SEQ ID NO: 12814 - DNA, 300 bp, Zea mays
gggagctttggatggtggcctggatattcctcacagcgagaagaggtttgctggtttcaagaaggatgacaagcagctggatgctgatatccatcgcaagtacatctatggtggccatgttgctgactacatgaggaacctcgctgaagaggagccagagaagtaccagtctcacttcagtgagtacattaagaagggaattgaggctgatgacatggaagctctgtacaagaaggtccatgctgccatccgtgctgatccttctgtggtcaagtcaaccaagcagccaccaaaggagca

SEQ ID NO: 12815 - DNA, 321 bp, Zea mays
ctgccctcccctcctgcagcgcccgtcgcctccctttccccttccctccctccctctcaccgcgggccgccagaggcaatttcgccctcgattcgaccccgattcgtccgcccgcgaccgcgattccctccgccaagcgcggatctgaacgctgcgctccgtgtcgccgctcgaatccgccatgaagggggccaaatccaagggcgccgccaaggccgatgccaagctggcggtgaagagcaagggggcggagaagcccgccaagggcaggaaatggaaggccggcaaggaccccaacaagcctaagagggctcccagcgc

SEQ ID NO: 12816 - DNA, 317 bp, Zea mays
tgaagatattaggactagagatatgtgcagacacaatggtaggggatgagatgctcaggggcatatctggtggacaacggaagcgcgttacaactggtgagatgctggttgggccagccagggcgcttttcatggacgagatctcaactgggcttgatagctccactacattccaaattgtgaactcgctgaggcagtccattcacatcctcggtggcacagctgttatctccctactgcagccagcacctgagacatataacttgtttgatgatatcatactcctctcagatggtcaggttgtgtaccacggtccc

SEQ ID NO: 12817 - DNA, 319 bp, Zea mays
atgcctcaaaaagggtggcattgcttcattatatactggatggggtgctgtcctttgcagaaatatcccacattccatagtgaagttctattcttatgagagtctgaagcagtctctgttgaaatcagcacctgatagggccaaactcaattctggccaaacgcttttatgtggaggttttgctgggtcaactgctgctctctgtacaacaccgtttgatgttatcaagacacgagtgcaattacaggcactcagccctgtttgcaagtatgatggggtggttcatgcactaaaagaaatttttcggcatgaaggcttg

SEQ ID NO: 12818 - DNA, 255 bp, Zea mays
cccacaccccccgagctcagcttaactccactccagctccaatcacagtcgtgaccagagcgcgagaggtagctagagggccgtgaaaatgccggtcaataggatcgccctggggagccaccaggaggtgtaccacccgggcgccctcaaggcggcgttcgctgagttcatctccagcctcatcttcgtcttcggcggccagggctccggcatggccttcagcaagctgaccggcggcgggccgacgaccccggt

SEQ ID NO: 12819 - DNA, 317 bp, Zea mays
caaatagaacattcagacctatcatagaaggatttgcagttgctggagatatgaaaagggctttcgatacccttgacctaatgcggcgaacggattgtgctcctactgtaatgacttacaatgctctcattcatgggctagttagaaagcaccaggttgaaaaggccgtttctgtacttgacaagatgtctattgctggcattgcaccaaatgagcatacatacacgatcattatgagaggttatgctgctagtggagatattgggaaggcctttgagtatttcaccaaaatcaaagagagtggcgtaaagcttgat

SEQ ID NO: 12820 - DNA, 286 bp, Zea mays
ggaagaagggcctcctgtctcctctcacttcctcagtcctcgtccgtctctgctccctcctctctctacctagcaagctagccagccttcctgtagcgcggcagagatggctgcccctgcatccaccacggcggcggcggcggcggcgctgctgctgctgctgctcgtgtcgatcgccgcggcggcggacatgtcgatcgtgtcctacggggagcgcacagcagaggaggcgcggcggatgtacgcggagtggatggcggcgcacggccggacctacaacgccgtc

SEQ ID NO: 12821 - DNA, 306 bp, Zea mays
gttcgctcagtacactggcgctcatgccatcgctgggaggcacacccctggtaccttcactaaccagctccagacctccttcagcgagcctcggctgctcatccttaccgacccaaggactgaccatcagccaattaaggagtctgctctggggaacatccccaccattgccttctgtgatactgactctcccatgcggtatgtcgatatcggcatcccagcgaacaacaaggggaggaacagcattggatgcctgttctggcttttggccaggatggttctgcagatgaggggcactatcctccc

SEQ ID NO: 12822 - DNA, 308 bp, Zea mays
cccgtctccttggtcgtggtctcgacaaggcaggcaggttcccgaccctggttagtcagcaggaatccctcgagtcggaggtgaacgagactaaggcaagcgtcaagttccagctcaagaaggttctttgcatgggtggtgccgttggcaacttggcgatggaggagaagcagatccagcagaacatccagatgagcgtcaagttgcttgtttcccttctggaggagaactggcagaatgtgagatggctctacgtcaagagcaccatggggaagccatacagggtgttctaagtatgctcttttgtg

SEQ ID NO: 12823 - DNA, 308 bp, Zea mays
ccacgcgtccgccgtctacgcgctccgtctcccccaaaccccacctcctcgccggaaccctagcccccgccgacgcggcgccatgagggagatcctccacattcagggcggacagtgcggtaaccagatcggtgcgaagttctgggaggtgatctgcgacgagcacggcatcgaccacaccggcaagtatgccggcgactccgacctccagctcgagcgcatcaacgtctactacaacgaggccagcagcggccgcttcgtcccgcgcgccgtcctcatggaccttgagcccggcaccatggactccg

SEQ ID NO: 12824 - DNA, 301 bp, Zea mays
agaagctgcaaatcatgatgaccatcgtcgacgaccttgtctctgtcgacactctcattgaggactatctgtgcgctgagccagttaacgagtacgtacagagttgcgacatagttgccttcaacaagatgtaggcgtgactttcgatcagtccttcccctggggtgctggcgatggtggtggctgggcaatgcaccagcctaatttatccatagctatatgtctgctttgtgtggccagtgatattgccgtgagtatttttggatcctattcgagtcgaatgtaccagtaccagagttaa

SEQ ID NO: 12825 - DNA, 305 bp, Zea mays
cccatccgcacctctctccatctccctgctcctccgcctccttcttgatccagccaagccagggatcgccatgtcggactcggaggagcaccacttcgaatcgaaggccgacgccggagcgtccaagacctacccgcagcaggctggcaccgtccgtaagaacggcttcatcgtcatcaagaaccgcccctgcaaggttgtggaggtttctacctcaaagactggtaatcatggccatgccaaatgccactttgttgccatagacatattcaacgggaaaaagcttgaagatattgttccttcat

SEQ ID NO: 12826 - DNA, 310 bp, Zea mays
cccgtctccttggtcctggtctcaacaaggcaggcaagttcccgaccctggttactcaccaggagtccctcgagtccaaggtgaacgagactaaggcaaccgtcaagttccagctcaagaaggttctttgcatgggtgttgccgttggcaacttggcgatggaggagaagcagatccagcagaacatccagatgagcgtcaacttgcttgtttcccttctgaagaagaactggcagaatgtgagatgcctctacgtcaagagcaccatggggaagccatacagggtgttctaagtatgctcttttgtgaa

SEQ ID NO: 12827 - DNA, 313 bp, Zea mays
attctatgagactcttctaggatttgtgaacttcaaactctatcattcaataaatgtaaattatcctcctattctggatcgacgtcgcgaatctttagctgctgagctctatgcattgtgccgatacatgtctgctggttccagaagaatgattgggaattcacaaactgacgaagtaatggaagataaggatgagaaaagtaaagctgaggaagtaattaaggaagagaaggttgtgaagaataaagcaagctccaaagcagatgaatctgagctcagattagcacagcttcgacatcagctcccaccaatg

SEQ ID NO: 12828 - DNA, 312 bp, Zea mays
ctgggccaagggccactacaccgagggcgccgagctcatcgactccgtgctggacgtcgtgcgcaaggaggccgagaattgcgactgcctccaagggttccaggtctgccactcgctgggaggaggtactggttcaggaatgggcaccctgctcatctctaagatcagggaggagtacccggatcggatgatgttaacattctctgttttcccgtcgcccaaggtgtctgatactgtagtggagccctacaacgcaacgctctctgttcaccagctcgttgagaacgcagacgagtgcatggtgctcgacaa

SEQ ID NO: 12829 - DNA, 309 bp, Zea mays
gtccttttcctttcataaaccccaagccgcgccgcaatagctcgccccctcgttcgccgcctctcctgctcctaccgcagctctccctcaggtttagtgttcgcaatggcggccttcaacaagcttggtggccttctaaggcacagtgctctggtgagcggtatcactggtggctcttctcctgcagtgttcaatgctgcacggctcatgtctaccaagctatttattggtggtcttgactggggtgttgatgacgtgaaactaagagaagcatttagcagctttggagaggttactgaagcgagggtg

SEQ ID NO: 12830 - DNA, 312 bp, Zea mays
gctgactccaacggtgggcccatccttccgccgcccaccgagatgggccgcgaggagggattcctgctccgcgagtggtgccgacaaaatgctattcaccttgaggaaaaagagaagaaggagaaggagctgaggagccaaatcatcgttgatgctgaagagtttaagaaagcttttgttgagaagagaaagctcaatgctgagacaagcaagggccaaaaccgtgacagggagaagcttttcctagcaaaccaggaaaagttccatgctggtgcagataagcaatactggaaggcgatatctgaacttatc

SEQ ID NO: 12831 - DNA, 310 bp, Zea mays
catatatagcccttgactatgagcaagagttggaaactgccaagaacagctcttcagttgaaaagagctatgagctacctgatggacaagtaatcaccattggtgcagagagattcaggtgccctgaggtcctcttccagccgtcgatgattggtatggaggctgctggaatccatgagacaacatacaattcaatcatgaagtgtgacgtggatatcaggaaggacctctatggtaacattgtgctcagtggtggttcgactatgttcccgggtatcgctgatcgtatgagcaaggagatcacttccct

SEQ ID NO: 12832 - DNA, 312 bp, Zea mays
ccccagcaatccctagcagaagccttccatcctcactcgctcgatggcccgcacgaagcagacggcgaggaagtccaccggcggcaaggcgccgaggaagcagctggcgactaaggcggcccgcaagtctgcccctgcgaccggcggagtgaagaagccccaccgcttccgccccggcaccgtcgcgctccgggagatccgcaagtaccagaagagcacggagctgctgatccgcaagctgccgttccagcgcctggtgcgggagatcgcgcaggacttcaagaccgacctacgcttccagagctctgctgt

SEQ ID NO: 12833 - DNA, 303 bp, Zea mays
agaccggcaggcaccttcgactcgagcggacaggcgaggcagagatggcgctgcgacgggcgctcctcagatcggtcgacttctcccccgacagcaaggctgcaattgagtacttttattctttctcaagggcacagtctgcttgttctctcaatggtgctggtctttgtcctgctagtagatcatttagcacccaggctgccactacgtcaagcacaccacagcctccacctccaccaccccctccagagaagactcactttggtggcctcaaagatgaggatcgcattttcaccaacctct

SEQ ID NO: 12834 - DNA, 288 bp, Zea mays
gtccttcgacttcatcggcgaggcctacttcggcgtgcgcccctcggcgaccgagctcggcaagggcgggccgagcaaggcggccaagtggctcatctggcagctccacccgctggtcacgctcggcctccccatggtcgtggaggagccgctgctccacacgttccagctgccgcctttcctcgtcaagggcgactacagggcgctgtacaagtagttgtccacggtgtcgaacaggcgctggacaccgccgagggcctggggctgtcgcgcgaggaggcctgccac

SEQ ID NO: 12835 - DNA, 247 bp, Zea mays
gtcatcaccgacgatggtgccacggctaacacaagcaagcaagcaagtcactgagtagctagcagtgtgtaccaccatagaaacaacacacacacacacgtgcgctaataaggtgagcttgaggcggtagccgtagctcgtctcggtgtccgggtcggacggacgacgttggcgtggctgctcaagtgcatcacgcagtgtgcgaggtgctgcacgaagcagcagcagcgcaacgaggtgtgctggt

SEQ ID NO: 12836 - DNA, 291 bp, Zea mays
cccacgcgtccgcacgtgctgactgtaaagcagagcagtatgaaataacaggctcacctttgagcccttctgatgttcctgctgatgccgttatgattggagatacaaacgagatttctccctggtggcaggagtttccaaagcgctggacggtcgttctcctctgcttctttgcgtttcttctttgcaatatggaccgtgtcaatatgagcattgcaatccttccaatgtcgtcagagttcagctggaatccagcaaccgttggtctaatccaatcatctttcttttggg

SEQ ID NO: 12837 - DNA, 288 bp, Zea mays
gcacctctctccatctccctgctcctccgcctccttcttgatccagccaagccagggatcgccatgtcggactcggaggagcaccacttcgaatcgaaggccgacgccggagcgtccaagacctacccgcagcaggctggcaccgtccgtaagaacggcttcatcgtcatcaagaaccgcccctgcacagttgtggaggtttctacctcaaagactggtaagcatggccatgccaaatgccactttgttgccatagacatattcaacgggaaaaagcttgaagatatt

SEQ ID NO: 12838 - DNA, 285 bp, Zea mays
aggataactggatgccctaatggatgcgctagaccatatatggcagagcttggtttcgttggtgatggcccaaaaagttaccagatctggctgggtggaacaccaaaccagagtacgctagcagaatcatttatggacaaggtgaagcttgatgacatcgagaaggttttggagcctctctttacctattggaatggcacacgccaggaaggcgaatcttttggaagcttcacaaaccgaacaggattcgacaaattgaaagaggtagtgaataagtgggcagag

SEQ ID NO: 12839 - DNA, 285 bp, Zea mays
cccgtcctgtccttcccttacccggcggcttaaaccctagttctcactcccatcgccgcttcagctccgccgcagcagatggagttctggggtctcgaggtcaagcctggttccactgttaagtgtgagcctggatatggctttgtgctgcacctttcccaggctgctcttggggaatcgaagaagagtgataatgccttgatgtatgtcaaaattgatgatcagaaacttgccattggaaccctctctgttgacaagaacccacacatacaatttgatctggtt

SEQ ID NO: 12840 - DNA, 283 bp, Zea mays
ggctcgcaacccctccctccccttccttgtccgcgagtgctccggtgtccagccccagctctgggcgcgctacgatatgggtgtggagagatgcgtgaacttggatggcctgacggaagcacagattgataaaaagctggaggagcttgccaaggccggcgagtctcttaaaaccaaatagttttggaactctatcctgccatgtttaacgttcccaaataaatgatgccatatgggtgagcaattgttactctatcgttatctgtagttgtgcctggaatta

SEQ ID NO: 12841 - DNA, 279 bp, Zea mays
tatggcaaccggtccagcactttcacgctcagctccagcaatggctggctccaccatggcggtgtgctccacggcggtggccggcacccccatcaaggtggggtccttcggcgaggtgcgcatcaccatgcgcaagaccgtgggcaagcccaaggtggcggcgtccggcaacccgtggtacggccccgaccgcgtcaagtagctcggcccgttctgcggcgagcccccgaggtacctgaccggcgagttggccggcgactactggtgggagcaccgcgg

SEQ ID NO: 12842 - DNA, 284 bp, Zea mays
cgcacgacgccgagacggcggagtacttccgcggcagcgcgtgcactgcgtgctctgcccccgcaaccccgacgccggcagcagcgccgtcatgggcgcgcagatcgcctacatgatcacgcaccaccagaagatcgtcgtggtcgaccacgaaatgccggcgaacgcagcactcgccgccgcatcctcagcttcgtcggcggccttgacctctgcgatggccgctacgacacgcagttccactccctgttccggactctggatacagcgcaccacaaggattt

SEQ ID NO: 12843 - DNA, 284 bp, Zea mays
cttgcaaccttgagtggacaccagggcccagtatggcaagtcgcatgggctcatcccaagtttggttccatgcttgcatcctgcagctacgacggccgggtgatcatctggaaggaaggaagcaagcctgatgaatgggcactagcacacacctttgctgagcacaagtcctccgtgaactccattgcatgggcgcctcatgagctgggtctatgcttggcttgtggttcatcagacgggaacatttcagtcttcgctgctcgttctgatggaggttgggacac

SEQ ID NO: 12844 - DNA, 310 bp, Zea mays
cccacgcgtccgctggaaagtacctctttgctggtgttgtggatggacgcaacatctgggctgatgatcttgctacatctctcagcactctccagtctcttgaggctgttgttgggaaggacaagcttgtcgtatcaagttcctgctcgctcatgcacaccgctgtggatcttgtgaacgagactaagcttgacagcgagattaagtcttggcttgcttttgctgcccagaaggttgttgaggttgatgctcctgctaaggcattggctggtcaaaaggatgaggcttacttcgcagcaaatgctgcagc

SEQ ID NO: 12845 - DNA, 307 bp, Zea mays
cacagctcgttgttgaacctacggaagcaagatcaaattcgtttgttggaacccatgaatatcttgccccagagattattcgaggagatggccatggtagttcagttgattggtggactcttggaatcttcctttacgaattactctatggcaagacaccattcaagggacctggcaatgaggaaacactctcaaatgtgatctcacagggcttgaagttccctgataatccagctgtaagcttccacgctcgagatctgatcagaggtctgcttgtgaaagagcctgagtaccggcttggctcgtc

SEQ ID NO: 12846 - DNA, 304 bp, Zea mays
gtcacttgatcagcctcttgttacctcttgtggcactggtgtgacagcatgtgtattagccttgggccttcatcgacttggcaaaaccgatgtcgcaatttatgacggatcgtggaccgaatggggcgcccatcctgacactccagttgcaactgctgtttagtctcttcataataggacgcccgtgctcttcatagaggacctcttgattgtatttgccccgtgctgtgattctatggaggttggttggatgcttggatgtaaggctggggaagcgaacgcttttggccttcactgtaaatgc

SEQ ID NO: 12847 - DNA, 306 bp, Zea mays
tgaaattctcctccactttcccaagcaaagaacaaagaaccgcccttgttgtctgcgactctgcccggccggactccgaagcgggcggagggaaccagagagcaaggcgaggagcgcggaaaggctgaggaaaggagcggcggggcatggctcgccggccggcgtcgtgggagcagggcggcgacgagtacgactatctcttcaaggtcgtgctcatcggcgactctggcgtggggaagtccgacctgctctcgcgcttgaacaagaacaccttcgccctcgactccaagtccaccatcggcgtcg

SEQ ID NO: 12848 - DNA, 308 bp, Zea mays
gctcaagtcccccggcgaggagtgcaacaaggtgttcctcggcatcagccagggcaagctcgtcgaccccatgctcgagtgcctcaaggagtgggacggcaagccgctgcccatcaacatcaactaaaagacgccaggcgccgccatccatgctgccgtccgcgcatggccggatgaggaggagaggaggaggaggaaaatacatgaaaagatgaacttgtacacgtgtatgtctccagattgtgccgccgtcgttctcgtcgttgacttttcgttgtattggtcgatccatatgtgtgtgcgtgtgt

SEQ ID NO: 12849 - DNA, 306 bp, Zea mays
gtacgcacgcaccgggacaccagcaacccccaacagcgccactgtccagtgcgcgcgtcaagcttgcttagctagccgccatggcctccctcgccgccgtctccgtgaagcccgtggccatcaagggtctcgccggcagctccatctccggaaggaagctcgccgtcgccaggccgtcggcccgctccatccgcatgccccgcgcaccgtccgtggtggccaagtacggcgacaagagcgtctactttgacctcgacgacatcggcaacaccaccggacagtgggacctctacggctctgacgcgc

SEQ ID NO: 12850 - DNA, 300 bp, Zea mays
ggctcctatctggtataggacggagctgagcttctagcaacgtacagtgtatccgccatgagtcctttcggggcggtgatcacgccagaaaccctcaagtacatgtccaagtaccagggacgtgagatcacgcaggtggactgcgcacgggaggcgatgaggctgatccacgcggaagacaagaacctcaaggccgaggactcagcgtgggagctgaagaagaagttcggcaacggcgtgagcaccatggtcctcgtctacaacgccaccggggccagcctgagcctggtggacgacggg

SEQ ID NO: 12851 - DNA, 302 bp, Zea mays
gtatttatattctctccttaattccccatctttctcctccgccttcgcctcctccgcatccctcgccttcctccgcccaagcctctgttctcctccggctgccgaaaccctagccgcctccgccgtcatggcgagcagcaacgtctccaccgtctacatctccgtcatcgatgacgtcatctccaaggtccgcgaggatttcatcacctacggagtcggcgacgccgtcctaaacgagctccaggctctctgggagatgaaaatgctgcactgtggcgcgatctcggggaacatagagcgaa

SEQ ID NO: 12852 - DNA, 302 bp, Zea mays
ccgccatccattctcctcctccgttgcagctgcggcatccatccagtagtccgaccaatccatggcttcagcgttcgggaccgcctccacttgcggcattaaacatgcacctgccggcgttgcgcttgctgcgcccatgaagcacctttccctcgtctcgccctcgctggtttcgcttccgcgcaagatgaggccgcgaaggaagtacaacttcagggtaaacgctgcaaaggagctgcatttcaacaaggatggctcggctatcaggaaaatgcaaaatggggtcaacaagcttgcagatc

SEQ ID NO: 12853 - DNA, 302 bp, Zea mays
atccatctcaggcgactttgcagaaactgaacaagactacatggagcaagacatggttgccagaacaagaatctatcgtcggaggggccgcaatcgaaagctgaaatatacttggaagtctgcagggcatccaactgttagaaaaagaattggtgatgggaagcaatggtacacacaatataacccatgcgtgtgccagcaaatgtgtggtaaagattgcccctgtgtggaaaatggaacttgctgcgaaaagtactgtgggtgttcgaagagctgcaaaaacaagtttagaggctgtcatt

SEQ ID NO: 12854 - DNA, 298 bp, Zea mays
ggctgctgaaatgaacaagcggtccttcaagtacgcgtgggtgctcgacaagctcaaggctgagcgtgagataggtatcaccattgatatcgctctgtggaagtttgagaccaccaagtactactgcacggtcattgatgcccctggacaccgtgacttcatcaagaacatgatcactggtacctcccaggctgactgtgctgtccttatcattgactccaccactggtggttttgaggctggtatctccaaggatggccagacccgtgaacatgctctccttgcgttcacccttgga

SEQ ID NO: 12855 - DNA, 300 bp, Zea mays
cccacgcgtccgcaagaaggacctccaccgcttcgtcaagtggcccaaggtcgtgcgcatccagcgccacgccgcatcctcaagcagcgcctcaaggtgcccccggcgctcaaccagttcacacgtaccctcgacaagaaccttgcaacaaacttgttcaagatgcttcttaagtaccgccccgaggacaaagctgccaagaaggagaggctcttgaagagggcccaggctgaaaacgaggggaaaactgttgagtcaaagaaaccaattgttgtgaagtacggccttaaccatgtgact

SEQ ID NO: 12856 - DNA, 296 bp, Zea mays
tgtctttttattccaatgtgctaaactttatcagagtggtccaaacacccccaaggtgctaaactttagcacttcactaaagtttagcaggaagctaaagtttatctcgtgagattgaatcaggcccttactcctagtaggccttactttcttctggcggctcgtgactatggtttacaatcttggcaatgccaattgacatatgacagtattagttgcgtctgtttcaaattgctatctttatatctctacaatcatggaatgttgcaggaaatactagacgccttcaaccgggc

SEQ ID NO: 12857 - DNA, 296 bp, Zea mays
attcggaaggagggttgtagccccaccccctctggttccggcgcccatggcggtggcggtacctggccagctcaacctagacgatgccccgtcatggggctcccgcagcgtcgactgcttcgagaagctcgagcatatcggcgagggcacttacgggcaagtgtacatggcgaaggagacgggcaccaacgagatcgtcgcgctcaagaagatccgcatggacaacgagcgggaagggttcccgatcaccgccatacgcgagatcaagatcctgaagaagcttcaccaccagaacg

SEQ ID NO: 12858 - DNA, 294 bp, Zea mays
ctgacgcgtgggtggagcttatcaatgaatggtacctggcttctcaggccacaacaggaagcactgctggatgggatgatgatgatgcttttgttgcctggaaggacagtcctgaaaactacaagggatatatccaagagctaagggctcaaaaagtatctcagtcgctctctgatgttgctgactccagttcagatgtacaagcattctcgcagggtctttctacactattagataagatggatccttctcagagagtgaagtttgttcaggaagtcaagaaggttcttggat

SEQ ID NO: 12859 - DNA, 295 bp, Zea mays
gcctcgagcacggcatccagcctgatggccaagtgcctggagataagaccgcgggacatcacgatgatgccttcagcaccttgttcagccagactggtgctgggaagcacgttccccgtgcaatcttcgttgatgtagaacccactgtgatcgatgaggtgcgcactggcacgtaccgccagctcttccaccctgagcagctcatcagtggcaaggaggatgcagctaacaatttcgcccgtggccattacacaattggcaaggagattgttgatgtgtgccttgaccgtatccg

SEQ ID NO: 12860 - DNA, 298 bp, Zea mays
cagacgtttacagataactgagatggtcgaagaggatccactcacagttgaagttgatcatctaaaggaaaagccctacaacaaggatgatgatgttataaaagctacctcattcgaagttatatcgactttaagggaagttctaaggacaagttccctttggaaggatcatgtgcaaacctacacacagcacattggtgacttcaactaccaacggctagcagattttggtgctgctatctctggtgccaacaagttgctttgccaggaggtgcttgaggaattagatgtatacaag

SEQ ID NO: 12861 - DNA, 317 bp, Zea mays
gaagcagatgatttgctgctgcaacaagatggatgcaaccactcccaaatactccaaggcacgttatgatgagattgtgaaggaagtctcatcttacctcaagaaagttgggtacaaccctgataagattgcatttgttcccatctctggttttgagggtgacaacatgattgagaggtccaccaatcttgactggtacaaaggcccaaccctgcttgaggctcttgatcagatcaccgagcccaagagaccctcagacaagcccctgcgtctccccctccaggatgtgtacaagattggtggtattggaactgtgc

SEQ ID NO: 12862 - DNA, 318 bp, Zea mays
tgcaaatcctgcagacaccaccgctcgtttttctctccgggacaggagaaaaggggagagagaggtgaggcgcggtgtccgcccgatctgctctgccccgacgcagctgttacgacctcctcagtctcagtcaggagcaagatgggtgccggcggcaggatgaccgagaaggagcgggagactcaggagcagctcgcccgagctaccggtggcgccgcgatgcagcggtcgccggtggagaagcctccgttcactctgggtcagatcaagaaggccatcccgccacactgcttcgagcgctcggtgctcaagtccttc

SEQ ID NO: 12863 - DNA, 315 bp, Zea mays
cggacggtgggcggacgcgtgggcggacgcgtgggccgccgccaacgtcgcctggcggccgtctgcagctccgcgcctctgctcggaagttggtgaaggtttcgtgaagctgagaacatggtgctgccgacagaactctgccgcttcagcgccagaagatttatcctgggaaaggcatccgatttatccgtgctgattctcaggttttcctttttgccaactcaaaatgcaagcgctacttccacaaccgcctgaagcctgcgaagcttacctggacagcaatgtacaggaagcagcacgagaaggatatccatg

SEQ ID NO: 12864 - DNA, 318 bp, Zea mays
cggacgcgtgggtttcgtcaactccactcctcttggccgccgcatcacctcctcttcgccgctgccgccaccgctccaccgggcagccagccagccatggatgacgagtacgacgtgatcgtgcttggcacggggctcaaggagtgcatcctcagtggtctcctttccgtcgacggcctcaaggttttgcatatggacagaaacgactactatggaggagattccacctcgctcaaccttaatcagctctggaagaggtttagaggggaagacaagcccccagcacatctaggtgcaagcagagactacaatgtggac

SEQ ID NO: 12865 - DNA, 313 bp, Zea mays
gactgcggcacggagtgcagagagcggacgcaacgcaacaccgcccactctctatcactgacgatcgaagcgaggagcgcactgaagccagccgccgatgagtcgcctcctctcgcggcaagaccttgccgccgtccgtcgatctgcaccctttgcgtgcgtgtccaggtggctgcacacgccgtcattcgcgacggtgtctccgcaagacgtttcaggttccagcccagcggaagtgcagaattttgtgcagggcagctggacagcatctgctaactggaactggatagtcgatcccctgaacggtgataaa

SEQ ID NO: 12866 - DNA, 307 bp, Zea mays
caagcctgccctgtccagccttgttaaacagcacagcgagacatcacgagagctagagagagatggcggccacggtttcctccttcccggtggtgaacatggagagagctgagacagaagagaggacaacggccatggaggtcatccgcaacggctgcgagaactggggcttcttcgagctgctaaagcacgggatctcgcacgagctgatagacgaggtggagcggctgaccgaaggcgcactagcggaccttccgggaggccaagtaccaggaattcgcggcacggacactggaaaccggcggag

SEQ ID NO: 12867 - DNA, 314 bp, Zea mays
ctctccgccgcccgccgcccgccgcagcagcacccaccgggcaagatgaagacgatcctggcgtcggagagatggacatcccggaggcgtcacggtcacggtggccgccaagctggtcacggtggagggcccccgcggcaagctcacccgcaacttcaagcacctcaacctcgacttccagctgcaggaggccggccgcaagctcaaggtggacgcctggttcggcacccgccgcaccatggccgccatccgcaccgccatctcccacgtccagaacctcatcaagggggtcaccaagggctaccgctacaaga

SEQ ID NO: 12868 - DNA, 313 bp, Zea mays
ccaagagcgaccccaacagcgagagcaggctcacgctggtcgacggcgacgtctacgtgccgcgcgacgagcgcttcggccacatcaagaagtcggacttctacggctacgccatcaaggcgctggtgaacgccgtcatcccggcaatccgcacctacgtcgacctgtcgcccggcgagttcgactccttcaaggacatcatgaagctgtacgagggcgggatccagctgcccaaaataccagccctcgaggacctgcggaagcagttcccactcgagctcgtcaaggatgtcctcccggtcggcggcgacta

SEQ ID NO: 12869 - DNA, 310 bp, Zea mays
gcagtagcaagagggatagagcaaggccacacacacacacacaccactaggctaggttagccttttaatcgtcgtcgagaaacaagagaggcgcgcacgcaagcaggcaagcgagaagcgagccgatcgaccgagaactagcacgcgatggcgaggtcttccaagatgatggtagcagcactctactggccttggccctagccgtgtcgaccgccgcagcgatgaacatcaataccacgacgactgagtcgaaggacgacgcggaggtgcagccgcagaccttcccgcccttcgaccggctcaacagcgg

SEQ ID NO: 12870 - DNA, 311 bp, Zea mays
cgtcgttcccctccttccggcacaaccagcacgcgagcggcacgagaagactagggttacggcgaggcgacggcgagagcatggcagggattcggtggccgccagatgacccggagatcttcccttccaggatggtcagcggcggggcttgggtccccgtcgcgcccccaggagagatggcgtcggacgacgacaggtcggtggccgcggactcgtggtcgatcaagagcgactacggcagcaccctcgacgacgatcagcgttactccgacaaccgcgaggtcctcctagcctcctcctccgcctcctct

SEQ ID NO: 12871 - DNA, 309 bp, Zea mays
ctagcgacacctcggctcgtttgatccccgcggggagctctagttccgccaagcgtgcgtaccggcgtccggatccgggaccgaagatgacggagtccctggtgcggaacaagccggggatggccagcatcaaggagatgccggtggtgcaggacgggccgccgccgggcggtttcgcgcccgtgcgcttcgcccgccggatccccacctcggggcccagcgccaccgccatcttcctcagcaccttcggtgctttcgcatatggcatgtaccaggtcggtcaggggaacaaggtccgccgggcgctca

SEQ ID NO: 12872 - DNA, 308 bp, Zea mays
ctcttcgtcgcgccgccgtagcacgactccgactcggccatggcgacacccccagctctcctattcccttcgccctcttcggcatcttctccgccgtcatccgcgcaggtagaggcggtggtcctcttcaacgtctgcgacagctacgtgcggcgaccggaccaggcagaccgtgtcatcggcaccctccttggatccctcctccccgatggcaccgtccacgtccgcaactcctacgtggtcccccacagcgagtcggccgaccaggtcgccatcgacatcgactaccaccataacatgtacgcctc

SEQ ID NO: 12873 - DNA, 310 bp, Zea mays
cccgtcgcatcccatcccactaccacccatctcgtcgtccgccgattcgatccggttcttccaacccaggggctgtgatggcgacgaagaggagcgtgggcaccctcggcgaggcggatctgaatgggaagaaggtgttcgtgcgcgccgacctcaacgtccctctcgacgacgcccagaagatcaccgacgacacccgcatccgcgcctccgtccccaccatcaagttcctcctcgagaagggcgccaaggtcatcctcgccagccacctgggtcgtccaaaaggtgtcaccccaaagtacagcttgaa

SEQ ID NO: 12874 - DNA, 304 bp, Zea mays
cttcaagaagtggggaggtatagaatttcctctaccttttggaagagtactcagccctacagaaagtttcatccatgaactagatgagaagacaagtgcctctctgaagttcacggttttgaacccgaaaggtcgcatctggaccatggtcgctggtggtggtgctagtgtcatttatgctgatacagttggagacttgggatatgcatcagagcttggaaactatgcagagtatagtggtgctcctaatgaggaggaggttctgaattattctagagttgttcttgattgtgcaactgctgat

SEQ ID NO: 12875 - DNA, 305 bp, Zea mays
tgactggcgaggcaaaagcgcaaacgcgaccacagacagagcgcgcttcaaggccttttttttttgagataacaaggaggagaggaggagatggcggtcacgatcacctgggtgaaggcgaggcagatcttcgacagccgcggcaaccccaccgtcgaggtggacgtgggcctcagcgacggcagctacgcgaggggggccgtacccagcggcgcatccactggaatatatgaggccttggagttgagggatggaggatctgattatcttggccaaggtgttcttaaggctgtcagcaacgtaaa

SEQ ID NO: 12876 - DNA, 305 bp, Zea mays
cacttctccacccacgactgcgagatcaacggctacaccatccccgccggcacgcgcgtcatcgtcaacgcgtgggcgctcgccagggacccgacgtgctgggacaaggccgaggagttcttccccggagcgcttcctggaacaaggccgcgacgccgaggtcgacatgtacggcaaggacatccggttcgtgccgttcggggcggggcgcaggatctgcgcgggggccacgttcgccatcgccaccgtcgagatcatgctcgcgaacctcatctaccatttcgactgggagatgcccgccgaga

SEQ ID NO: 12877 - DNA, 301 bp, Zea mays
cgcaaccgccgcaacgcaaacccagaaaccctccgccgccgccgccgccgccgtaccacgtaccgtcccgcttctcctccgcccttgtgcgagcaggcaacggcagcagagcccgcacaggttgctcccggacggagggataacgcgcggggctgggctagccgggggcggccggaggaggtacgtatggacaagtacgaagcggtgcgggacatctggtctgggaacttctgggtggcgcgcctgatgcgcaacagcgagacccgggagctcgtcgcagtgaagtgcatcgagcgcagct

SEQ ID NO: 12878 - DNA, 307 bp, Zea mays
cgtgacgcgctgggaggttttcctttttgccaactcgaaatgcaagcgctacttccacaaccgcctgaagcctgcaaagcttacctggacagcaatgtacaggaagcagcacaagaaggacatccatgctgaagctgtcaagaagaggcgccgcgccaccaagaagccatactcgaggtccattgtgggtgcttccttggaagtgatccagaagaagagagctgagaagcctgaagtccgagatgctgctagagaagctgctcctcgtgagatcaaggagcgcatcaagaagaccaaggatgagaag

SEQ ID NO: 12879 - DNA, 302 bp, Zea mays
ccttaattcgcttcctggtgttgatcccaatgatccatctgttaaagatttgctggcatcgttgcacagccagggagagcaagagaagaaggaagacacgtcagacaaaacagaagacgataagaactgatatagccatgttcacgcttccatgcgtacaaagaaattaaagaccggtctccattgactgcgtttactctcttggtcgtggagtttgtttatcctcatagaacggtgctttgattataacttaccgccgagggaatttgtattatgacactgcaacaatcttctctccatat

SEQ ID NO: 12880 - DNA, 312 bp, Zea mays
cccactcgtccgcccactcgtccgctagttctagatcgcgagctgccgccctttttttttttttttttttttttttttttattggtataaaaagatctgaccaatataatattttacatacatcgctacaccactttttacatagaaatatcaccaataatactagttgcaacaaatcacgacatcccattattcatcatcaggactcctacaatatatagttactgacgaagaacagagtcactttattccttgcattatttaatcttgttcccggtacagctagcaagacacaagttttacagatgtagg

SEQ ID NO: 12881 - DNA, 306 bp, Zea mays
gaacgtgcttactttgattctgctgattgggctctaggaaagcaaggtggtgttcccaacaagcctaaaggtcctcttgaggcactccgacccaagcttcagcctacgcaacagaatgcccgcgcccgccgaacttcatatgcgtctgcggacagtgacgacactttgaatctgtcccccgaggatctggtcccgcaaggagaacccagccagcagggagaaccagtcgaggacaagaacaaggaataaacacatgcccagcatagctactgtactgtaccccttttcatacacaagatgccattt

SEQ ID NO: 12882 - DNA, 307 bp, Zea mays
tgtccgcaacgcagacgatcccttcccgcaacgcctcctccaagtacgatttcgtcaaggtcaaggtctggctcggggagaacgccgaccactactacgtcctctccaggttcctcctcagcaggatgctcacagtcaccaagattcctaatcatgtcgccatcaagattgcccttgagctcaagaagctgcttgtcgacaacagcctgcttgatgtatcccagagtgatctagaggctaatctgttcaagcttatggaaaaacggggatacggagaggagtatataaatcgctataaaatgatgac

SEQ ID NO: 12883 - DNA, 309 bp, Zea mays
cgcaggctagcagcacagcagcagccagagccatcccctctcctcgctacgcttcgcttcctcggcgccgattcctcctcctcctcctccgcgctcgtccgtcaccttccggcgcacgagctcgcccgagatggcgaacgcgagatcgggtgtcgctgtgaacgatgagtgcatgctgaagtttggcgagctgcagtcgaagaggctgcaccgcttcataactttcaagatggacgacaagttcaaggagatagttgtggaccaggtcggggatcgcgctaccagctacgatgacttcacaaacagcct

SEQ ID NO: 12884 - DNA, 305 bp, Zea mays
atcgctgactgcttctctgaggttcgatggtgccctcaatgtggatgtgaacgagttccagaccaacctggttccttacccgaggatccacttcatgctctcctcctacgcaccggtgatctcttctgcggaagccttccacgagcagctgtctgtggcggagatcaccagcagcgcgttcgagccggcttccatgatggtcaagtgcgacccacggcacggcaagtacatggcttgctgcctgatgtaccgcggcgacgtggtgcccaaggacgtgaacgccgcggtggccaccatcaagacga

SEQ ID NO: 12885 - DNA, 302 bp, Zea mays
tctctccactgctccgtccagcgcgtccacctcccaaacccctactcccccaggaagcaatggcttcccccacccagggccaggtcatcacctgcaaagcggcggtggcgtacgagccgaacaagccgctcgtgatcgaggacgtgcaggtggcgccgccgcaggcggcgaggtccgcgtcaagatcctcttcaccgcgctctgccacaccgaccactacacctggagcggcaaggatcctgagggtctttttccttgcattcttggccacgaagctgccggaattgtggaaagtgtcggtg

SEQ ID NO: 12886 - DNA, 303 bp, Zea mays
cccacgcgtccgcccacgcgtccggtcccgaataaagagcagcagcgcaagatgtcggtagagcgagaagaatgcaatggcggcagggagcttccttttcacctcggagtccgtgaacgaggggcaccccgacaagctgttcgaccaggtgtcggacgccgtgcttgacgcatgcctcgcgcaggaccccgacagcaaggtggcctgcgagacctgcaccaagaccaacatggtgatggtgttcggcgagatcacgaccaatgcgaccgtggactacgagaagatcgtgcgcgacacctgccg

SEQ ID NO: 12887 - DNA, 302 bp, Zea mays
atggcgtcgtccatgctctccgctaccaccgtgccactccagcaggggggcggcctgtccgagttctccgggctcaggagctccgcgtcgctgcccatgcgccggaatgccacctccgacgacttcatgtccgccgtctccttcaggacccacgcggtcggcacgagcggcgggccgcggcgggcgccgacggaggcgaactgaaggtggccatcaatgggttcggccgcatcgggcgcaacttcctgcggtgctggcacgggcgcggcgaccctcgcccctcgacgtcatcgccatcaacg

SEQ ID NO: 12888 - DNA, 306 bp, Zea mays
cccacgcgtccgcggtttaccgtgttggggatctggaccgcacaatcaagtactacacggaatgctttgggatgaaactgctgaggaaaagggatgttcctgatgagaagtacaccaatgccttccttggctttgggccagagaacaccaactttgcagttgaattgacatacaactatggcgttgacaagtatgacattggaacgggctttgggcatttcgcaattgctaatgatgatgtgtacaagttagctgagaatatcaaatccaagggtggtaagatcacccgcgaacctggtcctgtca

SEQ ID NO: 12889 - DNA, 293 bp, Zea mays
cgggcacaccccccgagctcagcttagctccactccagctccaatcacagtcgtgaccagagcgcgagagctagctagagggccgtgaaaatgccgatcaataggatcgccctggggagccaccaggaggtgtaccacccgggcgccctcaaggcggcgttcgctgagttcatctccaccctcatcttcgtcttcgccggccagggctccggcatggccttcagcaagctgaccggcggcggcccgacgacaccggcgggcatgatcgcggcggcggtggcgcacgcgttcgc

SEQ ID NO: 12890 - DNA, 295 bp, Zea mays
tccccaccctgccggcaaatgcttctcctgcacaaatctgttcccctccgcctgctccttccacgccgtcctctcaaaacctttctcctcccgccgccgtctcgcccccgctgtctctcgctcctcccacgcgctgccatgggctccgtagctggagacaccgccgcccgcctcgcgtacccgccggcccgccgcgacgattcggtcgtcgacgactaccacggcgttcggatcccagatccctatcgctggctggaggacccggactcggaggagacgaaagagttcgtggcgc

SEQ ID NO: 12891 - DNA, 297 bp, Zea mays
cccacgcgtccgcccacgcgtccgttatgttcttgccctcaccgctgagaacttcctcgcaaggcggcttcaaacacttgtcttcaaggctggcatggccaagtccattcaccatgctcgtgtcttgatcaagcagcgtcacatcagggttggcaggcaaattgtcaacgtcccatcattcatggtgagggtggagtctgagaagcacattgacttttcactgtcaagcccattcggtggaggccccgcaggaagggtgaagagaaagaatcagaagaaggcaagcggtggcggcga

SEQ ID NO: 12892 - DNA, 296 bp, Zea mays
accaaattgaaactgctgcaaggccatatgcttttatcaagtttgatacattcatccagaagactaggaaactgtatttggatacaagaactcaaaggaacctcgcaaaactgaatgatgaactctatgaggtgcatcaaattatgactcgcaatgttcaagaggttcttggtgttggtgaaaagctagaccaggtcagtgaaatgtcaagcaggttgacttctgatacaagaatatacgcagataaggctaaggacctcaaccggcaggcgttgattcggaagtatgctcctgtc

SEQ ID NO: 12893 - DNA, 298 bp, Zea mays
cccacgcgtccggtgaagactcctcgtggcctccgcacactcaactctgtttgggcccaacatcttagcgaagaagtgaggagaaggttctacaagaactggtgcaagagcaagaagaaggctttcacaaagtatgctctcaaatatgaaaatgatgctggcaagaaggaaattcagctgcagcttgagaagatgaagaaatatgcttctgttatccgtgtcattgctcatacccagattaggaagatgaagggtttgaagcagaagaaggctcacctgatggagattcaggtcaatg

SEQ ID NO: 12894 - DNA, 329 bp, Zea mays
gttcatcatggacaactgcgaagagctgatccctgagtggctgagcttcgttaagggtattgttgactctgaggaccttcccctcaatatctctcgtgagactcttcagcagaacaagatcctgaaggtgatcaggaagaaccttgtgaagaagtgtgttgagctcttctttgagattgctgagaacaaggaggactacaacaagttttacgaggctttctccaagaacctcaagcttggcatccatgaggactcgcagaacaggaccaagatcgccgagcttctgagataccactccaccaagagtggtgatgagctgaccagcctca

SEQ ID NO: 12895 - DNA, 329 bp, Zea mays
cgccacgcgtccgcggtaccgtgggcgtgcgacgaagcgatacagaggtacgggcccgaggagcacaccattgtcgaggcccacccggaggtgtacgagcggatgctcacgctccgatggggcgacaagaagaacgtcaggatcgtgttcgggcgatggcaggacgtgatgccgcagctcggatcttatgacggcatattcttcgacacgtacggggaatactacgaggacatgagagagttccaccagcaccttccgaagctgctgaagcccggaggcatctactcgtacttcaacggcctctgcggcgacaacgcgttcttccacgc

SEQ ID NO: 12896 - DNA, 325 bp, Zea mays
ccgacggtgggtgttacaaggcacaaggatattctgttggaaaatctctcgtggaagaggataaacttgagctcgcaacttctcttattgagaaggcgaacgcaaagggggtttctcttttgcttcccactgatattgtagtagcggacaagtttgcagccgatgctgagagcaagattgtccctgccactgctatccctgatgactggatgggtcttgatgttggccctgatgccacgaaaaccttcaacgaagcattggacaccaccaagactgttatttggaacggccccatgggagtgtttgagttcgagaagtttgcagc

SEQ ID NO: 12897 - DNA, 327 bp, Zea mays
gagagccgcgcacctatctggcaagccacgccgcggcctcgatcggagtcggaggcgaacacccccatggcggcggctggcggcggcgcaggagggaaggtatccttcaagatcatcctcacctccgaccccaagctccctttcaaagtgttcagcgtgcccgatgcggcgcccttcaccgcggtgctcaagtacgccgcggaggagttcaaggtcccgccccagaccagtgccatcatcaccaacgatggaattggcatcaacccccagcaaagtgcaggcaacgtgtttctgaaacatggttcggagctgcgtctcatccctcgc

SEQ ID NO: 12898 - DNA, 328 bp, Zea mays
gttcagcggcttcttaacatgaaggacaagtatgacaatatcatcaatgtgtcatttagcaatgacaagagtttcctgaatgctctcaattcctcatttgagaactttataaacttaaacaacagatcacctgagttcatatcactgtttgttgatgacaaactgcggatgggggtgaaagaggccaatgaggaggatcttgaaactgtcctggacaaagtgatgatgctgtttaggtatttgcaagaaaaagatctatttgagaaatattacaagcaacacttggcaaagcgtcttctttctgggaaggctgcttctgatgattctg

SEQ ID NO: 12899 - DNA, 330 bp, Zea mays
cccgccgcaccatggccgccatccgcaccgccatctcccacgtccagaacctcatcaagggggtcaccaagggctaccgctacaagatgaggtttgtctacgcccatttccccatcaacgcgtccatcaccaactccaacaccgccatcgagataaggaacttcctcggcgagaagaaggtcagaaaggtggacatgcttgacggcgtgaccatcctccgctccgagaaggtcaaggacgagcttattctcgatggcaacgacgtcgagttagtctctcgctccgccgccctcatcaaccagaaatgccatgtcaagaagaaggatatca

SEQ ID NO: 12900 - DNA, 327 bp, Zea mays
gtggcaaatggaggcgatgcggtggcggaggcaggccccgcgagctgggacgaggtggtgagggtggtgccgtgcatggacgccgtggtcaaggtgttctgcgtgcacacggagcccaacttctcgctgccgtggcagggaagcggcagtacagctctagcagtagcgggtttatcatcagcggccgccgtgtcctcaccaatgcccactccgtggagcactatacccaggttaagcttaagaagcgcggctctgacaccaagtaccttggcaccgtcctggccatcggcacagagtgcgatattgcggtcttaactgtcaatgacg

SEQ ID NO: 12901 - DNA, 246 bp, Zea mays
gtcttcacactcctcgccgtcacgtgacaccagtgcaggccgaagcagcgcaatggcgagccgcaccatggccctctcctgcacagccttcggcggccaggcagtgaacgtgccgtcgtctggcttcggcgaggcacgcctgcacgatgcggcaagcacggcgagcgaaaggcaaaagaccggcagcgaaggtccggcagcccgtggtacagccccgaccgggtggtgtagctggggccggtgtcc

SEQ ID NO: 12902 - DNA, 322 bp, Zea mays
atataataataagctaatagcagcgccacgcaccgacaccaatacgccatgggttccatcatggagcaacgctgcaacaacgatccgcaggcgctgctcgacgctcagctcgagctctggcacagcacgttcgcgttcatcaagtccatggcgttcaagtcggcgctggagctcggcatcgccgacgccatccactgccacggcggcaccgccacgctcacccagatagccaccaaggccgcgctccacccgtccaagacaccgtgcctgcgcaggctcatgcgcgcgctcacagtcgccggcatcttcagcgtcgccaaga

SEQ ID NO: 12903 - DNA, 321 bp, Zea mays
gctctcgtttcacatccatccatcctcgtttcctccgtcccgcagcatctcaaccccatggccaagatcaagatcgggatcaatgggttcggcaggatcggaaggctggtggccagggtggccctgcagagtgacgatgtcgagctcgtcgccgtgaacgaccccttcatcagcaccgactacatgacctacatgttcaagtacgacactgtgcacggacagtggaagcaccatgaagtcaaggtgaaggactccaaaacccttctctttggtgagaaggaggttgctgtgtttggctgcaggaaccctgaggagatcccg

SEQ ID NO: 12904 - DNA, 320 bp, Zea mays
ccacgcgtccggcgatcttgcagcagctggactatcgcctggctgactgccaggccctggtccttgctcccacccgtcagcttgcacagcaaatcgagaaagtcatgcgcgcgcttggtgattaccttggtgttaaggtccatgcatgtgtgggaggaacatccgtccgtgaggaccaaaggattcttacgcagtggtgtgcatgttgttgttggtacacctggtcgtgtgtttgatatgctgcgcagacagtccctccgccctgataacatcaagatgtttgttctagatgaagctgatgaaatgctttctcgtggttt

SEQ ID NO: 12905 - DNA, 324 bp, Zea mays
caaatacgatctaggagagcaaagatgtccgacgagaaccaggccctccaacgccagctcctacttaaacaggaactggagaatttcagaatgggtgagaactgggacgacagcactcaatccaaggagcaaatcgaggcaagcctaataagcaggcaagaggcagcgataagaagagaaagagctcttgcatatgcattttcacatcagtggaagagcacatcaagatctgcgaacccaatgtttgtagacccaaataacttgcagtggggctggagctggttggagcgctggatggcagcaaaaccttgggagggacgcaat

SEQ ID NO: 12906 - DNA, 324 bp, Zea mays
cagattcatcgggcgagcaaagacaccagaaatgagatggccattcccattttcagaggggaagatgtttgttctcactatccaagctggagtcgaaggataccatatcaatgtgggaggccgccacgttgcctcatttcctcataggatgggattcgccctcgaagacgcaacaggtttagccgtgacagggggcatagatgttcactctgtgtacgcaacagcgcttccaaaggcacatcctagcttttctctccagcaagtcttggaaatgtctgacaggtggaaggctcgccctgtgccagaggaaccaatccatctttt

SEQ ID NO: 12907 - DNA, 322 bp, Zea mays
gcaatttcatctaaatatttacgacagcccattgtagatggaggaaagccaagtgatggacggagtccttggcaacttcggcccatcaattctcaatgtggcttacttccaagagctcatggtagtgctctgttcacgaggggagacacacagtcactggctgtcgtcactttaggtggctatcagatggcacaacgaattgacaaccttgttgatacggaagactcaaaaagcttctatcttcagtagtcatttcctccatcatgtgttggcgaagttggtcgaattggagcacctagccggagagagattggacatggga

SEQ ID NO: 12908 - DNA, 320 bp, Zea mays
gcggtccagcagtttcacgctcagctccagccgtggctgcctgcaccatggcggtgtgctgcacggccatggccggcacccccatcaaggtgggctccttcggcgaggcgcgcatcaccatgcgcaacaccgtcggcaagcccaacgtggcggcgtccggcaaccgctggtacggccccgaccgcctgaagtacgtcggcccgttctccggcgagcccccgacgtaggtgaccggcgagttgcccggcgagtagcggtgggacaccgccgggctgtccggcgaccccgagacgttcgccaagaaccgcgaggtggaggtg

SEQ ID NO: 12909 - DNA, 310 bp, Zea mays
cccaagcgtccgcaacgatgcaagctgaacaaagcgaagggaaatctaatccttcaactgcgtgcgtcgttgagatggacattcaatgaggggcataaacactctagcagtcacttcctggtatatctcaacgatgcgagctgaacaaagcgaaaggaaatctaatccttcaactgcgtgcgtcaaagcttttgacatttcaagaggtaaagcttcaagagttagcagagcacgtaccaaaggggcacattcctcgtgctctgactgttcatctaagaggagagctgactagaaaggttgcacctggaga

SEQ ID NO: 12910 - DNA, 322 bp, Zea mays
gtgagtaagaatatattcttgttgaagtcactagatgatctgtttcagaagggcagggaggcaataaattatcctgctcttcaggacctaatgcaaaagacaggatttgacatggatgatgtagtaaggaagtacatccgttacacactgaatgacaaacagttcagtcctgatgtggttgtggatctcatacatcttaggaaggcatcaatgctggaagatgcagaagttgctgaaattttaaatgagatttcaagacgaattgtccgggataaagggccagtagttatggacttatctggttttacagatcaaggtttta

SEQ ID NO: 12911 - DNA, 289 bp, Zea mays
gtcgttcccctccttccggcacaaccagcacgcgagcggcacgagaagactagggttccggcgaggcgacggcgagaccatggcagggattcgatggccgccagacgacccggagatcttcccttccaggatggtcagccgcggggcttgggtccccgtcgcgcccccaggagagatggcgtcggacgacgaccggtcggtggccgcggactcgtggtcgatcaagagcgactacggcagcaccctcgacgacgatcagcgttactccgacaccgccgaggtcctccta

SEQ ID NO: 12912 - DNA, 314 bp, Zea mays
gctcgccactggtagccgtgctcaacgtgtcaacatacctggcaaggctctggctattacttctgatgaggccttgagcttggaggagcttccaaagcgcgctgtaatcctgggtggcggatatattgctgttgaatttgcttctatcttgagggggatgggtgctgaagtagatttgttttatcgaagagatcttcctctaagaggttttgatgatgagatgagagctattgttgcaagcaaccttgacggaaggggaatcaagttgcatccagggacaaatctctctgagttgagtaaaacggctgacggaa

SEQ ID NO: 12913 - DNA, 314 bp, Zea mays
atacacgcttgtatgttggaagattggcccctcgcacccgttcccgcgacctacagtatcttttcagcaaatatggaagaatacgtgaagtggagttgaagcgtgactatgcattcattgaattcagtgacccccgtgatgctgatgatgcgcagtacaacctagatggcagggaagtcgatggaagccgtattattgttgaatttgctaaaggagttcctcgtggttctggtggttcacgtgagtacatgggaagaggacctccaccaggaacaggtcgttgttttaactgtggaatggatggtcactgggca

SEQ ID NO: 12914 - DNA, 313 bp, Zea mays
ctgctgtccgcctcaacggtccaaccctccggttcgacgtaggcgccggcggcgaaatgaaggtctccgtgaagacgctcaagggatccagcttccatatcgaagtggatcctaccgacaaggttgccgacgtgaaaaaggttatagagagtatacaagagcaggcttcctatcctgctgaccaacaagtgcttatacaccaggggaaggtgctcaaggacgacacaacattggaggaaaaccaagtagttgaaaataattttcttgttataatgctcagacagaacaagggatcatcaagtgcagcaccagc

SEQ ID NO: 12915 - DNA, 309 bp, Zea mays
cccggacgtccgcctgcagcccggtaagaagatgaccgtccagttcgccagcaccgggacgaccggcgccaggttcctgccgcggaacagagccgaggccatcccgttgtcctcgcagaaggtgcccgaggtgctggcccgcctgtcggtggagccggactccgtcgaggcggcggagatgacgcagacgctgcgcggctgcaaggcgcccgccgccaagggcgagaagaaggcgtgcgccacgtcgctggagtccatggtggagttcggcaggcgcaggctcggaaccatgcacgtaggagccgtgtc

SEQ ID NO: 12916 - DNA, 225 bp, Zea mays
gctgatcaatggatttatccatttgcatgactttgcaaatgcttttagcattttcgaggacatgataaaatcaggtttgcagcctgatcgtgccatatacaatttgctggtagaagcattttgtaagatgggaaatatggatcgagctattcgcatactcgaaagaatgcagaaggaacgaatgctaccatcagatagaacattcagacctatcatagaaggatt

SEQ ID NO: 12917 - DNA, 342 bp, Zea mays
aactcgccgtctgccttctgcgcctccatttcggcctctgtcccttgcaagttcaatctcacctccaaccatgggtaaagagaagtcccacatcaacattgtggttattggccacgttgactctggcaagtcgaccaccacaggacacctgatctacaagcttggaggcattgacaagcgtgtgatcgagaggtttgagaaggaggctgctgaaatgaacaagcggtccttcaagtacgcatgggtgctcgacaagctcaaggctgagcgtgagagaggtatcaccattgatatcgctctgtggaagtttgagaccaccaagtactactgcacggtcattga

SEQ ID NO: 12918 - DNA, 342 bp, Zea mays
cgagttctcctcaaccaaattcaaggtcacagcggcgaacctctcggctatcatgtctggccgcggcaagggcgggaagggtctgggcaagggcggcgccaagcgccaccgcaaggctctgcgcgacaacatccagggcatcaccaagccggcgattcgcaggttggcgacgaggggcggcgtcaagcggcatctccgggctcatctacgaggagacccgcggcgtgctcaagatcttcctcgagaacgtcatccgcgacgccgtcacctacaccgagcacgcccgccgcaagactgtcaccgccatggacgttgtctacgcgctcaagcgtcagggccgca

SEQ ID NO: 12919 - DNA, 137 bp, Zea mays
ctcagagaggtggagaggaagaagcagatgacaacagaggagaaaaaaacattgcgggaagacaaattgaaacaagaggagaagtacatgtgggctgttgtagatggtgttaaaggcaaggtcggaaatttcagagt

SEQ ID NO: 12920 - DNA, 334 bp, Zea mays
cccacgcgtccggaaaattacagatttagttaccaaacagcagcaaatggatgctgaacgtgatcatgcgaagtcagagttggaacaatttaaggctgacattgccagggctatgaagcaaagggggtcacttgagaaagcccttgtcaagaaggaaaaatcacttaacaacatctgcaaccaaattgagcaagtccagtctagcattgcaatgaagaatgatgaaatgggcacagagcttattgatcagctaacttcagaagaaagagatctcctttcacgattgaatcctgaaattactgatttgaaggagagatttctaatgtgtaaaaca

SEQ ID NO: 12921 - DNA, 343 bp, Zea mays
ccgaggacggtttcagctatgccagttacgaggttatgggcttggatgccactgctctatcttatggtgaccttgtcaagagggtcctccggtgctttggcccctcggagttttccgttgccgtgaccatcttcggcgggcgtggccatgccgggacatggggaaaggcactaggtgcagaggtctatgactgcaacaacatggtggagcaggagctgcctggaggcgggctcctcgtataccagagcttctgcgctgctgaagacgctgttgctacctcgcccaaatctgttttccactgctttgacggcgagaacgtggagagtgctctcctcctatgaag

SEQ ID NO: 12922 - DNA, 333 bp, Zea mays
ccacgcgtccgatgatcttgatctacgacattcaccagcgcccagataaagttttggagatattcgcggatatggaggagttaggtgtgcgtccggacgaggatacagcgagacggatcggaaaggcattcgtggcttctggccaagaagaaaaggagaagcatgtcctcgagaaatacttgaagaagtggaagtacatccatttcaacggcgagcgcgttcgcgtgcggagggacggaccattggcgtagtgcccgttttctgaaaaatgctcgaacctatcagagtatcgtgccggtagcggtagggcaggggagatgctgttactgccgc

SEQ ID NO: 12923 - DNA, 333 bp, Zea mays
cggacgcgtggcatcggccttcaagtctcgctacgtagcagtgcagtgaaaaaagcagccgcaatggcgagcagcaccatggccgtgtcctccacggcgttcgccggcaaggccgtgaacgtgccgtcgtcgtccggcttcggcgaggcccgcgtgacgatgcgcaagacggcggcgaaggccaagccagctgctgcgtccggtagcccgtggtacggccccgaccgggtgctgtagctgggcccagtgtccggcgagccaccgagctagctgacgggcgagttcgcgggcgagtacggctgggacaccgcggggctgtcggcggacccggag

SEQ ID NO: 12924 - DNA, 319 bp, Zea mays
gccgagtgcacaccacctttccccactccgatcgaatcgatggccgccgagggcgagaagaagatgataaccctcaaaagctccgatggcgaggagttcgaggtggaagaggcggtggcgatggagtcgcagaccatccgccacatgatcgaggatgactgcgccgacaacggcatccctcttcctaacgtcaactccaagatcctatccaaggtaatcgagtactgcaacaagcacgtacatgccgccgcagccgcagccgccgcctcgaaggccggttccgacgacgtgggtgccgcctccgccaacagcaccgccg

SEQ ID NO: 12925 - DNA, 334 bp, Zea mays
gtgctcttctcttcctcttccagttggtattctttatctgaaacatagtacagaagaggagaggagagcgagagctaagaagatgaccggcaaggttctccttgtggccgtcctcttggtgggcgtggcctctcgatgctcgggcagtaggggcctgcagggcgatcacgttgctgaacataagttcggtcgcggtggctatcgtggtggcggtgggtacggaggctacggctgcagttgttgatgaggtggtgggtatcgcggttgcggctgcggcggtgggtaccgatgcggtggcggctacacacccggctactctggcaccggcacctgg

SEQ ID NO: 12926 - DNA, 130 bp, Zea mays
cccacgcgtccgacctactactcaagtatccatccttattgagtacagtgttgatccatggactcggaaggagttgtagcagcaaaggtggcagatgagactactaaaccggcaatccaagaagacggcg

SEQ ID NO: 12927 - DNA, 326 bp, Zea mays
atcatcgccgctgcgccgtctcctccgctcccgtcgtccggaaagatggcgtcccacattgttggataccctcgcatgggccccaagagggagctcaagtttgcacttgagtctttctgggatgggaagagcaccgctgaggatctggagaaggttgctaccgacctcagggccagtatctggaagcagatggctgatgctgggatcaagtacatccccagcaacactttctcgtactatgaccaggtccttgacaccactgccatgctcggcgctgtccccgaacgttactcatggactggaggagagattggatttgacaccta

SEQ ID NO: 12928 - DNA, 323 bp, Zea mays
tggtctggtctacgctgttgagttctctcacaggagtggaagagaccttgtcaacatggcaaagaagaggaccaatgtgatccccattattgaggatgccaggcatccggcaaggtaccggatgttggttggcatggttgatgttatcttctctgatgttgcacagccagaccaggctaggatcttagcacttaatgcttcatacttcttgaagaacggtggccactttgtcatttcaatcaaggctaactgcatcgactccaccctgcctgctgaggccgtgtttgcagcggaagtggagaagctcaaggcggatcagttca

SEQ ID NO: 12929 - DNA, 321 bp, Zea mays
tggagactcctgatggccctgtttttgagagtaatgctattgcgcgctatgttgctcgcttgaaggatgacaaccctcttttcgggtcttcccgtattgaacaagcccacgttgagcagtggatggactttgctgcaacagaagttgatcctggtgttggatggtacttgtatccaaggcttgggtacatcccttatgctcacacgactgaggaaacagttattgcttcattgaagagatcccttggtgctctgaacacacatcttgccttgaacacataccttgttggacattctgttactctagctgacattgtattga

SEQ ID NO: 12930 - DNA, 319 bp, Zea mays
caacagcccgccatcagtaagatttacttctgggatgtggcatccgaatgtttatccggatgggcgtgtttgcatttctattcttcatccacctggtgaagatcccagtggttatgagcttgcaagcgaacggtggacaccagtgcacacggttgaaagtatagttctgagcatcatttcaatgctctctagtccgaatgacgagtctccagcaaatattgaagctgccaaggattggagagagaagcgggatgagttcaagaagaaggttaggcaatgtgtccgcaggtctcaggaaatgctgtgaaggaggaacatg

SEQ ID NO: 12931 - DNA, 309 bp, Zea mays
ggacggtgggtggcgatgcaaagaaacacttgagaagtatctgattaagaggaacatcatgggaatatatgatgtggatacacgtgctataacacgaagattatagagaagatggtagtcttattggtgtcttgagtactgatcagtctctgacagacaatgagttgttagaaatggcccaaaagtggaaaattgttggagttgatttgattagtggtgtcacatgtgatgctccatatgaatggtcggacaagactgattcagaatgggagtttaagagggatccgtcaagtgaaacttttcatgtgg

SEQ ID NO: 12932 - DNA, 265 bp, Zea mays
gcagtcaccactcccaagccagtacccacagtcctacgagcagtcgcacgcaagtgtcgagagacagaacggtcgacatggctcgcacgcaatctgccgtagcggtcgccgtggtggccgcggagctactgctaggcgctgcggcgacgacctcggaagccgccatcacctgcaggcaggtgagctcagccatcgcacactgcctctcctacacacgcagaacggggaccggaacctccacgtcctgctgtagcggcatcaggaa

SEQ ID NO: 12933 - DNA, 312 bp, Zea mays
ggccggccggcttgacaaaacagaacgtgttcgaggcagccatcgagacctcatatctggtgctggagtccgccatggccgagctcatgaaccacaggcgcgtcatgaagaagctgcaacggaggtacgggcgtacggagcggagaagaagctggacatgatcagggaggacgacctgagcagcctgccgtacctaaaggcgtccatgaaggaagcgctgcggctgcacccaccggggcccctgctgctgccgcactactccaccgccgactgccagatcgacgggtaccacatccccgccaacacgcgcgt

SEQ ID NO: 12934 - DNA, 306 bp, Zea mays
cccacgcgtccgaaagaagtttgttttgcatacaaacttccctggccactcagatttcaattcatataagaaatgcaactttgttatatacgacgctgaagctgaaggtacatgtcagcctaataatgcctcaaaaaattgcataacacctagtacaacatgggaacaagtcaaggagatcctcggtgactgtggccgagctgcaatccagacacaaggctccatgaacaatccatttggatcaacttttgtatatggttatcagaatatcgctttcgaggtgatgaaaaacggatatattgcaac

SEQ ID NO: 12935 - DNA, 302 bp, Zea mays
cataaaaccagtgcaagcagaagcagcgcaatggcgagcagcaccatggccctctcctccacagccttcgccggcaaggcagtgaacgtgccgtcgtgtctcttcggcgaggcccgcgtgacgatgcgcaagacggcggcgaaggcaaagccggcggcgagctccggcagcccgtggtacggccccgaccgcgtgctctacgtgggcccgctgtccggcgcgcacccgagctacctgacgggccagttcccgggcgactacggctgggataccgcggggctgtcggctgacccggagacgtt

SEQ ID NO: 12936 - DNA, 278 bp, Zea mays
ttctcaacgacgtctgccggcagtgctcctgctcctcctcctccttcccggccgcggcgagcttgggttagtgtctcttctaagcggagacctgtgagaggagccatcatcatggccgctgttgagactgttgtcctcaaggttgctatgtcatgcgagggttgcgccggggcggtcagaagagtgctctccaagatggaaggagttgaaaccttcgacatagacctcaaggagcagaaggtgacagtcaaaggcaatgtcaagcctgaggacgtctt

SEQ ID NO: 12937 - DNA, 300 bp, Zea mays
acctctcgttctctccccctccgcctgctccctctcaggagcgcgcgcgcgcggcccagatctagggtttcgtccgcggcaagatgagcagcccgcatggcggtctcgacgaccagatcgagcggctcatgcagtgcaagccgctcgctgagcctgaggttagagctctttgtgagaaggcaaaggagattctgatggaggaaagcaatgttcagcctgtaaagagtcctgttactatatgcggtgatattcatggacaatttcatgatcttgctgaactcttccgaatcggtggaaagt

SEQ ID NO: 12938 - DNA, 303 bp, Zea mays
aagtcatgcagttttaacggtgactgcattgatggaacctgtcactgctttcctggttttcatggccatgactgcagcagaagatcttgcccagacaagtgcagtaaccatggtacatgcaaagctaatgggatctgtgaatgtcaaagtggatggacagggattgactgctctacagcggtttgcgatgaacaatgtagtttacatggaggggtttgtgataatggtaaatgtgaattccgttgttcagattatgcaggctacacatgtcagaagggttctgcaatactgcccagtctgtca

SEQ ID NO: 12939 - DNA, 306 bp, Zea mays
tctacgcgtccgcggacgcgtggggtaccacctgtgcaactgtgcttacacaggcaattcttactgaaggatgcaaggccgtggcagccggtgtcaacgttatggacttgcggaatgctataaacaacgcaataaatgctatcactgctcacctcaaaagtaaagcgtggaagattaattctccagaagaaattaaccaggtagcaaccatttctgcaaacggtgaaaaggaaattggagatctaatatcaaaagctatggaaaaagttggaaaggatggagtcattactattgttgatggcaaaa

SEQ ID NO: 12940 - DNA, 302 bp, Zea mays
gaaaggttgataagcaatgcgctcatttttttggcgtaacaataagtgaagagcaagctcattctggaatggttgtcagagtgacttcacctgctcaaagtaaatttaagcttctttacttcgagcaagaagttaatggaggttatggacttgctttgcaggaagatagtcaaaagactggcaaggtaacatcagcaggcatgtatttcttgcatttccaggtgtatcgtatggactcaacagcgaatgcgttggcaatggccaaagatcctgaagctgccttctttaaaaggttggaaggt

SEQ ID NO: 12941 - DNA, 296 bp, Zea mays
ggccgcatcgcgatcagtcatctctttccctcccagccttcctcctgcgtctcgctctcgccggaggtcaggcgcaccgccgccgggctatggacgcctcctaccgccgctccgccatcctccgcgccctcacccacgacgttgaggagttctacgcgctgtgcgatccagagaaggagaacctgtgcctgtacggctacgcgaacgaagagtgggaggtagcgctgccggcggaggaggtgcccacggagcttccggagccggcgctcgggatcaacttcgcgcgcgacgggatg

SEQ ID NO: 12942 - DNA, 300 bp, Zea mays
cgaagaagagagaggagaagaggaagaagctggaagatgagcggaggctcaaggaggaagagaagaagaacaaggctgcggctgccagtggaaaacctcagaaggcatctgctgctgacgatgatgacatggatcccactcaatactatgagaataggctcaaggctcttgattcactgaaggccacaggtgtaaacccctatccccataagttcccggttggcatttctgtacccgaatacattgagaagtacaggaccttgagcgagggggagaagcttacagatgtggcagattgtt

SEQ ID NO: 12943 - DNA, 298 bp, Zea mays
caactcgccgtctgccttctgcgcctccatttcggcctctgtcccttgcaagttcaatctcacctccaaccatgggtaaagagaagtcccacatcaacattgtggttattggccacgttgactctggcaagtcgaccaccacaggacacctgatctacaagcttggaggcattgacaagcgtgtgatcgagaggtttgagaaggaggctgctgaaatgaacaagcggtccttcaagtacgcatgggtgctcgacaagctcaaggctgagcgtgagagaggtatcaccattgatatcgc

SEQ ID NO: 12944 - DNA, 289 bp, Zea mays
cccttgcacaccatggccgctgcctcagcttcgcttctccacctcgcgaccccgaccctgactcgctccactcgcctcgccgtccgcctccccagcgcccagctgtcgcgctggccatcgggggcacgcatcgccgccgcgcaccgccgcgggcgtacaaggtgacgatcgagcacggcggcgagtcgcgggtggtggaggtggaggaggacgagacgatcctgtcccgcgcgctggacgagggcctggacgtgccgcacgactgctagctcggcgtgtgcatgacgtg

SEQ ID NO: 12945 - DNA, 299 bp, Zea mays
ctccaattccctcgtagcagcagcaccagtagagtctccttcctctccggcggcgatgtctgggcgcggcaagggcggcaaggggctgggcaagggcggcgccaagcggcaccgcaaggtcgtccgcgacaacatccaagggatcacgaagccggcgatccggaggcttgcgaggaggggcggcgtgaagcgcatctccgggctcatctacgaggagacccgcggcgtgctcaagatcttcctcgagaacgtcatccgcgacgccgtcacctacactgagcacgcccgtcgaaaaaccg

SEQ ID NO: 12946 - DNA, 295 bp, Zea mays
actcgagaactccatttcgatcccatttgaaatcaacccatcctcgtttcctccgtctagcagcctctcaccctcatggccaagatcaagatcgggatcaatgggtttggcaggatcggaaggctggtggccagggtggccctgcagagcgacgacgtcgagctcgtcgccgtgaacgaccccttcatcagcaccgattacatgacctacatgttcaagtatgacactgtgcacggacagtggaagcaccatgaggtcaaggtgaaggactccaagacccttctctttggtgaga

SEQ ID NO: 12947 - DNA, 298 bp, Zea mays
gcgtcgcgtcgcatcctacgatccaaagctctctctgctcgcagccatggcgaagaactacccgaccgtgagcgccgagtacagcgaggctgtggagaaggccaggcgcaactccgagccctcatcgccgagaagagctgcgccccgctcatgctccgcctcgcgtggcactccgcggggacgttcgacgtgtcgtcgaggaccggcggtccattcggcacgatgaagcatcagtcggaattggctcacggcgctaacgcggggctggacatcgcggtgcggctgctcgagcccatca

SEQ ID NO: 12948 - DNA, 301 bp, Zea mays
cgcgacgcagcgccgaagcaccaaggatggagcccgagattcagagcctgtgtccgagtacgacggccgtgctcctcctgctggccgcctgtctcgccgccgcggtggcagcgctcgacgctgcggactacgccaggccgccgctgcctgcaggcggaggcggccggcgcgtcctgttcgccaacgggctcgggctgacgccgcagatggggtggaacagctggaaccatttccagtgcgacatcaacgaggcggtcgtccggagcaccgctgatgcgctcgtcgccaccggacttgcaaa

SEQ ID NO: 12949 - DNA, 316 bp, Zea mays
ggcgaccctccctccttcgctccttccgcgccgcctcccggccgtcgccgccatggtgaagtactcgcaggagccgggcaaccctaccaagtctgctaaggccatgggcagggatctgagggtccacttcaagaacacaagggagacagcctttgcgcttcgcaagttgtctttgaccaaggctaagcgataccttgaggatgttattgctcacaagcaggcaattcccttccggagatactgtgggggtgttggtcgcaccgcgcaagctaagtcgcgccactccaatgggcagggccgctggcccgttaaatca

SEQ ID NO: 12950 - DNA, 315 bp, Zea mays
aaaaaagcagccgcaatggcgagcagcaccatggccctctcctccacggccttcgccggcaaggccgtgaacgtgccgtcgtcgtccgcattcagcgaggcccgcgtgacgatgcgcaagacggcggcgaaggccaagccagcggcagcgtccgggagcccgtggtacggccccgaccgcgtgctgtacatgggcacactgtccggcgagccaccgagctacctgacgggcgagttcccgggcgaatacggctgggacaccgcggggctgtcggcggaaccggagacgttcgccaagaaccgggagctggaggtg

SEQ ID NO: 12951 - DNA, 317 bp, Zea mays
caaggaggttctttactgtgcaaagaaagctggtgtgacacacatattgaaagctggaggagctcaggcaatctcagcaatggcatggggaactgcatcgtgcccaaaggctgagaagatttttggacctggtaaccagtatgtaacagctgccaaaatgattcttcagaacagtgaagctatggtatctatagacatgcctgctggcccttctgaagttttagtcattgctgataaatacgcgaacccagttcatgttgctgctgatctgctatcccaggcagaacatggtccagatagtcaggttgttctagttg

SEQ ID NO: 12952 - DNA, 314 bp, Zea mays
cccacgcgtccggtgcaattgaacgcctggagcttgtttcgtcaactccttttgtgcggatttcatacacaaaggctgtggagctcttgaaaaatgttaccgacaagaagtttgacaacaaagttgaatggggaattgatttagcctctgagcatgaaaggtatttaacagaggatatatttaagaagccagttattgtctataactatccgaaaggaataaaggcattttatatgagactcaatgatgatgacaagacggtggctgcaatggatgttcttgtgcctaaggtgttggtgaattgattggtggaa

SEQ ID NO: 12953 - DNA, 314 bp, Zea mays
ccatgggctaactctgaatggagatcattgaaggtccaatgggacgagccttctgctattctgcgtccagatagagtttcaccatgggaagtagaaccccttgatcgaactaatccacagccacctcaacctcctttacggaataagcgagcacggcctcctgcttcaccttcgattgctccagaacttgctccagtttttggtttttggaagtccccagctgagcctgcccaagctttctcattctcaggactgcagcgaactcaggagctataccattcaagccccagttcaatgttctcatcgtcgttgaa

SEQ ID NO: 12954 - DNA, 114 bp, Zea mays
cggacgcgtgggcggacgcgtgggtcaggctaaggcagacaaaagtcctgtcacagtggctgattatggatctcaaatattggtcggtttttccttaaagatgtatgtatcatc

SEQ ID NO: 12955 - DNA, 313 bp, Zea mays
cgcgctcctcgactcccacctcgtcccatccgccggcgggccgagtccaaggtcttctacctcaagatgaagggtgactaccacaggtaccttgctgagttcaagtcaggtgcagagaggaaggatgctgcggagagcaccatgaatgcctacaaagctgctcaggatattgctcttgctgatctggctccaacccaccccatcaggctcgggcttgctctcaacttctcagtgttctactacgagatcctcaactcccctgaccgtgcttgcaaccttgcaaagcaggcctttgatgaggcaatctccgagc

SEQ ID NO: 12956 - DNA, 311 bp, Zea mays
gtccgccgcacgcaccgccggaaccctagcctcagccgccacaggcagccgggatggagaaaggagcctcggaggcgtcggccccctgcgctcgctgcggcaagcccgcgcagtccaatgccccaaatgtgctgaacttaagctaccgcgtgagaacgcagctttctgcacacaggactgttttagggcagcatggagctctcacaaatctgttcacccaaagcctggtgcactggcatcccagcagtctccggaaggttggaaatattgtttgagaaaagggcggggacgtgcattgcaacttcctcgtt

SEQ ID NO: 12957 - DNA, 310 bp, Zea mays
accctctctctcgtggttctcccgtgctctgtgtccctagcggcgacgactgggcgatcgccgccgccttaagccaggtgctcaggtctgccacttggcacttcgccggcgacgagcacctaacagagagatggctggtggttttcgagtactgcatcttgtgaggccatttctggctttcttgccagaagtacagagtgctgataggaaaataccattcagagagaaagtgatctacacggtcatttctctcttcatttttctggtctgcagccagctcccactctatggcattcattcaactactggc

SEQ ID NO: 12958 - DNA, 304 bp, Zea mays
gtgcagctgtcgggagcaggcaatggcgccggatctaagcgaactcgccgccgccgctccagcccgtggcgcctacctcgccggcgtcggtgtcgcggtcctcctcgctgcctccttcctcccagtagccgagtcgtcctgcgtgcgagataactcattggtgagagacataagccaaatgccgcaaagcagctatgggattgaaggattgtcacatataacagttgctggtgcgctcaatcatgggatgaaggaggtggaagtgtggcttcagacaataagtccaggtcaaaggacgccaatc

SEQ ID NO: 12959 - DNA, 305 bp, Zea mays
cttcattagctcatccaatctattccgatgacgaccgtgcccacgccacagcaggtggcgcactcacgggctcggctcgcaccccgcgcgatcggcgccttgctggagtttgccccagcctcctcctccctccgcttcgccgtgcaccgctgccgcactgctcgcctagaggtgaaggcatctggaaacacgtttggaaactactttcaggttgcaacctatggtgaatctcatgggggtggtgttggttgtgttatcagtggttgccacctagaattcactcactgaggcagactacaagttga

SEQ ID NO: 12960 - DNA, 311 bp, Zea mays
gtcgagagtgagctcatggacatgtactccaaatgcgggttgatggaggatgcgctcagggtgttccgctccggccaggatcctgacgaagtttccttgacggtgattcttgctgggtttgctcagaacggactggaggaggaggcgttcaggttgttcgctgagatggtcgggaaaggaatcagcgtcgacgcaaacatggtttctgcagtcctgggtgccttcggtgcttcggcgccgtttgctcttgggaaacagatccacgcgctggccgtcaagagatgcttcggagggaacacctacgtctgcaa

SEQ ID NO: 12961 - DNA, 313 bp, Zea mays
gcttcccagagacccagccatggcgatctcccagatctcacgcatattcctggccatccttctcctggccgccgccttcgccgccgccccagctgcgcttgcggacggcgacgacgtggtggcccttaccgaatccacgttcgagaaggaggtcggaaaggaccgcggcgccctcgtcgagttctacgccccctggtgtggtcactgcaagaagcttgctcctgagtatgaaagacttggtgcaagttttaagaaagctagatctgtcttgattgctaaggttgattgtgatgagcacaagagtttgtgcagc

SEQ ID NO: 12962 - DNA, 311 bp, Zea mays
cccacgcgtccgctccctctccctctatgatatcgccgggacccccggcgtcgcggccgacgtgtcccacatcaactcccccgccctggtgaaggggttcatgggggacgaccagctcggggaggcgctcgagggctccgacgtcgtcatcatccccgccggggtgcccatgaagcccggcatgactagggacgacctcttcaacatcaacgccggcatcgttaaggggctctgcactgccatcgccaagcactgccccaacgctcttgtcaatatgatcagcaaccctgttaactccactgtcccgattg

SEQ ID NO: 12963 - DNA, 317 bp, Zea mays
caccagcgctcgtcacctccaatcaacaaattcccaatccgccgcttcccatcccgcgttcgccgctccatttgatcgaattcccgatggcgcccaaggccgagaagaagcccgcggagaagaagccgacggaggagaaggccgagaagaagcccagggcggagaagcgcgtgccgggcaaggagggcggcgagaagaaggggaagaagaaggccaagaagagcgtcgagacgtacaagatctacatcttcaaggtgctcaagcaggtgcacccggacattggtatctcgtccaaggccatgtccatcatgaactcc

SEQ ID NO: 12964 - DNA, 314 bp, Zea mays
atgttgatggtttctggttttgaaaaatattatcagattgcaaggtgcttccgagatgaagatctgcgtgcggacaggcaaccagagtttacacaacttgatatggaggttgcttttacatctatggaggatatgttgaagttgaatgaagatttaatgagacatgtttttcaagcggtaggagatatcaagctgccaaacccttttccaaggttaacatatgcagaggcaatggatcgctatgggacagataggcctgatctccggttcgattgggagctgaaagatgttagtgatgtatttttggggagtag

SEQ ID NO: 12965 - DNA, 317 bp, Zea mays
cgccattcctaagtcctaactacctccacccccgcacgcacaactggccgcaccaaggcaaagctagaagaagacaacgcaaagggagaggacagaggaggagcagaggacgatgggcagcggcggcgctaacactgcccccctcatcaccccctacaagatgggaaaattcgatgtttcccacagggtagtcctcgcaccactgacgagacagcggtcctacggcaacgttcctcagcctcatgccatactgtactatcagcagagggcgactaaaggaggtcttctgatagctgaggccacgggggtttcagaca

SEQ ID NO: 12966 - DNA, 302 bp, Zea mays
cggacggtggtccatcatcccctttgcaagtatagtctctctgctaagcgaaggcagcttccaagctagtctcggcggctctagaagacgatgggcacggacgacgtgatcgagagcggcgctggcggcggcgaagttcgctgccaaggactacacggaccctcccccggcgccgctgatcgacgcggcggagctagggtcctggtcgctgtaccgcgccgtgatcgccgagttcatcgccacgctgctgttcctgtacatcacggtggccaccgtgatcgggtacaagcaccagacggacg

SEQ ID NO: 12967 - DNA, 310 bp, Zea mays
cggacgcgtgggcagaagccgccgaggggaggcgccgacgccgagtttttgctccatcccgcatccaccgccagaatgtttctcacgaggacggagtacgaccgcggggtgaacaccttctcgccggaggggcggctgttccaggtcgagtacgccatcgaggccatcaagttgggatccactgcgatcgggttgaaaacaaaggatggtgttgtccttgctgttgagaaacgtgtgacctcgccactgctggaaccaagcagtgtggaaaaaatcatggaaattgatgagcacataggctgtgccatga

SEQ ID NO: 12968 - DNA, 309 bp, Zea mays
ccaaagaattccctcccctagccgccgccgccgccgctcgtctccctgagaggtgccgggaccgaggaactggccgagtactaggtagagaatcggtttttcttgtctcagcccggggtctgctgcgtctggtggtggtgaaggggagaaattcgtgagatctgttccggatcaggcgtgcgagctcgggaatcaggggtttcacacatagcttcgtcgatttgaatttgatgtactaatggagtctaagggtggcaaaaagtctagcagtagtcgttctatgatgtatgaagctccccttggctacag

SEQ ID NO: 12969 - DNA, 308 bp, Zea mays
gcaaatcctgcagacaccaccgctcgtttttctctccgggacatgagaaaaggggagagagagaggtgaggcgcggtgtccgcccgatgtgctctgccccgacgcagctgttacgtcctcctcagtctcagtcaggagcaagatgggtgccggcggcaggatgaccgacacttagcgggagatacaggagcagctcgcccgagctaccggtggcgccgcgatgcagcggtcgccggtggagaagcctccgttcactctgggtcagatcaagaaggccatcccgccacactgcttcgagcgctcggtgc

SEQ ID NO: 12970 - DNA, 309 bp, Zea mays
cccacacgtccgcttggcattgcaccctaatgtcaaaggtgtatctggtaaatacttcgctgattgcaatgaagcaacaccgactgctgtcgcgagatactcagagctggcgaagaggctatggtcgttcagcgaagaacttgtcaagatctatgctgatatgtcacagacgacacaggcaagcgaagaagaggaaaccacggttacgaaagacgttttccaagacaagtagcgtaatatatgttgctgcgttttctacgttttgtacctgtcctctgggcccgaatggccagtgactgtaatagcacc

SEQ ID NO: 12971 - DNA, 309 bp, Zea mays
ctctagggtttttgattttagccgccgccgctgctcatctcacatccctcgagaagacgcctgctcctcgccgatcgatacgatggccgtcttctccgacctccacaccgccgacggcctcaagtccctcgaggctcacctcgccggcaaaacctatgtgtctggtgactccattactaaggatgacattaaggtcttcgccgcggtgccgtcgaagcctggcgctgagtttcctaatgccgcccgctggtacgagaccgtctctgcggctgtagcctcaagattccctggtaaggctgttggtgtaaa

SEQ ID NO: 12972 - DNA, 309 bp, Zea mays
ggtgcagacagacaggaagtctggtgggcttggcgatcttaaatacccacttatttctgatgtcaccaaatcaatttcaaaggccttcggtgttctgatccctgaccagggtatcgctctgagaggactgttcatcattgacaaggagggagtgattcagcactctaccattaataaccttgccattggtcgcagtgtggacgagaccatgaggacccttcaggcattgcagtacgtccaggagaacccagacgaggtctgcccggccggttggaagccaggggagaggtccatgaagcccgaccccaa

SEQ ID NO: 12973 - DNA, 304 bp, Zea mays
ctcctcactctcgccgccgccgcttcccctgcgccccgagccaagatgaatgttgaaaagctcaagaagatggcaggtgctgtgcgcactgtggggaagggtagcatgcgcaggaagaagaaggcagtccacaagactacgaccacagatgataagaggcttcagagcaccctgaaaagaataggagtgaacaccattcctggtattgaagaggtcaacatctttaaggatgatgttgttattcagtttgtgaatcctaaagtgcaagcttcaattggtgctaatacatgggtggtcagtggaa

SEQ ID NO: 12974 - DNA, 303 bp, Zea mays
cgccgctgcgccgtctcctccgctcccgtcgtccggaaagatggcgtcccacattgttggataccctcgcatgggccccaagagggagctcaagtttgcacttgagtctttctgggatgggaagagcaccgctgaggatctggagaaggttgctaccgacctcagggccagtatctggaagcagatggctgatgctgggatcaagtacatccccagcaacactttctcgtactatgaccaggtccttgacaccactgccatgctcggcgctgtccccgaacgttactcatggactggaggaga

SEQ ID NO: 12975 - DNA, 304 bp, Zea mays
ccttcttcaaggcgcacggcatcgaccagcgcatctggaacaccggctccatcaacacccagatcggctggctccaggacatgaagccgtccctctgtaaatcggagcaagactgcaaggattacttcagcaaatccctgttcgtcgtcggggagttcgggggcaacgactacaacgcgccgctcttctccggcgtcccattttctgatgtcaagacttacgtgccccttgttgcaaaggctatcgccaatggcgttgagaaactgatcgagcttggggcaacagacctcctggtgcctggcgt

SEQ ID NO: 12976 - DNA, 300 bp, Zea mays
atgggacatggatgagacactcattttgctcaagtcacttctggatggctcatatgctggggcttttgatggcctcaaggatcatgagaaaagtactgaaataggaaagcgatgggagaacctcattcttgaactctgtgatgagcacttcttttatgaggagattgagaactacaatgaaccctatctcaatgccttgaatgaatatgacgatgggagagacttgacctcatatgattttgaggctgactgttttagttcaccatatgatgatgcgaacaaaaagaagcttgcttacag

SEQ ID NO: 12977 - DNA, 302 bp, Zea mays
ggaggtcgccaagtacaaggtgggggctcctgctcgtgttggtctggttgctccagttgatgttgttgtgccccctggcaacactgggctggatccgtcccagacctctttcttccaggtgcttaacatccccaccaagattaacaagggtaccgtggaaattatcacccctgtggagctgatcaagaagggtgaaaaggtgggctcgtccgagtctgccctgctcgccaagctgggtatccgccccttctcgtacggcctccaggtcaccagtgtctacgaggatgggtccgtgttcagcc

SEQ ID NO: 12978 - DNA, 312 bp, Zea mays
ggctatgcctagatcgtcaagattatgtccgagcacaaattttatcaaggaaaatcagtactagagtatttgacgcagatccatcaaaggaaaaaaagaaaccaaaggagggtgacaacattgttcaggatgctcctgcagatattccttccctcctagaattgaagcgtatctactatgaactgatgattcgatattacttgcacaacaatgattacctggaaatctgtcgttgttacaaggctatttatgatatcccagcaataaaggaagatccaaccaagtggataccgattcttaggaagatctgtt

SEQ ID NO: 12979 - DNA, 315 bp, Zea mays
cgggcgaccagggccacatgttcgggtacgccaccgacgagacccccgagctgatgccgctgagccacgtgctggccaccaagctgggcgcgcgcctcaccgaggtgcgcaagaacggcacctgcgcctggctgaggcccgacggcaagacccaggtgacggtggagtacgtgaacgagggcggcgccatggtgcccgtccgcgtgcacaccgtgctcatctccacccagcacgacgagaccgtcaccaacgacgagatcgccgccgacctcaaggagcacgtcatcaagcccgtgatccctgagaagtacctcg

SEQ ID NO: 12980 - DNA, 306 bp, Zea mays
ctccctctccccgcggtccgccagacgcaatttcgccctcgattcgaccccgattcgtccgcccgcgaccgggattccctccgccaagcgcggatctgaacgctgcgctccgtgtcgccgctcgaatccgccatgaagggggccaaatccaagggcgccgccaaggccgatgccaagctggcggtgaagagcaagggggcggagaagcccgccaagggcaggaaagggaaggccggcaaggaccccaacaagcctaagagggctcccagcgctttcttcgtgttcatggaggaatttcgcaaggag

SEQ ID NO: 12981 - DNA, 311 bp, Zea mays
gaagcattatgcacctggtgtgccaattattctcgtagggacaaagcttgatcttcgagacgacaagcagttctttgtggaccatcctggtgctgtccctatcactactgctcatggagaggagctaagaaagcaaataggcgctccatactacatcgaatgcagctcgaagacccaactaaacgtgaagggcgtcttcgatgcggcgataaaggttgtgctgcagccgcctaaggcgaagaagaagaaaaaggtgcagatgggggcgtgctccattttgtgatctaatcatcggtagatgaagaaacaaa

SEQ ID NO: 12982 - DNA, 307 bp, Zea mays
agcgaaccaaagccatggcgtccgacggcagcggcgtggtgacggtgtacggcagcaacggcgcggactgctggagccgtccaagcagcccaagtcggcgactttctccgtcaaggtggggctggcgcagatgctccgtggcggggtcatcatggacgtggtgaccccggagcaggcgcgcctcgcggaggaggccggcgcgtgcgcgtgatggcgctggagcgggtccccgccgacatccgcgcgcagggcggcgtggcgcgcatgtcggacccggggctcatccgcgacatcaagcgcgccgtca

SEQ ID NO: 12983 - DNA, 307 bp, Zea mays
gtctgagccgtgatctcaatgatttgcctcttctgaagactattactgctgttcttggctcatccatatggttcaatgccattgttgcactgacacatgctgcctcagctcctcctgaaggcctcaatggtgctcccatgacatatgaggtcttgatggctcagagatcccacatcatccagcagtccatcaggcaggctgctggagatatgcggttgatgaacccagtagcacttgttgagaaccatccttcgtgcaggaaaaaccgggagggccagaaagtgcttccgaatggccaaagctggag

SEQ ID NO: 12984 - DNA, 308 bp, Zea mays
cagaagtcagatcagaagccgccgaggggaggcgccgacgccgagtttttgctccatcccgcatccaccgccagaatgtttctcacgaggacggagtacgaccgcggggttaacaccttctcgccggaggggcggctgttccaggtcgagtacgccatcgaggccatcaagttgggatccactgcgatcgggttgaaaacaaaggatggtgttgtccttgctgttgagaaacgtgtgacctcgccactgctggaaccaagcagtgtggaaaaaatcatggaaattgatgagcacataggctgtgccat

SEQ ID NO: 12985 - DNA, 309 bp, Zea mays
ctgccccgcacaacgaacacgaaccttggcagaacgaagctgaagtagttcgttgtgaacccagtatggcaaacgcgccgaggatcctggccctcggcctgctgctagcgctcctgtgcgctgccgccggcccggccgccgcgcagaactgcggctgccagcctaacttctgctgcagcaagttcggctactgcggcacgaccgacgactactgcggcgacgggtgccagtcgggcccgtgccgctcggatagcggcggcggcggcggcggaggcggaggcagtggcggtgcgaacgccgctaacgtgg

SEQ ID NO: 12986 - DNA, 309 bp, Zea mays
aagaagacgagtgtcaagtgaacctgaaacttgcggtgtcactggctggtatagcctgagtgtgagtgagtgatcgagctagctgagctccgatcctcgctagctagctaggataccgccataccacaagtcttcttcacaagtttaggagtgacagcaacaagagatctcgatggcctctgccaccgtgctcaagtcctccttccttcccaagaagtccgaatggggcgccaccaggcaggccgccgcgcccaggccgcccaccgtctccatggtcgtccgcgcctccgcctacgccgatgagctcgt

SEQ ID NO: 12987 - DNA, 308 bp, Zea mays
ctgccgttcgtccagatgggcggggccatgccgccccagccgtgctgcggcggcatccgcagcctgctgcagcagccaacaacacccccgaccgccgcaccatctgcggctgcctcaagaacgtcgccaacgggccaacgggagcggcacctacatcagccgcgccgccgagctgcccagcaagtgcggcgtcgccctgccgtacaagatcagcaccaacgttaactgcaacacgattaattaagtgaggcgtcctgtgcgcgtcccgggcgaggaatgcatgcatggcgctggcggagagtaataaa

SEQ ID NO: 12988 - DNA, 305 bp, Zea mays
gtcgcgcgccaaggtcgactcctccaccagcgcgcgtggcggcggccgggaaaccaaaccatctactgatgatgcttgccaggaccaatcagtaccaccagcctctggttccgcaacaaccagtaacactggaagtatctcaccttcttccatagttggagaggagctaaaactagctttccaactgcgtagatttacttttagtgaactgaaatgtgccacgagaaacttccgacctgagagtcttcttggcgagggaggttttggctgtgtctttaaaggatggattgaggagaatggaactg

SEQ ID NO: 12989 - DNA, 303 bp, Zea mays
ggagaatgaagcaacatgagaaggttcttgaggaaggtgtcctcaacccagaatcaactgttgttgcgatcttcccctctcctatgcattatgctgggccaactgaggttcaatggcatgctaaggctcgtattaatgctggtgcaaatttctatatcgttggaagggatcctgctggtatgagccaccccacagagaaaagggacctctatgatgctgatcacggaaagaaggttttgagcatggctcctggccttgagaggctcaacatccttcctttcaaggtggctgcgtatgacacaa

SEQ ID NO: 12990 - DNA, 303 bp, Zea mays
atgatgctgagaaatcatcattgattgaagtcccatgtgatactctagctgttggggactatgttgttgtgctacctggggatcacatcccagcagacggtattgtgaaagctggaaggagtacagttgatgaatcaagtttgacaggtgaacctatgcctgtaacaaagataacaggggcagaagtatcagcaggaagtattaacttgaatggtaaactcactgttgaagttagaagacctggtggtgagactgtcatgtctgacatacttcacttagttgaagaagcccagacaagggcgg

SEQ ID NO: 12991 - DNA, 303 bp, Zea mays
ggcaaacgttatatgttccctcatgccaaagctatgattcagcaaccacgtattccttcttatgggatgatgcaagcatcagatgttgttattcgtgcaaaggaggttgtgcacaacaggaacacattggtcaaacttttagcaaggcatactggaaatccaccagagaaaatagacaaggtaatgagaggaccattttacatggactccttgaaggcaaaggagtttggagtcattgacaagatcctttggcgcggtcaggagaagtacatggctgacatgctctccccagatgagtgggac

SEQ ID NO: 12992 - DNA, 300 bp, Zea mays
agcgaacgagcagcagcaccaccactgcgcggcattgcagcgagcaagcgggagggatctggggcatggtggcggtcgctgccgctgccgctcggatctagagggccgcacgggctgattgccctccgccggcctcgtcggtgtcggtggagtgtgaatcggtgtgtgtaggaggagcgcggagatggcggccaacaaggggactcgtgcaggctctcacaaccgcaacgagttcgtcatgatccgccacgacggcgacgcgcctgtcccggctaagcccacgaagagtgcgaatgggca

SEQ ID NO: 12993 - DNA, 299 bp, Zea mays
aaaacccaagcccctgcgaccccgagataccaaagccagcagaagaagggatgcagcagccgatgcacatgcagccgcacgccggcgataccccagctgccggaatcaccacggagcagatccaaaagtatctggatgagaataagcagcttattttggctattttggaaaatcagaacctaggaaaattggcagaatgtgctcagtatcaatcacaacttcagaagaacctcttgtatctcgctgcaatcgcagatgcccaaccggagactgctgtaagccgcactcagatggcgccg

SEQ ID NO: 12994 - DNA, 304 bp, Zea mays
atagcttctgtccgcacccaatcacctaaaatggaaatgattgactcattgtttaagccacgggaagctgaagatgatggtctgatccgggagtgtctgattgacttctacaccagttctgggaagagaaagcctgaccaagttatcatattcagggacggtgttagcgaaagtcagtttaatcaggtgctgaacattgagttgcaacaaatcatcgaggcttgcaaatttcttgatgagaaatggaatcccaagttcacgttgattattgcccagaagaatcatcacactaaatttttcattc

SEQ ID NO: 12995 - DNA, 307 bp, Zea mays
gccaaagaattccctcccctagccgccgccgccgctcgtctccctgagaggtgccgggaccgaggaactggccgagttctaggtagagaatcggttttgcttgtctcagcacggggtctgctgcgtctggtggtggtgaaggggagaaattcgtgagatctgttccggatcaggcgtgcgagctcgggaatcaggggtttcacacatagcttcgtcgatttgaatttgatgtactaatggagtctaagggtggcaaaaagtctagcagtagtcgttccatgatgtatgaagctccccttggctacag

SEQ ID NO: 12996 - DNA, 292 bp, Zea mays
  unsure (1)..(292): unsure at all n locations
gagcggcggcgcgggcggacaaggagcaggcggaggaggagctgtgccaagccacaatgggtatctcacgcgactcgatgcacaagcgccgtgccaccggtggaaagcagaaggcctggaggaagaagcganagtatgagcttggtcgccagccggccaacaccaagttgtcaagcaataagacagtgaggagggtccgtgttcgtggaggtaacgtgaagtggagggctcttcgccttgatactggtaactactcatggggaagtgaagctgttacccgcaagacccgtat

SEQ ID NO: 12997 - DNA, 291 bp, Zea mays
ggaggttactccaaaaacattggctgatgttaaaggcggtactctcatctcttacgaaggaagagttcagcttttggagattgcccaagtacctgatgagcatgtgaatgagtttaaatcaatcgagaagtttaagatattcaacactaacaacttgtgggtgaaccttaaagctgtcaagagactagtagaggctgaggcacttaagatggaaattattccaaaccccaaggaagttgatggtgtgaaagtccttcaacttgaaactgcagctggtgcagctattcgttt

SEQ ID NO: 12998 - DNA, 286 bp, Zea mays
catcacacacaagacacaaccccactcacccggcaggtaggccctcttcgtcggcggaggccatggtttccctcaagccgcagaagaggctcgccgcgggagtcctaaaatgtggcaagggtgaagtgtggcttgaccccaacgaggtctacgagatctcgatggctaactcgcgtcagaacattcgtaagctggtgaaggatggattcataattaagaagccacagaaaatccactcaaggtcccgggcaaggagggcccatgaggccaagcagaaggggaggca

SEQ ID NO: 12999 - DNA, 287 bp, Zea mays
gtctatgcttaaggatgctcttcgtgagaaatcagatgtcttcaattctgaaaattcagaggaggacaaggtaaagcttggagaaccaggatggagggataggtactatgaagagaagtttggggcaaggacacctgaacggatggaagaaatacggagggatgttgctctcaaatatactgaaggattgtgttgggttatgcactactactatgaaggggtgtgctcatggcaatggttttatccttatcattatgctccttttgcttcggatttaacgagtctga

SEQ ID NO: 13000 - DNA, 288 bp, Zea mays
ggttcactctaggtcccgtgcaagaagggcacatgaggccaagcagaaggcaaggcactctggatacggcaagcgcaggggtaccagggaggttaggctccccaccaagattctgtggatgaggaggatgcgtgttctgaggcgcctgctccgcaagtaccgtgtagccaagaagatcgacaagcacatgtatcatgacatgtacatgaaggtcaagggtaatatgtttaagaacaagagggtgcttatggagagtatccacaagtccaaggctgagaaggccagaga

SEQ ID NO: 13001 - DNA, 286 bp, Zea mays
gggcaggaagaccgaagaccgagccgtgcggtggctcgtgacgggaacgggacaggacctcaaaatctcagatccttcctgcccgcccgcccgtgcccgtcgacgcgtcgttcttgccggccgcgccccacctccgccctctcctcctccagggggatcggatacgccacaggctgcgcgatggtgctgtgggtcttcggctacggctccctcatctggaaccccggcttcgacttcgacgacaaaatcctcggcttcatcaagggctacaagcgcacctttaatc

SEQ ID NO: 13002 - DNA, 286 bp, Zea mays
cttaggtgagaggttggcaagctgtctcagaatggagccggtggagcctcagcagcaagtggagctcaaccgcctgaatgccagctccaggccaggcaccaatggcgggagtgcaagaacagagagagaagaggaagtagacgactgccccatcgaggaggtccggctgacggtgccgatcaccgactacccggcattgcccgctctcacgttccggacatggttcctggggctcctctcctgcgcgctgctggccttctccaaccagttcttcggctaccgccag

SEQ ID NO: 13003 - DNA, 285 bp, Zea mays
caagcaccgtgagctccgtggcctcacctcagcaggcaagaagtaccgtggtctgcgtggcaagggccacacccaccacaagaacaggccctcaaggagagccacctggaagcgcaaccagaccctctccctccgccgctaccgctgagcagctcgtcgggtgcttggatactgccactgtccgatcattcccaatcaagacaacaagcgtgcctgtctctggttgcattttcaaagttttgctatttgtgttcttggcacttttaatgttagaagtcaattatg

SEQ ID NO: 13004 - DNA, 277 bp, Zea mays
gttctagatcgcgatctgccgcccttttttttttttttttttgcctcttgtaattgtgctgctatgttgtaagtcatgtcaagaatgagtattggtaagcattcaagagttcactcaaaacttcaatcgatacaaaacctaataactcagtatattagatgcagacagacttgaactgctacatctgacagggcaccacgtcaggactcgaaattacagcctccttcctcttctaccaccctttctgcgtgtgctgtctgtggggactggagtaaca

SEQ ID NO: 13005 - DNA, 279 bp, Zea mays
cgacaagttcgatgaggtcaggaagaagtggggaggtggcatcatgggatccaagtcgcaggccaagaccaaggcccgggaaaagctgctcgccaaggaggctgcgcagcggatgacctagattgtctactgctgtgtctgccctgtagtttgacggggaagaactgaactcgtattgtggttttccgaatctagtttcatatgtttctgtccaccagaccatgtttagaagctttgcaagacagagtttacagtgtttatgtgatgcctcagatccaa

SEQ ID NO: 13006 - DNA, 279 bp, Zea mays
cccccatctcttcgactcctttctggagcagctagggttccgtcctcgatccgatccgccgagtgcacaccacctttccccactccgatcgaatcgatggccgccgagggcgagaagaagatgataaccctcaaaagctccgatggcgaggagttcgaggtggaagaggcggtggcgatggagtcgcagaccatccgccacatgatcgaggatgactgcgccgacaacggcatccctcttcctaacgtcaactccaagatcctatccaaggtaatcgag

SEQ ID NO: 13007 - DNA, 276 bp, Zea mays
gcccttcttgactttgtctccgcagtctatcatggaaacaagctcaactgggacaaacatacctcagtttgttcatggcatggcgtaaaatgctcagaagatcagtcacaagtttttgaaatgagggtaccggctgctggtcttatcggagtaatttctccaaacactcttggcaagctttattctcttcaagtactgagcctgcggtctaatcgattgaccggaagtcttccagctgatgtggcctcccttccgtctttacgttccatataccta

SEQ ID NO: 13008 - DNA, 274 bp, Zea mays
cccacgcgtccgtgctcagtgcacttgttccggctggtgggcacattgtgaccacacggattgctaccggaaaacaaggatttacatggaaactgagctccccaagaggggaatttcgatgactgtcattaggcctgctgacatggatgctctacaaaatgcgttggacaacaataatgtatctcttttcttcacggagactcccacaaatccatttctcagatgcattgatattgaacatgtatcaaatatgtgccatagcaagggagcgttg

SEQ ID NO: 13009 - DNA, 276 bp, Zea mays
gcggtactcaaaccctcggtccttctcggcggcggcgtacgggatagcatacgttgccatggcggcggtggccacggcgagctctgccagtcggctccttgctatgctgcaggagccggcgccggagctgaagctgcacgcactcgacagtctcaactccgtcgtccacctcttctggcccgatcatctccaccagtgttcacaccatcgagagcttgtatgaagatgaagagtttgagcacaggcagcttgcagcacttgttgtctctaaggtat

SEQ ID NO: 13010 - DNA, 319 bp, Zea mays
ctccctcctcctcgctcgctcgatcgctcccacgtcctcgcctccctccacaaaccaccaccaccatccaggatcgcagcgggcgccgagagaggggtgagcaggtcgggcaagatgagggagatcctgcacatccagggcggccagtgcggcaaccagatcggcgccaagttctgggaggtgatctgcggcgagcactgcgtcgactccacgggccgctactcggggacctcctcgcagcagctcgagctcgagcggatcaacgtctactacaacgaggctgggggtggccgctacgtgccccgcgccgtgctcatgg

SEQ ID NO: 13011 - DNA, 313 bp, Zea mays
caaagctgttgatgggagctatgttttcagcaaagggaagatttacaaggtccctgccactgatatggaggctctgaagtcccctttgatgggtctattcgagaagcgcagagcaaggaacttcttcatttatgtccaagattacaatgaagctgatccaaggacacatcaaggattagaccttactagggtgacaactagagaacttatagcaaaatatggtttaagtgatgatacagtggatttcattggacatgcacttgctcttcatagagatgatcgctatcttgatgaaccggcacttgatacagtg

SEQ ID NO: 13012 - DNA, 291 bp, Zea mays
cgcgtctctttcctattcgcgccgccgccgctgctgcaacgccactcgccgtcgtccgaatagtacactctaacgccgccatggggcgtatgcacagccgcgggaagggtatctcgtcgtcggcgctgccgtacaagaggacgcctcctacctggctgaagaccgccggctccgacgtggaggagatgatcacaaaggcagcgaagaagggacagatgccgtcgcagatcggcgtcctgctccgtgaccagcacggtatcccccttgtccagagtgtcaccggcagcaaaa

SEQ ID NO: 13013 - DNA, 312 bp, Zea mays
cggacgcgtgggtcgctctagtcggaaggtttcgaggaactcccgggctcgaggagatcgggacgatgatgggagggcgcgctctgctgctgctcctggtctcggcgctgctcgttcagatccgcgcctctgacccgctgctgtacgagccgtttgatgaggacttcgagggtagatggatcgtctccaagaaggatgaataccaaggtgtatggaagcatgccaagagtgatgggcatgaggactatggcctccctgttagtgacaaggcaaggaaatacgccataatcaaggagcttgatgagccagtta

SEQ ID NO: 13014 - DNA, 304 bp, Zea mays
cagagggagctccaggagcgcatcgggcgtgcgggcgggcccgaggccacgctggcgcgcgtccggcgcgaggtggtggacttgcacggcgagatggtgctgctgctcaactacagcagcgtcaactacacgggcctcgccaagatcctcaagaagttcgacaagcgcaccggcggcgtgctccgcctccccgtcatcgcgcgggtgctgcggcagcccttcttcaccaccgacctcatctccgagctggtcagggactgcgaggccgcgatggaggccgtcttcccgcccgccgccagcaggg

SEQ ID NO: 13015 - DNA, 313 bp, Zea mays
tggcgaccgaagcgccacttgcttgagtagcgaaccagagatcaatggcgtcgctgtcgtgcgcctccacgctgccctggacccccgcctcctcgccgcagccctcggcggaccgccgcctcacggcctctcgccggactccgtcgctggtcatcgtcgcccactggaaggtgaagaaacaccctcaggtcatattgacagatgacatagaagaggtggggaagaaaggggatacaatgaaggtgcgagctggattctaccgcaactccttgcttcccaagggcaaggctgcgcttctagacccagcagtcca

SEQ ID NO: 13016 - DNA, 311 bp, Zea mays
gaaagaaagaaaaggggcaggaagaaatcgagcctcactcgatccatcgcctcgccgcagcacacacgaggccggcggcgccatggccatgaagctggacatgtccgcgctcgagaccaacttcgccaacctgaccgcctccgccggcgacgacacgtacttctccgccgaggcccccgacgtgccgtccatggtgctccccatctgcgacgacttcgacggcttccaggcggccaccaaggatatggtgaagaataagaaggggacgaccacgcttgccttcatcttcgacaagggcgtcatcgtcgccg

SEQ ID NO: 13017 - DNA, 316 bp, Zea mays
cgccaagaaccgggagctggaggtcatccactcccgctgggccatgctgggcgcgttgggctgcgtgttcccggagctgctcgcccgcaacggcgtcaagttcggcgaggccgtgtggttcaaggccgggtcgcagatcttcagcgagggtgggctggactacctcggcaacccgagcctgatccacgcgcagagcatcctcgccatctgggcctgccaggtcgtgctcatgggcgccatcgaggggtaccgcgtcgccggcggcccgctcggagaggtcgtcgacccgctctaccccggcggcagcttcgacccg

SEQ ID NO: 13018 - DNA, 303 bp, Zea mays
ccgaccggaggagctgccgccggcgatgaagcacgcctaccgagtcatcgttgccgaccctccctatctgaggaaatatcgaggagaaatggctattattcgttggttgatgatgcagagcaaggagtgcttggaaaaggttgccaaaacagtatctttcctcgcacggcctgaaggttcattcctgctgctgctcacaggggaagttcagatggaccgggcgttggagctgctgaatgttcgtccctgcggtttcaggcctcgccactcgaacaaactgggcaacgagtttcggctgttcac

SEQ ID NO: 13019 - DNA, 302 bp, Zea mays
agcgcaacccttccctgacagcggcggcgacatggtgctcgaggcgacgatgatctgcatagacaactcggagtggatgcggaacggcgactacgccccgtcgcggttccaggcgcaggccgatgccgtcaacctcatatgcggtgccaagacccagtcgaacccggagaacacagtaggcgtgatgacgatggccgggaagggcgtccgcgtgcttgtcactcccaccagcgacctcgggaagattctcgcctgtatgcacgggttggaagttggtgctgaggcaaacttggctgcggcaa

SEQ ID NO: 13020 - DNA, 303 bp, Zea mays
atatgatagagggaaaatgtgaggttagaaagaagaacgatcttgcaagttcagaccttccagtgatgtttgaacatgtatttttctgtgaacttatatatgaccgtgccagtggagctctcaagcagttgcctccaaatgttaggtttatgtctatggtgcaaaggacaagtgcgttgaaaaagaacaaaggaaagcagatctgtgagcctgatcaaatagattcaggtaaatggttggatgtgcctaaagagaaccgtctagctactcttgacatttttgctggctgtggaggtttatcag

SEQ ID NO: 13021 - DNA, 160 bp, Zea mays
gggaattgaaggtgattaaatttccttctatacaaatagaggggctttaatcccctccaatactcttcaatccactcctaatcgaacaagcacttaatatgatatcttagattgccgtacctgtgtaatatcatgaataaaatttgctattatggattct

SEQ ID NO: 13022 - DNA, 326 bp, Zea mays
gtgaaggccaagatccaggacaaggagggcattcccccagaccagcagcgtctgatctttgcgggcaagcagctggaggatggccgcactctcgcggactacaacatccagaaggagagcacccttcaccttgttctccgcctcaggggtggtatgcagatctttgtgaagaccctgactggaaaaaccataaccctggaggttgagagctcggacaccatcgacaatgtgaaggcgaagatccaggacaaggagggcatccccccggaccagcagcgtctgatcttcgccggctaacagctggaggatggccgcaccctagcaga

SEQ ID NO: 13023 - DNA, 321 bp, Zea mays
aacaagaccctgagtttcttaagatgaacccccttgggaaggttcctgttctggagactcctgatggccctgtttttgagagtaatgctatcgcacgctatgttgctcgcttgaaggatgacaaccctctttttgggtcttcccgtattgaacaagcccacgttgagcaatggatggattttgccgcaacagaagttgatcctggtgttgcatggtacttgtatccaaggcttgggtacctcccttatgttagcacaactgaggaaacagctatttcttcattgaagaggtcgcttggtgctctgaacacacaccttgctt

SEQ ID NO: 13024 - DNA, 312 bp, Zea mays
gcctccctgccggcgtggcgctgcaacgacgtggtggacaagtgctccgccgactgccaggactgcgaggcgtcgccggccgggaggcttcgtctgcggtgactttatcttaagcctgaccgagcccccggtctgcacaccgaggccgtgggactgctgcgacacgtggcctgcacaagggactacatccccaactgcatgtgcctggacaaggtggagtcgtgctcgagcaactgcgaacggtgcgagtttcagaatcattcggaccctcctcgcttccaatgccgagacatcttccacggctatcctggt

SEQ ID NO: 13025 - DNA, 315 bp, Zea mays
ggaccgtccgcggagcgtggccggacgcgtgggcggacgcgtgggcggacgcgtgggcggacgcgtgggttccggaacagcaggaccgcttaaagaagcttaaatcacagcatgggaaagttcagcttggacacataactgtggatatggtccttggtggaatgagagggatcattggaatgctttgggagacatccctagtcgacccagaggagggtattcgttttaggggcctctcaattccagagtgccgaaaagtgctgccaacagcagttgagggtggtgaacctttgcctgagggtctcctctggcttc

SEQ ID NO: 13026 - DNA, 319 bp, Zea mays
cccacgcgtccgaaaagcaaagatgctgctggtcaagttcgtggttcccctaatgaatttccagggattggtgctacatctcctcttctttggttagctagagggtttgtgattctgtctggtccgacaatcccaattatcggtgaaggcgatgaagaggccaatgacagatatgtggaacaactagtaacaagtgcagaggctgcagttgaggaagttgtcaaaagaggggtggctcaccctgataaaattgctgtcggtggtcattcatatggtgcattcatgacagctaatctgctggctcacgctcctcatcttt

SEQ ID NO: 13027 - DNA, 324 bp, Zea mays
ccgcaacatgacaactgtattgacaagggaatacttggatgtgaggccggatggatggttggattatgcagctaaaaggatcgcacagcttggtgctgataaatgttacaaccacactctctgtgatgaacttcttagcattttactgcctgctaaaccccctttccatccacgccagttcgcgacatgtgcagttgttggtaactcaggagatctcttgaaaacagagtttggacaagagattgatgcgcatgacgccgtgtttcgggacaatgaggcacctgtcaataagaaatatgcaaaacatgttggattgaaaagaga

SEQ ID NO: 13028 - DNA, 317 bp, Zea mays
gcaagcactccacactgctgtgcagaacgagagccacaccatcagtagttagagcgaccaatagatgagttcctccccgtcctttggtctcctggctgtagcagcattactcctagcactgagcttagcacaacatggctccctcgccgcaaccgtcggccccagggtcatcgtcgtcggcgccggcatgtctgggatctcggcggcgaagaggctgtcggaggccgggataaccgacctgctgattctggaagcgacggaccacatcggcgggcggatgcacaagacgaacttcgccggcatcaacgtcgagttag

SEQ ID NO: 13029 - DNA, 316 bp, Zea mays
caagacgtcgtcgggcaggcacacgacggccgccctcctcgacagcggcaacctcgtgatccgcgactccagcagcggcagcaacaaggtcgtgtggcagagcttccgctcgccgaccgacaccctgctccccgggcaggagctgaccaaggacacgaggttagtctccggctaccaccacctctacttcgacaacgacaacgtcctgaggatgctctacgacggcccggagatcaccagcatctactggccgagccccgactacaacgccctcaagaacggccgcaacaggttcaacagcaccagggtagcggtc

SEQ ID NO: 13030 - DNA, 314 bp, Zea mays
ccaagtcatgctgacattgatgagaggacagatatatggtctttgggatgcactttgtatgctatgatgtatggaaagtctccatttgattatgagcttgatgagtcttctggtgaaagcttgcacagtgttattaaaaatgtacagattaaatggcctgaagaagcgggatctacataccctgattccctccgccagtttataacttggatgctgcagccacatcccgcagttcgtcctcatattgatgatatcataattcatgttgataaacttgtcatgaagtactctaattaaccgctacaccaagccgc

SEQ ID NO: 13031 - DNA, 313 bp, Zea mays
cggtaacccgtcgccgccctacggctcagatcttcgtcgtcatcttctccggcaacgagcacccaaagatggtggtccttcaaccagatcggttcctgagcgagctgacgagcatgtacgagcggacacggagaagggctccgtctgggtcaccatgaagcgatcaactctcaagggcaaggcacagttgcggaagatggagaataaggggcaggaggtagagcacaggtgcctcgtccgcgcctccaatggcaagaagaacatctccacctcggtttctctaaaggagtacacaaagtttcaagcttcatac

SEQ ID NO: 13032 - DNA, 96 bp, Zea mays
ggcaccaacaccgccttctatctctccaacaacgaggcgcaccctggtttccacgacgagatcgacatggagttcctggtcaccatcccgggggag

SEQ ID NO: 13033 - DNA, 313 bp, Zea mays
cttatcctctcgactttacagtacctgctctcagctcctccctatctcaatggcatccgcgaatgccatctccaccgcctccctcctccggcccctctctcagggcagggcgacgaggtcacagcggttcgtggtgcgtgcgaacgccaaagacattgcctttgaccagaaatccagggcagcgctgcaggccggcgtcgagaagctggcaaacgccgtcggtgtcaccctcgggccacgagggaggaatgtggtgctcgatgagtacggcaaccccaaagttgtgaatgatggagtcactattgcccgtgct

SEQ ID NO: 13034 - DNA, 311 bp, Zea mays
cgttcccaagccagccattggttggtagcaagccaagctaatcaagttagctttagataccctctcccgctcttcttccctccgacgaaggcagctgacgacacagcaggctagcttcggagttcggagcactcagccatggccattgccggcgctctcctcctcctgctcggactcctcgcgcgggaggccgctgccggcgggtggcagagcgcgcacgccacgttctacggcggcggggacgcgtccggcacaatgggcggcgcttgcgggtacggcaacctgtacagcacggggtacggcacgagcac

SEQ ID NO: 13035 - DNA, 308 bp, Zea mays
gttgaaaagctcaagaagatggcaggtgctgtgcgcactggggggaagggtagcatgcgcaggaagaagaaggcagtccacaagactacgaccacagatgataagaggcttcagagcaccctgaaaagaataggagtgaacaccattcctggtattgaagaggtcaacatctttaaggatgatgttgttattcagtttgtgaatcctaaagtgcaagcttcaattggtgctaatacatgggtggtcagtggaactccacagacaaagaagctgcaagatctgcttccgtccattatcaaccagctcgg

SEQ ID NO: 13036 - DNA, 309 bp, Zea mays
accaaatccaagcgcaagacggggcaaagccgcaaagggggaggcaccaggcaccggcagccattacttactggtcctcactcccacaccaaccaaccaacctcctctgcctgccgcttctcctgctgcgggcgggcactgctgcaagtactagaggaggacattcgcttccattactgcgcctgcggaggatcggaggaaccagtagcggaggcttcgattttcggcgggcgcaataaatttcccgcatggctcggagggccgcgtcctcgctcgtctcccgctgcctcctggcgagggcccctgccg

SEQ ID NO: 13037 - DNA, 307 bp, Zea mays
gcaattcaacggttatacatttcaaggaagacctctgagggtgaactgcgggccaccgccacctagagatggatccgcaccaagagcaccaagcggtggtggtggtgggggtggtggcggcactttgtcaacgccccatgcaaggttccccacgtataggattttgttgacatcaacctctgaagtttatggtgatccacttgagcatcctcaaactgaggcctactggggcaatgttaacccgattggagttacgagttgttactgctgcggtaagcgtgtagcagagacgctgatgttcgactat

SEQ ID NO: 13038 - DNA, 305 bp, Zea mays
cgcctctctcactctgagaccgcagatccgttgtccggtgagtggaagccgcacgaacccatggcctccggcgagcttgcctgcacctacgccgctctcatcctcagcgacgatggcatcgccatcaccgccgagaagatcgccacgatcgtgaaggcagccaacatcaaggtcgagtcctactggccggcgctcttcgccaagctcctggagaagcgcaacgtcgaggacctcatcctctccgttggatctggtgccgaactgcttcaagttgctgctgccgcccctgctgttgttgctccggc

SEQ ID NO: 13039 - DNA, 311 bp, Zea mays
agctgaggcagatatgtgtacagtttggagaacttatatatgtgaaaattcctgttggtaaaggatgtggttttgtacagtatgcatctagggcatcagctgaagaggcagtacaacgtcttcatggcacaatgattggccaacaagctgttcggctttcatggggccgaagtcctgcgagtaaacaggattcatcagctgtgtggagtcagcaagcagatccaaatcagtgggcaaacgcttactatggctatgggtatgatgcatatggatatgctcaggatccgtcatacgcttatggtgcttatgca

SEQ ID NO: 13040 - DNA, 312 bp, Zea mays
cggacgcgtgggcagttgttgaacaaatatctggaaaggatcacatcctaaatcatttaagcatcccagcagcatgtttcacccatccagagattagtatggttggactgacagagccacaagccagagagaaggctgataaagaaggatttgagataaatgttgtgaagactagctttaaggctaacactaaagctttggcagaaaatgaaggagatgggattgctaagttgatttaccgacctgacacgggtgaagttcttggggttcacattttgggtttgcatgctgctgatctcattcacgaggcat

SEQ ID NO: 13041 - DNA, 311 bp, Zea mays
ccgcatttccccttccccgcaccgcaccgcacccaacccccgtcggagagagagatggcatcggtggcggagatgcagcccctcgcgccggcggggtaccgcgcgcgccggagatgaaggagaaggtggaggcgtcggtggtggacctggaggccgggaccggggagacgctgtacccggggatctcgcgcggggagagcgccctccgatggggcttcgtccgcatagtctacggcatcctcgctgcgcactgctcctcaccaccgccgtctccgccctcaccgttctccaccccaccctcaacgccacgc

SEQ ID NO: 13042 - DNA, 312 bp, Zea mays
gaagaattcaaccagacttgttataagtgcagtggcaacagtgggagctctcctattggtggctttaatgtgtttctggggttgctttctttacaaaaattttggaaaaaaagatatgcgtggtttcagagtggagctctgtggaggctcttctgtcgtgatgttccatggggacctcccttactcctcaaaagacatcctcaagaagctagagactatagatgaagaaaatatcattggagcaggaggcttcggaactgtttataaacttgcaatggatgatggcaatgtctttgctttgaaaaggatagt

SEQ ID NO: 13043 - DNA, 308 bp, Zea mays
ccacgcgtccgcgagctgctcaggcatctcaacgccggaatcttcggcaccggcagcgacgggcacacgctgccgtcggaagtcacccgcgcggcgatgctggtgcgcatcaacaccctcctccagggctactccggcatccgcttcgagatcctcgaggccatcacgaagctgctcaacaccggtgtcagcccctgcctgccgctccggggcaccatcaccgcgtcgggcgacctggtcccgctctcctacatcgccggcctcatcacgggccgccccaacgcgcaggccgtcaccgtcgacggaag

SEQ ID NO: 13044 - DNA, 315 bp, Zea mays
ctcctcctcagaaacccaccaaccccgtccagccgccggctgtctcggccgccgccgccgccgccgccgccctatcccggtccttcaggcgaaccaggttggtcatggccttcaacaagatcaaggtctccaaccccgtcgtcgagatggacggcgatgagatgaccagggtgttctggaaatctatcaaggacaagcttatattccctttcgtagacctcgacatcaaatattttgacctcgggcttccacaccgtgatgctaccgacgacaaagtcacagtggaggctgcggaggccacactcaagtacaatg

SEQ ID NO: 13045 - DNA, 308 bp, Zea mays
cccacgcgtccgcggacgcgtggcgagcgtggctggagtgtacaagcacatcaccggtggcattatgggtggccatgccgtcaagttgattggatggggaaccagtgatgctggagaagcttactggcttctggcaaatcagtggaatagaggctggggcgatgatggatacttcaagatcataaggggcaaaaatgaatgtggcatcgaggagggcgttgttgctggaatgccatccacaaagaatatggttccaaacttcggcggtgccgttggaagagctatagtttaatggttacgtttgcatg

SEQ ID NO: 13046 - DNA, 319 bp, Zea mays
agcggcccgaggagatcggcgcgggcgaccagggccacatgttcgggtacgccaccgacgagacccccgagctgatgccgctgagccacgtgctggccaccaagctgggcgcgcgcctcaccgaggtgcgcaagaacggcacctgcgcctggctgaggcccgacggcaagacccaggtgacggtggagtacgtgaacgagggcggcgccatggtgcccgtccgcgtgcacaccgtgctcatctccacccagcacgacgagaccgtcaccaacgacgagatcgccgccgacctcaaggagcacgtcatcaagcccgtgat

SEQ ID NO: 13047 - DNA, 309 bp, Zea mays
cacaccgggcacaccccccgagctcagcttagctccactccagctccaatcacagtcgtgaccagagcgcgagagctagctagagggccgtgaaaatgccgatcaataggatcgccctggggagccaccaggaggtgtaccacccgggcgccctcaaggcggcgttcgctgagttcatctccaccctcatcttcgtcttcgccggccagggctccggcatggccttcagcaagctgaccggcggcggcccgacgaccccggcgggcctgatcgcggcggcggtggcgcacgcgttcgcgctgttcgtgg

SEQ ID NO: 13048 - DNA, 310 bp, Zea mays
cgtccccgtcccgacgaattggaataggagaagcaaaagatgatggatctcgccgacagccagcaacagcggctcatcgccggcgcggctctgctggtcgccaccgtcgccttcctcaggctcctcctgagctcccgctccgggggcaagcgcctgccgcccaccatcccggaggcgccggtggtcggcggcctcgtcaagttcatgcgcgggcctatcccgatgatccgggagcagtacgcccgcctcggcagcgtcttcaccgtccccatcatcagccgcaagatcacgttcctcgtcgggcccgagg

SEQ ID NO: 13049 - DNA, 308 bp, Zea mays
gctcgttctatctgtccagcagacttgaggttccgagcggccggaaaccagcggcaaccgtcggcatggcgctcgtattgcattctggggctggaaacaaaaatgccttcaaggcacttattgctgcagaatacagtggggtcaaggttgagttgaccaaggattttgagatgggtgtctcgaacaagacccctgagtttctaaagatgaacccccttgggaaggttcctgttctggagactcctgatggccctgtttttgagagtaatgctattgcgcgctatgttgctcgcttgaaggatgacaac

SEQ ID NO: 13050 - DNA, 309 bp, Zea mays
accgcctccgccgccgacaacagcgtagtgtagtgtagttccggagatggttggggagagtagtagtgatccgcaatgtcgacggaggaggctgttgtggctgaggtcccggtgaccgatgtgccagcggaggtcccggcggcccaggtggccgatgcgcccaaggcgaagaaggcgcccaaggagaagaaggcgcctaatgagaagtaaccgtccgcggcgaagaagcctgcggcgcaccctccctacgctgagatgattgtagatgcgatcgctgccctcaaggagaggaaggtgtcgagctcggtg

SEQ ID NO: 13051 - DNA, 177 bp, Zea mays
tcacttctagatcggcacgagcgaccattgtcacatgttcgggtacgccaccgacgagacccccgagctgatgccgctgagccacgtgctggccaccaagctgggcgcgcgcctcaccgaggtgcgcaagataggcacctgcgcctggctgaggcccgacggcaagacccaggtgac

SEQ ID NO: 13052 - DNA, 298 bp, Zea mays
  unsure (1)..(298): unsure at all n locations
tccagaagtcctccctagacgccgccagccgcgcgcacacccaccgagagctcctcgggctttctttctccgttcctccctcgcgcgctcagggtttcacgatggaggccgaggcggcggccaagatggcgttgtatggntgtgaggacgccaccgcgccggtggcgggggccgaggcggtggtcgccggtgctggcgatcaggcgggaatctccgccgtcatcccaggatggttccccgagatcagccccatgtggctcggtgaggcgcactgcttgaaggtggagaaggttctgtt

SEQ ID NO: 13053 - DNA, 301 bp, Zea mays
gactagttctagatcgcgagcggggataaggttgtcaaatttgactttcatgggcagccagcagaaatcaagcatggtagtgttgttatagcagcaataactagctgcacaaacacctcaaatcctagtgttatgcttggtgctggtcttgtagctaagaaagcttgcgagttgggtcttgaggttaaaccatgggtgaagacaagccttgcccctggatcaggagttgtcacaaagtacttgcttcagagtggtcttcaagaatacctcaaccagcaaggattccatatcgttggctatg

SEQ ID NO: 13054 - DNA, 302 bp, Zea mays
cggacgcgtggcggacgcgtgggtttcggcaaccccgcaggaaaaaaaaaagggcgaaacgaggccaccagctcaccgccgagcggaagcggcgccgagcaacacacccctctccacgtccgccgccgtctccccggaccatgtccatggccgcctcctcccggctgctctgggcgtcccgcgccgccgcctacctcaagatctccaccttccccagggccttctccaccgtgctgaaggatctgaagtatgctgacactcatgaatgggtgaaagttgagggtgattcagcaaccgtgggg

SEQ ID NO: 13055 - DNA, 302 bp, Zea mays
cgccggcaaggcagtgaacgtgccgtcgtctctcttcggcgaggcccgcgtgacgatgcgcaagacggcggcgaaggcaaatccggcggctagctccggcagcccgtggtacggccccgaccgcgtgctctacctgggcccgctgtccggcgcgcccccgagctacctgacgggcgagttcccgggcgactacggctgggacaccgcggtgctgtcggcggacccggagacgttcgccaagaaccgggagctggaggtcatccactcccgctgggccatgctggtcgcgttgggctgcgtgt

SEQ ID NO: 13056 - DNA, 167 bp, Zea mays
cggacgcgtgggcggacgcgtgggtccgtgttcgtcgacacgtacggcaccggcgcgatccccgacaaggagatcctcaagattgtcaaggagaacttcgatttcaggcctggcaagatcatcatcaaccttgacctcaagaaaggcggcaacgggcgctacctcaa

SEQ ID NO: 13057 - DNA, 302 bp, Zea mays
ttccaccccctgctcacccacccgtcccctcctgctcgcccatggctcccatcgctgtcggcgacgccctccccgacggccagctcgggtggttcgacgagaacgaccagctgcagcaggtctccgtccacgcgctcgccgccggcaagaaggtcatcctcttcggcgtccccggcgccttcaccccgacctgcagcaaccagcatgtgccaggcttcatcacacaggctgagcagctcaaagccaagggtgtagacgagatcctgcttatcagcgttaacgaccccttcgtcatgaaggcg

SEQ ID NO: 13058 - DNA, 301 bp, Zea mays
gccaaggaactgctcaatgggcagaaggtggtcgtcgtccgctgcgaggagatctgtatgtcgggtggactcgtacgccagaagatgaagtacctccgctttctccgcaagcggatgaacaccaagccatcccatgggcccatccacttccgcgccccgtccaagatcctgtggcgcaccatccgcgggatgattccgcacaagaccaagaggggggaggcggctctggcgaggctcaagacgtacgagggcgtcccgccgccgtacgacaagaccaagcgcctggtcatccctgacgctc

SEQ ID NO: 13059 - DNA, 298 bp, Zea mays
ctctgaggaggaatacgtcactgccatcaaggaggaaatcaacaaggtcgttaagcttcaagaagagcttgacattgatgtgcttgtgcatggcgagcctgagagaaacgatatggttgagtacttcggtgagcagctctccggttttgcgttcactgccaatggctgggtgcagtcttatgggtcaaggtgcgtcaagcctccgatcatctacggtgacgtgagccgccccaaccccatgaccgttttctggtcgaagacggcacagagcatgacgtctcgcccaatgaaggggatg

SEQ ID NO: 13060 - DNA, 300 bp, Zea mays
cgggtcaaaccctaagcagggagttgatttatccgctgcagccatgagtaagttgcagtctgagtctgtcaaggatgccatctcccagattgttggggatgccaaggagaagaataggaagttcactgagactgtggaacttcagattggtctgaagaattatgatccacagaaggacaagcgtttcagtggctctgttaagttgccccatatccctcgtcccaagatgaaggtgtgcatgcttggtgatgcccagcatgttgaggaggccgagaagatgggacttgactacatggatgt

SEQ ID NO: 13061 - DNA, 300 bp, Zea mays
aagaagatgcggccttcctactaattttgattctaactattgctatgcattaggctatggtgctggtgcccttctccaaagtgggaagacaggacttatttcgtcggttggcaaccttgcggctccagtagaagaatggactgttggtggaacagcattgacatcactgatggatgttgagaggaggcacggcaagttcaagccagtgatcaagaaggctatggtggaactcgatgctgcacctttcaagaaatatgcatcgttgagggatgagtgggccatcaagaacagatacatcag

SEQ ID NO: 13062 - DNA, 301 bp, Zea mays
ctcgccgtctgccttctgcgcctccatttcggcctctgtcccttgcaagttcaatctcacctccaaccatgggtaaagagaagtcccacatcaacattgtggttattggccacgttgactctggcaagtcgaccaccacaggacacctgatctacaagcttggaggcattgacaagcgtgtgatcgagaggtttgagaaggaggctgctgaaatgaacaagcggtccttcaagtacgcatgggtgctcgacaagctcaaggctgagcgtgagagaggtatcaccattgatatcgctctgtg

SEQ ID NO: 13063 - DNA, 96 bp, Zea mays
gcggcctggacgcgtgcgagagacttgaccaagcagcagcagcagggatggcgcctctgaagctgtacgggatgccgctgtcgcccaacgtggtgc

SEQ ID NO: 13064 - DNA, 301 bp, Zea mays
agcagctagggtttctcccctcttcttttcccctcctcccgctgccctcggctcccacgacgcccggctagggttttgcctccttcccgctgccgccgtctcagcgagcgagactgagctgtgcttagtaagccatgtcgctgcgcccgagcgagcgggtcgaggtgcggcggaaccgctacaaggtggcggttgacgcggaggaggggcggcggcggcgcgaggacaatatggtggagatccgcaagagccgccgcgaggagagccttctcaagaggcgccgcgaggggctccaggccca

SEQ ID NO: 13065 - DNA, 298 bp, Zea mays
aaccctacagcgacgacgagagcgaggccatgaaggggaagaagccggtcaaggagctcaagctcaccgtgccggcgcaggagaccccggtagacaagttcctgacggcaagtggcacgttcaaggatggtgagctgaggctcaatcagagcggcttgcggcttatctctgaggaaaacggggatgaagatgaatctacaaagctgaaggtggaagatgtgcagttatcaatggatgatcttgagatgattcaagtcattggcaaaggaagcggtggtgttgtccagctagtgaggca

SEQ ID NO: 13066 - DNA, 294 bp, Zea mays
atggggcaccaggcgcacacgccacggacgacaccgaggagctgctggcagcgcaccgcgagctgtggtgccatgccctgggctacgtcaagtccatggcgctcaaatgcgccttggatctgcgcatccccgacaccatccaacgctgcggcggaagcgccaccctaggccagctgctcgccgccagcgaggtcccagcgtccaacctcggctacgtgcgacgggtcatgcgcacgctgacagccatgcgcatcttcgcagtcgtcggccacggtcacggtcccgacaaggccg

SEQ ID NO: 13067 - DNA, 298 bp, Zea mays
aaaaaattactctcagtttgtgtctttccccatatacacatggcaggagaaatcaagaactgttgaggttgaagaggatgaagagccgaaagaagttgaagaggcaacgaagggtgagaaaaagaagaagactattacagagaaatattgggattgggaactagccaatgagacaaaacccatatggatgagaaatccaaaggaaattgagaacaccgaatacaatgagttctataagaagacattcaatgagtttttggaccctcttgcccacactcacttcacaactgagggtgag

SEQ ID NO: 13068 - DNA, 284 bp, Zea mays
ccacgcgtccggattaagatcggaatcaacggcttcggaaggatcggcaggctcgtggccagggtcgccctccagagcgaggatgtcgagctcgtcgccgtcaacgaccccttcatcaccacggactacatgacctacatgttcaagtacgacaccgtccacggccactggaagcacagcgacatcacactcaaggactccaagaccctttcttcggtgaaaccggtcacgctttggcataggaacctgaggaaatccgtgggtgaggtgcgctgagtatgtcg

SEQ ID NO: 13069 - DNA, 299 bp, Zea mays
cgagccaagatgaatgttgaaaagctcaagaagatggcaggtgctgtgcgcactggggggaagggtagcatgcgcaggaagaagaaggcagtccacaagactacgaccacagatgataagaggcttcagagcaccctgaaaagaataggagtgaacaccattcctggtattgaagaggtcaacatctttaaggatgatgttgttattcagtttgtgaatcctaaagtgcaagcttcaattggtgctaatacatgggtggtcagtggaactccacagacaaagaagctgcaagatctgct

SEQ ID NO: 13070 - DNA, 298 bp, Zea mays
cggcgcgagacgacggaggaagggcagacgggcgagcaggatgagagagatcatcagcatccacatcggccaggccgggatccaggtcggcaaccctgctgggagctctactgcctcgagcacggcatcgagcccgatggcaccatgcccagtgataccacggttggcgtcgcacatgatgccttcaacacgttcttcagcgagaccggttctggcaagcatgtgccgagggccatcttcgtcgaccttgagcccactgtcattgatgaggttcgcactggctcgtaccgccaactct

SEQ ID NO: 13071 - DNA, 290 bp, Zea mays
ctccctcagccgcgtcgcgtcgcatcctacgatccaaagctctctctgctcgcagccatggcgaagaactacccgaccgtgagcgccgagtacagcgaggctgtggagaaggccaggcgcaagctccgagccctcatcgccgagaagagctgcgccccgctcatgctccgcctcgcgtggcactccgcggggacgttcgacgtgtcgtcgaggaccggcggtccattcggcacgatgaagcatcagtcggaattggctcacggcgctaacgcggggctggacatcgcggt

SEQ ID NO: 13072 - DNA, 287 bp, Zea mays
gatgagttcctccccgtcctttggtctcctggctgtagcagcattactcctagcactgagcttagcacaacatggctccctcgccgcaaccgtcggccccagggtcatcgtcgtcggcgccggcatgtctgggatctcggcggcgaagaggctgtcggaggccgggataaccgacctgctgattctggaagcgacggaccacatcggcgggcggatgcacaagacgaacttcgccggcatcaacgtcgagttaggcgccaactgggtggagggcgtgaacggcggca

SEQ ID NO: 13073 - DNA, 288 bp, Zea mays
gcaaggccaatcccgagcagtggtgcgaaacctcgagcgctcgcgccggtgaccataacaaagaggaagccgcggtacactggtagcggcacagtaagggggagatgtcgtcggcgttcagcggcgatgagaccgcccctttcttcggcttccttggcgcctccgctgcgctcgtcttctcatgcatgggggcggcgtacgggacagccaagagtggcgtcggcgtggcgtccatgggtgtcatgcgcccagagctcgtcatgaagtccatcgtgcccgtggtcatgg

SEQ ID NO: 13074 - DNA, 291 bp, Zea mays
cggacggtgggtcaacgtctccggattggagaacttcatgaaggatgtcagattgggtgaatgcgggctgtcctatgctgttgtatcaataatgggcccgcaaactagtgggaaaagtacacttttgaatcatctttttggcaccaattttagggagatggatgccttcagaggaaggtcacagactaccaaaggtatatggctagcgaaggcccagaatattgatccgtgcacccttgtaatggatttggaaggaactgatggaagagagaggggagaggatgatacagc

SEQ ID NO: 13075 - DNA, 291 bp, Zea mays
ccacgcgtccggggaaagttactgctgcagggatgtatttccttggttttcctgtgtaccgttttgaacaaaataacctggcagctgctgcaaaagattctgatggtgcattctttaaaagattggatagctttcagccatgtgacatacatgaactgaaacctggaacacacttctttgctgtctacggtgacaacttcttcaagagcgctagttatactatagaggttgtatgtggtgaatcttttcctgccgaaaaggagatgctacgaaatgtggaggccaagatac

SEQ ID NO: 13076 - DNA, 291 bp, Zea mays
cccacgcgtccgacccaatcagaccgaatgggcaccgcatcaccggactccggcgaccttatcgaggtggggccggcgaggccgggatctccggtagccgtggtgaccatcaaccggccttcggcgctcaacgcgctgacgaagcccatgatgatctccatggcggctgcgttccggcggctgggtgccgacgacgccgtggcagcggtggtgctcgcgggccgcggtcgcgcgttctgctccggggtggacctgacggccgcggcggaggtgttcaagggcgatgtgaag

SEQ ID NO: 13077 - DNA, 293 bp, Zea mays
cgcagtcggctgccgcagactggtagtagccggcgcgccgtcaccgtatcctcagatcagaggcgagcagaaaccacaccactctactgacgcccgacgagcagtgtaacattttccttcagccatgggtaaggagaagactcacatcaacattgtggtcattggccatgtcgactctggcaagtcgaccaccactggccacctgatctacaagcttggaggtattgacaagcgagtgattgagaggttcgagaaagaggctgccgagatgaacaagcggtcattcaagtatg

SEQ ID NO: 13078 - DNA, 291 bp, Zea mays
gggaatcaaacagatcggtgtaatcggctggggctcgcagggtcctgcgcaactcagaacttgagagactcacttgttgaggcaaagtcagatattgttgttaagattggtctccggaaaggttctaaatcttttgaagaagcccgagcagcaggattcaccgaagagagtgggacgctgggtgatatatgggagactgtatcaaacagtgatcttgttttgctactgatatctgattctgctcaggctgataactacgagaaaattttctcgcacatgaaaccaaacagt

SEQ ID NO: 13079 - DNA, 292 bp, Zea mays
aagagctactactacagctcctcatctcaagtgtgtagacgagacagagagacactgagagagcgccatggccagcctccaagtcactcctacttcggcgttcactgagtggaacgagctgaagttcgaaggcctgtacctgttccacacgcccctgggctcaggcgccaaccaagctcgggtcatagacaacaaggcgccgattggcatcggtgccaccgtagttaacaactggacagtgtatgacgggccagggccgaacgcaaagctggttgcccgtgcacagggcttg

SEQ ID NO: 13080 - DNA, 293 bp, Zea mays
ggcaagcgcctttccagcatcaatgtcgagaacgtttaggagaaccgccgtgccctccgtgagctcctattctgctgccctggtgctctccagtacatcagcggtgtgatcctcttcgaggagaccctgtaccagaagaccaaggatggcaagccttttgttgatgtcctcaaggagggaggcgtcctccctggcatcaaggttgacaagggcaccattgaggttgttggcactgataaggagaccaccacccaaggccatgacgaccttggcaagcgttgcgccaagtacta

SEQ ID NO: 13081 - DNA, 292 bp, Zea mays
tgcactcacttcaggaattgctggatacgttgctacctctttttattctcagctggaggggacaaactgggtgaggaacttgctattgacaggatgcctgttctgtggacctctcttactgacattttgcttcttgaacactgttgctattgcttatagtgcaacagcagcactgccctttggcactatctgtgtcattgtgctcatctggaccttggtcacatttcctttgcttgttttgggtggtattgctggtaaaaacagcaaaagtgagttccaagctccttgccgt

SEQ ID NO: 13082 - DNA, 225 bp, Zea mays
ccaactttgtgcccggcaagtgagggggtggaggcgccaccgaccaccggccaccgctgcggatatctaggtgttcggatgcacgtgagcgcgcactggttccagtttgtaccatgatgtaaattacttaccgtaccagggttcaatcggcaaggaagaattgttgtgttcactgtcttgggcagtctcttggtccaatatgaatcaacttacacagcatctcat

SEQ ID NO: 13083 - DNA, 306 bp, Zea mays
gtcgccgacactccatcccggaagagctaacgaggtgacaccccaccgcgcccatgggtgacagccagtactccttctccctcaccaccttcagtccgtcggggaagctcgtgcagattgagcacgcgctcacggctgtcggatccgggcagacctcgctcgggatcaaagctgccaatggtgtagtcattgccactgagaagaagctgccttctattttagtggatgaaacatctgtgcaaaagattcaggcactaacacctaatattggagttgtctatagtgggatgggtccagatttccgtg

SEQ ID NO: 13084 - DNA, 296 bp, Zea mays
gtcactcaacaacttcgaacgatttacagacaggagccttacttcaattgcaaaagggtgcaagaatctcacagatcttgttctcactgattgccagttactaactgatagaagccttgaatttgtagctcgtaactgcaaaaagttagcacgtttgaagatcaatggttgtcagagcatggaatctgttgcactggagcacattgggcgatggtgtccgcgccttttggagctctctctaattttctgccccaggatcgagaacagtgcattcctggagattggtagcggctgct

SEQ ID NO: 13085 - DNA, 301 bp, Zea mays
gcatggcagtgttgttcttgcagcaatatgtagctccacaaacacatcaaatcccagcgtcatgattggtgctggccttgtggcaaagaaagcctgcgaattgggccttgaggtgaagccatgggtaaagacaagccttacccctggatctgtggttgctaccgagtacttgaaacatagtggccttcaagattatctgaaccagcaagggttccatgtcgctgcgcatggttgcgccacttgtgtgggcaactccggtgacctggatggatctgtatcagctgctatcacagaaaatgat

SEQ ID NO: 13086 - DNA, 301 bp, Zea mays
cccacgcgtccggctatacatgttatcagctgcggctacgaagacaagaccgactggggaaaagagattggctggatttacggatcgatcacagaggatatcttgactggatttaagatgcactgccatggctggcggtctatttactgcatcccgaagcggcctgcattcaaaggttctgcgcctctgaacctttccgaccgtcttcaccaggtccttcgctgggcccttgggtccgtcgaaattttcttcagcaagcactgcccactttggtacggatacggcggcgggctaaaattcc

SEQ ID NO: 13087 - DNA, 304 bp, Zea mays
cccacgcgtccgacctcctgatggacatcggcatgatgaccatgacaaaaggacggcagagagatgaaaaagaatggagcgagctcttcaccaaagcagggttcagcgaatacaagatcctgaaggaatttggagctcgtgttgccttcgaagtctatccgtgagattgcacctggactatacatatatatttacatacatatatgtatgtgtgtgggtgccttgcgtggcttggcgtgatgatgtcataaataaagagggtgggtgtgcttgcggtattcatggatggccatggatctgagca

SEQ ID NO: 13088 - DNA, 303 bp, Zea mays
ggaaactgaatgatctcttggacgctcttgatttcaaccaagttgtgatattcgtgaagagtgttagcagagctgccgaactgaataagttactttgtgaatgcaacttcccatcaatctgcattcattctggaatgactcaggaagaaaggctaacaagatataagaacttcaaggaaggccacaagagaattcttgtggctacagatttagttggcaggggcattgacattgagcgtgtcaacattgtgataaactatgacatgccagactcagctgatacttatttgcacagggttggaa

SEQ ID NO: 13089 - DNA, 310 bp, Zea mays
cgcctccaaacccgaactccaagtcgccccgcatcgatggcgcccaaggccgagaagaagcccgcggcgaagaagccggcggaggaggagcccgctgccgagaaggcgccggccgggaagaagcccaaggcggagaagcgtgtcccagcaggcaagtccgccggcaaggagggcggcgagggaaagaggggccggaagaagggcaagaagagcgtggagacctacaagatctacatcttcaaggtgctgaagcaggtgcacccggacatcggcatctcctctaaggccatgtccatcatgaactccttca

SEQ ID NO: 13090 - DNA, 305 bp, Zea mays
cccacgcgtccgcccacgcgtccgagaatgcaccttacaaactgtttgctggaactgcaaagagtctgggcacattgccagtgagtgcaagaacgaggccctatgccacgcctgcaacaagacaggtcacttggcacgagactgccctacctcaggtgctaacgtcaagctatgcaacaaatgctttaaatcaggccacatcgccgttgactgcaccaacgaacgggcctgcaacaactgccgtcagccagggcacatagctcgggagtgcaagaacgacccggtctgcaacctgtgcaatgtct

SEQ ID NO: 13091 - DNA, 294 bp, Zea mays
gtgatgtgtttcttgagactgccaaattgtgcaagtacacagaaaaggagttgggggctagcttgtttttcggtctcttcgctatctcctggcttctattgcgtttgatttacttcccgttttggataatcaaagcctctagctatcattccatcacattctggaggaagctggatgaattccctacagctttgtactatatcttcaatacaatgcttctcacattgcttgtattccatatgtactggtggaaactcatatgtttgatgataatgagacaattgaataataaag

SEQ ID NO: 13092 - DNA, 298 bp, Zea mays
gttgcaatttatggtgtaattgtggcaatcatcctccagacaaagcttgaaagtgtgccaacatcccaaatgtacgatccggagtctcttcgagctggctatgcgatctttgcatctggtcttatcgttggcttcgctaatcttgtttgcggggtatgtgtggggataatcggaagcagctgtgcactgtctgatgctcagaactcatcactctttgtaaagattttggtgattgagatcttcggcagcgctctgggactgttcggagtcattgtgggcatcattatgtcatctcagg

SEQ ID NO: 13093 - DNA, 296 bp, Zea mays
caagcgcactctagcaatggcttctgaggttgtccgccctagcgacgccgagctactaaaggcacaagccgacatatggcggctcagcctctcctacctcacgcccctgtcactgaggtgcgccgtggagcttggcatccctacggcgatctaccgccatggcggggctgcctcagccgctgagctggtcacggcgctgtctctcccctccactaagctgccgttcctccgccgcctgctgcggctcctcgccgcgtcgggcgtgttcaccgtcgacaagcagagctcggaggagg

SEQ ID NO: 13094 - DNA, 291 bp, Zea mays
cacatgtccacgttagatgacccacttatgtggggattcaagggttttccaacttcggatgctaagcttggaaggtgggtgctgacagcagaagatatatgcttcaagaatgtagtcatgtcctacatgtttcgacttgggaaatgcataccaatcacgagagggggtgggatttatcaagaacacatgaatgaagcccttgacgtgcttagaaatggaggctgggaaaaatagcccaagaagatcagccgattagaagattgaagtggggaactgccagtcttattgtcc

SEQ ID NO: 13095 - DNA, 280 bp, Zea mays
ctcccacccggtttagccggctccgctgccaccgccgcgactccacctctgtcgccaccatggtcaagtccaaggccatcagggtccacgagctgggcggccccgaggtgctgcggtgggaggaggtggaggtcggggagcccggtgaaggggagatccgcatcaggaccaccgccgtcggcgtcaacttcatcgacatctactttcggaagggggtctacgccgcgcccaccatgcccttcaccccaggaatggaagacgttggcgtcgtcaccgctgt

SEQ ID NO: 13096 - DNA, 290 bp, Zea mays
ccgcgtcctccgcccgggcggcttctgggtgctctccggcccgcccgtcaactacgagaaccgctggcacggctggaacaccaccgcgcaggcgcagaaggccgacctggacaggctcaagaagatgctggccagcatgtgcttcaagctctacagcatgaagggggacatcgccgtgtggcagaagtccgccgacgcctgctacgacaagctcaccccggtcaccacgcccgccaagtgcgacgacagcgtcgaccccgacgccgcctggtacgtgcccatgcgctcct

SEQ ID NO: 13097 - DNA, 289 bp, Zea mays
tccctgacgacctaatcaagagaggcatggcggttgccgacccgtcgagcccgtacaaggtacggctgctggtggaggactacccgtacgcgtcggacgggctggccatctggcacgccatcgagcagtgggtgacggagtacctcgccgtctactaccccaacgacggcgtgctgcgggcggacgtggagctgcaggcgtggtggaaggaggcgcgcgatgtcgggcacgccgacctcaaggacgcgccctggtggcccaagactcagacggtggccgagctggtcaa

SEQ ID NO: 13098 - DNA, 293 bp, Zea mays
gaaggttgccaatttccttgctcggttcaagtccatccccagcatcgtcgagcttgacagcttgaaggtttctggtgatgtctggtttggttctggaattacgctcaagggcaaggtgacaatcaccgccaagtctggagtgaagttggagattccagacggagctgtatttgaaaacaaggatgtcaatggccctgaggatctttaagctatgcttgccgtcaccagtttttcccaaggacatgtcaataggagctgccaacccaaatcactcccgctgagctctacctttt

SEQ ID NO: 13099 - DNA, 312 bp, Zea mays
gggcggcaagatcatccgcgtcgaggcgcaccccatccccgagcaccccaggcctaagagggtgtccgggcgggtgacgctggtgggcgatgccgcggggtacgtgaccaagtgctctggcgagggcatctacttcgcggcgaagagcgggcggatgtgcgccgaggccatcgtggcgggctccgcaacgggacgcggatggtggaggagagcgacctgcgcaagtacctggccgagttcgaccgcctctactggcccacttacaaggtgctggacatcctgcagaaggtgttctaccgctccaacgcggcg

SEQ ID NO: 13100 - DNA, 315 bp, Zea mays
gccgccacctctcttccggcatcgacgaggcgaaaccctagcgcccgagtccctctccctgctcccacaacccatggcggcggatatggcgtacgcgccgccgatgaaggctggcaaggccgggttcgaggctggcatgatggatccacagcacaggatccgcatcacgctctcctccaagagcgtcaagaacctcgagaaagtctgcggggatctggtgaagggcgccaagggtaaggagctcaaggtcaagggccccgtgcggatgcctaccaaggtgctccacatcaccaccaggaagtctccctgtggaga

SEQ ID NO: 13101 - DNA, 313 bp, Zea mays
gaagaggatgctccaggcgatccagcatttcaccaagctcacgtacctggagctcgaggacaccggcattcaggacgccttccccatggagatctgctgtttggtcagcttgaagcacctcaacctatccaagaacaagatcctgtcgctgccgatggagctgggcaacctgagccagctcgagtacttctacctgcgcgacaactactacatccagatcaccataccaccggggctgatctcgcggcttgggaagctgcaggtgctggaggttttcaccgcgagcatcgtctccgtcgcggacaactacgtc

SEQ ID NO: 13102 - DNA, 316 bp, Zea mays
gtcttcacactcctcgccatcacatagaaccagtgcaagcagaagcagcgcgatggcgagcagcaccatggcgctctcctccacagccttcgccggcaaggcagtgaacgtgccgtcgtctctcttcggcgaggcccgcgtgacgatgcgcaagacggcggcgaaggcaaagccggcggcgggctccggcagcccgtggtacggccccgaccgcgtgctctacctgggcccgctgtccggcgcgccgcgcgagctacctgacgggcgagttcccgggcgactgcggctgggacaccgcggggctgtcggcggaccc

SEQ ID NO: 13103 - DNA, 307 bp, Zea mays
caacccagctcgctcgtcccagctgatcaggtcgagcacctagtagcgacctgctcgatcatcagtgtagagtgtcggtaggtgtctgtctctcttggtggctggttgcaacggtcatggcgacgtcgtctcgtcgggtgcccttgctgctgctgtacctgggcgtgctggtgtcctgctccttcgcggcgggcagcttggaccaggagctggacatcacgtggggcgacgggcggggcaaggtccttgacaacgggcggctgctgacgctgtcgctggaccgcacgtccggctccgggttccagtc

SEQ ID NO: 13104 - DNA, 308 bp, Zea mays
catcgacacgatcgcgagcgcaacacgtacgttgtcggaagctcaagttagaagaagcaccagtgcctgatcgatggcggcccaggctctcctctccggccggcagctgctgggccgccccgtgcagtcggccgtctctaggtcgtcggcgaggaaggcgcccttcgtcgtcagggccagctccagccctccagccaagcaaggtgccgacaggacgctgtggttcgcgtccaagcagtccctctcctacctcgatggcacgctgcccggcgactatggcttcgacccgctgggcctctcggacccgg

SEQ ID NO: 13105 - DNA, 313 bp, Zea mays
gccgggaaagagcttacgctgctggggttatgggcgagcccgttcgtgctccgggcgcgcatcggctcagcctcaaaggcctcacctacgcttactccgaggagaacctcgacgacaagagcgagtttctcctcagctccaaccccgtgctcaagaaggtgcccgtgctcatccaccacggcaagcccgtctgcgagtcccagatcatcgtgcagtacgtcgacgaggctttccccgccgccgcacctaatttccttccatccgacccctacgaccgcgccattgctcgcttctgggcctcctacgtcgacga

SEQ ID NO: 13106 - DNA, 311 bp, Zea mays
ccagaagagcggcggcgcgggcggacaaggagcaggcggaggaggagttgtgccaagccacaatgggtatctcgcgtgactcgatgcacaagcgccgagccaccggtggaaagcagaaggcctggaggaagaagcgaaagtatgagcttggtcgccagccagccaacaccaagttgtcaagcaataagacagtgaggagggtccgtgttcgtggaggtaatgtgaaatggagggctcttcgccttgatactggtaactactcatggggaagtgaagctgttacccgcaagacccgtatcctcgacgtggtc

SEQ ID NO: 13107 - DNA, 309 bp, Zea mays
aagaaattcgcctcctcttctccaattgcagctgcagttgcgtgctcgagaggggtgaagaacctagaagccctgccagcgcgcggcgccggcgccttgtttactctgcgacggcacgctgattgcattggtactgttcttctcctgatcaccacacatgacaagggtcatccatgactccggagatgacatgcagaaggaggcacttgatttggtctcatctgacgttaatttccccaagggccatttcccagactataggattggaccaaacaaccaaatcattgatccagaggagacacatgaggc

SEQ ID NO: 13108 - DNA, 308 bp, Zea mays
cggacgcgtgcgttccatttccccatctcccagatccaattcgcgagttctccctcctctgccgccatggcgctctctgtggagaagacctcgtctggacgggagtacaaggtcaaggatctctcgcaggcggacttcggccgcctcgagattgagctggccgaggtcgaaatgcccggcctcatggcgtgccgcgccgagttcggcccgtccaagcccttcgccggcgctaggatctcggggtctctccacatgaccatccagaccgccgtcctcatcgagaccctcaccgcgctcggcgccgaggt

SEQ ID NO: 13109 - DNA, 307 bp, Zea mays
atccggatcaatgaacgtgtccggactgggctatgggttggcgattgttttatctacaacaattcttcgtggcggcttaattactgcgtaggaggagaggttacaaccttatttcacttggatcggccaatgtatttactaggatatcttgcaaaccaaagccgtgtctatcttattgataagcaatttaatgttgtggggtatactttactccttagtttgatcgagtataaaacacttgtaatgcgtggggattttgatcgtgcaaatgatgttttatcatctataccaaaggaacaatatgaca

SEQ ID NO: 13110 - DNA, 307 bp, Zea mays
ctgttctgtatgaaacgtgatgccccttaaagacatttgttcagcgacaaaatctctaacctcttcatcaaatcctcttaaaactttcttctgacgaataaacacatggacttcactctttaagccattgaaaattttggtgggttctcacatgtaatgtttgcaacaggtcgcagaccaaattcaaagaaccttggactggaagcggtgggggttgaaatggataagaacggtgcaatagtggttgatgagtattcacgtacctcagttgattccatttgggctgttggagatgttaccaataggg

SEQ ID NO: 13111 - DNA, 297 bp, Zea mays
gggtttaaacaatgtgtcggctatgaacaacactgaggaatttacaaatgtgaattccaacacagagaatggaggagtcttcaatgatgggccaggagcagttttggttaacattttgaccagaatgaggcatctacctcctgggatgcattcagtgcttctagttatggccctaacatggttgtcatggtttccctttttcctttttgacactgactggatgggacgcgaagtttaccatggggatccaaatggagatttgagtgagatgaaagcttatgacaatggtgtccgaga

SEQ ID NO: 13112 - DNA, 306 bp, Zea mays
cgttaccgccgccggagaagcgccgctcgctcaggaggacagccatggcgccggagccggaggatgatattatgaacgagaagaatccccgcccgctcgacgaggatgacatcgcgctcctcaaaacctatggactggggccgtattcgactagcattaagaaggtcgagaaggagatcaaggaaatggccaagaaaatcaacgacctctgtgggataaaggagtctgatacagggctggctccacctagccagtgggatttggtttcagataagcagatgatgcaagaagaacaaccgttacaag

SEQ ID NO: 13113 - DNA, 301 bp, Zea mays
cggacgcgtgctagttctagatcgcgagcggccgccctttttttttttttttgttcaaacgatttccattagctctataaaacaatggtctcttacatttcgagcgagcggctgaggaggtgcaagcgagaatgtagcaagtatacaacggcacgtgaagacgaagacgaaacaagatgaaagcatgcttcatacagtcacagtggcggcttcattcaacgcaacaactcccggaagctcctttccttccaacaattccaggctagcgccacctcccgtggaaatgtggctcataacgtca

SEQ ID NO: 13114 - DNA, 302 bp, Zea mays
gcaagctcgatctactactactactagctggtacacatactagccagcctgccagccagcttgccatggcgcccaccgtgatgatggcctcgtcggcaaccgccgtcgccccgttccagggtctcaagtccgccgccagcctccccgtcgcccgccgcagcaccaggagcctcggcaacgtcagcaacggcggaaggatccggtgcatgcaggtgtggccggcctacggcaacaagaagttcgagacgctgtcgtacctgccgccgctgtcgacggacgacctgctgaagcaggtggactac

SEQ ID NO: 13115 - DNA, 303 bp, Zea mays
gtgcctgtcaaaacatcgaaagcagacgccataagcaaagacctggtccgaagggtttccgcagcgtcggcccaacggtcgtttataccttcatgcaagtctctggcatgactaacgaccaccttatctcctgctaccgttttgctgaatgcgtggcctcctctgctggtgccgctaaacttaccgatggaagcctagcagatgcaagtgatagcaaccatgccacggcggagcagaaggtgaacgggacgaatgacattgaactgtccagggctatagacgagctcagcatttcatagcggt

SEQ ID NO: 13116 - DNA, 174 bp, Zea mays
actacatatccagtcttgatggctgaatgacgaccctagttatcgagacgcaaaaccttttgttgtatgtgttccttttacagacttccttggcttgtcatgaatttctaatgtgaacttgtgctgtgaacttgttgcaaaacctcttgaacctgaagcattcaacatgctgtg

SEQ ID NO: 13117 - DNA, 341 bp, Zea mays
ggagtacaaggcgcacagcggcaggttctgctccggcttcgacgtgctcacggccaagctctggcagtgccgcacccgggcgctggccctggacccggccgccgaggtcaagctctgcttcttcgccagcgtccgccacctgctcaagctcgaccgggggtactacggcaactccatcttccccgtcaagatgtccgcgccggcagagaaggtgctggcctcctcgctcgtggaggtggtcgacatcatccgggaggccaaggacaggatggccgtcgagttctcccgcttcgctggggaggagacggaccaggacccgttccagatgaccttcaactacg

SEQ ID NO: 13118 - DNA, 334 bp, Zea mays
cctgctcccatcccgccgccggcgctgccacccgcatctgccaaggcgctcgccgccggggaggctgctcgcggtgccgcgctctctcccgcgcccgaccttggccctcccctcctccatgatctgcgcgatctccggcgaggtgccggacgagccggtcgtgtcgaagaagtcggggctactcttcgagcggcggctcatcgagcgctacattgaggaccatggcaagtgtcccgccaccaaggaggacctcaccatggatgatatcgtgccggtcaagaccaacacgatcgtgaagcccaggcctttgcaggctgcaagcattccaggactc

SEQ ID NO: 13119 - DNA, 287 bp, Zea mays
cggaccgtgggtgctcgccagagaatttcgtcaccggactggaggtcccaggacagaacctctctggcttgctctccccgagcatagggaacctgaccaaccttgagactgttctcatgcaggacaacaacataaccggccaatcccagcagagattggcaagcttacaaagctcaagacacttgatctctccagcaaccacctgtacggtggaatcccggcttctgtaggccaccttgagagcctgcagtacttgtgagcgccaactctacagtagtactagtaca

SEQ ID NO: 13120 - DNA, 333 bp, Zea mays
ggtgaagccgccgccgctgcagtgtccatagccaccgctagagactgagatggggggttttgtcaagacccacaagagcaatgcatacttcaagcgtttccaggtgaagttccagagaaggcgcgctggcaagacagactacagggccaggataaggctgattaaccaagacaaaaacaagtacaatacacccaaatacagatttgttgtgcgatttaccaacaaggacatcacagcacaaatcatatctgctagtatagcaggtgatatggttcttgcttctgcttactcgcatgagttgccacgatatggtctcgaagttggtctgaccaa

SEQ ID NO: 13121 - DNA, 288 bp, Zea mays
gagactgccaacgaggcgaacagccggccaatctagcatccgcgcgcggggtctgagagcagagcggcagggcgccatggcggcatcggtggcgctgagcagcgggcaccggatgccggcggtggggctgggcgtgtggcggatggagaagcggacatccgcggcctcatccacacagcggctccgcgtcggctaccgccacctggactgcgccgctgactaccagaacgaagctgaagttggtgacgcgctcgcagaggcattccagacgggactcgtcaagcggga

SEQ ID NO: 13122 - DNA, 331 bp, Zea mays
gtcgcccgggacatggacgactacgtcgtctacggcctcaacgcgtgcttgcagaacgtccgcaactgctgcgtgcgcctggacgccatcgacaagctgcgggcgcactacgacgccctcgccgacgccgtcgccgacccggccgccaacgtcgagggcctcgccgcggaggcgtccgagtacaaggccgccatgtggcagtactgctacaaccagcggacgcctccgcgcgggcgcactcccgcgcctactcccaggcgctcaagctggagggcatcgacttcgccgagctggtgcggaggcaccagctccggctcgggtacggcagcaa

SEQ ID NO: 13123 - DNA, 331 bp, Zea mays
gccctccaagaagttgatcgatctgggcgtttgtttccttccgtttgatgtgaccatcagggagaccgtcgattgcttcagaagcaaagggctcatctagccctgtgaacatttccagattgctatgagatggagatggagatgatggttaggcatgatctttctataggttaaaagaacagattatccaacaactgatggaacctgcattagagatattatgttgatgtcacagatttagttgatgctcatgtgaaagcgctcaacaaggcagacactagaaaagtcagtatttacaacgttggaacatgaagagagaggcccgcaaata

SEQ ID NO: 13124 - DNA, 332 bp, Zea mays
agatctgcgacgtcaacggcgtctgcgtggacgccaccgaggacgagctcttccgcctcaccaccaaggaggggaagctcaccgtggagcgcgagaaggtgaagatcgagacgcagcccttctcccccgtggtgcagttcgagcaggaccccgtgcagatcctggacgcgctgctcccgctctacctcaacagccagatcctccgtgccctgcaggagtcgctcgccagcgagctcgccgcccggatgagcgccatgagcagcgccaccgacaacgccatcgagctccgcaagaacctctccatcgcctacaaccgacagcgccaggccaag

SEQ ID NO: 13125 - DNA, 326 bp, Zea mays
cacacaccgaagagagagacagagcgagagaggatggcgtccctggcgcacacgtcgcgggcctaccgtgcccccctctatccggcgcgtcgcgcgtcgccccgcggcgcagaggcggcctccgtcggcgcttgtgtgcggtacctatgcgctgaccaaggacgagcgggagcgtgagcgtatgcgccaggtgttcgacgacgcctccgagcgctgccgcaccgcgcccatggagggcgtggcttctcacccgacgacctcgacaccgccgtcgagtccaccgacatagacacggagatcggctcgctcattaaaggaacagtatt

SEQ ID NO: 13126 - DNA, 327 bp, Zea mays
cccacgcgtccgcccacgcgtccgcccacgcgtccgagcacgcccaaaaattccaaggtttttcacctcttggagcgcaccaacaccacccggagaccggagccactcgccaccggcgcggaaacagagggcggatgctcgatggcggatgagaatcaggctggaaagaaagatgaggaggaatttagcacaggccctctgtcagtcctaatgatgagtgttaagaacaacacccaggtcctcatcaattgccgcaacaacaagaagctacttggccgtgttcgtgcttttgatcgccactgtaacatggtgctcgagaacgtgcgt

SEQ ID NO: 13127 - DNA, 324 bp, Zea mays
ctcgccgtcgtcttctgcggttctgccgtctacgcctccaatttggcctctctcccttgcaagtttaagcttcaccttcaaccatgggtaaggagaagtcccacatcaacattgtggtcattggccacgtcgactctggcaagtcgaccaccaccggccacctgatctacaagcttggaggcattgacaagcgtgtaatagagaggtttgagaaggaggctgctgagatgaacaagcggtccttcaagtatgcttgggtgctcgacaagctcaaggctgagcgtgagaggggtatcaccattgatattgctctgtggaagtttg

SEQ ID NO: 13128 - DNA, 325 bp, Zea mays
cggacgcgtgggcgtgacgcgtgggtattgatgttccagttgaagatggtgatactttgctccatctggcatgcttatatggtcatcttccttgtgtgcagctatacctggaacgtggcagctagcttggaatgccaagacgaagaaggtgctattcctcttcacgatgcttgtgctggaggcttcactgagctggtccaatatattctcaactttgctgccaacaaggatggttgcgtagtgagaatgctcaacactattgattctgaaggcgatacgccgctccatcatgctgctagaggagaacatttggatgttgtcaagc

SEQ ID NO: 13129 - DNA, 302 bp, Zea mays
gagagacccactaccaccaccgcaagcgacgacggggagatgtttctgcgacggatcctgaccggcggaggtggcctggcggcgctgagggcggcgcgcgccgtgaaggagacgacggggatcgtcggcctttgaggtggcgcccaacgcgcgggaggttctcatcgggctctacacgcgtacgctcaaggagatcgaggccgtccccaaagacgagggctaccgcacagccgttgagtccttcaccaatcaccgcctccagatctgccaggaggaggacgactggaagccatcgaggaccg

SEQ ID NO: 13130 - DNA, 306 bp, Zea mays
cccacgcgtccgcccacgcgtccgaggatggcatgcttaaatataaaggaacatatgaaataatatcgcctgatgatattggtttaacacgtgcaaatgaatttggtattgttcttgggaaactcagcggaaggcatgcagtgagatctaagctagtggagcttggatatgaaatcagtgacaaggaatttgaagatttctttaaacgctacaaagaggtcgcagagaagaaaaagcgtgtaactgatgaagacatagaagcgttattgtcagatgagatattccagcctaaggttatttggtccc

SEQ ID NO: 13131 - DNA, 299 bp, Zea mays
tggcgcgacggcgatcagctcctcaccggcgtcaacttcgcttccgccgcagccgggatccgtgacgagaccggacagcaactggggcaacggatcagcttcggcgggcagctccagaactaccaggcggcggtgcagcagctggtgagcatcctgggcgacgaggactccgcggccagccacctgagccagtgcatcttcacggtgggcatgggcagcaacgactacctcaacaactacttcatgccggcggtctactccaccagccagcagtacacgccggagcagtacgccgacgt

SEQ ID NO: 13132 - DNA, 293 bp, Zea mays
gggaggtggcggacggtgggtgacacgcgtccgttttctagggcgttcttcggcttcgttgtcacaaggttcgagttcgtcatcgtctaactcgactgtgcgagggaggaagaggcgaggagaaactgcagatcttcgtgaagaccctgacggggaagaccatcaccctcgaggtggagagcagcgacaccgtcgacaacgtcaaagccaaaatccaggacaaggaagggattcccccagatcaacagcgactgatattcgctggcaagcagctggaggatggacgcacgctg

SEQ ID NO: 13133 - DNA, 282 bp, Zea mays
tcatcccctttgcgagtatagtctctctgctaagcgacggagctcaggctagtctcggcggctctagaagacgatgggcaaggacgacgtgatcgagagcggcctggcggcgcgagttcgctgcgaaggagtacacggacgctcccccggcggcggtgatcgacgcgggcgactggggtcctggtcgctgtacggcgccgtgatcgccgagttcatcgccacgctgctgttcctgtacatcacggtggccaccgtgatcgggtacaagcaccagacggacgc

SEQ ID NO: 13134 - DNA, 296 bp, Zea mays
aaatattctagtgggttaaggactaatcgctcaactggagttggatattggaaagctaccgggaaggacaggccggtggtatataattctaggactgttgggatgaagagaactttagtgtttcatcttggcaagccaccacgaggtgatagaactgactgggtaatgtatgaatataggctggaggacgaggaaatagctgcttctggtgttaaactggatgcctgcgttctatgcaaaatctttcagaaaagtggcccagggcccaagattggcgcacagtatggtgccccatt

SEQ ID NO: 13135 - DNA, 297 bp, Zea mays
gcagccccggtttcgcaagccgcgccgtggtttgcttgcccacaggcggccaaaccgcaccctccttcccgtcgtttcccatctcttcctcctttagagctaccactatataaatcagggctcattttctcgctcctcacaggctcatctcgctttggatcgattggtttcgtaactggtgagggactgagggtctcggagtggattgatttgggattctgttcgaagatttgcggaggggggcaatggcgaccgcggggaaggtgatcaagtgcaaagctgcggtggcatgggagg

SEQ ID NO: 13136 - DNA, 287 bp, Zea mays
ccttaataaagagcagcagcgcaaggtgagccgccagcttgccccaggttggtagagcgagcgaggagaaggcaatggcggcggagagcttcctgttcagctcggagtccgtgaacgaggggcacccagacaagctgtgcgaccaggtgtcggacgcggtgctggacgcctgcctggcgcaggaccccgacagcaaggtggcctgcgagacctgcaccaagacgaacatggtgatggtgttcggcgagatcaccaccaaggcgagcgtggactacgagaagatcgtg

SEQ ID NO: 13137 - DNA, 294 bp, Zea mays
ggagaaggcaaccatacgcaagcccaacgacttcaagcagccaggggagaggtaccgctcctgggacgccgaccgacaggaccgattcgtgaggcgattcgccgactcgctcggacacccaaaggtcagccaggagctcaggtccatctggatagacctcctcgccaagtgcgacgcgtcgcatggggatgaagattgccacccggctcaacatgaagccaaacatgtgatgcatcatgcttgtgctgaataataatgaagacgcatgcatgtcgtcgccaggaacaaagatcg

SEQ ID NO: 13138 - DNA, 290 bp, Zea mays
cccacgcgtccgaacaatttttgtgaaaatctttcatccaccagccatatcagtggttggtgaaataccacagggtcttcccaggttctccattcctcaaggatttgagcatctaatgtcacttgtgccaactgctgtactaatcactggtgttgctattttggaatctgttggtattgctaaagctttggcagcgaagaatgggtatgagttggactctaacaaagagttatttggtctgggaatagcaaatatctgtggttcattcttctctgcatatcctgccacag

SEQ ID NO: 13139 - DNA, 291 bp, Zea mays
cactgctttgtcttatggtgaccttgtcaagagggtcctccggtgctttggcccctcagagttttccgttgccgtgaccatcttcggcgggcgtggccatgccgggacatggggaaaggcacttggtgcagaggtctatgactgcaacaacatggtggagcaggagctgcctggaggcgggctcctcgtgtaccagagcttctgtgctgctgaagacgctgttgctacctcgcccaaatctgttttccactgctttgacggcgagaacgtggagagtgctcctcctcctat

SEQ ID NO: 13140 - DNA, 288 bp, Zea mays
ctctgggtctggggccgagacaccgagcacgtactaccagcaagatggtggcgtctcccagattcaagcccatcgaggagtgctgctcggaggggcggtcggagcagacggtggccgccgacctggacggcacgctgctcatctccaggagcgcgttcccctactacctcctcgtggctctcgaggccggcagcgtcctccgcgccgcgctgctgctcctgtccgtgccgttcgtctacgtcacctacgccttcttctccgagtcgctggccatcagcacgctggtgt

SEQ ID NO: 13141 - DNA, 291 bp, Zea mays
caattcgctcgagttcagatcgagcgcgcgccaagcaagttttccggccggccgcgaagagcgcgatcaagcaagacaagatggtgaagctcgccttcggaagcgtcggcgactccttcagcgccacctccatcaaggcctacgtggccgagttcatcgccaccctcctcttcgtcttcgccggcgtcggttccgccatcggctacgggcaactgacgaatggcggcgcgctggacccggcgggcctggtggcgatcgcgatcgcgcacgcgctgggcggtgttcgtgggc

SEQ ID NO: 13142 - DNA, 287 bp, Zea mays
ctgatccagctgaagctgagcgacttagattcttggcttctccttctggaaaggatgagtattctcaatggataactgctagtcagaggagccttcttgaagttatggccgcattcccttcagctaagccaccactgggagtgttttttgcagcaatagctcctcgtctgcaaccacgatactactcaatttcatcatctccaaagatggctccctccagaattcatgtaacatgtgcgttagtttatgggccttcaccaacaggaaggatccaccaaggagtttgt

SEQ ID NO: 13143 - DNA, 287 bp, Zea mays
cccacgcgtccggagtggaaaggatcaaatcatcgaccggagtatccaggatgcatacataaatgccatacggagggcgaagaacttcatctacattgagaatcagtacttccttggaagctcatatgactggacgccggaaggcatcaagccagaagatatcgattgtcttcacttgattccgaagagctctcattgaagattgtcagcaagattgaggctggggagcggttcactgtttatgttgtggtgccaatgtggcctgagggtgttccagaaagtgcttc

SEQ ID NO: 13144 - DNA, 289 bp, Zea mays
ctcacaacccagtcgctcaaaaccctagagctctcgcctgctcgcctccgccgccggagcgagctccccatcttcatccgtcaaccatggcgacccagatcagcaagaagaagaagttcgtcagcgacggtgttttctacgccgagctcaatgagatgctgacgcgggagctggcggaggatggctactctggcgtggaggtgcgcgtcacgccgatgcgcacggagatcatcatccgcgccacgcgcacgcagaacgtgctcggcgagaagggccgcaggatcaggga

SEQ ID NO: 13145 - DNA, 299 bp, Zea mays
caagcacaagcgcactctagcaatggcttctgaggttgtccgccctagcgacgccgagctactaaaggcacaagccgacatatggcggctcagcctctcctacctcacgcccctgtcactgaggtgcgccgtggagcttggcatccccacggcgatctaccgccatggcggggctgcctcagccgctgagctggtcacggcgctgtctctcccctccactaagctgccgttcctccgccgcctgctgcggctcctcgccgcgtcgggcgtgttcaccgtcgacaagcagagcacggagg

SEQ ID NO: 13146 - DNA, 295 bp, Zea mays
ggtcaagatctttataaatcgaagcaggtgagggataaacaaattgtgcgagtacttgggaaggcaccaacaatagcagctgctgcctacttgagattagcaggaagacctcccgtccttcctttaaatactctatcttattcagagaacttcttgtacatgctggactctttgggtgacagaacatataaaccaaatcctcgacttgctcgagctctagatattctttttattctgcatgctgaacatgaaatgaactgctccactgctgctgttaggcaccttgcttcaagtg

SEQ ID NO: 13147 - DNA, 297 bp, Zea mays
cgtctgtccgctacccctccccgaccagatcgctacgagacgccgcgcgatccgacccaggccgacgccgacgacccctctcgccgccggggtccatggcgtacggcgaccgcgtcaccaccttcgaggactccgagaaggagagcgagtacggctatgtccgcaaggtctctggacctgtggttgtggctgatggaatgggtggtgctgccatgtatgaacttgttcgtgtcggacatgataacctcattggggaaattatccgtcttgagggcgattcagctacaatccaagttt

SEQ ID NO: 13148 - DNA, 295 bp, Zea mays
cctgaacttggcccaagcaccaagttcacatacgcttctcacaaggctgtttctgagtacaaggaggcaaaggcgctcggcattgatacagtcccagtgcttgttggaccagtgtcatacttgctcctctctaagcctgccaagggtgtggagaaatctttctctcttctttcacttcttggtagcattcttcccatctacaaggaggttgttgctgagctgaaggcagctggtgcttcatggattcaacttgatgagcatacccttgttagagaccttgatgctcgcgaattgg

SEQ ID NO: 13149 - DNA, 295 bp, Zea mays
caaaatctattatattccataacacaatcatagtggtccaattattatatcttaattgccacaacattgtgtataaacattattataattgttcgtcctagcaatgctatgcttttgctagtaactgatgatataatatgcaggtatttaattgttattgatgacatatgggacatctcagtctggaaaatgattagatgtgctttaccagataataatatcgggtacattattgttacaaccacacgcatttccgatgttgctgaaaaagttggtggtgcttataagctaaaac

SEQ ID NO: 13150 - DNA, 291 bp, Zea mays
cacacctcccgaactacaagtttcgcttctcgtcgcgacgactgggcgagaccgccgccgccgcctgagttctgtagaaatggctgatggtgaggacatccagcctcttgtctgcgacaatggcactggaatggtcaaggctggttttgctggcgacgatgcaccaagggctgttttccctagtattgttggccgtcctcgccacactggtgttatggtagggatgggacagaaggatgcgtatgttggcgacgaggcacagtccaagagaggtattctcacgctcaagta

SEQ ID NO: 13151 - DNA, 293 bp, Zea mays
cagcacactcgtctttttcctctacggccgccaccatcgcctcgcggccgcctgccgctccgctcgaaagtttttagtgaagattttttgaagccgagaagatggtgctgaagacggaactctgccgcttcagtggccagaagatctatcctgggaaaggcatccggtttattcgtgctgattctcaggttttcctttttgccaactcgaaatgcaagcgctacttccacaaccgcctgaagcctgcaaagcttacctggacagcaatgtacaggaagcagcacaagaaggac

SEQ ID NO: 13152 - DNA, 290 bp, Zea mays
accacgcgtccgcggaccgtggctcagacaatggcactccaggcagcctacgagtacctgcagcaggccgtcggcatggcgcgtggtcgtccacgcagacgctgacgctgctgctcatcgccgtacccaccgtactactgctgctagcgtccctcgccaagagcacgtcgtcgtccggtaggggcaagccgccgctccctccctcgccgctgggcaccctccccatcgtggggcacctacaccacatcgggccccagacccacatctcgctccaggagctggtggccaag

SEQ ID NO: 13153 - DNA, 289 bp, Zea mays
cggacgcgtggcacctatcatcgccgctgcgccgtctcctccgctcccgtcgtccggaaagatggcgtcccacattgttggataccctcgcatgggccccaagagggagctcaagtttgcacttgagtctttctgggatgggaagagcaccgctgaggatctggagaaggttgctaccgacctcagggccagtatctggaagcagatggctgatgctgggatcaagtacatccccagcaacactttctcgtactatgaccaggtccttgacaccactgccatgctcggc

SEQ ID NO: 13154 - DNA, 293 bp, Zea mays
cccacgcgtccgcccacgcgtccgtcccacaccgggcacaccccccgatctcagcttagctccactccagctccaatcacagtcgtgaccagagcgcgagagctagctagagggccgtgaaaatgccgatcaataggatcgccctggggagccaccaggaggtgtaccacccgggcgccctcaaggcggcgttcgctgagttcatctccaccctcatcttcgtcttcgccggccagggctccggcatggccttcagcaagctgaccggcggcggtccgacgaccccggcgggc

SEQ ID NO: 13155 - DNA, 292 bp, Zea mays
cgagaagccggtcaccgtctttggcatcaggaaccccgaggagatcccgtggggtgaggctggtgctgagtatgtcgtggagtccaccggtgtcttcactgacaaggacaaggctgctgcacatctgaagggtggtgccaagaaggttgttatctctgccccaagcaaagatgcgcccatgtttgttgttggtgtcaatgaggacaagtacacctccgatgttaacattgtttccaatgctagctgcaccacaaactgccttgctccccttgctaaggtcattcatgacaac

SEQ ID NO: 13156 - DNA, 289 bp, Zea mays
ggacctgggccggagatgatagagagggaccggttctcgtggttcaaggacgaggagttcgcgaggcagacgatcgcggggctcaaaccgctgtgcatccagctgctgactgagttccccatcaagagcaagctggacccggaggtgtacgggccagcggagtccgccatcaccaaggagatcctggagaagcagatgaacggcgcgctgaccgtagagcaggcgctggcggcgaacggtctgttcatcctggactaccacgacgtgttcctgccctacgtgcacaagg

SEQ ID NO: 13157 - DNA, 280 bp, Zea mays
  unsure (1)..(280): unsure at all n locations
agagagaggacatagccgcacaaagggaaggataccctcgccaacctcgaagctagtccaaactagtgggaggttgaactcagggatcgatcggggaagacgagacaannnnnnnnnnnnnnnnnnnnnnnccccgccagctctagttcaccagagttactacttactagccaatctgacaccgatccaccgccggcaccgaccgtccatggcgcggggcaaggtgcagcttcggcgcgtcgagaacccggtgcaccggcaggtgacattctgcaagcgc

SEQ ID NO: 13158 - DNA, 293 bp, Zea mays
ctcttgcaacaagccaaacaacccagtggctgctagccgagacaggggatagattgagagagaggcgcgcagatggcgacgccgtcgtcgtcgctttgctccagcttcgcctccctgcggaccgcctccatcggccacccccgtggcatcgcctcctccacgcccaggaaggcattccatgtgagggcatcagctcgggttgacaaattctcaaagagtgacatcatcgtgtccccttcgattctgtctgcaaactttgcgaactgtggtgatcaggtaaaagctgtggaggt

SEQ ID NO: 13159 - DNA, 292 bp, Zea mays
cggacgcgtggctcgcctcgtcagatcgaccgggaagaagggagcagaagccaaccggctcgtccgcccgttgcctgtcgtcgctatggacgccgtggaggtgtgcgtgaaggccgccgcggggaaccccgacacgctcggcgattgcccgttctcgcagagggtgctgctcacgctggaggagaagaaggtcccgtacgaggtgaagctcgtcgacctcggcaacaagcccgaatggtttctgaacatcagcccagagggtaaggtgcctttgttcaacggtggagatggc

SEQ ID NO: 13160 - DNA, 287 bp, Zea mays
ggcggcggcgcgatcccgaagacatggacgccgacgtggcactgaacgacgaggcgaggcagccgctgtcgaggaaggtgtcgatcgcgtcgagcaaggtgaacccgtaccggatggtgatcgtggtgcgtctcgttgtgctcgccttcttcctccggtaccgtatcctgcaccccgtcccggacgccatcgggctgtggctcgtctccatcatctgcgagatctggttcgccatctcctggatcctcgaccagttccccaagtggttccccatcgaccgcgagacg

SEQ ID NO: 13161 - DNA, 292 bp, Zea mays
atcaagaaagaagcatgctggacaatctcaaacatcacagctggtaacagggaacagattcaggccgtgattaatgcaaacataattgcacctctggtgaacttctgcaaactgctgaatttgacatcaagaaagaagcagcctgggcaatttcaaatgccacttctggtggcacacatgatcagatcaagtaccttgttgcccagggttgcattaagccactctgtgatctgcttgtttgcccggatcccagaattgtaacagtttgcttggagggtcttgagaacatcct

SEQ ID NO: 13162 - DNA, 280 bp, Zea mays
tggctgctccgcgcgcgccgctgcctctcccccaactgctgctcctcctcgttgccgcgctcctcgccgccgctcccctccctagggcggccagggcggacgagttcgacgtccgccgccacctctccaccgtcaccaggtatgatgtggccagggagtccagtagtgtcatctccatgccgtcaatcccagacgggtgccgtgtcattcacctcaatttagtggcaagacatgggactcgcgctcctaccaagaagcgcatcaaggagctggatagatt

SEQ ID NO: 13163 - DNA, 287 bp, Zea mays
gccgccgccgctgcagtgtccatagccaccgcagagactgagatggggggttttgtcaagacccacaagaccaatgcgtacttcaagcgtttccaggtgaagttcaagagaaggcgcgctggcaagacagactacagggccaggataaggctgattaaccaagacaaaaacaagtacaatacacccaaatacagatttgttgtgcgatttaccaacaaggacatcacagcacaaatcatctctgctagtatagcaggtgatatggttcttgcttctgcttactcgca

SEQ ID NO: 13164 - DNA, 288 bp, Zea mays
cccacgcgtccgccagacccagcagctattgtggtcgtccctcagccgcgtcgcaccgcatcgcattctacgattcgaagctctctctgctcgcagccatggcgaagaattacccaaccgtgagcgccgagtacagcgaggccgtcgagaaggccaggcgcaactccgcgccctcatcgccgagaagagctgcgcgcccctcatgctccgcctcgcgtggcactccgcggggacgttcgacgtgtcgtcgaggaccggcggtcccttcggtactatgaagtgcccggc

SEQ ID NO: 13165 - DNA, 288 bp, Zea mays
gtgccactttctcagtcccctctagccgccgcctaccgctcgcgctctcctcgcgttcgggaaggtcgtttcgccatggcctcggagacggagacgttcgccttccaggcggagatcaaccagctgctctcgctcatcatcaacaccttctactccaacaaggagatcttcctcagggagctcatctccaactcctccgatgccttggacaagatcaggtttgagagtttgacggacaagaccaagctggatgcacagccagagctgttcatccacattgtccccgac

SEQ ID NO: 13166 - DNA, 147 bp, Zea mays
gcggagggtgaacgcaagccattgcttaacattgccatgcagctgcgcaagtagctcaaccatccatatttgttccaaggagctgaacctggcccaccctacacaactggtgaacatctagttgagaatgccggaaaaatggttcta

SEQ ID NO: 13167 - DNA, 198 bp, Zea mays
ggcatgtcgggtaaggatgaccaaaaacttgagaggggtaatcttgtactagagaggagtttgcatagaggtaatccaatcagagtcattcgtagcgtaaaagacttgacttgtccaactggcaagatttacatatatgatgggctttacaagatccaagaagcctgggtagagaaagggaaatctggtttcaatgtg

SEQ ID NO: 13168 - DNA, 336 bp, Zea mays
cccacgcgtccgcgacgcggtatgatctacacattttacaaggcacaaggatattctgtaggaaaatctcccgtggaagaggataaacttgagctcgcaacttctcttattgagaaggcgaaggcaaagggggtttctcttttgcttcccactgatattgtagtagcggacaagtttgcagccgatgctgagagcaagattgtccctgccactgctatccctgatgactggatgggtcttgatgttggccctgatgccacgaaaaccttcaacgaagcattggacaccaccaagactgttatttggaacggccccatgggagtgtttgagttcgag

SEQ ID NO: 13169 - DNA, 319 bp, Zea mays
cccacgcgtccgagcaaccggtccaacactttcacgctcaggcgctcagctctagcaatggctgcctccaccatggcgatctcctccacggcgatggccggtacccccatcaaggtgggctccttcggcgagggccgcatcaccatgcgcaagaccgtgggcaagcccaaggtggcggcgtccggcagcccctggtacggccccgaccgcgtcaagtacctcggccccttctccggcgagcccccgagctacctcaccggcgagttccccggcgactacggctgggacaccgccgggctgtccgccgaccccgagacct

SEQ ID NO: 13170 - DNA, 278 bp, Zea mays
ctagccaaagcatgcacctcggagtccttgcgactgcatggcacgccattaacacgaatccatgttcactgtctactacaagcctaggacgagcccttcagagttcatcataccgtacgatcaatatatggagtcggtaaaacataattattctattggcatgagattcaggatgaggtttgacggagaagaggcgccagagcagaggtttactggtacaatagttggttgtgaaaatcttgacccactatggcctgactccagttggagatacttga

SEQ ID NO: 13171 - DNA, 337 bp, Zea mays
gtacgaagccgacgagcagccgacgctaaagcttggtccggtgagcttcagagaaggggcgggtacgtcaagatgcagatcttcgtgaagaccctgacgggaaagaccatcaccctcgaggtcgagagcagcgatacaatcgacaatgtcaaggccaagatccaggacaaggaaggtatcccgccggaccagcagcgactaatcttcgcggggaagcagctcgaagacggccgcaccttggccgactacaacatccagaaggagtccacccttcaccttgttcttcgccttcgcggtggcatcattgaaccttccctccaggcgctcgccgcaagta

SEQ ID NO: 13172 - DNA, 135 bp, Zea mays
ctccacagcagtagcaagacggatagagcaaggccacacacacacacacaccactagtaggctagcctagccttttagtcgtcgaggaggagcaagatgggcgcgcacgccagcatgcaagccagacgagagccg

SEQ ID NO: 13173 - DNA, 339 bp, Zea mays
gtcagactggaaccagagttccagttggtggtggagacaacaacgttgttcacaaagccgaggacgttgtgagcactatgcttgccaagggtttcgtgctaggcaaagacgcggttggcaaggccaaagcattcgatgagaagcatggcttcacatccacagccggtgctacagtggcctcaattgacaagaagattgggctgactgataagatcacgacaggcacttccttggttagcgggaaggtgaaggagatggaccagaagttccaggtctccgacaagaccaagtctgcactcgctgccgccgagcagaaggtgagcagtgccgggtctgcca

SEQ ID NO: 13174 - DNA, 133 bp, Zea mays
actggcaaccgtgatgctgcgtccttggttaacaatgatgatccaacttgtattgagatatggcaccttgtattcattcagttcaatagggaggcagatggcacattgagacctttgccagccaaacatgtgg

SEQ ID NO: 13175 - DNA, 328 bp, Zea mays
gtatgacgcaatcactgtgaatggtgaccttgattggcaggataagctcaacaagtacaataagccattctttgatgtatgtgatgggctattttctaactatacatggacggcaaatgacccacaagattcagctacagttgctggcgacagacaatatgatgtatacatgggtattgatgtttttggacgacatacatttggtggtggtcaatggactacaaatgttgcccttgatctacttaagacagttgatatctcagctgccatatttgctcctggatgggtatatgacactaagcaaccacctgactttcagagagcgcag

SEQ ID NO: 13176 - DNA, 333 bp, Zea mays
gctttcctcagacatggcttcagctggtgtagcccatctgggtacaaaaacagcagcagcactagcattggtgccgagaagttgcaagaccagatgaacgagctaaagattagagatgataaggcagttgaagcaaccataattcatgggaaacggactgacactgggcacataattgtcaccactactggtggcaagactggtcaaccaaaacagacagtgagctacatggctgagcgcattgtaggtcaaggttcttttgggatcgtcttccaggctaagtgtttggcgacgggtgagactgtctgcatacagcaggttcttcaggataag

SEQ ID NO: 13177 - DNA, 138 bp, Zea mays
ctctctcttcggcgaggcccgcctgacgatgcgcaagacggcggcgaaggcaaagccggcgcggagctccggcagcccgtcgtacggccccgaccgcctgctctacctgggcccgctgtccggcgcgcccccgatcta

SEQ ID NO: 13178 - DNA, 157 bp, Zea mays
cctgccgcacggatgcgctgggtgccgcaagtccatgacctacaactactgccccgaccccaagccctcccagccgggcctccccgccgagtgctccatgcagtagcgcccggttattcctcggccgtccaacaatggcgggcgcgcccgtgtgtgt

SEQ ID NO: 13179 - DNA, 286 bp, Zea mays
cggacgctgggcgccaacaagcgtggtagtagagtggtgctactgttactgtagtacgtcgtcgtcttcatgcatgcatggttcgtggtttcccctagctccaaacgagcagtagttgggccttgcacgtaccgtacgtctagctagctatatatatagcttgtgttctactgctttttagtttaattacctgcctgcattggagagttggatctgtttcatttggtggtgtttgctttactattaggtcagtatctgtttgtggagacttggtgtttaatttatt

SEQ ID NO: 13180 - DNA, 284 bp, Zea mays
ggagttcgaggacctggacgacacccagaagctggaggtgtacaacagcatcatcgtcgagtcggggcgggcggggctaccggtgcggatgttctcgtcgggccgctctgccggtggccctaagattgcagccacgacgtgggcggaggcggtgagcgtcttcatcatggcggcgggcaacctggcgtgggacgtgttcaccacggagcacgaggtggaggccatcctcaagggcagcctcaacctcctggcggggctagggggcttcgccgtggaggccgtcg

SEQ ID NO: 13181 - DNA, 282 bp, Zea mays
ggaggaccgtcggtgctgtggacggagagcaaggacgtgggcaagggcttccgctgcatccgcatggtcaacaacacccgcctcaacttcgacgccttccacggcgacaaggaccacggcggcgtgcatcgacggcaccgcgtctctctgggagtggtgcaagggcgagaaccagagctggaagatcctgccgtggggtcccgaggccaactcctccgcggcccacgcgggaggcccgcacgccgtgcgcgtcttctgcaaggccggcggcgaggactacag

SEQ ID NO: 13182 - DNA, 193 bp, Zea mays
cctccaactacccgagaccatcgacgagcatcttcctgcatctgcaatggctgccgctaccgtgtccgtcccccgcatcaagctgggctcccaggggctagaggtctccgcgcagggcctcggctgcatgggcatgtccgccttctacggtccgcccaaacccgagcctgacatgatcaagctcatccaccac

SEQ ID NO: 13183 - DNA, 119 bp, Zea mays
gaaactgaggaggacaagaaggcagctgatgagcgtgctgccgctgccaaggcctcttctaaaaagaaagaaagtgcgaaatcctccgtccttatggatgtaaaaccatgggacgatga

SEQ ID NO: 13184 - DNA, 277 bp, Zea mays
ggcaccgacaaggagaccaccacccagggccacgatgacctcggcaagcgctgcgctaagtactacgaggccggtgcccgctttgacaagtggcgtgctgttctcaagattggccccaacgagccgtcacagcttgccattgacctgaatgctcagggtctggctcgctacgccatcatctgccaggagaacggtctggtgccaattgttgagcctgagatccttgttgatggccctcatgacattgatcgctgcgcttacgtcactgagacagtcc

SEQ ID NO: 13185 - DNA, 275 bp, Zea mays
ggcgccgacgagactagtcttctcagccaggaccgcgtctgcatggagtggctagacgcacgggcccctggatccgtgctgtacgtgagcttcggcagtgttgttcatgtcaccccagacgagttggtggagatcgcgtggggcttggcgaacagcggcgtgccgttcctgttggtggtctggcgtggccttgtggtcggagtggacaagcaggagctcccggacgggttcatggcggccgtggagggcaggggcaaggtgatcgagtgggcgcc

SEQ ID NO: 13186 - DNA, 280 bp, Zea mays
cgccgcgcgatccgccgcggctacgcgaggcgtacgggaaggagctgctccgcgctctcggcgacgagatccacggcaagttcgagagggcggtgatcctgtggacgctggaccccgcggagacggacgcggtgctggcgaacgacgaggcgaagaagagccaccccggcggccgcgcgctggtggagatcgcgtgcgcgcgcacgcccgcgcagctctttgcggtcaagcaggcgtaccatgaccggtttaagcgatcgctcgaggaggacgttgccgc

SEQ ID NO: 13187 - DNA, 284 bp, Zea mays
cccacgcgtccgcccacgcgtccgcccacgcgtccgcccacgcgtccgcaatgagcagggctgattgaagccacagctcgcagagcaggaccaatacccagaagacttgcccagaatttctgcatgaccgattggctgcaaagcttaagcattggaaggctgaatttgttactacactgcagcattactggttagggacaaagctactatgggcagatgttagaatctcatcaagattactggtgaaacttgctggtggaaaaagcctttctagaagagagagg

SEQ ID NO: 13188 - DNA, 263 bp, Zea mays
  unsure (1)..(263): unsure at all n locations
ggtaaaactacatttgtgaagaggcatctcactggagagtttgagaagaaatatgaaccaaccattggtgtggaagttcatccgttggatttcaccactaactgtggtaagatcaggttctactgctgggataccgcanggcaagagaagtttggtggcctcagggatggatactatatccatggccagtgtgcgatcatcatgtttgatgtaacctcaaggcttacttacaagaatgttcctacgtggcatagggacctgtg

SEQ ID NO: 13189 - DNA, 269 bp, Zea mays
ggtttagcacgcccgcttccagcacgcatcctcccctcctcccgtctcaagggatagcagggtgcagcggctcgaagctggaggaagcggacgggttcgccatggggtccgagggatcctcgggtccagttgtcgttcccagaaactttaggctgctagaagaactagaacgtggtgagaagggcattggtgatggaactgtgagctatgggatggacgatgctgatgacatatttatgcggtcctggacaggaactatcattggtcct

SEQ ID NO: 13190 - DNA, 275 bp, Zea mays
cgccggagctcgacaaggacgaccgacgacgcacgcggagatccggcgtactgcaaattttgaaaactgaactgtaagatggcatcagcagagctttcccgtgaggaaaatgtgtacatggcgaactcgctgagcaggcggagaggtacgaggagatggttgagttcatggagaaggtagccaagactgttgactcggaggagctcactgtggaggagcgaaacctcttgtctgttgcatacaagaacgtcattggagtccgccgcgcctcatgg

SEQ ID NO: 13191 - DNA, 276 bp, Zea mays
cccacgcgtccgcccacgcgtccggagcaagcccagtccccaatcccaccctgccacccaaccttgcttcttctccgatagctatttctctggtttctccccaatcttcccgggtttccctgattaaagatggctgagtcctttgttctcaataccggctcgaggatcccatcggttgggcttggcgtatggcaaatacaacctgacgctgccaacgacgccatctacgctgctgtcaaggctgggtatcggcatattgactgtgcagcagcatac

SEQ ID NO: 13192 - DNA, 282 bp, Zea mays
cgaccttcaagtctcgctacgtagcagtgcaataaaaaaagcagccgcaatggcgagcagcaccatggccctctcctccacggccttcgccggcaaggccgtgaacgtgccgtcgtcgtccgccttcggcgaggcccgcgtgacgatgcgcaagacggcggcgaaggccaagccagcggcggcgtccgggagcccgtggtacggccccgaccgcgtgctgtacctgggcccactgtccggcgagccaccgagctacctgacgggcgagttcccgggcgacta

SEQ ID NO: 13193 - DNA, 321 bp, Zea mays
gaagaagcagcgcacaggtggcagggatgggtcgcggcggttttggggacggtggagttgctcgcggtgaaaatggtgagggtaggcaggcagagaggggccgtgggcccgccagccttaccgtggaggtgggcgacgtggtgggtacagcgatgggcaggctgggaatgagttcggacgtcctcgccgggcatatgagcgccacagcggcacaggccgtggctacgggatgaagcgtgaaggggctgggcgtggaaattggggaactgcaactgatgaaggccttgaacaggacactgtggatgctgttaatcctgagga

SEQ ID NO: 13194 - DNA, 322 bp, Zea mays
agaggttagataagcttagcaagagcaaaactaaagatacacaagtaaaagtgaaggaacaagcagagaaatcacgattggaaaaaattcagcaagcacttatggaaggaaaaacctgcaagatcgatctatttggctgagcatgagaaacaagctataaaacatctttatctgctaactatgaaacctgtcatttatgttgctaatgtaacagaatcttatcttgctgaacctgatatcaatcctcatgtcaaagaggtgtctaaaccaacatcagacttgcagtctggtatggttacaataccagctcgggtttattgta

SEQ ID NO: 13195 - DNA, 321 bp, Zea mays
agacgagagccagctctcccagcacacgagcacatggcgtccaccaccctcctcgctgtcttcctgctcgtggctgcgtccgcaccgccggcgcggtcttgctcacctcgcgacctgcaggcgctgttgagcgtgaagcaggcgctagggaacccggcaacgctgtcgacgtggaccccagcgtcgcccgactgctgctcgtgggaccacctccggtgtaacgacgccggacgcgtgaacaacgtgttcatcgacggcgcggacgacgtgcgcgggcaaatcccgtcggcggtgggcgggctgacggagctcatgtcgctg

SEQ ID NO: 13196 - DNA, 320 bp, Zea mays
cccacgcgtccgagagccgcaaagttatgggtcatcaacagctggttgctgaatgtgttgagcagctgagccgcatgttcaagcctgacttcaaagccataaagaagaggattgaggatctcattacaagggactacttggagcgcgacaaggacaacgctaatacgtacaaataccttgcctgattggtggtcagtggcaaaagtccaaaacagctcccagactagtgcaataccacgggggtggcgatctcctgcaaggtggtggtgcgtcaacttttaccatgatttgaggtgcgttatggtgatttgcgtgcttat

SEQ ID NO: 13197 - DNA, 318 bp, Zea mays
gagaaagttaccagctttatagctgatgaggaatggcaacaatttgaggaggctgtccaacatgactttgttactgggtttgggaagaagctcagcagccttctggatagatgtttatcagagtatgacatggaggctatttattttgatgaaggtgtcagaagctcgaaaagacaacaacttgagtctaaactgttacagcttgtcaatcctgcctatcaatctcttctaggtcacttacacactagaactttagaagcatttaaggagtactttggcaaggccctagaaaaggagggatttgctgttgcagcttgc

SEQ ID NO: 13198 - DNA, 318 bp, Zea mays
cccacgcgtccgctcttgctcgcactcgcggagatcgaagagaagcgcaggaggccccagcactagcgccgccccgccgccgcatcagacatggcgctggccgctcgcctcgtctcgcgctcccgtcagctatattcggttcaagccactttggggaatggaggtgtcactcaagttcgctcctttgccaaggatgcagctccagctgaccgtcctcctgtcagtggggatgatctcctgaagggcatattctttgaggtaaagaagaagtttgagacagctcttggtgttcttaaaaaggaaaagatcactattgat

SEQ ID NO: 13199 - DNA, 311 bp, Zea mays
gtgagaccaccaacagtgtccatggctctggacgccccggtggagcgacgggacgaggtacagatcgcgatggggaacggaaacggcgtggcgccgtctcaaccgtcgcggccagccggtcggccaacggctgctgcggcggcacgccatacgcggacaggcggctgcggctgaacccaaatgcggatcacaagccggaagactacagcgacgtgcgcggcgagtacgcgccggccgtgtacagcgcactcgagcggcatctcccacccagcctcatcgatgccgaccgcgatgtcaagctacacttcatg

SEQ ID NO: 13200 - DNA, 314 bp, Zea mays
cagcgacgcaccagtgatctcccggcgaaatcccgctcccgcgtcccccctcctccggctgcctctgccgcgcccccgctccggaaggtgcagtaaatcatggcgactgggcaacttttctcaaaaactaaccaagcgttattctacaactacaagcaacttcccatccaacggatgcttgattttgacttcctctgcgggagagaaacaccttccgttgctggaataatcaatcctggttctgacggttttcagaaacttttctttggacaagaggaaattgctattccagttcatcctacagttgaagctgc

SEQ ID NO: 13201 - DNA, 313 bp, Zea mays
ccacgcgtccggtgagtttaagactattgtgaacaacgggatcaagattggtgcatctctctccgttgctgagttcatttggtatttgagatggttgtgtccacttaatgaggagctttacaaaactcacaatgagagaagggaccgcctgacaatgaagatcattgatgagcacgctaagtctctcaaggagagtggcgccaagcagcactttgtggatgcactcttcactctcaaacaacagtatgaccttagtgaagacacagttattggacttctatgggatatgatcactgctggaatggacacaaca

SEQ ID NO: 13202 - DNA, 317 bp, Zea mays
ccctctcgtcgccgtcctctcccgttcgcaacgccacgctccccaccgccgaaatggccccgaagcgaggtggcagggcaccggtgccggccaagaagaagacggataaagtgacgaaccctctgttcgagaaaaggccgaagcagttcggcatcggcggcgcgttgcctcccaagaaggacctgcaccgattcgtcaagtggcccaaggtcgtgcgcatccagcgccagcgtcgcatcctcaagcagcgcctcaaggtgcctccggcgctcaaccagttcacccgcatcctcgacaagaacctcgctaccaacctg

SEQ ID NO: 13203 - DNA, 318 bp, Zea mays
acgacgcgtggcccacgcgtcgcgaagctttacaagagtcactaataatgattgatagagagatgccaggctttgtttctagcaaggccctacttcatacgtgtggagaccaggacaagttctcccttacaaatttcacgacatggagaaacatacgaaagtacatcactgcgaggattatatccaactggggaaggtgctggctatgctgggggcatcttaagtgctgctgtggatggtatgtattgtggttttgctttagctaaacaactttctttattccatggcgatatagagccatttctaggcaaaacacaa

SEQ ID NO: 13204 - DNA, 318 bp, Zea mays
cccacgcgtccgccttccctccctccctctccccgcgggccgccagaggcaatttcgccctcgattcgaccccgattcgtccgcccgcgaccgggattccctccgccaagcgcggatctgaacgctgcgctccgtgtcgccgctcgaatccgccatgaagggggccaaatccaagggcgccgccaaggccgatgccaagctggcggtgaagagcaagggggcggagaagcccgccaagggcaggaaagggaaggccggcaaggaccccaacaagcctaagagggctcccagcgctttcttcgtgttcatggaggaatt

SEQ ID NO: 13205 - DNA, 317 bp, Zea mays
caagagctactactacagctcctcatctcaagtgtgtagacgagacagagagacactgagagagcgccatggccagcctccaagtcactcctacttcggcgttcactgagtggaacgagctgaagttcgaaggcctgtacctgttccacacgcccctgggctcaggcgccaaccaagctcgggtcatagacaacaaggcgccgattggcatcggtgccaccgtagttaacaactggacagtgtatgacgggccagggccgaacgcaaagctggttgcccgtgcacagggcttgcatatccaagccggcaactgggtc

SEQ ID NO: 13206 - DNA, 316 bp, Zea mays
acagaagacaacccgtcagcccctctcgtttttcatccgccttcgcctccaaccgcgtgcgctccacgcctcctccaggaaagcgagagcttctgcataagaacaacaaatcaaaagcgtgatcagctcggtgccaacaaaacctcaacaaccaagtttcatgtctgatctcgacgtccagcttccatctgcctttgatccgtttgctgaggcaaatgctgaggactctggtgctggtcctggaacgaaggattatgtgcatgtgcgcatccagcagcgcaacggcagaaagagtctgactacagtccagggtctg

SEQ ID NO: 13207 - DNA, 311 bp, Zea mays
cgcttccagccgccgccgccgcgtccgcctcgcccagcgcacagccgccgcagcacatcgctatctcgatctcagccatggcggaggtggagcagcaacaggacacgccgaagctgttcaaccgctggaccttcgatgatgtccaggtgaacgacatctcgctgaacgactacctcgctgtgaacgcgacgaagcacgcgatgtacctgccgcacaccgcggggcgttactccaagaagcggttccgcaaggcgcagtgcccgatcgtcgagcgcctcacaaactccctcatgatgcacgggcgcaacaac

SEQ ID NO: 13208 - DNA, 310 bp, Zea mays
cacgccgccgtcttctgcggttctgccgtttactcttccactttggcctcctctcttgcaagtttaagcttcgcctccagccatgggtaaggagaagtctcacatcaacattgtggttattggccacgtcgactctggcaagtcgacaaccaccggccacctgatctacaagcttggaggcattgacaagcgtgtgatcgagaggtttgagaaggaggccgctgaaatgaacaagcgatccttcaagtatgcttgggtgcttgacaagctcaaggctgagcgtgagaggggtatcaccattgatattgct

SEQ ID NO: 13209 - DNA, 312 bp, Zea mays
cagagtcacttcgccacgaacaaaagcgcatcgatctcgctgtcgtcactcctcgtcacccagccacgaacagaggcaccacccagcatggccctgcaggcggcgctcctcccatccaccctctcatccgtccccaagaagtgcagcctcgccgtcgcggcgaaggacacggcattccttagcgtatcccagaagaaggtgcaggcggcgtcgctgtcggtgagaacgcgggtggcgacgacggcgcctgtggccacgccggggtccagcacggcggccaaggatgggaagaagaccgtgcggcagggcgtg

SEQ ID NO: 13210 - DNA, 309 bp, Zea mays
cccacccgtccgcccacgcgtccggagattttgatgaggggttaacccgaggtttgcagcaacgtctaacccaactgtactagctgtaatttctatagtttcctgttcacattccagaggacacttcaatggtttgcagtttcatttggtttcaagtcagtggatgattattactccaattcaagcagctcggattctatcaaggatgtttgcatacccttactctgcatacaggtcaaacttcactctatctgttctgtgcttcattagacgccaggacattaggaacaacagatacagtttaagagc

SEQ ID NO: 13211 - DNA, 313 bp, Zea mays
cactttcacaaggaccatgactaccaccacttctttgaccacttccacaagaagcccgtgccacccaagccaaaaccggagccagagccaaagccaaagccacaacctaagccagagtacaagccccccatgcccacatacgggtctccaactcctatctaccatcctccagccaagaaagaagtggcatttgacaagaagcacttccttgatcacttccacaaagaccatgactaccaccactttttttaccactttcacaagaagcctgtgccaccgaagcctaagccggagcccaagccagagctcaaac

SEQ ID NO: 13212 - DNA, 311 bp, Zea mays
cccacgcgtccgcccacgcgtccgcccacgcgtccgcccacgcgtacgcccacgcgtccgggcacttatctacgagttcatgccccatggatctctcgataagtacatcttctcgtcggagaagagtttctcatgggacaaactcaatgagatcgctttgggcattgctagaggtctcaactacctacatcacgggtgtgatatgcagattgtacacttcgacatcaagccacacaacatccttcttgacagtaactttgttccaaaagttgttgattttgggcttgccaaactgttcccaagagacgaca

SEQ ID NO: 13213 - DNA, 308 bp, Zea mays
cgccgtctgccttctgcgcctccatttcggcctctgtcccttgcaagttcaatctcacctccaaccatgggtaaagagaagtcccacatcaacattgtggttattggccatgtcgactctggcaagtcgaccaccacaggacaccttatctacaagcttggaggcattgacaagcgtgtgatcgagaggtttgagaaggaggctgctgaaatgaataagcggtccttcaagtacgcgtgggtgctcgacaagctcaaggctgagcgtgagagaggtatcaccattgatattgctctgtggaagtttga

SEQ ID NO: 13214 - DNA, 309 bp, Zea mays
accgctacaaccgcgtcttcttctccaacgacacgtacctccccagccagatgccggcggcgctgaagccctaccgcgacgacgagctccggaacctgaggggcgacgaccagcagggcccgtaccaggagcacgaccgcgtctaccgctacgacgtctacaacgacctcggcctgcctgacagcgggaacccgcgccccgtcctcggcggcaccaaggagctcccctacccgcgccgctgccgcaccgggcggaagccaccaagagcgaccccaacagcgagagcaggctcacgctggtcgacggcga

SEQ ID NO: 13215 - DNA, 308 bp, Zea mays
ggacgcgtggccgtccgtgaggaccaaaggattcttggcagtggtgtgcatgttgttgttggtacacctggtcgtgtgtttgatatgctactcagacagtccctccgccctgataacatcaagatgtttgttctagatgaagctgatgaaatgctttctcgtggtttcaaggatcagatttacgacatcttccagcttctcccagccaagattcaggttggagtcttctctgctaccatgccccctgaggcccttgagattacccgcaagttcatgaacaagccagtgagaatcctcgtgaagagaga

SEQ ID NO: 13216 - DNA, 309 bp, Zea mays
atcgagccagggccaggcaacctggtgctccgcccctcgccgttaccgcgacgcttcggcctctggctccaccgcctgcctccgtggctccgtgacgagacacgacgccgagaggtcacccccacaccgcgccgaggccaccccgcttgggattgtgaggtaaagcgtgatggcagcgccaccggcgagggcccgagccgactacgactacctcatcaaactgctcctcatcggtgacagcggagttggaaaaagttgtctcctgttacggttctcagatggatcattcaccactagctttattaccac

SEQ ID NO: 13217 - DNA, 308 bp, Zea mays
gcagtctcctcctcctgctactcctgtcacagatgtaccgcctttcagttctaaccccgagaacatcaatatccaagagcctgaagttgatgcacatgcaatatatgtgaggaatttacctttaaatgccactgaaactcaactggaggatgagttcaagaagtttggtaccattaagcaaaatggcattcaagtcagaagcaataagattcaagggttctgttatggattcgttgaattcgaggattctacttctgtccagagtgctatagaggcttcccctgtagcaattggcggtcgtcaatgtt

SEQ ID NO: 13218 - DNA, 305 bp, Zea mays
atgcaatcgtgctggaatggtggcagctttaacaaacgagagtgcaacaagcaaatctgtatattttgctcattgcacgtcagagatgatattcattactcatttgctgacagagcaacctgagaaactcgctggtcctctgctggctgacacgtatgtaactctcttaaaaggtcgcaatgcatggtatgggcaaatgcttgccaagggagagttgagtcctgacatgggtgatagtatcaaggggaagggaatgattcagggtatctctgcagttggtgcattttttgagctgcttagtcaac

SEQ ID NO: 13219 - DNA, 308 bp, Zea mays
agggatccgatggacaagtacgagcccgttcgcgagatcggggcgggcaacttcggggtggccaagctgatgaggaacaaggacacgagggagctggtggccatgaagttcatagagcgaggaaacaggatcgacgagaacgtgttccgcgagatcgtgaaccaccgctccctccgccaccccaacatcatccggttcaaggaggtggtgctgactcccacgcaccttgcgatcgtgatggagtacgctgcgggcggggagctgttcgagcgcatctgcgacgccgggcggttccacgaggacgaggc

SEQ ID NO: 13220 - DNA, 307 bp, Zea mays
gtcggatcggagcgagctcattctcaactcgactcaagagctctgcctcctccatcttcccttctctttctggacgttgagggcctccggggccacgctgagagatggaggcgaatccgaagaacaccttcacgatcaaagtggaggacgggaagcccgggaaggacggccggctggcggtcggaccggtgttccggagcgttctggccaaggatgggttcccgcagcttgagcctgacatgaagacatcatgggacgtgttcagggtagcagcagtcaagtatgccgacaaccggatgctcggatg

SEQ ID NO: 13221 - DNA, 307 bp, Zea mays
  unsure (1)..(307): unsure at all n locations
cacataaaaccagtgcaagcagaagcagcgcaatggcgagcaccaccatggccctctcctccacagccttcgccggcaaggcagtgaacgtcccgtcgtctctcttcggcgaggcccgcgtgacgatgcgcaagacggcggcgaaggcaaagccggcgtggagctccggcagcccgtggtacggccccgaccgcgtgctctacctggggccgctgtccggcgggactccgacntacctgacgggcgagttcccgggcgactatggctgggacaccgcggggctgtcggcggactcggacacgttcgc

SEQ ID NO: 13222 - DNA, 303 bp, Zea mays
ctctggtccgtggccatggcgtcgtccatgctctccgctaccaccgtgccactccagcaggggggcggcctgtccgagttctccgggctcaggagctccgcgtcgctgcccatgcgccggaatgccacctccgacgacttcatgtccgccgtctccttcaggacccacgcggtcggcacgagcggcgggccgcggcgggcgccgacggaggcgaagctgaaggtggccatcaatgggttcggccgcatcgggcgcaacttcctgcggtgctggcacgggcgcggcgaccctcgcccctcgacg

SEQ ID NO: 13223 - DNA, 305 bp, Zea mays
ggtgtatgaaattaattgtgcacggcataatagagaagctgactcgcctattacaattttcaaagagcagcttaatcaagccgtttcagggcagctctctcctgaagcaattgtggagctacgtctgcaagcatacaatgagattacaaaaaatattgttaatgataatattttctcccaatatatgcacaagattctgccaactggcaactacctgtggaccttcaagaaacaatttgcaatccaagtggctctctcctgcttcatgtcgtatatgctgcagattggcggcagggctcctaaca

SEQ ID NO: 13224 - DNA, 299 bp, Zea mays
gtctgccttctgcgcctccatttcggcctctgtcccttgcaagttcaatctcacctccaaccatgggtaaagagaagtcccacatcaacattgtggttattggccatgtcgactctggcaagtcgaccaccacaggacaccttatctacaagcttggatgcattgacaagcgtgtgatcgagaggtttgataatgaggctgctgatatgaacaagcggtccttcaagtacgcgtgggtgctcgactagctcaaagctgagcgttatagaggtatcaccattgataatgcactgtggaag

SEQ ID NO: 13225 - DNA, 307 bp, Zea mays
aacccagattcgttcaagtggatgctgcagaatccaatgtaccggcaacaactacaggatatgctaaagaacatgggtggatctcctgatcaatgggataaccgaatgcttgatcacctgaagaactttgaccttagcagtccagaagtgcggcagcagtttgcgcaagttggcatgactcccgaggaagtggtatcgaaaataatggcaaacccagatgtagctgtcgcattccagaacccaaaaatacagacagccatcatggactgctcgcagaaccctcttaacattgtaaagtaccaaaacg

SEQ ID NO: 13226 - DNA, 304 bp, Zea mays
cgaaccctagcagtggttctccctcggggccccgctaagcagcttggttccaagctgtagaagcatctccgatcccatccgcggcgggttgaggccatcagctccggtttctgcagccggatttgggatccgcgagatgtcttggtccgcgcccgacgacatcctcctctccacctccctcgccggcttcttggacaagaaacttattgtcctgctaagagatggacggaaactgcttggcaccctctgctcatttgatcagtttgcaaatgttgttcttcagggtgcttgtgaacgagtgatt

SEQ ID NO: 13227 - DNA, 302 bp, Zea mays
gaagaattcatgataattgatgagaacccaggtgatgaaactttgattctaagtttgcaagcaattcagcaagaacttgcatgggaaaggtgccggcaacttcaggccgaagatgtcgttgtcacgggtaaagtaattggtggaaacaaaggaggtgtagtagctcttgtggatgggcttaagggtttcgttccattttcgcaagtgtcatcgaaaacaaccgccgaagagctgcttgagaaagaattgcctctgaagtttgtagaggtcgatgaggaacaaggcaggcttgtcctcagtaa

SEQ ID NO: 13228 - DNA, 300 bp, Zea mays
tcccagtctcccatccctgaaaacctcacaaaaccctcgctcgctccccaccaccccgccgcgccgccgcctgtaccagctgcgtcaagatgagtcggcaccctgaggtgaagtgggctcagaggatcgacaaggtttacatcactgtacagttacctgacgcaaaggatgctaaggtcaatttggatccagatggtgtcttcacattctctggcagtgctggtacaaacttgtatgaattgaaactagatctgaatgacaaagtaaacgttgaggctagcaaaataagtgtgggggtca

SEQ ID NO: 13229 - DNA, 305 bp, Zea mays
cccacgcgtccgagcagctgatgttcgacaaagtgcccttgcccttcttggagacctttctagggtttgcccaatacatttgcatccacgtcttcaagaatttcttactgttgcagcaaagcaactgaaccctcagtctgtgaaggatgcggtatcagtagctaacaatgcctgttgggctattggagaattagcaatcaagattggcaaagaaatagcacctgtggtgatcaccgttgtttcgtgcttgattaccatcctaaaatccccagagggtttgaacaagtcacttgttgaaaatagtg

SEQ ID NO: 13230 - DNA, 304 bp, Zea mays
cggacgcgtggcgtgacgcgtgggcggacgcgtgggtcccaacaccacctcgcctgcgatcttcgtagtctccgtcgcgtcgagcatcgatcaagctcggcctactactgaaagtacaacgatgagctcatcaagaatgctgcctacattggcacccccggcaagggtatccttgctgctgatgagtccactggcaccattggcaagcgcctttccagcatcaatgtcgagaacgttgaggagaaccgccgtgccctccgtgagctcctattctgctgccctggtgctctccagtacatcagcg

SEQ ID NO: 13231 - DNA, 297 bp, Zea mays
gtcacctgatattttttccgacggacacacaagcatatatacatacacgccgacatagggatgatggcttcctctagtcctcagcgtgcagccggcgccgcgtcgccggcgtgctgctggtggcggctgccgccctgtgctcgtgcggcgcatggccactgaccgcggactactacgactgcacatgccctgacgcctacaacatcgtgaagcaggtcctgatcgatgcgcacaagtccgacgtgcgcatctacgccagcctcacccgcctccacttccacgactgcttcgtccagg

SEQ ID NO: 13232 - DNA, 299 bp, Zea mays
tccacgcgtccgcggacgcgtggcacatacacaagcacaagcgcactctagcaatggcttctgaggttgtccgccctagcgacgccgagctactaaaggcacaagccgacatatggcggctcagcctctcctacctcacgcccctgtcactgaggtgcgccgtggagcttggcatccctacggcgatctaccgccatggcggggctgcctcagccgctgagctggtcacggcgctgtctctcccctccactaagctgccgttcctccgccgcctgctgcggctcctcgccgcgtcgggc

SEQ ID NO: 13233 - DNA, 298 bp, Zea mays
cccacgcgtccgctcctatatgctgcgaccctagcctgccttgtcttcatcaatcatcaccgcaccgacgactgcaccggccgtcgctgccgcgctacttcggcccctttgccggcgacgagcaccaccaggtccatgcagagtaggaaggcaccttttcgtcgctcgaacctgttgcctgacctgcaagtgtcgggcggtgcacctgtgcccttgttgccgcgatgcagattatgtgggttttgagttggacagctgatggagtgcaaatctcttgcctgccagaccatataagttg

SEQ ID NO: 13234 - DNA, 301 bp, Zea mays
cgtgacttcccctccccttcctgcctctccactccatcgtcaaggaaggaacacggccctaactaaaccctagctaagggaagggaaacaagaccatggatgcctccaagctccgcgagcttcgcgacttcgtcgaggcgtgcaagaagaatccttcgctcctcgccgaccccaacctctccttcttccgggattacctccagagtttgggtgccaaaattcccgccgccgccccctctttcgaaagtcccaagagatcttccatggacgacattgatgacgacggtgatgacgacgacga

SEQ ID NO: 13235 - DNA, 297 bp, Zea mays
gtgacgcagccgggacggacgcctcgcgccgccgatcgagttaatggacgccgaggctggcgtcgccggcgccgaccagttgccgcggaggcagtactacatgaatctattgcttttggcttaccagagctttggtgttgtttacggtgacctaagcacatcgcctctttacgtttataaaagcacattctctggaaagctcaatcagtaccaagatgaggagacagtgttcggtgtgctttccctcatcttctggaccttcactctgattcctttgctgaagtatgtcactattgt

SEQ ID NO: 13236 - DNA, 297 bp, Zea mays
gccgtgaatacaaggcaaagaagatcaccgaggacgaatacatcagtgccatcaaggaagaaatcagcaaggttgtcaagatccaagaggagcttgacattgatgtgcttgtgcatggagagccagagagaaatgacatggttgagtacttcggtgagcaattatctggttttgcgttcactgccaacggatgggtgcaatcctatggatcacgctgtgtgaagccacccattatctatggtgatgtcagccggccgaaccccatgactgttttctggtccaagatggcacagagca

SEQ ID NO: 13237 - DNA, 313 bp, Zea mays
ctggccagtttgccaagccaaggtccgaaccgttggaggagagggacggcgtcaagctgccaagctacaggggcgacaacgtcaacggcgacgacttcaccgagaagagccgcgtgccagacccgcagaggatgatccgcgcctactcgcagtcggtggcgacgctcaacctgctccgcgcgttggcgaccggagggtacgctgccatgcagcgcgtcacacagtggaacctcgatttcatggatcacagcgagcaaggtgataggtaccgtgaattggcccatagggtggatgaggctcttgggttcatgac

SEQ ID NO: 13238 - DNA, 308 bp, Zea mays
cattcctccccaaaacacatcctgcgatcctcgaagcctccgccgagcatcgatcatgtcggcctactgcggcaagtacgcggatgagctcatcaagaatgctgcctacatcggcacccctggcaagggtatccttgctgctgatgagtcaactggcaccattggcaagcgcctttccagcatcaatgtcgagaacgtggaggagaaccggcgggctctccgtgagctcctgttctgctgccctggtgccctccagtacatcagcggtgtgatcctcttcgaggagaccctctaccagaagaccaagg

SEQ ID NO: 13239 - DNA, 306 bp, Zea mays
ctccgctgggccaccagctttgaccgccgcctcccttcccctccgctaccgctcctccccaccccactcccccgcaggagcggcggcggcggcggcgaggtcgtaccccacatcggcgagcggggcggacgcggaggaaaggcaagatgttcgggcgcgcgccgaagaagagcgacaacaccaagtactacgagatcctcggggtgcccaagtcggcgtcccaggacgatctcaagaaggcctaccgcatagctgctatcaagaaccaccccgacaagggcggtgaccccgagaagttcaaggagc

SEQ ID NO: 13240 - DNA, 312 bp, Zea mays
atatcatcaagaaaaccaaagaaaagcgccagaagaagaaacaggagaacgctgatcccaaccggcccaagaggccagcctcttcctttcttcttttcagcaaggaagagaggaaacagctgatcgaggaacgcccgggcatcaataactcaaccctgaacgcgctcatcacggtgaagtggaaggaactgagcggcgaggagaggcaggcctggaatgcaaaggccgcgcctgccatggctgcgtacaagaaggagatggaggagtacactaaggcccaaagctcatctgcttgacagaataactaattcc

SEQ ID NO: 13241 - DNA, 287 bp, Zea mays
cccgactcctcgcttcctcccgttccgtcgccgccgcgcgcctcggagaagagatagaggcggccgctgcatcgaccccgcgccacccccgcctgcctcccccggcaccgatcgggtttgatcgatggcgtcgaagaggatcctgaaggagttgaaggacctgcagaaggacccgcccacctcctgcagcgcaggtcctgttggtgaggacatgttccattggcaagcgaccatcatgggggcttcggacagcccatttgcaggtcgggtattcctggtgaacattc

SEQ ID NO: 13242 - DNA, 314 bp, Zea mays
actaaggtgttccatccaaacatcaacagcaacgggagcatttgcctcgacatcttgaaggaccagtggagtccggcactaaccatctccaaggtgctgctgtccatctgttccctgctgactgatccgaaccccgacgaccctttggtccccgagatagctcacatgtacaagacggaccggcacaagtacgagaacaccgcgaggacctggacccagaggtatgccatgtagtattttctctacctggcctttggggtcgctgctgcgttgtgttgccgggacctggacgtgcctccatgtattcgttctat

SEQ ID NO: 13243 - DNA, 308 bp, Zea mays
gtggagagcagcaacagcagcagcagctgcttgagcgacgagctggtgctgggcgaggagaacaacttcctaggcatctgcacgcaggagctgctcgcgcgcggcaccgagctgctcaagcgcacccgcaaagggtcgttgcattggaaggtcgtctctgtgtacatcaaccgcgcgggtctggtgatgctgaagatgaagagtcggcacgtcggtggcaccatcacgaagaagaagaagagcgtggtggtggacgtgtgccgggacgtggcagcgtggcccgggcggcacctgctggacggcggcga

SEQ ID NO: 13244 - DNA, 303 bp, Zea mays
ggcatgcttttgctggaattgaaccgcttgttacgccctggtggttactttgtctggtctgccactcctgtttaccaaaagctcccagaggatgttgagatttggaatgccatgtctactttgacaaagtccatgtgctggaagatggtcaacaagactaaggataagttaaaccaagttggtatggtcatatatcagaaaccaatggacaatatttgctatgagaaaagatctgaaaacagcccgccattgtgcaaggaatctgatgatgcagatgctgcttggaatgtaccgttggaagca

SEQ ID NO: 13245 - DNA, 304 bp, Zea mays
gtcgtgaccagagcgcgagagctagctagagggccgtgaaaatgccgatcaataggatcgccctggggagccaccaggaggtgtaccacccgggcgccctcaaggcggcgttcgctgagttcatctccaccctcatcttcgtcttcgccggccagggctccggcatggccttcagcaagctgaccggcggcggcccgacgaccccggcgggcctgatcgcggcggcggtggcgcacgcgttcgcgctgttcgtggcggtgtcggtgggcgcgaacatctccggcgggcacgtgaacccggccgt

SEQ ID NO: 13246 - DNA, 304 bp, Zea mays
gggtttttgattttagccgccgccgctgctcatctcacatccctcgagaagacgcctgctcctcgccgatcgatacgatggccgtcttctccgacctccacaccgccgacggcctcaagtccctcgaggctcacctcgccggcaaaacctatgtgtctggtgactccattactaaggatgacattaaggtcttcgccgcggtgccgtcgaagcctggcgctgagtttcctaatgccgcccgctggtacgagaccgtctctgcggctgtagcctcaagattccctggtaaggctgttggtgtaaa

SEQ ID NO: 13247 - DNA, 304 bp, Zea mays
atgaaatcaaagggagggtgcttcatcattccttccctgtttctcttttcctgccccgcaatgtccgattggagcacaagacattgaagcttctgaagtattggacctggcaatttgttattgttaggccagtatgttccattctgattattgcactccagcttcttgggctgtaccccagctgggtcagctggacgtttagtattatactgaacttttcagtctccatggccttatatgcattggttctcttctaccacttgtttgctaaagagctggcacctcacaagcctcttgcaaagtt

SEQ ID NO: 13248 - DNA, 303 bp, Zea mays
atgcactctcaatggttgctttagagagtgttaagatctacactgcaattagcgatggaacaatcaatctagttgacaagttcttcgagatgcaaaggaatgatgctgttagggcacttgatgtatacaaaagagcaactaaccaggctgaacgactttcagaatttcatgaagtgtgtaaaactatacacattgggcgtggtgagaaattcctgaaaatcgagcagcctccagcatcattcctgcagactatggaggactatgttagagatgctccaacaggtcaaaaacaaaagactatac

SEQ ID NO: 13249 - DNA, 303 bp, Zea mays
gaaaaagggtgcctttgatgccgcgtctctccagagactagttaatggaaagtctgatggtggtgtcaccccgcttcacttggcagcccttcatggacatgctgagagtgtacagttgctgctagaccttggagcctctgtctctgaggtgactgtcaatgatggttcaacaattgacctcattggttcggggagcacacccctccattacgcggcgtgtggtggaagtgctgtttgctgccaacttctcattgcagcaggagcaaacatgggagctcaaaatgttaacgggttgactccttt

SEQ ID NO: 13250 - DNA, 306 bp, Zea mays
caacaagtgggcgcagatcctgagcggcaagaagccggaagccaccgtcctcaccccgccgaaccagccgctgcagggccagtcccccgcggcgccgcgctccgtcaagcaggtcgggcccatcgaggacctctggctggtccccgcgggccgcgacatggcgtgctactccttccacgtcagcgacgcggtgctcaagaagctccaccagcagcagaatgggcgccaggacgcggccgctggcaccttcgagctcgtgtcggcgctggtgtggcaggcggtggccaagatcaggggcgacgtgga

SEQ ID NO: 13251 - DNA, 307 bp, Zea mays
ttttagcagagcagcgagggtcggagaagcctccccaagcttcgaatcgctatgcagcccgtcaaggtgtacgccgaccggcggtcgcaaccctcccgagctgtcatcatcttctgcagggtgaaccagatcgatttcgaggaggtcacggtggatctgttcaagtctcagcacctcacacccgaattcaaaaaaataaacccaatgggacaggtacctgcaattgttgatggaagattcaaactatttgaaagtcatgcgattttgaggtatcttgcatcggttttccctagagttgctgaccact

SEQ ID NO: 13252 - DNA, 297 bp, Zea mays
ctcctcgccatcacataaaaccagtgcaagcagaagcagcgcaatggcgagcagcaccatggccctctcctccacagccttcgccggcaaggcagtgaacgtgccgtcgtctctcttcggcgaggcccgcgtgacgatgcgcaagacggcggcgaaggcaaagccggcggcgagctccggcagcccgtggtacggccccgaccgcgtgctctacctgggcccgctgtccggcgcgcccccgagctacctgacgggcgagttcccgggcgactacggctgggacaccgcggggctgtc

SEQ ID NO: 13253 - DNA, 294 bp, Zea mays
cacacctcctcgcttgcactccgctcgtctgacatctcgtcccgtcctttcgtttcgaagcctcgcgagccccgacgatggccaccaccgcggtgtcggtcgacgagaagctcgataagcttcgcgccgaggtcgccaagctcgaccagatcagcgagaacgagaagtccgggttcatcagcctcgtgtcacggtacctcagtggggaggcggacagatcgagtggagcaagatccagacccctacggatgacgtggtggtgccctacgataccgtcgcgtcgcctcccgaaga

SEQ ID NO: 13254 - DNA, 298 bp, Zea mays
ctcagaggcgggttggcttctcctcccccaccggttcgtgttcaggttctggttcgtgggcgagagggaagagatggcggcgtcggacgttgagtaccgttgcttcgttggcggcctcgcctgggccaccgacgaccactccctcaacaacgccttcagcacctacggcgaggtcctcgagtcgaagatcatcctggatcgggagacgcagaggtcccgcggcttcggcttcgtcaccttctccacggaggacgcgatgcgcacgcctatcgagggcatgaacggcaaggagctcgac

SEQ ID NO: 13255 - DNA, 298 bp, Zea mays
caagctatgtgtatgcggaacagcagttgggttatccagaacagtatgtgcagcaaagcacccaggaatacgatgtgttagcggaccctagtatatcccaggatccgaggttcatgactcacgcggacaaggatcggggtttaggttctgttttcaaacgtgacgatcaaaggcttaatcagctgagggaaaaagatgcacgggagagagatccaaattttatttcagatagttactcagagtgttatcctgggtaccaggagtataataatgagattgcaggaagcgatgatgaaga

SEQ ID NO: 13256 - DNA, 297 bp, Zea mays
cccacgcgtccgcactcgagctcgagccctcgccctctcctcaaacacaagcctcagatctcagtcacctgcgccgccgcttcgttcgtgtggaggggagaagagaggaaatggcggcgaccgagggcgtgctcctggggatgggcaaccccctcctcgacatctccgccgtcgtcgatgacgccttcctgacaaagtatgacatcaagctgaacaatgctattctcgctgaggagaagcacttgcctatgtatgacgagttggctagcaagagcaatgttgaatatattgccggag

SEQ ID NO: 13257 - DNA, 297 bp, Zea mays
tgattgaccaatataagaacaggtcagaagaactaactagtgaaggcaaggtttctgtctcactcagtgtgaatgagagggaggtacttcttgctgaaatccagagtctgagggagcaactcaaaaaccagactactgtatcaactactggtagccttcttgatcagttaaggaacggcagcacagaccaggagtatgaacttgacaaagaaaggcagaaatggatggagtctgagagcaagtggatttcacttaccgaagagttgagggtcgatctagaatcaaacaggatgcacg

SEQ ID NO: 13258 - DNA, 294 bp, Zea mays
agacactgagccggtgatccagctcggcgactccgaggtgctcacggagctgtccgggacgatcggcaacgtcgacggccacaccgtcataacctccatcaagttcgtcacaagcctcaagacctacggccctttcggagcatggggggacgggagtgacactccgttcgcgatccccgtgcagcaaggcagtgccatcgttggcttcttcgcacgagctggggtctacctcgacgcccttggcgtttacgtgcgatccctgtgatgagactctcacgagaggggcagctagct

SEQ ID NO: 13259 - DNA, 295 bp, Zea mays
acacactcgggtaaagctatctcgagctagctagctgctgtaaccgttgccatggccaaaatggtgttgctctgcgtgctcgtctccttcctcctgatgcccttggcctccctagccctgacgcaggacttctgcgtcgccgacctgacctgcagcgacacgccggcggggtacccgtgcaagtccagcgtcaccgccaacgacttctacttccacggcctggccggccagggcaaaataaacccactcatcaaggccgccgtgaccccggccttcgtgggccagttcccgggcg

SEQ ID NO: 13260 - DNA, 134 bp, Zea mays
ctggacgcgtgcgagagacttgaccaagcagcagcagcagggatggcgcctctgaagctgtacgggatgccgctgtcccccaacgtggtgcgcgtggccaccgtgctcaacgagaagggcctcgacttcgagat

SEQ ID NO: 13261 - DNA, 310 bp, Zea mays
  unsure (1)..(310): unsure at all n locations
agctgccttcctcgccaggtgcaaggccaactctgaggctaccctcggcacctacaagggtgatgctgccgccgacaccgagagcctccacgtcaaggactacaagtactgagttgcttctctttgcgtgcccgttttggaactcctgcctacgagctaggttgcggagtgtggtttgctcgttagacnttattttcggacatccaaaaaacatgcttcctatgtgggatgatggttatctttatatttgtatgttaattagtctctttgctgttaaatttcgtgtaagttggtcctgccgatggagaat

SEQ ID NO: 13262 - DNA, 292 bp, Zea mays
ggaccgtgggtttgtgagctgccactgccagcttccccgtgcgcgactgtgctgctgctcggcggcgcgcccactccccagtcgctctctcgtcaccccgcctgccggtaatcggtctctatatatataggtggttcgaggtgatcggcagaaccacacaggcaaagatggcgagcgtgcacaaggccacacccttgttctcatgttctgcctgctagcgctggggagagcggagtacctcaagtaccaggatccgaagcagcccgtcgctgttcgcatcaaggacctgctg

SEQ ID NO: 13263 - DNA, 309 bp, Zea mays
cccacgcgtccgagctcctcatctcaagtgtgtagacgagagagagagactgagagagcgccatggccagcctccaagtgactcctacttcatcgttcactcagtggaacgagctgaagttcgaaggcctgtacctgttccacacacccctgggctcaggcgccaaccaagctcaggtcatagacaacaaggcgccgattggcatcggtgccaccgtagttaacaactgggcagtgtacgacgggccagggccgaacgcaaagctcgttgcccgtgcacagggcttgcatatccaagccggcaactggg

SEQ ID NO: 13264 - DNA, 266 bp, Zea mays
ccagccaccgtccgcgacgtggcggacgtggcggacgcgtgagctgacgcgtggccggaccgtgggcggaccgtgggcttggactaaagatgctgttacttcggaggaagccaaggaatgacgctgggctccgatatttgtgaggcaatcaaacttcaaactacccgctgatccttcagtaccgattatcatgattggccctgggaccggtcttgcacccttccgtggcttcttgcaggaaagacttgctcaaaaagaatctggag

SEQ ID NO: 13265 - DNA, 308 bp, Zea mays
aggccaccacgcacaaccgctccaaccatggacgccggccccgcgcgtccatcggcaccgtcgaccgccgcagtcgcgggggcctccgtcgcggacgagccccgggacgcgcgggtggtgcgggagctcctgcgctccatgggtctccgcgagggcgattacgagccccgcgtcgtgcaccagttcctggacctgtcctaccgatacgtcggatagtgctcggggacgcccaggtctacgccgaccacgccgggaaggctcagatcgacgccgacgacgttcgcctcgccatccatgccaaggtcaat

SEQ ID NO: 13266 - DNA, 306 bp, Zea mays
ggaagcggaaagggcggcggcggcgctcgtggtcagtcaaagatccaacctccggactcgcgatggggcggcggatcctcaacgatgctctgcgcacgatggtcaacgcagaccggcgggggaacgcgtcggcgcttctccgacccatctccggcgtcatggtctccttcctcaacatcatgaagtaccgagggtatatcaaaaactttgaggtcattgatgagaatagagttgggaaaattagagtggagcttgatggacgtcttaaagattgcaaagctctcacctacaggcaagacctcaaag

SEQ ID NO: 13267 - DNA, 269 bp, Zea mays
ggcctggtacacctcgccgcggtggacgccttctgcgagctcgtcgcccgcggcatgttcgcgcccgagccgccgcgcacctaccacatcaacctgtccgtgttcacctccctgccggacatgtgggccatcgggcagcagttccccatcatcccgatccagcggctgcaggatcggcccgccgtcgacgggtgctctcggacgtcacctgcgacacgacggcaatgtgagctagttcatcggcgggaggcacagcctgccgctgcacg

SEQ ID NO: 13268 - DNA, 303 bp, Zea mays
aggaagcaatgtgttttatgatggatcctttgcttggaaataaagtttgctatgtgcagtttcctcaaagatttgatgggattgatcgccatgatcgatatgctaacagaaatgttgtctttttcgatatcaacatgaaaggtttggatggtatccagggcccaatttatgtgggtactggatgtgtcttcagaaggcaggcattatatggctacgatgctcccaaaacaaagaagccaccatcaagaacttgcaactgctggccaaagtggtgcatttgctgttgctgttttggtaacagga

SEQ ID NO: 13269 - DNA, 292 bp, Zea mays
ctactagtcagtggtaaagtgaaaaatagggacgccgcagcatttagaacaagggcatctgcaatcgcccccctttgaccagcaagaacatcctggagaacttttgcattaaacgctggatcgcctcctttcagatcttccaatgtgcagcgaggaatgccaaaatccaatggatcgaagaacattggaagatctgaaaggaggcgatccacgtttttatccaagactcaagtgtattgatggctttcccggaccgctgtgtctcctgggctaagcgacaccgtcatgtaaa

SEQ ID NO: 13270 - DNA, 314 bp, Zea mays
ccaccacctccacctcgtcgtctcccaccaccgccgagcgcgaccctatcccgatctagccggcggcaggcaccagatcccgccgcccgccggtcccgggacgcgccccgccgaatccgccgctcctcgcactgcaacacgcccggaccacggtgcatttgatccgtcccggccgcctacacgatgtccaagtcgggagcgctggatcttgcttctggcctcggagggaagatcaacaaggtggaagtcaagtcggccgtcgatgagtatgagaaatatcatggatactatggagggaaggaggaagcaaggaa

SEQ ID NO: 13271 - DNA, 256 bp, Zea mays
cccacgcgtccgcttacctgcagtcaccactcccaagccagtacccacagtcctacgagcagtcgcacgcaatgtcaagagacaaaacggtcgacatggctcgcacgcaatctgccgtagcggtcgccgtggtggccgcggtgctgctgctggcagctgcggcgacgacctcggaggccgccatcacctgcgggcaggtgatctccgccatcgctgcctgcctctcctactcccgcggcacggggtcctgcttctc

SEQ ID NO: 13272 - DNA, 299 bp, Zea mays
gctcttgcaacaagccaaacaacccagtggctgctagccgagacaggggatagattgagagagaggcgcgcagatggcgacgccgtcgtcgtcgctttgctccagcttcgcctccctgcggaccgcctccatcggccacccccgtggcatcgcctcctccacgcccaggaaggcattccatgtgagggcatcagctcgggttgacaaattctcaaagagtgacatcatcgtgtccccttcgattctgtctgcaaactttgcgaacgttggtgatcaggtaaaagctgtggaggtggcag

SEQ ID NO: 13273 - DNA, 288 bp, Zea mays
gtgctgcattctatgctgacaagagcctttctcttgtcggtgctggtggtattgccactgctattcaacaccatggaaaggaaatgtcttacaacaactacttggatgcggatgctgcatggaactgtgtatcggagtttgatagtcctacttgtgttgtggtgaagcacacaaatccatgtggtgttgcctcacgaaaggatattcttgaagcttacaggttagctgtaaggggagatgctgtcagtgcatttggtgggatagttgcattcaacacgactattgacg

SEQ ID NO: 13274 - DNA, 275 bp, Zea mays
gcttctctggtttcagacgcaaccccgcgggtcgcggatcaaggagccagagagcgggacgagcgagcgttccgccagagatcgagaccgtagctagggtttgaggcgccgggctgcggtggacgagatgtcgacgccggcgaggaagcggctgatgcgggacttcaggcgcctgcagcaggacccgcccgccgggatcagcggcgcgccgcacgacaacaacatcatgctctggaacgccgtcatattcgggccggatgatacgccgtgggacg

SEQ ID NO: 13275 - DNA, 275 bp, Zea mays
gttctagatcgcgggcggccgctcgcgatctagagcgccgccgcagcccgcagtcgcttgcgcgcacagcacttcgcaccgccgccccatcccaactgccgccagcggctgctcgatccgcactctcccacgaagaagtcgaagaagagcacagagagcatcaacaacaagctgcagctggtgatgaagagcggcaagtacaccctgggctacaagaccgtcctcaagacgctgcgcaactccaagggaaagctgattaatcatggaaaccaatt

SEQ ID NO: 13276 - DNA, 277 bp, Zea mays
gggcacggacctgctccccgcgacggcgtcggcggcgaacgtggaggtgtggctagaggtggagtcgcaccacttctacccgaacgcgtcgccgctggtgttccagctgctcgtgaggccgctcctgggcggcgcccccgacgcggcggtggtggacaagcacgcggacagctcgccaaggtgctcgacgcgtacgatgcgcacctcgcccgcaacaagtacctcgccggggacgagttcacgctcgccgacgccaaccacgcgtcctacctgctct

SEQ ID NO: 13277 - DNA, 278 bp, Zea mays
tccttaacatccttgttgcaagcggcgccacttgctcgcgctctctcgcagctgctacgctaaagcaagtctagtctctagatgtggacgcggagggggaggccatgggcaaggacgacgtggtccagagcggcgcgtgcggcggggagttcgccgccaaggactacacggacccgccgccgggccgctggtggacgcggcggactgggttcgtggtcgctgaccgcgcggtgatcgcggagttcacacgacgctgctgtcctgtactgacgtggcac

SEQ ID NO: 13278 - DNA, 297 bp, Zea mays
cccacgcgtccggttctagatcgcgagcggccgccctttttttttttttttttttttaagcagcaaatgattagtttttcatgactgacggtgactgaatgtgaagcagactattctagtcctggagatctccctcctcctcgtcctcgtactcgccctcctcgtcggcggtggcgtcctggtactgctggtactcggacacgaggtcgttcatgttgctctcggctcgtggaaccaactcgtccatgccctcccccgtgtaccagtgcaagaaggccttcctgcggaacatggcgg

SEQ ID NO: 13279 - DNA, 303 bp, Zea mays
caactacggcatgctcatggtgggccgcttcgtggccggagttggcgtgggctacgggggcatgatcgcgcccgtgtacaccgccgagatctcgccggcggcgtcccgcggcttcctcacgtccttccctgaagtcttcatcaacctcggcatcctgctcggctacctgtcgaactacgcatttgcgggcctcgcgctccacctcggctggcgtgttatgctcggcatcggcgcggcgccgtccgccctgctcgcgctcctggtcttctgcatgcccgagtcgcctcggtgcttgtcatgaag

SEQ ID NO: 13280 - DNA, 108 bp, Zea mays
cttcctcgcctccacaagtccacagcatctcaagccaccatcgaccttcaagtctcgctacgtagcagtgcaagaaaaaaagcagccgcaatggcgagcagcaccatg

SEQ ID NO: 13281 - DNA, 291 bp, Zea mays
ctgggcagcaggacaaatgcttcttatgtggtcaggtggggcatctagccgctaattgtgaaggaaaggcaaagagaaaagctggggaatacgatgagaaaggtgaagctattgttccaaagaaaccataccagttcttgaataactggaaccttcgggagtacttaggatatgagttcagaatggccaatccggctttccagattgattttggacggattgttgatgatttcatcttcatgtgctttttcgttggcaacgattttcttccgcatatggcaacactaggga

SEQ ID NO: 13282 - DNA, 296 bp, Zea mays
cggacgcgtgggcggacgcgtgggtttgacattaaggcttggggatttggggacatatgttataaacaagcaaactccaaacaaacaaatttggctaacttctcctgtgacgtgggccttctaggtttgattgggatggaacagctaatggttggatatacaagaggactggagtgaaccttgtgcggcttctggagaaggagattggtgagctctgtggtactccagtagaactttagtaagagtactggaaatgccacacagctaggttgtatggagagcagtgctctgaatgt

SEQ ID NO: 13283 - DNA, 296 bp, Zea mays
agcgctcaagttctcgcgcccagagccaaatttttctccactcaatcactgcagccatggacgccagcggaccggtagcaaggcgaagaagggggcggctgggcgcaaggctggcggccccaggaagaagtcggtgtcgcggtccgtcaaggccgggctgcagttccccgtcggccggatcgggcgctacctcaagaagggccggtacgcgcagcggtgggcaccggcgcccccgtctatctcgccgccgtgcttgagtacctcgccgccgaggtgctggacctggccggcaacgc

SEQ ID NO: 13284 - DNA, 295 bp, Zea mays
cgacggtgcactcaacgtgttcgaggaaatgaaggcaatcggtgtgaggccaaacctggtcgtgtacaataccatgttggatgccatgggccgcgcattgcgaccttgggtggtgaagaccatccacagagagatggttgaccagcaggtgcagcccagcagggcgacctattgttgtctcctgcacgcatacaccagggcacgctatggcgaggatgccatggccgtgtaccgactgatgaaggatgaggcaatgggcatcgatgtgatgctgtacaacatgcttctgtccatg

SEQ ID NO: 13285 - DNA, 126 bp, Zea mays
gcaaccggtccagcactttcacgctcagctccagcaatggctgcctccaccatggcgatctcctccacggcgatggccggcacccccatcaaggtgggctccttcggcgagggccgcatcaccatg

SEQ ID NO: 13286 - DNA, 288 bp, Zea mays
cggcgcgtggctgggcgggcagctgttctcggccatggtggtgcgcaaccggcgcacctgttcctggacgagctgggcgtggcgtacgacgaggccgaggactacgtggtcatcaagcacgccgcgctcttcacgtccacggtcatgagcctgctcctggcgcgccccaacgtcaagctgttcaacgccgtggccgtggaggacctcatcgtcaggggagggcgcgtcggcggcgtcgtcaccaactgggcgctcgtgtccatgaaccacgacacgcagtcctgcatg

SEQ ID NO: 13287 - DNA, 288 bp, Zea mays
ggcctattttcaggtggggtggtggaaaggatgacaaatattttgcgaggcttgggaagaatataatatctgtatacgaaacacatacattctcccttcttgataagaagtctctgaaggtagaaaatgtagtggacttcagctggtctcccactgatcctatcatatctctgttcgtgcctgaaatgggtggtggaaatcagcctgcgagggtgagtctagtgcaaatccctggcaaagaggagctgcgacagaaaaaccttttcagtgtcagtgattgtaagatgt

SEQ ID NO: 13288 - DNA, 288 bp, Zea mays
ccggaaggccggaacccacctgctgcgcacctgcaagcctcgagtggagctcttccacggccgcggtggagatggcggcgaatctggaggacgtgccgtcactggatctgatgcacgagctgctccgccgcatgaagtgcagctccaagcccgacaagcgcctcatcctcatcggtccacctggctctggaaagggaactcagtctcctattatcaaggatgaatattgcttgtgccatttagccaccggtgatatgctgagggctgctgtggcggccaagacacctc

SEQ ID NO: 13289 - DNA, 285 bp, Zea mays
cccaaagagccgaacggctcgtacgtggtgcactacaaccactacgacggcagcaacggcaaggtcggcggcgagaagcggtcgttcgaggtggacgcgatcgtcggcgcggacggcgccaactctcgcgtggccaaggacatgggcgcgggcgactacgagtacgccatcgcgttccaggagcgcgtcaagatccccgacgacaagatggtgtactacgaggagcgcgcggagatgtacgtcggcgacgacgtctctcccgacttctacggctgggtgttcccc

SEQ ID NO: 13290 - DNA, 285 bp, Zea mays
gaaaattcttgctactggcattaagactttgcacctttacacactaaacatggacaagtctgctataggaattttgatgaatcttggattaattgaggagtccaaggtttcaaggccattaccttggaggccagcgactaatgttttccgtgttaaagaggatgttcgacctatattctgggccaacagaccaaagagctatcttaaaaggacattaggttgggatcagtatccccatggacggtggggtgattctcggaacccatcatatggagcacttactga

SEQ ID NO: 13291 - DNA, 319 bp, Zea mays
cccacgcgtccggtgagcgcaggaggaagtctgtccgtggttgtattgtgagccaagacctatctgttatcaacttggtaattgttaagaagggtgagaacgatctgcctggtttaactgacactgagaagccaaggatgaggggtcccaaaagggcctccaagatcaggaagctgttcaatcttgcaaaggatgacgacgtgcgcaagtacgtgaacacgtaccgcaggacattcactaccaagaatggcaagaaggtgagcaaggcacctaagatccagcggcttgtgacccccttgaccctccagaggaagcgtgc

SEQ ID NO: 13292 - DNA, 304 bp, Zea mays
gagctcattctcaactcgactcaagagctctgcctcctccatcttcccttctctggcctccggagccacgctgatcagagatggaggcgaatccgaagaacaccttcacgatcaaagtggaggacgggaagcccgggaaggacggccggctggcggtcggaccggtgttccggagcgttctggccaaggatgggttcccgcagcttgagcctgacatgaagacatcatgggacgtgttcagggtagcagcagtcaagtatgccgacaaccggatgctcggatggcgtccgttcaaagatggagt

SEQ ID NO: 13293 - DNA, 294 bp, Zea mays
gcggagagcaccatgaatgcctacaaagctgctcaggatattgctcttgctgatctggctccaacccaccccatcaggctcgggcttgctctcaacttctcagtgttctactacgagatcctcaactcccctgaccgtgcttgcaaccttgcaaagcaggcctttgatgaggcaatctccgagctagacagcctgggagaggagtcctacaaggacagcactctgatcatgcagctcctgcgtgacaacttgaccttatggacttccgacaccaacgaggacggcggggatgag

SEQ ID NO: 13294 - DNA, 300 bp, Zea mays
ctattaacaggtggtgaagatgatcttgtgcaggtatggggcatggatgatagaaagatagttgcttggggtgaaggacataattcatgggtcagtggagtgtcttttgattcatattggtccccaccaagttctgatggaaatggagaaaatgtatatcgctttggttctgttgggcaggacacccaactacttctgtgggacctggcactggatgagattgttgtcccactacggcatccttcaagtgcctcacctacgtttagcagcgggagcccttccacacactgggacaatgca

SEQ ID NO: 13295 - DNA, 312 bp, Zea mays
cccacgcgtccgccacgcgtccgcacggagctgctactagcccagaggttaaagtatatgcatatgcggctgcacaagttaagaaagctttggaggtcacacactacctaggtggtgaaaactatgtgttttggggtggaagagagggttaccaaactcttctgaacactgatcttaagagagaacttgaccatttggctaactttcttcaagctgctgttgactacaagaagaagattggattcaacggaacactgttgatagagcctaaaccacaggaacctacaaaacaccagtatgactgggatgttg

SEQ ID NO: 13296 - DNA, 232 bp, Zea mays
cacagctcacagcaaacaccgcgaaccgcccccgctcccaaacccgaccgagcaaagcgcaaagccccccaaccgcggatcaatccgcagcatcgatggcgcccaaggcggagaaaaagccggcggcgaagaagctcgcggaggaggagcacgcgaccgagaaagcggagaatgctcccggcaggaagaagccgaagcggaagaaaccgcctccccgcgggcaaagtcccgg

SEQ ID NO: 13297 - DNA, 304 bp, Zea mays
cccccggtgagctgccactgccagcttccccgtgcgcgagctgtgctgctgctcggcggcgcgcccactccccggccgctctctcgtcaccccgcctgccggtaatcggtctctatatatataggtggttcgacgtgatcggcagaaccacacaggcaaagatggcgagcgtgcacaaggccaccacccttgttctcatgttctgcctgctagcgctggggagagcggagtacctcaagtacaaggacccgaagcagcccgtcgctgttcgcatcaaggacctgctgggtcggatgactctcgc

SEQ ID NO: 13298 - DNA, 293 bp, Zea mays
cagagggaggccgcacgcagccatggatttcctgcaggagcaaagcgtcgagaccacagtggccgtcgccgtcgctgtcgcgccgtcgccgcagcgcgccttcctcctccttcgatccaggaagcccaagggctgcttggatcctgagaacttcaggaagttcaaacttgttgaaaagaagcaaataagtcataatgttgccaggttcaagttcgctcttccaactccaacttctgtattgggccttccaatcggtcaacatatcagctgcagaggacaagacgctacaggtg

SEQ ID NO: 13299 - DNA, 296 bp, Zea mays
gctgcctccgcctctcgagtctcgtccacccgtcgtcctcctagctcctctactcgccagtcgccatgggcaagattaagatcggaatcaacggcttcggaaggatcggcaggctcgtggccagggtcgccctccagagcgaggatgtcgagctcgtcgccgtcaacgaccccttcatcaccacggactacatgacctacatgttcaagtacgacaccgtccacggccactggaagcacagcgacatcacactcaaggactccaagacccttctcttcggtgacaagccggtcacc

SEQ ID NO: 13300 - DNA, 296 bp, Zea mays
cggacgcgtgggctgctacccagaagactgttgatgggccctcatctaaggactggaggggtggaagggctgctagtttcaacatcattcccagcagcactggagctgctaaggctgttggcaaagtgcttcctgtcctcaatggaaagttgactggaatgtctttccgtgtcccaactgtcgatgtttctgttgttgatctgactgttaggcttgagaagtctgccacctatgatgagatcaaggctgcggtcaaggccgaggcagagggtagcctcaagggcattctgggttat

SEQ ID NO: 13301 - DNA, 295 bp, Zea mays
gtagaagttgatagtgatccaagagctgcatattttaggcaggctaagaatggcctctacataaggatggcattgctcaaacttctgcttgttggtcactgacatttcggctagtgctttagcttgtgctgcgtcaagggattagaaggtattattcttaatataatgatcgaggctgtcttacccacgcaggtcgagtttttagaaacatgtactaataatcagcagcttgtgtcaaaattcaatgttcgctgttgcaggtaaaacatacaaaaactaaaaaaaagggcggccg

SEQ ID NO: 13302 - DNA, 289 bp, Zea mays
cgaccacaccgttcctccgagcccaggagcagccccgcgccaggaggaagtttgttcttttaacaatatgtcgagggaggagaatgtttacatggccaagttggctgagcaggctgaaaggtatgaggagatggttgagtatatggagaaggtggctaagactgtagatgtggaagagctcactgttgaggagcgtaaccttctgtctgttgcatacaagaatgtgattggggctcgccgcgcttcatggcgcattgtttcctccattgaacaaaaggaggagtcccgt

SEQ ID NO: 13303 - DNA, 296 bp, Zea mays
cgctgactcaagtctccggcgtgctggggtcgcagtggggcgacgagggaaagggcaagctcgtcgacgtgctcgccccccgcttcgacatagtcgcgcgttgccaggggggagcgaacgctggacatactatctacaactcagaaggcaagaaatttgctctgcatcttgttccatctggtattctccatgaagggacactgtgtgttgttggcaatggagcagtgatccatgttccagggttctttggagaaattgatggtcttgagtccaatggagtccgctgcgatggaagg

SEQ ID NO: 13304 - DNA, 299 bp, Zea mays
cccacgcgtccgctaaagatttcaatcgcatagtttgcacttgcttcaatggtgcatcaaacattgcgcaactggtggtttagcctgcctctctccagacggtctaaaggctatgcaagatgttgttggcttctacaaggagaacactgaaataatcgttgagacatttacatcactcggattcaacgtttatggcgccaagaacgctccatacgtatgggtgcacttccctggccgcaattcgtgggatgtgttcgctgagatcctggagaaggccaatgtggtcactactcctggca

SEQ ID NO: 13305 - DNA, 296 bp, Zea mays
gaggagtcctgctcgacatgaaggcgaactgtaccgattcgacaaagacggtaaccaatggaaggaacggggcacgggcgctgtcaagcttctcaagcacaagcagaccggcaaggtccgcctagtcatgcgccaggctaaaacgcttaagatctgcgcgaaccacctcgtggcctccaccacgaagatgcaggagcatgcgggcagcgacaagtcgtgtgtttggcacgctgctgactttgccgatggcgaacttaaggaggagatgtttgccatcaggtttggttcggtagaaa

SEQ ID NO: 13306 - DNA, 298 bp, Zea mays
ggctcctatctggtataggacggagctgagcttctagcaacgtacagtgtatccgccatgagtcctttcggggcggtgatcacgccagaaaccctcaagtacatgtccaagtaccagggacgtgagatcacgcaggtggactgcgcacgggaggcgatgaggctgatccacgcggaagacaagaacctcaaggccgaggactcagcgtgggagctgaagaagaagttcggcaacggcgtgagcaccatggtcctcgtctacaacgccaccggggccagcctgagcctggtggacgacg

SEQ ID NO: 13307 - DNA, 297 bp, Zea mays
cggacgcgtggggcaaaaaaaaaacacccacacccacacccgcgtccgcgtgctctctctgccccatccgcgcgcccctcctcctccaccgcccgtcacactcccgccgccgccgccgcccggccgtctgctggcgatggcgtaccgggcggacgacgactacgactacctcttcaaggtggtgctcatcggcgactccggcgtcggcaagtcgaacctgctctcgcgcttcacgcgcaacgagttcagcctcgagtccaagtccaccatcggcgtccagttcgccacccgcagcat

SEQ ID NO: 13308 - DNA, 298 bp, Zea mays
gctactagctagctagcagcactgtgggtacgtacccaactactacacattacgtacgtgagcaagctagctagcagctagtgatagagaccagatcagctgcagcggcgacgatggctcctgagaagctgaagctgctcgtcggagtgctggccctgcagttccttctggcagggttccacatcgtctccagggcggcgctcaacatgggcatcagcgagatcgtgttcatggtgtacaggaacctcatctccctcgccttgctcgctccgttcgcctacttcctcgagaagaaaga

SEQ ID NO: 13309 - DNA, 310 bp, Zea mays
atacgcccacgcgtccgctcgcggggctgaggtggtggcgcgactgaagcggtgtcgactccgacgaactcgcagccaccgggggatacgcagcagcagcacatgcgtactccatcgacgttcatatttaaggacttggtttggataattctactcgtcaacaaaagtgattaaaaatggtggttcttgcagcttcaatcgtttcaaagtcgggaaaagcacttgtttcaagacagtttgttgacatgtctcgcataagaattgaaggattacttgctgcgttcccgaaactggttggaactgggaaaca

SEQ ID NO: 13310 - DNA, 299 bp, Zea mays
cggaccgtggtcgcccacgcgtccggctgcctccgcctctcgagtctcgtccaaccgtcatcctcctagctcctctactcgccagtcgccatgggcatgattaagatcggaatcaacggcttcggaaggatcggcaggctcgtggccagggtcgccctccagagcgaggatgtcgagctcgtcgccgtcaacgaccccttcatcaccacggactacatgacctacatgttcaagtacgacaccgtccacggccactggaagcacagcgacatcacactcaaggactccaagacgcttct

SEQ ID NO: 13311 - DNA, 298 bp, Zea mays
ctcactctcgttccatttccccatctcccagatccaattcgcgagttctccctcctctgcggccatggcgctctctgtggagaagacctcgtctggacgggagtacaaggtcaaggatctctcgcaggcggacttcggccgcctcgagattgagctggccgaggtcgaaatgcccggcctcatggcgtgcagcgcacgagttcggcccgtccaagcccttcgccggcgctaggatctcggggtctctccacatgaccatccagaccgccgtcctcatcgagaccctcaccgcgctcgg

SEQ ID NO: 13312 - DNA, 296 bp, Zea mays
cccacgcgtccgagcgcgtccacctcccaaacccctactcccccaggaagcaatggcttcccccacccagggccaggtcatcacctgcaaagcggcggtggcgtacgagccgaacaagccactcgtgatcgaggacgtgcaggtggcgccgccgcagccggcgaggtccgcgtcaagatcctcttcaccgcgctctgccacaccgaccactacacctggagcggcaaggatcctgagggtctttttccttgcattcttggccacgaagctgctggaattgtggaaagtgtcggtga

SEQ ID NO: 13313 - DNA, 293 bp, Zea mays
gcagaaggaccctacggtgtgtccccaactacaagctgtggattgggagaatataagctgtgcgataatccagaaaggtatggatcatgggatggcctccatccaacagaatctgcatacaaggtcatcgctatgggcctgctactaggttcctatacaagaccgccaatcgcttccaccaccacttcatgtccacagcttatggagctcggctcttctgctgaatacaaacgcctctacgacctgtaataatttatgtaattatattttattgtatgtactccctcgcccac

SEQ ID NO: 13314 - DNA, 289 bp, Zea mays
cggacggtggcacgggcaatgcatgaggtctgtgatgcaccatctgctagttgcagtaatcaaccaaacagcactaatggtagctacttcagagttgaagagctagtaagcactttctcggccaatccaagcttgattgcttttgcaaaactctgctccgtgtcatggaagagcagatgcaatagcaattttcaggagttctgttctcaagtgctatatgaatgtatgagcaaagatagaccatcactgttacaggcctatatcagtttttacacaacaatagagttaa

SEQ ID NO: 13315 - DNA, 286 bp, Zea mays
gcagcctccaaagccactcccaaacccccgcttccagaaccttctcgaagctccccgccgcctcctccactcgcaccgatggcgaaggaaccaatgcgcgtgctcgtcactggcgccgcagacaaattggatatgccctggttcccatgattgctacgggtgttatgcttggtgcagaccagcctgttattctgcacatgcttgacattccgccagcagctgaagcccttaatggtgttaagatggagttggttgatgctgcgtttcctcttctgaagggagttgt

SEQ ID NO: 13316 - DNA, 297 bp, Zea mays
agcgagaaagttctccagcgctctctcagctgctagctctgcttgtgaccatattcgtgattgggttcttggaacccctgaggggacatttgtttccatgggtgtgtattccgatggttcatatggtgttccttccggacttatttactcattcccagtaacatgcagtggtggtgaatggaaaatcgttcaaggcctcccgatcgacgagctctcaaggaagaagatggatgccactgcccaagagctgtcggaagagaagtcgcttgcttactcatgcatcgagtaaattatacc

SEQ ID NO: 13317 - DNA, 262 bp, Zea mays
cacatcactcatccacagctcgcagccgtattcctgtctcgaatcctctctcgccgctccgatggcccgcacgaagcaaacagcaaggaagtcgaccggcggcaaggccccccggaagcagctggccactaaggctgcgcgcaagtcggccccggccaccggcggcgtgaagaagccccaccgcttccggcccggcaccgtcgcgctccggagattcgcaagtaccagaagagcactgagctgctcatccggaagctcccct

SEQ ID NO: 13318 - DNA, 306 bp, Zea mays
cccacgcgtccgcccacgcgtccgcccacgcgtccggcaacgccacgctccccaccgccgaaatggccccgaagcgaggtggcagggcaccggtgcaggccaagaagaagacggataaagtgacgaaccctctgttcgagaaaaggccgaagcagttcggcatcggcggcgcgttgcctcccaagaaggacctgcaccgattcgtcaagtggcccaaggtcgtgcgcatccagcgtcaccgtcgcatcctcaagcagcgcctcaactgtgctccggcgctcaaccagttcacccgcatcctcgaca

SEQ ID NO: 13319 - DNA, 300 bp, Zea mays
cgaaagaatcacattccaagagttggtgatttcaatgagagcacatactacatggagggtaacactgggcatccagtgtttgaaacagcttatggcaaaataggagtgaacatttgttatggaagacatcatccccttaattggcttgcgtttggtctcaatggagctgaaatagtgttcaacccatctgcgactgttggtgaactgagtgaaccaatgtggcccattgaggcaaggaacgccgcaattgcaaacagctacttcgttggatcaattaatcgggttggcacagaagtgttc

SEQ ID NO: 13320 - DNA, 306 bp, Zea mays
ccctctcgtcgccgtcctctcccgttcgcaacgccacgctccccaccgccgaaatggccccgaagcgaggtggcagggcaccggtgccggccaagaagaagacggataaagtgacgaaccctctgttcgagaaaaggccgaagcagttcggcatcggcggcgcgttgcctcccaagaaggacctgcaccgattcgtcaagtggcccaaggtcgtgcgcatccagcgccagcgtcgcatcctcaagcagcgcctcaaggtgcctccggcgctcaaccagttcacccgcaccctcgacaagaacctcg

SEQ ID NO: 13321 - DNA, 282 bp, Zea mays
cggacgcgtggggtcctcttaagcccgccattgctccgccccgtccatcgaccggccggaacgtgttcttggattaattaactacgatctctatgagcatggggatggatcaacccgtcgtgcgtggtctcgttttgtgatgagtgggagagagaggatggcaagatcgatcctttgttaatggagatctcgttaattaggagagctaccgctgggacttggtggtttgtaatatatgatccaaccagtgatgaatcaatgcattcacttgtgtacacatat

SEQ ID NO: 13322 - DNA, 295 bp, Zea mays
cggacgcgtgggcaaggagcttactggcatacaacagattcaggtggacagaggtgtgcctctaggtgaagccttactcatgcacgataaatggctaacggacaagggcatcaagaacacaaactttgctattgtgacctggtctaactgggactgccgtataatgctggagtcggaatgcagatttaagagaatcaggaagcccccttattttaacaggtggatcaacttgagggtaccgttccaggaagtgtacggggacgtccgctgcaacctgaaggaggcagtccagctg

SEQ ID NO: 13323 - DNA, 258 bp, Zea mays
ccacgcgtccgcaatgagcttgtgaggacacaaactcattgtttgatgcattgtagaccacgtcgaggatacatcaaacaatgagcttgtgaggacacaaacccttgtgaagagtgccattgtgcaagttgatgctgccccattcaagacagtggtacctcactcactatggagttgacattggtaggaagaagaaaacccctgctgcaaagaaggataatgctgagggacaagaggttgaggcagcagctgaggaaa

SEQ ID NO: 13324 - DNA, 293 bp, Zea mays
ccccaattctaagcgagacggggcacaggaagaggagagcctaaaaccctaaccccccgaatcggatccggccgccggagcgcggaaccccaccccggccgccatggagatgggagggatgagcgacgctgagcggctgttcttcttcgagatggcctgcaagaactccgaggtcgcgtacgagcagaaccccaacgacgccgacaacctgacgcggtggggcggcgcgctgctggagctgtcgcaggtccgaaccggccccgacagcctcaagcttcttgaagatgcggaag

SEQ ID NO: 13325 - DNA, 292 bp, Zea mays
aacgcacacaccgcccgtccccgatctccgatcccctcgtcgatccaaagatgcagatcttcgtcaagaccctcactggaaagactatcaccctcgaggtggagtcttctgacaccattgacaacgtcaaggccaagatccaggacaaggagggcatccccccggaccagcagcggctcatctttgctggcaagcagctcgaggacgggcgcacacttgccgactacaacatccagaaggagagcaccctccaccttgttctccgcctcaggggaggcatgcagatcttcgt

SEQ ID NO: 13326 - DNA, 287 bp, Zea mays
tgtacttccgttcacttcttcagcggcggcgtgacaacgagagcaagaaagtatcaaaacccgagagcaatggaggcggtggggaagagcgtgtgcgtgaccggcgcgggcggcttcatcgcgtcgtggctggtgaagctcctcctctgccggggccaatacaaggtccgcggcaccgtgcgcgaccctggtgctagcaagaatgctcatctcaaggtgctggaaggagctggggaaaggttgcagcttgtcaaggctgatttgttggactacagcagtgttgcttc

SEQ ID NO: 13327 - DNA, 290 bp, Zea mays
cccacgcgtccgccgccttctacctgtccaacaacgagctgtacccggggaggcacgacgagatcgacatggagctgctgggcaccgtgccgggggagccctacacgctgcagaccaacgtgtacgtgcggggcaccggcgacggcgcgcgcctcgtgggccgggagatgcgcttccacctctggttcgacccggccgccgacttccaccactacgccatcctctggaaccccgaccagatcgtcttcctcgtcgacgacgtccccatcaggcgctacgccgccgccagt

SEQ ID NO: 13328 - DNA, 296 bp, Zea mays
cacgccgacccgcagccggcggtcgtctgggcctcgtcctcgtccgtgtacgggctcaacaccgacgcgcccttctccgaggaccaccgcaccgaccgcccggcgtcgctgtacgcggccaccaagaaggccggcgaggccatcgcgcacgcctacaaccacatctacgggctctccatcaccggcctccgcttcttcaccgtgtacgggccgtggggccgccccgacatggcctacttcttcttcgcccgcatcatcgtggccggcgagcccgtcacgctgttccgcgccgccga

SEQ ID NO: 13329 - DNA, 326 bp, Zea mays
cccacgcgtccgctcctcgcatttccttgcaaccgattgccttcccccctcccaacccaagaccgatggcgcccaaggccgagaagaagcccgcggcgaagaagccggcggaggaggagcccgcggcggagaagacgaccgccgggaagaagcccaaggcggagaagcggatccccgctggcaagtccgccggcaaggagggcggcgagggcaagcgtggcaagaagaagggcaagaagagcgtggagacgtacaagatctacatcttcaaggtgctgaagcaggtgcacccggacatcggcatctcctccaaggccatgtccatc

SEQ ID NO: 13330 - DNA, 317 bp, Zea mays
attactttccagggctatgatgatattcccaaggaaattcctgaccctgatgctaagaaggtacttatgtggttatttgttatgtagtttctgtcatatgattaataacatgggtatataaattctaaaatgtccattgcagcctgaggactgggacgatgaggaagatggtgaatggactgcccctaccattcccaacccagaatacaagggaccatggaaacaaaagaaaatcaagaacccgaactaccagggtaaatggaaggcacctatgattgacaacccagattttaaggatgatccatacatttacgcct

SEQ ID NO: 13331 - DNA, 317 bp, Zea mays
aaacagatctcctcgtcgtcgcctcgctgtctcctccgccgttgcctgcgatcccgatcatggagggcgacagtaccaacctcgacgcggctatagagtcgctcctgaacgtggagaagcagatgaggctggccggcgatgtcgccgcacgcggaaggccgtcatcgacatcgtcgagctctgctacaaggccggcgcgtggaagacgctaaacgaccagatcgttctcctctccaagaggagaggccagcttaagcaggccattactgctatggttcagaaagcaatggactacattgatttgacaccagacattg

SEQ ID NO: 13332 - DNA, 317 bp, Zea mays
ggcaaccgagagcgatcggcgatgggctccttcctctcgagcttagtcacgccccctccggccgccgacgaccccaactgcgccgtggtggccgcccactccaaggccacctacgacgagcagtgggcggcccacaagagcagcagcaagctgatggtgatcgacttctcggcctcctggtgcgggccctgccgcttcatcgagccggccttcaaggagctggcctcccgcttctccgacgccatcttcgtcaaggtcgacgtcgacgagctcgcggaggtcgcaaggacatggaaggtagaggcgatgccaacgtt

SEQ ID NO: 13333 - DNA, 315 bp, Zea mays
cagaaagtgcttccgttcaggcaatccttgactggcaaaggagaacaatggatatgatgtacactgacatcacacaagctctcgaagccaatggaatccaaacaaaccccaaggactatctcactttcttctgcttaggtaaccgtgaggtgaagcaggagggagaatatcaacctgaggaacacccagaacctggcactgattacatccgggctcaagaggctaggaggtttatgatctatgttcatgccaaaatgatgatagtggacgatgaatacatcatcattgggtccgccaacatcaaccagaggtcca

SEQ ID NO: 13334 - DNA, 313 bp, Zea mays
tcgaccttcaagtctcgctacgtagcagtgcaataaaaaaagcagccgcaatggcgagcagcaccatggccctctcctccacggccttcgccggcaaggccgtgaacgtgccgtcgtcgtccgccttcggcgaggcccgcgtgacgatgcgcaagacggcggcgaaggccaagccagcggcggcgtccgggagcccgtggtacggccccgaccgcgtgctgtacctgggcccactgtccggcgagccaccgagctacctgacgggcgagttcccgggcgactacggctgggacaccgcggggctgtcggcgga

SEQ ID NO: 13335 - DNA, 307 bp, Zea mays
gcgagatcgccgccccgggtgggctctagatcccgatggcctcgcgccgccgcaccctgctcaaggtcatcatcctcggcgacacggggttgggaagacgtctttgatgaaccaatatgtgaacaagaagttcagcaaccagtacaaggctacgattggggcggatttcctcaccaaggaggtgcagttcgaggacaggctcttcactctgcaaatatgggacactgctggtcaggaaaggtttcagagtcttggcgttgcattctaccggggagcagattgttgtgtcctagtctatgatgttaat

SEQ ID NO: 13336 - DNA, 308 bp, Zea mays
gtttcactattaagaacgttaaatcagaaatttgatcctgatgatcagtataacattgtccgtatgcttgattatttgtcatttcaaaatcatttgtgcatagcttttgagatgcttggtcaaaacctgtatgaactgctcaaaaggaatcacttaagaggtctgaaattgaaatatgttcaagccttctcaaaacagatattggatgccatggttgtgatgagagaagctggaataattcattgtgatctgaagccagaaaatatcctgttagctcccagcgtcgcaacagctgcagcagtgaaagt

SEQ ID NO: 13337 - DNA, 305 bp, Zea mays
gtgccctctgcgttcgagatcgatctcagctggcaccgtcccagttcgccatggcggaggaccggagccccaagcccatccactgcaaagcggcggtgtgccgagccgccggcgagccactcaccatcgaggagatcgtcgtcgacccgccgaaagcgtacgagatccgcatccgggtcatctgcacctcactctgccacaccgatatcaccttctggaaagctaaggtggcaccggtgtttccaagaatactagggcatgatgcgtacggggtagtggagagcgtgggggagcacgtggagggc

SEQ ID NO: 13338 - DNA, 306 bp, Zea mays
gtcatatctagctatagtagctcccttgagaagcatttgagggaggagccatgtctgaggagaagcaccaccaccacctgtttcaccaccgcaagccagaggaggagggcgcctccggcgagggtcgactacgagaagaaggagaagcaccacaagcacatggagaagctcggcgagctcggcgccatcgccgccggcgcgtacgccctgcacgagaagcacaaggccaagaaggacccagagaacgagcacgggcaccgggtcaaggaggaggtggccgccgtcgccgccgtgggctccgccggc

SEQ ID NO: 13339 - DNA, 310 bp, Zea mays
cagaagcggcggcggcggagcaaacgcaggcgaaggcgagggtgtgagggaaggagcaccagccatggtgcacgtcaacttctaccgcaactatggtaagacgttcaagaaaccaaggcgtccttatgagaaggagcgtcttgatgctgaactgaagctggttggtgagtatgggctgaggtgcaagcgtgagctttggagggtccagtatgcactgagcaggatccgtaatgctgcaaggcacttgctcacccttgacgagaagaacccccgtcgtatctttgagggtgaggcacttcttcgccgcatg

SEQ ID NO: 13340 - DNA, 303 bp, Zea mays
gccagcgcggggtcatccacgaattcatcgtgcccgaggaccagtacattctgcacacggcggaggcgcaggacatcaggctgccgttcgcgtgccgccacggttgctgcacaagctgtgcagtccgaataaaatcaggacagataaggcagcctgaagcacttgggatatctgcagaactaaaagataagggctatgctttgttgtgtgttggtttcccatctggcgatgttgaagtcgagactcaagatgaagatgaggtatattggctccaattcgggagatactttgcacgagggccag

SEQ ID NO: 13341 - DNA, 304 bp, Zea mays
cccacgcgtccgctcctatctggtataggacggagctgagcttctagcaacgtacagtgtatccgccatgagtcctttcggggcggtgatcacgccagaaaccctcaagtacatgtccaagtaccagggacgtgagatcacgcaggtggactgcgcacgggaggcgatgaggctgatccacgcggaagacaagaacctcaaggccgaggactcagcgtgggagctgaagaagaagttcggcaacggcgtgagcaccatggtcctcgtctacaacgccaccggggccagcctgagcctggtggac

SEQ ID NO: 13342 - DNA, 301 bp, Zea mays
gttccgtgtccgcgtccagtgtgtccgctactccgctccccctcagtcctcagttcctcacctagcggtacgtgcgcgcgggagacgcagatggcggcttcggaggcggcacggcggcggcaacaccggtgacgccgacagaggggacggtgatcgcgatccacagcctggaggagtggagcatccagatcgaggaggccaacagcgccaagaagctggtggtgattgacttcactgcaacatggtgtcctccgtgccgcgccatggctccaatttttgctgatatggccaagaagtcccc

SEQ ID NO: 13343 - DNA, 303 bp, Zea mays
agcagccagaaaaggacagttaagtcacttgagcgtgatgttggttgcaactttgagtttataagccctccgtccatagaagaagtgctggagtcatctgctgagcatgtcattgctacattgcgaggtgtgcacccagagtcaactaaatactttcttggagctgctgagaaattaacagaagaattgggacctcatgctcttgcttctgcactggcacatctgagtggattttctcagccaccttcgtcacgttctctcatcagtcatgagcagggatgggtgacgttgcaactaactaga

SEQ ID NO: 13344 - DNA, 305 bp, Zea mays
tttcgttgaccccaaactacgtgcttagaagcttaatactgcagtggtgcgaggaaaaggggatggaaccacctagcaggtctaaaagcgacggttctcctcttgaggttgctggcaacagattagcaattgaagcgttagtccgcaacctctcgagcagttcattagatgatcggaaatctgctgcggctgaaataagatccttggccaagaaaagcacagacaaccgtatacttctagcggaatctagcgctataccggctctggtgaaactcctgtcgtccaaggacccgaaaacccaagag

SEQ ID NO: 13345 - DNA, 303 bp, Zea mays
gcctccgctgccgattcgaaagcacccgtcctgtcccctcgcaaaaccctagctccagccaccatgaagggcaaggctgacacctccaagaaggacgagggcaggctccgggacgggcgagcgccgccgtgaaagcgcaagaaggccgccgcgagcggcaagcccaagcgcccgccctccgccttcttcgtcttcatgtctgaattcaggcaggagtatcaggcgctgcaccctggcaacaagagcgttgcgaccgtgagcaaggcagcaggggaaaagtggcgtgctatgtcagatcgagag

SEQ ID NO: 13346 - DNA, 297 bp, Zea mays
cgcgagtatcgccgccccgggtgggctctagatcccgatggcctcgcgccgccgcaccctgctcaaggtcatcatcctcggcgacacggggttgggaagacgtctttgatgaaccaatatgtgaacaagaagttcagcaaccagtacaaggctacgattggggcggatttcctcaccaaggaggtgcagttcgaggacaggctcttcactctgcaaatatgggacactgctggtcaggaaaggtttcagagtcttggcgttgcattctaccggggagcagattgttgtgtcctagtc

SEQ ID NO: 13347 - DNA, 294 bp, Zea mays
tttgaatatatttttgtattaaaattattcgaagacacaaatgttgctaatatattctataaatctaatcaaacttaagaaagtttgaccgacacgaataacatagcgaaacatttgtggacggagggagtatcagacatggattctgaatctcttgttcataatgtttaattaaaagttggaacagaaaactacctgatgttttatgagtagtgttgatcatgggctacagcatagccttgtaggtttcagtttatcatgcctgatgcaccagggttcttagcataaaagtgt

SEQ ID NO: 13348 - DNA, 102 bp, Zea mays
ctaccgcacctccggcgggccgttcatcggcagcagctacgactactacgcgccgatcgacgaatacggtctgctgaggcagccgaaatgggggcacctgag

SEQ ID NO: 13349 - DNA, 297 bp, Zea mays
gccatcctcatgaagtggatcctccacgactggagcgacgcgcactgcgccacgctgctcaagaactgctacgacgcgctgccggaaaatggcaaggtcatcgtcgtcgagtgcgtgctgccggtcaacacggaggccacccccaaggcgcagggcgtcttccacgtcgacatgatcatgctcgcgcacaaccccggcggcaaggagcggtacgagcgcgagttccgcgagctcgcaaagggcgccggcttctccgggttcaaggccacctacatctacgccaacgcctgggccatc

SEQ ID NO: 13350 - DNA, 295 bp, Zea mays
gcagcgaccaggtcgctgccggtcactccggtcagcttgtcgccgggccagactccgaagatggttcccacggtgaagttggtgtcgacaatgctggagccgactagggggtcgaacgcaacgctgaaaccaccttcgactgggccacccatgtcctggagctcggggacttcctcggagcacgcatacttacacacatgtgagtactccaaagcctcaaagaggagcttgttagcgagcatgtcgacggccagctgctcgtcgccgaaggaattgacacaggccgtgccgccgc

SEQ ID NO: 13351 - DNA, 293 bp, Zea mays
gctagtcttcagctagtagcttacgacgggataatctcggtctgggagcaaaggggaggacgacgacaatggaagatgagctccgtgcccgcagtagggcgggtgatggtggtggtggtggtggtgctatctgcagcggcgacgactgtgacggggcaggcgcttgtgaccggcgtgatgatcttcggcgactcggtggttgacgccggcaacaacaaccggctagcgacgctggtgcgcgccgacttcccgccctacggccgcgacttcccggcgacgcacgctcccacggg

SEQ ID NO: 13352 - DNA, 292 bp, Zea mays
ccagtattgacaattgctgctgctctcgcatatcgaaatccatttgtgctcccaatagatagaaaagaagaagctgatgctgtcaaaagatcatttgctggtgactcgtgcagtgatcacattgctcttgttaaggcgtttgtagcatggaaggatgctaaaaggagtggtagagaacgcactttctgttgggaaagttttctgtcccctatgaccctgaagatgatggacgacatgcgaaatcaattttttgatctactatctgatattgggtttgttagcaagacagcag

SEQ ID NO: 13353 - DNA, 291 bp, Zea mays
ggcctctgtcccttgcaagttcaatctcacctccaaccatgggtaaagagaagtcccacatcaacattgtggttattggccacgttgactctggcaagtcgaccaccacaggacacctgatctacaagcttggaggcattgacaagcgtgtgatcgagaggtttgagaaggaggctgctgaaatgaacaagcggtccttcaagtacgcatgggtgctcgacaagctcaaggctgagcgtgagagaggtatcaccattgatatcgctctgtggaagtttgagaccaccaagt

SEQ ID NO: 13354 - DNA, 294 bp, Zea mays
cggacgcgtggcgtgacgcgtggggttctagatcgcgagctgccgcccgcgatctagaactagtcccggagcctctccttcccggtcagctccgcccgtagctcttcgtcccctccatctccggctgcgtcgccggcgagcccgacaccgcgaatcggatccacctacaaggtgagagggaagagatggggctcacgttcaccaagctgttcagccggctgttcgccaagaaggagatgcggatcctgatggtgggactcgacgccgccggaaagaccaccatcctctacaagc

SEQ ID NO: 13355 - DNA, 292 bp, Zea mays
cccacgcgtccgcggcctcgttcccgcagtatgtcaccgaggccatcacggggccgctcccggacccgcccggggtcaagctgcagaaagaggggacgcgagttaagcaccccgtcgtcttcgtcccgggcatcgtcaccgggggcctggagttatgggaggggcaccactgcgccgaggggctcttccgcaagcggctatggggcggcacatttggtgacgtatacaagagacctctatgctgggtcgaacatatgtcattggacaatgaaactggattagacaaacctgg

SEQ ID NO: 13356 - DNA, 290 bp, Zea mays
gtactccgagggcatgcccggcgcccgctactacggcggcaacgacgtcatcgacgagatcgagaacctctgccggtcacgcgcgctcgctgccttccaccttgacgccgcgtcctggggcgtcaacgtgcagccctactcgggctcccccgccaacttcgccgcctacaccgcgctgctcaacccgcacgaccggatcatggggctcgaccttccctccggcggacacctcactcacgggtactacacggccggcggtaagaagatctccgccacctcgatctgctttg

SEQ ID NO: 13357 - DNA, 289 bp, Zea mays
tttaacctggaaaaattggggataggtgggttaagtgctgaattcactgacatatttcgtagggcattcgcttcaagagtctttcctcctcaagttgtcagtaagttgggcatcaaacatgtaaaaggtatactgctatatggacctcctggtactggcaagactcttatggcacgacaaattggaaaattattgaacggaaaagatcccaagattgtgaatggacctgaagttctgagcaagtttgttggagaaaccgagaagaatgtgagagatttgtttgctgatg

SEQ ID NO: 13358 - DNA, 289 bp, Zea mays
gaggcccctgcccaaggcaagagaaaccgcggcgcgggagaaggaggaagggcagacgcagacgggcgaacaagatgagggagatcatcagcatccacatcggccaggccgggatccaggtcggcaagcctgctgggagctctactgcctcgagcacggcatcgagcacgatggcaccatgcccagtgattcctcggttggcgtcgcacatgatgccttcaacacgttcttcagcgagactggttccggcaagcatgtgcccagggccatcttcgtcgaccttgagccc

SEQ ID NO: 13359 - DNA, 295 bp, Zea mays
gtgtgtgtgtgtgtgtgtgtgtgtgtgtgtgtgtgtgtctgcgtgcagggcgcgatcgcggtagggcacgcccaagaggctgacctacgacgagatccagagcaaaacgtacatggaggtgaagggcacgggcacggcgaaccagtgcccgaccatcgacggcggcgtggagtcgttcccgttcaaggccggcaagtaccagatgaagaagctgtgcctggagccgacgtccttcaccgtcagagcggagggcatcgccaagaacgccccgcccgagttccagaagaccaagctc

SEQ ID NO: 13360 - DNA, 288 bp, Zea mays
cgcacgcagccatggtgctctcgcacgcgagctccggccgggacgacgacgacgcggtggcctccaccttcgcgtcgcgctacgtgcgcgagcgcctgccgcggtaccggatgccggagcggtcgatcccgcgggaggcggcgcacagatcatcagcgacgagctcatgctggacggcaacccgcgcctgaacctggcgtccttcgtcaccacgtggatggatcccgagtgcgacaagctcatcatggactccatcaacaagaactacgtcgacatggacgagtaccc

SEQ ID NO: 13361 - DNA, 285 bp, Zea mays
cccgaaaggaaccctaatcctagccgcacgcgggaggcagctaagagagcttgaagcaccagccatggcggacacgacctcacggcgctgatggcggcgcactggaccggcacctggtcttcccgctgctggagttcctccaggagcggcagtctactcggagccggagatcctggaggccaagatgcgcctcctcagcggcaccaacatggtcgactacgccatggacatccacaagtccctccacggcaccgatgacgttcccgaggacatggtcaagcgccg

SEQ ID NO: 13362 - DNA, 286 bp, Zea mays
ctcctcgctcctgctgccatcgtttttcctttttcctggacagccactgcaactcctcccaaatcctcccacccggtttagccggctccgctgccaccgccgcgactccacctctgtcgccaccatggtcaagtccaaggccatcagggtccacgagctgggcggccccgaggtgctgcggtgggaggaggtggaggtcggggagcccggtgaaggggagatccgcatcaggaccaccgccgtcggcgtcaacttcatcgacatctactttcggaagggggtctac

SEQ ID NO: 13363 - DNA, 287 bp, Zea mays
gcttccagaaccccccgccgccgctgcgccctcctctcggtcctgccgtccgtcgaggtaaaaggacagcatggtgagggtcagcgtgctcaatgatgctctcaagtccatgtacaatgctgaaaagatagggaaacgtcaggtcatgatcaggccgtcatccaaggtgatcatcaagttcctgacggtcatgcagcgccatggctacattggcgagttcgagtacgtggatgaccacagagctgggaagatcgtggtggagctgaatggaagactgaataaatgtg

SEQ ID NO: 13364 - DNA, 289 bp, Zea mays
cgtcactcaacacagcacaggcagctcgagagagagagagagagaaagatgtcgtggttcgggcaccaccaccacaaccagccggctcccccggcgtcgggccccaaccaggtgttcaagatgttctgccgcgccaacgagaactactgcctggccgtccgcgacggcaccgtcgtgctggccccggtcaaccccaaggacgaccaccagcactggtacaaggacatgcgcttcagcacccgggtcaaggacgaggaaggcatgccggcgttcgcgctcgtcaacaagg

SEQ ID NO: 13365 - DNA, 283 bp, Zea mays
gcgtcagagcccgatcccgatccagcgaggcggcgaccctccctcctccccttgcttcgctcgtccagccctgaccacccgcatccccgtcagtcatggcagcggcacaggcggaggcgcggtgcgtgcgctgtcccagaaggagcaggacatacagatgatgctcgccgccgacgtccaccttggcaccaagaactgcgatttccagatggagcgctatgcctttaagcgccgcaccgacggcatctacatcatcaaccttggcaagacatgggagaaactg

SEQ ID NO: 13366 - DNA, 285 bp, Zea mays
caaatccttcgatcggcgccgcccgccctctcgcagctctctccgatggcccgcacgaagcagacggcgaggaagtcaactggcggcaaggcgccgcggaagcacctggccaccaaggcggcgcgcaagtcggctccggccaccggcggcgtgaagaagccgcacaggttccgccccggcaccgtcgctctccgcgagatccgcaagtaccagaagagcacggagctgctcatccggaagctgcccttccagcggctggtgcgtgagaatgcgcaagacttcaag

SEQ ID NO: 13367 - DNA, 324 bp, Zea mays
gctggtccagctggcgcccagtagctactctgccgattggcaggttcaatatgtttttgcacgcaatggcaaaccgattggaccacaggcgaattctaagtggctctacatcgccccgacggggatgtacgggtgcgtgaactacctcaaggagaagtatgggaatccaacgatctacataacggagaacggaatggaccagcctggaaacttgacccgagaccagtacctgcgcgacgccacgagggtgcggttctacaggagctacatcggccagctgaagaaggccatagaccagggagcgaacgtggctggctacttcgc

SEQ ID NO: 13368 - DNA, 318 bp, Zea mays
ccacgacctgaccccagcgatgctccagttgctggtgttggaaaggtgtttttggaatatgcagatgtcgagggctcgaccaaagcaaagacggggatgcatgggcggaaatttggcgggaaccaggtggtggccgtgttctatcccgaggacaagttcgctgctgagcagtatgactgaaagttgtagaacctgttctagagttgcaacacacaatgtgtgtgttttttttaaaatctttgagggtaccgttttctcttgaatttgaatcttatctagttataagtttggtgcaggaccagtcgataagcgataagt

SEQ ID NO: 13369 - DNA, 320 bp, Zea mays
ggacctccactccacgacccgaacgttcgggagaaggcaaattccagacaccacacaggacacagcgcattcggctaatttcctcgtctctccccaatccgaccacccccatccattcaccaacccgaaatagaaggccgtccccagccaccagcctccggagttcctccggcgatccccgtccccttgtgtgcgcgctccaggagggccttctgcctccagcttgcagagcccacctaattgctgcgagatggatagagggcagaacgggagggatgacgtcttcggacgcagggatccattttctgggtttggcttcg

SEQ ID NO: 13370 - DNA, 320 bp, Zea mays
ggcggccacgagaggaagaagccgtgcccggcgtacgtgctctggctcaaggaccagtggaccgaggtcaagaaggagaaccctgaggccgacttcaaggaggtgtccaacacgctgggcgccaagtggaaggctctgggcgccgaggagaagcagccctatgaggatcgataccgccaggagaaggaggcctacctgcaggtggttggccaggagaagcgcgaggccgaggcgatgaagcttctcgaggagcagcagatgcagtggaccgccaaggagctgctggatcagtacctcaagttcaggcaggaggccgagga

SEQ ID NO: 13371 - DNA, 315 bp, Zea mays
agcgagggatgagaatgagggccgtggtgatcacgtgcgccggcgggccggaggtgctggaagcgcgggaggtggaggaccatcccgcgctaggcgaaggagaggtgctcctcgaggtcgccgccgcgggcgtcaatcgcgcggacaccgtgcagcggatgggccggtacccgccgcctgccggcgcgtccccttacccggggctcgagtgctccggcaccatcctcgcgctcggccccaacggtccctcccgttgggccgtgggcgataaggtttgcgcgctcctcatcggcggcgggtacgcggataatgtgg

SEQ ID NO: 13372 - DNA, 313 bp, Zea mays
agaaaggggtgacgtaagttgcagggtttatattcatgtgcaatgcaaagactaagaaggagtgctaccagagtcgcttgtttgggatgcctagtgggaagattgaaatggtcaagaagattaggccaggggtcaagctgttcctgtatgattttgacttgaagcttctgtatggcgtgtacaaggcagcatcacatggtgggctgaaccttgtccatgaagcatttaatgggaagttccctgcacaggttaagtttaagattgataaagattgccgtcctctccctgagagtagtctcaagcaagccatcaa

SEQ ID NO: 13373 - DNA, 313 bp, Zea mays
caccaacctcagcacatcgaggagaagaggagtggccatggcttcgtcggtggccaccgcggcgagcacattcctgggcacccgcctggcggacccggcgccgcagaacgggcgcatcgtggcccggttcgggttcggcggcggaaagcccaaggctgccgtcccgaagaaggtggcgaagacgtcgatctcctctgaccggccgctgtggttccccggcgccgtggcgccgactacctcgacggctcgctggtcggcgactacgggttcgacccgttcgggctcgggaagcccgtggagtacctgcagttcg

SEQ ID NO: 13374 - DNA, 313 bp, Zea mays
gcttcctccaaagccactccaaacccccgcttccagaaccttctcgaaactctccgcctcctcctctactcgctccgatggcgaaggaaccgatgcgcgtgctcgtcactggcgccgcaggcaaattggatatgctcttgttcccatgattgctaggggagttatgcttggtgcagaccagcctgttattctgcacatgcttgatattccgccagcagctgaagcccttaatggtgttaagatggagttggttgatgctgcatttcctcttctgaagggagtcgttgcgacaactgatgttgtggaagcgtgc

SEQ ID NO: 13375 - DNA, 315 bp, Zea mays
gaagcacggctggagtcggtccctgaaatgggctacgacgcactgtcagacacgccccggggcgagatctgcttgaggggccacaccatgttctccgggtactacaagcgccctagcctcactgaagaagtgttctcagatggctggttccatacaggtgatatcggggagtggcaatccaatggcacgatgaagatcatcgacagaaagaagaacatcttcaagctgtcccagggggagtatgtggcagttgaggtcctggaaagagcatacctgcagtcaccccttgtggcatcggtctgggtctacgggaac

SEQ ID NO: 13376 - DNA, 309 bp, Zea mays
ccttaattcgcttcctggtgttgatcccaatgatccatctgttaaagatttgctggcatcgttgcacagccagggagagcaagagaagaaggaagacacgtcagacaaaacagaagacgataagaactgatatagccatgttcacgcttccatgcgtacaaagaaattaaagaccggtctccattgactgcgtttactctcttggtcgtggagtttgtttatcctcatataacggtgctttgattataacttaccgccgagggaatttgtattatgacactgcaacaatcttctctccatatatgttca

SEQ ID NO: 13377 - DNA, 307 bp, Zea mays
gtccaaaacttgcttgttcttcgttttgccaaccgattattcttgcctctttggaaccgcgacaatattgataatatacagattgtattcagggaagactttggtactgaagggcgtggaggatattttgaccaatatggaatcattcgtgatatcattcagaatcatttactgcaggttttctgtttggttgcaatggaaaagcctgtctcccttaagcctgagcacatcagagatgagaaagtcaaggttctgcaatctgtgaaccctattaagcctgaagaggtagtccttgggcaatacgatg

SEQ ID NO: 13378 - DNA, 308 bp, Zea mays
ggatgaggaaagcattaaggttactatggatgactttgtgaatgcacttcatgaaattactcctgcatttggtgcttccaccgatgatctcgaaagatgcagattgcgaggtattgttgactgtggtaaggcacataagcacatttaccagagagctatgctccttgtagagcaagttaaagttagcaaaggtagtccacttgtgacttgcctgttggaaggtcctgctggaagtggtaaaacagctatggcagcaagtgttggcattgacagtgattttgcatatgtgaaaattatatcagcagaaa

SEQ ID NO: 13379 - DNA, 307 bp, Zea mays
caccggtatctattggggagtgaacaagtttgttattgataactcatctgtgcccgtggttgagcggaaaaagaaggttggacctggcagattttctattgttcttcttcttgtgtttatggatctctccttaacggttctgcgaacataacctttcaggacaagccaaagctcagcatgggtgagagcatgaaggttctgttgtcatctcggtatgtgagggatcttgctacattggttgttgcttatggaataagcattaaccttgtcgaggtgacatggaaatcaaaactgaaagcacagttcc

SEQ ID NO: 13380 - DNA, 309 bp, Zea mays
cactggccgggaacatcccgcccaaggccgggctgggcgacctccgcagcctcgcggcggggctgcgcggccagaacggctctgccatgatcgacggctccgagagcttcgacggcgccaaggcgtacaaggacagcaagatctgcaacatgctcaccatgcaggagctgcaccggcggtaccacgaggagacgggcatcacgttcgcgtcgctctacccggggtgcatcgccaccacggggctgttccgcgagcacatcccgctgttccgcctgctcttcccgccgttccagaagttcgtcaccaagg

SEQ ID NO: 13381 - DNA, 308 bp, Zea mays
gcgctcattagtcactagggttttaaactttccccccgatccgcctcgccgccggcgtcgtcctccgccggaaatccaccaccctacacccagccggagacgactatggtgggtttcggctcgatggcgggctacgggatccagtcgatgctcaaggaaggccaccgccacctctccgggctcgaggaggccgttctcaagaacatcgacgcctgccgcgagctgtccgccattacgcgcacctctctcggcccgaacggaatgaacaaaatggttatcaatcacttggacaagctgtctgtcacaaa

SEQ ID NO: 13382 - DNA, 305 bp, Zea mays
ctgtacctcccggacacggctacggggtccgatgattccaagaagctcccggtgctagtctacttccacggcggcggctttgtcacccactcggcagcgtctccgccctatcagtccttcctcaacaccctggccgcgaaggccggcctgctcatcgtctccgtgaactaccgcctcgcgccagagcacccgctgcctgcaggctacgaggactccttccgcgcgctcaggtgggcggcctctggtagtggggacccctggctgtcacatcacggcgacctggcccgcatcttcctggccggcga

SEQ ID NO: 13383 - DNA, 235 bp, Zea mays
ctctggtgacatggatttgaagattgctggtaatgaaagtggcatatctgcatttcagatggacattaaggtagttgggataactctacctgtgatggagaaagcactccttcaagctagggaagggagacaacatattctaaatgaaatgttgaaatcttcacctccaccctcaaaagcactatctccacacgctccattaattcatgttatgaaggtcaaacctaacaaggtg

SEQ ID NO: 13384 - DNA, 312 bp, Zea mays
ccgcgaaaaccctagaaactacccaccccgaccacccgccgccatgtcatccacaacgccggccatcgcgtcccccgcctctgagcaagccaaatcgaagaaaaagaagcacagatcgaaggacgacccctccgctgctgccgccgacccaccgtcgctcgctgaggccgaggagaagactgatggctacctcatcaagccgcagtcccttgttccgtccctcgacacctccacctggccgctcctcctcaaaaactacgaccgccttaacgtccgcaccggccactacaccccgctaccctccggccactc

SEQ ID NO: 13385 - DNA, 305 bp, Zea mays
cttcctctcctcgctctccctattctggacggccgactcgcttctgtgagctaccggccttagatccagccatgagggagattctccacatccagggcggccagtgcggcaaccagatcggttcaaaattctgggaggtcgtctgcgacgagcatggtatcgatcccaccggacgctatgtcggcacctccgacctccagctcgagcgcgtcaatgtctactacaacgaggcctcatgcggccgcttcgtgccgcgcgctgtgctcatggacctcgagcctggcaccatggacagcgtccgcacc

SEQ ID NO: 13386 - DNA, 302 bp, Zea mays
caactttggaccaggaaggcaaacattttccagagttttatggataatcagaaattgtccattaaggacataaggatatcatctcagtccattaagcaggaaatgtttgcccttcaaatgaaatggatagatgaaatatctagcattggacgtgagttgaaaggcttggtagatgctgctgacaattaccataaggttcttgctgaaaatcagaagctatttaatgaggtacaggaactaaaaggcaatatcagggtttattgtcgtgtcagaccatttcttcctggtcaagatggaaaaac

SEQ ID NO: 13387 - DNA, 300 bp, Zea mays
cccacgcgtccgatcccgtcgcatcccatcccactaccacccatctcgtcgtccgccgattcgatccggttcttccaacccaggggctgtgatggcgacgaagaggagcgtgggcaccctcggcgaggcggatctgaaggggaagaaggtgttcgtgcgcgccgacctcaacgtccctctcgacgacgcccagaagatcaccgacgacacccgcatccgcgcctccgtccccaccatcaagttcctcctcgagaagggcgccaaggtcatcctcggcgagcagctaggtcgtccaaaagg

SEQ ID NO: 13388 - DNA, 295 bp, Zea mays
cccacgcgtccgggcgaaaccgtcgcatcctccatgcccggcatgagatactccattgcaagcacctacaattttgtcaccgacttgatggacagccatctagtggctgggctccgggtggtcgacagggcatgctgcggatcgggaaaactgaacgccgcggtcatgtgcgcccagccaaacacgacttactgttcggatcgcgacgactacatgttctgggacatgctacatcctacgcaggcaacaaatgaacgtggggtggtcgccatcttctacggcccgcatgagtacg

SEQ ID NO: 13389 - DNA, 299 bp, Zea mays
aaccggtccaacactttcacgctcaggcgctcagctctagcaatggctgcctccaccatggcgatctcctccacggcgatggccggtacgcccatcaaggtgggctccttcggcgaggggcggcatcaccatgcgcaagaccgtgggcaagcccaaggtggcggcgtccggcagcccctggtacggccccgaccgcgtcaagtacctcggccccttctccggcgagcccccgagctacctcaccggcgagttccccggcgactacggctgggacaccgccgggctgtccgccgaccccg

SEQ ID NO: 13390 - DNA, 299 bp, Zea mays
cccacgcgtccgtcgacctcgaagaagcagcgcatcgccacccacactcacatcaagggcctcggcctcgacgccaatggaatgtcgatgccgttggcggcgggggttcgtgtggctagcggcggcgcgcgatgcggccgggctggcggtcgacatgatccgccagaagaagatggccggtcgcgcgctgctccttgctggctcgctcgccacgggcaaaacggcgatactctcggcatagctcaggatctcggcagcaaggtcccattctgtcctatggtaggatcagaagtgtactc

SEQ ID NO: 13391 - DNA, 302 bp, Zea mays
gccatgagtcctttcggggcggtgatcacgccagaaaccctcaagtacatgtccaagtaccagggacgtgagatcacgcaggtggactgcgcacgggaggcgatgaggctgatccacgcggaagacaagaacctcaaggccgaggactcagcgtgggagctgaagaagaagttcggcaacggcgtgacaccatggtcctcgtctacaacgccaccggggccagcctgagcctggtggacgacgggaaagactggatgggctccgtctacagctcgccgatcccggacaccttccacaacggg

SEQ ID NO: 13392 - DNA, 294 bp, Zea mays
ccatccctcactctcctccgaagccatcgtccacgtcccagcctccccggactctaggggcagaagctgcagcgtcgagatggtgaaggggcgcacggggcagcgcgtgaggctctacgtccggggcaccgtccttggatacaagcggtccaagtcgaaccagtacgagactacgtcgctggtgcagatcgagggggtgaacaccaaggaggacgtcgcgtggtactgcgggaagcggatggcctacatctacaaggccaagaccaagagcagcggcacccactaccgctgcat

SEQ ID NO: 13393 - DNA, 293 bp, Zea mays
aacgagagcaacgaatattcaaaccgaaaacaatggagccggtgcggaagagcgtgtgcgtgaccggcgctggcggcttcgtcgcgtcggagctggtgaagctcctcctctcccggggccaatacgcggtccgcagcaccgtgcgcgaccctggtgctagcaagaatgcccatctcaaggtgctggaaggagctgaggaaaggttgcagcttctcaaggctgatctgatggactacaacagcattgcatcagcagttgccggctgtgagggtgtcttccatgtagccagtcct

SEQ ID NO: 13394 - DNA, 290 bp, Zea mays
ggtaagcagcagcaggaaccctagcaccgccgcatccgcagccatgggtatcgacctcgttgccggtgggaggaacaagaagaccaagcgcacagcgccgaagtccgacgatgtttatctcaagctccttgtcaagctctaccgtttcttggtcaggaggaccaagagcaacttcaatgctgtcattctcaagaggctcttcatgagcaaaaccaatcgcccaccaatctccatgcgccgccttgtcaagttcatggaaggaaaggagaagaacattgctgtgattgttg

SEQ ID NO: 13395 - DNA, 289 bp, Zea mays
cccacgcgtccgggcaagtaccagatgaagaagctgtgcctggagccgacgtccttcaccgtcaaggcggagggcatcgccaagaacgccccgcccgagttccagaagaccaagctcatgacccgcctcacgtacacgctggacgagatcgagggcccgctcgaggtcggctccgacggcacgctcaagttcgaggagaaggacggcatcgactacgccgccgtcaccgtgcagctcccggggggcgagcgcgtgccgttcctcttcaccgtcaagcagctcgtcgcca

SEQ ID NO: 13396 - DNA, 315 bp, Zea mays
ccgtcatgcatgtgggttgtgttgcaaagatcaaccctcaggctccccttgataaagtttgcgtccttagctgtggtatttctaccggtcttggtgcatcaattaatgttgcaaaacctccgaagggttcgacagtggctgttttcggtttaggagccgttggtcttgccgctgcagaaggtgcaaggattgctggagcgtcaaggatcattggtgtcgacctgaaccccagcagattcgaagaagctaggaagttcggttgcactgaatttgtgaacccaaaagaccacaacaagccagtgcaggaggtacttg

SEQ ID NO: 13397 - DNA, 317 bp, Zea mays
cccagacccagcagctattgtggtcgtccctcagccgcgtcgcaccgcatcgcattctacgattcgaagctctctctgctcgcagccatggcgaagaattacccaaccgtgagcgccgagtacagcgaggccgtcgagaaggccaggcgcaagctccgcgccctcatcgccgagaagagctgcgcgcccctcatgctccgcctcgcgtggcactccgcggggacgttcgacgtgtcgtcgaggaccggcggtcccttcggtactatgaagtgcccggcggaactggctcacggcgccaacgcggggctggacatcgc

SEQ ID NO: 13398 - DNA, 316 bp, Zea mays
agatttttccaccaaaagattggttgattgcgtcatctgtgccatcaaagttttcaccagatgctattcagaatgttttaaatgaactgactcctgagactgtaagaatattctgggaatcgaaaaagtttgaagggaaaacaaaattagcagagccatggtatggtacatcatattctgtcgaagttgtccctccatcaatcatacagaaatgggtagggaaagcccctgaggaagatctacacctgccaaagcgtaacatcttcattccaagtgatctttcactgagaagtgtagaggaaaaggtaagttttcc

SEQ ID NO: 13399 - DNA, 318 bp, Zea mays
gccagggtcgggctggacaaggccaggatgcgcgccacccgccacgtcctctccgagtacggcaacatgtccagcgcctgcgtgcacttcatcctcgacgagatgcgcaacggctccgccgaggacggccaggccaccaccggcgaggggctcgactggggcgtcctcttcggcttcggcccgggcctcaccgtcgagaccgtcgtgctccacagcgtccccatcaccaccggagcgcccaccgccgcctgagtcgtccatcctcgatcgctccagtccagacatgaacgacccggcctacgaataatgtatctgcgt

SEQ ID NO: 13400 - DNA, 316 bp, Zea mays
aatgagacgaaggctacagtcaagtttcaactgaagaaagtcctttgcatgggtgtcgcggtcggtaacctgtctatggaggagaagcagatccaacagaacatccagatgagcatcaacttcctcgtgtctcttctgaagaagaactggcagaatgtaagatgtctctacatcaagagcaccatggggaaaccattcaggattttctaagtctgtttttttgtgaagtctgctctttatgatatttggtttttgaaccgaggttgtcttgaactaaaactcttgttagatcatgtttggttggtaggatatttga

SEQ ID NO: 13401 - DNA, 316 bp, Zea mays
cccacgcgtccgcccacgcgtccggagagatccggagcagccgcagtcccaccgacctcgccgccggtcgccctccatctcctcgccgctgcctctcggaagtcgcaaacattctagccagtggcatcaaactgcgcgagtacacaaaaggcgtcgagaataacatacgccaaatcgagctggattctatccaggattacattaaggaaagtgaaaatctagtttctctgcatgatcaaatttgtgattgtgacaatattttgttacaaatggaaacagttctgactggattccagaaattggttccataagttca

SEQ ID NO: 13402 - DNA, 314 bp, Zea mays
cttgtgattacactgggcatgtttgagatggcattgtggtattttgagtatgctgaatttaatgagactggagtacggccaaaaggcatcacattttgggctgtcacgtttgggactgtcaagaggacggctgctgaagttattgttctcattgtctcaatgggatatggtgttgtcacgcctactttgggtggcttgacatcaaaagtggtcatgcttggaggaacattctttctagcaacagaaattcttgaattggtagaaaatcttggtgctgttaatgatctatctggaaaagctcgtctgttcttggt

SEQ ID NO: 13403 - DNA, 321 bp, Zea mays
gtcacttcgccacgaacaaaagcgcatcgatctcgctgtcgtcactcctcgtcacccagccacgaacagaggcaccacccagcatggccctgcaggcggcgctcctcccatccaccctctcatccgtccccaagaagtgcagcctcgccgtcgcggcgaaggacacggcattccttagcgtatcccagaagaaggtgcaggcggcgtcgctgtcggtgagaacgcgggtggcgacgacggcgcctgtggccacgccggggtccagcacggcggccaaggatgggaagaagaccgtgcggcagggcgtggtggtgatcacgg

SEQ ID NO: 13404 - DNA, 313 bp, Zea mays
tcccgcacatccagaggtgcaccgtcatggacctcccccacgtcgtcgccgaggctcccgccggcaccgccggcctgtccttccacggcggcgacatgttcgagcacatctcgtcggctgacgcactcatgctcaagtggatcctgcacgactgggatgaggacaagtgcatcaagataatggagcgctgcaaggaagcgatcggtggcaaggaagcaggggggaaggtgattataatagacacggtgctcggatctcgggcagacgacgacgacgacgacaagacgtgcagggagacgtatgtgttggatct

SEQ ID NO: 13405 - DNA, 312 bp, Zea mays
gacgagtccgtgctctggaccgagagccgcgacgtcggcaacggcttccgctgcgtccgcatggtcaacaacatctacctcaacttcgacgccttccacggcgacaaggcccacggcggcgtccatgacggtaccgagatcgtgctctggaagtggtgcgagggcgacaaccagcgctggaagatcctcccttggtgaacgaacgaaagaaactactagctggtaccctaataataattctgctggctgcggcgatcccaaaataaaagaggccgggtgcgatgcatctcggacttctcgagtggtgtttgc

SEQ ID NO: 13406 - DNA, 312 bp, Zea mays
ggcgcctcccccatggctgagaaggagggcaacctcgaggccgtcctcaaggaggccgtcgacctggagaacatccccctcgatgaagtgttcgagaatctgagatgcagccgcgagggtctctccaccgagcaggcgcacagcgcctcgaaatctttggcccaaacaagctcgatgagaaggaggagagcaaattcctcaagtttctgggtttcatgtggaacccactgtcctgggtcatggaggctgcagcaatcatggccattgctcttgccaatggaggggggaagccaccagattggcaggactttg

SEQ ID NO: 13407 - DNA, 312 bp, Zea mays
tcgaccttcaagtctcgctacgtatcagtgcaataaaaaaagcagccgcaatggcgagcagcaccatggccctctcctccacggtcttcgccggcaaggccgtgaacgtgccgtcgtcgtccgccttcggcgatgcccgtgtgacgatgcgcaagacggcggcgaaggccaagccagcggtggcgtccgggagcccgtggtacggccccgaccgcgtgctgtacctgggcccactgtccggcgagccaccgagctacctgacgggcgagtacccgggcgactacggctgggacaccgcggggctgtcggcgg

SEQ ID NO: 13408 - DNA, 313 bp, Zea mays
cccacgcgtccgctcctccctcctgccgggtccttaataaagagcagcagcgcaagaggttggtagagcgagcgagaagaaggcaatggcggcggagagcttcctgttcacctcggagtccgtgaacgaggggcacccagacaagctgtgcgaccaggtgtcggacgcggtgctggacgcctgcctggcgcaggaccccgacagcaaggtggcctgcgagacctgcaccaagacgaacatggtgatggtgttcggcgagatcaccaccaaggcgagcgtggactacgagaagatcgtgcgcgacacctgccgc

SEQ ID NO: 13409 - DNA, 311 bp, Zea mays
cccacgcgtccgaaatgatcaaaggaatcaaaggtcatggctaccatgatgaattggtcattcctattattgagaataccccttatgagtatgagctcactgactccctaagtgaggcgattgcagcatacccaaaggcaactgctgtgcttgtaaggaaccacggaatatatgtatggggggagtcttggatcaatgccaagacacaggctgaatgctaccattatcttttagatgcttgcatcaagctctatcagctaggtattgattggacaacccctgaacatggttcaataaacaatccaaggaga

SEQ ID NO: 13410 - DNA, 315 bp, Zea mays
gtcttcaggtccttcccttggaggacgttgtctctgaagctgacatcttcgtgaccaccactggcaacaaggatatcatcatggttgaccacatgaggaagatgaagaacaatgccattgtctgcaacattggccactttgacaatgaaattgatatgctcggccttgagacctaccctggcgtcaagcgcatcaccatcaagccccagactgaccgctgggtgttccccgagaccaacactggcatcattgtccttgctgagggtcgcctgatgaaccttgggtgtgctactggccatcctagctttgtcatgt

SEQ ID NO: 13411 - DNA, 304 bp, Zea mays
acttcggtgagcagctctccggttttgcgttcactgccaatggctgggtgcagtcttatgggtcaaggtgcgtcaagcctccgatcatctacggtgacgtgagccgccccaaccccatgaccgttttctggtcgaagacggcacagagcatgacgtctcgcccaatgaaggggatgctgactggcccagtcacaatcctcaactggtccttcgtccggaatgaccagccgaggtttgagacttgctaccagatcgctcttgcgatcaagaaggaagtcgaggatcttgaggctggtggtattca

SEQ ID NO: 13412 - DNA, 307 bp, Zea mays
cgcaccgccgcccgctcgctcgcctccgctccggcagcgagctctatctcccgcgacgagcagcagctgccaccgacgcacgcagaccggggaataaatattggtattggtagtgtgatatctataagaagtcaagatggtgaagttcacagctgaagagctccgcgctatcatggacaaaaagaacaacattcgtaacatgtctgtcattgctcatgtggaccatggcaagtctacgcttacagattcccttgtggcagctgctgggattattgcccaggaagttgctggtgatgttcgcatgact

SEQ ID NO: 13413 - DNA, 310 bp, Zea mays
cccgccgcaccatggccgccatccgcaccgccatctcccacgtccagaacctcatcaagggggtcaccaagggctaccgctacaagatgaggtttgtctacggccatttccccatcaacgcgtccatcaccaactccaacaccgccatcgagataaggaacttcctcggcgagaagaaggtcagaaaggtggacatgcttgacggcgtgaccatcctccgctccgagaaggtcaaggacgagcttattctcgatggcaacgacgtcgagttagtctctcgctccgccgccctcatcaaccagaaatgcca

SEQ ID NO: 13414 - DNA, 307 bp, Zea mays
ggtttcgatacctcggttggcgagcatgggacacagctctctggtggacagaagcagaggatcgccatcgcaagggctattctgaaagatccaagaattctactgttagatgaagctacaagtgcgctggacgccgagtctgaaaggatcgtgcaggaagctcttgacagggtcatgtcgaataggacgactgtcatagtcgcacaccgtctgagcaccgttagaaacgctgacaccattgccgtcattcatcaaggaacactagttgaaaagggcccacacaatgagcttctaagagatccagaag

SEQ ID NO: 13415 - DNA, 306 bp, Zea mays
ctggatagttaatgaaatgaagaaatcaggtcttcggggtcgtggaggtgcaggttttccttctggtctcaaatggtcctttatgcccaaggtttcagatggacgcccttcttatcttgtcgttaatgctgatgagagtgagcctggaacttgcaaagatagagaaatcatgcgccatgacccccacaagcttctggaaggatgccttattgctggagttggaatgagggcatcagctgcttacatctacattagaggtgaatacgtgaatgagcgtctcaaccttgagaaagctcggcaggaagc

SEQ ID NO: 13416 - DNA, 305 bp, Zea mays
gttccctcccttattacaatcttcctcagcgccgccgctcccagacaccgagcccgactgcccaaccccgatccggcgatccgtctccttcttttcctcctttctggcgtccccgatcactcgcaaccatggcggcggcagcaggcggaggcgcggtgcgtgctctgtcccagaaggagcaggacatacagatgatgctcgccgccgacgtccaccttggcaccaagaactgcgatttccagacggagcgctatgtctttaagcgccgttccgacggcatctacatcatcaatcttggcaagaca

SEQ ID NO: 13417 - DNA, 301 bp, Zea mays
agcaagtgggttagagcaaggccacacacacacacacaccactagtaggctagcctagccttttagtcgtcgaggaggagcaagaagggcgcgcacgcaagcaggcaagcaagtagtgtgccgatcgtccgagagctagcacgcgatggcgaggtcttccatgatgatggtggcggcagctctgctggccttggccctggccgtgtcgttcgccgtggcgaggaacatcaagaccacgacgacggagaagatggacgacgcggtggtgcagccgcagaccttcccgcccttcgaccgcctc

SEQ ID NO: 13418 - DNA, 305 bp, Zea mays
cagcaacagatattccctagaggtggtcgtggctaccgctatgctactggacgtggaatgcctgatcctggcatgcataatgttggtgctgtgatgccatctccatatgagatgggagggatggcaatgagagatgctggtgtctcacaacctgttccaattggggcactagccactgcgcttgctaacgcctcaccagatcagcaaagactgatgcttggtgagaacctgtatcctcttgttgaacagctggagcgtgagcaggctgccaaggtcactggcatgcttttggagatggaccagac

SEQ ID NO: 13419 - DNA, 303 bp, Zea mays
gacacagcctctgccatgacgaattgttctgtcacgagatatgtatcttctgcagttgtgcagcggtgtggatgaaaatgcagctggtgcatgtgcacagcttgtgtttgcacccatcgatgaatcttttgccgacgatgcgccactgctaccctcaggcttccgtgtcattccactggatgcaaagacggatccaccatcaggcacacgcacacttgaccttgcatctaccctcgaggttggatctggtgggacaacgcgtgcttcgagtgacgcctccagcacctgcaacacaagatcagt

SEQ ID NO: 13420 - DNA, 298 bp, Zea mays
gagcagaggaaggccagtttcttggagttgtacctcttgtgatccttctgtggtcaagtcaaccaagcagccaccaaaggagcacaagaggtacaaccccaagaaatgacatacgagcagaggaaggccagtctcattgaaaggctcaaccaactcaactcctcgggcggcgcagatgacgacgatgaagatgacgagtaaagtttggtcccatcgaagtagtgctatcttatgcggcgatcagtatttgtgctatggcatttatcgctacctgtagtcgtgcaaatgcatttttgtt

SEQ ID NO: 13421 - DNA, 297 bp, Zea mays
gcactcaggtaaaacctcttatctgggtcgaagcacagattgagaaacattctagaagccgtatagaactcatggtgaaggcaaggagtcagtttaaagaaagaagcacagcaacgaatgttgaaattgaagtgcctgttccttcagatgccacaaacccaaatataagaacttcaatggggtctgctgcatatgctcctgagagagatgcaatggtttggaaaataaaatcattccctggtggcaaggaatacatgtgcagagcagaatttagtcttcctagcataacagcggaag

SEQ ID NO: 13422 - DNA, 298 bp, Zea mays
ccacgcgtccgcaataaggtaaggggtgacgaaaatggctccaacgaccgccaccaaggacgacagtggctacggcgacgagcgccggcgcgagctgcaggcgttcgacgacacgaagctgggggtgaaaggtctggtggactccggcgtcaagtccatcccgtccatcttccaccacccgccggaagccctgagcgacataatttctccggcgcctctgccgtcgtcgccaccctccggcgccgccatcccggtggtggacctctcggtgacgcggcgcgaggacctagtcgagcag

SEQ ID NO: 13423 - DNA, 300 bp, Zea mays
gtgatgcttgctaatgagtcagctgaagagatgtatacaagattgaaaaaaatcatcaagaaaattagaagctatggaagtaagaaatggacagatcatgaagtggtgaaaataatgctaagggcttattttctaagaaactcggtattatgttttatgataagagatagtcctaattatgagaagatgacgccagaagtagtacttggtagatttatccgtcatgaaatgatggaaaatgaagggcttcttgaagctgaacttggaagatttgtgatgcttgctgatgagtcagctgaa

SEQ ID NO: 13424 - DNA, 295 bp, Zea mays
ctgagatggagatctgtgattttgacttcgaaccctgcggctactccatgaatgcaatccatggctctgcgttctccacgatccatgtgacgcctgaggatgggttcagctacgccagttatgaggttatgggcttggatgccactgccctgtcttacggtgaccttgtcaagagggtccttgggtgcttcggcccctcggaattttctgtcgccgtgaccatcttcggcgggcggggccaagctgggacatggggaaaggaacttggtgcggaggcttatgactgcaacaacat

SEQ ID NO: 13425 - DNA, 300 bp, Zea mays
  unsure (1)..(300): unsure at all n locations
gtctccactctggagtctggaactcccctcatcctccacatctccaccgcatcggaactaggaaggcgaacgnatggcgcgtgcgcggcgcggcacggatcgagcgatggcggtggcccctcctacggcggcggcgctggagcagctaagcagcagcaagatgttcgacggcttcaatctccgcttccgccaccagagcgccacccttggctgcgccatgactttctccatctacctgcccccgtccccggcgtccaaccttcccgtgctgtactggctctcgggtctcacctgcaccga

SEQ ID NO: 13426 - DNA, 295 bp, Zea mays
ctcctcgcccgcccccgtacgtgtccatctctccactcctttcctttccttgttggtaagagcaaggcgagacgtaacgtaatccggccatggcgttcttccggggcctcaccgcggtctcgagactgcgatcccgcatggcgcaggaggccaccacgctgggtggtgtgagatggctgcagatgcagagcgcgtccgacctcgatcttaagtcccagctgcgggaactgattccggaacagcaggaccgcttaaagaagcttaaatcagagcatgggaaggttcagcttggaaa

SEQ ID NO: 13427 - DNA, 294 bp, Zea mays
gccgccgcctcctccgccacccagcgctcgagctcctcgcgtcctgcgagcgcgctccgcaacgtcaccatgaagttcaacatcgcgaacccttccaccgggtgccaaaagaagctggaaatcgatgacgaccagaagctgcgtgccttttatgaccgaagatatcccaggaggtcagtggtgatgctctgggtgaggagttcaagggttatgtcttcaagatcatgggtggatgtgataagcaaggcttcccaatgaagcaaggagttttgacttctggtcgtgttcgtcttc

SEQ ID NO: 13428 - DNA, 295 bp, Zea mays
ggaatttgggatcaacattagtgagaagctaacctatgttgaagcccgagtccttcctgcaccttggcagaagtatcatgacactggaaaagagaaagagtgcttaccacaggttggtcagtggaacatggtaaacaagaaagtgataaacggatgcaaggtgagccactgggcatgtataaacttctcaaggagtgttccagaagccacagctcggggattttgccaggaattggcacaaatgtgtcaaatttcgggcatggaatttaacagtgagcccgtgatgccaatatat

SEQ ID NO: 13429 - DNA, 289 bp, Zea mays
ggagcgggtgaaggttggaaaggccaaagtttggaaaaaaataagacctgaaaaggagcttgaacgagccaaggcagaaatcctccaatgcaagttaagaatccgtgaagcttttcgaaatatggactctcttttatccaaggggaagcttgaagaatctttgtttgattccgcagagaaatttcaagcgaagatatattttgtgctgtatgtggctcaaaggatgttactttacaaaatgacatcattctttgtgatggagcctgtgacagaggattccaccagaact

SEQ ID NO: 13430 - DNA, 289 bp, Zea mays
ggaccgggtcctcctcctcccgtctataaattcccctccttttcttcctccatatataggggccatcagatccaaacagagggaagagcaccaaggaccttcggcgcccgttcaggatccacatcttcccgagcgagttcttggttgacctcttcccccttcggaccacctccaaggctcttggtgtagcttgccactctcaccaatcaagttttcatgtctgatctcgacattcagatcccaactgccttcgatcccttcgctgaggccaatgctggggactctggtg

SEQ ID NO: 13431 - DNA, 290 bp, Zea mays
gctgttctcaatgtatacataaatcatgacaagaaatttgcttttgtggagatgagatctgttgaggaagcaagcaatgcaatggccctggatggcattatgttcgaaggggcaccggtgaaggttagaaggccaacagactacaacccttcccttgcagccgccctgggcccaagccagccaagccccaatctgaatcttgctgcagttggcctaacagcaggatctaatggaggactagaaggtccagaccgtatttttgtgggtggcctcccgtattacttcactga

SEQ ID NO: 13432 - DNA, 289 bp, Zea mays
gaagaattgcctgctgatcctggaaataaaggagggcaaaccacgaatgaggatatcaccaacaatagccgttctcctgttgctgatactgacttaactatcccatccaagaaaactattcatgtcccacccttcaatagttttcttgtcttggaggtgtccgaaaaacataaagctgatgattcatcatgtgatcgctaccctgttaaggttctgcgtctgctgaatgaacactctggtacagaatgtgccgtgcatctgtgtgatgagtggttcgacagtattgttg

SEQ ID NO: 13433 - DNA, 290 bp, Zea mays
cctagccctcgcgccgccgccgccgtgcccagcgctcgagctcctcgcctgccgcgagctcgcgccgcaacgccaccatgaagttcaacatcgcgaacccgtctaccgggtgccagaagaagctggaaatcgatgacgaccagaaactacgtgccttttatgaccgaagatctcccaggaggtcagtggtgatgctctgggtgaggagtttaagggttatgtcttcaagatcatgggtggatgtgacaaacaaggcttcccaatgaagcaaggagttctgacttctggtc

SEQ ID NO: 13434 - DNA, 289 bp, Zea mays
attaccttgcagaaatgaccgaaaagatagcacaggaggatcggatcccggttcttaagacgtcacaggaccatctgaaggagttcattgctctatgtgaagtactagagcttatcccagaggatgagctagaattgtctaggcagaagcagccagatactctgacaaacagaagagcgcagaaggttgcccggttcaaacgtcaaaaggctgcagaaacgaagctccaagagatcagagagagaaaagaaaggcgtggacgctcattgagagcagctgctttgtctgc

SEQ ID NO: 13435 - DNA, 288 bp, Zea mays
ggtccggccgtctccttgccccgatggcgtccgagaagaagcagtccaacccgatgcgggagatcaaggtgcagaagctggtcctcaacatatccgtagggagagcggcgaccgcctcacccgcgccgccaaggtgctggagcagctcagcggccagacccccgtcttctccaaggcgaggtacacggtgcgctcgttcggcatccggcgtaacgagaagatcgcctgctacgtcacggtcaggggcgacaaggccatgcagctgcttgagagcggcctcaaggtcaa

SEQ ID NO: 13436 - DNA, 287 bp, Zea mays
cccacgcgtccgcacggtatcccaacaataatgtacctcccattgttgctccatatctgaatgtggatccagttacgggcgattattatcctacagtattcttcaatgagttttggctactgaaggataaattaatagcgctcaacgagactgtggaggaattgcccttaaaccttgaagttggtccttttagcatgaccaagtggcaattatttttacagattgagcagtccttccaggttcatcgtagttatggaagtatgcttgaaggcgaggctgatgaactc

SEQ ID NO: 13437 - DNA, 285 bp, Zea mays
accacgcgtccgcgacctggcgaggaaatcctcaccccgtgtgaccaatgaagaagtccagaaggctgctgctgctctcaagggctctgaacaccgccgtactaccaacgttagtgctagattggatgcccagcagaagaagcttaacctccccatccttcccaccactacaatcggttcgttcccacaaaccgttgagctcaggagggtccgccgtgagtacaaggcaaaaaagatctctgaggaggaatacgtcactgccatcaaggaggaaatcaacaaggt

SEQ ID NO: 13438 - DNA, 293 bp, Zea mays
agaaaactagaaaagcctcctcccgaccgcaacgcccctcatctccctcgaccccgacatccccgacccgatggcgcccaaggcggagaagaagccagcggagaagaagccggcggccgaggagaaggcggagaagacgaccgcaggatagaagcccaaggccgagaagcggctgcccgcgtccaagtcctccggcaaggagggcggcgagaagaaggggaagaagaaggccaagaagagcgtggagacctacaagatctacatcttcaaggtgctgaagcaggtgcaccccg

SEQ ID NO: 13439 - DNA, 291 bp, Zea mays
cgcaaacctccccctctcccatcgacttcctccgtcgtccgtcgcactgccacggatcaccctcttccttcgtcttcctccacaaaacctacagcgctggtgcgccgaggagctagctagctagcccggccggccggccgcgccatgcctcccgtgaaggccgaggacctggttgtgcacgccgtcaaggagcagttcgccggcctcgactactgcatcaccagccccccgccatggatcacgacggtgctcgttggcttccagcactacctggtcatgctcggcaccacc

SEQ ID NO: 13440 - DNA, 308 bp, Zea mays
caaggacatgcgcttcagcacccgggtcaaggacgaggaaggcatgccggcgttcgcgctcgtcaacaaggccacggggctcgcaatcaagcactccctccgccagtcccacccggtcaagctcgcgcctttcagcccggaccaggaggacgcgtcggtgctgtggacggagagcaaggacgtgggcaagggcttccgctgcatccgcatggtcaacaacacccgcctcaacttcgacgccttccacggcgacaaggaccacggcggcgtgcacgacggcaccgccgtcgtgcgtctgggagtggtgc

SEQ ID NO: 13441 - DNA, 315 bp, Zea mays
cccacgcgtccgccatatgccagttgatgttcagaaacttggcgcggactttcttgtcgcatcctctcataagatgtgtggccctacaggagtcggatttttgcatggtaaatttgagattttgtcgtctatggagcctttcttaggtggtggtgaaatgattgcggatgtattcgaagacaaatccacatatgctgagcctccctctagatttgaggctggaactcctgcaattggagaagctataggactgggagcagccatcgactatttatcatgcattggcatggagcagatccacgaatatgagaaaga

SEQ ID NO: 13442 - DNA, 315 bp, Zea mays
gctggatatagactttcatatcaaattgtggactcgatgatttggcttggaataagggatatgataaatgagttcagaaagaaaaagttgaagctgcgtccagtaacatatctaagtggttctcagggttctggcaatgacatccctcatggatacatttggagtcctcatctagtcccgaaaccaaaagattggggtccaaagatcgatgttgttggattttgcttccttgatcttgcttccaattacgtgcctcctgaaccacttgtgaaatggcttcaagctggtgacaagcccatatatgttggttttggg

SEQ ID NO: 13443 - DNA, 316 bp, Zea mays
gtcatgcatctcgtcgacctctacgggcccttcgcgctcttcaagggcatcttcgacgacgccaacatggagagactcaggatggccatgcctgtcgccgaccggctggagttcaacttcgacccaaacaccatcgactgggacgactacttctacaagatccacattccaggggtcatgaagtacgtcctcaagtagcagctacatgcactgatcgccgtcgttcgtactacctacatgtacatcatgatccatccagattagtactattaattaattaaatccaccaattggcgcgcgtttgtatacacattgc

SEQ ID NO: 13444 - DNA, 314 bp, Zea mays
gggagagagagagagagaagagagagagaagagagagagagagagaggagtgggagacccgcgagaggctgccgtgtagggaccgtagactcagcgactgcgaaggagggataaggggatggccgggatcggaccgatcaggcaggactgggagccggtcgttgtgcggaagaaggcacccaccgccgccgccaagaaggatgagaaggccgtcaacgccgcgcgccgcgccggtgcggagatcgataccatgaagaagtacaacgctggtacgaacaaggcggcatccagcggtacatccctcaacaccaagc

SEQ ID NO: 13445 - DNA, 310 bp, Zea mays
aggcatactccgaggcatccttctcctttccctctccttccccaaacccttttcctctttccctcgccccaagaacttcatctcatctccaggcgccccttttgcgcttgcgcaggaggagctcacggggacagtgggcggagagctcgatcgctgcaccactacttcactggaggtccgcccactcccatggaggagatcacccaacactttggagttggcgcaagagccacggccatggccacggccagcaccaccatcatcaccaccaccaacacccgtgggcatcctccctcagcgccgtcgtagc

SEQ ID NO: 13446 - DNA, 315 bp, Zea mays
gctacctactactcaagtatccatccttattgagtacagtgttgatccatggactcggaaggagttgtagcagcaaaggtggcagatgagactactaaaccggcaatccaagaagacggcgccgagagcaaggccgggatgactgatctgctgatgctgaccgacaagtcgcagctgcaggcgctggcgatgctgctgcggaacaacgaggagctcatgatgagccaggcgatcaagtcggagacggagcgcattgagtacctcaagacggtgagcgactgctacacgcggacgatgaagctcctcgacgattcc

SEQ ID NO: 13447 - DNA, 314 bp, Zea mays
cggacgcgtggcgcgacgcgtgggcgacatggacgcggacgtgatcaccattgagaactcgcggtccgacgagaagctgctctccgtgttccgagtgggcgtcaaactcggcgcgggcatcggccccggtgtctacgacatccactcccccaggatcccgtcggctgaggagatcgccgaccgcatcgacaagatgctggcggtgctggacaccaacatcctctgggtgaaccccgactgcggcctcaagacccgcaagtacacggaggtcaagcccgccctgaccaacatggtctccgccgctaagctcatcc

SEQ ID NO: 13448 - DNA, 311 bp, Zea mays
atcttgcgctacattaggtatggtgttgacggtggagctacccttgtgacgggtggtgataggttgggtgacaagggtttctacatccagccaacgattttctcagatgtccaggacggcatgaagattgctcaggaggagatatttgggcctgtgcagtcgatcctcaagttcaaagacctcaatgaggttatcaagagggcaaacgcgagccagtatggattggccgccggcgtgttcaccaacagcctggacacggccaacaccctgacgcgcgcgctcagggccgggaccgtctgggtgaactgctt

SEQ ID NO: 13449 - DNA, 310 bp, Zea mays
cccacgcgtccgctggccgctgcccgaccccgacgccagctgcccagttcttcgccggcgacgagcactccaccagacgagaggggattccaagatgccgagggccaccagcgacgcaactcctgatccagtccctcggcaaggcgtacgctgccacaccaacaaatctcaagattattgacctctacgtgggttttgcggttgccactgcccttattcaggttgcttacatgggattggttgggtcgtttcccttcaactccttcctctcaggagttctttcatgcataggaactgcagttcttgctgt

SEQ ID NO: 13450 - DNA, 312 bp, Zea mays
cttcgtgaccaccactggcaacaaggatatcatcatggttgaccacatgaggaagatgaagaacaatgccattgtctgcaacattggccactttgacaatgaaattgatatgctcggccttgagacctaccctggcgtcaagcgcatcaccatcaagccccagactgaccgctgggtgttccccgagaccaacactggcatcattgtccttgctgagggtcgcctgatgaaccttgggtgtgctactggccatcctagctttgtcatgtcctgctcattcactaaccaggtcattggccaacttgaactgtg

SEQ ID NO: 13451 - DNA, 308 bp, Zea mays
ggccaaggagcttagcgtggaggacatggtcgtcctctccggcgctcacaccgtcggccgctccttctgcgcctccttcttcaagcgcgtctggaacacaagcacgaaccccgctaccgcaatcgtggacgcggggctgagcccgtcgtacgcgcactactacgcgcgctgtgcccgtcaaacacgacgcagacgacgccgatcacgacggccatggacccgggaacgcccaacgtgctggacaacaactactacaagctcctgcctcgcggcatggggctcttcttctccgacaaccagctgcgcgt

SEQ ID NO: 13452 - DNA, 307 bp, Zea mays
ggtgaagcgccgccgctgcagtgtccatagccaccgcagagactgagatggggggttttgtcaagacccacaagagcaatgcatacttcaagcgtttccaggtgaagttcaagagaaggcgcgctggcaagacagactacagggccaggataaggctgattaaccaagacaaaaacaagtacaatacacccaaatacagatttgttgtgcgatttaccaacaaggacatcacagcacaaatcatatctgctagtatagcaggtgatatggttcttgcttctgcttactcgcatgagttgccacgata

SEQ ID NO: 13453 - DNA, 305 bp, Zea mays
gagatgcttctgaggattaagcagcaaggccttgatatcactccgaagatcctcattgttaccaggctgttgcctgatgctgctgggactacgtgcggtcagcggctggagaaggtcattggtactgagcacacagacatcattcgcgttccgttcagaaatgagaatggcatcctccgcaagtggatctctcgttttgatgtctggccatacctggagacatacactgaggatgtttccagtgaaataatgaaagacatgcaggccaagcctgaccttatcattggcaactacagcgatggcaa

SEQ ID NO: 13454 - DNA, 296 bp, Zea mays
acttatccaagaacatagaatgaagaagagaactgcagaaagccgtcctattgtccctagaaagtttgacaaagataggaaattcacaactaataggatgggacggcagctttcctctatgggtgtggatcctattgctgccatcaatagagctcgtagccagtctaggggccgcaagcgtgagaggtcagtgagcagagctgcagctgatggtgacggtatggagatagatggccagcaatccaacaagaaactgcgtcgtacatcaaggtcgaggtcgaggtcacgggctcctg

SEQ ID NO: 13455 - DNA, 301 bp, Zea mays
gcccgagcccgagccccagccccagaccaacgacgagaaaggacaatctgcggcggacctacccgaagtcggaggcagggcaaaaggcccgataccccctccccgccggttgccgcgctcgtgccacggtgcgctaccccgtcgacgccggcggacagcgtgcactatgggttgctcctcctccgtgccagctagaaatactggagggctgaacactatcagcaacgatagctctccagacgccagttccaaggacttgcgtgctaagttggtattgctgggagactcaggtgttgggaaa

SEQ ID NO: 13456 - DNA, 305 bp, Zea mays
cccacgcgtccggcggtgggcgaggggacgctggagaggtgctgcctggagatggaggaggcgctgaacacggtgtacaggcagagccgcgtggcggacgggtccatcgggccgctgagagatccgggtggtccggccgggcaccttcgaggagctcatggactacgccatctcccgcggcgcgtccatcaaccagtacaaggtgccccggtgcgtgacgttcccgcccatcatcgagctcctggactcccgcgtcgtgtccagccacttcagccccgcgctgccgcactggacccccggccagc

SEQ ID NO: 13457 - DNA, 304 bp, Zea mays
ccgccttggtctgccggggtccggttcgccggaccgccgtgttgtggctgccaccgcaaccaccctggacctgctcccggctaagggcgccaagcgcgggttttctgacgaggcgccgacgccatcgcccggtgcagcttccgggaagggaaagaaggtagcggaagacgaggacgacaagaaggttgcagcgacgccgcagccggtcgcaaaagctcaggtggtgggatggccaccaatccgaagctaccgcaagaacacgatgtctaccacccagctgaagggcagcaaggcggatgctgag

SEQ ID NO: 13458 - DNA, 311 bp, Zea mays
ctcacttcatataccactccctaggaggacccagcaacacacacagccgagctttgcttaggcaagatgaacaggaagccaggagactgggactgcagggcgtgccagcacctcaacttcagccgccgagacatatgccagcgctgcagcgagccacgtggagttgctgatcgtggcggcggaggaggaggaggcgactacgccagcttcggtggccgcggtggctcctccttcggcggcggctttggcgctgctggctctgacgtccggcctggtgactggtactgctcctgcggcgcgcacaacttcgc

SEQ ID NO: 13459 - DNA, 312 bp, Zea mays
acctatcatcgccgctgcgccgtctcctccgctcccgtcgtccggaaagatggcgtcccacattgttggataccctcgcatgggccccaagagggagctcaagtttgcacttgagtctttctgggatgggaagagcaccgctgaggatctggagaaggttgctaccgacctcagggccagtatctggaagcagatggctgatgctgggatcaagtacatccccagcaacaccttctcgtactatgaccaggtccttgacaccactgccatgctcggcgctgtccccgaacgctactcatggactggaggaga

SEQ ID NO: 13460 - DNA, 312 bp, Zea mays
gccgcagactggtagtagccggcgcgccgtcaccgtatcctcagatcagaggcgagcagaaaccacaccactctactgacgcccgacgagcagtgtaacattttccttcagccatgggtaaggagaagactcacatcaacattgtggtcattggccatgtcgactctggcaagtcgaccaccactggccacctgatctacaagcttggaggtattgacaagcgagtgattgagaggttcgagaaagaggctgccgagatgaacaagcggtcattcaagtatgcgtgggtgcttgacaagctcaaggctgagc

SEQ ID NO: 13461 - DNA, 305 bp, Zea mays
gctcaactccacgggccttgagctagggttttcttcgccgctacctccctacgaggcgggcgtgcagccatggcgctggtgcaggcgggcatgggccttacccgggtcgttatcctcgtcggcgccggcgttgccgctccgtcgtcctccgcaacggccgcctcgccgagatcctcggcgagctccaggagatactcgacaaggggaagaaggtgaaggacggctgatggggagacggggaaaccgatctcaacgaggctcttacctcgcaggtgcgtcgccttgccatggaggtccggcaactt

SEQ ID NO: 13462 - DNA, 306 bp, Zea mays
cggacgcgtggcgtgacctcaaacctgagaatctgttggttagcaaaggtgtcataaagctagcagactttggtcttgcaagggaagtctcatcattgccaccatatacagaatatgtctcaactcgctggtatcgggcaccagaagtcttgctccagtcatctgcttatgattctgcagttgatatgtgggcaatgggtgccataatggctgagctgttgacactccatcctctctttcctggaaccagtgaagcagatgagattcacaagatatgcaatgtcatcggtagtccagatgagcaat

SEQ ID NO: 13463 - DNA, 310 bp, Zea mays
cccacgcgtccgcccacgcgtccgccgcaacttcacagcgtatcatcgttttccatcgctcctactcctatcatccagaaaatctgagcggtattgatggcgcccaaggcggagaagaagccggcggcgaagaaggtggcggaggaggagccctcggagaaggcggctccggcggagaaggcccccgcggggaagaagcccaaggcggagaagcggctacctgcgggcaagtccgccggcaaggagggcggcgacaagaagggtaggaagaaggcgaagaagagcgtggagacctacaagatctacatct

SEQ ID NO: 13464 - DNA, 309 bp, Zea mays
cccacgcgtccgcacacactcagactcagccagtccgctgcctccgcgctcccccaaaacccaccaccgccacgccggaatcctagccttcgccaaccagtcgccatgagagagatcctccacatccagggcgggcagtgcggtaaccagatcggggccaagttctgggaggtgatatgcgacgagcacggcatcgatcacaccggaaagtacgccggcgactccgacctccagctggagcgcatcaacgtctactacaacgaggccagcggcggccgcttcgtcccgcgcgccgtcctcatggacctc

SEQ ID NO: 13465 - DNA, 312 bp, Zea mays
atttgagcaaaaagcttgaagtcacggagaaatgtatggaccacacaagcaacctactctctgcgacaaaagaagatctgaaacaggcacagtataatctaaaggagaaagattatataatttccgagcagaaaaaagcagaaaatgctttaacacaccaagcttgtgtgctgagatcagacttggaaaaatatactcgcgataatacttcactgtattcaaaaattgctagaggagacaagctaagtgcaacaaacaggtcggtcgtgaatacattccaaactgaccttgcttcgaagttggatactcttt

SEQ ID NO: 13466 - DNA, 310 bp, Zea mays
cccacgcgtccgggctttagctgccagttctgatggtcgttacttggcgagcggtggcttggaccgtcacattcatttatgggatattaggtcacaggagcacataggcatttagcggccatcggggaccaatatcatgtcttgcttttgcgccagactcttcagagctattctctggttcttttgatcgttcaataatgcagtggaatgcagaggatagaacatacatgaactgtttatatgggcatcagaatgaaatcttgacaatggatgcatttagtaaagagaggattcttactgtagcacggga

SEQ ID NO: 13467 - DNA, 139 bp, Zea mays
gtcgcgatgatgttcgtgagaggtctaggtcgtcgtctcccagtcaactatggctgctggatcgttgtcttcatatgatataattatttaattattttgtacacaattcccatatatattaaagatttgacatttgttt

SEQ ID NO: 13468 - DNA, 303 bp, Zea mays
catgacctccataaagggtgttgggcgccgcttctccaacatcgtctgcaagaaggccgacatcgacatgaacaagagggccggtgagctgacgcctgaagagctggagcgcctgatgacggtcgtggccaaccctaggcagttcaaggtgccggactggttcctcaacaggaagaaggattacaaggatggaaggttctcacaggtcgtgtccaacgccctcgacatgaagctcacggacgacctcgagaggctcaagaagatcaggaaccaccgtggtctgcgtcactactggggcctccg

SEQ ID NO: 13469 - DNA, 301 bp, Zea mays
aactcgagtagtagttgccagccacacctcctgtcttcctttttccttctcgcattgtggaggagaaggatcaagtgctcataagcaagctagcttgacgaatataggaaattaggaatacaaataaactcatcctcctcatatataaacgctcgatctccagatatggccggcctgtccctgctgcatcccatggccttcgccttcggcctcctcggcaacatcatctccttcatgacctacctggccccactgccgacgttctaccggatctacaagaacaagtcgacggaggggttcc

SEQ ID NO: 13470 - DNA, 303 bp, Zea mays
cgacaatggcactccaggcagcctacgagtacctgcagcaggccgtcggcatggcgcgtggtcgtccacgcagacgctgacgctgctgctcatcgccgtacccaccgtactactgctgctagcgtccctcgccaagagcacgtcgtcgtccggtaggggcaagccgccgctccctccctcgccgccgggcaccctccccatcgtggggcacctacaccacatcgggccccagacccacatctcgctccaggagctggtggccaagtacgggcacaacgggttcctgttcctccgcgccggcgc

SEQ ID NO: 13471 - DNA, 305 bp, Zea mays
cggacgcgtggcggacgcgtgggcgacgccacagcttgtgcgcgcgcaatggcactcgtgtccgcctcctcgtcctccaccaccgccgtcgcggcgcaccccaggaatacgcagcagcgggcgtcgtcgtcgttgttctcctcctcctcctcttcctccttcctcgtcggcaagacgctgctgaggcaggccgaggcagcccggccgtcgttcgccgtgcgcgccgcggcggattccgacaggccgatctggttccccggcagcacccctccgccgtggctcgacggcagccttcccggcgactt

SEQ ID NO: 13472 - DNA, 297 bp, Zea mays
gtccgtcggacgggagagtgcaaaaccaagatatcaagtaacttcgaaagaagaggacacacaaaatgcagaccgcgaggggtggcaatatagtacagaaggcctttcaaagagcatgtccaagtcaaggtacatcaaagtatttggggttgatttgtcccctgataatgtggctgttgctattgtttacttcgtgcaaggagttttaggcctttcgaggcttgctgtcagcttctacttaaaagataatcttcatcttgagccagcagagactgcagttatatctgggttctcagc

SEQ ID NO: 13473 - DNA, 294 bp, Zea mays
tccattccatcatcccctttgcaagtatagtctctctgctaagcgaaggagcttcaagctagtctcggcggctctagaagacgatgggcaaggacgacgtgatcgagagcggcgctggcggcggcgagttcgctgccaaggactacacggaccctcccccggcgccgctgatcgacgcggcggagctgggggcctggtcgctgtagcgcgccgtgatcgccgagttcatcgccacgctgctgttcctgtacatcacggtggccaccgtgatcgggtacaagcaccagacggacg

SEQ ID NO: 13474 - DNA, 150 bp, Zea mays
cctggtcccatctcgcggttgctggtcctgtgcgccgcccttagaacaagcaacccatctgctcttcgtgaaactgttgtcgaagtcccaaatgtctcttgggaggatattggtaggctggagaatgtcaagagggagctccaggagact

SEQ ID NO: 13475 - DNA, 299 bp, Zea mays
ctcaccgcctccgccgccgacaacagcgtagtgtagtgtagttccggagagggttggggagagtagtagtgatccgcaatgtcgacggatgaggctgttgtggctgatgtcccggtgaccgaagtgccagcggaggtcccggcggcccaggtggccgatgcgcccaaggcgaagaatgcgcccaaggagaagaaggcgcctaaggagaagaagctttccgcggcgaagaagccggcggcgcaccctccctacgctgagatgattgtagaggctgatcgctgccctcaaggagaggaagg

SEQ ID NO: 13476 - DNA, 298 bp, Zea mays
ccacgcgtccgcgcactggcacgtaccgccagctcttccaccctgagcagctcatcagtggcaaggaggatgcagctaacaatttcgcccgtggccattacacaattggcaaggagattgttgatctgtgccttgaccgtatccgcaagcttgctgacaactgcaccggcctccagggcttcctggtcttcaatgccgttggtggtggcaccggctctggccttggttctctcctccttgagcgcctgtctgtggagtacggcaagaaatccaagctgggcttcactgtgtacccatc

SEQ ID NO: 13477 - DNA, 299 bp, Zea mays
gggctttgcggcggctgcggagacggcgatggcaggcgcggaggggagaggtccgaggcggatctgcgtggcgttcgtgctggtggacgggatcggtgacgtcagcgttccgtcgctgggcgggctcacgccactggaggcggcgtgcacgcccgggctggacgctgtggcggcggtcggggtgacctggctcatggaccccgtggagccggggctcgcctgcggcagcgagtacggcgcacctatcgctcctcgggtacgacccacgggtgtactaccgcagccgcggcgcgttcgag

SEQ ID NO: 13478 - DNA, 299 bp, Zea mays
cggacgcgtggtgatgatgttgatttcaatgtgatgctttcttttctagaattctatgagactcttctaggatttgtgaacttcaaactctatcattcactaaatgtaaattatcctcctattctggatccacgtctggaagctttagctgctgagctctatgcattgtgccgatacatgtctgctggttccagaagaatgattgggaattcacaaactgacgaagtaatggaagataaggatgagaaaagtaaagctgaggaagtaattaaggaagagaaggttgtgaagaataaagc

SEQ ID NO: 13479 - DNA, 118 bp, Zea mays
gcacgaactgctccgtcggatgaagtgcagctccaagcccgacaagcacctcatcctcatcggtacgggaggccctctccttcttcctgctcctcgccgccggagcgtctccgcgctt

SEQ ID NO: 13480 - DNA, 297 bp, Zea mays
cccacgcgtccgtgatcgtcaccggaatggaggtcgccgagattgacggcgcccccaggatgggcccgacgtttggcgccatgatgatctccggccagaaggcggcgcacctggcgctcaaggccctgggcaggcccaacgccgtggacgggaccatgtcgccgccgttgcgcgaggagttgatgattgcgtacaaggacgacgaggtcgtggacgcctgagtgcggcaagcagagaggaggatcgacgccagcagcgtcttatcttaattgccttgttgttcaatgatgaatcgat

SEQ ID NO: 13481 - DNA, 295 bp, Zea mays
agaatgggtatagacaatatggatgtggaagccctcaagaagatgaacaaaaacaagaagctagtgaagaagctggcaaagaagtaccatgctttccttgcatctgaggctatcattaagcaaattcctcgtcttcttggtcctggtcttaacaaggcaggaaaattccctaccttggtgacacaccaggaatcccttgagtccaaggttaacgagacaaaggctacagttaagttccagctgaagaaggtgctttgcatgggtgttgctgttggcaactgcggcatggatgaga

SEQ ID NO: 13482 - DNA, 292 bp, Zea mays
agctacctactactcaagtatccatccttattgagtacagtgttgatccatggactcggaaggagttgtagcagcaaaggtggcagatgagactactaaaccggcaatccaagaagacggcgccgagagcaaggccgggatgactgatctgctgatgctgaccgacaagtcgcagctgcaggcgctggcgatgctgctgcggaacaacgaggagctcatgatgagccaggcgatcaagtcggagacggagcgcattgagtacctcaagacggtgagcgactgctacacgcgg

SEQ ID NO: 13483 - DNA, 291 bp, Zea mays
ccacgcgtccgcagtacattgagcccacgatactgctgaacccgccgctggactccgcgatcatgaccgaggagatattcgggcccctgctcccgatcatcacggtcaagaacatcgaggacagcatcgccttcgtgaaggccatgccgaagcctctcgccatctacgcgttcacccgggacgccgccctgcggcgcgaatcgtggacgagacgtcgtccgggagcgtcaccttcaacgacgcggtagtgcagtacgcgatagacgggctcccgttcggcggcgtcggcca

SEQ ID NO: 13484 - DNA, 295 bp, Zea mays
gcagcccccaactacccccagcctcggaaggaaccttccagaagcgcaagactctaaaggccgtcgccttcccattcttcctcgccgcgggggtcgcctgagatcacataaacaatggtgaaggctgttgctgtgcttggtagcagcgatggtgtcaagggcaccatctttttcacccaagagggagatggccctaccgctgtcaccggaagtgtctctggcctcaagcctggcctccatgggttccatgtacatgcacttggtgacaccaccaatggatgcatgtcaactggac

SEQ ID NO: 13485 - DNA, 135 bp, Zea mays
cgacaatggcactccaggcagcctacgagtacctgcagcaggccgtcggccatggcgcgtggtcgtccacgcagacgctgacgctgctgctcatcgccgtacccaccgtactactgctgctagcgtccctcgcca

SEQ ID NO: 13486 - DNA, 300 bp, Zea mays
cggacgcgtgggcggcggcgcgggcggacaaggagcaggcggaggaggagttgtgccaagccacaatgggtatctcgcgtgactcgatgcacaaacgtcgcgccaccggtggaaagcagaaggcctggaggaagaagcgaaagtatgagcttggtcgccagccagccaacaccaagttgtcaagcaataagacggtgaggagggtccgtgttcggggaggtaatgtgaaattgaaggctcttcgccctgatactggtaactactcatggggaagtgaagctgttacccgcaagacacgta

SEQ ID NO: 13487 - DNA, 290 bp, Zea mays
gtaatggacgaggtctatgacatggagctctacgagtggaccaaggtggacatctctgatgaggcccagaaggagcgtgtcaatgcgatgattgaggaccaggagccctttgagggcgaggccttgcttgacgcgaaatgcttcaagtgagtgtgcttgcctggagacagaactgtttagcccttgaatttgcctatggaagagtttgcccttttactagtgtcgatgttgatctggtataccttgctatgaactggttaaagtttgtgctggtttgggaatttttgtgc

SEQ ID NO: 13488 - DNA, 287 bp, Zea mays
cacagaatccgtgagagaactgatgctcttgatgctgctggcaacacaactgctgctattggaaaggggtttgccattggttcagctgctcttgtgtccctggcgctttttggtgcctttgtcagcagagctggagtgaaggtcgtcgacgtcctctcccccaaggttttcattggtttgattgttggagccatgcttccgtactggttctctgccatgaccatgaagagtgttggaagcgctgccctgaagatggtggaggaggtccgcaggcagttcaacaccat

SEQ ID NO: 13489 - DNA, 288 bp, Zea mays
cagctcctcatctcaagtgtgtagacgagagagagagactgagagagcgccatggccagcctccaagtgactcctacttcatcgttcactcagtggaacgagctgaagttcgaaggcctgtacctgttccacacacccctgggctcaggcgccaaccaagctcaggtcatagacaacaaggcgccgattggcatcggtgccaccgtagttaacaactgggcagtgtacgacgggccagggccgaacgcaaagctcgttgcccgtgcacagggcttgcatatccaagcc

SEQ ID NO: 13490 - DNA, 292 bp, Zea mays
ccacgcgtccgcagtacattgagcccacgatactgctgaacccgccgctggactccgcgatcatgaccgaggagatattcgggcccctgctcccgatcatcacggtcaagaacatcgaggacagcatcgccttcgtgaaggccatgccgaagcctctcgccatctacgcgttcacccgggacgccgccctgcggcgcgaactcgtggacgagacgtcgtccgggagcgtcaccttcaacgacgcggtagtgcagtacgcgatagacgggctcccgttcggcggcgtcggcca

SEQ ID NO: 13491 - DNA, 190 bp, Zea mays
ctttcccgcggcgacggtgacgacgaccgcgcgacgccgccgactccctactgcatcaggtgcctcggccttcgtcgtgctctccgccggcaacgagtatagacgggcgcgcatggccaccttcgagctgtaccggagtccaccatcggcatgtgcctcaccgagacgctcgacgagatggtctccaacg

SEQ ID NO: 13492 - DNA, 292 bp, Zea mays
gtggttctcccgtgctctgtgtccctagcggcgacgactgggcgatcgccgccgccttaagccaggcgctcaggtctgccacttggcacttcgccggcgacgagcacctaacagagagatggctggtggttttcgagtactgcatcttgtgaggccatttctggctttcttgccagaagtacagagtgctgataggaaaataccattcagagagaaagtgatctacacggtcatttctctcttcatttttctggtctgcagccagctcccactctatggcattcattcaact

SEQ ID NO: 13493 - DNA, 102 bp, Zea mays
ctcactcgtccgatagcctcattcatctccattcgaaacaccctcgctcccacactctcccttcgtccccagcctaaatccccgcaacgatggctcgcacga

SEQ ID NO: 13494 - DNA, 295 bp, Zea mays
gccagtacggagagatgatcctcgacatgctcatcgcacagacggatccacagagggtgtgcagccaggttggtctgtgcgtgttcgatggcgctcgatctgtcagcgaggggattgaatctgttgtcgggaaagaaaacctgggctcagatgtcatgtgctcggcctgtcagatggctgtcgtgtggatagagaaccagctccccgcaaacaatgccaaggagctcatactgcagtacgctaaccagctgtgtgagcgtctgccgagccccaacggagagtcaacagtcagctg

SEQ ID NO: 13495 - DNA, 300 bp, Zea mays
aagaaagcagctataagtgcaagtgatatatcagaatcatttgataattttccatattatcttagtgaaaataccaaaaatgttcttttgtcatcatcgtatgtaaatctatgctgcaaggaatccactaagtggacaaaggatatatcttctctttgtaaaagggtactattatctggcccaccagggtccgagatctaccaagaattactggttaaggcacttaccaaatcctttggtgctaagctgcttgtcatagattattcactgctgtctggtgggcagccttcaaagtcaaag

SEQ ID NO: 13496 - DNA, 299 bp, Zea mays
gccgagcaaacaaaacgatatgccgctgccctgaaccgagaccaccaccgctctgcctcgcctcgcctcacctcacctcatctcacctcgccgactagggttttgtaccgccgtggatctcgccgtccccgccatggacgtctcgcacgcgggatcctccgtcgccggcgaggctccgaccaccggggagcaccggatggggactaccatcgtcggggtctgctacgagggcggcgtcgtcctgggcgccgattccaggaccagcactggaatgtatgtagccaaccgtgcttcagaca

SEQ ID NO: 13497 - DNA, 300 bp, Zea mays
ccgtgacctggcgtccatccatccgccatggcgaccgctacgctactgagctcctccttcgccatgcccgccgccgcccgtagcctcctcccctatctccgcctcattgagcttcgccacgtcgcagctcgccggcctctccctctccgccggcgttgcaactccaaccgccgtcgccctcctccccaagaggcagcagctccagcccactgtcgcgcggcgtgtgtgcccgttcacggacaagaagacgaaccgggcgaacaaggtgtcgttttccaaccacaagacgaagaagcagca

SEQ ID NO: 13498 - DNA, 297 bp, Zea mays
caactttgcagtgttcccatctctccaaggtggccctcacaaccaccagattgctgcacttgctgttgctctacagcaaactatgtcgcctggcttcaaggcctatgcaaagcaagtgaaggccaatgctgttgcaattggaaactatctcatgagcaagggctacaagatggtgactgatggaactgagaaccaccttgttctctgggatctccgcccccttggcttgactggaaacaaggtcgaaaagctatgtgatctttgccacatcacattgaacaagaatgctgtcttcgg

SEQ ID NO: 13499 - DNA, 298 bp, Zea mays
  unsure (1)..(298): unsure at all n locations
cccacgcgtccgcgagagcggnagccccaggggcggcggaggtggaggcggtggcagcgtcagggagcaggacaggttcctgcccatcgccaacatcagtcgcatcatgaagaaggccatcccggctaacgggaagatcgccaaggacgctaaggagaccgtgcaggagtgcgtctcggagttcatctccttcatcactagcgaggcgagtgacaagtgccagagggagaagcggaagaccatcaatggcgacgacctgctgtgggccatggccacgctggggtttgaggactatatt

SEQ ID NO: 13500 - DNA, 297 bp, Zea mays
cccacgcgtccggtcgcttccagccgccgccgcgtccgcctcgccaagcgcacagccgccgcagcacatcgctctcttgatctcagccatggcggaggtggagcagcaacaggacacgccgaagctcttcaaccgctggaccttcgatgatgtccaggtgaacgacatctcgctgaacgactacctcgctgtgaacgcgacgaagcacgcgatgtacctgccgcacaccgcggggcgctactccaagaagcggttccgcaaggcgcagtgcccgatcgttgagcgccttacaaactc

SEQ ID NO: 13501 - DNA, 103 bp, Zea mays
accagtgcaagcagaagcatcgcaattgcgatcagcaccatggccctctcctccacagccttcgccggcaaggcagtgaacgtgccgtcgtctctcttcggcg

SEQ ID NO: 13502 - DNA, 292 bp, Zea mays
cccacgcgtccgcccacgcgtccgcccacgcgtccgagaagtttcagatcctcgcatcgtccgcaccttatcctctcgactttacagtacctgctctcagctcctccctatctcaatggcatccgcgaatgccatctccaccgcctcccccttccggcccctctctcagggcagggcgacgaggtcacagcggttcgtggtgcgtgcgaacgccaaagacattgcctttgaccagaaatccagggcagcgctgcaggccggcgtcgagaagctcgcaaacgccgtcggtgtc

SEQ ID NO: 13503 - DNA, 291 bp, Zea mays
caagaaggaagaaaggggtgaccataaggttgcagggtttatatttatgtgcaatgcaaagactaagaaggagtgctaccagaatcgcttgtttgggatgcctggtgggaagattggaatggtcaagaagataaggccaggggtgaagctgttcctgtatgattttgacctcaagcttttgtatggtgtgtacaaggcagcatcacatggggggctaaaccttgtccaaggagcatttagtgggaagttccctgcacaggttaagtttaagattgataaagattgccgtcc

SEQ ID NO: 13504 - DNA, 291 bp, Zea mays
gggagctacctcacggagctgctcctgtccaagggatacgaggtgcacggcctcatccgccgctcctccaacttcaacacgcagcggctggaccacatctaccacgacccgcacgcggtgccgtcggccccgcgtcccccgatgcggctccactacgccgacctctccgactcctcctccctccgccgcgcgctcgacgccatctcccccgacgacgtctaaaacctcgccgcgcagtcggacgtcgccgtctccttcgagatccccgactacatcgccgacgtcaccgcc

SEQ ID NO: 13505 - DNA, 290 bp, Zea mays
gcgagcggccgcccttgtttttttttttttataattctatcataatcactcagttccttgtatctctccttgaaaactctagcataacgttgaacttcctcttctgtcttaccctccatttcagatgatatacttttaatatcattgcgaccatatttctcacatgcacgaataaatgtgttgaagtctctccttgtccatgacgcaaaaccctcctctaataattgttccttctcttcctgctcctctgctgtcaaaggctccaactgatcttcgtcttcaccatcaat

SEQ ID NO: 13506 - DNA, 281 bp, Zea mays
ggagcgctttgattgcattgttgttggtcctggccttggaagggacccctttcttctggaatgtgtgagtaatatcatgaggcacgcacgacaggctaatattccaactgttgtggatggggatggcctatttcttgtaaacaataaccttaatcttgttgaaggaaaccctcttgccattttaacaccaaatgtctatgagtacaagcgtcttgttcagaaggttcttaactgtgacgtagatgaggaaagtgcttctgagcagctaatcgcactttgcc

SEQ ID NO: 13507 - DNA, 290 bp, Zea mays
attcctcccaacaccacctcgccgcgatctccgtagcctccgtcgcgtcgagcatcgatcatgtcggcctactgcggaaagtacaaggatgagctcatcaagaatgctgcctacattggcacccctggcaagggtatccttgctgctgatgagtccactggcaccattggcaagcgcctttccagcatcaatgtcgagaacgttgaggagaaccgccgtgccctccgtgagctcctattctgctgccctggtgctctccagtacatcagcggtgtgatcctcttcgagga

SEQ ID NO: 13508 - DNA, 288 bp, Zea mays
tatggtcagctggatgtgttcttgctgagcttcttcttagtcaaccattatttcctggggaaagtgctgtggaccagctggttgagattatcaaggttttgggcaccccaacacgagaggaaattcgttgtatgaatcccaactatacagaattcaagtttcctcagataaaagcatgtccatggcacaagatcttccacaagagaatgcctccagaagcaatagatcttgtttcccgtcttcttcagtattcgccgaatctgcgatgtagtgcacttgaggcgtgtg

SEQ ID NO: 13509 - DNA, 337 bp, Zea mays
tgcaaagaaaggaatcgatctaaagtattctggtgatttcccctgtataaatacagggaaggcaaagcgcccaacatattttccaatcgagctatgctcgcttgttccgcttcaaagatacaccaaagctttgtctacgctacaaaggtcatcccttgtggagaagtctagacagaagcctgaagaaaggatgaccgttctaaatgatgcactgcaacgcagtaactacgattctgaccccatgttgagggcatgtggtgtttcagttgctccaaaatttacccaagttgaaggaaggatccttcaagccccaaagctgaaagccggcaatggtgat

SEQ ID NO: 13510 - DNA, 332 bp, Zea mays
cccacgcgtccgcaagaaggacctccaccgcttcgtcaagtggcccaaggtcgtgcgcatccagcgccacgccgcatcctcaagcagcgcctcaaggtgcccccggcgctcaaccagttcacacgtaccctcgacaagaaccttgcaacaaacttgttcaagatgcttcttaagtaccgccccgaggacaaagctgccaagaaggagaggctcttgaagagggcccaggctgaaaacgaggggaaaactgttgagtcaaagaaaccaattgttgtgaagtacggccttaaccatgtgacttacctcatcgagcagagcaaggcccagctggt

SEQ ID NO: 13511 - DNA, 331 bp, Zea mays
ccacgcgtccgagggcgtgtacttcgctccctcgcagttcgaggcggggttcaccagcttggcgcacacctcccaggacatcgagaagaccgtcgaggcagctgagaaggttctgaagcggatatagggggtccgcttcaagcaagcatgcagagagcatttcctcgtatctacgttcttgtactcttagttctatatgccaccgaggttttgtattgtgcagcagcaggacagcttctgtaagttcctctttctgaattagtgggtcttgtttttgtcagtgccaataaatctctggtccacgattacggtttcgttgttgtactgatgt

SEQ ID NO: 13512 - DNA, 325 bp, Zea mays
ggcggcggcgccatgcacggcggaggcgcggcctcgcccgatgccgccatatgcatctccccagaagctgggcccatcgtcgggtgtgcccccgccgggatcagggtcgaaaactgctacgtgttcaagagccggctgcaggagtatgctcagacggttggcattccaaccccggagtaccacacgctgaaagaaggcccatctcatgaacctgtcttcaagtccacagtgttcgttaataataccaagtatgagtcgctgcctgggttcttcagccggaaggctgcagaacagtctgccgcggaagttgcgctcatggagatag

SEQ ID NO: 13513 - DNA, 324 bp, Zea mays
gccgcgcgcggccgatagacgagcgagcctcattcacactccgatctagctagctagctagtttaggaaagagaaatctgaccacagggatgcggtggcggctgcagccggcgccggcgccggcagctgctcctcgtcctggccaccatcgccgccgtcgtggtggtgcgagcggaccccaggtgccgtgctacttcgtgttcggggactccctcgtggacaacggcaacaacaacgacatcgcgtcgctggcgcgggccaactacccgccctacggcatcgacttcgccgccggccccaccggccgtttcagcaatggcctca

SEQ ID NO: 13514 - DNA, 323 bp, Zea mays
agctcaggaaggtctgccccacgcccagctccccgtgctgctccagtgaggaacccgccacagccagcacgccaggctcctcctccagctcctgttcgagatggtggtggctccatgtttggaggaattgggtccaccattgctcaaggtatggcgtttggcacgggtagtgccatggcacacagggctgttgatgctgtattaggtccccggaccattcagcatgagactgttgcctcagaagctgctgctgctgcccctgcccctccagtgatgaatgctgatgcttgcagcatccattctaaggctttccaagattgtct

SEQ ID NO: 13515 - DNA, 322 bp, Zea mays
cccacgcgtccggttggaagggcagccaataaggtaaggggtgacgaaaatggctccaacgaccgccaccaaggacgacagtggctacggcgacgagcgccggcgcgagctgcaggcgttcgacgacacgaagctgggggtgaaaggtctggtggactccggcgtcaagtccatcccgtccatcttccaccacccgccggaagccctgagcgacataatttctccggcgcctctgccgtcgtcgccaccctccggcgccgccatcccggtggtggacctctcggtgacgcggcgcgaggacctagtcgagcaggtgaggcac

SEQ ID NO: 13516 - DNA, 321 bp, Zea mays
cccacgcgtccgcggacgcgtgggtttcaatctggtcatattgaaaggaggttcataaatgtaccttttggagcttcatgggcggaagttactatgcgaacatcagcttttgttactcctagatgattctttttggacactgttcagatctgtccactgaagcgacctgttaaatgggaggctgttgttactttctcttctccatcttcaaagaatttcagttttcctgtagaaggtggcttaactttggagttgtccatagcccagttctggtctagtggaattgctagccatgaacctacctgtgttgattttgagatt

SEQ ID NO: 13517 - DNA, 328 bp, Zea mays
ggctccccaagcctcgacgcccggctagggttttgcctccttcccgccgccgctgtttcagcgagcgagaccgaggggtagagcaagagcggtgcttagccacccatgtcgctgcgtccgagcgagcgggtcgaggtacggcggaaccgctacaaggtggcggttgacgcggaggaggggcggcggcggcgcgaggacaatatggtggagatccgcaagagccgccgtgaggagagcctcctcaagaggcgccgtgaggggctccaggcccaggtccctgcccctccctccggggttgagaagaagcttgaaagcctcccagctatgg

SEQ ID NO: 13518 - DNA, 318 bp, Zea mays
ggaagagataaaaaatatgagaagcaaaatactacagttatcggataaagcatcttcatttctttcatcaggaaataaggctgaagcaggttctatctacaagataatcaaacagttagagagaaatctgtaccatgctttctcaactactttgctgcacacgtgcgaaacactattgaagatatatctggaattacaagattggtggactgcgttgacatactgtagattgacaattcctgtttatgaaagagtttatccaccttttcatccgatgattggattacaattctatacttgtggaaagcttgaatggga

SEQ ID NO: 13519 - DNA, 317 bp, Zea mays
ggatgcagcagccgatgcacatgcagccgcagcgccggcgatagcccagctgccggaatcaccacggagcagatccaaaagtatctggatgagaataagcagcttattttggctattttggaaaatcagaacctaggaaaattggcagaatgtgctcagtatcaatcacaacttcagaagaacctcttgtatctcgctgcaatcgcagatgcccaaccgcagactgctgtaagccgcactcagatggcgccgcctggtggatctcctggagtagggcagtacatgtcacaggtgcctatgttcccaccgaggacacc

SEQ ID NO: 13520 - DNA, 318 bp, Zea mays
cccacgcgtccggacgagtgtcaagtgaacctgaaacttgcggtgtcactggctggtatagcctgagtgtgagtgagtgatcgagctagctgagctccgatcctcgctagctagctaggataccgccataccacaagtcttcttcacaagtttaggagtgacagcaacaagagatctcgatggcctctgccaccgtgctcaagtcctccttccttcccaagaagtccgaatggggcgccaccaggcaggccgccgcgcccaggccgcccaccgtctccatggtcgtccgcgcctccgcctacgccgatgagctcgtga

SEQ ID NO: 13521 - DNA, 313 bp, Zea mays
cccggtagccagaggcaccagcaagctcagccccccagccctactgccaccgcgccgaacgccatggccgagccggcagagcaccgtccagcggaggaggaggaggccgcggcggccggcgaggatgaggacaccggcgcccaggtcgcgcccatcgtgaagctggaggaggtcgccgttaccaccggagaggaggacgaggacgcgctcctggacatgaaggcgaagtctaccggttcgacaaggaggggaaccagtggaaagagcgcggcacaggcactgtgaagctgctcaagcacaaagacaccgccaa

SEQ ID NO: 13522 - DNA, 314 bp, Zea mays
ggcttgggaagtgctacaaactggcagcaaagctagagttgtgggttctacaaatgctaatgagcatagtagtcgatctcactgtatacattgtgtaatcgtcaaaggagaaaacttgatgaatggagaatgtacaaagagcaaattatggctaattgaccttgctggaagtgaacgggtagcaaagacagatgcacaaggagaaagattgacagaagcacagaacataaacaaatcactttctgcacttggtgatgttatatctgctcttgcaacgaagacctcgcacataccctttaggaattcgaagctaa

SEQ ID NO: 13523 - DNA, 315 bp, Zea mays
cccaacaccacctcgccgcgatctccgtagcctccgtcgcgtcgagcatcgatcatgtcggcctactgcggaaagtacaaggatgagctcatcaagaatgctgcctacattggcacccctggcaagggtatccttgctgctgatgagtccactggcaccattggcaagcgcctttccagcatcaatgtcgagaacgttgaggagaaccgccgtgccctccgtgagctcctattctgctgccctggtgctctccagtacatcagcggtgtgatcctcttcgaggagaccctgtaccagaagaccaaggatggcaag

SEQ ID NO: 13524 - DNA, 291 bp, Zea mays
cccacgcgtccgacccagtagagagagatatttctgcctccctatcgtgggtcgtccccaatggcctttggtcgcagacatctttgctgcttgtctatgctgagaataaatgtgaacggtgcccctggacgctggatccatgctggttttggacacgttgtctttttgtgtttaacttatctgctaccgtcctgtaacgaattcactaagttctagttcttttgtgctttgttaagaatataaacaatgaggtttcaattttggtggcgccatccggtctgattgcgtact

SEQ ID NO: 13525 - DNA, 315 bp, Zea mays
cccacgcgtccgattggctggtgggagatatgctgataatgatgttgttgctgctgtaatattgggcactggcacaaatgcagcttatgtggaacatgcaaatgtgattcctaaatggaccgggctgctacctagatcagggaacatggtaatcaacatggagtggggaaacttcagatcagataaacttccaaggtcggagtatgataaatccttagacttcgaaagtttgaaccctggtgagcagatatatgacaagatgatttctggaatgtatcttggagaaattgtccggacgatcctgctgaaactggc

SEQ ID NO: 13526 - DNA, 315 bp, Zea mays
cccacgcgtccgcccacgcgtccgcgcacccgtaagtggcgacgaatctcgcggtgcggaagcgcgacagaggcggtgtcgactccgacggactcgcagccaccggtggagacgccccaccggcgcactcctccaacgttcatagtttaagggcttgatttggataattagtcatcaacagaagtgataaaaaatggtggttcttgcagcatcaatcgtttcaaagtcgggaaaagcacttgtttcaagacagtttgttgacatgtctcgcataagaattgaaggattacttgctgcgttcccgaaactggttgg

SEQ ID NO: 13527 - DNA, 313 bp, Zea mays
cggacactgggatcttcttttgcaagagggagatatggtgttcataaaaaatgccaacctccccaagggcacatatgtgaagttgcagcctcatacaacagaccttctagatatttcaaaccccaaagcaatcttggagaaaactttgcgggacttttcttgtctaactacaggtgacagcattatggttgcatataataacaagaagtactacattgatatagtagagacaaagccctccaatgctataagtattattgagaccgattgtgaggttgactttgctccaccacttgactacaaagaacctgag

SEQ ID NO: 13528 - DNA, 314 bp, Zea mays
cccacgcgtccgaaaaaccccacgagagagacgaatcttccgaatctctcggtggcgatggcgctctccgaccgctcccgcgagtcgctcctcccgagcttcctctacgcctcctcggcgcgctctttcgctgccacaggagccgccgcgcgcctccctgtctcctccccagcgcctgccacggctggagcaggaggcggcgtgccgttctcgatccaggcgcccaaggagaagatcgagatgtactcgccggccttctatgccgcctgcactgccggaggaatcgccagctgcgggctcacccacatggccgt

SEQ ID NO: 13529 - DNA, 310 bp, Zea mays
ctcgatcgagctccagagctaaagcagatagaaagctcagagtgagagagcagcatctgatcgaccaattgttcaccttcgtcatgaggtccacttggttggcatttgccttgtcggcgctcgtcgtcgtctcctcatcagcggcacacgtacacgcctcgccggggaaacttgaggtcggtttctacgagcactcatgcgcacaggccgaggacatcgtgcgcaacgccgtccgccgcggcatcgcccgtgagaccggcgtcggcgcggggctcatccggatgcacttccacgactgcttcgtccgggg

SEQ ID NO: 13530 - DNA, 302 bp, Zea mays
cactccctactcggagttcaaccataggttccaagagcttggtttggagaagggttggggtgacactgcgaacgtgtactcgacacactccacttgcttcttgaccttcttgaggcccctgatcctgccaacttggagaagttccttggaactataccaatgatgttcaatgttgttatcctttctcctcatggctacttcgctcagtccaatgtgcttggataccctgacactggcggtcaggttgtgtacattctggatcaagtccgtgctttggagaatgagatgcttctgaggattaa

SEQ ID NO: 13531 - DNA, 165 bp, Zea mays
cccacgcgtccggctatctacaagctatagcaatggtagctcagcataaatctgggcatgatttctcatactcctttgagctgatatggatgtatacttaggaaatggtgggacctgtccattcacaatgagtgaaactaggatatactttttgtaagctcatag

SEQ ID NO: 13532 - DNA, 289 bp, Zea mays
agcgacgccgccagccagacccgatcccctccctcgctagggttttcgtccccgccccgccgcgctcccggatcccaccgaaacaaccatggccggcggtcccgcggcggtgtcgttcctgaccaacatcgcgaaggtggctgccgggctcggagccgcggcctcgctcgcctccgcgtcgctctacaccgtcgacggcggcgagcgcgccgtcatcttcgaccgtttccgcggggtgctcccggagaccgtcggcgagggcaaccatttcctcgtggcctggctgcag

SEQ ID NO: 13533 - DNA, 291 bp, Zea mays
aattttctccgcgacgaaggagaggcatccctcccttccgcgtggtgtgctctctgttcctacgccgtttcctctcccgactctctcctcgccggcgacgcccggagtaggtgcaaagaaactgctcgaggcggaggcggacctgcggctgcacagacatgggtgatcacgaggcgcgcggtgatgacttcgagaagaaggcggagaagaagctctcgggctggggcctcttcggctccaagtacgaggacgccgccgacctcttcgacaaggctgcgaactccttcaagc

SEQ ID NO: 13534 - DNA, 289 bp, Zea mays
cccacgcgtccgcggaccgtgggtttcctctaacctttagctttcctccctccctctccactctcccccctcctctaacaagaactactcccagccattcagatcctaagtagctgaccttgctgctgcttgttggagatagatttgttggttctaagttcgaagtaccatgagtccaccgagtgtgatggggcagtttggggacacaacctacaccaaggtttttgttgggggactcgcgtgggaaacccagaaggagacgatgaggaagtacttcgagcagtttggg

SEQ ID NO: 13535 - DNA, 289 bp, Zea mays
gaccggactgccttatgtgatgagaagtgatgcagaagcaggtaaagctctggagagcttgaaagagtgggaaggggtaaaagtcatggatgatgttctcccattcttccagtcgctcaagctatcgaggactgcagttactgttgacgattgtgttaaggagcttgctggagttgtccgtgagaagctaggacctaagaatgcaatcttcaccaaagcagccgatgccatggtggaatggaacaatctctggaaagtgcatggtgctcagaatgcatagtttgggagt

SEQ ID NO: 13536 - DNA, 297 bp, Zea mays
ggactttcagctgcggcggctggccggcgcggcgacggggatgggggatgggcgcacaggcggcgccaaccgtccggcttggctgcagcagtacgaactgattggcaagattggggaagggacctatggcctcgtcttcctcgcgcgccttaagccggcccacccggcacctggccgacgcggcccccctatcgccataaagaagtttaagcagtcaaaggcgggggacggagtatcacccacctcaattagagagatcatgctcctgcgcgagatcaaccacgagaatgtcgtcaa

SEQ ID NO: 13537 - DNA, 114 bp, Zea mays
cccacgcgtccggcagtcaccagtcccaagccagtacccacagtcctacgagcagtcgcacgcaagtctcaagagacaaaacggtcgacatggctcgcacggaatgctgccgta

SEQ ID NO: 13538 - DNA, 290 bp, Zea mays
gtgacaaaagcccacagcttcttctccctactcctccagtcctccgtcatccgtttcgctctctgccgccgccaccgcacaagaagctagctcctgcctgtaccgccccgtcatggcgatgctatcccgcgcagctcctccgcggcccggcgcccgctgctgccgccgcctaggcttctggcggtgagggcgatggcgtcgtcgctcttcggccacgtcgagccggcgcccaaggaccccatcctcggcgtcaccgaggctttcctcgccgacccctcgtccgacaaagt

SEQ ID NO: 13539 - DNA, 291 bp, Zea mays
atttcttctctctctgctcctccgcctccgcctgatccatccaagacagggatcgccatgtcggactcggaggagcaccacttcgaatcgaaggccgacgctggggcgtccaagacctacccgcagcaggctggcaccgtccgtaagaacggcttcatcgtcatcaagaaccgtccctgcaaggttgtggaggtttctacctccaagactggtaagcatggccacgccaaatgccactttgtcgccatagacatattcaatgggaaaaagcttgaagatattgttccttca

SEQ ID NO: 13540 - DNA, 286 bp, Zea mays
atttgataagaacagttttgaacagttctgcattaattatgctaatgaaaggttgcagcaacatttcaatcgtcatttgtttaagcttgagcaagaggaatatgtggaggatggcatcgactgggcaaaggttgacttcgaggataatcaagactgtttgagcctctttgagaaaaaaccactgggactattgtctctgctggatgaggaatctactttcccgaatgccacagatcttacttttgcaaacaagcttaagcaacatcttgactcgaattcttgcttc

SEQ ID NO: 13541 - DNA, 287 bp, Zea mays
cccacacgctccagccgcttcaccgcgccgccaccgccaccgcgaggatgccgttcaagaggttcgtggagatcgggcgcgtggccctggtgaactacgggaaggactatggccgtctcgtcgtcatcgtagatgtggtcgaccagaacagggcacttgtggatgcccctgatatggtcaggtgccaggtgaacttcaagcggctctcacttactgacatcaagattgacatcaaacgtgtccccaagaagacaaccctgatcaaggcgatggaggaagctgatgtg

SEQ ID NO: 13542 - DNA, 285 bp, Zea mays
caaacatgggttctgccctgcttggaatggatattggtttcatgggtccaaactactccatctcaactgcctgtgctacctcgaactactgtttctatgctgcagcaaaccatatccgtagaggcgaagcggatataatgatagctggaggcactgaagctgcaattattccaattggtgttggtggctttgttgcatgtagagcactgtcacagaggaatgatgaccctaaaacagcatccaggccttgggacaaggatcgtgatggttttgtcatgggtgaag

SEQ ID NO: 13543 - DNA, 286 bp, Zea mays
gtttccgactccggtgactccaccaccagcaacccgtgcagcgagcgcactccgaccatcgccatgtcgaggcgcggcgactgggtctacgagaacaacggcgggacctgcgtggccatcgccggcgctgattactgtgtcgtcgctgcggacacccgcctctctgtaggatacagtatcctcacgcgtgatcactccaagatctgcgacctggctgacaaatgtgtactggcatcttctggctttcaaggtgatattaaggctctgcagaagaacctagctgcca

SEQ ID NO: 13544 - DNA, 286 bp, Zea mays
atcttaaatatggtatttttggccttggaaacaggcagtatgaacattttaataaggttgcaaaggtggtagatgagctactagaggagcagggtgggaaacgtcttgttcctgttggccttggagatgatgatcagtgcattgaggatgatttcactgcatggaaagaactagtgtggccagagttggatcaattgctccgcgacgaggatgacacaaatggtgcatcaactccatatactgctgctattcctgaatacagagttgttttcattgataaatctga

SEQ ID NO: 13545 - DNA, 290 bp, Zea mays
cgtttgcctcttctccctcttgccggtcccgaataaagagcagcagcgcaagaggtcggtagagcgagaagaaggcaatggcggccgagagcttccttttcacctcggagtccgtgaacgaggggcaccccgacaagctgtgcgaccaggtgtcggacgccgtgcttgacgcatgcctcgcgcaggaccccgacagcaaggtggcctgcgagacctgcaccaagaccaacatggtgatggtgttcggcgagatcacgaccaaggcgaccgtggactacgagaagatcgtg

SEQ ID NO: 13546 - DNA, 288 bp, Zea mays
gacctccaattccctcgtagcagcagcaccagtagagtctccttcctctccggcggcgatgtctgggcgcggcaagggcggcaaggggctgggcaagggcggcgccaagcggcaccggcaagtcgtccgcgacaacatccaagggatcacgaagccggcgatccggaggcttgcgaggaggggcggcgtgaagcgcatctccgggctcatctacgaggagacccgctgcgtgctcaagatcttcctcgagaacgtcatccgcgacgccgtcacctacactgagcacgc

SEQ ID NO: 13547 - DNA, 288 bp, Zea mays
ctccccgcgggccgccagaggcaatttcgccctcgattcgaccccgattcgtccgcccgcgaccgggattccctccgccaagcgcggatctgaacgctgcgctccgtgtcgccgctcgaatccgccatgaagggggccaaatccaagggcgccgccaaggccgatgccaagctggcggtgaagagcaagggggcggagaagcccgccaagggcaggaaagggaaggccggcaaggaccccaacaagcctaagagggctcccagcgctttcttcgtgttcatggaggaa

SEQ ID NO: 13548 - DNA, 279 bp, Zea mays
cccacgcgtccgccgtttgcctcttctccctcttgccggtcccgaataaagagcagcagcgcaagaggtcggtagagcgagaagaaggcaatggcggccgagagcttccttttcacctcggagtccgtgaacgaggggcacccgacaagctgtgcgaccaggtgtcggacgccgtgcttgacgcatgcctcgcgcaggaccccgacagcaaggtggcctgcgagacctgcaccaagaccaacatggtgatggtgttcggcgagatcacgaccaaggcga

SEQ ID NO: 13549 - DNA, 279 bp, Zea mays
cgccttgcccggtgtgcaccgacgaaaccagcgacacagcacagagacgaacggcgtggtatcctcctgtctcagctgcttcctagctgggggtgctctctaccgtttcgagtacgcagtcaacccggcgctcttcctcgccaaagcgcgaggagggacgtgcacgctcgctccctctgaccctgacgacacggtggctcgccgcgccagatacctgctgagcaacggtttcaggtgctacaacctgttcaagagcaactgcgaggacttcgcgatata

SEQ ID NO: 13550 - DNA, 280 bp, Zea mays
cgagaattctaccaatgtgatttcgacattgctggtgtatatgaacctatggaaccggattttgaggtcatcaaagttttgactgagttgctgaatcaactggatataggcacgtatgagataaaattaaatcacagaaagttgctggatggaatgttggagatttgtggtgtgcctcctcaaaagttcagaaccgtttgctcgagtattgacaagctggacaagcaaacattcgaacaggtgaagaaagaactggtggatgagaaaggtatatcaaatg

SEQ ID NO: 13551 - DNA, 283 bp, Zea mays
ttctagatcgcgagcggccgccctttttttttttttttgagtaaatattattggtataaaaagatctgacaaatataatattttacatacatcgctacaccactttttacatagaaatatcaccaataatactagttgcaacaaatcacgacatcccattattcatcatcaggactcctacaatatatagttactgacgaagaacagagtcactttattccttgcattatttaatcttgttcccggtacagctagcaagacacaagttttacagatgtaggat

SEQ ID NO: 13552 - DNA, 274 bp, Zea mays
ctatagcaaccggtccaacactttcacgctcaggcgctcagctctagcaatggctgcctccaccatggcgatctcctccacggcgatggccggtacccccatcaaggtgggctccttcggcgagggccgcatcaccatgcgcaagaccgtgggcaagcccaaggtggcggcgtacggcagcccctggtacggccccgaccgcgtcaagtacctcgggcccttctccggcgagcccccgagctacctcaccggcgagttccccggcgactacggc

SEQ ID NO: 13553 - DNA, 316 bp, Zea mays
ccagcagagattggaaagctaagaaagctcaaaacgcttgatctgtccagcaaccacttctctggagaaatcccaagctctgtgggccaccttgaaagccttcagtatttgaggcttaacaacaacacattgtctggtgccttcccttcatcatcaactaatttgtcacaccttattttcctggatctgtcatacaataatttgagtggtccaatcccagggtccctgacaaggactttcaacattgtagggaatccactgatctgtgcagcaaccatggaacaagattgttatgggtctttacctatgccaatgt

SEQ ID NO: 13554 - DNA, 275 bp, Zea mays
ctcttacaggtgatgaaaatgtggatatgtggaatggttatgttaacaatgatgatcgggcacttttgaaggtgataaagtattcatcgcctacttctgctggagcagagtgtgttgatcttgactgtagctgggtggagcaatgggtgcatcgagcaggaccacgcaaggagatatactatgagccagaggaagtaaaagctgctatagttacctgtggaggtctatgtcctggtttgaatgatgtcatcagacagatagtattccacctagag

SEQ ID NO: 13555 - DNA, 312 bp, Zea mays
ccggccaacaccaagttgtcaagcaataagacagtgaggagggtccgtgttcgtggaggtaacgtgaagtggagggctcttcgccttgatactggtaactactcatggggaagtgaagctgttacccgcagacccgtatcctcgacgtggtctacaatgcatcaaacaatgagcttgtgaggacacaaacccttgtgaagagtgccattgtgcaagttgatgctgccccattcaagcagtggtacctcactcactatggagttgacattggtaggaagaagaaaacccctgctgcaaagaaggataatgctg

SEQ ID NO: 13556 - DNA, 311 bp, Zea mays
atgacacgtagagaccattcggatgtgtctaatcagctttatgccaactacgcaattggaaaggatgttcaggccatgaaggcagtcgttggagaggaggcactctcgtctgaggatctgctttacttagagttccttgacaagtttgagaggaagtttgtgacacaaggagcatacgacacacggaacatcttccagtcactagatcttgcatggacattgcttcggatcttccctcgcgaacttctccaccgtatcccggcgaagaccttggaccagtactatagcagagatgcctcccactgaatcac

SEQ ID NO: 13557 - DNA, 276 bp, Zea mays
cccacgcgtccgcggcaatttgcaaggccaagaaagggggtttcaaggatacctttgctgaggacctcttggttcctgtcttcaaggctttggtagacaagacgaagctggacccaagtgaagttggcgacattgttgttggtactgtcttagctcctggatcccagatggcaatcgaatgcagaatggctgcactgtatgctgggttccctgacactgatcctcttaagactgtaaacaggcagtgctcttctggccttcaagaagttgcagatg

SEQ ID NO: 13558 - DNA, 306 bp, Zea mays
actaggcggcgcatcttccagatacacacatcgaaaatgacactggctgatgatgtaaacctagaagagtttattatgtcaaaagatgagttttcaggtgctgacatcaaggccatttgtactgaagctggcttgcttgctttgagagagcggcggatgaaggtaacgcatgcagacttcaagaaggccaaagaaaaggttatgttcaagaagaaagaaggcgtgccggagggcctatatatgtgagactcatcagcagcgctattagtctttgtgagagaactggcgtttgtaatctgcttaaat

SEQ ID NO: 13559 - DNA, 304 bp, Zea mays
ccacgcgtccggaacccggcgtcgtacgtgcactccaacatcgcggggctcgtcacgctcctcgaggcctgcaaggacgccgacccgcaaccggccatcgtctgggcctcctcctcctccgtctacggcctcaacgacaaggtccccttctccgagcgcgaccgcaccgaccagccggcctcgctctacgcggccaccaagaaggccggcgaggagatcacgcacacgtacaaccatatctacggcctatccatcaccggcctccgcttcttcaccgtgtacgggccctggggccgccccgaca

SEQ ID NO: 13560 - DNA, 307 bp, Zea mays
gaagaagaggaggactggaggaggaagaagactatcgatcgatcgatccatccatccatcgaattaatggcggcgacaacaccgtacaagcccaagaggatcctgatcacgggcgccgcggggatcatcgcgtcccacgtggcgatccgcatcgtgaacaggtaccctgagtacaaggaggtggtgctggacaagcttgactactgctccaacctcaagaacctcctccccgtcatgggctccggcggcaacaacttcaagttcgtcaagggcgacatcgccagcgccgacctcgtcagcttcatcc

SEQ ID NO: 13561 - DNA, 302 bp, Zea mays
tgatggttggtctgtaatggggggagatggcattgaagacgttgttgttgcttgcaactcaaccaagaaaattaggaataatagcaatgctgggattacatttggagcgcctggaggcattatttgtgcgaaggcatccatgttactgcagagcgtcccaccggcagtactggtccgatttctgagggagcatagatctgaatgggccgattacaatattgatgtgtatttggcttcatcactgaagaccagtgcgtgctcacttcctggggtgcgacccatgagattttctggggggcaga

SEQ ID NO: 13562 - DNA, 95 bp, Zea mays
agcaacgacctcggcctggctgacagcgggaacccgtgctccgtcctcggcggcaccaaggagctcagctacccgcgctgctgcagcatcgggcg

SEQ ID NO: 13563 - DNA, 307 bp, Zea mays
gtgccactcccatccaccacaaggcttggcttggtgggaagaagacaaacgccggcacgcgcacgcagacacgatggcgatctgcagcgcgcacactaccacctccctgcgctccccatgcacgaccgtctcgaacgcaggtctgaggcagaagcaagtcatcttcgtcaccagcaacaggaggagcggcggcggcaggaggcacggaggggcaaggagcttccaggtctcgtgctccgtcgacaagccggtggtgattggcctggcggcagactcagggtgcggcaagagcaccttcatgcgccgg

SEQ ID NO: 13564 - DNA, 271 bp, Zea mays
ggaccgtggcggtacgcgtgggtttgtcgacatatctgtcccaaggaatgtcagcgcgtgcgtctctgaaattggctccgagcgagtatacaatgtcgacgacctgaaagaggtggtggaagccaacaaggaagaccgtctcaggaaagcgatggaggcacagacaatcatcgccgaagagctgaaacggtttgaggcgtggcgggactcgctggagaccgttccaaccatcaagaagctgaggtcttacgccgacaggatccgggcctcg

SEQ ID NO: 13565 - DNA, 273 bp, Zea mays
tgacatcttcgtgaccaccactggcaacaaggatatcatcatggttgaccacatgaggaagatgaagaacaatgccattgtctgcaacattggccactttgacaatgaaattgatatgctcggccttgagacctaccctggcgtcaagcgcatcaccatcaagccccagactgaccgctgggtgttccccgagaccaacactggcatcattgtccttgctgagggtcgcctgatgaaccttgggtgtgctactggccatcctagctttgtcat

SEQ ID NO: 13566 - DNA, 276 bp, Zea mays
gaagaggaagcccatggcgctcatcaagaaactgcgcaaggcgaaaaaggatgctcctgctggtgagaagcccgagccagtcaagacacatctccgtaacatgatcattgtccctgagatgattggaagcattgttggggtctacaacggcaagaccttcaaccaggttgagatcaagcctgagatgatcggccagtaccttgctgagttctccatctcctacaagccggtcaagcacggcaggcccggtatcggtgccacccactcctcgcggtt

SEQ ID NO: 13567 - DNA, 275 bp, Zea mays
cccgtcgcatcccatcccactaccacccatctcgtcgtccgccgattcgatccggttcttccaacccaggggctgtgatggcgacgaagaggagcgtgggcaccctcggcgaggcggatctgaaggggaagaaggtgttcgtgcgcgccgacctcaacgtccctctcgacgacgcccagaagatcaccgacgacacccgcatccgcgcctccgtccccaccatcaagttcctcctcgagaagggcgccaaggtcatcctcggcagccacctgggt

SEQ ID NO: 13568 - DNA, 276 bp, Zea mays
aagagcccaaaatcagataaacagtatgtgtgggaagctgtggctgacagtagctcttggtggacaccacaaccttctctgcaacaagagcccaaaatcagataaacagtatgtgtgggaagctgtggctgacaagtagctcttatgtcataaaggaagagactgatcctgagaaaatgcttactcgtggaactcagattaccctgtttctaagacctgatgataagtacgagtttgcggacccttcaaggattcaaggcttagtaaaaaattact

SEQ ID NO: 13569 - DNA, 268 bp, Zea mays
ctcagggccatatggagcagctcgaggcgtctgcacaccaccagcagcttgatcagtacttaccgatgttcgatctaccacccaagatcctatgcagagtagtcaacgtggaactacgggccgaagctgattcagatgaagtttatgctcaaattatgttgcagccagaagctgatcaaaatgaactcaccagcctggacgctgaaccacaagaacgtgaaaaatgcactgcccattccttctgcaagacactgacagcttcagatac

SEQ ID NO: 13570 - DNA, 96 bp, Zea mays
cccacgcgtccgacctgcagtcaccactcccaagccagtatccacagtcctacgagcagtcgcatgcaagtgttcaagagacaaaacggtcgacat

SEQ ID NO: 13571 - DNA, 271 bp, Zea mays
tgtagcctcaagattccctggtaaggctgttggtgtaaatctgcctgcaggatcagctcctgcggcagctgctcctgcggatgaggctgaggatgatgatgaccttgatctttttggtgatgaaactgaggaggacaagaaggcagctgatgagcgtgccgccgctgccaaggcctcttctaaaaagaaagagagtggtaaatcctccgtccttatggatgtcaaaccatgggacgatgagactgatatgaagaagctggaggaggctgtc

SEQ ID NO: 13572 - DNA, 264 bp, Zea mays
atggaaactcgctgagactggcatgaatgtggctcggcttaatatgtcacatggagaccatgcatcacaccagaaagttattgatctggtaaaggagtacaatgcatcacatgctgacaatgtgattgctatcatgcttgacacaaagggaccagaagttcgaagtggagatttgcctcaaccgatatttctggaaagcggacaagaatttacttttacaatcaaaaggggagttgggactgatacgtgtgttagcgttaacta

SEQ ID NO: 13573 - DNA, 263 bp, Zea mays
gttggtggtggcactggctctggccttggttctctcctccttgagcgcctgtctgtggagtacggcaagaaatccaagctgggcttcactgtgtacccatctccccaggtgtcaacctctgttgtggagccttacaacagcgtgctctccactcactcactcctggagcacactgatgtctccatcctgctcgacaacgaggccatctatgacatctgcaggcgctccctcgacattgagaggcccaactactccaacttgaa

SEQ ID NO: 13574 - DNA, 266 bp, Zea mays
cgcacgcgtccgcccacgcgtccgcggtagcaagagcgaaagagtagcagcagcaggcggcgccgagtagcggctccccacctcgagcttgccaccatggctagaggattgaagaagcatttgaagaggctcaatgcgcccaagcattggatgctggacaagcttggcggagcttttgctcccaagccatcttctggacctcacaagtctagggagtgcctgccactgatcctcatcatcaggaacaggctcaagtatgctcttac

SEQ ID NO: 13575 - DNA, 264 bp, Zea mays
cggacggtggtcggtacgcgtgggcggacgcgtggggtggtcgctgtaccgcgcggtgatcgccgagttcgtggccacgctgctcttccagtacatcacggaggccacggtgatcggtgtacaagcaccagacggacgcggcggcgtcgggccccgacgcggcgtgcggtggcgtcggcgtgctcggcatcgcctgggccttcggcggcatgatcttcatcctcgtctactgcaccgcgggggtgtcgggagggcacatcaacc

SEQ ID NO: 13576 - DNA, 267 bp, Zea mays
gtttccgcggtgggcggcgcggaggcggcgctcctcgggaaggggcggtacaaggtctgggccttggccgccatcgcgctcctcgcgctctggtccatgtccgccaggtccgtctcagtccggtggtccgtcctcggggtgacctcggctccgtctacggggacctggacgtcccgctcgccgacgacctcgattcccttgagatggaggagagggagaaattagtgggacgaatgtgggacatgtacacacggaccagtgatgagg

SEQ ID NO: 13577 - DNA, 308 bp, Zea mays
aggaaacagaaagattgtgatgtatggtggatgggatggcaaaagatggctttcagatgtatacatcatggacacaatgtcactagagtggacagaattagctgttaccggatctgtgccacctccaagatgtgggcattcggcaaccatgattgagaagagactccttatatttggaggcagaggtggagcaggaccaataatgggtgatttatgggctttaaagggtattactgaagaagacaatgaggcgccaggttggacacagttgaaacttccagggcaatctccctcaccacgatgcggtc

SEQ ID NO: 13578 - DNA, 304 bp, Zea mays
cccacgcgtccgctcacggccacctctgtcctgtcccactagactagctgcagctagcgcctctttccctcgccgccgccccctatccgagagcgacgagcatggcgcactcgctcgccgcctccttctcgccggccgccgcgcgcgccaggtgacaaatgtgatttcaagccggagctcggtttccttccagagccacaggatgacttctgtatccatccgttcaagaccaagttctcttcggttcaagatttgctgttcggctaagaaggagacagtcgacaaggtctgtagtatagtgaag

SEQ ID NO: 13579 - DNA, 305 bp, Zea mays
agaaggactggataatggagcagtgggagagaagctactacataacaacaattgctggatcatccaacgggagctcattggttgtcatgtccaaaggaactccttacacccagcaatcatacaaggttagtgagtcgtttccttacaagtggatcaataagaagtggaaagaagggttccatgtgacatccatggccaccgctgggaatcgctggggcgtagtcatgtcaaggaattcagggttctctactcaggttgtagagttggatttcctgtaccccagcgaaggcatccaccgacgctgg

SEQ ID NO: 13580 - DNA, 304 bp, Zea mays
aagtaataaggggcgacgaaaatggctccaacgaccgccaccaaggacgacagtggctacggcgacgagcgccggcgcgagctgcaggcgttcgacgacacgaagctgggggtgaaaggcctggtggactccggcgtcaagtccatcccgtccatcttccaccacccgccggaagccctgagcgacataatttctccggcgcctctgccgccgtcgtcgtcgccctccgccgccgccatcccggtggtggacctctcggtgacgcgccgcgaggagctagtcgagcaggtgaggcacgcggccg

SEQ ID NO: 13581 - DNA, 302 bp, Zea mays
cgcagattcggtgcaggaaggacccgtcctgctccgggcggacggagacggtgatcatcaccgacatgaactactacccggtgtccaagtaccacttcgacctcagcggcactgcgttcggcaggctggccaagcccggactcaacgacaagctccgccactccggcatcatcgacatcgagttcaccaggtcggtggtgtgcgtgctgttgaatttcgtagcgcggcaagtgaaagtttggtggtagggcggaggcagcagcatcatcatcattagccgctcacgttactcaccgtcgccg

SEQ ID NO: 13582 - DNA, 304 bp, Zea mays
cgacatcttagcgaagaagtgaggagaaggttctacaagaactggtgcaagagcaagaagaaggctttcacaaagtatgctctcaaatatgagaatgatgctggcaagaaggaaattcagctgcagcttgagaagatgaagagatatgcttctgttatccgtgtcattgctcatacccagattaggaagatgaagggtttgaagcagaagaaggctcacctgatggagattcaggtcaatggtggtaccattgctgacaaggtggactacggctataaattttttgagaaagaggtccctgttg

SEQ ID NO: 13583 - DNA, 293 bp, Zea mays
gttcgggcggaatgaggagcctcgtcgcccgggacatggacgactacgtcgtctacggcctcaacgcgtgcttgcagaacgtccgcaactgctgcgtgcgcctggacgccatcgacaagctgcgggcgcactacgacgccctcgccgacgccgtcgccgacccggccgccaacgtcgagggcctcgccgcggaggcgtccgagtacaaggccgccatgtggcagtactgctacaaccagcggacgcctccgcgcgggcgcactcccgggcctactcccaggggctcaagctgg

SEQ ID NO: 13584 - DNA, 302 bp, Zea mays
cttcgcaaagcgccgccgtcgccccatccggcatggctccgaagaaggataaggccccgcccccgtcgtcgaagcccgccaagtccggcggtggcaagcagaagaagaagaagtggagcaagggaaagctaaaggagaaggtgaacaacgcggtgctgttcgaccaggctacctacgacaagctgctctctgaggtgcccaagtacaagcagatcaccccctccatcctatccgagcgcctcaggatcaatggctccctggctcggagggctatcaaggacctgatggcgcgtggcctcatc

SEQ ID NO: 13585 - DNA, 300 bp, Zea mays
cccacgcgtccggcagcacattcttccccgagtcgccgtcgtctgctccgggctgctgttctgcgcctccacaaggctttggcctctgttgtaagatttaagcttaacctccaaccatgggcaaggagaagtcccacatcaacattgtggttattggccatgtcgactctggcaagtcaaccaccaccggccacctgatctacaagcttggaggcattgacaagcgtgtgattgagaggttcgagaaggaagccgctgaaatgaacaaacggtccttcaagtacgcttgggtgcttgaca

SEQ ID NO: 13586 - DNA, 302 bp, Zea mays
cccacgcgtccgctcttctcctccctcctgccgtttccttaataaagagcagcagcgcaagaggttggtagagcgagcgagaagaaggcaatggcggcggagagcttcctgttcacctcggagtccgtgaacgaggggcacccagacaagctgtgcgaccaggtgtcggacgcggtgctggacgcctgcctggcgcaggaccccgacatcaaggtggcctgcgagacctgcaccaagacgaacatggtgatggtgttcggcgagatcaccaccaaggcgagcgttgactacgagaagatcgt

SEQ ID NO: 13587 - DNA, 298 bp, Zea mays
cttctccctcttgccggtcccgaataaagagcagcagcgcaagaggtcggtagagcgagaagaaggcaatggcggccgagagcttccttttcacctcggagtccgtgaacgaggggcaccccgacaagctgtgcgaccaggtgtcggacgccgtgcttgacgcatgcctcgcgcaggaccccgacagcaaggtggcctgcgagacctgcaccaagaccaacatggtgatggtgttcggcgagatcacgaccaaggcgaccgtggactacgagaagatcgtgcgcgacacctgccgcga

SEQ ID NO: 13588 - DNA, 297 bp, Zea mays
cctcacttctgcgccgccacccactacaggtaaggaagaggaggagggcaggatgtcgcaccgtaagttcgagcacccgaggcacggctccctcggcttccttcccagggaagcgctcctcccgccaccgcggcaaggtgaagtcatttcccagggatgaccccaagaagccttgccatctcactgccttccttggctacaaggctggcatgactcacattgtccgtgaggttgagaagccaggatccaaactccataagaaggaaacttgtgaggctgttaccatcattgaaaccc

SEQ ID NO: 13589 - DNA, 295 bp, Zea mays
ggctcctatctggtataggacggagctgagcttctagcaacgtacagtgtatccgccatgagtcctttcggggcggtgatcacgccagaaaccctcaagtacatgtccaagtaccagggacgtgagatcacgcaggtggactgcgcacgggaggcgatgaggctgatccacgcggaagacaagaacctcaaggccgaggactcagcgtgggagctgaagaagaagttcggcaacggcgtgagcaccatggtcctcgtctacaacgccaccggggccagcctgagcctggtggacg

SEQ ID NO: 13590 - DNA, 294 bp, Zea mays
cgccggagctcgacaaggacgaccgacgacgcacgcggagatccggcgtactgcaaattttgaaaactgaactgtaagatggcatcagcagagctttcccgtgaggaaaatgtgtacatggcgaactcgctgagcaggcggagaggtacgaggagatggttgagttcatggagaaggtagccaagactgttgactcggaggagctcactgtggaggagcgaaacctcttgtctgttgcatacaagaacgtcattggagcccgccgcgcctcatggcgcatcatctcctccatcg

SEQ ID NO: 13591 - DNA, 296 bp, Zea mays
cccacgcgtccggtcttgaaacgggagagagagagagagaagagagagagaagagagagagagagagaggagtgggagacccgcgagaggctgccgtgtagggaccgtagactcagcgactgcgaaggagggataaggggatggccgggatcggaccgatcaggcaggactgggagccggtcgttgtgcggaagaaggcacccaccgccgccgccaagaaggatgagaaggccgtcaacgccgcgcgccgcgccggtgcggagatcgataccatgaagaagtacaacgctggtacg

SEQ ID NO: 13592 - DNA, 303 bp, Zea mays
gtcttcgccggcgccttcgccaggtcttcgaatgtaacgagcaccaaccggattcagggaatataagtaaaatgagggcagttttttgtgggaaccttgactatgatgttcgcatctcagaggttgagcgcctttttgggaagtatggaaaggtggaacgagtggatctaaagacagggtttgcatttgtctacatggaagatgaacgcgatgctgaagatgctatcagtagacttgatggaattgattttggcagaaaaggaatgaggatcagggttgagttgacaaaggaagatcgcactg

SEQ ID NO: 13593 - DNA, 308 bp, Zea mays
ccacgcgtccgagtaaaagattctgagcatcatcagtctgaataaggatgttgatggtttccatcccttaaatgttggcaatcttgcactaagaagccgaaatcctttgtttgtgccctgtgctgcaaaggcttgcattgaattattgctccaatctgggattgaactgatgggcaagcatgtatctgtcattgggagaagcaaagttgttggattgccaacttccttacttttacagcggcatcatgccactgtcagtgttatccatgccttcacaacaaatccagaggctattacccgcgaatctg

SEQ ID NO: 13594 - DNA, 305 bp, Zea mays
accattcctccccaaaacacatcctgcgatcctcgaagcctccgccgagcatcgatcatgtcggcctactgcggcaagtacgcggatgagctcatcaagaatgctgcctacatcggcacccctggcaaaggtatccttgctgctgatgagtcaactggcaccattggcaagcgcctttccagcatcaatgtcgagaacgtggaggagaaccggcgggctctccgtgagctcctgttctgctgccctggtgccctccagtacatcagcggtgtgatcctcttcgaggagaccctctaccagaagac

SEQ ID NO: 13595 - DNA, 305 bp, Zea mays
gtggactggactacctcgggaacccgagcctcatccacgcgcagagcatcctcgccatctgggcctgccaggtcgtgctcatgggcgccgtcgagggctaccgcatcgccggcggcccgctcggcgaggtcgtcgacccgctctatcccggcggcagcttcgacccgctcggcctcgccgacgaccccgaggccttcgctgagctcaaggtgaaggagctcaagaacggccgcctcgccatgttctccatgttcggattcttcgtccaggccatcgtcaccgggaagggcccgctcgagaacctc

SEQ ID NO: 13596 - DNA, 304 bp, Zea mays
gacaaatgttattggtaccctgaacatgctaggacttgcaaagagagttggagctaggattttgttgacatcaacctctgaagtttatggtgatccacttgagcatcctcaaactgaggcctactggggcaatgttaacccgattggtgttaggagttgttatgatgagggtaagcgtgtagcagagacgctgatgttcgactatcacaggcagcatggcattgaaatccggattgccaggattttcaacacctatgggcctaggatgaacattgatgatggccgtgttgttagcaacttcatt

SEQ ID NO: 13597 - DNA, 300 bp, Zea mays
ggtacaaaggcccaaccctgcttgaggctcttgaccagatcaccgagcccaagaggccttcggacaagcccctgcgtctgcccctccaggatgtgtacaagattggtggtattggaactgtaccggttggtcgtgtggagactggtgtcatcaagcctggtatggtagtcacctttggtccaaccggcctgactaccgaggtgaagtctgttgagatgcaccacgaggcacttcaggaggctcttccgggtgacaatgttggcttcaacgtgaagaatgttgctgtcaaggatctgaagc

SEQ ID NO: 13598 - DNA, 301 bp, Zea mays
gggctcaaaaaactttttgatattgacctaaggaacttaaagctagtagctgagtattttcaaagaagtgaaacatttggaggcccttcaagggactggattggtatttatgaggaatgttccaaaattttatatgaagaaattgattacatcaatgaaggaaagaatgcggacaagtttcggcgggatttcagaaatataaagtgggttcgcgtgccacttatcatgtgggactacacaactgaaaaggtgctaaccctggagtatgcccctggtattaaaataaacaatttggatgtgc

SEQ ID NO: 13599 - DNA, 301 bp, Zea mays
ggagattaaagaggtacaatcctgttctagaagctgttattacatatactgaagatttagcatacaaacaagccaaggaggcagatgacttgctggcacaaggaaaatatcttggtcctttgcatggcattccatatggcctcaaagatataattgcggtaccacactataagaccacttggggctcaaggacgtttaaaaaccaagtccttgatagtgaagcttatgtgtacagaagattgaagtccgctggagcagtcctggtagcaaagcttgtcacgggctcacttgcctatgatga

SEQ ID NO: 13600 - DNA, 298 bp, Zea mays
acgaccgtggtcgccgacgcgtccgccacgcgtccgcgcgccgccgccaccttcgccacccagcgctcgaggtcctcgctccctgcgagacttcgccgcaacgccaccatgaagtacgacatcgcgatccgttccaccgggtgccaaaagaagctggaaatcgatgacgaccagaagctgcgtgccttttatgaccgaagatatcccaggaggtcagtggtgatgctctgggtgaggagttcaagggttatgtcttcaagatcatgggtggatgtgacaagcaaggcttcccaatgaa

SEQ ID NO: 13601 - DNA, 296 bp, Zea mays
atgggtaagccggtgctaagggacgggggaaacccggcagatagcgcggtcacggcgtcacccgaaagggagtcgggttaagatttcccgatccgggacgtggcggcagacggcgacgttaggaagtccggagacgccggcaggggcctcgggaagagttatgttttctggttaacggcccgccaaccctggaatcggttcagccggaggtaaggtccagcggccggaagagcaccgcacatcgctcggtgtccggtgctgccccggcggcgcttgaaaatccggaggagcgaatt

SEQ ID NO: 13602 - DNA, 298 bp, Zea mays
cgcccaccgccgtcgccgcccagccgcagtaaggaggaaggagcaggaagatgccggcggggcacgggctgcggtcgcggacccgcgacctgttcgcgcggcccttccgcaagaaggggtacatcccgctcaccacgtacctgcgcacctacaagatcggcgactacgtcgacgtcaaggttaacggcgccgtgcacaagggcatgccgcacaagttctaccacggccgcaccgggagcgtctggaacgtcaccaagcgcgccattggcgtcgagatcaacaagcaggttaacggtcg

SEQ ID NO: 13603 - DNA, 296 bp, Zea mays
agccattggccagcacagcagtgtataggcatagctacgtacgtgggaagtgggaacgatggcactcatcatgcaggagagtagtagccatgatttgctccaagctcacgacgagctcttgcaccattccctgtgcttcgccaaatcgctcgcgctcgccgtggcgctggacctccgcatccccgacgcgatccaccaccacggcgccggcggcgcacccttctccagatcctcgccgagactgcgctccacccaagcaagcttcgcgcccttcgccgcctcatgcgcgtgctcac

SEQ ID NO: 13604 - DNA, 296 bp, Zea mays
agacatcattcctggtgctggagtactccatgagcgagctgatgaacaaccgccacgtcctggccaagctccagaaggaggtgaggacggcgacgcccgacggccgcatggtgatggaggaggacctgagccggatgccatacctgaaggccaccatcaaggagtccatgcgcatccacccgccggcgccgttcctcctgccgcacttctccacccacgactgcgagatcaacggctacaccatccccgccggcacgcgcgtcatcgtcaacgcgtgggcgctcgccagggacccg

SEQ ID NO: 13605 - DNA, 293 bp, Zea mays
gatgctctcccagtaactgcacatcctatgacacaatttaccgcagaataatggctcttcaggttgagagcgaatttcaaaaagcttacggcaatggattgccaaaatcaaagctttgggagcctacttatgaagactgcttaaatttgattgctcggcttccaccagtggcttcttatgtttaccggagaattttcaaggatgggaaatcaatagaagctgatgattctctggattatgcggcaaatttatcacatatgcttggttttgacgaccccaggatgctggagctg

SEQ ID NO: 13606 - DNA, 295 bp, Zea mays
cccacgcgtccggcagcttcccccaatcgggaagcctttactccgctccgcttcctacctcagggaggccctcctcctcgcgctcaccgacggccaccaaggctccactcgcctaacatccccgctcgacgtcgccctcaagctcggtgcatacaagtctttctccgacctctcgcctgtgctccagttcgccaattttacggccacacaggcgcttcttgacgagatcgcctcaacaacttcgtcttgtatccgcatcattgatttcgaccttggtgttggcggccagtgggct

SEQ ID NO: 13607 - DNA, 294 bp, Zea mays
aaatagcgcatactttgactaacaggagatatactgaaaaatgcatcgcatatgctgagagccatgatcagtctattgttggcgacaaaactattgcatttctcctgatggacaaggaaatgtacactggcatgtcagacttgcagcctgcttcacctacaattgatcgagggattgcactccaaaagatgattcacttcatcacaatggcccttggaggtgatggctacttgaattttatgggaaatgagtttggtcacccagaatggattgactttccaagagaagggaaca

SEQ ID NO: 13608 - DNA, 312 bp, Zea mays
tccaaccaagggttcggaaagtcaaggctaatttccccaatgtgggaaaccgaggctgggattgaggctaaccttaatgggcaaaaggcttctggcttgagcgacttatctcgagttaccagtgtcgcatccttctttgtcagtcgagtcgacacccttatcgacaaaatgcttgagaagattggaacacctgaggcacttgccttgagagggaaggctgccgtcgcacaggccaaactagcaaatcggctctaccagaagaaattctctggcccgaggtgggaggcgttggccaagaaaggtgccaagaaa

SEQ ID NO: 13609 - DNA, 320 bp, Zea mays
ctctctttgcaagccagtaggtcaccactcaaaagcttgtgaagcaggtgagatgggcaaggaggtggatgtgtccactctagacgccggcggcgtccgtgaccgtgactacgcggaccctccgccggcaccgctgatcgacatcgacgagctcggcaagtggtccctgtaccgcgccgtgatcgccgagttcgtggccacgctgctgtttctgtacatcacggttgccacggtgatcgggtacaagcaccagacggacgcgtcggcgtcggggcccgacgcggcgtgcagcggcgtgggcatcctgggcatcgcgtggg

SEQ ID NO: 13610 - DNA, 315 bp, Zea mays
tggatatgaaaagggtcactctagaaatatacttacacctgtatgctgaatatgttttgttctgggcaactatattatgttgtttcctggtgcttgctgattgactgatggttagttccttgtcattttgtagatcgaagccacgatcatgcctcttgtgtatcgctacaagatttgggtgctttgcaacgattgcaacaaggtctcagaggtgaactttcacgtgattggccacaagtgcagccactgcagatcgtacaacacccgaacgacatcgcgccctgcagatttatcgggaagcagctcaccttcaac

SEQ ID NO: 13611 - DNA, 310 bp, Zea mays
ggctcctatctggtataggacggagctgagcttctagcaacgtacagtgtatccgccatgagtcctttcggggcggtgatcacgccagaaaccctcaagtacatgtccaagtaccagggacgtgagatcacgcaggtggactgcgcacgggaggcgatgaggctgatccacgcggaagacaagaacctcaaggccgaggactcagcgtgggagctgaagaagaagttcggcaacggcgtgagcaccatggtcctcgtctacaacgccaccgggggcagcctgagcctggtggacgacgggaaagactgga

SEQ ID NO: 13612 - DNA, 144 bp, Zea mays
cgatctccgatcccctcgtcgatccaaagatgcagatcttcgtcaagaccctcactggaaagactatcaccctcgaggtggagtcttctgacaccattgacaacgtcaaggccaagatccaggacaaggagggcatccccccgg

SEQ ID NO: 13613 - DNA, 248 bp, Zea mays
ggaatggaggaacatcatctttgaagctggtttcagtgactacataatcataccagttttaggtgttcgatcaatcatcgagctatacccctgaaatataatccagcttcctcagccggcggcctcatcacctacatgttgaatgctttggcgtgtggatctgtgtgtgtgttttttcctttaagaacagtgtgcatgtgtgtttaataaattggtatatatagttatatactcactagaaggatggt

SEQ ID NO: 13614 - DNA, 309 bp, Zea mays
attgtcacgtaattcgtttccctgtcctccccctctcgctgagctgagcccacctactccctcccaccacttgcattcacacactcgattccgctgctctctccctcttcctctcccccgcggcggagcataaaccctaggcctcgccgtcgtcggaggcgccgccgcgatgtcgcactttggaaggacgggtccgccggacatccgcgacaccttctcgctgctcgtcctcaacatcagcttccgaaccacggccgacgaccttttcccgctcttcgagcgctgcggcaaggtcgtcgacgtcttcat

SEQ ID NO: 13615 - DNA, 309 bp, Zea mays
cacaaggttggcataccagtttttgttactgggggcattggaggtgtgcatagacatggtgaacaaactatggatgtctcctcagacttaactgaacttggaaagactcctgtagctgttgtatcggcaggtgtgaagtccattttggacataccgcggacacttgaatacctggaaactgaaggggtgactgttgctgcttacagaaccaatgaatttcccgcgttcttcacagaaattagtggatgccaggtgccatgtcgtgttgattctccagaagagtgtgccaaaataatatatgcaaacaag

SEQ ID NO: 13616 - DNA, 314 bp, Zea mays
ccacgcgtccggtgctttgacaagggaaaaaaccaggtctgtgtgtgtgtgagagagagggaggcgaaggcaactcaggcgacgcgatggcgatggcggcgctgcgacgcgaggggaggcgcctcatcctctcctccaccgtccccaacccgtctctggcggccgcttcctctgcggtgacgcgatcttccgccgtctcgcaaccggagatggctccacttggtgcacggtctatttcaactcaaatcgtgaggaaccggatgaagagtgtcaggaatatccagaagatcacaaaggctatgaagatggttgca

SEQ ID NO: 13617 - DNA, 311 bp, Zea mays
ctgttcaggaagtgcatggagcctgttgagaagtgcctgagggatgccaagatggacaagagcagcgtccatgatgttgtccttgttggtggctccactaggatccccagggtgcagcagctgctccaggacttcttcaacggcaaggagctgtgcaagaacatcaatcctgatgaggccgttgcctatggtgctgccgtccaggccgctatcctcagtggtgagggcaacgagaaggtgcaggacctgcttctgcttgacgtcactcctctctctctgggtctggagactgccggaggagtgatgaccgt

SEQ ID NO: 13618 - DNA, 311 bp, Zea mays
gtttccctccacaaccacttgctcctcatctacttttctcctccgccttaaactcatccttgctcctgcctgccgtcgtgcatcatcatctccggccagggccagggcattcgtctccgcctcctcaacaccaagatcaccggcgacgacgcgccgggggagacgtggcacatggtcttcagcaccgaagggtctcagaatccggggggaaaaagaaaagaaaagaaaagatgatgactgtctctacctcttgctacatgtgccgcttcctcgtccgggctcctccgctcaagtccaggagtgcagtgcgc

SEQ ID NO: 13619 - DNA, 310 bp, Zea mays
ccacgcgtccgggcgcgcggttcgccaagtggcgcaccgtcgtcagcatccctaacggcccctccgagctcgccgtcaaggaggccgcgtgggggctcgcacgctacgccgccatctcacaggacaacgggcttgtgccgatcgtggagccggagatcctgctggacggcgagcacggcatcgagcgcacgttcgaggtggcgcagaaggtgtgggccgaaaccttctacgccatggcggagaacaacgtcatgttcgagggcatcctgctgaagccgtccatggtgacgcccggcgcggaggccaagga

SEQ ID NO: 13620 - DNA, 308 bp, Zea mays
caaagtatgacatcaagctgaacaatgctattctcgctgaggagaagcacttgcctatgtatgacgagttggctagcaagagcaatgttgaatatattgccggaggagccacccagaactctatcagggttgcccaatggatgcttcaaactcctggtgcaacaagttacatgggatgcattggaaaggacaagtttggtgaggaaatgaagaaaaacgctcaagctgcaggagttactgctcattactacgaggatgagactgctcctactggcacatgtgctgtatgtgttgttggtggtgaaagg

SEQ ID NO: 13621 - DNA, 310 bp, Zea mays
acttcatctacgccagcaggaccctactgttcctgaaggacgatggcacgctgaagcccctggccgtcgagctgagcctgccccaccctgatggccagcagcacggcgcggtcagcaaggtgtacaccccagctcactccggcgctgagggccacgtctggcaacttgccaaggcttatgcctgcgtgaacgactccgcctggcatcagctgatcagccactggctgaacacgcacgcggtgatcgagccgttcgtcatcgcaacgaaccggcagctgagcgtggtgcatccagtgcacaagctgctgag

SEQ ID NO: 13622 - DNA, 311 bp, Zea mays
cgtctctctcccgtcctcccctccaccgccgcagccgccgccgtacctcctcctcccgcgcagtagccaccgccaccgccggaaatgaagaccatcctggccacggagacgatggacatccccgagggggtcacggtcacggtggcggccaagctggtgacggtggaggggccgcgcggtaagctcacccgcaacttcaagcacctcaacctcgacttccagctgcaggacggcggtcgcaagctcaaggtcgacgcctggtttggcacccgccgaaccatggccgccatccgcaccgccatctcccacgt

SEQ ID NO: 13623 - DNA, 301 bp, Zea mays
cggacgcgtgggctgccagcgtatgggcctgacgggaaacccattggtcctcctgtacgtatatctttccaacactatatgaatttgttcacattattctcatttatgtttaaagtgattggtgtaaaaaattcatccaaaaatataagcacagaagaatgtttgctcatggatgaaattatacgtgttgagtagcaaatgttttgtgttggcagtaaagcagaacaaatctttacttttttgtggaaatatgcatgttgttaactagtgaataatattcgctacaatttgcagatgggaa

SEQ ID NO: 13624 - DNA, 300 bp, Zea mays
caatcctctcttacgccgatttctaccagctcgcgggagttgtggccgtggaggtcaccggtgggcctgagattcccttccaccccggtagggaggacaagcctcaacccccacctgagggccgccttcctgacgccactaagggttctgaccacctgaggcaagtttttggcaagcagatgggcttgagcgatcaggacattgttgccctctctggtggccacaccttgggaaggtgccacaaagagcggtctggtttcgagggggcctggactacaaaccctttggtctttgacaact

SEQ ID NO: 13625 - DNA, 294 bp, Zea mays
cccacgcgtccgagtttctgcacgaagagcaagggagggaggatcgttcgccccgggatccagtcgatgaacaagtcggaagcaaccaggaagggtgtcgaggagttctacagggcagctctcctgccagaagtagcgaagttcctggacccctctctgccgccgtggaaggagtggctggagaacctggacaggttctcgggcataccgggttcacagctggacgaagtcagggaggcgtatcgagcgtggagggatgattacgaccgagcgaagatggctagaaactaggag

SEQ ID NO: 13626 - DNA, 288 bp, Zea mays
ctgctgcggaacctcaggagcccaagcggcacggcgggtaccagatcccccgcggtttcttgttcaacatcgtgacctgcgccaattacaccaccgagatctatcagtgggtcggcttcaacatcgccacgcagaccgtggcaggttacgtcttccttgtcgtggcggcaggcatcatgaccaactgggcgctcggcaagcacagccgtctgaagaagctgtttgacggcaaggatgggaggcccaagtaccctcgccggtgggtgattctccctccgttcctgtgaa

SEQ ID NO: 13627 - DNA, 289 bp, Zea mays
gctcccactctactcctatccactgcggcctggacgcgtgcgagagacttgaccaagcagcagcagcagggatggcgcctctgaagctgtacgggatgccgctgtcccccaacgtggtgcgcgtggccaccgtgctcaacgagaagggcctcgacttcgagatcgtccccgtcgacctcaccaccggcgcccacaagcagcccgacttcctcgccctcaaccctttcggccagatcccggctctcgtcgacggagacgaagtcctgttcgagtcccgtgcgatcaaccg

SEQ ID NO: 13628 - DNA, 288 bp, Zea mays
caaaggtcttctacctcaagatgaagggtgactatcacaggtatcttgcggaatttaagactggtcctgagaggaaggaatctgctgagagcacgatgatggcctacaaggctgctcaggacattgcgctggctgagctggcacctacccatccgataaggcttgggcttgctcttaacttctcagtgttctattatgagattctgaactccccagacaaagcttgcaaccttgcaaagcaggcgtttgatgaagctatctcccagttagacacccttggggaggagt

SEQ ID NO: 13629 - DNA, 286 bp, Zea mays
gtgacgtggtgtcacgctcctccgcctgattcccagcgcgtcgcacatctgctgctcgtcgcacttcaagagatactatcgggttcgccggttcgcgcccgccgccatggcgacttcctcaggaccaaaggaggcgccacgaataaccctgggctccagaccgaggtcgaccccgccaccaaaggctacttcttgcaacaaacgatgttacgtgtgaaggacccaaaagtgagccttgacttctactcacgtgtgatgggcatgtcgttgctgaaaaggttggatt

SEQ ID NO: 13630 - DNA, 295 bp, Zea mays
cccacgcgtccgatcagagattcgtgagaagattatttgttttcttcgagacaaggtttttcctcttaaagcagagctactgaaacctcaagcagaaatggagagatttataacggatttggtaaagaaaagtgtgcaagatgtaactggttcagaatttgaactattcatggggtttctgcgaactctgagcatatttggggattctgctcctagagagtcctttcaagaactaattgaaattattcaagcacaggctgatctcaactcacaattcaatgtttcggacattgac

SEQ ID NO: 13631 - DNA, 282 bp, Zea mays
aacacgggcagccggtacaccccggagcagttcgccgactcgctcatcgccgactaccgccgccacctgcgggtgctgtacaactacggcgcgcgcaaggtggtgatgatcggggtcggccaggtcgggtgcagccccaacgagctggcccgctacagcgccgacgggtcacctgcgtcgaccgcatcgacgacgccatccagatgttcaaccgccgcctcgtcggcctcgtcgacgagttcaacgcgctcccaggcgcgcacttcaccttcatcaacgcct

SEQ ID NO: 13632 - DNA, 284 bp, Zea mays
gctgaagggcatggtgcgcaacgcgaagaaagccgaggcggagatcgccgctctgaagatatcctacctcaagaagatcggaaagggctccaacgtcatcatcatggactcgtacagcgacgtcgccaagactgtggcgaagacgttggacagcgtggggttcaagaactgctgggtcatggccggcggcttctctggccggaaagggtgggcgcagagccgtctcggaacggattcctacaacctatccgtggtcgaagtcgtcacgccgtcacgtgtgatcc

SEQ ID NO: 13633 - DNA, 287 bp, Zea mays
gagtcacttcgccacgaacaaaagcgcatcgatctcgctgtcgtcactcctcgtcacccagccacgaacagaggcaccacccagcatggccctgcaggcggcgctcctcccatccaccctctcatccgtccccaagaagtgcagcctcgccgtcgcggcgaaggacacggcattccttagcgtatcccagaagaaggtgcaggcggcgtcgctgtcggtgagaacgcgggtggcgacgacggcgcctgtggccacgccggggtccagcacggcggccaaggatggga

SEQ ID NO: 13634 - DNA, 284 bp, Zea mays
cccacgcgtccgaccagatcgagtggctccctgattcaattggaaagctcactggacttgtcacccttgacatttcggagaatcggatcttggccttgccggaagcaattgggatgctttcttctttggccaagcttgaccttcacgctaacagaattgctcagcttcccgagtcgattggggatctttccaacctgatatatctcgaccttaggggcaatcagcttgcatcattgcgggccagtcttggtaggctggtgaagcttgaggagcttgatgtgagt

SEQ ID NO: 13635 - DNA, 290 bp, Zea mays
acaccactccacagcagtagcaagagggatagagcaaggccacacacacacacacaccactagtaggctagcctagccttttagtcgtcgaggaggagcaagaagggcgcgcacgcaagcaggcaagcaagaagagagccgatcgaccgagagctagcacgcgatggcgaggtcttccaagatgatggtggcggcagtctgctggccttggccctggccgtgtcgaccgccgacgcgaggaacatcaagaccacgacgacggagaagaaggacgacgcggtggtgcagcc

SEQ ID NO: 13636 - DNA, 281 bp, Zea mays
gaagcagcagccaattcgctcgagttcagatcgagcgcgcgccaagcaagtcttccggccggccgcgaagagcgcaatcaagcaagacaagatggtgaagctcgccttcggaagcgtcggcgactccttcagcgccacctccatcaaggcctacgtggccgagttcatcgccaccctcctcttcgtcttcgccggcgtcggttccgccatcgcctacgggcaactgacgaatggcggcgcgctggacccggcgggcctggtggcgatcgcgatcgcgcacg

SEQ ID NO: 13637 - DNA, 264 bp, Zea mays
aggacataagcggcaacccccgtgcactgcgccggctgcgcacggctcgagcgcgccaaggcacgctgtcatcgactgcccagacgaccattgagatcgactccctgttcgagggcatcgatttctactccacgatcaccagggctcgcttcgaggagctcaatatggacttgttccggaagtgcatggaacctgtggagaagtgcttgcgcgacgccaagatggacaagagcagcgtgcacgacgtcgtgctcgtcggtggct

SEQ ID NO: 13638 - DNA, 280 bp, Zea mays
atggtttccagttcttaaggatttaaaacctggaagctctgttcccagtgcagcacgaagctcaagttttactgctgctcttatgctcccagaccaatataattttggtgtgaaccaaggatcaggtagcttcaatcagttgcacccccagtttgtgggttatacacgtggtaaattacatgaactagtcatgaaatatttcaagagcagggaacttactttagctataaatgaggtcttggatccctggatctcagcaaagcagcaaaaaaaagagttt

SEQ ID NO: 13639 - DNA, 281 bp, Zea mays
ggccacggccgcgatgttcgccatcatgaagcgcaacccgggggccgccacatcaagccgctgccggtaccggggccgccgggggccatcgactccaagtacggcgacgcgctcggggtcgcgctccagttcttccaggtccagaaggcggggaagctggagaacaaccagatcccgtggcgtggggactcggcgttgaccgacgggaaggaagcggggctggatctttccaagggaatgtatgatgctggggatcacatgaagttcaccttcccgatggc

SEQ ID NO: 13640 - DNA, 279 bp, Zea mays
ctccagcactgaacacttgattgattcagtaggtagctagctagctgaatcacaatggatcctaccaagttccgtccgtccagtagccacgacacgacggtgacgacgacgaacgctggcgctcctgtgtggaacgacaacgaggcgctgactgtggggcctcgcggtcccatcctgctggaggactaccacctgatcgagaaggtggcgcacttcgcgcgcgagcgatcccggagcgcgtggtgcacggcgcggcgcctcggccaagggcttcttcga

SEQ ID NO: 13641 - DNA, 279 bp, Zea mays
ctttcctattcgcgccgccgccgctgctgcaacgccactcgccgtcgtccgaatagtacactctaacgccgccatggggcgtatgcacagccgcgggaagggtatctcgtcgtcggcgctgccgtacaagaggacgcctcctacctggctgaagaccgccgcctccgacgtggaggagatgatcacaaaggcagcgaagaagggacagatgccgtcgcagatcggcgtcctgctccgtgaccagcacggtatcccccttgtcaagagtgtcaccggcag

SEQ ID NO: 13642 - DNA, 299 bp, Zea mays
ggacgtgtcgtacagcaagtcacaagtgagggcgggagaggttgaggttgaggaagagcagaggaatccattccaagagtgtttaatggcgggacgcaaggaagcgcacgggtgggcagccagggatgtctctggtcacctctccccttaccacttctcacggagggttcagagagacgacgacgtcaccatcaaggtgctcttctgcgggctttgccacactgacctccacgtcatcaagaacgagtttggcaacgccaagtaccccgtcgttcccgggcacgagatcgtcggcgtcg

SEQ ID NO: 13643 - DNA, 302 bp, Zea mays
cccacgcgtccgacgcgtccgggcaccgtgcgcgaccctggtgctagcaagaatgcccatctcaaggtgctggaaggagctgaggaaaggttgcagcttctcaaggctgatctgatggactacaacagcattgcatcagcagttgccggctgtgagggtgtcttccatgtagccagtcctgtcctttcccatcgaccctccaaccctgaggtggaggtcatagctcccgctgtaataggtacaaccaatgtgttaaaggcttgctatgaggcaaaagttaggcgagttgtggtggtgtcttc

SEQ ID NO: 13644 - DNA, 266 bp, Zea mays
ggtagggcccgcggcggggcgccgtcgccgcccacatggacgtcgacaaggtcagcttcacggggtccacggaggtcggccgcctcgtcatgagggccgcggccgagagcaacctcaagcccgtgtcgctcgagctgggctgcaagtctcccgtcatcgtcttcgacgacgccgacctcgacatggccgttaacctcgtcaacttcgccacctacaccaacaagggcgagatctgtgtggccggcacgcgcatctacgtgcaggaa

SEQ ID NO: 13645 - DNA, 308 bp, Zea mays
cccgtccgccccgtcccgcattcgtatcctctcctcactctcgccgccgccgcttcccctgcgccccgagccaagatgaatgttgaaaagctcaagaagatggcaggtgctgtgcgcactggggggaagggtagcatgcgcaggaagaagaaggcagtccacaagactacgaccacagatgataagaggcttcagagcaccctgaaaagaataggagtgaacaccattcctggtattgaagaggtcaacatctttaaggatgatgttgttattcagtttgtgaatcctaaagtgcaagcttcaattgg

SEQ ID NO: 13646 - DNA, 306 bp, Zea mays
ctatcatcgccgctgcgccgtctcctccgctcccgtcgtccggaaagatggcgtcccacattgttggataccctcgcatgggccccaagagggagctcaagtttgcacttgagtctttctgggatgggaagagcaccgctgaggatctggagaaggttgctaccgacctcagggccagtatctggaagcagatggctgatgctgggatcaagtacatccccagcaacaccttctcgtactatgaccaggtccttgacaccactgccatgctcggcgctgtccccgaacgctactcatggactggag

SEQ ID NO: 13647 - DNA, 306 bp, Zea mays
ccacaaccagccggctcccccggcgtcgggccccaaccaggtgttcaagatcttctgccgcgccaacgagaactactgcctggccgtccgcgacgcgccgtcgtgctggccccggtcaaccccaaggacgaccaccagcactggtacaaggacatgcgcttcagcacccgggtcaaggacgaggaaggcatgccggcgttcgcgctcgtcaacaaggccacggggctcgccatcaagcactccctcggccagtcccacccggtcaagctcgcgcctttcaacccggaccaggaggacgcgtcggtg

SEQ ID NO: 13648 - DNA, 307 bp, Zea mays
caaaactctagctagctagcagggggggaaatggctccacttctcgccgcagccatgaaccacgctgcccatccagtccttagaagccatctaggacccaacaatgagagtttctcacgacaccacctatcttcttcaccgcaaagcagtaagcgaaggtttaaccttagctttacgccacgatctgcaagagtaggcaatcaaaatggagtccaattgttgagcccttcggaaatccctcgaagggactggttcccctccgacttcatctttggtgccgccacttcagcgtaccaaattgaaggtg

SEQ ID NO: 13649 - DNA, 307 bp, Zea mays
cccacgcgtccgaccaaccccgtccagccgccggctgtctcggccgtcgccgccgccgccgccgccctatcccggtccttcatgtgaaccaggttggccatggccttcaacaagatcaaggtcgccaaccccatcgtcgagatggacggcgatgagatgaccagggtgttctggaaatctatcaaggacaagcttatattccctttcgtagacctcgacatcaaatattttgacctcgggcttccacaccgtgatgctaccgacgacaaagtcacagtggaggctgcggaggccacactcaagtaca

SEQ ID NO: 13650 - DNA, 293 bp, Zea mays
cccacgcgtccggtcataagtgaggtctggacacgttgaggttgaggaagagcagatgaatccattccaggagtgtttaattgcgggacgcaaggcagcgtacggtgggcagccagggatgtctctggtcatctctccccttaccacttctcacggagggttcagatagacgacgacgtcatcatcaaggtgctcttctgccggctttgcagactgacctccaagtcatcaataacgagttttgtaacgcctagtatcccgtcgttcccgggtacgagactgtcggcgtcgtt

SEQ ID NO: 13651 - DNA, 301 bp, Zea mays
cccacgcgtccggaaatatattgaaattgagctttatctgggcaactttgaccgttgtaggactctttatgagaaatatattgaatggtccccagcaaactgttatgcctggaggaagtatgccgaattggagaagaaccttagtgagactgatcgtgctcgatcaatatatgaacttgctattgcacaaccagcccttgatacaccagaggttctatggaaggagtacttgcagtttgaaattgatgaaaatgaatttgagaggacaaggcaactatatgagagactgcttgataggaca

SEQ ID NO: 13652 - DNA, 300 bp, Zea mays
gattggtggtatgtagaagttacattacctgaaaggcattggtgttggattgggtttttgctgatggaccacctgggaatgcaaggaattatgataacaatggaaggcaggattttcatgccatcgttcctaataacatatcggatgatatcctttgggtggaagaagaacataggatctttacaaggcttcaacaagagagaagagaaagggagagtgccgaaagaataaaggctgagagatctgcaaaaatgaaggctgagatgaaggaaaagactatgagagcgtttctgctctcac

SEQ ID NO: 13653 - DNA, 300 bp, Zea mays
ccacgcgtccggtccttcgcgaacggaggcgccgccacgtcggtggaggacctctgccaccacgcggggtattaccgcctcgccaacacccacgacgccaggatgttctacttcttcttcgagtcgaggggccacaaggacgaccccgtggtgatctggctcacgggcgggcccggctgcagcagcgagctcgcgctcttctacgagaacggccccttcaacatagcggacaacttgtcgctcgtctggaatgattttggttgggacaaggcatcaaatcttatctatgtcgaccagccc

SEQ ID NO: 13654 - DNA, 291 bp, Zea mays
gggctgctggccatgctcttcaccctcttcgtctacgaccgcgcgctcatccgcgtggcgcgccgcttcacggggctggaccgcggcatctccttcctgcaccgcatgggcgtcggcttcgccatcagcgtgctcgccaccctggtcgctggattcgtggagcggcaccgcagcgacgcggcggcggcggccggcgccacggacgccggcacgtccccgctgtcggcctactggctggtgccgcagtacgcactgcacggcgtggccgaggcgttcacctccgtggggcac

SEQ ID NO: 13655 - DNA, 295 bp, Zea mays
gatcttcctccgggagctcatttccaactcttccgatgcgttggacaaaatcaggttcgagagcctcactgacaagagcaagctcgatgcgcaccggagctgttcatccacattgtaccagacaaggcttcgaacacgctctccatcatcgacagcggcatcggcatgaccaagtccgaccttgtcaacaacctcggtaccatcgccaggtccgggaccaaggagttcatggaagcccttgctgctggcgctgatgtgtctatgattgggcagttcggtgtcggtttctactctg

SEQ ID NO: 13656 - DNA, 294 bp, Zea mays
ctctcgttccatttccccatctcccagatccaattcgcgagttctccctcctctgcggccatggcgctctctgtggagaagacctcgtctggacgggagtacaaggtcaaggatctctcgcaggcggacttcggccgcctcgagattgagctggccgaggtcgaaatgcccggcctcatggcgtgccgcgccgagttcggcccgtccaagcccttcgccggcgctaggatctcggggtctctccacatgaccatccagaccgccgtcctcatcgagaccctcaccgcgctcggc

SEQ ID NO: 13657 - DNA, 296 bp, Zea mays
ctcgctccagccgcttcaccgcgccgccaccgccaccgcgaggatgccgttcaagaggttcgtggagatcgggcgcgtggccctggtgaactacggggaggactatggccgtctcgttgtcatcgtcgatgtggtcgaccagaacagggcacttgtggatgcccctgatatggtcaggtgccaggtgaacttcaagcggctctcacttactgacatcaagattgacatcaaacgtgtccccaagaagacagccctgatcaaggcgatggaggaagctgatgtgaagaccaagtggg

SEQ ID NO: 13658 - DNA, 295 bp, Zea mays
gaagaagggcctcctgtatcctctcacttccctcagtcctcgtccgtctgctccctcctctctctacctagctctagctagccttcctgtagcgcggcagagatggctgcccctgcctccaccacggcggcggcggcggcacgctgctgctgctgctcctcctgtcgctcgccgcggcggcggacatgtcgatcgtgtcctacggggatcgcacgcagacggaggcgcggcggatgtacgcggagtggatggcggcgcacggccggacctacaacgccgtcggcgaggaggagcg

SEQ ID NO: 13659 - DNA, 313 bp, Zea mays
ggccttgagcttggaggagcttccaaagcgcgctgtaatcctgggtggcggatatattgctgttgaatttgcttctatcttgagggggatgggtgctgaagtagatttgttttatcgaagagatcttcctctaggaggttttgatgatgagatgagagctattgttgcaagcaaccttgagggaaggggaatcaagttgcatccagggacaaatctctctgagttgagtaaaacggctgacggaataaaagttgtaactgataaaggagaagagctcattgcagatgttgtcctatttgcgacagggcgcaca

SEQ ID NO: 13660 - DNA, 313 bp, Zea mays
ctcactcttcactagcctctgctcctctgaaatggcggcggcgacttcctcttccacctacctcgccatcggccgcaaaaccctaaaccccgccccctccgtagccacagccgccacctccgtctccttccccgccacgcagcacccatgcctcgtcgccgcctccgcggaccgccgccgcgccgtggctgcgaaggtctcgtcgccgtcggtcatcggcaccgccatgccgtcgctcgacttcgagacctccgtcttcaagaaggaaaaggtgtccctggccggccatgaggagtatattgtgaggggtggg

SEQ ID NO: 13661 - DNA, 311 bp, Zea mays
atcaagccccagactgaccgctgggtgttccccgagaccaacactggcatcattgtccttgctgagggtcgcctgatgaaccttgggtgtgctactggccatcctagctttgtcatgtcctgctcattcactaaccaggtcattgcccaacttgaactgtggaaggagaagagctctggcaagtatgagaagaaggtgtatgtgctccccaagcaccttgatgagaaggttgctgctctccacttgggcaagcttggtgccaagctgaccaagctcaccaagtctcaggccgactacatcagcgtgccgat

SEQ ID NO: 13662 - DNA, 312 bp, Zea mays
ggcaggcgtgcgagctcgctcccgtttttaacgagcttgtggaccgtgttagcatggacgggaatttcttgcagaatgctttgtccaaaacaaggcaggttgatgatttcacatctaggctcttggagattcacaggaaaatgatggaaataaataaggaagagaatattcgcttggggttgcaccgatcagattatatgctggattcagaaacaagttctcttcttcaaatagagctcaacaccatttcagcatcatttcctgggcttggttccttagttagtgatcttcacaggtccttaattaaacaat

SEQ ID NO: 13663 - DNA, 317 bp, Zea mays
ctccctcttgccggtcccgaataaagagcagcagcgcaagaggtcggtagagcgagaagaaggcaatggcggccgagagcttccttttcgactcggagtccgtgaacgaggggcacccgacaagctgtgcgaccaggtgtcggacgccgtgcttgacgcatgcctcgcgcaggaccccgacagcaaggtggcctgcgagacctgcaccaagaccaacatggtgatggtgttcggcgagatcacgaccaaggcgaccgtggactacgagaagatcgtgcgcgacacctgccgcgagatcgggttcagctccgacgacg

SEQ ID NO: 13664 - DNA, 306 bp, Zea mays
ggatgtcattatactggctgcctgcagcttcctcatccctctcgtgttcctctgcaatgctacgaagcggcggcggcggcgcgcgccccctggcccggccaccgtacccatcatcgggaacctggcgtggctaacgttgcgcgacgggttgggtgagctggacatcctgcgacgactgcactcgcgctttggcccgctgctgtcggtccgcttgggttcatcggagcaggtgaacgtggcggaccgccgtctcgcacacgccttgctcgtggagcgtggcgccgctgtggctgaccgctcgccgct

SEQ ID NO: 13665 - DNA, 307 bp, Zea mays
cagacgcgtggtcgctagttctagatcgcgagcagccgcccacgcgtccgatcccgtcgcatcccatcccactaccacccatctcgtcgtccgccgagacgatccggttcctcccagcccaggggctgtgatggcgacgaagaggagcgtgggcaccctcggcgaagcggatctgaaggggaagaaggtgttcgtgcgcgccgacctcaacgtccctctcgacgacgcccagaagatcaccgacgacacccgcatccgcgcctccgtccccaccatcaagttcctcctcgagaagggcgccaaggtc

SEQ ID NO: 13666 - DNA, 308 bp, Zea mays
ggcaatccccgctccgtctagcggccctgcgcaatcagtcagggttccatggccaacagcaacctcccgcgccgaatcatcaaggagacgcagcggctcctcagcgaaccagcgccggggattagcgcgtcgccgtcggaagagaacatgcggtacttcaatgtcatgatccttggccccgcacagtcaccctatgaaggtggagttttcaagcttgagctattcttgcctgaggaatatccaatggctgccccgaaagttaggtttctcaccaaaatttaccatccgaacattgacaagcttggtag

SEQ ID NO: 13667 - DNA, 309 bp, Zea mays
ggctggtcgaaataaagacgatgctgaggaagctatctcactggtggaggcactagctgtccagctgacacaacgagaaggggagttaatttatgagaaggctgaagtaaaaaaattggctaacttccttaagcaggctactgtagatgcacgcaaagtagctgaagaggaaagggctcttgcacttgctgaaattgaaaaggctagagctgcaatcgaaaaagtcgagaaagcatttgatgtgcatgattctacgaaaagcagcagagaggaggaaatagaagaacttaggaaagaggtccgagaggc

SEQ ID NO: 13668 - DNA, 307 bp, Zea mays
aattaaaccgccggcgcctccacttcgcgttctcgcctcatctcctcccgctcaggatccggcggcgaaggtaaggcaagatgtacaccgcgaggaagaagatccagaaggataagggccttgagccctccgagttcgaggactccgtcgcccaggctttcttcgacctggagaacggtaaccaggagctcaagagcgacctcaaggacctttacatcaacggtgctatccagctggatgttgccgggagcaggaaggctgttgtgatccacgtcccataccgcttgcgtaaggccttcaggaagat

SEQ ID NO: 13669 - DNA, 305 bp, Zea mays
cggacgcgtggcttctgcggttctgccgtttactcctccactttggcctcctcacttgcaagtttaatcttcgcctccagccatgggtaaggagaagactcacatcaacattgtggttattggccacgtcgactctggcaagtcgacaaccaccggccacctgatctacaagcttggaggcattgacaagcgtgtgatcgagaggtttgagaaggaggccgctgaaatgaacaagcggtcctttaagtatgcttgggtgcttgacaagctcaaggctgagcgtgagaggggtatcaccattgata

SEQ ID NO: 13670 - DNA, 305 bp, Zea mays
gaaaactagaaaagcctcctcccgaccgcaacgcccctcatctccctcgaccccgacatccccgacccgatggcgcccaaggcggagaagaagccagcggagaagaaccggcggcgaggagaagcggaaagacgacgcaggaagaagcccaaggccgagaagcggctgcccgcgtccaagtcctccggcaaggagggcggcgagaagaaggggaagaagaaggccaagaagagcgtggagacctacaagatctacatcttcaaggtgctgaagcaggtgcaccccgacatcggcatatcctccaa

SEQ ID NO: 13671 - DNA, 303 bp, Zea mays
cccacgcgtccgggccgccctttttttttttttttgacgaagaacagagtcactttattccttgcattatttaatcttgttcccggtacagctagcaagacacaagttttacagatgtagggattatcaggaagcaatccttggaacaaggagaagcttctccttccggcgaacgtcagcccaaaggactcgtccatggacacccctgctgcagagcccggaacctcccaatcaaaatggtacatgagattggccagcatgatctccatggtcgcgaatccgaagttcatcccggggcagatc

SEQ ID NO: 13672 - DNA, 301 bp, Zea mays
gtttagctgtgacacttggcttccgtgacataacagtgataggaaatgcttatggtctcgcgtgcatcactgtgatgtttgtcaccacctgtctgatgtcattggtcatcatcctcctgtgggcaaaagaatctcctcatctccttgctattcttcgtattctttggggcactcgaaggcgcctacctgtctgcagcagtgatgaaggttccccagggaggctgggctccgatcgcgctatccgccgtgttcatgttcatcatgtacgtgtggcactacggcacgcggcggaagtacctgt

SEQ ID NO: 13673 - DNA, 302 bp, Zea mays
ttcgttagcccggatcacgtctgccatgtctgcagcatcaaggctctgcatcgagcaccttgagaatattgggtaccattactacccaacgctgatacagtggagggacaacttcatgggccaatagagatgcaattttggccctgggcttcgatgagaaattcatccgtatatgggaatactacttcatatactgcgccgctggtttcaagtcacggacacttgggaactaccagattgtgttttctcgccctggcaacgacaaattaggtgacagcggtatacactccttaagcaagctt

SEQ ID NO: 13674 - DNA, 302 bp, Zea mays
gtacgccatcgaggccatcaagttgggatccactgcgatcggtttgaagacaaaggatggtgttgtcctcgccgttgagaaacgtgtgacctcaccactgctggaaccaagcagtgtgggaaaacataatggaaattgatgagcacataggctgtgccatgagtggacttattgctgatgctagaacactagtggaacatgctcgtgttgaaactcagaatcataggttctcatacggagagccaatgactgtagaatcttcgacacaagctatctgtgacttagctctgcgttttggcgaa

SEQ ID NO: 13675 - DNA, 302 bp, Zea mays
gccctctagaacaaaaagtaattcagggcccaagaagaaggccagacattagttatgcctgatagggcttggcaaatatgctgccgttgtgatgtatgcttctgagttccgaccgataataattttttcactcacccacgcgtccgagcaccttcccaaaaaatcccccattttcttcgaggcgaggagagcgtgaaagacagggcaccggcagcgacgatgtcggggcgcggcaagggcggcaaaggtctgggcaagggcggagcaaagcgccaccggaaggtgctccgtgacaacatcca

SEQ ID NO: 13676 - DNA, 302 bp, Zea mays
cgcactggctcaaggtggccggcggcgtcttcttcaacttctgggtgctcttccacctctaccctttcgccaagggcatcctggggaggcacggcaagacccccgtggtggtgctcgtctggtgggccttcacttcgtcatcaccgccgtgctgtacatcaacatcccacacatccacgggcccggcggcaagcacggcggcgcgatcggaaggcacggcggcgacgcacaccaccatggcaagaagttcgacggctactacctctggccgtgaagcgccgagcagccagcatcgtcatgca

SEQ ID NO: 13677 - DNA, 306 bp, Zea mays
attcgttccaactcctgagcactttctcctcgtccccgacaagccaatcgaagccgagatacggccatggactccaccggcaccggagcagggggtaatgggaagaagggagcggccgggcgcaaggtcggcgggccaaggaagaagtcggtgtcgaggtccgtgaaggccgggctccagttccccgtcggccgcatcgggcgctacttgaagaagggccgctacgcgcagctgtgaggcaccggcgcccccgtctacctcgccgctgtcctcgaatacctcgccgctgaggttctggagctcgcc

SEQ ID NO: 13678 - DNA, 342 bp, Zea mays
ccagtttcgcgtccgactgctcgctccctgcccttccctctacctctctccctagggtttctacctcgcgcccgcttccgactagcagcgctagcgtcgcctaactccgaccgaggggacaacgagggttttgggacggacggtgggagatttggaggaggcagcggaaggccggagaccagaccatgaggccggtgttctgcggcaacttcgaccacgacacccgccagtacgacctcgagcgcctcttctccaagtacgggcccatcagccggatcgacatgaagttaggctatgctttcatttactttgaagatgagcgtgacgcagaggatgctataa

SEQ ID NO: 13679 - DNA, 331 bp, Zea mays
ggccttgagcttggaggagcttccaaagcgcgctgtaatcctgggtggcggatatattgctgttgaatttgcttctatcttgagggggatgggtgctgaagtagatttgttttatcgaagagatcttcctctaagaggttttgatgatgagatgagagctattgttgcaagcaaccttgagggaaggggaatcaagttgcatccagggacaaatctctctgagttgagtaaaacggctgacggaataaaagttgtaactgataaaggagaagagctcattgcagatgttgtcctatttgcgacagggcgcacaccaaactcccagagactg

SEQ ID NO: 13680 - DNA, 339 bp, Zea mays
ctcactcttcactagcctctgctcctctgaaatggcggcggcgacttcctcttccacctacctcgccatcggccgcaaaaccctaaaccccgccccctccgtagccacagccgccacctccgtctccttccccgccacgcagcacccatgcctcgtcgccgcctccgcggaccgccgccgcgccgtggctgcgaaggtctcgtcgccgtcggtcatcggcaccgccatgccgtcgctcgacttcgagacctccgtcttcaagaaggaaaaggtgtccctggccggccatgaggagtatattgtgaggggtgggagggatctgttcccgctgttaccgga

SEQ ID NO: 13681 - DNA, 334 bp, Zea mays
atcaagccccagactgaccgctgggtgttccccgagaccaacactggcatcattgtccttgctgagggtcgcctgatgaaccttgggtgtgctactggccatcctagctttgtcatgtcctgctcattcactaaccaggtcattgcccaacttgaactgtggaaggagaagagctctggcaagtatgagaagaaggtgtatgtgctccccaagcaccttgatgagaaggttgctgctctccacttgggcaagcttggtgccaagctgaccaagctcaccaagtctcaggccgactacatcagcgtgccgatcgagggtccctacaagcctgccc

SEQ ID NO: 13682 - DNA, 333 bp, Zea mays
ggcaggcgtgcgagctcgctcccgtttttaacgagcttgtggaccgtgttagcatggacgggaatttcttgcagaatgctttgtccaaaacaaggcaggttgatgaattcacatctaggctcttggaaattcacaggaaaatgatggaaataaataaggaagagaatattcgcttggggttgcaccgatcagattatatgctggattcagaaacaagttctcttcttcaaatagagctcaacaccatttcagcatcatttcctgggcttggttccttagttagtgatcttcacaggtccttaattaaacaatatgggacttctttaagtctag

SEQ ID NO: 13683 - DNA, 335 bp, Zea mays
ctgccgatcccccctcctatccgccgcagaggcgcgcctctgggcctaccccgatgtatagcaacttcaaggagcaggcgatcgagtacgtcaagcaggcggtccaggaggacaatgccggcaactacgtcaaggcgttccctctctacatgaacgcgctcgatgtacttcaagacccatctcaagtacgagaagaaccccaagatcaaggaggccatcaccgccaagttcaccgagtacctccgccgcgccgaggagatccgggccgtcctcgacgacttcggcgcggggccgggggccaacggaggtgacgcagccgtctgcacgcgccccaa

SEQ ID NO: 13684 - DNA, 335 bp, Zea mays
ctccctcttgccggtcccgaataaagagcagcagcgcaagaggtcggtagagcgagaagaaggcaatggcggccgagagcttccttttaacctcggagtccgtgaaacgagggcaccccgacaagctgtgcgaccaggtgtcggacgccgtgcttgacgcatgcctcgcgcaggaccccgacagcaaggtggcctgcgagacctgcaccaagaccaacatggtgatggtgttcggcgagatcacgaccaaggcgaccgtggactacgagaagatcgtgcgcgacacctgccgcgagatcgggttcagctccgacgacgtgggcctcgacgccgac

SEQ ID NO: 13685 - DNA, 327 bp, Zea mays
ggatgtcattatactggctgcctgcagcttcctcatccctctcgtgttcctctgcaatgctacgaagcggcggcggcggcgcgcgccccctggcccggccaccgtacccatcatcgggaacctggcgtggctaacgttgcgcgacgggttgggtgagctggacatcctgcgacgactgcactcgcgctttggcccgctgctgtcggtccgcttgggttcatcggagcaggtgaacgtggcggaccgccgtctcgcacacgccttgctcgtggagcgtggcgccgctgtggctgaccgctcgccgctgctggtgtccaccgagaggtt

SEQ ID NO: 13686 - DNA, 336 bp, Zea mays
cagacgcgtggtcgctagttctagatcgcgagccgccgcccacgcgtccgatcccgtcgcatcccatcccactaccacccatctcgtcgtccgccgatctgatccggttcctccaacccaagggctgtgatggcgacgaagaggaacgtgggcaccctcggcgaggcggatctgaaggggaagaaggtgttcgtgcgcgccgacctcaacgtccctctcgacgacgcccagaagatcaccgacgacacccgcatccgcgcctccgtccccaccatcaagttcctcctcgagaagggcgccaaggtcatcctcgccagcccactgggtcgtccaaaa

SEQ ID NO: 13687 - DNA, 335 bp, Zea mays
ggcaatccccgctccgtctagcggccctgcgcaatcagtcagggttccatggccaacagcaacctcccgcgccgaatcatcaaggagacgcagcggctcctcagcgaaccagcgccggggattagcgcgtcgccgtcggaagagaacatgcggtacttcaatgtcatgatccttggccccgcacagtcaccctatgaaggtggagttttcaagcttgagctattcttgcctgaggaatatccaatggctgccccgaaagttaggtttctcaccaaaatttaccatccgaacattgacaagcttggtaggatatgcctcgacattcttaaggacaa

SEQ ID NO: 13688 - DNA, 333 bp, Zea mays
ggctggtcgaaataaagacgatgctgaggaagctatctcactggtggaggcactagctgtccagctgacacaacgagaaggggagttaatttatgagaaggctgagataaaacgattggctaacttccttaagcaggctaatgtagatgcacgcaaagtagctgaagaggaaagggctcttgcacttgctgaaattgaaaaggctagagctgcaatcgaaaaagtcgagaaagcatttgatgtgcatgattctacgaaaagcagcagaggtgaggaaatagaagaacttaggaaagaggtccgagaggctaggaggataaaatgctacaccag

SEQ ID NO: 13689 - DNA, 331 bp, Zea mays
aattaaaccgccggcgcctccacttcgcgttctcgcctcatctcctcccgctcaggatccggcggcgaaggtaaggcaagatgtacaccgcgaggaagaagatccagaacgataagggccttgagccctccgagttcgaggactccgtcgcccaggctttcttcgacctggagaacggtaaccaggagctcaagagcgacctcaaggacctttacatcaacggtgctatccagctggatgttgccgggagcaggaaggctgttgtgatccacgtcccataccgcttgcgtaaggccttcaggaagatccatgtcaggatcgtcagggagct

SEQ ID NO: 13690 - DNA, 329 bp, Zea mays
cggacgcgtggcttctgcggttctgccgtttactcctccactttggcctcctcacttgcaagtttaatcttcgcctccagccatgggtaaggagaagtctcacatcaacattgtggttattggccacgtcgactctggcaagtcgacaaccaccggccacctgatctacaagcttggaggcattgacaagcgtgtgatcgagaggtttgagaaggaggccgctgaaatgaacaagcggtcctttaagtatgcttgggtgcttgacaagctcaaggctgagcgtgagaggggtatcaccattgatattgctctgtggaagtttgagacca

SEQ ID NO: 13691 - DNA, 329 bp, Zea mays
gaaaactagaaaagcctcctcccgaccgcaacgcccctcatctccctcgaccccgacatccccgacccgatggcgcccaaggcggagaagaagccagcggagaagaacccggcggccgaggagaaggcggagaagacgaccgcaggaagaagcccaaggccgagaagcggctgcccgcgtccaagtcctccggcaaggagggcggcgagaagaaggggaagaagaaggccaagaagagcgtggagacctacaagatctacatcttcaaggtgctgaagcaggtgcaccccgacatcggcatatcctccaaggccatgtccatcatgaac

SEQ ID NO: 13692 - DNA, 333 bp, Zea mays
cccacgcgtccgggccgccctttttttttttttttgacgaagaacagagtcactttattccttgcattatttaatcttgttcccggtacagctagcaagacacaagttttacagatgtaggattatcaggaagcaatccttggaacaaggagaagcttctccttccggcgaacgtcagcccaaaggactcgtccatggacacccctgctgcagagcccggaacctcccaatcaaaatggtacatgagattggccagcatgatctccatggtcgcgaatccgaagttcatcccggggcagaatctccggccggagccgaacgggatgaacctga

SEQ ID NO: 13693 - DNA, 331 bp, Zea mays
gtttagctgtgacacttggcttccgtgacataacagtgataggaaatgcttatggtctcgcgtgcatcactgtgatgtttgtcaccacctgtctgatgtcattggtcatcatcttcgtgtggcaaaagaatctcctcatctccttgctattcttcgtattctttggggcactcgaaggcgcctacctgtctgcagcagtgatgaaggttccccagggaggctgggctccgatcgcgctatccgccgtgttcatgttcatcatgtacgtgtggcactacggcacgcggcggaagtacctgttcgacctccagaacaaggtgtccatgagatg

SEQ ID NO: 13694 - DNA, 331 bp, Zea mays
ttcgttagcccggatcacgtctgccatgtctgcagcatcaaggctctgcatcgagcaccttgagaatattgggtaccattactacccaacgctgatacagtggagggacaacttcatggccaataaggatgcaattttggccctgggcttcgatgagaaattcatccgtatatgggaatactacttcatatactgcgccgctggtttcaagtcacggacacttgggaactaccagattgtgttttctcgccctggcaacgacaaattaggtgacagcggtatacactccttaagcaagctttctggcagctaataatgcgaggatctatat

SEQ ID NO: 13695 - DNA, 331 bp, Zea mays
gtacgccatcgaggccatcaagttgggatccactgcgatcggtttgaagacaaaggatggtgttgtcctcgccgttgagaaacgtgtgacctcaccactgctggaaccaagcagtgtggaaaaaataatggaaattgatgagcacataggctgtgccatgagtggacttattgctgatgctagaacactagtggaacatgctcgtgttgaaactcagaatcataggttctcatacggagagccaatgactgtagaatcttcgacacaagctatctgtgacttagctctgcgttttggcgaaggtgacgaagagtcaatgtcacggccattt

SEQ ID NO: 13696 - DNA, 330 bp, Zea mays
gccctctagaacaaaaagtaattcagggcccaagaagaaggccagacattagttatgcctgatagggcttggcaaatatgctgccgttgtgatgtatgcttctgagttccgaccgataataatttttccactcacccacgcgtccgagcaccttcccaaaaaatcccccattttcttcgaggcgaggagagcgtgaaagacagggcaccggcagcgacgatgtcggggcgcggcaagggcggcaaaggtctgggcaagggcggagcaaagcgccaccggaaggtgctccgtgacaacatccagggcatcaccaagcccgccatccggagg

SEQ ID NO: 13697 - DNA, 326 bp, Zea mays
cgcactggctcaaggtggccggcggcgtcttcttcaacttctgggtgctcttccacctctaccctttcgccaagggcatcctggggaggcacggcaagacccccgtggtggtgctcgtctggtgggccttcaccttcgtcatcaccgccgtgctgtacatcaacatcccacacatccacgggcccggcggcaagcacggcggcgcgatcggaaggcacggcggcgacgcacaccaccatggcaagaagttcgacggctactacctctggccgtgaagcgccgagcagccagcatcgtcatgcatgcacatataccgcctgccctga

SEQ ID NO: 13698 - DNA, 325 bp, Zea mays
attcgttccaactcctgagcactttctcctcgtccccgacaagccaatcgaagccgagatacggccatggactccaccggcaccggagcagggggtaatgggaagaagggagcggccgggcgcaaggtcggcgggccaaggaagaagtcggtgtcgaggtccgtgaaggccgggctccagttccccgtcggccgcatcgggcgctacttgaagaagggccgctacgcgcacgtggtcggcaccggcgcccccgtctagctcgccgctgtcctcgaatacctcgccgctgaggttctggagctcgccggtaatgctgccagggaca

SEQ ID NO: 13699 - DNA, 312 bp, Zea mays
cccacgcgtccgcccacgcgtccgcccacgcgtccgggttattccttcaccacgacggcagaacgggaaatcgtgagagacataaaggagaagctggcctttgtcggccctagcctacgagcaggagcctgagaccgctaagagcagctcctccgtcgagaagagctacgagctgcccgatgggcaggtcatcacgatcggcgcggagaggttcagatgcccagaggtgcttttccagccgtcgctgatcgggatggaagctcccggcatccacgagaccacctacaactcaatcatgaaatgtgacgttga

SEQ ID NO: 13700 - DNA, 102 bp, Zea mays
aactcgatctcgcacctagggtttcgtctcgccgctctcgtcctccgcgaagatgccgaagaacaagggtaagggaggcaagaaccggaagcgaggaaagaa

SEQ ID NO: 13701 - DNA, 119 bp, Zea mays
cactcagctctagcaatggctgcctccaccatggcgatgtcctccacggcgatggccggtacccccatcaaggtgggctccttcggcgaggtacgcatcaccatgccgaaaaacgttgg

SEQ ID NO: 13702 - DNA, 107 bp, Zea mays
aaatgtgtgtcctgatgagtacacactgtccagggagggacgtacccttgacccacacattgaggagcaatttggcagtggacggttgctggcatgcatttcttccc

SEQ ID NO: 13703 - DNA, 98 bp, Zea mays
cggacgcgtggggtgatcctaatatatatgcaaatgctatacccgtgccctacttgacttttgatgaggctgctgagcttgcctactttggtgcacag

SEQ ID NO: 13704 - DNA, 308 bp, Zea mays
  unsure (1)..(308): unsure at all n locations
gtcacttttctttgtgggagaggtcggtggaaatgattacaaccatttaatcgttagggataaatctgttgatgagctacatgaagttgttcctaatgttgttggtgccataaacctcggccataacggatcttataaatcttggagcanagaagttagttgttccagggaacttcccaatagggtgcgtcccattatatcttgcaatctttcagagccaaaaagaggattactatgaggaacaaacaggctgcattaagtggctcaatgattttgctgagtaccataataagatgcttcaggaggag

SEQ ID NO: 13705 - DNA, 306 bp, Zea mays
ccccaaagcctccgacccccttcctctctccctccgccgccgctgcgcacgcagggaacaagcgacatgggcgtctacacctttgtgtgccgcaacaacggcggcgagttgaccgccagccagcattccggcgagatcgaggcttccgccgctaccccatacgagctgcagcgccgcctcgtcgctgccgcctccgcggccgactctgcctacggcgtccagtcgtccttctccatggtcacccccagctccgccgtgttccaggtgatcgtcggtgctgtcggtggtggtgcaatgatggtgagc

SEQ ID NO: 13706 - DNA, 113 bp, Zea mays
gtcaaggcgaagtaccagtggtgagcgaattaattggcgacgccgacgccgctcctgtcgcaggacctggacgttatttagaaggctcttctccctggcggctttgatgcgtg

SEQ ID NO: 13707 - DNA, 100 bp, Zea mays
gcacgacgcacgcagagccgcagagatccgtcacactgcaagttttgaaaactgaactgtaagatggcatcagcagagctttcccgtgaggaaaatgtgt

SEQ ID NO: 13708 - DNA, 304 bp, Zea mays
cccacgcgtccggcctaaggagaggaacgaaaggtacgttgatgctgtcatgacaatccccaagggaaccttgttccccatgtgcggcatgaaccttgccttcgacaaggatctcattggcccgccatgtacttcggtctcatgggtgatggccagcccattggtcgctacgacgacatgtgggccggatggtgtgtgaaggtcatctgcgaccacttgagcctgggagtcaagactggcttgccatacatctggcacagcaaggctagcaaccccttcgttaacttgaagaaggaatacaagg

SEQ ID NO: 13709 - DNA, 304 bp, Zea mays
cggagaagacaacacagttgagtgtccctttattaattattgccgaggatgtgtcgcatgaggtatattcaacactggttcttaacaaactgaatggattgctaaatgttgcgggttgtaaaatgtcctggtttgggagatgaaaagaaggccattctccaagacattgctattatgacaggtgcagatttctttgctagtgaccttggctggggtcttcatggcattacttctgatcagcttggtatggctcagaagatcacaataactagtgaatccacaactatcatagcacatccttcaa

SEQ ID NO: 13710 - DNA, 306 bp, Zea mays
ctgagcttgtagcaaagcttagggcatatcatcatactgctcaaacaaaggccgacaagcaacattattcaagtatgggccttgacctctctaagggtatcattcggaacaaaccttgagtatggcgtgatagagccatcgatgagcaaagtaaagatcattcagtttgccacggaggctgccattactatcctgaggattgacgacatgatcaagcttaccaaggaagaagagggtaacgaagagtaagcagcccaccagtagtgggctagtggactcccatgggatggttgccatagcatgtag

SEQ ID NO: 13711 - DNA, 307 bp, Zea mays
caatgctgatggttcccctgctattcctcatggctcacgtgtaaagatacggatggacacaccatctggtgttaaggattccattcctgcctggatcaagttttctgtgcaaggttccagttgaaataccatacaacggtatatattatgacccacctgaagaggagaaatatgtattcaaacaccctcaacctaagcggcccaagtcactgcggatatatgaatcacatgttggaatgagtagcccggaaccaaagataaatacatatgctaacttcagagatgaggtgcttccaagaattaaaaa

SEQ ID NO: 13712 - DNA, 305 bp, Zea mays
cttattgataagcaatttaatgttgtggggtatactttactccttagtttgatcgagtataaaacacttgtaatgcgtggggattttgatcgtgcaaatgatggtttaacaaccaataccaaaggaacaatatgacagtgtggcacgtttcttggaatcacgtggaatgttggaggaagccctcgagatagcaactgacactaattacagatttgacctggctgtgcagcttggtcgacttgaaatagcgaaggtgattgctactgaggtgcaaagtgaatccaagtggaagcaattaggggagt

SEQ ID NO: 13713 - DNA, 300 bp, Zea mays
gagcttatcggtggtaaagaagtggcagacattgattgaagcccatgttgatgtcaagacaaccgacaactacatgctgcgtttgttctgcattggttttaccaagaggccgcccaaaccaggtcaagagaacctgctatgctcaggcatcccagattcggcagattcgccgcaagatggttgagattatgatcaaccaggcttctacatgtgaccttaaagaacttgtttctaagttcattccggaagttattggcaaagagattgagaagtctacctccagcatcttcccacttcaaa

SEQ ID NO: 13714 - DNA, 100 bp, Zea mays
acaacacgacgatcgtggagatggaccccggcagcttccgcaccttcgacctgagctactaccgcggcgtgctcaaactgcggggcctgttccagtccga

SEQ ID NO: 13715 - DNA, 293 bp, Zea mays
cttctcttctcgccaaaccctaatcctgctcctgcctttctcgtctccaaccgttggccgagcagtagcggtggcgatggagggcaaggaagaaggtcggatcttccgtgggcggcttgtcgtggcaaacggacgaacgcaacttgaggacgcctttggccgcttcggcaaggtcgtcgacgcccagatcatggtggagagacacactaaccgccacaggggctttggcttcgtgacatttgaagatcggagggcagttgacagcgctattaaagagatgcatggccaagaaa

SEQ ID NO: 13716 - DNA, 296 bp, Zea mays
cacgccacgccaaccccgggctcaactcgagtccacacgccccagcaccacccctgcctctcagtccagtcccccacccaccagcagcactcctcccctcggcggcggccggttcccgaccgatccggccggatcgcaccgccatggaccagtacgagaaggtggagaagatcggggagggcacgtacggggtggtgtacaagggcaaggaccgccacaccaacgagacgatcgcgctcaagaagatccgcctcgagcaggaggacgagggcgtcccctccaccgccatccgcgag

SEQ ID NO: 13717 - DNA, 291 bp, Zea mays
cgctccgccgccgccgaaacagcacatcgctctctcgatctcagccatggcggaggtggagcagccccaggacgcggtgaagctcttcaaccgctggaccttcgacgatgttcagttgaacgatatctcgctgaacgactacctggctgtgactgcggcgaacacgcgacattcctgccgcactccgcggggcgctactccaagaagcggttccgcaaggcgcagtgcgccatcgtcgagcgcctcaccaactcgctcatgatgcacgggcgcaacaacggcaagaaggtc

SEQ ID NO: 13718 - DNA, 296 bp, Zea mays
cgcacggaccggggtggtaaaacccggcgaccacatcaaaacacgatgcgtccccgactccgcagtccgcaggaccggtcactcggcagtcggcacgcaggctagcagcacagcagcagccagagccatcccctctcctcgctacgcttcgcttcctcggcgccgattcctcctcctcctcctccaccctcgtccgtcccgttccggcgcgcgagctcgcccgagatggcgaacgcgagatcgggtgtcgctgtgaacgatgagtgcatgctgaagtttggcgagctgcagtcgaa

SEQ ID NO: 13719 - DNA, 300 bp, Zea mays
ggaccgtgggtgaaggcaaccagactccaggatggagttcaaagccggcgttttcaccgtggcaatgctagcaaccgtcgtgctctccacaccagcagccgcgcagaagcccaagagccctcccgctccgccatccccagtcgtcctggcgccggcgccacgcccgcacggcgccggcgcaccacgtggacctcgcggacctcctcagcgtggccgggccgttccacacgttcctggactacctgcagaagaccggcgtcatcgagaccttccagagccaggcgaacgacacgaagcggg

SEQ ID NO: 13720 - DNA, 304 bp, Zea mays
gttctagatcgcgagctgccgccctttttttttttttttattgtatacttatgtgactaagtagagggcgaggatccaatgctggcatatataattcactcaaacaggccacacactatcagattgtagcacacctccatggctccaatgcgtcgtgtcaaattattgggggtccagatacagcagggtagtttccaaataaaaaaaaaagataatgtatgcaaattggtcgaatcttctatgatgaagcggcgggatctgactgtaggtagggggcaaagtgtttcaatgcttcctcatatac

SEQ ID NO: 13721 - DNA, 303 bp, Zea mays
atttgagcgtgtgaggtcgttggcctcgacccctctcgcgcactcgcgcttgcctgcacgctccagggcttcaggctcccctcccacctcgccgcggcagccatggcgatcacggcgccaactcccgacatccgcggcgagcgtcagtccggccaggacgtccgcacgcagaacgtgatggcgtgcggcgcgttgtccaacatcgtaaaatcctcgctcggccccgtcggtctcgacaagatgctagtggacgatatcggtgatgttacaatcactaatgatggtgcaacatacttaagatgt

SEQ ID NO: 13722 - DNA, 307 bp, Zea mays
cccacgcgtccgcccacgcgtccgagaagagcggcggcgcggacggacaaggagcaggcggaagaggagttgtgccactgcacaatgggtatctcgcgtgactcgatgcacaagcgccgagccaccggtggaaagcagaaggcctggaggaagaagcgaaagtatgagcttggtcgccagccagccaacaccaagttgtcaagcaataagacagttaggagggtccgtgttcgtggaggtaatgtgaaatggagggctcttcgccttgatactggtaactactcatggggaagtgaagctgttaccc

SEQ ID NO: 13723 - DNA, 302 bp, Zea mays
ccgacatcctactttcgtcctcacgagtgaccgataatccgccggcgctaagatgttggtttatcaagatctcctatctggcgacgagctcctgtcggattcattcacctacaaggagctcgagaacggcgtcctgtgggaggtcgagggaaagtgggtcacccaaggtcctgttgatgtagacattggtgccaatccatccgccgagggtggtgaggacgaaagcgttgatgacacagccgtgaaggtggttgatattgttgacacattccgtctacaggagcaacctccttttgacaaga

SEQ ID NO: 13724 - DNA, 305 bp, Zea mays
gtcttggtggaggccaaaggcgccagatggtatttcgggtgaccatcaaatttgctgctcgcgctgatctccaccatttggctatgtttcttgctgggaggcagccagatgcccctcaagaggctcttcaagtacttgacatcgtgctacgtgaaatgcctactgccaagtattgtcctgttggtagatcattttattctcccaagttagggagacctcagcaacttggtgaaggtttggaaacttggcgtggtttctaccaaagcataaggcccacacagatgggtctttctctgaatattgaa

SEQ ID NO: 13725 - DNA, 302 bp, Zea mays
cgaccgtgctccgccgccgacaacagcgtagtgtagtgtagttccggagagggttggggagagtagtagtgatccgcaatgtcgacggaggaggctgttgtggctgaggtcccggtgagcgatgtgccagcggaggtcccggcggcccaggtggccgaggcgcccaaggcgaagaaggcgcccaaggagaagaaggcgcctaaggagaagaagctttccgcggcgaagaagccggcggcgcaccctccctacgctgagatgattgtagaggcgatcgctgccctcaaggagaggaaggggtc

SEQ ID NO: 13726 - DNA, 291 bp, Zea mays
cttcacctgctgattgctgtaccgctccgctcctctccggtggcatctgcatctgcatctccatccctcgatctgtcttctctcagggtggaataagcgagacaatggaggctccacccgtggcgctgttcgacaccctcaaggcagccaaaccgttcttcttgttggctggtcccaacgtgattgaatcggaggagcacgtcctgaagatgcagatgccaccggagcggacgtagcggcacgggccggccgccgggcgaggtgcgcgtacctgccgtcgatcgtcgccgg

SEQ ID NO: 13727 - DNA, 301 bp, Zea mays
aagatgacaagcagctggatgctgatatccatcgcaagtacatctatggtggccatgttgctgactacatgaggaacctcgctgaagaggagccagagaagtaccagtctcacttcagtgagtacattaagaagggaattgaggctgatgacatggaagctctgtacaagaaggtccatgctgccatccgtgctgatccttctgtggtcaagtcaaccaagcagccaccaaaggagcacaagaggtacaaccccaagaaactgacatacgagcagaggaaggccagtctcattgaaaggct

SEQ ID NO: 13728 - DNA, 300 bp, Zea mays
cacgcgtccggggctgctccttcctcccagaggaagcgtacaaacctggaggggaactgcccgtctcctcggctgacccgtccacctcctttactctttccccctcgtgtccgccgctacacgcgccgccggaaccctagcctccgccgccacaggcagccgggatggagaaaggagcctcggaggcgtcgcccccttgcgctcgctgcggcaagcccgctcagcttcaatgccccaagtgtgtcgaacttaagttaccgcgtgagaacgcagctttctgcacacaggattgttttaggg

SEQ ID NO: 13729 - DNA, 301 bp, Zea mays
ccacgcgtccgccacgcgtccggccgcatcgggcgcaacttcctgcggtgctggcacgggcgcggcgacgctcgcccctcgacgtcatcgccatcaacgacaccggaggcgtcaagcaggcgtcccacctgctcaagtacgactccacgctcggcatcttcgatgccgacgtcaagcccgtcggcgacaacgccatctccgtcgacggcaaggtcatcaaggtcgtgtccgaccgcaaccccagcaacctgccgtggggcgagctcggcatcgacctcgtcatcgagggcaccggcgtctt

SEQ ID NO: 13730 - DNA, 304 bp, Zea mays
  unsure (1)..(304): unsure at all n locations
ctccaccgcatcggaactaggaaggcgaacgnaggcgcgtgcgcggcgcggcacggatcgagcgatggcggtggcccctcctacggcggcggcgctggagcagctaagcagcagcaagatgttcgacggcttcaatctccgcttccgccaccagagcgccacccttggctgcgccatgactttctccatctacctgcccccgtccccggcgtccaaccttcccgtgctgtactggctctcgggtctcacctgcaccgacgagaatttcatcataaagtccggcgcccagcgcgccgccgctgcc

SEQ ID NO: 13731 - DNA, 106 bp, Zea mays
ctcacgcgtccgcgacgctggtaaagccagaggagattgaagcactgcatctcgtcccaagagagctctcgctgaagattgtgagcaagaatgaagctggcgagca

SEQ ID NO: 13732 - DNA, 296 bp, Zea mays
tgcccgtggaggaggaggcgggccgggacgaagagatgaagaagttcctgaagcagccggagacgaccctgctggacatgctgccgacgcagatgcaggccatcagggtgatgacgacgctggacatcctctcgtcgcactcgcccgacgaggagtacatgggagagttggcggagcgtcgtggctggaggagcccatggtgaaggcggcgttcgagaagttcggcggcaggatgaaggagatcgagggattcatcgacgagtgcaacaacaacccggagctcaggaaccggtgcg

SEQ ID NO: 13733 - DNA, 296 bp, Zea mays
gccgtctgccttctgcgcctccatttcggcctctgtcccttgcaagttcaatctcacctccaaccatgggtaaagagaagtcccacatcaacattgtggttattggccatgtcgactctggcaagtcgaccaccacaggacaccttatctacaagcttggaggcattgacaagcgtgtgatcgagaggttcgagaaggaggctgctgaaatgaacaagcggtccttcaagtacgcgtgggtgctcgacaagctcaaggctgagcgtgagagaggtatcaccattgatatcgctctg

SEQ ID NO: 13734 - DNA, 173 bp, Zea mays
atcgctcgcctaggagctagtgaacttggtgacggctttggtgccctcggagacggcgtgcttggcgagctcgccgctgtgtttgctttctgggctgggctcgtttaagtgttttatgtaagaaagtaactgtattgtgtctgcagtaccttaccatgcatgttttaagtagc

SEQ ID NO: 13735 - DNA, 321 bp, Zea mays
ctccgcctcagcgcatagcccgccgcgacctcatcgatcaccttcaactttcaatcatggcggacgtcgatgtcgaaccggaggttgccgccggagctcccaaggaagaagacgttccgcaagtacagctaccgcggcgtcgacctagatgcgcttctcgacatgtccacggacgacctcgtccagctcttccccgcgcgcgccaggagaaggttccagaggggtctgaagaggaagcccatggcgctcatcaagaagctgcgcaaggcgaaaaaagatgctcctgctggtgagaaaccagagccagtcaagacacatctc

SEQ ID NO: 13736 - DNA, 314 bp, Zea mays
cgccccttctcgtacggtctccaggtcaccagcgtctacgaggatgggtctgtgttcagccctgaggtgcttgacctttctgaggaggacctaatcgagaagttcgcaactggtgtctccatggtcgcttctctttccctggcattatcgtacccgacccttgctgctgtgccccacatgtttatcaatgggtacaagaacgtgcttgctgttgctgtggagacggactactcgtacccacacgccgacaagatcaaggagtacctcaaggacccgagcaagtttgctgttgctgctcctgtagctgctgcgga

SEQ ID NO: 13737 - DNA, 310 bp, Zea mays
gcatggccttcagcaagctgaccggcggcggcccgacgaccccggcgggcctgatcgcggcggcggtggcgcacgcgttcgcgctgttcgtggcggtgtctgtaggcgcgaacatctccggcgggcacgtgaaccctgccgtgaccttcggcgccttcgtgggcggcaacatcaccctgttccgggggctcctgtactgggtggcgcactgctggggtccaccgtggcgtgcttcctgctccgcttctcgacgggcgggcaggccacgggcaccttcgggctgacgggcgtgtcggtgtgggaggcgctg

SEQ ID NO: 13738 - DNA, 313 bp, Zea mays
ccgcctcctctccccagcacccggagctcgaccgaacgccgctcaccatgatcatccccaagaagaaccgcaatgagatctgcaagtacctcttcaaggaaggcgtgctgtatgcccagaaggactacaacctggcgaacacccgcagatcgatgtgcccaacctccaggtgatcaagctcatgcagagctttaagtccaaggagtatgttagggagaccttctcctggcagtactactactggtatctcaccaacgatggcattgagcacctacgcaactacctgaacctcccgtctgagatcgtgcctgcc

SEQ ID NO: 13739 - DNA, 308 bp, Zea mays
cccgaagctggcggacgtggacctgttcctccggatcatctgcgccaaggccaagggcgtcacaagcggtgggacagcctcttcaacgagctgctgtccgagtacgcgctctccggcggcaagcagggcgaccacaactctgaagacttcgtgcacctcttgctgtcgctgcagaaagactacggtctcaccacggataacatcaagggcatacttgtgaacatgttcgaagcagccatcgagacatcattcctggtgctggagtactccatgagcgagctgatgaacaaccgccacgtcctggccaa

SEQ ID NO: 13740 - DNA, 335 bp, Zea mays
  unsure (1)..(335): unsure at all n locations
atccgctaaccgcggtgggatggttcgtatactcgtgactggttctcgtcaacagcactgggtttgggaagcctgncatttagagaatcttagtatgcagatggggcttgtctctggcctgaagatgggtaagnacaatgagcaagagtaaaaagaactatcctccacccaaggatctcattgatgagtttggagcggatgctctgcgactatatttggtaaactccccagttgtacgtgcagagtctctacgattcaaacgtactggtgtctttgctgttgtgaaagatgtcttcctcccatggtataacgcatatagattttttgtccaaaat

SEQ ID NO: 13741 - DNA, 315 bp, Zea mays
gttgaggtcaaacgaatccataactgccgcaggttaagccatgaatggcaagcatacatatcccgaacccattctctgaggaagacatttatttccgtgaaggggcataataataaggctgaagttcaaggacaaaagatcacctggctaactccgcatgctcttcagcaagtattaactgatgatgttgatttcaatgtgatgctttcttttctagaattctatgagactcttctaggatttgtgaacttcaaactctatcattcaataaatgtaaattatcctcctattctggatccacgtctggaagcttta

SEQ ID NO: 13742 - DNA, 314 bp, Zea mays
gctcgatctactactactactagctggtacacatactagccagcctgccagccagcttgccatggcgcccaccgtgatgatggcctcgtcggcaaccgcccgtcgccccgttcaagggtctcaagtccgccgccagcctccccgtcgcccgccgcagcaccaggagcctcggcaacgtcagcaacggcggaaggatccggtgcatgcaggtgtggccggcctacggcaacaagaagttcgagacgctgtcgtacctgccgccgctgtcgacggacgacctgctgaagcaggtggactacctgctgcgcaacggc

SEQ ID NO: 13743 - DNA, 302 bp, Zea mays
cgcaggtggactgcgcacgggaggcgatgaggctgatccacgcggaagacaagaacctcaaggccgaggactcacgtgggagctgaagaagaattcggcacgcgtgacaccatggtcctcgtctacaacgccaccggggccagcctgagcctggtggacgacgggaaagactggatgggctccgtctacagctcgccgatcccggacaccttccacaacgggcagtggatcgccttcctccacgtcaagcccggctcgctggcgcagggcagccaggccgccagggtgttccgcggcaggga

SEQ ID NO: 13744 - DNA, 307 bp, Zea mays
cccacgcgtccgccacgcgtccggcgcccgggccaccgcacacctgaaagcaatggagatcgtcgccacgcgctccccggcctgctgcgccgccgtgtccttctcccagtcgtacaggcccaaggcgtccaggccgccgacaacgttctacggcgagtcggtgcgggtgaacacggcgcggccgctctcggcgaggaggcagtccaaggcggccagccgcgcggccctcagtgcccggtgcgagatcggagacagcctggaggagttcctgaccaaggcgacgccggacaagaacctcatcaggctg

SEQ ID NO: 13745 - DNA, 303 bp, Zea mays
gggttaatagagagcgggcgattgggtttcgggaagagggcaccggcaatgtcaacgacgacggaggcggcaaagagcggctcagccgcaccggtgcggtgccagctgatcggctgcgacgccatattcaccaacgatgacaaccgcgagggctcctgccaataccacccctccgcacctatgtttcatgacggcatgaaagaatggagctgctgcaagcaaagaagccatgatttcagcttatttttgcagatacctggatgcacaacaggaaagcatacaaccgaaaaaccaatcacaaaa

SEQ ID NO: 13746 - DNA, 307 bp, Zea mays
gcgctccatatcacccaacacggtcacacagaacatcgtcctcagcggctacgggaaggccgggcggttggccgacatggagcgagtgctctccgacatgctcgaccacgtgttcatgcaaaccggacgtttggaccatgaacatcatcctcagcctcttcgggaaccggggcgaggttgaactgatggagagatggtacgagaagttccgaggctacggggtcgagccggagacccgcacgctgaacatcctgattggcgcctacgggaagcggcggatgtatgacaagatgtccgcagtcatgga

SEQ ID NO: 13747 - DNA, 303 bp, Zea mays
gccgtccgccttgcccttcacgaaggcttggtcctcctccttgtatctccactccccccttcacagatccgttcctccagctagggttagcgttccttgcaggatgcgatcaagcggactaaggcggagaagaagatcgcgtacgacaagaagctgtgcagcctgctcgatgagtacaccaaggtgctcatcgccctggccgacaacgtcggttccaagcagctccaggacatccgccggggcctcaggggcgactcggtggtgctcatggggaagaacacgctcatcaggcgttgcatcaag

SEQ ID NO: 13748 - DNA, 309 bp, Zea mays
ccccacccacccacccactcgcttcagccgcctccgccgcgcgtacaagcaggtggagacaggatgccggctggccacggcctgcgctcgcggacgcgcggacctttttcgggggccccttccgcaagaagggctacatcccgctcaccacctacctccgcacctacaagatcggcgattacgtcgatgtcaaggtgaacggcgccgtccacaaggggatgccgcacaagttctaccacggccgcaccggtcgcgtctggaacgtcaccaagcgcgccatcggcgtcgaggtcaacaagcaggtcaatg

SEQ ID NO: 13749 - DNA, 303 bp, Zea mays
agcaattgaaaaaaaaaacaggcaaggaaaatggctccgaccgccgccaaggacagtggctccgccgatcgctggcgcgaggtgcaggcgttcgaggacagcaagctgggtgtgaagggcctggtcgactccggcgtcaagtccatcccggccatgttccaccacccgccggagtccctcaaggatgtcatttctccaccagctctgccctcctccgacgatgcgccggccatcccagtggtggacctgtccgtggcgcggcgcgaggatctggtggcccaggtgaagcacgcggccgggacg

SEQ ID NO: 13750 - DNA, 299 bp, Zea mays
gcggccgcccttttttttttttttttttttttttttttttttttttttttttttttttttaccggtgagagagtatgacatgcattcatcttggtgaaaaagggaaattttcactttagagatacaattccttggacctgtctcgaatgcacataatgtgaatccattacaactcaacaaacgtgcttattattttactacaccccacgcaattattactgccacacgtctaagactcatgcattcttggataggaggcggcggcggcacagtaactagctagctagacggccctagga

SEQ ID NO: 13751 - DNA, 95 bp, Zea mays
gttcacgggcacctacatgccctccacctccctcaccggcggccaccgcgtctgcgcctacctcgacccctccgaggccaaccacgccaaagtta

SEQ ID NO: 13752 - DNA, 301 bp, Zea mays
cggacgcgtgggcaagtggggcgtgctgatcccatcgcgcgtggtggaggaccattcgccgcttccggggtggatggtggagtcgctcaaggccatcaagatacatcgacggcgagagcttcgccgtgccgcggggtcggcgcgccgtggagctgctggccgggagggagagcgcgatcgcgcaggtcatccgcaccgtgccggggcgacagtacgtgctgtccttcaccatcggcgacgccagtaacgcctgccgcggctcgctcatggtggaggcatacgcgggccgggagtccaccaa

SEQ ID NO: 13753 - DNA, 295 bp, Zea mays
gtcaagagcggcgcgccatttgcgcgtaagtttcccaaggacgacaaggtcctggacaagatagaccgcgagctcttgcaccgctcggagggctggttcacccctggagcatggtgtgacgggggctctgaaggaggagctgatccatgcctgtctaggggtgaagactctgttttcgagcctggacctggtgccgaaaggctgcgaggcctgatgaagaaggtgctctcgtgggattaccgcaatggcagctgttcctcgcttgcttatgatcagacgaagagggactggtatg

SEQ ID NO: 13754 - DNA, 292 bp, Zea mays
cggaccgtgggcacatcccttcttgcttctcgcctccccacccttcatccacccgccgctcctcaagccccaagctccggcgatatgtcacgcttcggtcgaaccggtccgccgccgccgatccgcgacacatattcactcctcgtcctcaacatcaccttccgcacgactgctgatgacctcttcccgctcttcgacaagtacggcgagattgtcgacatctacatcccaagggaccgcaggactggcgactcgcgcggattcgcgttcgtgaggtacaagtacgaggacg

SEQ ID NO: 13755 - DNA, 290 bp, Zea mays
cggaccgtgggcggacgcgtgggcggacgcgtgggcaggcgcaactccgcgccctcatcgccgagaagagctgcgcgcccctcatgctccgcctcgcgtggcactccgcggggacgttcgacgtgacgtcgaggaccggcggtcccttcggtactatgaagtgcccggcggaactggctcacggcgccaacgcggggctggacatcgcggtgcggctgctcgagcccatcaaggaggagttccccaccctctcctatgccgatttctaccagcttgccggagttgtggcc

SEQ ID NO: 13756 - DNA, 291 bp, Zea mays
ctggagaacatctttggtcaaactcctgctgttgattcgatttgggtctacggcaacagcttcgagtcgagcctggtagcagttgtgaaccccaacacgcaagcactggagcgctgggcagagtcgaacggggtaactggagaatttgccacgatatgcgaagaccctaaagcgagagagttcatcttgggagagcttacaaagatgggtaaagaaaagaagctcaaaggcttcgagctcatcagggctgttcatctggaccccgcaccgttcgacatggagcgcgacctt

SEQ ID NO: 13757 - DNA, 291 bp, Zea mays
gagagagagagagatcagcaacttaacaacaataatggccaccgccatagttcccacggacgccgagctgctgcaggcgcaggccgacctgtggcgccacagcctctactacctgacatccatggcgctcaagtgcgcggtggagctccacatcccgaccgccatccacaacctaggcggtgctgccacgctgccggacctcgtggccgcgctgtccctgccagcggccaagctcccgttcctcgggcgcgtgatgcggctgctggtcacgtcgggcgtcttcgcgtcgtc

SEQ ID NO: 13758 - DNA, 178 bp, Zea mays
cccacggcgggggcgccttctccggcaaggacccgaccaaggtggaccgcagcggggcctacgtcgcgaggcaggctgccaagagcatcgtcgccgccggcctcgcccgccgcgccattgtccaggtctcctacgccatcggcgtgcccgagaccctttcggtgttcgtggacacgta

SEQ ID NO: 13759 - DNA, 110 bp, Zea mays
acgcggcgctggggtcatcgtctgcatgctcgacaccggcatctccccgacccacccgtgcttcaacgacgacggcatgccgccgccgccgccggaaaagtggaacgggc

SEQ ID NO: 13760 - DNA, 286 bp, Zea mays
aggttcggctgggaacaagttccgcatgtcactgggtctaccggtggcggccacggtgaactgcgcggacaacacgggcgccaagaacctctacatcatctccgtcaagggcatcaagggccgcctcaaccgcctcccgtccgcctgtgtcggcgacatggtcatggccaccgtaaataagggaaagcccgacctcaggaagaaagtgatgcccgccgtcatcgtccgccagcgcaagccgtggcgtcgcaaggacggtgtctacatgtacttcgaagataatgct

SEQ ID NO: 13761 - DNA, 286 bp, Zea mays
gccaaaggttggacctcaccgatccgccaccacgccacgaaatcatctcctactccagcagttccgctcctcgccgccgccgccgccaccgccaccgccacgatgccggaagacgtgcagatgaacgactcggagccccagtctgcggccccagctcccgccgccgccgcggcgccggcgctctccacactacaccatctgaaggagatcgcgtccgtgatcgaggctggttctctgtccaaggaggtccgccggatctcccgcgccttccgcctcaccgtcgcgc

SEQ ID NO: 13762 - DNA, 283 bp, Zea mays
ggccgccggaaccaatgaccaccattatatcgcaggacatgttcgaggccggaaccgacacctcgtacatgacgttggagttcgccatgacggagctcatacggaagccacacctgatgaagaagctgcaggaagaagtgcggcggaacgtgccggcggggcaggagatggtcaccgaggacaacctccccggcatgacctacctcaaggccgtcatcaaggagacgctccgcctgcacccgccggtcccgctcctcctcccgcactactccctggacgcctg

SEQ ID NO: 13763 - DNA, 283 bp, Zea mays
gatcaaggaggtttctcatgagtggcaattggttaacaagcagaagcctatctggatgagaaagcctgaggagattaccaaagaagagtatgctgctttctacaagagcttgaccaacgactgggaggagcatctcgccgttaagcacttctctgttgagggtcagcttgagttcaaggctgtcctgtttgtgccgaagagggccccctttgacctcttcgacaccaggaagaaactgaacaacatcaagctctatgtgcgccgtgtcttcatcatggacaac

SEQ ID NO: 13764 - DNA, 283 bp, Zea mays
caagcaagcagagaacaaggataacacagcaactgaaaaccttattaccaagaacaaacaactacaagaggctttgcaagttcacagaggcagctgttcactgcgaatgaacaaccagaggaagcctggagactggaactgcaagaactgccagcatctcaacttcagccgccgtgactactgccagcgttgccgtgatccacgccctgacttgcagttcggcgacggctatagcacggttggtgtgctgacctccctggacatccgcccaggtgactggtac

SEQ ID NO: 13765 - DNA, 283 bp, Zea mays
agcttctggaaaacacctactcgtctctcatcccttccccgccgtcgcgtcctcttcgaactgaatcgcgccgcgatcacccaccttatggcggacaaggagcctgtcgtggagcgatccgaggcgtctgaggaggaggacgcctccgccgcggccgccgcgggggaggaagaggacacgggtgcccaggtggcccccatcgtgcggcttgaggaggtactcgtcaccaccggtgaggaggacgaggacgtcctgctcgacatgaaggcgaactgtaccggtt

SEQ ID NO: 13766 - DNA, 287 bp, Zea mays
agcagatgcagtttctacagtggagtcccttcctcgccccaccagcacaaggttcctttcatacgaagaactgaaagtggcaacaaataacttcgagccttcaagtgtgcttggagaaggtggttttggccgtgtcttcaagggggtactgggtgatggcactgctgtcgctataaagaagcttactaacggagggcaccaaggagataaggagtttttagttgaagtggaaatgctgagcaggttgcaccaccggaatcttgtgaaactgattggttattacagca

SEQ ID NO: 13767 - DNA, 288 bp, Zea mays
ggagcacgtcatcaagccagtcatccccgagcagtacctcgacgagaagacaatcttccacctcaacccgtctggccgcttcgtcatcggcggacctcacggcgacgctggcctcactggccggaagatcatcatcgacacctacggtggctggggagcccacggcgggggcgccttctccggcaaggacccgaccaaggtggaccgcagcggggcctacgtcgcgaggcaggctgccaagagcatcgtcgccgccggcctcgcccgccgtgccatcgtccaggtctc

SEQ ID NO: 13768 - DNA, 339 bp, Zea mays
gtcagacgtctataccgctttctatgagttttcttcattgatagagtcaaagattgatgacaatgatccaaatgctgctctaacacggagacacgtgaattcaataaagcaaacttgcaagtcatctggtttggtaaagttgagggggtaccatttggacacatcaccttacaggcctatgctgatcatgattgtcctcctgctggtggctatccttttcggggcactgtataccaagtgatgcacttgtagctggcctttttcccctatggagacgagacaaactctgccaatctggtatggcaaataatttgaactgtttaaaccgcattgcttttg

SEQ ID NO: 13769 - DNA, 335 bp, Zea mays
atcaagccccagactgaccgctgggtgttccccgagaccaacactggcatcattgtccttgctgagggtcgcctgatgaaccttgggtgtgctactggccatcctagctttgtcatgtcctgctcattcactaaccaggtcattgcccaacttgaactgtggaaggagaagagctctggcaagtatgagaagaaggtgtatgtgctccccaagcaccttgatgagaaggttgctgctctccacttgggcaagcttggtgccaagctgaccaagctcaccaagtctcaggccgactacatcagcgtgccgatcgagggtccctacaagcctgccca

SEQ ID NO: 13770 - DNA, 336 bp, Zea mays
gagcaaagatacttgtccttgatgaggcaacagcagcagttgacgtgcggactgatgctcttattcagaaaacaatccgagaagaattcaagagttgcacaatgctcataattgcccaccgtttgaacacggtcattgactgtgacaggttgcttattctaagttctgggcaggttctggaattcgactctcctgagaatcttctaagcaacgaggggagtgctttctccaagatggtgcaaagtacaggacctagcaacgcagaatacctcaagagtcttgtatttgcaagtggagaagagaggtcccggagggaagaaatcaagctgcaagata

SEQ ID NO: 13771 - DNA, 296 bp, Zea mays
ctactgggaggagcacaagtgtatcgctgtggctgcggcgcccggcagtccgccacaagcacacgcgcacacaggggccaagcgcctacacctacagaggagagacaaggtctgccgtccgcgcgtgcgcggaagatgggacggaggaagaaggctgccagcaatcagagatggaggtggggttcttgggtctgggcatcatgggcaaggcaatggcgaccaacctcctccgccacggcttccgcgtcaccgtctggaacaggaccctcgccaagtgccaagagctcgccgcgctc

SEQ ID NO: 13772 - DNA, 335 bp, Zea mays
atcctatggttctctgtacaatggaagaatctggtgagcatatcattgctggagctggtgagcttcatcttgagatttgcctgaaggatctgcaggaggacttcatgggtggtgctgaaattattgtttccccacccgtcgtctccttccgtgaaacggttcttgagaagtcctgccgtactgtcatgagcaagtctcccaacaagcacaaccgtctgtacatggaagcgcgccccttggaggagggtctcgctgaggccatcgatgacggccgtattggcccacgtgatgatccgaaggtgcgctcccagatcctctctcaggagtttgggtgg

SEQ ID NO: 13773 - DNA, 338 bp, Zea mays
gcaaaaaggagtttgtcatggcgtctaagcgcatcctcaaggagctgaaggacctgcagaaggacccccccacatcatgcagtgcaggtcctgctggtgaggacatgtttcattggcaagcaacaattatgggaccacctgacagtccctatgctggtggtgttttttttagtgaacattcatttcccgccagattaccccttcaaacctccaaaggtttctttcaagacaaaggtcttccatcctaatatcaacagcaatggaagtatatgccttgacattctcaaagagcagtggagccctgctttgacaatttctaaggtcctgctctccatctg

SEQ ID NO: 13774 - DNA, 331 bp, Zea mays
ctcgactcctcgttctgcaggatcctggcgaaccggcagtctgcggcgaggtccaaggagaggaagatcaagtacaccagtgagctggagaggaaggtgcagacgctgcagacagaggccaccacactttcggcacagctcacgcttcttcagagggacacctctggtttaaccactgagaacagggagctgaagctccggctgcaggccatggaagaacaagctaaactccgagatgctctaaatgacgccctgagagaagaagtccagcggcttaagatagccacagggcaggtccctaacataaacgggaatcccttcaacggaggac

SEQ ID NO: 13775 - DNA, 331 bp, Zea mays
attttagccgccgccgctgctcatctcacatccctcgagaagacgcctgctcctcgccgatcgatacgatggccgtcttctccgacctccacaccgccgacggcctcaagtccctcgaggctcacctcgccggcaaaacctatgtgtctggtgactccattactaaggatgacattaaggtcttcgccgcggtgccgtcgaagcctggcgctgagtttcctaatgccgcccgctggtacgagaccgtctctgcggctgtagcctcaagattccctggtaaggctgttggtgtaaatctgcctgcgggatcagctcctgcggcagctgctcc

SEQ ID NO: 13776 - DNA, 324 bp, Zea mays
ccacgcgtccgcggacgcgtgggctcaacacgtccaacagggacagttgagactggtgtcattaagcctggtatggttgttacttttgggcctactggtcttactactgacgttaactccgttgagatgcaccatgaggctctccaggaggcccttcccggtgacaatgttggcttcaacgtgaagaatgttgctgtgaaggatctgaagcgtgggtatgtggcctccaactccaaggatgaccctgccaaggaggctgctagcttcacctcccaggtcatcatcatgaaccaccctggccagattggcaatggctatgcccca

SEQ ID NO: 13777 - DNA, 324 bp, Zea mays
ctcctcgccatcacataaaaccagtgcaagcagaagcagcgcaatggcgagcagcaccatggccctctcctccacagccttcgccggcaaggcagtgaacgtgccgtcgtctctcttcggcgaggcccgcgtgacgatgcgcaagacggcggcgaaggcaaagccggcggcgagctccggcagcccgtggtacggccccgaccgcgtgctctacctgggcccgctgtccggcgcgcccccgagctacctgacgggcgagttcccgggcgactacggctgggacagcgcggggctgtcggcggacccggagacgttcgccaagaa

SEQ ID NO: 13778 - DNA, 323 bp, Zea mays
ctgctgggttggatgttctctctaatgtgtttggtgacagcatccttccaactttaatgccattgattgagcaaaacttggctcgaacagatgacaattcttggaaggagagggaaactgctgttttgtgtctaggcgctatagcagaggggtgcattagtggtctatacccacaccttcctcagattgttgccttcctaatcccacttcttgatgataaatttcctcttatacggagtattacgtgttggacgctctctcgatatagcaaattcattgttcagagccttgatcatccaaatggacgtgaacaatttgataag

SEQ ID NO: 13779 - DNA, 323 bp, Zea mays
ggggatggatgagtcgtctttacctctgtcagtcaattgctggccgtcagtatctggaaatgaaacctatgtgaacattgaatatgaagcttctgagatgtttgatctgcacaacgttgtcatatctatacctctgccagcacttcgggaggctccgagtgttagacagatcgatggagagtggaagttcgactcaagaaactctgtgttggaatggtctattctccttatcgatcagtcgaatcgcagtggttccatggaatttgttgttcccccagctgacccatcatcgtttttccccatctccgttggattttctgcat

SEQ ID NO: 13780 - DNA, 322 bp, Zea mays
gttcaagagcaggtcttaagctgccgtggccgtgccgagacatgccagtccgaagaacgggcgtcttcctgtgatgtcttcttgtctgcccacgcctagtttctctgtcgattcctattcgtcgtctcttcagggctggtgctcactgctgcgccgttctgttaaccgaaacaagaactctgtgtattcctgtaccgagctgtgcatgttttttttttctttccatcgtggagaatttaagttattatccgtttgctgcaaggtttgccgtctcattttatgcgttgggatgttggcaagaaagggcagatgtcatgtgaga

SEQ ID NO: 13781 - DNA, 310 bp, Zea mays
cattggtccttgttactccagcaaggtaactcgaaatggactgcgggtttgtgatttacgacacatggacacttttggggataagcttgacatcttattcaaagacgctgcttcgagatttcaaggctttcagtacagcaaaagcttgctcaaggaagaggttgagagatacaagaagtttgctgatcgcttggagcccttcattgctgataccgtgcatgtgctaaatgaatctatcaagcagaagaagaaaatcctggtcgaaggcggccaagcaactatgctggatattgattttggcacttatcca

SEQ ID NO: 13782 - DNA, 158 bp, Zea mays
ggaggaagcagatcggagaaggtgatctgttgtaatggctcgattgtacatcggcaacctggatccccgggtgaccgctcgggagctggaggacgagttccgcacgttcggggttcttcgcagtgtctgggttgctcggaaaccacctggctttgcgt

SEQ ID NO: 13783 - DNA, 303 bp, Zea mays
cggacgcgtgggcggacgcgtgggctactactcaaatccatccttattgagcttagtgtttgatccatggactcggaaggagtagcagcaaaggtggcagatgagactactaaaccggcaagccaagaagacggcgagagcaaggccgggatgactgatctgctgatgctgaccgacaagtcgcagctgcaggcgctagcgatgctgctgcggaacaacgaggagctcatgatgagccaagcgatcaagtcggagacggagcgcgttgagtacctcaagacggtgagcgactgctacacgcgg

SEQ ID NO: 13784 - DNA, 300 bp, Zea mays
ggagccgtcagactcagctgatcaagttcttctcagggaacaagctgcgattggcaggagtactggacagatggataacgtgatatcacaagctcaggcaacacttggttctctcatgacccaacggtcaacattcggtggcatcactacaaagataagcaacgtcagcagccagcttccaacaattaaccacgtcctctcatcgatcagaaggaagaaatccatggataccatcattctttcgctcgttgcatctgtctgcacgtttctcatcttcatctactggctgtcgaagtaggt

SEQ ID NO: 13785 - DNA, 299 bp, Zea mays
ctccactctcggagtgagctccccaccaccacctccgtccccaaatgtcccgtcaccatcaccacgccgccgccatcgctgctgccgtgctcttcctcctcacagcgcctccttgcgccgccgaccctaacgacgagcgttgcctgactcacctccaccagtccctctccgattcctccggaaggctcaactggaccaaggcggcgatctcggcgccgtgcgacggcttcttctcgcacctccaaggcgtgacctgcaacaacgggcgcgtgtacaagctagccctcccggatctctcg

SEQ ID NO: 13786 - DNA, 299 bp, Zea mays
ggatttctagtgagcaaactgcaaataattatttctcaagaacttccagtagtgttgttgttcctactgagtggggaaggcccaatgcatcactttggggtggcagggtcgttggacggcggcaaattagatacattagaggaagctcttgtctatctactgatgaatataatgcttttatgaatatatttgagagaggttctcttctctactgcaatatgtcctttgatgcactgctaagtgttcgaaagcaactcgaagaatttggattcccttgtaaagctgtcaatgatagtcta

SEQ ID NO: 13787 - DNA, 301 bp, Zea mays
gcacaataggagtctcagagagaaacgactgtcccaagttcgatctcatccttctcaccatgggctccgatgggcatgtggcctcgcttttcccgaaccaccctgccatggagctgaaagacgactgggtcacctacatcaccgactctccgcagcctcctcctgagaggatcaccttcactctcccagtgatcaactcagcatccaacatcgcaatagtgtccaccggtgatgacaaagcaaaggctgttcacatagcagtttctgacatggccgaagtcttgatgctcctacatcgctg

SEQ ID NO: 13788 - DNA, 295 bp, Zea mays
ctcgtctccctgagaggtgccgggaccgaggaactggccgagttctaggtagagaatcggttttgcttgtctcagcacggggtctgctgcgtctggtggtggtgaaggggagaaattcgtgagatctgttccggatcaggcgtgcgagctcgggaatcaggggtttcacacatagcttcgtcgatttgaatttgatgtactaatggagtctaagggtggcaaaaagtctagcagtagtcgttccatgatgtatgaagctccccttggctacagcattgaggacgttcgacctgcc

SEQ ID NO: 13789 - DNA, 294 bp, Zea mays
cccacgcgtccgcagcttcagagctgggaaaaaacaatggactgccatagtccaggtcaaggtttaatgcccgccagcttcaaagtgcggacaattccacttgatggtgatgaggatgcaactgaggaggtcttggatcctgattttggggaagccgcaataggccgtgtggcacctgttgattcaggtctatggtggatcatattgctgagggcatacggaaaatgttcaggggatctgtcagtacaagagagaattgatgtccagaccggaatgaaaatgattctgaagctt

SEQ ID NO: 13790 - DNA, 299 bp, Zea mays
tttacatttaaggcatggatttattatggtgattaaggacatcgtgccttaatctcacactacacagcaaatgacacaaaaacactaggggcacaaccgcggaggcgcggacacaagtacatgggaccaaactattgtaatttgacaagtaaaattaagtccaacactacatgcaagatgcagcaaccacagcttattgaattcaaagaataaaataagcacaagagaacttaatcgcagtcaacagctcatgtatcatcacaaatctctacaagatccagacaaccatcacctcataa

SEQ ID NO: 13791 - DNA, 293 bp, Zea mays
agaacatgatcactggtacctcccaggctgactgtgctgtccttatcattgactccaccactggtggttttgaggctggtatctccaaggatggccagacacgtgagcatgctctccttgcgttcacacttggagtgaagcagatgatttgctgctgcaacaagatggatgcaaccactcccaaatactccaaggcacgttatgatgagattgtgaaggaagtctcatcttacctcaagaaagttgggtacaaccctgataagatagcatttgttcccatctctggttttgag

SEQ ID NO: 13792 - DNA, 288 bp, Zea mays
cggacggtgggggctgaagcagcagtttttcctttgcagcgcatcacttcaggatatgattgccagatttaaagaaaggaaatctgatagagtttcagggaagtggagtgagttccctactaaagttgctgttcaactgaatgacactcaccctactcttgccatccctgagctaatgaggttacttatggatgaggagggacttggttgggatgaagcttgggacattacagataggacaatttcctacaccaatcatacagttctccccgaagctcttgaaaaatg

SEQ ID NO: 13793 - DNA, 289 bp, Zea mays
atccgctcccctacctctccagcatctcccgtctccgtcgtctcgtctctgctcctcacctcgccgccagccatgggcaagatcaagatcggaatcaacggtttcggaaggatcggcaggctcgtggccagggtcgccctgcagagcgaggatgtcgagctcgtcgccgtcaacgaccccttcatcaccacggattacatgacctacatgttcaagtacgacaccgtgcacggccaatggaagcacagcgacatcaccctcaaggactccaagacgcttctcttcggcg

SEQ ID NO: 13794 - DNA, 286 bp, Zea mays
ctcaggcccaagagtggtctgcgcacagggctgattgtatccatggtggtcgggtcagtagcgttggctgccgtgatagtgatactggcgctcctatggcgatcccggacctggagaggtgtatttacttgcagtcgcagagagtttgaagcaggaggttctctcgcgttctactcttacgcgcagatgaagaaggctacaaggaacttctccgacaaactcggcgagggagggtttggaagcgttttcaggggaacaatggcaggaccaaccgccgtcgccgtga

SEQ ID NO: 13795 - DNA, 286 bp, Zea mays
ggaatgatatgtgcctgcctcaatgtgctcatgtacgggtcacccttgcttctatgaaaacggtgatcacgacaaagagcgtggagttcatgccattcttcctgtccttcttcctcttcctcaacggaggcgtctgggcaacgtacgcggtgcttgaccgcgacatcttcctcgggatccccaatgggataggcttcgtgcttggcaccatccagctgatcgtctacgcgatctacatgaacagcaaggcctcccaatgcagcaaggaaacagcgtcctcgcctct

SEQ ID NO: 13796 - DNA, 287 bp, Zea mays
gaaaaaaaaaacaggcaaggaaaatggctccgaccgccgccaaggacagtggctccgccgatcgctggcgcgaggtgcaggcgttcgaggacagcaagctgggtgtgaagggcctggtcgactccggcgtcaagtccatcccggccatgttccaccacccgccggagtccctcaaggatgtcatttctccaccagctctgccctcctccgacgatgcgccggccatcccagtggtggacctgtccgtggcgcggcgcgaggatctggtggcccaggtgaagcacgcg

SEQ ID NO: 13797 - DNA, 284 bp, Zea mays
ggcaaacgcggctgcgagcccggcgcccctctcccagtccccagcagccgccagcccgcacacccctccctcgcgcgctcaggggttcggaatggaagccgaggcggcggccaagacgacgcgggacagcggggaggacgccgccgcggcggggatctccgccgtcatcccgggatggttctccgagatcagccccatgtggcccggtgaggcgcactctttgaaggtggacaaggtgctgttccaagggaagtcagactaccaaagcgttatggtccttcagt

SEQ ID NO: 13798 - DNA, 114 bp, Zea mays
actagttctagatcgcgatctgccgccctttttttttttttttttgcataaactgattctgagattgttcccaaattacttattccatcggtttctttattctttcacaccgtt

SEQ ID NO: 13799 - DNA, 323 bp, Zea mays
cgcgggtggcgccgcgatggaggagctgcgccaggcggtggtcaacacgctggagcggaagctgttttacataccctccttcaagatctaccgcggtgtcgcggggctctactactacgggccgcccgggtgccgcgttaaggccaatgtgctttccttctggcgccacactttgttttggaagagaatatgttggaggttgactgcccctgtgtgacgcctgaggttgtcttgaaggcatcgggccatgtcgagaagtttactgacctcatggttaaggacgagaagacaggcacatgctaccgtgctgaccacttgttgaa

SEQ ID NO: 13800 - DNA, 324 bp, Zea mays
gtgctcgctgcaacaatgagttagttgatctatatcatgttgaggaagaggatgacatcatcacattgaaaatgatgattgagcaacatcgtcgcaacactgagagtgttttggctagagatatactctccgattttgataaccttcttccaaaatttgtaaaagtatatccaagggactataagagggttctagaaagcatgaaggtggaaaaggctgttgctaagcatgcaaaggagcctaagatggcaaatggaatttctgtgacaactaagaaagtacaacctgatcagtcagcaagccgaccaacacatgttgccaatg

SEQ ID NO: 13801 - DNA, 325 bp, Zea mays
  unsure (1)..(325): unsure at all n locations
ctgcttttttgcccttagatgaggcatgtcttcttgatatcgataatgttgaagaggctggcattcgtcctgggttagtagaagaattcatgataattgatgagaacccaggtgatgaaactttgattctaagnttgcaagcaattcagcaagaacttgcatgggaaaggtgccggcaacttcaggccgaagatgtcgttgtcacgggtaaagtaattggtggaaacaaaggaggtgtagtagctcttgtggatgggcttaagggtttcgttccattttcgcaagtgtcatcgaaaacaaccgccgaagagctgcttgagaaaga

SEQ ID NO: 13802 - DNA, 117 bp, Zea mays
cccacgcgtccgggtgatcatcaccgacatgaactactacccggtgtccaagtaccacttcgacctcagcggcacggcgttcggcaggctggccaagtccggcctcaacgacaagct

SEQ ID NO: 13803 - DNA, 124 bp, Zea mays
cgcacgcatacacagcacgagagtggaggtaggcatccgaaaaaagctgtggtctggtcgacatggccgccggcaccatggctctcacgtcccgggcggtcgtcggcgaaccggcgaccagcac

SEQ ID NO: 13804 - DNA, 326 bp, Zea mays
ccagccgccaccaggtgcagagtctttcgtcatctcttctccggcgaagaacccccagtcgcccaccagatcacttgttaaactttgttgaggggtgatggcggtttctttcgcaaacctcaactccgaggcagggcttaaaaagcttgatgagtaccttctcactcgcagctacatcactggctaccaagcttccaaggatgacttggctgtctacacttcgttttcggctgctccctcgtccaagtatatcaacgtagcaaggtggtttaaccacattgatgcgctcgtgaggctgagcggaattactgcagagggccaaggtg

SEQ ID NO: 13805 - DNA, 322 bp, Zea mays
tccaccgccgccaacgtcgcctggcggccgtctgcagctccgcgcctctgctcggaagttggtgaaggtttcttgaagctgagaagatggtgctgaagacagaactctgccgcttcagcggccagaagatttatcctgggaaaggcatccgatttatccgtgctgattctcaggttttcctttttgccaactcaaaatgcaagcgctacttccacaaccgcctgaagcctgcaaagcttacctggacagcaatgtacaggaagcagcacaagaaggatatccatgctgaggctgtcaagaagaggcgccgcgccaccaagaa

SEQ ID NO: 13806 - DNA, 317 bp, Zea mays
gttttgagaaaccatctgcaattcagcagagaggaattgttcccttctgcaaggggcttgatgtcattcagcaagcacaatctggtacaggaaagacagcaaccttctgttctgggatcttgcagcagcttgactatggtctggttgaatgccaggccctggttcttgctcccacccgtgagcttgcacagcaaattgagaaagttatgcgcgcacttggtgactaccttggtgttaaagtccatgcatgcgttggaggaacatctgttcgtgaggaccaaaggattctcgccagtggtgtgcatgttgttgttggt

SEQ ID NO: 13807 - DNA, 119 bp, Zea mays
ggaataatgagtggtgctctgactgtgggtgatttggtcatggttaatggacttttattccagctttcattacctctgaacttccttgggagtgtgtatcgagaatctagacaaagcct

SEQ ID NO: 13808 - DNA, 320 bp, Zea mays
  unsure (1)..(320): unsure at all n locations
ctattctgggtaaaaaggttggtgtaccagtttactcagaaggaactgaagcaaaaccttcacaaatagccaaaaacggtttgaaggatgcaaaagtcaataaggctgatgtaattatagtggacacggctggaagactgcaggtagataaagcaatgatgaatgagttgaaagaagtaaaaaaagcagtgaatcctacagaagttcttcttgtggttgatgccatgactggccaagaagctgcagggttggtcagctccttcaatgatgagattggtataactggtgctatactngacaaactggatggtgactcaaga

SEQ ID NO: 13809 - DNA, 321 bp, Zea mays
cggacgcgtggggtccagacgccagacgccctctacttctctctagttagtgtacatttcaaactcttggccgccgcctcgctctctgttcgccgcgccccgccgcagaaatggcgctgccgaatcagcaggttgtggattaccccagcttcaagctcgtcatcgttggcgacggtggaactggcaaaaccacatttgtgaagaggcatcttactggcgagttctgagagaaatatgagcccacattggtgttgaagttccacctctcgaatttagcactaactgtggcaaaaatccgttctaatgcctggacactgctgg

SEQ ID NO: 13810 - DNA, 321 bp, Zea mays
cccacgcgtccgcaaggcctggccaagaagatttggtgttttggacctgagaccactggcccgaacatggttgtagatatgtgcaagggagtgcagtatctcaatgagatcaaggattctgttgtggctggtttccagtgggcatcaaaggagggtgcactggctgaggagaacatgcgtggaatttgctttgaggtatgtgatgtcgttcttcatgctgatgctatccacaggggtggtggtcaggtcattcccactgccaggagggtcatctatgcctctcagctcacggccaagccaaggctgctggagccagtctac

SEQ ID NO: 13811 - DNA, 312 bp, Zea mays
cccacgcgtccgcccacgcgtccgattccgccgcccgccccgcgaccccgaggaggaggcaagatgaagacgatccttgcgtcggagacgatggacatcccggaggacgtcacagtgacggtggcggccaagctggtgacggtggagggcccccgcgggaagctcacccggaacttcaagcacctcaacctcgacttccagctgcaggagggcggccgcaagctcaaggtggacgcatggttcggcacccgccgcaccatggccgccatccgcaccgccatctcccacgtccagaacctcatcaagggggtc

SEQ ID NO: 13812 - DNA, 311 bp, Zea mays
caagatgaaccacacgcacctgaggaagatgctcgacgacggcaaggaactggggatgccagacggtgttttgatgaatggcaaggggccatataggtataatgactcgctagtgccagatggcattgagcacgagactatcaaagttgagccaggaaaaacataccgtttccgtgtccacaatgttggtgtctccacaagcttgaacttacggattcagaatcacaacatggcccttgttgaaacagaaggttcatacacgatgaagcagaatttcactaatctcgacatccacgtgggccagtcttact

SEQ ID NO: 13813 - DNA, 311 bp, Zea mays
ctcctcgcagggcgcttcatggggaagagagtggtgtttctcaagcagctcaagtccggcctgctccttatctctgggcctttcaagctcaatggagtaccgatccgccgtgtgaaccagacctatgtcattgctacatcaaccaaagttgacatctctggtgttgatgtcgccaagtttgatgacaagtactttgccagggagaagaagcagaaggtgaagaagaccgagggcgagctttttgagacagaaaaggaggcatccaagtcactgcctgacttcaagaaggatgaccagaaggctgtggattc

SEQ ID NO: 13814 - DNA, 309 bp, Zea mays
gcgatgctgggcgcacccccgacacacccgccgtgcccgcccatcgcgtcatccttgccagcagatctcctgttttcagagcgatgcttgagaatgagatggaagagagtaggagtggcgtcatcaagatctatgatgtgtcttatgacatccttcgtgcttttgtccattacatgtacactgcagaagctcttctagacgaacagatggcatctgacctcttggtgttggctgagaagtacgaagtaaagcacctgaaggcatactgtgagaagttcatagcatccaaagtgaatgacgacaatgcta

SEQ ID NO: 13815 - DNA, 314 bp, Zea mays
cgagaatgctattgttgaagaagcagatggggagactttccttccaccagtgcaatacaaccttgtcaagattgatcagctaggaccatacgtcggtggcagggagcttgtagatattgttggtgtggttcagagcgtatctcccacactcagtgttaggagaaagattgacaacgagacaataccgaagcgtgacattgttgtagcagatgactctggcaaaactgttactatttctctctggaatgatcttgctactacgactggccaagagcttttggacatggttgacagttcgcctgttgttgcgataa

SEQ ID NO: 13816 - DNA, 312 bp, Zea mays
cccacgcgtccgcccacgcgtccgcttacctgcagtcaccactcccaagccagtacccacagtcctacgagcagtcgcacgcaagtgtcaagagacaaaacggtcgacatggctcgcacgcaatctgccgtagcggtcgccgtggtggccgcggtgctgctgctggcagcggcggcgacgacctcggaggccgccatcacctgcgggcaggtgagctccgccatcgcgccctgcctctcctacgcccgctgcacggggtccggcgcctccgcgtcctgctgtagcggcgtcaggaacctcaagagcgccgcc

SEQ ID NO: 13817 - DNA, 308 bp, Zea mays
cccgaccccgcgcgccgcgaccagcagccatgtcgtgctcccacctctccaccgcctggtcctcctcggcgctcgccagctgcgcctccaccacccgtcggcgctcccccccgcgctcgggtctcctggtgcggtgttccctccgtgagctccgcacccgcatcgactccgtcaggaacacgcagaagatcacggaggccatgaagctggtggccgccgccaaggtccggcgcgcgcaggaggccgtcgtctcctctcgccctttctcggaggcgctggtggaggtgctctacaacatgaaccaggag

SEQ ID NO: 13818 - DNA, 309 bp, Zea mays
ccggcaaaaacgtgcactggcgaggagtatcatgagcttatggaagagttcatggctgctgttaagcaaatctacggcgagaaagtcctcattcagtttgaggacttcgcgaatcataatgcttttaatttgcttgcaaaatatagcaagagccatcttgttttcaatgatgacatccagggcacagcatcagtggtccttgcaggtttgttagcagcactcaaggtggttggtaggaccttggcagagcacacttatttattccttggtgctggggaagctggaactggtattgcagaactcattgct

SEQ ID NO: 13819 - DNA, 311 bp, Zea mays
gagagatcaagtattccccgggtggcgtcaccgtcaagacagaggacaactcggtgtacagcgccgactacgtcatggtttctgcgagcctgggtgtcctgcaatccgatctcattcagttcaagcccaagctacctacatggaaggttagggcgatctaccaattcgacatggccgtgtacaccaagatcttcctcaagttccccaggaagttctggcctgacgggaaaggaagggagttcttcctctacgccagcagcaggagaggttactacggagtgtggcaggagttcgagaagcagtaccctgac

SEQ ID NO: 13820 - DNA, 309 bp, Zea mays
ctatagaccacagccagtcagccacatcactagctatctgtgcagaggcaatggcgtccaaggttgagctggtggtggaggtcaagtccccggctgacaagctgtgggcggcgctgcgtgactcgacggagctgttccccaagatcttccccgagcagtacaagagcatcgagaccgtcgagggcgacggcaagtcggccggcaccgtccgcctcctcaagtacaccgaggcggtgccgatgctgacgttcgccaaggagaagcttgagacggcggacgacgagaacaaggtggtgtcgtacagcgtgg

SEQ ID NO: 13821 - DNA, 306 bp, Zea mays
tgcaatgagaaaactcgcagacagcctgaggactgtgtggatgatgatgatgcagaggctggtgatgaacataaagcagtagatgacaatagaggaccatcaccatttgttgtgattccagaggctgtgcacaggaagcctacttttccagaaagcggtagaactttgatggatggattgatgttcttaatttacaagtatggggatgaaaggaccaaagcccgtgcaatgctgtgtgacatatatcaccatgcgatctctgatgagttttcagtggctcgcgacttgcttttaatgagtcatttg

SEQ ID NO: 13822 - DNA, 307 bp, Zea mays
ctctcggccccacgcctccatggtcaccgccacgacaaccccgccgcaatgctggcgagggctccccgccttggcccgggcacctccacccctctcctctcctcttcggccgcgtgccgtagcggctgcggctcccatctatcctctcaggcgccgcatcgctattactacaaccagaggaaggcgaggcacactggactgttcccccaggtgtacgctggaaaccgccggccctggcttcgactctctggggctctacgaggaggggtctaattctctgtcgcggtctcccctgtctaccttcttt

SEQ ID NO: 13823 - DNA, 306 bp, Zea mays
ctcgcgccgcctccgagacagccgccgcaaccatggccaccaccgccgccgcgtctaccgcgctcactggcgccactaccgctgcgcccaaggcgaggcgccgggcgcacctcctggccacccgccgcgccctcgccgcgcccatcaggtgctcagcggcgtcacccgccatgccgatggctcccccggccaccccgctccggccgtggggccccaccgagccccgcaagggtgctgacatcctcgtcgagtccctcgagcgctgcggcgtccgcgacgtcttcgcctaccccggcggcgcgtcca

SEQ ID NO: 13824 - DNA, 306 bp, Zea mays
ctcgtggcctccgcacactcaactctgtttgggcccaacatcttagcgaagaagtgaggagaaggttctacaagaactggtgcaagagcaagaagaaggctttcacaaagtatgctctcaaatatgaaaatgatgctggcaagaaggaaattcagctgcagcttgagaagatgaagaaatatgcttctgttatccgtgtcattgctcatacccagattaggaagatgaagggtttgaagcagaagaaggctcacctgatggagattcaggtcaatggtggtaccattgctgacaaggtggactacg

SEQ ID NO: 13825 - DNA, 305 bp, Zea mays
gaagctagcgcctccctagctctcgttgtcagcaatggccaccaccgccgcgtccagcctcctcaagtcgtccttcgcgggctcccggctcccttcggccacgcgcaccaccaccccgtcgtccgtggccgtggccaccccgcgcgccggcggccgccccatccgcgcgtccatctcctcctcccccaccccgccctacgacctgacgtccttccggttcagccccatcaaggagtccatcgtgtcccgcgagatgacccggcgctacatgacggacatgatcacccacgccgacaccgacgtgg

SEQ ID NO: 13826 - DNA, 304 bp, Zea mays
ggaccctgttccattttcccagaagtttcccagtgcagatcctttggcacttaaactgttagaaaaactattagcgtttgatccaaaggaccgtctgacagcagaagaggcattgcgtgatccatacttcaaaggtcttgccagggctgaaagagaaccatcctgtcaaccaatcagaaaagtggaatttgactttgagcacaaaagaatgtcaaaggaagagataagagagttgatattccgcgagatactggaatatcacccacaactgctgagtagctacattaatggcacagagaggaca

SEQ ID NO: 13827 - DNA, 305 bp, Zea mays
gagatggcacaagccatggcgtccatgaccggcctctcgcagggcgttctgcccagcaggcgcgccgccaacagggccaggacggccgccgtcgtcagggcgtccgccgaggcgcaggcgcaggcgggccgccgcgccgtgctcgggctggtggccactggcatcgtcggcggcgccttgtcgcaggcggtgcacgccgagaccgtcaagaccatcaagatcggagccccgccgccgccctccggatgactccccgggactctgaactctgaccaggcgagggacttcgacctccccttgaagga

SEQ ID NO: 13828 - DNA, 299 bp, Zea mays
caagaagcgccccgaggactccaaaacctgcccctactaccaccagctcgacgcgctctaccgcagcaaggcgctcgcgtcgtcgtcgtccggccccggtgcagctccggcgctgccgccgccgccgccgccgccgcagcgcccagatcagcaggctgctgctgcggcgccgcccgtcaccgtcttgctagccccggtgccactgtcccagacggggcctcacggcaacggaaacggcaacggcaatgggtgcgcgggcaggggcagctcggacaatggcggcggcggctccgggggca

SEQ ID NO: 13829 - DNA, 297 bp, Zea mays
cccgcctccactcccccctcccaggtgctgcccaggtaagtcggcggcggcgatgacaacgcgcttcaagaagaaccgcaagaagcgcggccacgtgtccgccgggcacggccgcatcggcaagcacaggaagcacccgggaggtcgcggtaacgccggtggcatgcaccaccaccgtatcctcttcgacaagtaccatccgggctacttcggcaaggttggcatgcgttacttccataagctccgcaacaagttctactgccccgcggtcaacatcgagcgcctctggtcgatggt

SEQ ID NO: 13830 - DNA, 297 bp, Zea mays
cggacgcgtggtcgctttccagttctcatacgagaatcacctacgagaaagcgtcgcagcgatggccaggcaatatgtcaggactgtggtggcatcggtgcagttggtggccatggcaatagctccttcccgtcttggtggacaggttgagatgaagcaaacacctggttctcctgaggcgcacacgcttgcgaggtggatcggcaggagctacaggtttcacactggagcagaactgcttcgcacagacacccaatgcacggatgcttccttgaaagcactgtggcagcactcgga

SEQ ID NO: 13831 - DNA, 296 bp, Zea mays
gcaattgatcttattagcgtgaatgctttggttgggatattctactttgttggatttggactgttctgtctggaatcattgctcagcatctgggtcatccagcaagtgtacatgtacttccgtggaagtggaaaggctgcagagatgaagcgtgatgcgacgaggggtgcaatgagagccgcattttaagtgtggtgtggtattttttttgtgatgacagtcctaggcccaagcgcatacttccggtggataggttgtgcaccgaacaaaaagcagatgtttcttccttggttgct

SEQ ID NO: 13832 - DNA, 296 bp, Zea mays
gttggcttctcctctccctccggttcgggttcgggttcgtgaggttctccggggttcggtttcgtgggtgggcggatcgagatggcggcgtcggatgttgagtaccgctgcttcgtcggctgcgtcgcgtggggcacggacgaccactccctccacaacgccttcagcacctacggcgaggtgctcgagtccaagatcatcctcgatcgggagacgcagaggtcccgctgcttcggcttcgtgaccttctccacggaggaggcgatgcgggacgccatctagggcatgatcggcaa

SEQ ID NO: 13833 - DNA, 306 bp, Zea mays
atgatctgctgccttatacgaaacatagctacctactactcaagtatccatccttattgagtacagtgttgatccatggactcggagagagttgtagcagcaaaggtggcagatgagactactaaaccggcaatccaagaagacggcgccgagagcaaggccgggatgactgatctgctgatgctgaccgacgagtcgcagctgcaggcgctggcgatgctgctgcggaacaacgaggagctcatgatgagccaggcgatcaagtcggagacggagctcattgagtacctcaagacggtgagcgac

SEQ ID NO: 13834 - DNA, 305 bp, Zea mays
gttggaatataagatcctgaaggagaagatcaaggagtacaacaagaaggacgccaaattctacagcaacatgttcgccaagatgacaaagtagcttttggggtggaggatgttgtggtgaagcgaagggattaaaaacaccgatttctgctgccgaagacttcgcccgttgcttaacttctcgcttttcgcatactttgtagtcaattagtgtgcacggatgcttggatatgtgaaactgaggaacatgtacttcgaggattattattggttctgaatttttatgttttctggttcttgttaaa

SEQ ID NO: 13835 - DNA, 302 bp, Zea mays
ctccctctccgaaatcaaggtagcatacaccgctgcagtttctagagccctctctgccactcgtgatcccactagtcacgatgcctgccctcgctaagcccgcctcccgcaccgccaagcccgccgcggctccgaagccgaagcctgccgccgccaagccgaaggggccaccgctggtgcctcccacccgccttacttcgagatgatcaaggaggctatcacggcgctaaaggagaggaccggctccagctcgcaagcgatcgccaagtatgtgggggacaagcacggcgcgtctctgccgg

SEQ ID NO: 13836 - DNA, 305 bp, Zea mays
gagaagccgccgtcgcagcaatcacagcagcccggagaacggccaggtccgacaagatgcagatcttcgtgaagacgctgacagggaagaccatcaccctcgaggtcgagagcagcgacaccatcgacaatgtcaaggccaagatccaggacaaggaagggatcccgccggaccagcagcggctgatctttgccgggaagcagctggaggatggccgcacccttgcggactataacatccaaaaggagtctacgctccacctcgtgctcaggctccgcggtggcatcattgagccctcgctgcag

SEQ ID NO: 13837 - DNA, 305 bp, Zea mays
gctacctactactcaagtatccatccttattgagtacagtgttgatccatggactcggaaggagttgtagcagcaaaggtggcagatgagactactaaaccggcaatccaagaagacggcgccgagagcaaggccgggatgactgatctgctgatgctgaccgacaagtcgcagctgcaggcgctggcgatgctgctgcggaacaacgaggagctcatgatgagccaggcgatcaagtcggagacggagcgcattgagtacctcaagacggtgagcgactgctacacgcggacgatgaagctcct

SEQ ID NO: 13838 - DNA, 305 bp, Zea mays
cccacgcgtccgctcaacacagcacaggcagctcgagagagagagagagagaaagatgtcgtggttcgggcaccaccaccacaaccagccggctcccccggcgtcgggccccaaccaggtgttcaagatcttctgccgcgccaacgagaactactgcctggccgtccgcgacggcgccgtcgtgctggccccggtcaaccccaaggacgaccaccagcactggtacaaggacatgcgcttcagcacccgggtcaaggacgaggaaggcatgccggcgttcgcgctcgtcaacaaggccacggggc

SEQ ID NO: 13839 - DNA, 300 bp, Zea mays
ggcgtgccacgggcgtgcggactctcctccgtggatctccgcgcagtcgtggcggcacggcgtgcgtccctgcttgcgccttcctcgtgaggccgtatacatggacgcgaaggacatactagggcttccgaagacccccttctcgtcctcccaggagaagaaatcgcggccgcccaaggagccgcagcgcaagcctgatggcgtctcgcgcgaggtctatgccctcaccggaggggtgggaatgcccccgctcatgccgaccattgaggcatcgcacctgaagaggcggcctgctgcgga

SEQ ID NO: 13840 - DNA, 299 bp, Zea mays
ggcgccgtccacaaggggatgccgcacaagttctaccacggccgcaccggtcgcgtctggaacgtcaccaagcgcgccatcggcgtgttagataaactagcaggtataccacacggatcccttttcgctagctcgctgatgggttgctgggcgcaggcagttgaaatcgtttgtgcacggcgcttacgtttagtgcggggacgtatcctctgttcgtgccattctaggaaatcgaatgtttagagtgacgacaatttgctggtgtgttgtttgatttggatctctgtagaagttgtgga

SEQ ID NO: 13841 - DNA, 299 bp, Zea mays
gataagatccttccatttagtagcacctcgtcacggacaccatgcactacaatccctccgacctgtcgtcctgggtcgagagcatgctgtccgagctcaacgcgcccccgccgctgctcccgcccgtgacgccgttcccaaggctcgcgtccacctcgtccaccgtcacaagtggtgtcgccgccggtgccggctacttcgatctcccgcccgccgtcgactcgtccagcagtacctacgctctaaagtcgatcccctcgccggtggtggcggcgtcggctgacccgtcccccgactcg

SEQ ID NO: 13842 - DNA, 299 bp, Zea mays
ccctccctcagccgcgtcgcgtcgcatcctacgatccaaagctctctctgctcgcagccatggcgaagaactacccgaccgtgagcgccgagtacagcgaggctgtggagaaggccaggcgcaagctccgagccctcatcgccgagaagagctgcgccccgctcatgctccgcctcgcgtggcactccgcggggacgttcgacgtgtcgtcgaggaccggcggtccattcggcacgatgaagcatcagtcggaattggctcacggcgctaacgcggggctggacatcgcggtgcggctg

SEQ ID NO: 13843 - DNA, 298 bp, Zea mays
cggtgctcatgcatgtacggggcatggttttggactcgtgtgtctgcagttccaggtgcgcgctcaggtagccggcggcagcagcagtagcagcatcggagccgatggtgggaagatgatggtttccaaggagccggcggcgtcggccacgtcgtcgggaccgtggaagatcgacttctccggcgagaagccgccgacgccgctgctggacaccgtgaactacccgctccacatgaagaacctgtcgatcttggagctggagcagctggcggcggagtccgcgcggaggtcgtgcaca

SEQ ID NO: 13844 - DNA, 288 bp, Zea mays
ctcctctctcgcatccgcagcctttcgagctctactccaccccctcgatctcgaagcgcacagcagcagtcaggcggccatggacgcgagcgcaccggagccggcgggaaggcgaagaagggcgcggccgggcgcaaggccggcgggccgaggaagaagtcggtgacgaggtccgtcaaggccgggctgcagtttcccgtcggccgcatcgggcggtacctgaagaagggccggtacgcgcacgcgtcggcacgggcgcccccgtctacctggccgccgtcctcgagt

SEQ ID NO: 13845 - DNA, 295 bp, Zea mays
cggacgcgtgggcggcgatgacaacgcgcttcaagaagaaccgcaagaagcgcggccacgtgtccgccgggcacggccgcatcggcaagcacaggaagcacccgggcggtcgcggtaacgccggtggcatgcaccaccaccgtatcctcttcgacaagtaccatccgggctacttcggcaatgttggcatgcgttacttccataagctccgcaacaagttctactgccccgcggtcaacatcgagcgcctctggtcgatggtgcccaccgacaaggcggcggaggccggcggcga

SEQ ID NO: 13846 - DNA, 295 bp, Zea mays
cgacgttcctgatgtacgtggaaggacagagattctaaaagtgcatggtagcaacaagaaatttgattctgatgtttctcttgatgtcatagcaatgagaacacctgggttcagcggagcagacttggcaaaccttctgaatgaagcagccattctggctggaagacggggaaggacagcaatttcttcaaaagagattgatgattctattgacagaattgtagctggtatggaagggaccgtgatgacagacgggaagagcaaaagtcttgttgcttaccatgaagttgggcat

SEQ ID NO: 13847 - DNA, 298 bp, Zea mays
ggcggcggcatatggcgctcagcaaggagcaaaaactcacaattcctgatcaacaacacacaacaagcagcgaacagcaggtggcgctggatgccgagctccagctgtggaaccacactttcggctacgtcaagtccatggcgctcaaggccgcgctcgacctcggcatacccgatgccatccaccatcacggcggctcggccaacatcccacagatagtcaccaggatcacgctccacccgtccaagacaccatgcctgcggcgcctcatgcgcgtgctcagcctcagcggcgtctt

SEQ ID NO: 13848 - DNA, 322 bp, Zea mays
gattagagggagcgccctgcccaagcaaagagaaaccgcggcgcgagaagatggaggaagggcagacgggcgagcaggatgagagagatcatcagcatccacatcggccaggccgggatccaggtcggcaacgcctgctgggagctctattgcctcgagcacggcatcgagcccgatggcaccatgcccagtgataccacggttggcgtcgcacatgatgccttcaacacgttcttcagcgagaccggttctggcaagcatgtgccgagggccatcttcgtcgaccttgagcccactgtcattgatgaggttcgcactggct

SEQ ID NO: 13849 - DNA, 320 bp, Zea mays
gcagatgatttgctgctgcaacaagatggatgcaaccactcccaaatactccaaggcacgttatgatgagattgtgaaggaagtctcatcttacctcaagaaagttgggtacaaccctgataagattgcatttgttcccatctctggttttgagggtgacaacatgattgagaggtccaccaaccttgactggtacaaaggcccaaccctgcttgaggctcttgatcagatcaccgagcccaagagaccctcagacaagcccctgcgtctccccctccaggatgtgtacaagattggtggtattggaactgtgccagttg

SEQ ID NO: 13850 - DNA, 319 bp, Zea mays
cgtcccgctccacgacggctccatccgcaccgcgctcgacaccggatgcggggtggcgagctggggcgcgtacctgctgtcgcgggacatcctggccatgtcgttcgcgccgcgggactctcacgaggcgcaggtgcagttcgcgctggagcgcgcgtgccggccatgatcggcgtgctcgcgtccaaccgcctcacctacccggcccgcgcgttcgacatggcgcactgctcccgctgcctcatcccctggcaactctacgatggactgtagctgatcgaggtcgaccgtgtgctgcgccccggagggtactggatct

SEQ ID NO: 13851 - DNA, 318 bp, Zea mays
ccgtgacttcatcaagaacatgatcactggtacctcccaggctgactgtgctgtccttatcattgactccaccactggtggttttgaggctggtatctccaaggatggccagacccgtgaacatgctctccttgcgttcacccttggagtgaagcagatgatttgctgctgcaacaagatggatgcaaccactcccaaatactccaaggcacgttatgaagagattgtgaaggaagtctcatcctacctcaagaaagttgggtacaaccctgataagattgcctttgttcccatttctggttttgagggtgacaacat

SEQ ID NO: 13852 - DNA, 317 bp, Zea mays
cccacaccccccgagctcagcttagctccactccagctccaatcacagtcgtgaccagagcgcgagagctagctagagggccgtgaaaatgccgatcaataggatcgccctggggagccaccaggaggtgtaccacccgggcgccctcaaggcggcgttcgctgagttcatctccaccctcatcttcgtcttcgccggccagggctccggcatggccttcagcaagctgaccggcggcggcccgacgaccccggcgggcctgatcgcggcggcggtggcgcacgcgttcgcgctgttcgtggcggtgtctgtgggcg

SEQ ID NO: 13853 - DNA, 317 bp, Zea mays
caactcgccgacccagccgatcccaacgcacactgcacccagtgcggcggccgccggcaatggcggtgcacggcggcgactacttgcggcggttcgttgcggagacgcaatggtacaacgacgtcgtcctcaacgccgtggcgccaggcgactggtggcgcggcctgccgcacccggtgcagtcgtggatgcgcaactgtgtcggcggttacctcctctacttcatctctggtttcctctggtgtttcgtcatctactactggaagcgccacgcctacatccccaaagatgccatccccacaaatgaagctatgaag

SEQ ID NO: 13854 - DNA, 318 bp, Zea mays
cggcaaggacatccggttcgtgccgttcggggcggggcgcaagatctgcgcgggggccacgttcgccatcgccaccgtcgagatcatgctcgcgaacctcatctaccatttcgactgggagatgcccgccgagatggagcgcaccggggccaaggtggacatgtccgaccagttcgggatgacgcttcgccggacgcagaaactttaccttgttcctagaattcccaaatgagtgtcgtcgtcgtcgtacaaatggcatgcatcttattgtaagttttggagtttgttgttgcacacgcaacgatggaccgcctgtga

SEQ ID NO: 13855 - DNA, 317 bp, Zea mays
gttgcccccacgcgtcgaggagagcactggccatggtggccatgttcggcactgctgccttgttcgcatgtccgctcggcacacagtgcggtacgaggccggcggcgcgctctgccccgactgcctctgctgcagccaatggggctattgcggctccacccccgactactgtaccgacggctgccagagccagtgcatcggcagcggctgcggcggcggcggcggcggtacccctgcgactcccccgagcggcccggtgtccgacatcatctccgagtcgctgttcaacgagatgctgctgcaccgcaacgacgtgg

SEQ ID NO: 13856 - DNA, 322 bp, Zea mays
ggatgttccaaacagcttgctgaagcacatcattcttgagaacaatgaaaacaagccagtgacgaacagcagagatacacatgaggtgaagcttgagcaaggccttcaagtgcttaagattttcaaggatcatgtctgcaagacatccatactggatgacttcggcttttatgataatcgtgagaagatgatgcaagagaggaaagccaaacagcagcagtcgctgaaaaaggtcattgatgtgaagctgcccagcgtcaccgacatggagagaagtcctaaaggggagactggatcaacagaactcactggggttgggact

SEQ ID NO: 13857 - DNA, 316 bp, Zea mays
cccacgcgtccgaaaccgctgaggaggttgctgcattggttcgatctcttcctgtagaagagcagccaaagcaaattattgtgacaaggaagggcatgttggatcccttggaggtccatctacttgacttccctaacattgttattaagggcagcgagctgcagcttcctttccaggcttgcttgaagattgagaagtttggtgatcttatactgaaggcaactgaaccacaaatggttctttataatatatatgatgattggttgaaaagtatatcatcatacacagcattctcccgcattgtgcttattctacg

SEQ ID NO: 13858 - DNA, 313 bp, Zea mays
gtcttgtgttgttcggagcgggcagcagcacacagccccatcccaatcctagtcgatcttcttcccctcctcaaggaagaaaagaagctgaaccatggggaagagaaagtcagctgctaagccacctcctaagaagcggatggacaagcttgacactgtcttttcctgcccattctgcaaccacgggagtagtgttgagtgccgaattgacatgaagaatctgattggcgaacatcttgtagaatctgtcaggaaaacttcagcacaactgttaatgcactcactgagcctattgatatatatagtgaatgga

SEQ ID NO: 13859 - DNA, 313 bp, Zea mays
gagagatcaagtattccccgggtggcgtcaccgtcaagacagaggacaactcggtgtacagcgcagactacgtcatggtttctgcgagcctgggtgtcctgcaatccgatctcattcagttcaagcccaagctacctacatggaaggttagggcgatctaccaattcgacatggccgtgtacaccaagatcttcctcaagttccccaggaagttctggcctgatgggaaaggaagggagttcttcctctacgccagcagcaggagaggttactacggagtgtggcaggagttcgagaagcagtaccctgacgc

SEQ ID NO: 13860 - DNA, 310 bp, Zea mays
cggacgcgtgggttccgcgccgccacccctacaggtaaggaagatgaggagggcaggatgtcgcaccgtaagttcgagcacccgaggcacggctccctcggcttccatcccaggaagcgctcctcccgtcaccgcggcaaggtgaagtcattccctagggatgaccccaagaagccttgccatctcactgccttccttggctacaaggctggcatgactcacattgtccgtgaggttgagaagccaggatccaaactccataagaaggaaacttgtgaggcctttaccatcattgaaacccctcctcttg

SEQ ID NO: 13861 - DNA, 308 bp, Zea mays
tgaaattttaaaacccataatggggaagggtcttatacctgctgaccttgatacctggaagcaaaggagaaaagttataacacctgggttccatgccttattcatagaagctatggtgaggacatttacaaaatgttcagagagaacaatatcaaagcttgaggagcttactgaaagtgaaggccgtgaacaaaattcgactattgtggaccttgaagctgagttctccaatttggcacttgatatcattggattgggtgtgttcaattttgattttgactcggttactaaggaatctcctgtaataa

SEQ ID NO: 13862 - DNA, 309 bp, Zea mays
cccacgcgtccgcgcgaaactattgagaaaattccattccaacgacatcgaaggagcctgcgaagcgagcgagagcctataatggcggacggaggcgagctgcagctgctgggctcatggtacagcccctacgtgatccgcgccaaggtggcgctgggactcaaggggctcagctacgagttcgtcgaggaggacctctcccgcaagagcgacctgctgctgaagctcaacccggtgcacaggaaggtgcccgtgctggtccacggcggccgccccgtgtgcgagtcgctcgtcatcctgcagtacgtc

SEQ ID NO: 13863 - DNA, 309 bp, Zea mays
cggaccgtgggcgctgccgtctcgcctctcacatacagcagcagccgccaactctgcagtacccccatcgccaacgattcctccgccgcagaccgtgggacgaggccgagacggagatcctccgcgacgtcgagcccatcgtgaatatcgtcaaggacatcatccactcccgcaggtataaaaatggtgaatttttaagcccagatgatgaaaaggttgtaagagaaaagcttctttctcatcatcctcgtgcagaagaaaagattggttgtgggcttgatggtataatggttgacaggcaccctgagt

SEQ ID NO: 13864 - DNA, 184 bp, Zea mays
gccgggaaagagcttacgctgctggggttatgggcgagcccgttcgtgctccgggcgcgcatcgcgctcagcctcaaaggcctcacctacgcttactccgaggagaacctcgacgacaagagcgagtttctcctcagctccaaccccgtgctcaagaaggtgcccgtgctcatccaccacggca

SEQ ID NO: 13865 - DNA, 400 bp, Zea mays
cccacgcgtccggccaaaccatcctcctctccgccgcccgccgcccgccgcagcagcacccaccgggcaagatgaagacgatcctggcgtcggagacgatggacatcccggagggcgtcacggtcacggtggccgccaagctggtcacggtggagggcccccgcggcaagctcacccgcaacttcaagcacctcaacctcgacttccagctgcaggaggccggccgcaagctcaaggtggacgcctggttcggcacccgccgcaccatggccgccatccgcaccgccatctcccacgtccagaacctcatcaagggggtcaccaagggctaccgctacaagatgaggttcgtctacgcccacttccccatcaacgcctccatcaccaacagcaacaccgc

SEQ ID NO: 13866 - DNA, 267 bp, Zea mays
gtaaatttggttccaattgcaaatatcaccatcctaagcaagatggatctgtgcagtctgttatattaaacaacaatggattccctctacgtccgggtgagaaagaatgctcctactatatgaagactgggcaatgcaagtttggttctacatgtaaatttcatcatccagaatttggtggtattccggtaacccctggcatatatccagcattacaatcagcatctgtgccctccccccttacatatgcttcaaattggcaaatgg

SEQ ID NO: 13867 - DNA, 397 bp, Zea mays
gcttccgaccagccttgcttcgcccgttccagcgacgcactactgcggcgaaatcccgctcccgcgttccccatcctccggccgcctcgcttcggcctccctccggaaggtgtcttaaatcatggcgactggccaacttttctcaaaaactacccaagcattattctacaattacaagcaacttcccatccaacggatgcttgattttgacttcctctgtgggagagaaacaccttctgttgctggaataatcaatcctggttctgatggttttcagaaacttttctttggacaagaggaaattgctattccggttcatcccacagttgaagctgcatgcagtgcacacccaacagctgatgtatttatcaactttgcatccttccggagtgctgct

SEQ ID NO: 13868 - DNA, 394 bp, Zea mays
ccacgcgtccggttgcaggaacacatgctgatgatattggatatcaatgtggtggctggacgatagcatggcatggagacagtggaaaaataactcttggtacgagcatattggaggccatacaagaattagtgggagtgcaaactgaagttgtgtatgagaaatgcccaaccgaagctatgattgaaactggggggttttcctatgcggtggtggttgttggagaggttccatatgccgaatggacaggagatagaactgaccttagtattccgtttaatggctctgaccttatcatccgtgttgcaagtaaaatccctaccctagtgattgttatatctggaaggccattaattattgagtcacaagttttggacaagatagaagctctagt

SEQ ID NO: 13869 - DNA, 212 bp, Zea mays
actgattcagaatgggagtttaagagggatccgtcaagtgaaattttcatgtggttgcctacgactttggtatcaagcataatattttgagacgattgacatcatatggatgcaaaataacagttgttccagcaaattggcctgcttcagaggtactcaatttgaagcctaatggtgttctttttagcaatggtcctggggatccagctgca

SEQ ID NO: 13870 - DNA, 400 bp, Zea mays
gttacctcatctaagaatggtgccacggtaccactggtccaccgtcacggcccgtgttctccggtcatgtccaaagagaagccttcgcatgccgaaacactcggccgagaccaactacgtgccgccaacatccacgcaaagctttcttctcctcgaaacagtagcgccaaagagctccagcagtcgggcgtgactatcccgactagctccggctactccctgggcaccccagagtacgtgatcaccgtcagcctgggcacgcccgccgtgacccaggtcatgagcatcgacacaggcagcgacgtctcgtgggtgcagtgcgctccgtgtgctgcgcagtcgtgctcctcgcagaaggacaagctgttcgatccggccaagtccgcgacgtactccgcct

SEQ ID NO: 13871 - DNA, 392 bp, Zea mays
cccacgcgtccggtgccggcctcgcgctggaggagaaggagaaccggagatgcagggccagtatgcacgcggcggcgtcggccggagaggaagctgggggagggctcgccaagacgctgcagctgggggcgcttttcgggctctggtacctcttcaacatctacttcaacatctacaacaagcaggttctgaaggttttgccataccctataaacatcacaacggtgcagtttgctgttggaagtgccattgctttgttcatgtggatcactggtatccataaaaggccaaagatttcgggtgcccagcttttcgctatccttcctctagctattgtccataccatgggcaatcttttcacaaacatgagccttggaaaggttgcagtgtca

SEQ ID NO: 13872 - DNA, 394 bp, Zea mays
caactaggatcgatctctcgacagcaaatagctagcaatggagaagtacaccaaagccctagcgtcattgctcaccatgctggtgctggcacctctcctcgccatggccaccgacccagaccccctgcaggacttctgcgtcgccgacctcaacggcaagccatcagtgaacgggtacccatgccagccgccgtcgtcggccggcgaccagttcctcttctcgaccaagatcgccacgggaggcgaccccctggccaacccgaacggctccaacgtgacggagctggacgtttccgagtggcccggcgtgaacacgctgggcgtgtccatgaaccgcgtcgacttcgcgcccggcggcaccaacccgccccacgtccacccgcgctgcaccgag

SEQ ID NO: 13873 - DNA, 390 bp, Zea mays
gtgctatccgctcaggtttatctgctcgaggaatggcgtcggtgcaggtctccggcgcgggggtcggtgccgcggccttctctgtgaaggggaaggcctccaccggtgcgctccggcttcgctctacgttgaccttcggcgaggtctgcccggcgcggcgggcgttccgcggcctcgtcgtcagggccgctaccgtcgtcgcccccaagtatacaacacttaagcccttggctgatagagtgcttgtaaagattaactcttccgagaagaagacaactggtggaatcttgctccctacgactgctcagtccagacctcaaggtggcgaggtagttgctgttggagaaggaaggataattggggataagaaagttgatgtcagcattcagg

SEQ ID NO: 13874 - DNA, 392 bp, Zea mays
ctactacagctcctcatctcaagtgtgtagacgagagagagagactgagagagcgccatggccagcctccaagtgactcctacttcatcgttcactcagtggaacgagctgaagttcgaaggcctgtacctgttccacacacccctgggctcaggcgccaaccaagctcaggtcatagacaacaaggcgccgattggcatcggtgccaccgtagttaacaactgggcagtgtacgacgggccagggccgaacgcaaagctcgttgcccgtgcacagggcttgcatatccaagccggcaactgggtcaactccttcagcctagtgttcgtggatcaaaggttcagtgggtccacgcttgaagtgaccgggatagtagttgaatccggggagtg

SEQ ID NO: 13875 - DNA, 129 bp, Zea mays
cccacgcgtccgcggctccccggtccgcctctttctccagcgtggcgcgggggctccgctccctccgcctggccccgccccgccgccgccgcggagacctcgccaggccgcgcgccgcgggcgaggccg

SEQ ID NO: 13876 - DNA, 393 bp, Zea mays
gattgtgggagttcctccaccaggcagtgaccatctgcctgaacatccagaaggagtacggcaagctcctcaaggacttcaacaagggcctggtgaacaacaaggacatcgagaacctcaaggtccaggtggagaagtttgccgactccttcgacatgcctgggttcacgcttgagagcatgaaatacaaggagtagatatgcctctttcatgcgcggcaaggtcctcctgtaccgatgtctttccttgtggtggcgcagggtgccatggcactgcattgccgccacacttacgatgatgatgatgggttatggattttgtctacaatgtcagcaggataggctcacaattgccccctgccctccggtttggtcgcctctcaggttttcattt

SEQ ID NO: 13877 - DNA, 390 bp, Zea mays
cggacgcgtggcgtgacgcgtggggtctgctcgcatttcctcccaatccatcccgcctccaaacccgaactccaagtcgccccgcatcgatggcgcccaaggccgctaagaagcccgcggcgaagaagccggcggaggaggagcccgctgccgagaaggcgccggccgggaagaagcccaaggcggagaagcgtgtcccagcaggcaagtccgccggcaaggagggcggcgagggaaagaggggccggaagaagggcaagaagagcgtggagacctacaagatctacatcttcaaggtgctgaagcaggtgcacccggacatcggcatctcctctaaggccatgtccatcatgaactccttcatcaacgacatcttcgagaagctcgccg

SEQ ID NO: 13878 - DNA, 388 bp, Zea mays
cgagtcatcaagctagctagcccggagcacgcctagacacgccagcagcaatggcggctcagctggccgtcgcgtttctcgccttgttgtcctcctctgccttcttggccgtgtctggccagaagttcaacgccatcttcagcttcggcgactccatgtccgacaccggcaacctgtgcgtgaacggtccccccgccggcctgactctcacccagccgccctacggcgagaccttctttggccgcgccacctgccgctgctccgacggccgcctcgtcgtcgacttcctggccgagaagttcgggctgccgctgctgaagccgtcgaagcagggcggctcagacttcaagcagggcgccaacatggcgatcattggcgcgaccaccat

SEQ ID NO: 13879 - DNA, 387 bp, Zea mays
ggcccacgcccaccgccccatccaccccgaaaccctagcggatcgtcgccatggccgcggccgcgctccttcgccgcatccccgccgcggggccccggccacggccttcatggcggcgcgcccggtctccgattccacggcggcgctcaccatcgagacatctgtccctttcacctcccacctcgtcgacccgccctcgcgcgatgtcaccaccacccccgccgagctcgtcaccttcttccgcgacatgtccctcatgcgccgcatggagatcgctgccgactccctctataaggccaagctcatccgcgggttctgccacctctacgacggccaggaggccgtcgccgtaacgatggaggccgccatcacccgctccgattccat

SEQ ID NO: 13880 - DNA, 385 bp, Zea mays
cccacgcgtccgaagatgtcgaagcgaggacgtggaggttctgctggtaacaagttccggatgtcactgggtctaccagtggcagccactgtgaactgtgctgataacactggagccaagaacctttacatcatttctgtgaagggaatcaaggggcgccttaacaggcttccttctgcctgtgttggtgacatggttatggcaactgtgaagaagggaaagcctgaccttaggaagaaggtgatgccagctgtcattgtgaggcagcgcaagccatggcgccgaaaggatggtgtctacatgtactttgaagacaatgctggagtgattgtgaacccaaagggagagatgaaaggctctgccatcactggacccatcggaaagg

SEQ ID NO: 13881 - DNA, 375 bp, Zea mays
atagaatcttgggtcagccttcgctgatccgtgagtcatcaatgtcaaagttcccactaccaatgtctaggctactcaaacctagttcagcatctttgtcggagggagcaggctttgagaaagttatcctgcacccttcactaaagcggaggattgaacatcttgcacgagcaactgcaaatacgaagtctcatggtgcaccattccgcaacatgctgttctatggacctcctggaactggcaaaactttagtagccagggagatggctcgcaaatctggcctggactatgccatgatgacgggaggagatgttgcacccttaggatcagaggctgttaccaagatccatcaaatatttgactgggctaagaagt

SEQ ID NO: 13882 - DNA, 157 bp, Zea mays
cttggacttaactgggtatgatctgaatgttgatttgctagatgtccatgcagacaaaagcacatttcatcgttttgacaaattcaatctaaaatacaatccatgtggccaaagtaggctcagagaaattttcctcaaacaagataatcttattcaa

SEQ ID NO: 13883 - DNA, 321 bp, Zea mays
agattggggagttcctccaccaggcagtgaccatctgcctgaatatccagaaggagtacggcaagctcctcaaggacttcaacaagggcctggtgaacaacaaggacatcgagaacctcaaggtccaggtggagaagtttgccgactccttcgacatgcctgggttcacgcttgagagcatgaaatacaaggagtagatatgcctctttcatgcgcggcaaggtcctcctgtaccgatgtctttccttgtggtggcgcagggtgccatggcactgcattgccgccacacttacgatgatgatgatgggttatggattttgt

SEQ ID NO: 13884 - DNA, 324 bp, Zea mays
caccttccctggtgaagctgatgaagcgcctgatactgtcactggagacattgtattcgtcctccagcagaaggatcactccaaattcaaaagaaagggtgaagatctcttctatgagcacaccttgtctctgaccgaagcactatgtgggttccaatttgttcttacacatctggacaacaggcagcttctcatcaaatcagaccctggtgaagttgttaaacctgaccaattcaaggcgattaatgatgaggggatgccaatttaccagaggcctttcatgaaggggaagctgtacatccatttcacggtggagttccctga

SEQ ID NO: 13885 - DNA, 321 bp, Zea mays
gcgtaaacgatgcggagaagctcgtgacgatcggaggccatgtgctgcgcgaaggtgagtggctgtcgctgaatgggtcgactggtgaggtgatccttggaaagcagccgctttccccaccagcccttagtggcgatctgggaactttcatggcctgggtggatgatgttagaaagctcaaggtcctggctaacgccgatacccctgatgatgcattgactgcgcgaaacaatggggcacaaggaattggattatgccggacagagcacatgttctttgcttcagacgagaggattaaggctgtcaggcagatgattatgg

SEQ ID NO: 13886 - DNA, 321 bp, Zea mays
aggacatggactcgctggggttgtctctgttccggccagacttcatcatcacttcattttacagggtctttggggctgaaccaacgggttttggatgcttgctgatcaagaaatcggtaatggcatgcttgcagagcccgagcggtgggacgggggcagggatggtgcggattgtgccggtcttcccacagtatctcagtgattcagttgatgggtttgacggtgtcctggatgggctggaggatgataatatcattcaaattgaggaggggtcagtgttgaacagtcaccatgcaccccatttgcctgcattctcaggcg

SEQ ID NO: 13887 - DNA, 315 bp, Zea mays
aatctcacctccaaccatgggtaaagagaagtcccacatcaacattgtggttattggccatgtcgactctggcaagtcgaccaccacaggacaccttatctacaagcttggaggcattgacaagcgtgtgatcgagaggtttgagaaggaggctgctgaaatgaacaagcggtccttcaagtacgcgtgggtgctcgacaagctcaaggctgagcgtgagagaggtatcaccattgatattgctctgtggaagtttgagaccaccaagtactactgcacggtcattgatgccctggacaccgtgacttcatcaag

SEQ ID NO: 13888 - DNA, 313 bp, Zea mays
cacaccccctctccagctccgttggagctccggacagcagcaggcgcggggcggtcacgtagaggggatcggaaggatgacggcatcggtttccagggccatctgcgtacagaagccgggctcaaaatgcaccagggacagggaagcgacctccttcgcccgccgatcggtcgcagcgccgaggcccccgcacgccaaagccgccggcgtcatccgctccgactccggcgcgggacggggccagcattgctcgccgctgagggccgtcgttgacgccgcgccgatacagacgaccagaaagagggtgttccac

SEQ ID NO: 13889 - DNA, 321 bp, Zea mays
ctacgagtgcttcgctaccagccagccagcacactctacgagtcgccatcttccactccaccgaggcagctccaagccatggccatggagaaggccgcctccttcctctcctccctcttaggcggcggcggcggggagccggcggcgactgtgaaatctatcttcatataccctatcaagtcctgcaggggtcttgccgtgtcacaggcgcccatcacctccactgggttccggtgggatcggcagtgggtggtggtgaacgccaaagggcgagcatacacccagagggtggagcccaagcttgctctggtccaggtggag

SEQ ID NO: 13890 - DNA, 320 bp, Zea mays
ctcccgcccaccgccgtcgccgcccagccgcagtaaggaggaaggagcaggaagatgccggcggggcacgggctgcggtcgcggacccgcgacctgttcgcgcggcccttccgcaagaacgggtacatcccgctcaccacgtacctgcgcacctacaagatcggcgactacgtcgacgtcaaggttaacggcgccgtgcacaagggcatgccgcacaagttctaccacggccgcaccgggagcgtctggaacgtcaccaagcgcgccattggcgtcgagatcaacaagcaggttaacggtcgcatcatcaggaagcggat

SEQ ID NO: 13891 - DNA, 316 bp, Zea mays
gaaagttatgcgcgcacttggtgactaccttggtgttaaagtccatgcatgcgttggaggaacatctgttcgtgaggaccaaaggattctcgccagtggtgtgcatgttgttgttggtacacctggtcgtgtgtttgacatgctgcgtagacagtccctccgccctgataacatcaagatgtttgttcttgatgaagctgatgaaatgctttctcgtggtttcaaggatcagatttatgacatcttccagcttctgccatccaagattcaggttggagtcttctctgctaccatgccacctgaagcccttgagatt

SEQ ID NO: 13892 - DNA, 317 bp, Zea mays
cggccgtcgatgagtatgagaaatatcatggatactatggagggaaggaggaagcaaggaagtccaactatactgatatggttaataaatactatgatcttgccactagcttctatgagtatggttggggtgaatccttccactttgctcacagatggaatggagaatccttacgtgaaagcatcaagcgacatgagcattttcttgccctgcaacttggtttgaaaccaggaatgaaggttttagatgtgggctgtggaataggtggaccactgagagaaattgcaagatttagctcaacttcagttaccggattg

SEQ ID NO: 13893 - DNA, 318 bp, Zea mays
caccaataaatttgatagttgaagacaagttccatcgtgctactcctggtggtactgggggtgtgaagaccataggaaattatgcttcggtgttgatggcacagaaaattgcaaaggaaaagggttattctgatgtcctctacttggacgctgttcacaagaagtaccttgaagaagtttcttcatgcaatgtttttgttgtcaaggacaatgttatttctaccccagcaataaaaggaacaatattacctggtatcacaaggaaaagtataattgacgttgctttgagtaaaggcttccaggttgaggagcggcttg

SEQ ID NO: 13894 - DNA, 318 bp, Zea mays
atttccccatctcccagatccaattcgcgagttctccctcctctgccgccatggcgctctctgtggagaagacctcgtctggacgggagtacaaggtcaaggatctctcgcaggcggacttcggccgcctcgagattgagctggccgaggtcgaaatgcccggcctcatggcgtgccgcgccgagttcggcccgtccaagcccttcgccggcgctaggatctcggggtctctccacatgaccatccagaccgccgtcctcatcgagaccctcaccgcgctcggcgccgaggtccgctggtgctcctgcaacatcttct

SEQ ID NO: 13895 - DNA, 318 bp, Zea mays
cttttcttctagccgccgccgcaaccgcttgctagcgctctgcgctctcatcctcgcgtccgtggaaggtcgtctcgacatggcctccgagacggagacgttcgccttccaggcggagatcaaccagctgctatcgctcatcatcaacaccttctactccaacaaggagatcttccttagggagctcatttcaaactcctccgatgccttggataagatcaggttcgagagtttgacggacaagagcaagctggatgcccagccggagctgttcatccacatcgtccctgacaaggccaacaatactctgacaatcat

SEQ ID NO: 13896 - DNA, 316 bp, Zea mays
cccacgcgtccgcggacgcgtggggccaactctcgcgtggccaaggacatgggcgcgggcgactacgagtacgccatcgcgttccaggagcgcgtcaagatccccgacgacaagatggtgtactacgaggagcgcgcggagatgtacgtcggcgacgacgtctctcccgacttctacggctgggtgttccccaagtgcgaccacgtcgccgtcggcaccggcaccgtcacgcacaaggccgacatcaagaagtttcaggccgccacgcgcctccgcgccaaggacaagattgagggcggcaagatcatccgcgtcg

SEQ ID NO: 13897 - DNA, 315 bp, Zea mays
agcttagctccactccagctccaatcacagtcgtgaccagagcgcgagagctagctagagggccgtgaaaatgccgatcaataggatcgccctggggagccaccaggaggtgtaccacccgggcgccctcaaggcggcgttcgctgagttcatctccaccctcatcttcgtcttcgccggccagggctccggcatggccttcagcaagctgaccggcggcggcccgacgaccccggcgggcctgatcgcggcggcggtggcgcacgcgttcgcgctgttcgtggcggtgtctgtgggcgcgaacatctccggcgg

SEQ ID NO: 13898 - DNA, 306 bp, Zea mays
acgagcgacgaagcgcgcagaaagagaagaacctcggagctgagatggcacaagccatggccgtcgatgaccggcctctcgcagggcgtcctgcccagcaggcgcgccgacagcagaaccaggacggccgtcgtcatcgtcaggccgtccgctgaaggcgacgccgttgcgcaagcgggccagcgcggcgtgatcggggcggtgggcactggcatcgtcgggcggggcttgtctgaggcggcccgcgccgagaacgtcaagagcatcaaggttggaagcccgcggcggcctcccgttgaaccccgg

SEQ ID NO: 13899 - DNA, 311 bp, Zea mays
cccacgcgtccgcccacgcgtccgctgctttggagacatgggacaacgggaagccatatgagcaagcagcccagattgaagtacccatggtggcccgtcttatgcgttactatgctggttgggctgataagatccatgggctcattgtgccggctgatggcccacaccatgtacagatcttgcatgagcccattggagttgcaggtcagatcatcccatggaactttcctcttctgatgtttgcctggaaagttggccctgctttggcatgtggaaatactctcgtgctcaagactgctgaacaaacccct

SEQ ID NO: 13900 - DNA, 311 bp, Zea mays
caatggtcaaaagcagcacaaatgcttagtgggattgacttggattcaggaatcaggatgcttgatgacaccaacaaattatccaagtgtgttcaaattgcacgactctatttagaggatgatgatgcagtgaatgctgaggcttttataaacaaggcttcatttttggtcaccaacagccatcaggaggttctaaacttacagtacaaggtctgttatgcaaggattttggatctgaaaagaagatttctggaagctgcacttcgatattatgacatttctcaaattgaacaacgcaagattggagacga

SEQ ID NO: 13901 - DNA, 311 bp, Zea mays
cggacgcgtgggcgctcaccgacgccacagcttgtgcgcgcgcaatggcactcgtgtccgcctcctcgtcctccaccaccgccgtcgcggcgctccccaggaatgggcagcagcgggcgtcgtcgtcgttgttctcctcctcctcctcttcctccttcctcgtcggcaagacgctgctgaggcaggccgaggcagcccggccgtcgttcgccgtgcgcgccgcggcggattccgacaggccgatctggttccccggcagcacccctccgccgtggctcgacggcagccttcccggcgacttcggctttgat

SEQ ID NO: 13902 - DNA, 314 bp, Zea mays
ctccgccgtcgccctgctcgcccgaagcagctgccggcaaaatggccccgaagagaggcggtagggcgccggtccccgccaagaagaaggcggtggtgacgaacccgctcttcgagaagaggccgaagcagtttgggatcggcggcgcccttccgcccaagaaggacctccaccgcttcgtcaagtggcccaaggtcgtgcgcatccagcgccagcgccgcatcctcaagcagcgcctcaaggtgcccccggcgctcaaccagttcacacgtaccctcgacaagaaccttgcaacaaacttgttcaagatgctt

SEQ ID NO: 13903 - DNA, 310 bp, Zea mays
tctgaggagaccaccacgggtgtcaagaggctctaccagatgcaggagaccggcgccctcctcttccctgccattaacgtcaacgattccgtcaccaagagcaagtttgacaacctgtatggttgccgccactcgctccctgatggtctgatgagggccactgacgttatgatcgccggaaaggttgccgtggtctgcggatacggtgatgtcggcaagggttgtgctgctgccctcaagcaggctggtgcccgtgtcattgtgaccgagatcgaccccatctgtgccctccaggctctgatggagggtc

SEQ ID NO: 13904 - DNA, 307 bp, Zea mays
ctatgtcgaaggtgacatgttcagtttcattccacctgctcaaactgtcgtgctaaagcttgtgctgcaccacctgaccgatgaggagtgcgtcaagctcctggctcaatgccggaaggcgattcctccacggaaggacggcgggaaagttataatcggtgatattatgattgaccactctgggcttatgctggaaactcacctcctgatggacatcggcatgatgaccatgacaaaaggacggcagagagatgaaaaagaatggagcgagctcttcaccaaagcagggttcagcgaatacaagatc

SEQ ID NO: 13905 - DNA, 309 bp, Zea mays
ggcggaggtagcgaaggcgactccgcagtggatgacgccggcctcttcgttcaggtcgcggtgctggagatctataacgaggaggtctacgatttgctcgtgggcagcggggccgctgctaaaggaaacgcccccaaggcgagactagaagtaatggggaagaaagctaagaatgcaacctatatatctggaaatgaacctggaaggatatcaagagaagtttctaaagttgaaaagcgaagaactgtgaagagcacactttgtaatgagagaagttcacggagccattgcgtgattatcctggacgtc

SEQ ID NO: 13906 - DNA, 313 bp, Zea mays
gggaaaagcaagtgcagttatggaaggatctgatacttgattactgtagaagtcaaaagatacatacaatatctctagaagaagatttccccttgttctccaatgcaaagattgagagatctcttagctacgaagcaaaggaagtgttcctcgcagctctcgtcagtgaaggtcgtgcagaatggatggacaaaggtcacaagaagtgcctaattctttggctaaggatacaggattgggcaaatttcatattgaactttgtaaaggataacgggttggaagtaatgactatcgaagaaatacgctctggaat

SEQ ID NO: 13907 - DNA, 305 bp, Zea mays
gatccggttcgtgctgttcgtcaacaagcagggccagacgcggctggcgcagtactacgagcacctctccctcgacgagcgacgggccctcgagggcgagatcgtccgcaagtgcctcgcccgcactgaccagcagtgttcgtttgtggagcaccggaactacaaggtcgtttacaggcgctacgcctcccttttcttcctcgtcggcgtcgacagcgatgagaatgagttagctatccttgaattcatacatcttctggtggaaactatggatcgccacttcggcaatgtgtgcgagctcgata

SEQ ID NO: 13908 - DNA, 245 bp, Zea mays
ctccaaacacttgcgccgccactgcctcacaggtaaggccgccatggtctccggttcgggcgtgtgcgcgaacacgtcgaggtggacgcgcgccaccacatgctgggccgtctctcctcgatcatagccaaggagctgctcaatgggcagaaggtggtcgtcgtccgctgcgaggagatctgcatgtcgggcggcctcgtccgtcagaagatgaagtacctccgcttcctccgcaagcggatgaa

SEQ ID NO: 13909 - DNA, 307 bp, Zea mays
cagaagcagaagccaccgatcggcgtgccgcgtgcgtgaggcgatcggagcatcccgtcccgaggaggaagacaaccggcgacgcggggggaacatggggaagacgccggtgcggatgaaggcggtcgtgtacgcgctgtcgcccttccagcagaaggtaatgccggggctgtggaaggacatcaccaccaagatccaccacaaggtcaccgagaactggatctccgccacgctcctcctcacccccgtcgtcggcacctaccaatacgccatgtggtacaaggagcaggagaagctttcccacaga

SEQ ID NO: 13910 - DNA, 196 bp, Zea mays
cgacgcagtaccccacgtcagaagagttgagcatcggcaggatcaagttcaaggcgttcgaccttgggggccaccagatcgcccgccgcgtctggaaggactactacgccaaggttgatgctgttgtgtacttggtggatgctgttgacaaggaacgttttgccgagtcgaagaaggagcttgatgcgcttcttgc

SEQ ID NO: 13911 - DNA, 310 bp, Zea mays
ctgtcgtgggatcccagccaccgccgctagaagaagagctcggcgattcccaggtcccgcgagaatatgccgaagcagatccatgagattaaggacttcctcctcaccgcggagaggaaggatgcccgctcagtgaagatcaagaggagtaaggatgttgtcaagttcaaggtgcgctgctccaagtacttgtacacgctctgcgtcttcgatgctgagaaggcaaacaagttgaagcaatctcttcccccaggtttgaccgtcgaggaggtctgattggatacatggcaacgccgagttgaactaccca

SEQ ID NO: 13912 - DNA, 298 bp, Zea mays
cactgtcccgattgcggcggaggttttcaagaaggctggtacttatgatgcgaagaagctgtttggtgtgactactcttgatgttgttcgtgctaaaactttttatgctggaaaagcgggtgtgccagttactgaggtgaacgtacctgttgttggaggccatgcgggtattactattctgccactcttctcgcaggccactcctgcaagcaattcgttgtcccaagaagacattgaggccctcaccaagaggacacaagatggtgggacagaggtggttgaagcaaaggcgggaaaa

SEQ ID NO: 13913 - DNA, 300 bp, Zea mays
ccttgtacctgcatctcgacctcaccggcgtccggcggtggtatcacgatggtggcgttgctgggccggcggatcggggtggctgcggcagctgccgcgttcatcgccctcgtggcgttcggatccgcctcatcctcgcccaagtccttcgtgaagtccaccgtctccgcccacgacgtcgtcatcttctccaagtcatactgcccgtactgcaaaagagcaaaggccgtgtttaaggagcttgagttgaagaaagagccatatgttgtggagcttgatcagcgagaggatggctcagag

SEQ ID NO: 13914 - DNA, 303 bp, Zea mays
cccacgcgtccgctgagaaggtgaaggagaagatgctgatgctccgcagcagcgacaaccaggagttcgaggtgaaggagtcggtggcgatgcaatcgatgaccctcaagaaaatggtcgaggacggctgcgccgacaaaggcatcccgctccccaacgtcacctcccacatcctcgacaaggtcatcgagtattgcaacaagcacgccgagccgaccgggccgggcgacgcggccggcaccaccaacaggtccgccgaggatgagctcaacatcttcgacgcagacttcgtcaatgtagagc

SEQ ID NO: 13915 - DNA, 302 bp, Zea mays
  unsure (1)..(302): unsure at all n locations
gtgctatccgctagggtttatctgctcgaggaatggcgtcggtgcaggtctccggcgcgggggtcggtgccgcggccttctctgtgaaggggaaggcctccaccggtgcgctccggcttcgctctacgttgaccttcggcgaggtctgcccggcgcggcgggcgttccgcggcctcgtcgtcagggccgctaccgtcgtcgcccccaagtatacaacacttaagcccttggctgatagagtgcttgtaaagattaactcttccgagaagaagacaactggtggaatcttgctcnctacgact

SEQ ID NO: 13916 - DNA, 302 bp, Zea mays
cggttgtcaatttggaccctgcaaatgacgcattgccatatgagtgtgccataaacatcgaggacctcataaaactcagtgatgtcatgtctgagcattcgcttggccctaatggagggcttgtgtattgcatggattacttggagaagaatattgattggcttgaagaaaaactgaagccttttattgaagatcactatctgttatttgattttcctggtcaagtggaattgttcttccttcactcaaatgcaagaagtgttattaataaactcatcaaaaagatggacttgaggcttact

SEQ ID NO: 13917 - DNA, 295 bp, Zea mays
cccgcctccaaacccgaactccaagtcgccccgcatcgatggcgcccaaggccgagaagaagcccgcggcgaagaagccggcggaggaggagcccgctgccgagaaggcgccggccgggaagaagcccaaggcggagaagcgtgtcccagcaggcaagtccgccggcaaggagggcggcgagggaaagaggggccggaagaagggcaagaagagcgtggagacctacaagatctacatcttcaaggtgctgaagcaggtgcacccggacatcggcatctcctctaaggccatgtc

SEQ ID NO: 13918 - DNA, 294 bp, Zea mays
cttctctccactatcctaccaggcaccactcgcatcgtgtgctcagtcagatccccgtcccgcatttcctaaggccaggttagttggcattgaagacgatgactgcttctgcagctgctggtgtgcagatggtggctgcacgcccttgcatttcggcctcgccaggaattcttaccgcacgggtttctaggactgattgcatgctcagtaccactgctacattccccaaaatcagctgctcctggcctctaaggtttaagcgcaatgatgttgttgtaagagcaatatcggaag

SEQ ID NO: 13919 - DNA, 296 bp, Zea mays
agccctcacacaagagacgcagctgcgagtccgccagccttatcctcctccccgtctccggctccaacccgcaagcgcggtaaggtatggcttcgacattcggtgccacttctactgtcggccttatggctgctccaacagggaagaatgtgcgccttcagaggagggtgaacttcagagtaagagcagctaaggagctgtacttcaacaaggatggctcagctatcaagaagctccagactggagtcaataagcttgcagacctagtcggagttacactcggaccaaagggaagg

SEQ ID NO: 13920 - DNA, 298 bp, Zea mays
cgagaagggcgtgggcaagtccgggaagccgctccactacaagggctccaccttccaccgcgtcatccccgagttcatgtgccagggcggcgacttcacccgcggcaacggcaccggcggcgagtccatctacggcgagaagttccccgacgagaagttcgtgcgcaagacaccgcccccggtgtgctctccatggccaacgccgggcccaacaccaacggctcccagttcttcatctgcaccgtcgcgaccccttggctcgacggcaagcacgtcgtcttcggccaggtcgtcgagg

SEQ ID NO: 13921 - DNA, 296 bp, Zea mays
tccacagcgacacccgaccccgccgtcgcgatgaggccggcgctgctcaagtccacggccgagctcctccgccgcagccgcggctacgcctcctcggccaacccggagcggaaggtggccatcctgggcgctgcgggcggcatcgggcagccgctctccctcctcatgaagctcaacccgctcgtctcctccctctccctctatgatatcgccgggacccccggcgtcgcggccgacgtctcccacatcaactcccccgccctggtgaaggggttcatgggggacgaccagctcgg

SEQ ID NO: 13922 - DNA, 295 bp, Zea mays
ggacgaggctgtcaaagctattagccgtgctatccgccgtgctcgtgttggcctgaagaatccaaataggccaattgccagcttcatattctctggaccaactggagttggcaaatcagagctagcaaaggctctggcagcctactactttggctcagaggaggctatgattaggcttgacatgagtgagttcatggagagacatactgtctccaagcttattggatcacctccaggttatgttgggtacactgagggaggccaactaactgaagcagtccgtcgccgcccatac

SEQ ID NO: 13923 - DNA, 296 bp, Zea mays
tgtatttgcaaagaaggccaaagatttccttcccttcttgcagaggaacagaaggcattctgccgttgttgaatatgtttttagtggccatcggttcaaactaacaattcctaaggagacttgcagtattgccttctcattatctggtgttcggtgtcctggtaaaggcgagccatactcagatgaagctattgctttgatgaggagaaggatactacagcgtgatgtggagatagaggttgaagcagttgacagaacaggaacattcataggttcgttgtgggagtccaagacca

SEQ ID NO: 13924 - DNA, 298 bp, Zea mays
agcaaccggtccaacactttcacgctcaggcgctcagctctagcaatggctgcctccaccatggcgatctcctccacggcgatggccggtacccccatcaaggtgggctccttcggcgaaggccgcatcaccatgcgcaagaccgtgggcaagcccaaggtggcggcgtccggcagcccctggtacggccccgaccgcgtcaagtacctcggccccttctccggcgagcccccgagctacctcaccggcgagttccccggcgactacggctgggacaccgccgggctgtccgccgacc

SEQ ID NO: 13925 - DNA, 314 bp, Zea mays
ctcgacaatggcactccaggcagcctacgtagtaaccgtgcagcatggccgttcggtcaaagggagccgtgggcgtccacggaggaagcgcggaagggaggggcgacgccgggacccaccgtactactgctgctagcgtccctcgccaagagcacgtcgtcgtccggtaggggcaagccgccgctccctccctcgccgcggggcaccctccccatcgtggggcacctacaccacatcgggccccagacccacatctcgctccaggagctggtggccaagtacgggcacaacgggttcctgttcctccgcgccgg

SEQ ID NO: 13926 - DNA, 292 bp, Zea mays
cggacgcgtggggggccaatggaccccagagagcgtgggcgattatgcgagcgggacgaaccatgtccttccgacctatggttacgcaaggatgtacagcggtgtatcgctgaactctttcctcaaatacatcactgtccaatccctaacagaggaagggctgagaaagctggggccgtacgtcgcgaagatggccgaagtggaggggctagaggcgcataagagagccgttacccttaggctgcaagaggttgaggccaatgtaactgtctagctgctgtccatggtctat

SEQ ID NO: 13927 - DNA, 289 bp, Zea mays
ccacgcgtccgcccacgcgtccgggctggcctcgtgccactcgtcatggggctcgtgacgaaccccaccggagctctgctggacgaggccatggcgatcctgtcgatactgtccagccaccccgagggcaaggccgcgatcggggcggcggagccgtccccgtcctcgtggagatgatcgcgggtgggtcgccgaggaacagggagaacgctgccgccgtgatgctgcacctgtccgccagcgtgcggcagtccgcgcatctggctcgggcgcaggagtgcggcatcat

SEQ ID NO: 13928 - DNA, 293 bp, Zea mays
ccctccctctccccgcgggccgccagaggcaatttcgccctcgattcgaccccgattcgtccgcccgcgaccgggattccctccgccaagcgcggatctgaacgctgcgctccgtgtcgccgctcgaatccgccatgaagggggccaaatccaagggcgccgccaaggccgatgccaagctggcggtgaagagcaagggggcggagaagcccgccaagggcaggaaagggaaggccggcaaggaccccaacaagcctaagagggctcccagcgctttcttcgtgttcatggag

SEQ ID NO: 13929 - DNA, 289 bp, Zea mays
tctcaatcttgctgctgttggcttaacacctggctctgctggaggattagaaggtccagaccggatctttgtaggtggtctaccatattatttcactgaggctcaagtgcgggagttgctcgagtccttcggacctctgcgtggattcgatcttgtgaaggatagagaaactggtaactcgaagggatatgccttctgtgtttaccaggatcttaatgtcactgacattgcctgtgctgcccttaatggcatcaagatgggggacaagactcttactgttaggagggca

SEQ ID NO: 13930 - DNA, 286 bp, Zea mays
cttcaccgtgcgcgcctctctccgcaaggccaccggcaccgccgccgtggcaatggctgccagcgccctgcttgccggcggtgccatggcccaggaggtgctgctgggcgcaggcgacggcgggctcgtcttcgagcccagccagttcaccgtcaaggccggcgacaccatcacattcaagaacaacgccggcttcccgcacaacgtcgtcttcgacgaagacgaggtgccgagcggcgtcgacgccaccaagatctcgcaggaggagtacctcaacgcgccaggc

SEQ ID NO: 13931 - DNA, 283 bp, Zea mays
ggaggctaaggcgctcggtgttgataccgtgccagtacttgttggaccagtctcgtacctgttgctctcaaagcctgccaagggtgtggagaagggattccctcttctttcccttcttagcagcatcctcccagtctacaaggaggtcattgctgagttgaaggcagctggggcttcatggattcagtttgatgagcccactcttgtcctcgaccttgattctgacaaattggctgcattctctgctgcatacgcagaacttgaatctgtactttctggattg

SEQ ID NO: 13932 - DNA, 285 bp, Zea mays
ggggagccaaggtaatcataccagctaggacactggagagtgggctcaagttgaaggagagcctcgcagatgaggtcccaagctccaaggtacacgttatggagatggacctgagctgtctcagctccgtccgcgacttcgcacggtccttcaattcatcccacaagcatctgaacctcctcataaacaatgcagggatcatggcctgcccttaccagctgtccaaggatggaattgagctgaaattcgcaacgaatcatgttggccatttcttgctgacaagtc

SEQ ID NO: 13933 - DNA, 338 bp, Zea mays
acttcccctccgagcctcagttcgcatccacgcgcgccgccgccgcctcgccggtcgacgctcaccgcgcagcatggcggaacagactgagaaggctttcctcaagcagccaaaggttttcctcagctcaaagaaatctggcaagggtaagaagcctggcaagggcggcaaccgattctggaagagcattggccttggcttcaagactcccagggaagcaatcgaagggacctacattgacaagaaatgcccattcactggaactgtttctatcagaggcagaattattgctgggacatgccacagtgctaagatgaacagaactatcattgttcgca

SEQ ID NO: 13934 - DNA, 326 bp, Zea mays
cgagaagggcctcgacttcgagatcgtccccgtcgacctcaccaccggcgcccacaagcagcccgacttcctcgccctcaaccctttcggccagatcccggctctcgtcgacggagacgaagtcctcttcgagtcccgtgcgatcaaccggtacatcgccagcaagtacgcgtcggagggcacggacctgctccccgcgacggcgtcggcggcgaactggaggtgtggctagaggtggagtcgcaccacttctacccgaacgcgtcgccgctggtgttccagctgctcgtgaggccgctcctgggcggcgccccgacgcggcggtg

SEQ ID NO: 13935 - DNA, 325 bp, Zea mays
caccaaggagagtacgtggaggagcagccatggcttcatcggtggccgccgcggcgagcacattcctgggcacccgcctggcggacccggcgccacagaacgggcgcatcgtggcccggttcgggttcgggttgggcggcaaggcgaacctgctccgaagaaggtggcgaagacatcgacctcctctgaccggccgctgtggttccccggcgccgtggcgccgactacctggacggctcgctggtcggcgactacgggttcgacccgttcggtctcgggaagcccgtggagtacctgcagttcgagttggactcgctggaccaga

SEQ ID NO: 13936 - DNA, 335 bp, Zea mays
cacgcgccccgcccgacgcccgccacggcgccaccatgtcgcaggctacggaggtcgtcggaaacccgtacgccgccgagctcgctgcagccaagaaggtcgtcgccctagcggcccgcctctgccagagagtgcagcggagcattttgcactctgacattcaatcgaaggcagacaagactcctgttacagttgcggattatggatcacaggtactggtatgtctggtcctgaagaaggaattgccttctcactctttctcaatcatagctgaagaggattcaaaagacttgagagaagatggtgcccaagaaattatagaacacattaccacc

SEQ ID NO: 13937 - DNA, 332 bp, Zea mays
cagctttgaccgccgcctcccttcccctccgctactgctcctccccaccccactcccccgcaggagcggcggcggcggcggcgaggtcgtaccccacatcggcgagcggcggcggcaccgcggaggcaaaggcaagatgttcgggcgcgcgccgaagaagagcgacaacaccaagtactacgagatcctcggggtgcccaagtcggcgtcccaggacgatctcaagaaggcctaccgcatagctgctatcaagaaccaccccgacaagggcggtgaccccgagaagttcaaggagctcgcacaagcctatgaggttttgagtgatccagaga

SEQ ID NO: 13938 - DNA, 326 bp, Zea mays
ctttactcaaagtctagagctagctttttgctttgctcaccagacaaaccgcagcagatggcgtcgacgatcatggccgccacctcccgcatcgtcgcggccaagacgccgtttcttggccagggtcgcgccgccgccgccgccgccaatgccagccccctccgcgacgtcgccgccgccgctgctggcggccggatcaccatgggcaacgacctgtggtacggcccggaccgcgtcaagtacctgggcaccttctccgcccagacgccctcgtacctgaccggcgagttccccggcgactacggctgggacaccgccgggctgtc

SEQ ID NO: 13939 - DNA, 324 bp, Zea mays
gcttgcatctggtggaggaactgcagatagatgcatacgattttggaatacgaccacaaatgcacacttgagctgtgtggacactggcagccaggtctgcaatctcgcgtggtcaaagaatgtaaatgagcttgttagcacccacggctactctcagaaccaaataattgtttggagatatccaacaatgtcgaagcttgccactttgacagggcatacatacagagtattgtacttagctatttcccctgatggccagaccatagttactggtgctggtgatgaaacgctccggttttggaacgtgttcccctctccaaagtc

SEQ ID NO: 13940 - DNA, 322 bp, Zea mays
gttctagatcgcgagcggccgccctttttttttttttttagagtttgaaatcgaaaacttttattctgggtgtgcaaagtttcagattacagagttttattctgggtgtacaaagtttagagatttgacgcacatgtgcactacacgatgtctgtgtcttgcagttgtagtaacaggtagctcttgttacttattaggcgtcaacgtgatatgaggtggtattattggtggtgcttaagattgtgtttccgaaggggctctggtcgtagcagtccaagttgtcgccgtagctgagaccaaacatgtcgcagtagcgtttgta

SEQ ID NO: 13941 - DNA, 320 bp, Zea mays
caagcttggtgctcgtctcacggaggttcgcaagaatggaacctgcccctggctcaggcccgatgggaagacccaggtgacagtggagtaccgcaacgagggtggcgccatggttcccatccgtgtgcacacagtcctcatctctacccagcacgacgagacagtcaccaacgacgagattgctgctgacctgaaggagcacgtcatcaagccagtcatccccgagcagtacctcgacgagaagacaatcttccacctcaacccgtctggccgcttcgtcatcggcggacctcacggcgacgctggcctcactggccgga

SEQ ID NO: 13942 - DNA, 325 bp, Zea mays
catccaacctttggatcctttccttcagtgctcccctcacttctcgccgccgcccactgccgctcccccaccaatccacagcgagacacgcccgagcgagtgatccccgacccagccgccgccatgaggccgtcgctgctgaagtccacggccgagctcctccgccgcagccgcggctacgcgtccacggccaatccggagcggaaggtggccatcctgggcgcggcgggcggcatcgggcagccgctctcgctcctcatgaagctcaacccgctcgtttcctccctctccctctacgatatcgccggcacccccggcgtcgcgg

SEQ ID NO: 13943 - DNA, 326 bp, Zea mays
tgcaacttttcatctggactaattagagtaggtcaccagaagaatgaacgtgttgctatttttgctgagacatgggccgagtggcagattgggttgcaggcatgcttcagacaaaacattacagttgtcaccatctatgcctcattcggggaggaagctttgtgtcactcactagatgagactgaggtcactactgtagtttgtggtcagaaagaactaaaaaagttgattgatataagtgggcaacttgacactgtcaagcgtgttgtctatatcaatgaggaaggcatctcaactgaagtttctttagctcaaaactgcactag

SEQ ID NO: 13944 - DNA, 328 bp, Zea mays
ggccaagccggcgatgctgccggatggttctgtcaacctcatgctctggaactgcgtcgtccccggcaaggaaggcactgattcggaaggtggatatttcccagtcactctccatttcactgaaaattacccaagtatcccaccaacctgcaagttcccacgaaggtttttccatgtcaacgtctatgattctggggatgtatgcctgtcaatacttggtgatgcatgggcgccctctatcacagtgcggcaaattcttataggcatccaggagctgctggagaacccaaatccagcctctcccgcacaggattttgcttacgatgtt

SEQ ID NO: 13945 - DNA, 321 bp, Zea mays
acacgcgtccgcggacgcgtgggatacaccagacgctggcgctaggtgagcggttcaagaagtactacctggaaaacaggaagctgcagctgacatcggactttgatgtcattgctgcgacgcattcctcgagtcccaccaggtgtttttctcgcagattgctgggttctttattgttgaagaccgggtgtttagaacagggggtgggctcacatctcggccagatgtagatgcactttgggatgccgctgtggggaagatggtctctgtcatggaagataacttctccaggatgcagacagcataccacttgcttctcat

SEQ ID NO: 13946 - DNA, 318 bp, Zea mays
gcgggatgttccagtagtcaaggaaaatggcaaagctgatgggaagaaacagaaaagtcaagaaaaggcagttgctgcaccttcaaaatcaagtccggattccaagaagagcaaggatgacgatgattctgatgaggacgagactgatgattctgatgaggatgagacggacgattctgatgagggtttatcttctgaagaaggcgatgatgattcaagtgatgaagatgataccagtgacgatgaggaggaagacactccaactcctaagaagcctgaggtaggcaagaagagagctgctgaaagttccgtgctgaa

SEQ ID NO: 13947 - DNA, 314 bp, Zea mays
cccacgcgtccgcccacgcgtccgctggcgaggcaaaagcgcaaacgcgaccacagacagagcgcgcttcaaggccttttttttttgagataacaaggaggagaggaggagatggcggtcacgatcacctgggtgaaggcgaggcagatcttcgacagccgcggcaaccccaccgtcgaggtggacgtgggcctcagcgacggcagctacgcgaggggggccgtacccagcggcgcatccactggaatatatgaggccttggagttgagggatggaggatctgattatcttggcaagggtgttcttaaggctgt

SEQ ID NO: 13948 - DNA, 315 bp, Zea mays
ggcaaccggtcttgtaagtgcaagtttctgtcctttttttctagagatggcacccgtggagccccttccggaggctcccaacgacggcaggcccatcgtgtgccccatgtcagacttctgccctctcacgatcgatggggtgctgaaggagttgttcctagagacactacgaaagaagcgaagatcgagtggcttgcgaggagcttggcaggaaggccatgtacctaggagtgccattcgtatgcgagtgggttaggaacaagagtcattcatggaagtcacagatcacaacattgaaagcagcagtcgatgctt

SEQ ID NO: 13949 - DNA, 304 bp, Zea mays
ttgtgatccacgtcccataccgcttgcgtaaggccttcaggaagatccatgtcaggatcgtcagggagctggagaagaaattcagcggcaaggatgtggtaattgttgccacaaggaggatcgtgaggccgcccaagaagggttcagctgttcagcgccctcgcaccaggactctgactgctgtccatgatggcatcctggaggatgttgtcttcccagctgagattgtggggaagcgtgtcaggtaccgtctggatggtgccagatcatcaagatcttcttggacccaaaggagaggacaaca

SEQ ID NO: 13950 - DNA, 313 bp, Zea mays
cccacgcgtccgcttccttttctaccccgcgggccgcggcgcgtagtcttctactctctagctcgccatcaccgtcgtcatcaatcacggtgaccttgccctcgctgcccgactggatccggacgctgctgctgctggtaggctgacagcgaggaggacgagacgagggggccatggctcagatcttgctccacggcacgctccacgccaccatcttcgaggccgagtcgctctccaacccgcaccgcgccactggcggcgccccaagttcatcgctagcttgtggaaggatcgaggacaccgtggtgtcggc

SEQ ID NO: 13951 - DNA, 318 bp, Zea mays; identical to SEQ ID NO: 8362

SEQ ID NO: 13952 - DNA, 317 bp, Zea mays
gtggatggcgcgtgcctctgggtcgccaggatcatgctgagtctggacatgttttgcacttttgtttcccttcctgctaccatctgtgacagatccgctcgctaatatgggacctgagattagctttttgctgcttgtggtgaggttgcagttttgttctgtgtttctgtgttgttagtactcctatgatttaggccttgttccaatctcgcgagataaactttagcagctattttttagctacttttagccatttataatctaaacatgagagctaatggtgataaaaaaaaaaaaaaaaaaaaagggcggccgct

SEQ ID NO: 13953 - DNA, 318 bp, Zea mays
catcccttcagcatcgcttgacgcgataaaggaatggctggacacaactgacctcaagtactatgagagcaggctgaatctgaactggcgccctatcctgaaaactatagtcgatgatcctcagaagttcattgacgatggcggctgggagttcctgaacatggaggcgagtgactcagagactgaggacacagaggaatcagaccaaggctatgtgccttcagacgctgagcccgaatccgagtcagaagatgatgactctgacagtgagtccttggtggaatctgatgatgacgatgaggagtcagacgaggactc

SEQ ID NO: 13954 - DNA, 322 bp, Zea mays
gacgccttggcaagatttcaggaccctgcggaagctgacaaactaatgaaaattcagagggacttggatgaaacaaaaattaatcctcatagaactattgataagtgtctgggccagaggaggagaggattggataagcttggtttgagaaaagttctggtctaagtgctgcttctcagatgttctacaagcaggcaaagaagacaaaccaatgttgcacaaatactttgaactttggtgcttcaatcatgtttgcaagaaacaaaaacgatcgatattgtgctaatttactgtaagttaagtcgcgcatgaagcgtggaca

SEQ ID NO: 13955 - DNA, 319 bp, Zea mays
acgatatggttgagtacttcggtgagcagctctccggttttgcgttcactgccaatggctgggtgcagtcttatgggtcaaggtgcgtcaagcctccgatcatctacggtgacgtgagccgccccaaccccatgaccgttttctggtcgaagacggcgcagagcatgacgtctcgcccaatgaaggggatgctgactggcccagtcacaatcctcaactggtccttcgtccggaatgaccagccgaggtttgagacttgctaccagatcgctcttgcgatcaagaaggaagtcgaggatctcgaggctggtggtattca

SEQ ID NO: 13956 - DNA, 320 bp, Zea mays
ccaccgtgagcgtcgccatcgtggagcagtccgtgtccccgggcggcggcgcgtggctgggcgggcagctgttctcggccatggtggtgcgcaggccggcgcacctgttccctggacgaactgggcgtgggctacgacgaggccgaggactacgtggtggtcaagcacgcggcgctgttcacgtccaccgtgatgagccggctcctggcgcggcccaacgtgaagctgttcaacgccgtggcggtggaggacctgatcgtgcggcgggggcgcgtcggcggcgtggtcaccaactgggcgctcgtgtccatgaaccacga

SEQ ID NO: 13957 - DNA, 318 bp, Zea mays
tgagtagcgaaccgtagagcaatggcgtcgctgtcgtgcgcctccacgctgccctggacccccgcctcctacccgcggccctcggcggggcgctgcctcacggcctctcggccgggctccgtcgctggtcatcgtcgcccaggggaaggtcaagaagtaccgccaggtcatattgacagacgacatagaagaggtggggaagaaaggggatacactgaaggtgcgagctggattctaccgcaacttcctccttcccaagggcaaggctacacttctgaccccagaagtcctcaaggaaatgcagctggagcaggagag

SEQ ID NO: 13958 - DNA, 313 bp, Zea mays
cacacagaaaaccctagccgccgccaccgaagcggcctcccaggtaagcaggagcgtccaccccgccgccgtcatgaagcgcaatccccgcgtcacgagctcccgccggaagtgccgcaagcgcactttacggccccgtcctccgtccgccgcgttctcatgtccgccgggctgtcgacggagctccgccacaagtacaacgtgcgctccatcccgatccgcaaggacgacgaggtgcaggtcgtgcgcggcacctacaagggccgcgaggggaaggtggtgcaggtctaccgccgccgctgggtcatccacg

SEQ ID NO: 13959 - DNA, 311 bp, Zea mays
gtcttgaagttggtctgaccaactatgcagctgcctactgcactggacttctgttggctcgccgtgtgctaaagatccgtggtttggataaggagtatgagggcaatgttgaggccactggtgaggacttctctgttgagccagctgatgagaggaggccattccgtgctctcttggatgttggccttatcaggactacaacagggaaccgtgtctttggtgccctcaagggagctttggatgggggcctggatattcctcacagcgagaagaggtttgctggattcaagaaggatgacaagcagttggat

SEQ ID NO: 13960 - DNA, 308 bp, Zea mays
ccggcgtgtcggcgacggtagatggatcatttatttgtcggcgtcggcgtcggcgagaaaggggtagtctgtgtatccaatgacggggtcggatgtgtagaaggtggtgcggtcgtacttgttgagcggcgcttcggggaggcggaacctccggggcagatccgggttggccaggaacagcctgccgtagctgacgaggtccgtgtagccttcctccaccaccttgtccccctccgccctgtcgtaccctccggcggcgatgaaggtgccccggaatgcctccctgaacgggcgcaggcggtgcggga

SEQ ID NO: 13961 - DNA, 316 bp, Zea mays
ctcgccgtcgaccacaagtccacaacccacaaaatgcacgggaggacccacgccgccgccgtcggcgacatgacccagcgccttctcctcgccctctcgctcatcgcatcagcgaccgccgtgcccgctgtcatccgcacggtcccggacgaccccaccgcgggctcctctggcgcggcagacgccgcggacgcgctcttctgtgacagctggaggctgtcggtggagacggccaacgcgggcccctggagcgccgtgccctcgcgctgtggggctttcgtgcgggactacatggagggacctcgctacgcgtctg

SEQ ID NO: 13962 - DNA, 318 bp, Zea mays
  unsure (1)..(318): unsure at all n locations
gcggtgcgagcggaggaggcgaccgaagcgccacttgcttgagtagcgaacgcngagagcaatggcgtcgctgtcgtgcgcctccacgctgccctggacccccgcctcctaaccgctgccctcggcggggcgctgcctcacggcctctcgccgggctccgtcgctggtcatcgtcgcccaggggaaggtcaagaagtaccgccaggtcatattgacagacgacatagaagaggtggggaagaaaggggatacactgaaggtgcgagctggattctaccgcaacttcctccttcccaagggcaaggctacacttctgac

SEQ ID NO: 13963 - DNA, 310 bp, Zea mays
cgcatgcgcacgccaatcggcaatccaccaaagattccgttctcccagtcgcctctcccagtcccagatctcgttcactcgcactcgcgcaaccccgcggccccgcgcctaatggcatcctgtggcgccggcgacgccgcgtcagccagccgagggccagtatctcgcacgtcatcttcgatatggacggccttctcctcgacacggagggcttctacacggaggtgcaggagaagatcctagcgaggtacgacaaggtgttcgactggtcgctcaaggccaagatgatgggcaagaaggcggccgagtc

SEQ ID NO: 13964 - DNA, 309 bp, Zea mays
acctgcaccaatggctgttctttctgctgctggtgctcccccggcctcagctatcgggtttgagggctatgagaagcgccttgagatcacattctctgaggcacctgtctttgtggacccccatggcagcggtttgcgtgccctctccaggtcccagattgactctgttctggatcttgcacggtgcacgatcgtgtccgagctctccaacaaggattttgactcctatgttctctccgagtcaagcttgttcatctatcctctgaagattgtcatcaagacctgtggcactaccaagctcctgctcac

SEQ ID NO: 13965 - DNA, 313 bp, Zea mays
cacacacacacacacacacagacaagtggtttccaaagccaagtgtgtgtactagcaaccagctagctcgggcggcagcaggcagccatcatgtcggaggagaagcaccaccacttcttcaaccacgacaagaaggacgaggagcagcccgccggcgagtacgggtactccgagaccgaggtggtcaccgccaccggcgagggcgagtacgagaggtacaagaaggaggagaaggagcacaagcacaagcagcacctcggcgaggccggcgccatcgccgccggcgccttcgcactctacgagaagcacgagg

SEQ ID NO: 13966 - DNA, 312 bp, Zea mays
cccacgcgtccgagttctagatcgcgagccgccgctcgcgcccacgcgtccgcccacgcgtccgacaatttcaggtccaattggctggactgatgataaaagcagcgttaatgagcagagccttcattctgcgacggaatttggagcaaaatcaagttcgcttacttttcacatgactgacagtcaccagggtaaatctgaacttagttcaccaaggagggcaccttcagtcaaaggtactgatgcaagaacctcagaggataaatcagaaaaggagttgcttgacaatggtgagtatcttatcaggcctta

SEQ ID NO: 13967 - DNA, 311 bp, Zea mays
cccacgcgtccgataaaaccagtgcaagcagaagcagcgcaatggcgagcagcaccatggccctctcctccacagccttcgccggcaaggcagtgaacgtgccgtcgtccctcttcggcgaggccccttgacgatgcgcaagacggcggcgaaggcaaagccggcggcgagctccggcagcccgtggtacggccccgaccgcgtgctctacctgggcccgctgtccggcgcgcccccgagctacctgacgggcgagttcccgggcgactacggctgggataccgcggggctgtcggcggacccggagacgt

SEQ ID NO: 13968 - DNA, 316 bp, Zea mays
aatcgagggtgctgagatcaataaaagtttgcttgccctaaaggaatgcattagagcgcttgataatgatcagactcacatacctttccgaggtagcaaattaactgaagtgctgcgtgactcattcattggagactcacgcactgtcatgatatcctgcatttctcctagttctggctcttgcgagcatactctgaacacattgagatatgctgacagactgaagagtttgtcaaaaggaagcaacgccaagaaagacgtgtctttggcagtgtctttaagagagtcgaactcttccccactgccttcagttgta

SEQ ID NO: 13969 - DNA, 312 bp, Zea mays
ccctctcacacctgcgcgacccacctcgtggcctccaccacgaagatgcaggagcatgcgggcagcgacaagtcgtgtgtttggcacgctgctgactttgccgatggcgaacttaaggaggagacgtttgccatcaggtttggttcggcagaaaactgcaagaagttcaaggagtcggtcgaggagacagctgagtcgctcacaaagaacgagggcaaggaaggtgaagacggtggtctccacggctggattgctggcgaactcactgtgagcgagggcaaatctgagggaagctggcaagtctgagtccac

SEQ ID NO: 13970 - DNA, 315 bp, Zea mays
acgagatcgacctggccaaggtcgtggccaaggccgcgggcccgcgcgccggatgcggctcggcctgccgctgccgctgctcgtgcgcttccccgacgtcctgcgccaccgcgtcgagacgctcaacgctgccttcggctacgccgtccgctccaccggctacggctcaaggtaccagggcgtgtacccggtcaagtgcaaccaggacaggtacgtcgtcgaggacattgtggagttcggcgcgccctttgggttcggcctcgaggccggctccaagctcgagctgctgctcgccatgagctgcctcgccgcgcg

SEQ ID NO: 13971 - DNA, 317 bp, Zea mays
ccacgcgtccgaatcgacacccggccgacatgggccgcaagttcttcgttggtggcaactggaaacgcaatggaaccgcagaccaggttgagaagatcgtcaaaaccctgaatgaaggaaatgctccctcttcagacgtcgtcgaggttgttgtcagtcctcctcatgtgttcctcccggtggtcaagagccagctgcgccaagagttccaagtcgctgctcagaactgctgggtgaagaagggaggtgcattcactggtgaaaccagtgctgagatgctcgtcaaccttggcgtctccctgggtcactcttggaca

SEQ ID NO: 13972 - DNA, 310 bp, Zea mays
ggttcttgaggttcatgttgacaaggggatgcaacacaaccagaagatcaccttccctggtgaagctgatgaagcgcctgacactgtcactggagacattgtattcgtcctccagcagaaggatcactccaaatccaaaagaaagggtgaagatctcttctatgagcacaccttgtctctgaccgaagcactatgtgggtctcaatttgttcttacacatctggacaacaggcagcttctcatcaaatcagaccctggtgaagtctgttaaacctgaccaactcaaggcgactaacgatgaggggatgcc

SEQ ID NO: 13973 - DNA, 311 bp, Zea mays
agcaagcagcgagtacatacatactaggcagccaggcagccatggcgcccaccgtgatgatggcctcgtcggccaccgccgtcgctccgttccaggggctcaagtccaccgccagcctccccgtcgcccgccgctcctccagaagcctcggcaacgtcagcaacggcggaaggatccggtgcatgcaggtgtggccggcctacggcaacaagaagttcgacacgctgtcgtacctgccgccgctgtcgacggacgacctgctgaagcaggtggaccacctgctgcgcaacggctggactacctgcctcgag

SEQ ID NO: 13974 - DNA, 241 bp, Zea mays
ccacgcgtccgccacgcgtccggccgcatcgggcgcaacttcctgcggtgctggcacgggcgaggcgacgcctcgcccctcgacgtcatcgccatcaacgacaccgcacgcgtcaaccaggcgctccacacgcccaagcacgactccacgatcggcatctccgacgccgacgtcaagcccgtcggccacaacgacatctccctcgacggcaaggccatcaaggtcgctgtacgacagcaac

SEQ ID NO: 13975 - DNA, 309 bp, Zea mays
tctgacgagaccaccacgggcgtcaagaggctccaccagacgcaggagaccggcgccctcctcttccctgccatcaacgtcaacgactccgtcaccaagagcaagtttgacaacccgcatggctgccgccactcgctccccgacggcccgacgagggccaccgacgtcacgatcgccggacaggtcgccgtggtgtgcggacacggtgatgtcggcaagggtcgtgctgctgccctcaagcaggctggcgcccgtgtcaccgtgaccgacaccgaccccatctgcggcctccaggctctgacggagggt

SEQ ID NO: 13976 - DNA, 305 bp, Zea mays
acacgcctcgcccacggtccggtacggtgggggacgctgggcctcgatgtgtgagagcgttgaagcggatattcattatatgtgataatgacaaggatggtgctctcagtgacgtggagctcaatgaattccaggtccggtgttttagtgctcctctccagcctactgacatttcaggagttaagagagttgttcaggagaagatgcctgacggcgtaaatgacactggccttacttctgactgggttcctttttctgcatgccctatctattgacaaacgtcgtttggagactacatggactgt

SEQ ID NO: 13977 - DNA, 306 bp, Zea mays
aggaagcataaagatttgttgaagaatgaatgccctcatattgtggttggcacgcctggtaggacacttgctcttgccagggataaggatctctccttgaagaatgtgaggcacttcattcttgatgaatgtgacaaaatgctggaatcacttgacatgcggagagatgttcaggagaccttcaaaatgactcctcatgacaagcaagtcatgatgttctcagcaacgctcagcaaggagacccgtcctgtatgccagacattcatgcaagacgtaatgccctgcagccttctccagctctccttt

SEQ ID NO: 13978 - DNA, 305 bp, Zea mays
agccaccatcgaccttcaagtctcgctacgtagcagtgcaataaaaaaagcagccgcaatggcgagcagcaccatggccctctcctccacggccttcgccggcaaggccgtgaacgtgccgtcgtcgtccgccttcggcgaggcccgcgtgacgatgcgcaagacggcggcgaaggccaagccagcggcggcgtccgggagcccgtggtacggccccgaccgcgtgctgtacctgggcccactgtccggcgagtcaccgagctacctgacgggcgagttcccgggcgactacggttgggacacgc

SEQ ID NO: 13979 - DNA, 308 bp, Zea mays
gctagccagccaagggggggacaatcgctccgcttctcgctgctgccatgacccacgctgcagcccatcctggccttaggagccacctagtaggacccaacaatgagagtctctcacggcaccacctgccgtcttcttctccacagagcagcaagccaaggtgtaaccttagctttactacacgatctgcaagactaggcagccaaaatggagtccaaatgttgagccactcggaaatcccacaaagggactggttcccctctgacttcaccttcggtgccgccacttcagcgtaccaaattgaaggt

SEQ ID NO: 13980 - DNA, 292 bp, Zea mays
cggacgcgtggcgcgacttcgaccgcctcaaggcctccttcgacgctctccgagcggaccacgacgccctcctccaggacaacaaccgcccccgctcacaggctgtgtcgtcgaccgagaagctgcaagagaaggaggatgcgacggacggcggcgccaccgctgacaccgccgcgccggccgtcgacgtcgaggcctcctctggcgaccacgccgaggagccagcagagcatgccgcgacgcctcacgcgctgcaggaggcgaagctcgacgacaggcctgagcacggcag

SEQ ID NO: 13981 - DNA, 273 bp, Zea mays
ggcagaaattttcatgagtgccgccacatcattactgaaggaaaaacatcacggtgttctgatatctgctgttcagctttgcatggagctatgtaatgccagccatgaagcattggagtacttgaggaagaattgccctgaaggactggtccgaatactgagagatgtatccaacagttcatatgctcctgaatacgacattggtggcatcacagatccattcttacatatccgagtgcttaaactcatgcggatactgggccaaagagatgc

SEQ ID NO: 13982 - DNA, 282 bp, Zea mays
cctcaagccaggtcccaacaaacgaggtgtcacggccaccgtcgacgagcgcccccacgttgagctgtttctgtcaactcactgcaagattgctgttgctggcccagacctcacaagcggtggatggggctttgcatctccaagggactcccctccgcaaacagacccgtccaccgcaaccctgacactgtcggacaacggggagctgcagcggacccatgacaagcggcccaacacaggcgaccgctcaacggacaacgccgagctcgtggactcgaacca

SEQ ID NO: 13983 - DNA, 284 bp, Zea mays
caaccaagtccatgacaggacattgccttggcgcacaggcggtttggaagcattgctaccattaaagcgataactactggatgggtgcatccaagcataaaccaatttaacccagaggaagcagttgaatttgacactgtacctaatgtaaaaaagcagcatgaagtgaatgtcggtatcccaaatccccttggatttggaggtcacaattctgtcgtagtatctgcaccacttaagccataaggtgttccttgcctcacaaatcttggtcagaacagtgagac

SEQ ID NO: 13984 - DNA, 304 bp, Zea mays
cccacgcgtccgctccattggcacggggggcgtcaagtcagcttcacttccattgggagcagatcagcacaatgatgcgaacgccgaagagagcaaaagcaagcaactgttcttcagttggttcttcatggctgtcaaccttggagtgttcatctccggcactgttcttgtctggatacagcaaaacgtcgcttggtctcttggattcggcatctcctcgatatgccttgtcatcgccgcagttgcctttttggttggaacaccgctctacagggttcaactctcaactgggagcccactcaag

SEQ ID NO: 13985 - DNA, 313 bp, Zea mays
ggcaacttgttttgcttatgggcaaactggcagtggaaagacatataccatgcgtccccttcctcttaaggcttcccaagatatcttgaggttaatgcaccatgcatatcgaaatcaaggatttcaattgcatgttagcttctttgagatatatggtggcaaattatttgaccttctcaatgataggagcaaactttgcatgagagaggatgcaaagcaaaaggtttgtattgttggtttgcaagagtatagagtgtccgatgtagagactatcaaggagttgattgaaaaaggcagtgctacccagagtact

SEQ ID NO: 13986 - DNA, 305 bp, Zea mays
cactggctcttggacactcggacaagacagcagttttgacgcatgccactattgacgacatcgaagcggagaaatccctcatcgaagaccaagctaaagacaagatggagaaggcgatcgacacagtccaaactaacttcaacactgtgaggacagggcgtgcaagcccggcaatgcttgaccggctcgaggtcgagtactacggaactccagtgaacttgaagagcattgcacagataagcactccagatgcaagttctcttcttattcaaccatatgataagtcaagcctcaagcttattgag

SEQ ID NO: 13987 - DNA, 311 bp, Zea mays
gcttcaagctgctcgacataaatccagaggcctacaccgcatggcactaccggaagcttgcgtttcagcacaatgtcaaggagctttctgatccggaggccatcaagtctgctgttgatgatgagctgagagtcgttgacgttgctttaaggcaaaacccaaaatcctatggagcttggtatcaccgtaagtcgttgctatgccaaacgctagcgcccgtcgatttcaaacgtgagtctggcctcttggataaactgttgaaggtggacgccaggcattttcatggatggaactacagaaggttccttgca

SEQ ID NO: 13988 - DNA, 313 bp, Zea mays
gactgcggcacggagtgcagagagcggacgcaacgcaacaccgcccactctctatcactgacgatcgacgcgaggagcgcactgaagccagccgccgatgagtcgcctcctctcgcggcagcaccttgccgccgtccgtcgatctgcaccctttgcgtgcgtgtccaggtggctgcacacgccgtcattcgcgacggtgtctccgcaagacgtttcaggttccagcccagcggaagtgcagaattttgtgcagggcagctggacagcatctgctaactggaactggatagtcgatcccctgaacggtgataaa

SEQ ID NO: 13989 - DNA, 312 bp, Zea mays
ctgctcgttcgatctgtgcagcagatctgaggtcccgggcgaccgtgaagcagcttcaatcgtcggcatggcgctcgtattgcatagtggggctggaaacaagaatgccttcaaagcacttattgctgcagaatacagtgggatcaaggttgagttgaccaaggattttgagatgggtgtctccaacaagacccctgagtttcttaagatgaacccccttgggaaggttcctgttctggagactcctgatggccctgtttttgagagtaatgctatcgcacgctatgttgctcgcttgaaggatgacaaccc

SEQ ID NO: 13990 - DNA, 314 bp, Zea mays
gcgaacagcgcccttttttttttttttttgtaacaaaaacacaattactcaacttgtcattacaaatacgcaaagaatcaagtgtacaggacaaataacaattcataatatactatcaacaccttcttggtcttcagtttattatggaggcctttgttcacaaagcattcaaggatagacctcgatgatgaccgatacatcaccaatgacgggtagaattttgtagtctttgaatccagcttcagtgaagatcttcttccactcttgctcgtcacgctcaactccgttaaccgccatcatatacaaatcaaaca

SEQ ID NO: 13991 - DNA, 317 bp, Zea mays
gcgatacagctctacaccgggttccagtgcaccgtggacgaggagacgtcggagaagttcaagggtctgcctggggtgctgtgggtgctccctgattcctacatcgacgtgaagaacaaggactacggaggtgacaagtacgtgaacggcgagataatcccctgcacgtacccgacgtaccagccgaaggagcggaggacgtccaagtacgagagcaggcggtacgagaggcggagagatgggccaccggcggccagcaggaaaccgaggcagcaggcaccagctcagactcagaccgagtcggcgtcttcgtgacg

SEQ ID NO: 13992 - DNA, 307 bp, Zea mays
ccaactctaaccccgtcgcttccggctcccgcagcgtcgccgaccttcacagccggttccttcctctgccaccatggggaagacacgtggtatgggagctgggcgcaagctcaagacccaccgcaggaaccagaggtgggctgacaaagcatacaagaagagccacttgggcaatgagtggaaaaaaccttttgctggatcatctcacgccaagggcatcgttctggagaagattggtattgaggccaagcagccaaattcggccatccgtaagtgtgcccgtgttcagctggtcaagaatggaaag

SEQ ID NO: 13993 - DNA, 305 bp, Zea mays
  unsure (1)..(305): unsure at all n locations
cgncgtctgccttctgcgcctccatttcggcctctgtcccttgcaagttcaatctcacctccaaccatgggtaaagagaagtcccacatcaacattgtggttattggccatgtcgactctggcaagtcgaccaccacaggacaccttatctacaagcttggaggcattgacaagcgtgtgatcgagaggtttgagaaggaggctgctgaaatgaataagcggtccttcaagtacgcgtgggtgctcgacaagctcaaggctgagcgtgagagaggtatcaccattgatattgctctgtggaagtt

SEQ ID NO: 13994 - DNA, 303 bp, Zea mays
ctggatgaacgaccccaatggccccgtgtactacaagggctggtaccacctcttctaccagtacaaccctgacggcgccatctggggcaacaagatcgcgtggggccacgccgtgtcccgcgacctgatccactggcgccacctcccgctggccatggtgcccgaccagtggtacgacaccaacggcgtgtggacggggtccgacaccacgctccccgacggccgcctcgccatgctctacacgggctccaccaacgcctccgtccaggtgcagtgcctggccgtgcacgccgacgacgccga

SEQ ID NO: 13995 - DNA, 285 bp, Zea mays
cggacgcgtggccacggaaccactttcccccgcactatgctgccatatctgagtccaacgtccccgccgagctcttcccgcagtgctccaacttcgactacatcgtcggcggagcggcatccctggggtaggcggcgcgccgcgcgcccgccgcccgtatttctcttcgtcatcgacacctgcgtcatcgaggaggagctggagtacgttaagatggccatgcggaaggccgtcgcgctcctgccggagcacgcactcgtgggcaacgtcaccttcggcacgcag

SEQ ID NO: 13996 - DNA, 305 bp, Zea mays
cggaccgtggtcccgtttcgctctctgccgccgccaccgcacaagaagctagctcctgcctgtaccgccccgtcatggcgatgctatccagtgcagctcctccgcggcccggcgcccgctgctgccgccgcctaggcttctggcggtgagggcgatggcgtcgtcgctcttcggccacgtcgagccggcgcccaaggaccccatcctcggcgtcaccgaggctttcctcgccgacccctcgtccgacaaagtgaacgtcggcgtcggcgcctaccgggacgacaacggccagcccgtcgtgctca

SEQ ID NO: 13997 - DNA, 308 bp, Zea mays
cgaaaggcggcctctcactcgcagtcgcagtagcaggttctagaccaccaaacccagcggctcccgctcatctcagttcggcttcggccttcgcattcctctacagatttcgcagttttgctgggggtaactacggaatggggggcggatccggatctttcctcaaggtcttggtcaacaacatggatgtcctcgcggggcctttggtttcacttgcgtatcctctgtatgcctctgttagagcaattgaaacaaaatctgctgtggatgatcagcaatggctcacgtactgggtgctgtactcattt

SEQ ID NO: 13998 - DNA, 300 bp, Zea mays
cggacgcgtggcggccatggtggcagcgatggagctcgagatcctaggcatgaatttcgggtgcgtcctcgcggctctgtccgacgccaagatgctccgacaagggctgcctgctcccgctcatctctaagctgctcggctacgccatcgtcgccgcatccaccaccgtgaagcttccccagatactgaaaattttgaagcatggaagtgttagaggactaagtgtggcatcctttgaacttgaggttgtcggctacacaattgctttggcatattgtattcataaaggacttccctttt

SEQ ID NO: 13999 - DNA, 296 bp, Zea mays
ctgaagaacgccatcgagctgggcctgctggaggtgctgcagaaggaggccggcggcggcaaggcggcgctggcgcccgaggaggtggtggcgcggatgcccgcggcgcccagcgaccccgccgccgccgcgccatggtggaccgcatgctccgcctgctcgcctcctacgacgtcgtccggtgccagatggaggaccgggacggccggtacgagcgccgctactccgccgcgcccgtctgcaagtggctcacccccaacgaggacggagtgtccatcggccgcctcgcgctcatg

SEQ ID NO: 14000 - DNA, 294 bp, Zea mays
gccagataacacaatatttgtccgaccctcagtactactttcaagtcaacagccagtatgtgaggaacaaactgaaggtcatcttgttccctttcttgcacaggggccactggacaagaataactgaaccagtaggaggaaggctatcctacaaacctccagtccaggatatcaatgcaccggacttgtacatccctttgatggcatttggcacctacattgtagctgctgggtatgccttgggtgttcttggaaggtttacccctgaggcactgaccctacagttttctaaag

SEQ ID NO: 14001 - DNA, 308 bp, Zea mays
cagctcatggagctcggcggtaccgcaatgtcgctgctgctgctgctgctcgtgctcgccgcgtcgccattgcagcaggccagggcggttggcggcggcaggccgcgggtaccggccatcctggtgttcggcgactccatcgtggacacgggcaacaacaacgccgtcctcacgctcaccaagtccaacttcaggccatacggcaaggacctcaacggcggcgtccccaccggacgcttctccaacggcaggattccgacggacttcgtagcttcacggctcggcttgaaagatctggttccggcgta

SEQ ID NO: 14002 - DNA, 325 bp, Zea mays
cacaagtcgtcgtaggcagcgagcgtctctcctctcccacgcatcgcgccaaggaagagagagagatcgccgctccccttctcggcgtcggtggtgcgggtgccctccctcctcgagcgagatctgtctggtcacagatctatctgacaaaatggtgaagatctgctgcatcggtgctggctatgtcggtggcccaaccatggccgtcattgccctcaagtgcccagacattgaggtcgtcgtcgttgacatctccaagccccgcattgagggctggaacagtgacaccctgccaatctacgagcctggtctcgatgatgttgtg

SEQ ID NO: 14003 - DNA, 324 bp, Zea mays
agaaaaggagaaaataagagtgaagttggtgcttctgaacgtctcattgctggtggtttagcaggtgcagtggctcaaacagcaatttatcctatagagttagtaaagactcgtctacagacttattcaggtgaggttggttatgttcctagaattggtcagctctcaagggatattttggtgcatgaaggtccccgagctttttatagaggtcttgttccatctttgcttggtatcgtaccttatgctggaattgatcttgctgtatatgagactttgaaagatgtgtcgaagacatatatactgaaggacagtgatcctggt

SEQ ID NO: 14004 - DNA, 328 bp, Zea mays
cccagcggcccaaccgaacccgcctagggattcctaccgagggaggccgcacgcagccatggatttcctgcaggagcaaagcgtcgagaccacagtggccgtcgccgtcgctgtcgccgccgtcgccgcagggcgccttcctcctccttcgatccaggaagcccaagggctgcttggatcctgagaacttcaggaagttcaaacttgttgaaaagaagcaaataagtcataatgttgccaggttcaagttcgctcttccaactccaacttctgtattgggccttccaatcggtcaacatatcagctgcagaggacaagacgctacagg

SEQ ID NO: 14005 - DNA, 331 bp, Zea mays
cgggagacccgcgagaggctgccgtgtagggaccgtagactcagcgactgcgaaggagggataaggggatggccgggatcggaccgatcaggcaggactgggagccggtcgttgtgcggaagaaggcacccaccgccgccgccaagaaggatgagaaggccgtcaacgccgcgcgccgcgccggtgcggagatcgataccatgaagaagtacaacgctggtacgaacaaggcggcatccagcggtacatccctcaacaccaagcgcctcgacgacgacaccgaaaacctcgcccatgagcgagttccaagtgatctgaagaagaatctcat

SEQ ID NO: 14006 - DNA, 330 bp, Zea mays
agagcggcggcgcgggcggacaaggagcaggcggaggaggagctgtgccaagccacaatgggtatctcgcgtgactcgatgcacaagcgccgggccacggtggaaagcagaaggcctggaggaagaagcgaaagtatgagcttggtcgccagccagccaacaccaagttgtcaagcaataagacagtgaggagggtccgtgttcgtggaggtaatgtgaaatggagggctcttcgccttgatactggtaactactcatggggaagtgaagctgttacccgcaagacccgtatcctcgacgtggtctacaatgcatcaaacaatgagcttg

SEQ ID NO: 14007 - DNA, 332 bp, Zea mays
gaaaaaaaacacgagaaaaatcaaatcaggagacggggattccagagagcccctctcgggtagggaagggaaggagaggcgaacggaggcgagatgggggcggccgaatccgtgccggagacctccatacacgaattcaccgtcaaggattgcaacggcaaggaagtgagcctggaaacctacaaggggaaggtcctccttgttgttaacgtcgcctccaaatgtgggttcacggagaccaattacacgcagctgacggagctttatcagaagtacagggacaaagacttcgagatattggcattcccttgcaatcagttcttgcgacagga

SEQ ID NO: 14008 - DNA, 334 bp, Zea mays
cccacgcgtccgttactgcattggttgtcatctatgcactcacttcaggaattgctggatacgttgctacctctttttattctcagctggaggggacaaactgggctaggaacttgctattgacaggatgcctgttctgtggacctctcttactgacattttgcttcttgaacactgttgctattgcttatagtgcaacagcagcactgccctttggcactatctgtgtcattgtgctcatctggaccttggtcagatttcctttgcttgttttgggtggtactgctggtaaaaacagcaaaagtgagttccaagctccttgcagtaccacaaa

SEQ ID NO: 14009 - DNA, 329 bp, Zea mays
accttactgagtggaggaagcgtgaaatgctcaaatggccccaacgggtttgcgctgccattggcgttgcgagaggggttcagtttctgcataatctgactgctcctgggaacgtacagaacaatctcaacatagaacatatcctgctggacaagaccctcacgtctaagatcagcaacttcagtcttccaatgatatcaactagcaagaacggcaagattctctcagagaccccatttgctgtccatgaagacaatgatattggcagtgctcagaacgcggcacaaggtgacaaggaagacatctaccagattggcctaattctcctg

SEQ ID NO: 14010 - DNA, 318 bp, Zea mays
cataaaaccagtgcaagcagaagcagcgcaatggcgagcagcaccatggccctctcctccacagccttcgccggcaaggcagtgaacgtgccgtcgtctctcttcggcgaggcccgcgtgacgatgcgcaagacggcggcgaaggcaaagccggcggcgagctccggcagcccgtggtacggccccgaccgcgtgctctacctgggcccgctgtccggcgcgcccccgagctacctgacgggagagttcccgggcgactacggctgggataccgcggggctgtcggcggacccggagacgttcgccaagaaccgggag

SEQ ID NO: 14011 - DNA, 324 bp, Zea mays
ccacgcgtccgggaacctcaagagcgccgccagcaccgccgccgacagggcgccgcctgcaactgcctcaagaacgccgccaggggcgtcacggcctcaacgccggcaacgccgccagcatcccctccaagtgcggcgtcacatcccctacaccatcagcacctccaccgactgctccagggtgaactaaaacctagaccacgcgcgacgacggccgcctgatcgatcgaccaaccattccgccgtcgccgccggccggatcatcgatcgtcgtcatgatgatatctatcaatctacgcgtgatgatcgatggctacttgtcta

SEQ ID NO: 14012 - DNA, 324 bp, Zea mays
ctccagtccttcttcgtaagccttcaaaccgacgaatttgagcaactgcacccagagcgcgatccattgccggggaagaagcaacttgttgcgagcctcctctatggcgagctccgaccatggttccaccaccgcccccaaggacgtgccgggcagctacggcctgccgctggtgggcgccgtgcgcgaccgcctcgacttctactacttccaggggcaggacaagtacttcgagtcccgcgtggagcgctacggctccaccgtggtgcgcatgaacgtgccgccgggctccttcatggcgcgcgacccgcgggtggtggcggt

SEQ ID NO: 14013 - DNA, 286 bp, Zea mays
cggaccgtgggggctctcacctcccgcgcgctcgtcggcaagccggcgaccagcaccagggacgtcttcggcgaggagcgcatcaccatgcgcaagactgctgccagcccaagccagctgcgtccggcaggccctggtacggggccgaccgcgtcctgtacctgggcccgctgtccgggcaggccccaaggtacctgaccggcgagttccccggcgactacggctgggacaccgcggtgctgtccgccgacccggagactttcgccaagaaccgcgagctggaggt

SEQ ID NO: 14014 - DNA, 328 bp, Zea mays
accatatcgacatcgacgccagcgagccaaggacagaacagccggcgcccggccctaaaactgccgtgcagcgtgagagaagcgagggaaagatggaccggtaccagagagtggagaagcagagggaggaggcacccatcaaggaaaacgagatccgcattaccacgcaggggaggatgcgcaactacatcacctacgccaccggcttgcttcaggacaaaggttctgatgaggttgtattcaaggccatggggagggctatcaataagactgtcatggttgtggaattgatcaagaggaggattgttggcctccatcagaataccac

SEQ ID NO: 14015 - DNA, 214 bp, Zea mays
gttcccaatatgtcattcgagtatgtagactcagaaatccatgaagatctacataagatcattaagtactcctgcggtgaaatctgcaattcttcagatcaattagataaagtgatgagaatatggacaacttttgtggagccaatttggggtgtcagcgaaaacatggcttcgaagatcctgacctagttaagccaaagagcggaacaacaaa

SEQ ID NO: 14016 - DNA, 318 bp, Zea mays
cgcctgtggctgttgatcctgaccgtcccacatcatcccttgctgtgcacattgcttggatcatggatgttcttcaaaagaatctggatatgaagtctaagatataccgtgatccatctcttgcttctatcttcctgatgaataatggcaagtacatcatacacaaggtgaatgacagtgagttgggtgttttactcggtgatgagtggataaagcagatgacaaatagagttcgacgctggagcatggattatcagcgggcaacatggggcaaggttacaactgtgctgcaaagtggcactccaggcattggtggac

SEQ ID NO: 14017 - DNA, 316 bp, Zea mays
agctcttagaagcaaacatactaatctagccaatgagcttgagcttttactgtcagaaattggatcacggtttgttactctgcctgaggaaagacttctagctgtggttaatgctctgcttcatcgctgctacaaatatccaactgcaaccactggcgaggttccacagtctctcaagaaggaactctctggtgtatgtagagcttgcttctcacaagatgctgttaacaagcatgttgattttgtgaaggagtacaagcaagattttgaacgtgatcttgacccagagagcgctactacttttcctgcaaccctt

SEQ ID NO: 14018 - DNA, 312 bp, Zea mays
gccaaggactggagaggtggcagggctgccagctttaacatcattcctagcagcaccggtgctgccaaggctgttggtaaagttcttcctgatctgaatggcaagctcactggtatgtccttccgtgttcctactgtggatgtctcggttgttgacctcaccgtcagaatcgagaagggggcctcctatgaggatatcaagaaagctattaaggctgcttccgagggtccactcaagggtatcatgggttatgcggaggaggatctggtttctaccgacttccttggtgacagcaggtcgagcatcttcgac

SEQ ID NO: 14019 - DNA, 217 bp, Zea mays
cggaccgtgggcgacgagctccgcaacctgaggggcgacgaccagcagggcccgtaccaggagcacgaccgcgtctaccgctacgacgtctacaacgacctcggcaaccccgacgccaaaaacccgcgccccgtcctcggcggctccaagcaccacccctacccgcgccgcggccgcacgggccggaagccgacgcagactgaccccaacagcgaga

SEQ ID NO: 14020 - DNA, 301 bp, Zea mays
atgatccttacagcatcactttttccattcttgtgtttctcgattggattgttgttaaacactattgctatcttctaccgatcattagcagctataccatttggcacaatggttgtcatgtttattctttgggctttcatctccttcccgttggttctattggggactgtagttggtagaaattggagtggtgctcccaacaacccgtgtcgtgtgaaaacgatcccgcgcccaattcctgaaaagaagtggtaccttacaccttctgttatttcactgatgggtggacttctccccttcg

SEQ ID NO: 14021 - DNA, 307 bp, Zea mays
tttggagaaactccccggctcgaggagatcgtgacattgagaggacgatgggagggcgcgcgctcctcctcctcctcctggtctcggcgttggtctttcagatccacgcctccgacccgctgctgtacgagccgttcgatgaggactttgaggggagatgtgtcgtctccaagaaggatgaataccaaggtgtgtggaggcatgccaagagtgatggtcatgaggactatggcctccttgttagtgagaaggcaaggaaatacgccataatcaaggagcttgatgagccagttaccttgaaggatgg

SEQ ID NO: 14022 - DNA, 306 bp, Zea mays
cacaagtcgtcgtaggcagcgagcgtctctcctctcccacgcatcggccaaggaagagagagagatcgccgctccccttctcggcgtcggtggtgcgggtgccctccctcctcgagcgagatctgtctggtcacagatctatctgacaaaatggtgaagatctgctgcatcggtgctggctatgtcggtggcccaaccatggccgtcattgccctcaagtgcccagacattgaggtcgtcgtcgttgacatctccaagccccgcattgaggcctggaacagtgacaccctgccaatctacgagcct

SEQ ID NO: 14023 - DNA, 304 bp, Zea mays
agaaaaggagaaaataagagtgaagttggtgcttctgaacgtctcattgctggtggtttagcaggtgcagtggctcaaacagcaatttatcctatagagttagtaaagactcgtctacagacttattcaggtgaggttggttatgttcctagaattggtcagctctcaagggatattttggtgcatgaaggtccccgagctttttatagaggtcttgttccatctttgcttggtatcgtaccttatgctggaattgatcttgctgtatatgagactttgaaagatgtgtcgaagcatatatact

SEQ ID NO: 14024 - DNA, 304 bp, Zea mays
cccagcggcccaaccgaacccgcctagggattcctaccgagggaggccgcacgcagccatggatttcctgcaggagcaaagcgtcgagaccacagtggccgtcgccgtcgctgtcgccgccgtcgccgcaggcgcacttcctcctccttcgatccaggaagcccaagggctgcttggatcctgagaacttcaggaagttcaaacttgttgaaaagaagcaaataagtcataatgttgccaggttcaagttcgctcttccaactccaacttctgtattgggccttccaatcggtcaacatatcag

SEQ ID NO: 14025 - DNA, 307 bp, Zea mays
gggagaccgcgagacgctgccgtgtagggaccgtagactcagcgactgcgaaggagggataaggggatggccgggatcggaccgatcaggcaggactgggagccggtcgttgtgcggaagaaggcacccaccgccgccgccaagaaggatgagaaggccgtcaacgccgcgcgccgcgccggtgcggagatcgataccatgaagaagtacaacgctggtacgaacaaggcggcatccagcggtacatccctcaacaccaagcgcctcgacgacgacaccgaaaacctcgcccatgagcgagttccaa

SEQ ID NO: 14026 - DNA, 287 bp, Zea mays
agagcggcggcgcgggcggacaaggagcaggcggaggaggagctgtgccaagccacaatgggtatctcgcgtgactcgatgcacaagcgccgggacaccggtggaaagcagaaggcctggaggaagaagcgaaagtatgagcttggtcgccagccagccaacaccaagttgtcaagcaataagacagtgaggagggtccgtgttcgtggaggtaatgtgagatggagggctcttcggcttgatactggtaactactcatggggaagtgaagctgttacccgcaagac

SEQ ID NO: 14027 - DNA, 303 bp, Zea mays
gaaaaaaaacacgagaaaaatcaaatcaggagacggggattccagagagcccctctcgggtagggaagggaaggagaggcgaacggaggcgagatgggggcggccgaatccgtgccggagacctccatacacgaattcaccgtcaaggattgcaacggcaaggaagtgagcctggaaacctacaaggggaaggtcctccttgttgttaacgtcgcctccaaatgtgggttcacggagaccaattacacgcagctgacggagctttatcagaagtacagggacaaagacttcgagatattggca

SEQ ID NO: 14028 - DNA, 307 bp, Zea mays
cccacgcgtccgttactgcattggttgtcatctatgcactcacttcaggaattgctggatacgttgctacctctttttattctcagctggaggggacaaactgggtgaggaacttgctattgacaggatgcctgttctgtggacctctcttactgacattttgcttcttgaacactgttgctattgcttatagtgcaacagcagcactgccctttggcactatctgtgtcattgtgctcatctggaccttggtcacatttcctttgcttgttttgggtggtattgctggtaaaaacagcaaaagtga

SEQ ID NO: 14029 - DNA, 295 bp, Zea mays
cataaaaccagtgcaagcagaagcagcgcaatggcgagcagcaccatggccctctcctccacagccttcgccggcaaggcagtgaacgtgccgtcgtctctcttcggcgaggcccgcgtgacgatgcgcaagacggctgcgaaggcaaagccggcggcgagctccggcagcccgtggtacggccccgaccgcgtgctctacctgggcccgctgtccggcgcgcccccgagctacctgacgggcgagttcacgggcgactacggctgggataccgcggggctgtcggcggacccgg

SEQ ID NO: 14030 - DNA, 285 bp, Zea mays
ccacgcgtccgggaacctcaagagcgccgccagcaccgccgccgacagcgcgccgcctgcaactgcctcaagaacgccgccaggggcgtcacgtgcctcaacgccggcaacgcgccagcatcccctccaagtgcggcgtcacatcccctacaccatcagcacctccaccgactgctccagggtgaactaaaacctagaccacgcgcgacgacggccgcctgatcgatcgaccaaccattccgccgatcgcgccggccggatcatcgatcgtcgtcatgatgatat

SEQ ID NO: 14031 - DNA, 286 bp, Zea mays
cagacgtggggactctcacctcccgcgcgctcgtcggcaagccggctaccagcaccagggacgtcttcggcgaggtgcgcgtcaccgtgcgcaactactgctggcaagcccaagccagcggcgtccggcagccccgtggtacgggggccgaccgggtcgtgtacctggggccgctgtccggccaggccccaagctacgtggccggcgagttccccggcgagtacggctgggacagcgcgggggtgtccgccgagccggagagtttcgccaagaaccgcgagctgga

SEQ ID NO: 14032 - DNA, 288 bp, Zea mays
gttcccaatatgtcattcgagtatgtagactcagaaatccatgaagatctacataagatcattaagtactcctgcggtgaaatctgcaattcttcagatcaattagataaagtgatgagaatatggacaacttttgtggagccaattttgggtgttcagcgaaaacatggctccgaggatcctgacctagttaagccaaagagccgagcaacaaaatcgggtattgcaaatgttggggaaagcaacactggagctgggattgtctccaggcataacaacgatgatgaa

SEQ ID NO: 14033 - DNA, 287 bp, Zea mays
cgcctgtggctgttgatcctgaccgtcccacatcatcccttgctgtgcacattgcttggatcatggatgttcttcaaaagaatctggatatgaagtctaagatataccgtgatccatctcttgcttctatcttcctgatgaataatggcaagtacatcatacacaaggtgaatgacagtgagttgggtgttttactcggtgatgagtggataaagcagatgacaaatagagttcgacgctggagcatggattatcagcgggcaacatggggcaaggttacaactgtg

SEQ ID NO: 14034 - DNA, 287 bp, Zea mays
agctcttagaagcaaacatactaatctagccaatgagcttgagcttttactgtcagaaattggatcacggtttgttactctgcctgaggaaagacttctagctgtggttaatgctctgcttcatcgctgctacaaatatccaactgcaaccactggcgaggttccacagtctctcaagaaggaactctctggtgtatgtagagcttgcttctcacaagatgctgttaacaagcatgttgattttgtgaaggagtacaagcaagattttgaacgtgatcttgacccag

SEQ ID NO: 14035 - DNA, 285 bp, Zea mays
gccaaggactggagaggtggcagggctgccagctttaacatcattcctagcagcaccggtgctgccaaggctgttggtaaagttcttcctgatctgaatggcaagctcactggtatgtccttccgtgttcctactgtggatgtctcggttgttgacctcaccgtcagaatcgagaagggggcctcctatgaggatatcaagaaagctattaaggctgcttccgagggtccactcaagggtatcatgggttatgcggaggaggatctggtttctaccgacttcctt

SEQ ID NO: 14036 - DNA, 288 bp, Zea mays
cggacgcgtggcgacgagctccgcaacctgaggggcgacgaccagcagggcccgtaccaggagcacgaccgcgtctaccgctacgacgtctacaacgaactcggcaaccccgacgccaaaaacccgcgccccgtcctcggcggctccaagcaccacccctacccgcgccgcgccgcacgggccggaagccgacgcagactgaccccaacagcgagagcaggctgacgctgaccgacggcgacgtctacgtgccgcgcgacgagcggttcggccacatcaagaactccg

SEQ ID NO: 14037 - DNA, 317 bp, Zea mays
  unsure (1)..(317): unsure at all n locations
gaagcagcagccaattcgctcgagttcagatcgagcgcgcgccaagcaagtcttccggccggccgcgaagagcgcaatcaagcaagacaagatggtgaagctcgccttcggaagcgtcggcgactccttcagcgccacctccatcaaggcctaactggccgagttcatcgccaccctcctcttcgtcttcgccggcgtcggttccgccatcgcctacgggcaactgacgaatggcggcgcgctggacccggcgggcctggtggcgatcgcgatcgcgcacgcgntggcgctgttcgtgggcgtgtccgtcgcggcga

SEQ ID NO: 14038 - DNA, 308 bp, Zea mays
gcttgtggccactggcatcgtcggcggcgccttgtcgcaggcggcgcgcgccgagaccgtcaagaccatcaagattggagccccgccgccgccctccggtggactccacgggactctcaactctgaccaggcgagggacttcgacctccccttgaaggagcggttctacctgcagccgctgccgccggcggaggcggcggcgagggtaaagacgtcggcgcaggacatcatcaacctcaagccgctcatcgacaagaaggcgtggccgtacgtccagaacgacctccgcctccgggcctcctacctgc

SEQ ID NO: 14039 - DNA, 304 bp, Zea mays
cagcggaacacgggaacggcggaagcaaacaactagaaattccccagcccggttctttgcgtgcggttgatctcgtcggaggcccggccgcggttccccaatccgccatcgaattcgatggcggccaacgccgggaataagatccgcaacgccaagctggttcttcttggagatgtgggcgctggcaaatctagcttggttcttcggtttgttaagggacagtttgttgaattccaggaatcaacaattggagcagccttcttttcccagaccttagcggtcaatgatgagactgttaagtttg

SEQ ID NO: 14040 - DNA, 298 bp, Zea mays
gtgctcgtgatctcaacccaaggcgtgcctccgctccggtcacccgtcgctccacgcaaccatgtcgaggaggaagaccagggagcccaaggaggagaacgtcacccttggacccactgtccgtgaaggagagtatgtctttggtgtcgctcacatctttgcatccttcaatgacaccttcattcatatcactgatttgtctgggagggaaactctggttcggatcaccggtgggatgaaggtgaaggcctgacgtgacgagtcgtcacttacgctgctatgcttgctgctcaagacg

SEQ ID NO: 14041 - DNA, 309 bp, Zea mays
cggacgcgtgggctgtggtgggcaacaacttcttggcccgcgacctgacgatcgagaactcggccgggccgtcgaagcaccaggcggtggcgctccgcgtggctggcggacctgtcggcgttctaccggtgcagcttcgtggggtaccaggacactctgtacgtgcactcgctgcggcagttcttccgcgactgcgacgtctacggcaccatcgacttcgtgttcggcaacgcggccgtggtgctgcacggctgcaacctgtacgcgcgcatgctgctgccgaaccagagcaacatcttcacggcgcag

SEQ ID NO: 14042 - DNA, 303 bp, Zea mays
cacatctgctgtggataaactggataagggtctgacggacgctggtgtctcgtaccacaacctttccgggaggcacaagagcgtgtacagtatccactccaagatgctgaagaagaacttggcaatggaggagatccacgacatacatggcctgcgccttgtggttgacaacgaagaagattgctacgaagccctctgtgtcgtccataaactgtggcctcgagttactggtcggttcaaggactacatatcacgtccaaaactaaatgggtaccggtcgctgcacaccgtcgtcatgggcga

SEQ ID NO: 14043 - DNA, 300 bp, Zea mays
tttatctaagagctagccctgatacttgtcacaaaagaatgatggtgcgaaaaagatcagaggaggctggtgttactcttgattaccttcgaggtttgcatgagaaacatgagagctggttacttccatccaagggaggaggttctggcgtgttgtccatcagtcagcttccagttcatatggagggctccctgcatgcggatatacgagatagggtattctacttggaaggagatcacatgcattcaagtatccagaaggttcctgctcttatcctggactgcgaacatgacattgatt

SEQ ID NO: 14044 - DNA, 304 bp, Zea mays
ggacgagactcgcagctagctgacacggccgagaagcagcttgcattgcaggcgtagtacgtacccagcagcagctagcactagcagtccatcggagcgacgatggtgagaaggacggtgctggcggcgctgctggtggccgccgccctcgccggcggcgcgcgggcgcactcaaggaggggttctacgactactcctgcccacaggcggagaagatcgtcaaggactacgtgaaggcgcacatcccccacgcgcccgacgtcgcctccaccctgctccgcacccacttccacgactgcttcgt

SEQ ID NO: 14045 - DNA, 301 bp, Zea mays
  unsure (1)..(301): unsure at all n locations
cccacgcgtccgcccacgcgtccgcccacgcgtccgatctccctctccgaaatcaaggtagcgtacaccgctgcagtttctagagccctctctgccactcgtgatcccactagtcacaatgcctgccctcgccaagcccgcctcccgcaccgccaagcccgccgcggctccgaagccgaagcctgccgccgccaagccgaaggcnccaccgctggtgcctcccacccgccttacttcgagatgatcaaggaggctatcacggcgctcaaggagaggaccggctccagctcgcaagcgatcg

SEQ ID NO: 14046 - DNA, 302 bp, Zea mays
atggacttcattgaagggttaccgaagtccggaacaatggattgcattctggtggtggtagaccgattctcaaaatatggtcatttcttggcgctagcccaccctttttctgcagcaaaggtagcaaaacttttcttggataatatctataagcttcatggtatgccggacaatatagtatctgatcgggatagagtgttcacaagtctgttctggcagcaattattcactctcagtggcacccaattatgcatgagttcggcttatcacccacaatccgatggccagacggagcgcgtaaa

SEQ ID NO: 14047 - DNA, 300 bp, Zea mays
tggcgacggccagtcggcctgggagtcaagtgcgccaaggaggtggccaccgccatccgcggcgccatcatcctagccaagctctccgtcgtccccgtcaggagggggtactgcgggaacaagatcggacagccccacaccgtgccctgcaaggtcaccggcaagtgtggctccgtcactgtgcgcatggtgcccgcgcccaggggttctggcatcgtcgccgcgcgcgtgcccaagaaggtgctgcagttcgctggcattgaggatgtcttcacctcgtcccgtggctccactaagacc

SEQ ID NO: 14048 - DNA, 287 bp, Zea mays
gatggttcaaatctagagcatcagaaagcactggtggccctttggcatgcttcttttcctggaactgaacttctaggattagtatcagaccagtggaaggagatgggatggcaagggaaagatccatctacagatttcaggggtggtggttttatatctttggagaatttactgtatttctctaagaaatatccaaaatccttccatgagctccttcgtaagcagaatggtgatagagcattgtgggaataccctttgctgtagctggtgtaaatattacattcatg

SEQ ID NO: 14049 - DNA, 293 bp, Zea mays
cccacgcctccgcgccggcctcccacagcttactacaaaaaccctaaccccttcccttatcctctgctccctctccacggttccacgaacgttggcgcgcaactcgtggtgtgagcggtcactgtctcccatcccatggctccggcgctgagcgggactctgggcgcgtcgtcggtggcggcgctgcggccctgcgcggggaggagggcgccgtccgccgcgagctcggttgcgccgcgcgggagccgggtggtgaggtgctccagagggctcaggtgggacgcccacagaag

SEQ ID NO: 14050 - DNA, 299 bp, Zea mays
cggacggtgggggtggtttcttgtcatcactatgtggcggtaggaagaaggcaagcaaatcaaagaagggctcggacaagaagaagtcgcagaagcatgtggacagctctgtgccagtattcaaccttgaagatatagaggagggagttgaaggcgctggatttgacgacgagaaatcacttcttatgtctcaaatgagcctggagaagagatttggccagtccgcagcgtttgttgcctccactctgatggagtatggtggtgttcctcagtccgcaactccggagtctcttctgaaa

SEQ ID NO: 14051 - DNA, 299 bp, Zea mays
cggacgcgtgggctgcagtactgcaaatgaagtgcaaaatggccagcagtagtagagtagtagcagccgccgccgtccttgtagccttttgcgccgccgccctctcactcggccacggtgaccgtgaacgagcccatcgtcaacggcctctcctggagcttctacgacgcgtcctgcccgtccgtcgagggcatcgtgcgctggcacgtcgccgacgccctccgccgcgacatcggcatcgccgccggcctcatccgcatcttcttccacgactgcttcccgcacggctgcgacgcgtc

SEQ ID NO: 14052 - DNA, 299 bp, Zea mays
cccaccgcctccgccgccgacaacagcgtagtgtagtgtagttccggagagggttggggagagtagtagtgatccgcaatgtcgacggaggaggctgttgtggctgaggtcccggtgaccgaggtgccagcggaggtcccggcggcccaggtggccgaggcgcccaaggcgaagaaggcgcccaaggagaagaaggcgcctaaggagaagaagctttccgcggcgaagaagccggcggcgcaccctccctacgctgagatgattgtagaggcgatcgctgccctcaaggagaggaaggg

SEQ ID NO: 14053 - DNA, 302 bp, Zea mays
tttctttccccttggccaagcccaagcccaaacccgggaaccccgtctttaaaaagtacaccctcgactcgtcctccgcattccccgtttgccttgtttaccattcctccccaaaacacatcctgcgatcctcgaagcctccgccgagcatcgatcatgtcggcctactgcggcaagtacgcggatgagctcatcaagaatgctgcctacatcggcacccctggcaagggtatccttgctgctgatgagtcaactggcaccattggcaagcgcctttccagcatcaatgtcgagaacgtgga

SEQ ID NO: 14054 - DNA, 304 bp, Zea mays
cacacagaaaaccctagccgccgccaccgaagcggcctcccaggtaagcaggagcgtccaccccgccgccgtcatgaagcgcaatccccgcgtcacgagctcccgccggaagtgccgcaagcgcactttacggccccgtcctccgtccgccgcgttctcatgtccgccgggctgtcgacggagctccgccacaagtacaacgtgcgctccatcccgatccgcaaggacgacgaggtgcaggtcgtgcgcggcacctacaagggccgcgacgggaaggtggtgcaggtctaccgccgccgctggg

SEQ ID NO: 14055 - DNA, 189 bp, Zea mays
gagcctcattcatctccattcgaaacaccctcgcacccacactctcccttcgtccccagcctaaatccccgcaacgatggctcgcacgaagcagacggcgcgcaagtccacgggcggcaaggccccgaggaagcagctggcgaccaaggcggcgcgcaagtcggcccctgcgaccggcggcgtgaagaa

SEQ ID NO: 14056 - DNA, 246 bp, Zea mays
ctctccatcgtgtacgaccacgtcatcaatccgggccactggaccgaggacatgcgcgacgacgcctggaacctgccgacctcttcagccgccacctcacggtcgtcgacgtcggcggcggcaccgggttcaccacgctcggcatcgtcaagcacgtcaacccggagaacgtcacgctgctcgaccagtccccgcaccagctcgacaaggcccggcagaaggaggccctcaagggggtcaccatca

SEQ ID NO: 14057 - DNA, 311 bp, Zea mays
cccacgcgtccgcgcagagctctcatcctctctctctctctttctcgcgctcgctttgcttcctcgtcgaggtccaagttcctgcattgatggcgaccgaggtggctgagactcccgcgccgttggcggaggcggtccccgagacccccgcggaggcaccggcggcgcccgccgcagaggcgaagcctgccaaggccaagaaggcctctgcgcccaagaagcgtgccaacccgacccacccgccgtacgccgagatgatctcggaggctgtcacgtcgctcaaggagcggacggggtccagccagtacgcg

SEQ ID NO: 14058 - DNA, 309 bp, Zea mays
gcggcgtaggcctcagctcggctcagcagccgcctcgctcgaaccagaggagccaagcagaggaagcgaggcggcgggggcggagatgtcggcgggactggtgaccgacgaggccaccgtggggcggctgtaccggatccggcgcacggtgatgcagatgctccgtgaccgtggctacctggtggtggaactcgagctcgccaccagccgccgcgacttcctccgcaagttcggcgagtccttccaccgcgaggacctcctcatcaacaagtacaagaagaacgacccatccgaccagatatatgtctt

SEQ ID NO: 14059 - DNA, 310 bp, Zea mays
gcgccgccagacactccgtagtctgtaccccaagcaccggcgcggcggcggcggctaccatggcagtcgggaagaacaagaggatctccaagggaaagaagggtggtaagaaaaagaccgtcgatcccttctctaagaaggactggtatgacatcaaggccccatcggtcttcagtgtgcgcaacattgggaagactctcgtgtccaggacacagggtaccaggattgcctctgatggtctgaagcacagagtctttgaggtttgtctagctgatcttcagggtgacgaggatcaggcttacaggaaaat

SEQ ID NO: 14060 - DNA, 309 bp, Zea mays
cacctatcatcgccgctgcgccgtctcctccgctcccgtcgtccggaaagatggcgtcccacattgttggataccctcgcatgggccccaagagggagctcaagtttgcacttgagtctttctgggatgggaagagcaccgctgaggatctggagaaggttgctaccgacctcagggccagtatctggaagcagatggctgatgctgggatcaagtacatccccagcaacaccttctcgtactatgaccaggtccttgacaccactgccatgctcggcgctgtccccgaacgctactcatggactggag

SEQ ID NO: 14061 - DNA, 312 bp, Zea mays
cgccgagaaaggatggcgtcgtggtcgtcgccctcagccgccgcctcgggcgcccgattcggccccttcccgagcggagggcagcggctcgcgccgtgtccgtcgctcgtacgcggaactcccgccccgacgctcgtcctcaggccccacccggacggccgtggccatggcctcctcgcgcacaccggcacctctccctcctcgcggtgccgcgccgtcgccgccgaggtcgggggcctcaacatcgccaacgacgtcacccagctcatcggcaacacaccaatggtgtatctcaacaacgtcgtcaaggga

SEQ ID NO: 14062 - DNA, 305 bp, Zea mays
tgctcgacaagctcaaggctgagcgtgagagaggtatcaccattgatatcgctctgtggaagtttgagaccaccaagtactactgcacggtcattgatgcccctggacaccgtgacttcatcaagaacatgatcactggtacctcccaggctgactgtgctgtccttatcattgactccaccactggtggttttgaggctggtatctccaaggatggccagacccgtgaacatgctctccttgcgttcacccttggagtgaagcagatgatttgctgctgcaacaagatggatgcaaccactccc

SEQ ID NO: 14063 - DNA, 302 bp, Zea mays
cggacgcgtgggccagctgctcggcgctccacgcgatggcgcagaaggagaccaatggcagcaacggcgagcacatctccacccgcccgccgccgaacccgtcgcccctccgcttctccaagttcttccaggctaacctgcggatcctggtcactggtggggcgggcttcatcggctcgcacctcgtggacaggctcatggagaacgagaagcacgaggtcattgttgctgataactttttcaccggttcaaaagataacctgaagaagtggatcggacacccaagatttgagctcatccgc

SEQ ID NO: 14064 - DNA, 303 bp, Zea mays
cagcaacatctacagggtacagctgccgttgtcaccatatagcagaccaaagctccttgctggttctccaaaaggtttatctggccatgtggatggaagactgcgagaagcaaggatgaaccatcctaaagggttcactgtggacgataggggcaacatttatgttgcagacggcatgaacatggcaatacgaaaaatcagtgatacaggggttacaaccattgctgggggaaaatcaattagaggagggcacatagatgggcccagtgatgatgcaaaattctcaactgattttgaaatcaa

SEQ ID NO: 14065 - DNA, 303 bp, Zea mays
gcgtcctcctcacctatcatcgccgctgcgccgtctcctccgctcccgtcgtccggaaagatggcgtcccacattgttggataccctcgcatgggccccaagagggagctcaagtttgcacttgagtctttctgggatgggaagagcaccgctgaggatctggagaaggttgctaccgacctcagggccagtatctggaagcagatggctgatgctgggatcaagtacatccccagcaacactttctcgtactatgaccaggtccttgacaccactgccatgctcggcgctgtccccgaacgt

SEQ ID NO: 14066 - DNA, 303 bp, Zea mays
gttgcaggctctactccgggagggatggcctaccacgaccctgacaagttgaagaagtacgatctggaggacctgaggaagaccccgaaccctttctacctcgagtcggacaaggaggccggcaacgggtacagttttgtgaggacgccgtcgccagcacccggcgtggacgagtcgccgtttatgacgtggggtgagatcgacggaacgccgctgaggctggaccctgacgagacgccgggcggtagcgagagagcgcatttcaagatgccaccacctcctgctcgcgacatcaaggcgcac

SEQ ID NO: 14067 - DNA, 311 bp, Zea mays
cccacgcgtccgcgttctgcgagaaggcaagcgtgggctgcttggttgcgccaacgctgtcgattgggtccgtgctccttcagcaagcggctatacaggcctcgttccactacagcaacgttgagattgtggaatcgagaccaaacccatcggatcttccatcgcaagatgcaatccagattgcaaacaacatatcagaccttggtcagatatacaacagggaagatatggattccagcagtccagccagaggccagctgctcggggaagacggagtgcgcgtgcacagcatggttctccctggtctcgtc

SEQ ID NO: 14068 - DNA, 305 bp, Zea mays
ggaaagcccgacctcaggaagaaagtgatgcctgccgtcatcgtccgccagcgcaaccgtggcgtcgcaaggacggtgtctacatgtacttcgaagataatgctggagtgattgtgaatcccaagggtgagatgaaaggttctgcaatcactggacctatcggcaaggagtgtgctgacctttggcctaggatcgctagtgcagcaaatgccatcgtttgagagcttgttggaatgtgtttagacttgagtatgatcatctcaattgtgtgttgcagctgttgtaagggtgctattggacttgat

SEQ ID NO: 14069 - DNA, 298 bp, Zea mays
ctcatatgtcctctctgagtcaagcttgtttatctatcctctgaagattgtcatcaagacctgtggcactaccaagctcctgctcaccattccaagaatccttgagcttgctgaagagctgtctatgccacttgctgctgtgaagtactcccgtgggacgttcatctttcctggtgcacagccagccccccacaggagcttctctgaggaagttgctgcacttaaccgctactttggcggcctgaaatctggtggtaatgcttatgtgattggagatccagcaagacctggacagaag

SEQ ID NO: 14070 - DNA, 291 bp, Zea mays
gcgcacgaaccaactattcgtttgcttttcgtcttcgtcctctctttgcccagttgtcggtcgcccgcgccgtcgtctccgctccgccggccttcctgcgaaaccctagcgaggcgagcgagagagaaactagcggccatgttcggctacaggaaggctgacccggacctcgaggccggcgggtcctcgctgctgtacccgggaatgacggagagccccgagctgcggtgggcgttcgtccgcaagatctacgtcatcctagccgtccagctcgccatgacggcctgggtc

SEQ ID NO: 14071 - DNA, 293 bp, Zea mays
atctgagattgatggaacaattcaaatgtaagtatatagccactcgagctgaatgttacactaattctctcgagtggctatatacttacatctgagattgatggaacaattcaaatgaaaagttacctcactggcaatccggaaatccgtcttgctctcaatgaggatttgagcatcggaagaactggatcttcttcatacgattacagaagcacttctggaggaggaacagtcattcttgatgattgcaatttccatgagtcagtacatctggacagttttgatattgacag

SEQ ID NO: 14072 - DNA, 298 bp, Zea mays
ggtcctccttgtgagtctgagctgaagaggaggaggaggaggaggagaagcacacgcaccggaggagggagagcgaagatgcgccgcgtcgcgctgttgctcgtcgccgccgtgtgcgcgctggcggcgccggctgccgcggtcgtcactgacggtcttctcccgaacggcaacttcgaggatggcccgcccaagtcggcgctggtgaacggcacggtggtgtcgggcgctcacgccatcccgcggtgggagacgtccggcttcgtggagtacatcgagtcggggcacaagcaggggg

SEQ ID NO: 14073 - DNA, 304 bp, Zea mays
cccacgcgtccgcccacgcgtccgctacaatcctaaaaccatctgcttcagccttcagctagccccaagtttagtcggccgatcgatcactgaagtagtaatggcctccgccaacagctggaccctcgagatcgcgtcgccggtggccccgcagcgcctgttccgcgccgccgtgatggactggcacaccctggcgcccaaggtcgcctcccacgtcgtcgccagcgcgcacctcgtggagggcgacggcggcgttggcagcgtcaggcagttcaacttcacctcagtcatgccgttcagcttc

SEQ ID NO: 14074 - DNA, 296 bp, Zea mays
  unsure (1)..(296): unsure at all n locations
cctgtggcgggcctggggagctgatgggactgtgccgggaggggcgggtaaaggatgccgtggagcttctctccaagggtgcgcgcaccgacctggacaccttctacgagctcgcggccacctgctccaaccctaagctgctggaggagctcaggaaggtgcacgacttcttcctccgctcgcccttccgcggcgacctccgggtcaacaacatgctgctcgcgatgtatgccaagtgcgcagcnatgccacatgcccgcaagacgtttgacaatatgcctgaccgcgacatggac

SEQ ID NO: 14075 - DNA, 299 bp, Zea mays
cccacgcgtccgcccacgcgtccggtcttaggaagtttccagtcaaagctctagtggtggatccggtcatggtgtccaccagcggtgatactctttcaggaccatctactctcgctacatatagggatgaactattttctatggctgatatagtcactccaaatgtgaaagaagcatctaagttacttggtgatgtatcattgcatacaatttctgacatgtgcaatgcagctgaatccatttataaacttggtcccaaatatgtgcttgtgaaaggcggggatatgccagattcatca

SEQ ID NO: 14076 - DNA, 300 bp, Zea mays
gcacgcagcagtacgacgtctctcctctgggtctggggccgagacaccgagcacgtactaccagcaagatggtggcgtctcccagattcaagcccatcgaggagtgctgctcggaggggcggtcggagcagacggtggccgccgacctggacggcacgctgctcatctccaggagcgcgttcccctactacctcctcgtggctctcgaggccggcagcgtcctccgcgccgcgctgctgctcctgtccgtgccgttcgtctacgtcacctacgccttcttctccgagtcgctggccatca

SEQ ID NO: 14077 - DNA, 299 bp, Zea mays
gtgcaatcgtgggctatctgttgtcgatagctacaagattttgaagggtgttgacgttctgagcaaggaggagacatttctggcctgcacccttggctggtgtattgaatggcttcaagcttattttcttgtgcttgatgatattatggacaactcccagacacggcgtggccagccttgctggtttagagtgccacaggttggtctcattgcagtaaatgatgggattatccttcgcaatcatatctcacgaatccttcaacgccacttcaaaggaaagccatattatgttgatatca

SEQ ID NO: 14078 - DNA, 304 bp, Zea mays
gctcctcctcctcctccccccagtccctcccaggctcccaccccgccttgctcgcagcctccccaaaaccctagccctagccctagccctagccctagctctcccacacccgcactgggagatggacggcggcggcacgcaccgcacgccggaagacgtgttccgggatttccgcgcgcggcgggctggtatgatcaaagcgctcaccaccgacgtggagaagttctaccagcagtgtgacccagagaaagagaatctgtgtttgtatggtcttcccaatgaaacatgggaagtgaacctgcct

SEQ ID NO: 14079 - DNA, 303 bp, Zea mays
cccacgcgtccgcccacgcgtccgagttctcgcgcccagagccaaatttttctccactcaatcactgcagccatggacgccagcggaccggtagcaaggcgaagaagggggcggctgggcgcaaggctggcggccccaggaagaagtcggtgtcgcggtccgtcaaggccgggctgcagttccccgtcggccggatcgggcgctacctcaagaagggccggtacgcgcagctgtgggcaccggcgcccccgtctatctcgccgccgtgcttgagtacctcgccgccgaggtgctggagctggc

SEQ ID NO: 14080 - DNA, 307 bp, Zea mays
gcccgccgccaggagagccggctcggtcggttcgtcgaagatcccggatctgctctgtcacgaggtctttcggcgggtgttgtctcgcgaggtgtagcgagccaagttcaggagagtttcgagaagctgaaatggctcctaaagctgctcctgccaagaagggtgatgccaagacccaggccttgaaggttgccaaggctgtgaagtctgggtcagtaaagaagaccaagaagatccgcacgtccgtgacatttcaccgccccaagaccctgaagaaggctagggaccccaagtacccaagaatcag

SEQ ID NO: 14081 - DNA, 297 bp, Zea mays
gctcaagcttaccacgcccagcttcggcgacctcaaccacctcatctccgccaccatgagcggcgtcacctgctgcctccgcttcccggggcagctcaactcggacctccgcaagctggccgtcaacctgatcccgttcccgcgcctgcacttcttcatggtggggttcgcgccgctcacctccaggggctcccagcagtaccgcgccctgacggtgccggagcttacccagcagatgtgggacgccaagaacatgatgtgcgccgcggacccgcgccacggccggtacctgacggc

SEQ ID NO: 14082 - DNA, 296 bp, Zea mays
ccaggttaatgatgggtttcctttctcaattgcattgtcatggaatggagactcccagaacaccccccaacaaacccttgtattcccaaaggggaatgcaattcctagcactaaagttcttaccttctttaaatccagtacatttgaagttgatgttttgtatgtcgacccaaacggcttacaaattccacaaaaaataagcacatacacaattggccctttccaaacctccaaaggagagaaggccaaactgaaagtgaaagtgcgtctcaacatccatgggaccgttacagttg

SEQ ID NO: 14083 - DNA, 294 bp, Zea mays
cccacgcgtccgggccaggtctccctctccccggctctccgccttcctcttccagtccccgcgcgcgagatcgccgccccgtgtgggccctagatcccgatggcctcgcgccgccgcaccctgctcaaggtcatcatcctcggcgatagtggggttgggaaaacttccttgatgaaccaatatgtgaacaagaagttcagcaatcagtacaaggctacgatcggcgcggatttcctcaccaaggaggtgcagttcgaggacaggctcttcactctgcaaatatgggacactgct

SEQ ID NO: 14084 - DNA, 292 bp, Zea mays
gtcattttgacggaggggaataatcaacatattgcagcacacactttcacttttcgtgaacttgcagctgccactaagaacttcagacaagattgcttattgggtgagggaggttttggtcgtgtttataaaggacgtttggagaatggacaggttgttgcagtgaagcaacttgatcgcaatggccttcaaggaaacagggagtttctggttgaggttctaatgcttagtctgttgcaccatgacaatctagtaaacttaattggatactgcgctgatggagaccaacgtc

SEQ ID NO: 14085 - DNA, 296 bp, Zea mays
cggacgcgtggggcgcccaacacactagcctgcaggatcgtcgagcgcgaggcggctgccccgccggccggttcgttcgctctatagcttgagaccgatcctatctaggccaagacgatatcggcggcgatgatgatggacgcggcgaggatcgtagagtacttcaagggcaagtgcatcctcgtcaccggctcaacagggtttcttggaaagatccttgtggagaagatactgcgggtgcagcctgacgtgcgcaagatttacctgcttgtacgcgcggtcgacgagccatcagc

SEQ ID NO: 14086 - DNA, 297 bp, Zea mays
ccctcttgccggtcccgaataaagagcagcagcgcaagaggtcggtagagcgagaagaaggcaatggcggccgagagcttccttttcacctcggagtccgtgaacgaggggcaccccgacaagctgtgcgaccaggtgtcggaagccgtgcttgacgcatgcctcgcgcaggaccccgacagcaaggtggcctgcgagacctgcaccaagaccaacatggtgatggtgttcggcgagatcacgaccaaggcgaccgtggactacgagaagatcgtgcgcgacacctgccgcgagatc

SEQ ID NO: 14087 - DNA, 299 bp, Zea mays
cccacgcgtccgcccacgcgtccggccggaagccggaagcaccggtgacgaagccttccgtgtcatcactcatcaggatctcagggttttgtttcgtttcgcgggcgttgggaatccatccatggcgaggaagatgctcatcgacggggaggtggcggccgtcgcggatggtgggcactatgactacgatctcttcgtcatcggggcgggcagcggcggcgttcgcggctctcgcaccgccgcctccttcggagctaaggttgcgatttgtgagctcccattccaccccatcagctcag

SEQ ID NO: 14088 - DNA, 289 bp, Zea mays
cggtcccactcgcaccccccgacgggtcggaacctcagctcagaggatcggaagaacggacgacggcgagatggcaagcggggaagaaggcaagggcgagacggtgctggtcaccggggccagcggcttcatcggttcgaccctcgtccgcggcctcctcggccgcggctacaacgtccgcgccggcgtcctcgaccccgacgacagggcggagacggaccacctcctcgcgctcgccgccggcgccggccgcctcagcttcttccgctgcgacctcctggacggcgcc

SEQ ID NO: 14089 - DNA, 261 bp, Zea mays
gggagaacatcaacaagtacttccgcaaggccaaggagagcggcaagaagcggccggcgcacgccaagacgtgcccctacttcgacgagctggaccggctctactcccggtcggccgacggcgggggaggcgaggccaggcagctggggagctcagagctgctggacgcggtgatcaagtaccccgacgtgcgctacgggccgccggtgttcggtggcggcaatgctaataatgaaggtggagaggacgacgacagcgacg

SEQ ID NO: 14090 - DNA, 291 bp, Zea mays
gctcgatctccatctcgaccgtcgctcaccgggaagctacgctacgacgaagcatggcgtccgtcaccgcccgcgccccggtcgcggccctgcgcccgtcggcgtctctcaagtcgtcgtcgtcgtcggcggcggccttccttggccactctagccgcctcggccgcactgctaccgcgtcgccgacgagcgcgcagctataggcggaggccaagggcgagtggctcccgggccttccctcccccgcctacctcgacggcagcctgccgggtgacaatggcttcgacccgt

SEQ ID NO: 14091 - DNA, 290 bp, Zea mays
cacaatggcaaccttactaaccgtgtgatcactttgtggtatagacctccagagttgctacttggaagcacaaagtatggcccagccgttgacatgtggtcagtgggctgtatttttgcagaacttctcaatgggaagccaatattgcctggaaagaatgagccagagcagctgactaagatcttcgagctttgtggtacccctgatgacacaatctggcctggtgtcacaaaaatgccttggtacaacaacttcaagcctccccggccattaaagagacgagttaaaga

SEQ ID NO: 14092 - DNA, 290 bp, Zea mays
ggcacacagggctgttgactctgtattaggtccccggaccatccagcatgagactcttgccacagaagctcctgctgctgcccctgctgctccagcgatgaatgctgatgcttgcagcttccattctaaggctttccaagattgtctcaacaactatggcagcgagatcagcaagtgccagttctacctagacatgctgaacgagtgccgccgtggtggtgtgtctgtctaagctgcctctgggattattcatggattttctttccggatgggggtatctcattaataag

SEQ ID NO: 14093 - DNA, 293 bp, Zea mays
gcagaatcgacgacgccgtctacaggatccttcgtgtcaagttcaccatgggcctgttcgagaacccttaccccgactctagcctcgccggcgagctcgggaagcaagaacaccgggaactggcgcgcgaagcgtcaggaaatccctggttctcctgaagaacggcaagtcctcctacgctccgttgctgcctctcccgaagaaggccggcaagatcctggtcgccggcagccacgccaacgacctgggcaaccagtgcggggggtggacgatcacgtggcaaggaagcagcg

SEQ ID NO: 14094 - DNA, 296 bp, Zea mays
ggagaactccggatgagcggcaagagctacgacggcgtcgcgctggaccgcggatccgtcgtgcccctagacgtcggcaaggccacacagctggacatcgaggccgtgttcgacgtggacgcggaaggcgtgggcgtggcggaggaggccgacgtgacgttcaactgcagcaccagcgcaggcgcggcgagccggggcctgctcggcccgttcggcctgctcgtgctggcggacgaggacttgtccgagcgcaccgccgtgtacttctacctcgtcaaggccacggacggcagcct

SEQ ID NO: 14095 - DNA, 108 bp, Zea mays
cccacgcgtccgaacccaaatcccaagcaaccacttcgtcgaccatggggcagggcactccgggagggatgggcaagcagggcggcgtcggcgaccgcaagccggggg

SEQ ID NO: 14096 - DNA, 335 bp, Zea mays
ggatgagactgctcctactggcacatgtgctgtatgtgttgttggtggtgaaaggtcattgattgcaaatctgtcagcggcaaactgttacaaatctgagcatctaaagagaccagagaactgggcactagttgaaaaggcaaaatacatctacattgctggatttttccttacagtgtcgcctgattctatccagctagttgctgagcatgctgcagcaaataacaaggtgttcctgatgaacctctctgctcccttcatctgtgagttcttccgtgatgcccaagagaaggtcctcccgtatgctgactacatcttcggcaacgaaactgagg

SEQ ID NO: 14097 - DNA, 329 bp, Zea mays
gtcgcgtccatattcttgacatcggctttgggtattccagaaggtctcatcccagtgcaacttctatgggtcaatcttgttacggatggccctccagcgacagtttagggttcaacccacctgataaagacatcatgaagaaacctcctcggagaagtgatgactcattgatcacgccttggatcctgtttcgctatatggttattggcctttatgttggggttgcgacagtgggaatcttcatcatctggtacacgcatggcagtttcctgggaattgacctggctagtgatggccatacccttgtgtcgtactcccagctctcaaac

SEQ ID NO: 14098 - DNA, 266 bp, Zea mays
cgactctacaaaaacaaggagcatgctgaagttgaatacacgattgggccgatccctgtcgatgatgatgtagggaaggaggtcatcacacggctgacagcaaatatggtcacaaacagtacgttttatacagactccaatggaagggatttcctcaaaagggtgagaaactacagggaggactggaatcttcaagtaactcaaccagttgcaggaaattactatccggtgaacctaagagtgtatgtagccgatgaaaaatatga

SEQ ID NO: 14099 - DNA, 329 bp, Zea mays
gggtgctggccgttgcgggcgaaccgaaaatcacgggcgcgagagatcggagcacggcatgtcggaggagcagttcctcgccgtggcggtggaagccgccaagagcgccggcgagattattcgcaagggattctaccagaccaagaacgtcgagcacaagggccaggtggatttggtgacggagacggacaaggcctgcgaggacctcatcttcaaccacctccggaagcacttcccggaccacaagttcatcggggaggaggagtccgcggcgctcggggccaccgctgacctcaccgacgaccccacctggatcgtcgatcccctcg

SEQ ID NO: 14100 - DNA, 328 bp, Zea mays
tccatctccattaccgccgccgagagagagacccaccccgctcatccaccaccatgtggcgccgcctccacaccctagcacccgccttgcgcagggctactgccgccgctgccgggggccccgcggtgcccgcctcctctgctgcccgcgccgcgccgctctcctcggcggccgccggcttccgccgcactagccctctcctctcagaggacaagccggcgagggtggaggacgtcatgcccatcgccacggggctcgagcgggaggagctagaggccgagctccaggggaagaagcggtttgacatggattccccggtcggcccctt

SEQ ID NO: 14101 - DNA, 326 bp, Zea mays
catcaatgagccaaccgctgctgctattgcctatggtcttgacaagaaggcaaccagtgtcggtgagaagaatgtcctcatctttgaccttggaggtggtaccttcgatgtctccctccttacaattgaggaaggtatctttgaagtcaaggccacagctggcgacacccatcttggtggtgaggactttgacaacaggatggttaaccactttgtccaggagttcaagagaaagaacaagaaggatatcactggcaacccgagggctctccggaggctgaggacctcttgtgagagggccaagagaactctgtcttccactgccc

SEQ ID NO: 14102 - DNA, 322 bp, Zea mays
cggacggtgggctcggcggtggcagcggtggaagggatcaacaagatcgtgacaggcagcctcatctcgctgtcggagcaggagcttatcgactgcgataagtaccaggaccagggctgcgatggcggcttaatggacaatgctttcgtgttcatgatcaagaacggcgggatcgacaccgaggccgactacccgttcactggccacgacgggacgtgcgatctcaaactgaaaaatacaagggttgtatccatagattcgttcgagcgtgtgctcatcaactatgagagagcgttgcaaaaggccgtggcgcaccagcctg

SEQ ID NO: 14103 - DNA, 324 bp, Zea mays
gagatctccgccgccatggagacgctggccagcgccatgcggcgcgagaaccgccggtccaaggccccgccctcctcctctgcttcctccgccctcgcctcgggcagggtccctctcgtcatggccttcctctcctgcctcgcctggctctacgtcgccggccgtttgtggcaggacgcgcagacccgggcgatcctgtccggcctcctcgagaagagctctaccagcgtcccgaaggtgctctcggtggaggacaagcttaggaaccttgggtgcaaggcgattggaaggaaaattgttgaggcggagatggacctgaccaag

SEQ ID NO: 14104 - DNA, 315 bp, Zea mays
  unsure (1)..(315): unsure at all n locations
tgctgctcttggcctgctacgacctcacggccacctctgtcctgtcccactagactagctgcagctagcgcctcttcccctcgccgccgccccctatccgagagcgacgagcatggcgcactccctcgccgcctccttctcgccggccgccgcgcggcgccagngtgacaaatgtgatttcaagccggagctcggtttccttccagagccacaggatgacttctgtatccatccgttcaagaccaagttctcttcgtttcaagatttgctgttcggctaagaaggagacagtcgacaaggtctgtagtatagtga

SEQ ID NO: 14105 - DNA, 322 bp, Zea mays
ccgctcctgagtcctgtccaccctgccaccgccgacgccgcgccgccgcagcaattgtcaccgtcgctatggcccgtatcaaggtgcacgagctccgggggaagagcaagacggacctgcaggcgcactcaaggagctgaagtctgagctctccctcctccgcgtaccaaggtcaccggcggcgcacccaacaagctctccaagatcaaggtggtgcgcacctcgatcgcgcgcgtgctcacagtgatctcgcagaagcagaagtcggcgttgcgggaggcgtacaagaagaagaacctgctccccctcgacctccgcccta

SEQ ID NO: 14106 - DNA, 322 bp, Zea mays
cggacggtgggcgtggctctcaaaggatttgccaagttcttcaaggaatccagcgacgaggagagggagcacgctgaaaagctcatggagtaccagaacaaacgcggaggcagggtgaggctccaatcgattgtgacgcctttaaccgagtttgaccaccctgagaaaggagatgctctgtacgctatggagctggctctggccctggaaaagctggtcaatgagaagctgcacaacctgcatggtgtggcaacaaggtgcaatgatcctcagctgacagacttcatcgagagtgagttcctcgaggagcaggtggaagcca

SEQ ID NO: 14107 - DNA, 320 bp, Zea mays
ccttttgctcggaacgcacacaccgcccgtccccgatctccgatcccctcgtcgatccaaagatgcagatcttcgtcaagaccctcactggaaagactatcaccctcgaggtggagtcttctgacaccattgacaacgtcaaggccaagatccaggacaaggagggcatccccccggaccagcagcggctcatctttgctggcaagcagctcgaggacgggcgcacacttgccgactacaacatccagaaggagagcaccctccaccttgttctccgcctcaggggaggcatgcagatcttcgtcaagaccctcactgga

SEQ ID NO: 14108 - DNA, 319 bp, Zea mays
cctctgggagcaggtctccaggaagctggctgagaaggggtacaaccgcagcgccaagaagtgtaaggagaagttcgagaacgtgcacaagtactacaagcgcaccaaggagagccgagccggccggaacgacggcaagacgtatcgattcttcacgcagctggaggccctgcacggcaccggggcggctcccgcgtcggtggcggcgtcgcaggtgccccctgcgatctctggcggggtgtccggggcagcggggccgttagccgtgcgcttgcctgccgagccaccgcctgcggtgtcgggcggcgtggggatgccg

SEQ ID NO: 14109 - DNA, 317 bp, Zea mays
tgattgcaagaatgtagtttttaacagtgccacagttggtgttcagacatctcagatgcaaatgtggggagatggtgccacatcgatgatgtgggagaggtacgatgaggaggttgattctctggcagctgctccattgctcaccacaactggtttgcttgagcagcttaacgtcaccagagacagcagtgattatctgtggtacattaccagtgttgacataagcccatctgaaaactttctacaaggcggtggcaagcctccgtctcttagtgtgcagtctgctggtcatgccttgcatgtctttgtcaacggac

SEQ ID NO: 14110 - DNA, 316 bp, Zea mays
cagctggtcccctgctcggctcgtctgatccagcggctgaatccgcaggccatggggttcgacaaggaggcgagctcctcctcctcgcggctcgacgcggcgccgctgctcccgcagcacggcggcggcggcgcgggcgggcacctgtcctcgcagcccaagacgttcgccaacgtcttcatcgccgtcgtcggctcgggcgtgctgggcctcccctacaccttctcccgcacgggctgggcggcggggacgctgctgctcctcgccgtcgccgcgctcaccttccactgcatgatgctcctcgtcgcagcgcgcc

SEQ ID NO: 14111 - DNA, 311 bp, Zea mays
actctacagttgtgccgcctcgtctctctcctctctgctgcgcccccctatcgtgcgtgaggtgattctatccaggattctagggttcgttcgcctcgtctcgcgatggacaagggcagcgtcgtcgtgcccccggcccctgccgccgccgccgcgaagaaggccaagcgcttcgagatcaagaagtggaacgccgtctctctctgggcctgggacatcgtggtggacaactgcgccatctgccgcaaccacatcatggacctttgcatcgagtgccaggcgaaccaggcgagcgccaccagcgaggagtg

SEQ ID NO: 14112 - DNA, 314 bp, Zea mays
gtcgtggtatgcagaactctgaacttgctggaggtcttgaaatatttgttgatgacttgcctcaagattgtgtcaaggaagacattgctatggccttttctcaatcaggggaggtcaaatctgttaggataattaaaaattcatcaactggaaagaaccaagacattgcatttgtttgttacacaagtattgaagctgcaaagaaggttcttgctgaatttaaggagggaattgaggtaaaaggaaaaatggtcagggtatctgcttgtcaagataataataccctttacctggggaacatttgcaagggttgg

SEQ ID NO: 14113 - DNA, 313 bp, Zea mays
agcagttccgcctctggttcgaccctaccactcgccctgtccgcccctgaccacgttggtgggcaacgtgagcggggagccctacacgctgcacaccaacgtgttcacgcgcggacatggcagcgggagcagcagttccgcctctcgttcgaccctaccactgccttccacacctactccatcctgtggaacccgcagcacgtgatcttcgcggtggacggcaacccggtgcgggacttcaagaaccacgaggcgctcggggtggcgttcccgaggatgcagcccatgaggctgtacgccagcctgtggaacg

SEQ ID NO: 14114 - DNA, 313 bp, Zea mays
ggaacatgaaaacccgtgttattggttgcccaaagactatcgatggggatctgaaatgtaaggaggttccgacaagctttggatttgatacagcttgcaagatatactctgaaatgattggcaatgttatgactgatgcgagatccactggaaaatactaccactttgtgaggcttatgggtcgtgctgcttctcacattacgctggaatgcgctttgcaaacacaccccaatgctgcactcattggggaagaggttgctgcaaagaagcaaacccttaagaatgtcacaaactacattactgatatcatctg

SEQ ID NO: 14115 - DNA, 296 bp, Zea mays
actactcaaatccatccttattgagcttagtgtttgatccatggactcggaaggagtagcagcaaaggtggcagatgagactactaaaccggcaagccaagaagacggcgagagcaaggccgggatgactgatctgctgatgctgaccgacaagtcgcagctgcaggcgctagcgatgctgctgcggaacaacgaggagctcatgatgagccaagcgatcaagtcggagacggagcgcgttgagtacctcaagacggtgagcgactgctacacgcggacaatgaagctccttgacg

SEQ ID NO: 14116 - DNA, 185 bp, Zea mays
actagttctagatcgcgatctgccgccctttttttttttttttttaaacaaaaaccaccactattgcacaaacatggttcatcttagtgtaccacgccaactcatcatctcaacggctatgctatgcaacttcattgtctttcggatcggagagggtgtacgtacgtggattgattgatgctgcg

SEQ ID NO: 14117 - DNA, 308 bp, Zea mays
cgccaaggcgcaggaggcgttcaagcggttcggcgcgcggctgaccgagatcgagaaacgcgtcgtcaccatgaacgcggaccctcgcctcaagaaccgaaacggcccggccgagttcccctacacgctgctctaccccaacacctccgacacgaagggcgacgccgccggcatcaccgccaagggcattccaaacagcatctccatttgagttctgtctgagatgaggacgtacggtcgtcgcactagttgtttgcgtttccccgttccgttccgtgaagtgtggttctcacttgcgcggtattgtg

SEQ ID NO: 14118 - DNA, 304 bp, Zea mays
gccacgatacggtctagaagttggtctgaccaactatgctgcagcctactgcactggtcttcttttggctcgtcgtgttctcaagatccgtgatttggatcaggagtatgagggcaatgttgaggccactggtgaggacttctctgtcgagccagcggaagagaggaggcctttccgtgccctcttagatgtcggccttattaggactactactggaaaccgtgtctttggtgccctcaagggagctttggatggtggtctagatattcctcacagcgataagaggtttgctggcttcaagaag

SEQ ID NO: 14119 - DNA, 290 bp, Zea mays
gccagcctcacccgcctccacttccacgactgcttcgtccagggctgcgatggctcggtgctcctggacgccgttccgggggtggccaactccactgagaagctggcgccggccaacaacaactcggcgcgggggttcccggtggtggacaaagtgaaggcggcgctggaggacgcctgccccggcgtcgtctcctgcgccgacatcctcgccctcgccgcagagatgtcggtcgagctgtccggaggacaaagtgggcagtgcttcttgggaggctagacagcaagaag

SEQ ID NO: 14120 - DNA, 305 bp, Zea mays
cccagaaaatcaactcctccccaaatccacgctgccaccaactcgccgtcctccgcgccaagcaccaaagctccgatggcccgcactaaacagacggcgcgcaagtcgacgggcggcaaggcgccccgcaagcagctggcgaccaaggcggcgcgcaagtctgcgccggccaccggcggcgtgaagaagccccaccgcttccgccccggcaccgtcgcgctccgggagatccgcaagtaccagaagagcacggagctgctcatccgcaagttgcccttccagcgcctcgtccgtgagatcgcgca

SEQ ID NO: 14121 - DNA, 306 bp, Zea mays
aacaaattcccaatccgccgcttcccatcccgcgttcgccgctccatttgatcgaattcccgatggcgcccaaggccgagaagaagcccgcggagaagaagccgacggaggagaaggccgagaagaagcccagggcggagaagcgcgtgccgggcaaggagggcggcgagaagaaggggaagaagaaggccaagaagagcgtcgagacgtacaagatctacatcttcaaggtgctcaagcaggtgcacccggacattggtatctcgtccaaggccatgtccatcatgaactccttcatcaacgaca

SEQ ID NO: 14122 - DNA, 293 bp, Zea mays
ctcgccgctgttccccgcaacctatcgacccaatctcgtccgacccggcgcgtcgtcccctccagatctccgtcggcctctccaggtagcagaaactgttctgctgcagtctgacaaagtggagggcttaggagcttctgcttcttttaagtctgaacaatctttgctttatttgggattgttgggagagtactctcgtgcaacgggaaaaggcacaaggttccgtcccactgcatgcgtcaagagcctgtctggttttcatgttctgatttgtccattgcatggtgtcagag

SEQ ID NO: 14123 - DNA, 296 bp, Zea mays
agctccctcactctactctggacgcgactcgaacttaaaccctagagccgcagccccggtcgctccaccgaccccaaatctcaaatcagcgggagggaactcgcacgcgaaggctgaactcatggctcgcgtctacgttgggaacctggatccgcgtgtcacggcgcgggagatcgaggacgagttccggacgtttggggttctgaggagtgtatgggttgctaggaaaccaccagggtttgccttcattgactttgatgaccgcaggagtgcacaagatgccattcgtgaattgg

SEQ ID NO: 14124 - DNA, 298 bp, Zea mays
atccatcttttcgacattgacattccaggaaagatcactttcaaggaatcaaagactcttactgctgggcagagccctactgttgtagacacagatgttgggcgcattggtattggtatatgctatgacatccgtttccaggaactagcaatgttatatgctgcaagaggtgctcatttgttgtgctatcctggtgcattcaacatgactactggaccactgcattgggagttgctgcaaagggcgagggctgcagacaatcagctgtttgttgcaacatgcgctccagctcgagata

SEQ ID NO: 14125 - DNA, 299 bp, Zea mays
cacatctcctcgcatttcttcccatccgatccccccttcgcaaccaaaaccccaactcgccccgcatcgatggcgcccaaggccgagaagaaacccgcggcgaagaagccggcggaggaggagcccgcggccgagaaggcgcccgccgggaagaagccgaacggatgaagcgggtccccgctggcaagtccgctgccaaggaaggcggcgggggcaagaggggcaagaagaagggcaagaagagcgtggagacctacaagatctacatcttcaaggtgctgaagcaggtgcacccggac

SEQ ID NO: 14126 - DNA, 299 bp, Zea mays
cgcacgcatacacagcacagagtgaggtaagcatccgaaaaaagctgtgatctgatcgacatggccgccgccaccatggctctcacctcccgcgcgctcgtcggcaagccggcgaccagcaccagggacgtcttcggcgaggggcgcatcaccatgcgcaagactgctggcaagcccaagccagcggcgtccggcagcccctggtacggggccgaccgcgtcctgtacctgggcccgctgtccggccagcccccaagctacctgaccggcgagttccccggcgactacggctgggacac

SEQ ID NO: 14127 - DNA, 296 bp, Zea mays
cggacgcgtgggcggacgcgtgggcgagtcccgacggcctccagctccatcttgattcttgaggcgagcccggtgcgtaagagtctgccatggccagcgagaataaggtctttgctgttcgaggaagtcgccaagcacaacgtcaccaaggactgctggatcatcatcgccggcaaggtgtatgacgtcactccgtttatggatgagcatcctggtggagacgaggttttgctagctgtaactgggaaagatgctacagctgatttcgaagatattggccacagtgattccgcaag

SEQ ID NO: 14128 - DNA, 294 bp, Zea mays
cccacgcgtccgcgcggatttcgtggcgggcatgatcaagatgggcgacatcacaccgctgaccggctccaacaacggacagataaggaagaactgcagaagagacaattagcagatagctagctagggtcactaattaagacccatgcatggctgttgaactgcaagctaagtaaacactatgtgagatcgtcgcgttgatgtgctcacatgtcgtctttttatttgggtgaaggatggatgcatgtatcagatcacttgttgtttaattaatgccatttcagtctttgtcca

SEQ ID NO: 14129 - DNA, 293 bp, Zea mays
atccatcttttcgacattgacattccaggaaagatcactttcaaggaatcaaagactcttactgctgggcagagccctactgttgtagacacagatgttgggcgcattggtattggtatatgctatgacatccgtttccaggaactagcaatgttatatgctgcaagaggtgctcatttgttgtgctatcctggtgcattcaacatgactactggaccactgcattgggagttgctgcaaagggcgagggctgcagacaatcagctgtttgttgcaacatgcgctccagctcg

SEQ ID NO: 14130 - DNA, 292 bp, Zea mays
ggacgcacaccagcacggcagcacctgccctcctcgccgtcgctgcctccctccgcgcgaccgatctaccctccgccgccaccatgacgctgatcgccggggaggacttccagcatatcctgcgtttgctgaacaccaacgtggatgggaagcagaagatcatgttcgccatgacctcaatcaagggtgtcgggcgccgcttctccaacatcgtctgcaagaaggccgacatcgacatgaacaagagggccggcgagctgacgcctgatgagctggagcgcctgatgacggt

SEQ ID NO: 14131 - DNA, 268 bp, Zea mays
cagacgcgtccgcccacgcgtccgccctagctcccgcaactgccgccgccactcccacgcccgcagccatgccgcccaagctcgacccgtcgcaggtggtggaggagttcgtccgtgtgaccggcggctaggtcggcgcacgatcttcgctggcccccaagatcggcccgctcggtctttcccccaagaagatcggagaggacatcgccaaggagacggccaaggactggaagggcctccgcgtcaccgtcaagctcaccgtccagaa

SEQ ID NO: 14132 - DNA, 296 bp, Zea mays
ggtttccaaagccaagtgtgtgtactagcaaccagctagctcgggcggcagcaggcagccatcatgtcggaggagaagcaccaccacttcttcaaccaccacaagaaggacgaggagcagcccgccggcgagtacgggtactccgagaccgaggtggtcaccgccaccggcgagggcgagtacgagaggtacaagaaggaggagaaggagcacaagcacaagcagcacctcggcgaggccggcgccatcgccgccggcgccttcgcactctacgagaagcacgaggcgaagaagga

SEQ ID NO: 14133 - DNA, 291 bp, Zea mays
cagaatccgcggctgacgcgccggcgatggcggctcccatggtcgacgccgaatacctgcgccaggtcgacagggcgcgccgccacctccgcgccctcatctccaacaagggatgcgccccgatcatgctccgcctcgcatggcatgatgctggaacttatgacctgaagacaaaaactggtggtgcaaatggttcgattagatatgaagaagagtacactcatggttcaaatgctggtttaaagattgctatcgatctccttgagcctatcaaagcaaagaatccaaaga

SEQ ID NO: 14134 - DNA, 327 bp, Zea mays
ctcttctccctcttgccggtcccgaataaagagcagcagcgcaagaggtcggtagagcgagaagaaggcaatggcggccgagagcttccttttcacctcggagtccgtgaacgaggggcacccgacaagctgtgcgaccaggtgtcggacgccgatgcttgacgcatgcctcgcgcaggaccccgacagcaaggtggcctgcgagacctgcaccaagaccaacatggtgatggtgttcggcgagatcacgaccaaggcgaccgtggactacgagaagatcgtgcgcgacacctgccgcgagatcgggttcacctccgacgacgtggg

SEQ ID NO: 14135 - DNA, 329 bp, Zea mays
cgcgtgcgaaccaagcagaccacagcaagaagcgtagtcgtcgccggaaggaaaggcgcggacaagatgtcgtggcaggcgtacgtcgatgagcacctgatgtgcgagatcgaaggacaacatctcagcgccgccgccatcgtcggtcacgacggcagcgcttgggcgcagtccgagagcttccccgagttaaagcctgaggaggttgctggtatcataaaggactttgatgaacctggtactcttgcaccaactggtcttttcgttggaggtacaaagtacatggtgatccaaggtgaacctggagttgtcatccgaggaaagaaggg

SEQ ID NO: 14136 - DNA, 326 bp, Zea mays
ccgcccgtccactcgagactcgacggcacccgccgcatttgagctgagctgaggaggcgtgggggacggcgcggggatgtggcgcctgcggatcgcggaggggggcggggacccctggctccgcacgaagaacgcccacgtcggccgccaggtctgggagttcgacgcctccgccgaccccgaccccgccgtcgacgccgcgcgccgcgccttcgccggcagcaggggccacctcaagcacagcgccgacctcctcatgcgcatccagttcgccaaagaaaatcctcttgagcttgaccttccagcgatcaagctcggtgagcacg

SEQ ID NO: 14137 - DNA, 325 bp, Zea mays
gcactggtacaaggacatgcgcttcagcacccaggtcaaggacgaggagggcaaccctgcgttcgccctcgtcaacaaggccactgggctcgccatcaagcactccctcggccagtcccacccggtgaagctggtgccgttcaacccggagtaccaggacgagtcggtgctgtggacggagagcggcgacgtgggcaagggcttccgctgcatccgcatggtgaacaacatccgcctcaacttcgacgccttccacggcgacaagggccacggcggcgtgcacgacggcaccaccgtggtgctgtgggagtgggccaagggagac

SEQ ID NO: 14138 - DNA, 327 bp, Zea mays
ttgctctccactaacatccatcgtatcaacattatgatataaggcatgacataataaagaaaagaattgatcatcttggtaatgtaattgaatcaagaaaagacggagttggtgcccctaagattgaaagaccattacagaagcatggcggtaggcttgaccacaacgaggtttactgcggatcttgttatggtgctgaggagtcggatgatcagtgttgcaactcctgtgaagaagttcgtgatgcgtatcgaaagacagggtgggctgtcaacaacgtagaattaattgatcagtgcaagacggagggctatgtacaaaggttaa

SEQ ID NO: 14139 - DNA, 325 bp, Zea mays
cggacgcgtgggcgaggccgccgacgcccgacggcagggtgcccaggccttcttcggtcccatcgcgaggccatagttgcatcattcgcctgagacgactacccagcaccaggactgatctcctcactaggggcgtagaggtgaagagaagaacttgacaatgagcagcataggcacaggttacgatctgtctgtcaccaccttctccccagatggtcgcgtcttccaggtcgaatatgctaccaaggccgtcgacaacagcgggactgttgttgggatcaagtgcaaagatggcattgtcctgggtgttgagaagctggtaacc

SEQ ID NO: 14140 - DNA, 325 bp, Zea mays
cccacgcgtccgcccacgcgtccgcccacgcgtccgccacgcgtccggaacgaactgaggtcgacgacgactgatcgagcagcgacgatggcggctgtgctgaacagcaggaagacgccgcaggtggttgccgtgctggtggcggcggcgctgctggcgtcgtccgcttcggcggcgatcacctgcgggcaggtggggtcgtcgctggctccgtgcatcccgtacgcgacggggagggccagcgcgctccccgcgtcgtgctgcagcggcgtcaagagcctcaacagcgcggcgcggaccagcgcggacctgcaagcggcgtgcc

SEQ ID NO: 14141 - DNA, 314 bp, Zea mays
ctttatcgctactccaagagtacccaatcaccgagccatggccatctcagtcactgccgtggccgccttgtccgctttctcggctcaaagaagcctcccgcagccgtaccgccagacggtcgtaacgttcatcgtcgtccggccggtgcgcgcgcaccgccggtttgtgggcgtggcggccagctcgccgcccacgccgccggatctcgcaaagaaggtgtccgagagcatcaagcaggcccaggagacgtgcgcagatgacccggtgagcggcgagtgcgtggcggcgtgggacgaggtggaggagctcagcg

SEQ ID NO: 14142 - DNA, 320 bp, Zea mays
ggcagggcgtgtgggaggaggactggggtgaacgtactccaagaaaggaagaccctcactgtttgttcttgacatttccagaggggaagtggtagcggttaaagtcgtcccaacatcgttgagcgttgggcaagttgtttgggctccggaatcaccaggcaggcacaagtatctggttttcgttggatggtcagagcgcaacgggatcttccagaacactgctagaaaactcggcatcaagtactgctccaacaggccatgtgctctctatgcagccccttgccctatccaaggaccagagccgccaccggctacgacca

SEQ ID NO: 14143 - DNA, 319 bp, Zea mays
actccatccactactttactcaaagtctagagctagctttttgctttgctcaccagacaaaccgcagcagatggcgtcgacgatcatggccgccacctcccgcatcgtcgcggccaagacgccgtttcttggccagggtcgcgccgccgccgccgccgccaatgccagccccctccgcgacgtcgccgccgccgctgctggctgccggatcaccatgggcaacgacctgtggtacggcccggaccgcgtcaagtacctgggccccttctccgcccagacgccctcgtaccagaccggcgagttcccggcgactacggct

SEQ ID NO: 14144 - DNA, 323 bp, Zea mays
tccagatccaaggtaggagatggctctcacgagaattggcctcgccggcctcgcggtcatgggacagaaccttgccctcaacatcgcggagaaagggttccccatctcggtctacaacaggacaacctccaaggttgatgagaccgtgcagcgtgccaaggtcgaaggaaacctcccagtgtttggtttccacgaccccgcgtccttcgtgagctccatccagaagccccgtgtcgtcatcatgctcgtcaaggctggggcgccggtggaccagaccattgccacgctcgcggcgcaccttgatcagggggactgtatcgtcg

SEQ ID NO: 14145 - DNA, 322 bp, Zea mays
cgccgtcgcgatgaggccggcgctgctcaagtccacggccgagctcctccgccgcagccgcggctacgcctcctcggccaacccggagcggaaggtggccatcctgggcgctgcgggcggcatcgggcagccgctctccctcctcatgaagctcaacccgctcgtctcctccctctccctctatgatatcgccgggacccccggcgtcgcggccgacgtctcccacatcaactcccccgccctggtgaaggggttcatgggggacgaccagctcggggaggcgctcgagggctccgacgtcgtcatcatcccaaccggggtg

SEQ ID NO: 14146 - DNA, 319 bp, Zea mays
ggcgaaagcaaatgttgtggttgcctccttggaagacaagctagagattgttgcatccaggaaggtgaagatgattgctgatgtgctgttggatgatgctcttaaggagcaatatgatctcattctgttacctggaggtctgggtggtgcagaagcatatgcaaaatctgataaactaatggatctgatcaagaagcaagctgaggcaaatagattgtatggagctatatgtgcctcccctgcgattgctcttgaaccacatggcctactaaagggaaagaaagctacatcctatcctgctatgtggaacaaacttgca

SEQ ID NO: 14147 - DNA, 317 bp, Zea mays
ggtggatctgtttggcccaaacttgatggacgatttaattgatgcatctgcagcaactccagctacagacaatgctgcagaaccacaggttgatctgtttgctgatgcagattttcaatcggcaaccgcaagtacagagacagctgcaaatacagatgtcaaggtcaatgttgacctttttgcggaaaaggcatcttttcctgcagcatttccaccacaggctgggtttattccaccaccaagtgccgggacatcttctgaagtaaatacttccgtatccaagaaggcagctccggaaccttttgatacttttggcg

SEQ ID NO: 14148 - DNA, 312 bp, Zea mays
ctgagcttcgttaagggtattgttgactctgaggaccttcccctcaatatctctcgtgagactcttcagcagaacaagatcctgaaggtgatcaggaagaaccttgtgaagaagtgtgttgagctcttctttgagattgctgagaacaaggaggactacaacaagttttacgaggctttctccaagaacctcaagcttggcatccatgaggactcgcagaacaggaccaagatcgccgagcttctgagataccactccaccaagagtggtgatgagctgaccagcctcaaggactacgtgaccaggatgaag

SEQ ID NO: 14149 - DNA, 314 bp, Zea mays
cccacgcgtccgcccacgcgtccgcccgtatcctcgacgtggtctacaatgcatcaaacaatgagcttgtgaggacacaaacccttgtgaagagtgccattgtgcaagttgatgctgccccattcaagcagtggtacctcactcactatggagttgacattggtaggaagaagaaaacccctgctgcaaagaaggataatgctgagggacaagaggttgaggcagcagctgaggaaacgaaaaagagcaaccatgtcacgaggaagcttgagaagcgcaaggagggacgtacccttgacccacacattgaggag

SEQ ID NO: 14150 - DNA, 310 bp, Zea mays
gttctagatcgcgagcggccgccctttttttttttttttttttttttttttttttttttattttttttttttactgacgaagaacagagtcactttattccttgcattaattaatcttgttcccggtacagctagcaagacacaagttttacagatgtaggattatcaggaagcaatccttggaacaaggagaagcttctccttccggcgaacgtcagcccaaaggactcgtccatggacacccctgctgcagagcccggaacctcccaatcaaaatggtacatgagattggccagcatgatctccatgg

SEQ ID NO: 14151 - DNA, 309 bp, Zea mays
aaatgacggtgaattactagttggtctgcaaaatgacggtgaatcaattttgaatgttgttgctgttcattcaactctccatcttccttttgaccacaatatgtatggccagaaccttactgttcagaatttcttcaattcatcagttcctgtttctgtgcaagcaaccttcccctacaagttcgttgtgagcaagttcttgcagcctggagcatatgatctggttggttacatagtgtatgagatcgaccagcacccttaccagaatgtattctacaatggcactatcgaggttgttgaggctggagg

SEQ ID NO: 14152 - DNA, 308 bp, Zea mays
cacaagctcattaagcaccattcacactcttcttgatatgaaagcgcatgatgatctacaagttctgggttgtcttatgcttgttgacttcctgaatggccaggttgatagcacacatatgtttaatttggaaggcctcataccaaaactttgcaaaattggtcacgaattaagagaagatgatgaagggctccgtcttcgatctgcagctcttcaggctcttgcttctatggtccaatacatgggcgaccactcacacatttcaatggaacttgatgaagttgtctcagtgatcataagctgttacg

SEQ ID NO: 14153 - DNA, 316 bp, Zea mays
aaaccctctccccgccgcatcgccgccgccggaagcgcctccctcgatccagatccaggagatatgcctcgcaatgatgatcgctatgggaatacacgcttgtatgttggaagattgtctccccgcacccgttctcgtgacctagaataccttttcagcaaatatgggagaattcgagaagtggagttgaagcgtgactatgcattcattgaattcagtgacccccgtgatgctgatgatgcacagtacaacctagatggcagggacgtcgatggaagccgcattattgttgaatttgctaaaggggttcctcgtg

SEQ ID NO: 14154 - DNA, 317 bp, Zea mays
cgcactcccatcctctcgctcgccaggagaagcagccgccgttgctgctgccgcgtccacagaatggggggtttcgtgaagacccataagaccaatgcgtatttcaaacgtttccaagtgaaattcaagagaaggcgggctggcaagacagactacagggccaggataaggctgattaaccaagacaaaaacaagtacaacacacccaaatacagatttgttgtgcgatttaccaacaaggacatcactgcacaaatcatatctgctagtatagcgggtgatatggttcttgcttctgcctactctcatgagttgcc

SEQ ID NO: 14155 - DNA, 318 bp, Zea mays
aggcgaccctccctccttcgctccttccgcgccgcctcccggccgtcgccgccatggtgaagtactcgcaggagccgggcaaccctaccaagtcggctaaggccatgggcagggatctgagggtccacttcaagaacacaagggagacagcctttgcgcttcgcaagttgtctttgaccaaggctaagcgataccttgaggatgttattgctcacaagcaggcaattcccttccggagatactgtgggggtgttggtcgcaccgcgcaagctaagtcgcgccactccaatgggcagggccgctggcccgttaaatcag

SEQ ID NO: 14156 - DNA, 314 bp, Zea mays
cccacgcgtccgcccactcgcccgcatcttccggtcttcctcatggcgtcgagcgacctcgccgagagcctcctccccggcggcgggggcggagctccgactcacatgacgaatacgaggagcgcgcgtacgactccgaggacaagatctccatcgccgtgtcggattccgacggcgaagacgacggcacgccggcgtcgagcccgcacttctcgtggcggaagctctggcgcttcacgggcccgggttttctcatgtgcatcgcgttcctggacccgggcaatctggagggggacctacaggcgggcgccgcg

SEQ ID NO: 14157 - DNA, 314 bp, Zea mays
cacccgatacgtgttcgacgccaaggtgacggcgcaggatctggcggacacgtacaaccctccgttcaagagctgcgtggaggacggccatgccagcggcatcatgtgctcctacaaccgcgtcaatggcgtgccgacgtgcgccgactacaacctgctctccacgacggcgaggcaggactgggggttttacgggtatatcacctcggactgcgacgctgtggccatcatccatgatgcgcaaggctacgccaagacggcagaagatgcagttgcagatgtgctcaaagctggaatggacgtgaactgcggca

SEQ ID NO: 14158 - DNA, 318 bp, Zea mays
cccacgcgtccgattgatctctgagccgctgcaaccccggcccgtcgaagccatggggtccggggactggttcaagacgatcatcagcaagaaaaaatcgaagcggggaaagtcaaagcacgcaaagctctctggccaagtaacaaatggaggcaaccagacaaatcagaagttagacggcccttcttcaagtagtgaggaccacgaagacaatgcagcactagaggaatgggctgctactcgcattcagaatgcgtttcggaaatacaaggcaaggaagaccctgcgttgtctcaagggagtcaaaagattgcgcgt

SEQ ID NO: 14159 - DNA, 310 bp, Zea mays
caggaaaaaaggcccagaggcggtgccgtgaccgattcgagacgcaagagaaggatcgagacgaggcggcggttttccgggggcagcatcggcgcggccacgaaagatgtcttactcaaggggctcaagtgaaaggtatggatctcgctcaccttactcgagaagcacaaggtaccgaagtcgctctaggagtgtcgactctagcgatgctgaaaaccctgggaacaacctgtatgtgactggtttgtcggctcgtgtaacggatcgagatctggagaagcacttctccactgagggtgaggtgattgat

SEQ ID NO: 14160 - DNA, 310 bp, Zea mays
ccccttcctgctttccctctccagctctcatacacaaacacacggagctagcagcacggatcgagagaacaatggaggaaacaagcaggatccctgggtacttcaagaacaagggcatcctgatcacgggcgcaacaggcttccttggaaagatcctcgtggagaagatactgagggtccagccggacgtaaagaggatctacctccccgtgcgtgcgccggatgctgcatcagccaagaaacgggtggagactgaggtgatcgggaaggagctgtttgggcttctccgagagacgcacggcaagaggtt

SEQ ID NO: 14161 - DNA, 208 bp, Zea mays
tttgcttccaacaattctcctgctgatgtatccagcatggcatcatccatctacaattacgtacgtagtgcaacgactgtcgattcgttgggtgaggaacatatatgtgaatgcaagctccggctaccatacatgtgtaatgtgtaatagatatatatacaaaactgccgaggcgccgacaatactttaataactggtccttttatat

SEQ ID NO: 14162 - DNA, 304 bp, Zea mays
ccggccgtgttgaacctcacctacattggaaacgagactttagcaacaatcgaaaatgtgtttgcggtgatagaaggaaaagatgagcctgacagatatgtgatcataggcaaccatcgtgatgcttggacatttggagcagttgatcctaacagtggaacagcagccatgcttgagatcgcggagaggctgtccaagctacaagcgaaagggtggaggcctagaagaacaataatcctatgcagttgggacgcagaagagtttgccctgatagggtctactgaatgggccgaggagaacatgg

SEQ ID NO: 14163 - DNA, 299 bp, Zea mays
tgaagagtggcaagtacactctcggctacaagaccgtcctcaggactctcaggaactctaagtcgaagctagtgatcatcgctaacaactgcccgccccttcgtaagtctgaaattgagtactatgctatgctggccaaggtcactgtccaccacttccatggaaacaatgtcgaccttggaactgcctgtggtaaatactttcgggtctgctgcctcagcattattgatcctggtgattctgatatcatcaagactacaccgggtgagcagtaaagaagcccctgcagtagggggatc

SEQ ID NO: 14164 - DNA, 302 bp, Zea mays
aagttgttaggatttgctcaaggaaggatagtgatggcccttgaaggaggttataaccttaggtccatagcgaactcagtttgtgcttgtgcaaaagttctcttgggagacaaattcacattcaacactccagagatgcaaccatttgaatctacatggagagtaatacaagcggtacgcaatgaattgaagacatgctggcctgttctgagtagcaagttgccagaaaatgtatcattgaggattaagcctgcaccaagcgagctctacgcttcttctgattccgaatctgatagtgaaga

SEQ ID NO: 14165 - DNA, 105 bp, Zea mays
gactagttctagagccgcacaatccatccatccatctattctccagtccacccattccattccactaccgatgcccagaattcacgcgaacgcacacgcacccac

SEQ ID NO: 14166 - DNA, 303 bp, Zea mays
tcttgtgaccctccctcagccgcgtcgcgtcgcatcctacgatccaaagctctctctgctcgcagccatggcgaagaactacccgaccgtgagcgccgagtacagcgaggctgtggagaaggccaggcgcaactccgagccctcatcgccgagaagagctgcgccccgctcatgctccgcctcgcgtggcactccgcggggacgttcgacgtgtcgtcgaggaccggcggtccattcggcacgatgaagcatcagtcggaattggctcacggcgctaacgcggggctggacatcgcggtgcgg

SEQ ID NO: 14167 - DNA, 305 bp, Zea mays
cgccgagctcaaggtcaaggagatcaagaacggccgcctcgccatgttctccatgttcggcttcttcgtccaggccatcgtcaccggcaaggggcccctcgagaacctgctcgaccacctcgacgaccccgtcgccaacaacgcctgggtctacgccaccaagttcgcaccagggtcttaagctagctaccgggccgcggcgtgccaggacattgtgttgtacactactcgtttctgtcgtgatctgtaccatgaacgaatgcaaatattcttgtgctctaaaaaaaaaaaaaaaaaagggcggc

SEQ ID NO: 14168 - DNA, 317 bp, Zea mays
gcgtcgccgaggtccgggaccgtggcgagcgtggcgtccatggcgtccatctccccttccctccatcacccttgcaattctagaactggcttccttggatagacacacgggatctcgtcctcgctttttctctgctggaagagttggatttgtcagaacactagtggagtgcaaggaatctagaattggaaagcagcccattgaagtcccaccgaatgttactctcacattagaagagcagtttgtcaaagctaagggcccactaggggaattatctctcagcttcccaggtgatgtgaagattgtgaaagaagaat

SEQ ID NO: 14169 - DNA, 317 bp, Zea mays
ggaggacgtgacacgatggaggcggactccgggaagctcttcgtcggcggcatctcttgggagacggacgaggatcgcctccgcgcgtacttcggtcgctttggcgaggtcaccgaggccgttatcatgcgggaccgcaacaccggccgcgcccgtgggttcgggttcgtcgtcttcgccgattccgggatcgccgaacgcgtcaccctcgataagcacatgatcgacgggcgcatggtggaagcaaagaaggccgttcctagggacgaccagagtattgcgagcaagaacaacagcagcatagggtcacctggacc

SEQ ID NO: 14170 - DNA, 310 bp, Zea mays
atagccaccagcgctcgtcacctccaatcaacaaattcccaatccgccgcttcccatcccgcgttcgccgctccatttgatcgaattcccgatggcgcccaaggccgagaagaagcccgcggagaagaagccgacggaggagaaggccgagaagaagcccagggcggagaagcgcgtgccgggcaaggagggcggcgagaagaaggggaagaagaaggccaagaagagcgtcgagacgtacaagatctacatcttcaaggtgctcaagcaggtgcacccggacattggtatctcgtccaaggccatgtcc

SEQ ID NO: 14171 - DNA, 313 bp, Zea mays
gtcacacacacacacacacacagacaagtggtttccaaagccaagtgtgtgtactagcaaccagctagctcgggcggcagcaggcagccatcatgtcggaggagaagcaccaccggcgagggcgagtacgagaggtacaagaaggaggagaaggagcacaagcacaagcagcacctcggcgaggccggcgccatcgccgccggcgccttcgcactctacgagaagcacgaggcgaagaaggaccccgagcacgcgcacaggcacaagatcacggaggaggtcgctgccgcggcggccgtcggcgccggcggct

SEQ ID NO: 14172 - DNA, 309 bp, Zea mays
actcgttcgcctcaaagccaaaggtatcgagccggacttcgggctctacggcctcaaggcgatcaccaaggtcttcaagagcggcatcaacgcgacgccggtgatccagtgcagcaagggccccttcgacaagtacatgctgttccagctctacttctgcgcggcggggaacggcacgttcatcgactgccccgcgccgcagcagtacacctgctccaaggagatcctcttccaccccttcaagaagtggatgctcaagcagcagctcaaccaggacgacgaccctttccagctgcctggcgtcgccat

SEQ ID NO: 14173 - DNA, 314 bp, Zea mays
cgccctcggcttcttcctcccctccctgaccgctgccgcgacctctcggcgaaaccctaacctaccttagaccccgccgccgccgccgccgccgcccaagggagagagagacttgcacatcaaagggcgtccgatggggaagaagaagaagcgcgtcgataaggtcttctgctactactgcgaccgcgagttcgacgacgagaagatcctcgtccagcaccagaaggccaagcacttcaagtgccacgtatgtcacaagaagctctccaccgcctctggcatggccatacacgtcctccaggtccacaaggagt

SEQ ID NO: 14174 - DNA, 311 bp, Zea mays
aatttttgcatagatgatgcaaaagaagttaagaaaatcgagaaagtaaccaaccatgacgtgaaagccgtggagtactttctgaagcaaaggtgcagctcaaatccagagattgcaaaggtgtcggaatacttccattttggttgtacctctgaagatattaacaatctatcacatgcattggctttgaaagagggggtaaataaagttatgttccctgccatgatcgatctatgcagagcaatgtgttccttggcaacacaaaattcaggctaccctatgttggctcgaactcatgggcagccagcatc

SEQ ID NO: 14175 - DNA, 307 bp, Zea mays
gttgggttcggcgggaggccgggaaacgggaatttatttcaccagtatgcaacagatggccatgccatcgttcgccgtaacctcacctccgtcacatggcactaccttatgggcgcctcatgctcgtcgtcctcaaagactgcacaggagacacgtgcgcagcaagtccgggcagtggcacaagcacagctgcagtaccagaagctgggggactcagacctcctcatcagtgaggtcactcttggaacgatgacttttggcgagcaaaacacggagaaggaagcacatgacattatcgcttattctt

SEQ ID NO: 14176 - DNA, 310 bp, Zea mays
cccacgcgtccgcccacgcgtccgccagaacggcgcgcggtgcggcatgcccggcgcgtacggtgctctgacccggcgtcgtcgctcagctgggacggcatccacctgacggaggcggcgtataggaagatcgccgacggctgggtcagcggggcctactgccacccggccatctcggcctagaggctgctccgggaccgggggtcgggggctggttggtggttcgctggcccctcaagttaggggaggggaatcggattaattgtaatttttttagctggaatcgaagcaggcaagaagacgatggagg

SEQ ID NO: 14177 - DNA, 303 bp, Zea mays
agctcctcgacgactccgtccccgcgcgcgcgctcgtggccatcgccggcgagagcagcattggcaagacgacgctcgcgcggaaggtgtaccagagcctcgaggtccgcaaccacttcgagatccgcacgtggacggtgctcccgcacaagtgccgcgccgccgacgttctccgcgacatccacgagcagatgacctcccagctgcagcggaccccgtccgcgtccaactccaagcaggccgtggaagacgcctgcgatgacaaagccttcgggccgggaaaggacatcagcaaccagctgt

SEQ ID NO: 14178 - DNA, 296 bp, Zea mays
ccagaaatgaattatacatctgatgatcaaccttatccatccccagtgtgggataagttggtatttaacaaaataaaagctaggcttggtggacgagtgagacttatgagttcaggtgcttctccactgtcagcagatgtcatggaattcctgaggatatgctttggtggtgaagttcttgaaggctatggaatgacggagacatcctgtatcatatctgcaatggatattggtgacagatcaattggtcatgttggatccccaactgcatcttgtgaggtgaaacatgtggatgt

SEQ ID NO: 14179 - DNA, 266 bp, Zea mays
gcagcagccaattcgctcgagttcagatcgagcgcgcgccaagcaagtcttccggccggccgcgaagagcgcaatcaagcaagacaagatggtgaagctcgccttcggaagcgtcggcgactccttcagcgccacctccatcaaggcctacgtggccgagttcatcgccagcctcctcttcgtcttcgccggcgtcggttccgctatggcctacgggcaactgacgaatggcggcgcgctggacccggcgggcctggtggcgatcg

SEQ ID NO: 14180 - DNA, 302 bp, Zea mays
gtcggaagctcctggcaagcaaagcggtctaagtgcaaggataccaaacacctgtgtttgcaacaatgttaacaaagtctgcggaactgggcagaaagctactaagttcgccgcacagtcaattcagctgggtatccatgataatggtgtggcaagtggcatggaaagcatgtccaatgccccaaagtacaatgctgaagctaagaaaaggtctcggtttggacatgacacacttgttgatggcatgcctaaggattgaccttgggatgtataccatgactgtggcatgggaatgtgtgccg

SEQ ID NO: 14181 - DNA, 304 bp, Zea mays
gttctagattcgcgagcggccgccctttttttttttttttatctctctacgaatccggtcctgctccctctgcctctgttcattgagaagcctcaccctttcctcatccacagttttcttttgactgctcattctctttttttcttcttctttttccttctccaatatttgacgctcaagctcttctttacgtttttcaatgatggacttccttgcaagcagcctcttatgttcattctccactattgcagccaaactaatgagactttcaccgagtttagatggctttttcactggtggacag

SEQ ID NO: 14182 - DNA, 304 bp, Zea mays
cgagatgctgcactacaacttctacgagcagcggctggggcccaacgcgtccgcggagttcttcagcgtggcgcaggacgccgacccgctggccacgctcttcatgaacgagtacaacgtcatcgagacctgcgacgaccccttctccaccgtcgacacgtacgtgtccaagctcaaggacctccgctccgccggcgccatcctggaagggatcggcctggagggacacttctccaagcccaacatcccgctcatgagggccatactcgacaagctcgccaccctggggctgcccatctggttc

SEQ ID NO: 14183 - DNA, 143 bp, Zea mays
gcttccgagatctctccccacctcccggtccgctagcagatagcgggggccagagagatcgagatccggaggcgctagcgccacccatcagcgtctgcggcaatggcgggcacggtgacggtcccggggtcgtcgaaaccctc

SEQ ID NO: 14184 - DNA, 319 bp, Zea mays
cggacgcgtgggcgcggactcaaggtgaaggagctcaagaacggccgcctcgccatgttctccatgttcgggttcttcgtccaggccatcgtcaccggcaccggcccgctcgagaacctcgccgaccacctcgccgaccccgtcaacaacaacgcatgggcctatgccaccaactttgtgcccggcaagtgagggggtggaggcgccaccgcccaccggccaccgctgcggatatctaggtgttcggatgcacgtgagcgcgcactggttccagtttgtaccatgatgtaaattacttacccgtacaaggttcaatcgg

SEQ ID NO: 14185 - DNA, 317 bp, Zea mays
ccctcatcccccatcaatctcaggggcgccccagccaccccacccttcactcacctaaccatggcggacgcggcggcgagcgtggtggagagcgcggcgggttcggccgtggcccgcgccaagaggaagagaagtgggttcccgtcaccaagctcggccgccttgtcaaggagaacaagatcaccaagatcgaggagatctacctgcactcgctccccgtcaaggagcaccagatcgtcgagaccctcgtcccggggctcaaggacgaggtcatgaagatcacgcccgtccagaagcagacccgtgccgggcagcgc

SEQ ID NO: 14186 - DNA, 182 bp, Zea mays
gacatgaccatgtccccacctggcccctctacagtgaaagatgcctactgcttgctgaacttcggggacagcattactacagatcacatttcacctgcaggaagcatacacaaagacagtcctgctgccaagtatttgatggagcgtggtgtggaccggaaggacttcaactcatatggtag

SEQ ID NO: 14187 - DNA, 319 bp, Zea mays
caaacagggtagagggagaggagaggagaggagaggagaggttgggtctgggacaccatggctccgatgaagctgtacggggcggtgatgtcgtggaacgtgacgaggtgcgcaacggcgctggaggaggctggctccgactacgagatcgtgcccatcaacttcgccaccgccgagcacaagagccccgagcacctcgtccgcaacccgtttggtcaggttccagctctgcaggatggtgacttgtacctcttcgaatcacgagcaatctgcaagtacgctgctcgcaaaaacaagccagagctgttgagggaaggaa

SEQ ID NO: 14188 - DNA, 314 bp, Zea mays
cccacgcgtccggcagcagccaattcgctcgagttcagatcgagcgcgcgccaagcaagtcttccggccggccgcgaagagcgcaatcaagcaagacaagatggtgaagctcgccttcggaagcgtcggcgactccttcagcgccacctccatcaaggcctacgtggccgagttcatcgccaccctcctcttcgtcttcgccggcgtcggttccgccatcgcctacgggcaactgacgaatggcggcgcgctggacccggcgggcctggtggcgatcgcgatcgcgcacgcgctggcgctgttcgtgggcgtgt

SEQ ID NO: 14189 - DNA, 313 bp, Zea mays
cccacgcgtccgactcccaccaccctccgcctccgcctgcgccacagctgccgattcgaaagccctcgtcctgacccctcgcaaaaccctagctccaaccaacatgaagggcaaggccaacgcctccaagaaggatgaggccaggctccgggccggcggcggcggcgccggaaagcgcaagaaggccgccgcgagcggcaagcccaagcgccctccctccgccttcttcgtcttcatgtctgaattcaggcaggagtaccaggcgcagaccctggcaacaagagcgttgcggccgtgagcaaggcagcagggg

SEQ ID NO: 14190 - DNA, 317 bp, Zea mays
gcttctgccctccccggcgtcgcgctctggtcgtcgtcggccgggaagatggctggcggcttcagggtacttcatctggtcaggccctttctggctttcttgccagacgtgcagagcgcggataagaagataccattcagagaaaaagttatctacactgttatttctctcttcatttttctggtgtgcagccagctcccactctatggcattcattcgacgactggagctgatcctttctactggatgcgtgttatcctcgcatcaaaccgtggcactgtgatggagttgggtattactcaaattgtgacctctgg

SEQ ID NO: 14191 - DNA, 319 bp, Zea mays
gctcttgcaacaagccaaacaacccagtggctgctagccgagacaggggatagattgagagagaggcgcgcagatggcgacgccgtcgtcgtcgctttgctccagcttcgcctccctgcggaccgcctccatcggccacccccgtggcatcgcctcctccacgcccaggaaggcattccatgtgagggcatcagctcgggttgacaaattctcaaagagtgacatcatcgtgtccccttcgattctgtctgcaaactttgcgaactctggtgatcaggtaaaagctgtggaggtggcaggatgcgactggattcatgtc

SEQ ID NO: 14192 - DNA, 113 bp, Zea mays
ccactcccaagccagtacccacagtcttacgagcagtcgcacgcatatgtctagagataaaacggtcgacatggctcgcacgcaatcttccgtagctgtcgccgtggtggccg

SEQ ID NO: 14193 - DNA, 297 bp, Zea mays
agccgccgccgctgctcatctcacatccctcgagaagacgcctgctcctcgccgatcgatacgatggccgtcttctccgacctccacaccgccgacggcctcaagtccctcgaggctcacctcgccggcaaaacctatgtgtctggtgactccattactaaggatgacattaaggtcttcgccgcggtgccgtcgaagcctggcgctgagtttcctaatgccgcccgctggtacgagaccgtctctgcggctgtagcctcaagattccctggtaaggctgttggtgtaaatctgcct

SEQ ID NO: 14194 - DNA, 312 bp, Zea mays
agcaccttcccaaaaaatcccccattttcttcgaggcgaggagagcgtgaaagacagggcaccggcagcgacgatgtcggggcgcggcaagggcggcaaaggtctgggcaagggcggacaaagcgccaccggaaggtgctccgtgacaacatccagggcatcaccaagcccgccatccggaggctggctcggaggggcggcgtgaagcgcatttcggggcttatctacgaggagacccgcggcgtcctcaagatcttcctcgagaacgtcatccgcgacgccgtcacctacaccgagcacgcacgccgcaag

SEQ ID NO: 14195 - DNA, 304 bp, Zea mays
agatcatcagcatccacatcggccaggccgggatccaggtcggcaacgcctgctgggagctctactgcctcgagcacggcatcgagcccgatggcaccatgcccagtgatacctcggttggcgtcgcacatgatgccttcaacacgttcttcagcgagaccggttctggcaagcatgtgccgagggccatcttcgtcgaccttgaacccactgtcattgatgaggttcgcactggctcgtaccgccaactcttccacccagagcagctcatctcgggcaaggaagacgcagctaacaactttgc

SEQ ID NO: 14196 - DNA, 302 bp, Zea mays
aagatctggctacagttccaccaaactcatatgtttactacgaaatggagcatgtctcatttgataaggagaaagattcatgggacttgaagaacgttgctgagaagattgaagcagctgctaagaagaaagaagaagggaatgtgtggtttaaaattggcaagtatgccagggcttctaagagatatgaaaaggctttgagctttgtcgagtacgatagctccttcactgaagaagagaagcagctatcgaaaccacttcagataagctgcaagctcaacaatgccgcatgtaaactaaga

SEQ ID NO: 14197 - DNA, 300 bp, Zea mays
ttgatcttctatctgacagaaggcaactattgatgagggaagatggcaagacacaagtttgcattgttggtctacaggaatttgaggtttctgatgttcagattgtcaaggaatatattgacagacggaatgcagccaggagcacagggtcaacaggggccaatgaggaatcatcaaggtcacacgctattctgcaactggctgtgaagaagcatatcatagtaaaagataccaggagacagagagatcgtgatgctaatgaagctaaaaatacaaagggtgtggggaaaatatcattta

SEQ ID NO: 14198 - DNA, 305 bp, Zea mays
ccggtttggtcagggttagcataaaggagcattgtgttatagaatcaaaaccagaccacttcttggatgatttgcgacttcacaatccatggactgaactaaagcagtttgcaaaatcaattgacataaacgataaagatcctgttgtccacaaacatactccatacattgttatccttgtgaggcttgcagaaaaatgggcagatgcacatgatggtaacttgccttcaactaggcaagacaaaaaggaatttaaggatctaattcgagcccatatgcttaatgtagatgaagaaaattacaaa

SEQ ID NO: 14199 - DNA, 307 bp, Zea mays
cgaccgatcctcgcctgctgcagccatggcgacctccgccgcgctctccaccgccgccaatcccacccagctctaccggtcccgcgctttgctgggcaagccggtgaaggggcttggcctgagcatgggccgcgagcgcgcccaccggagcattgtgtgccaggcggcgagcagcatctccgccgaccgcgtccccgacatggagaagcggaagctgatgaacctcctcctcctcggcgccatctcgttgcccaccgtcggcatggtcgtcccctacggcgccttcttcgtccctgccggctccggg

SEQ ID NO: 14200 - DNA, 310 bp, Zea mays
caacgcgcgcccctcccattttcacctagccctactcctttgtacataaaggaagatgggagcatatgcaacgactggtatgcagatgatagcaacacgcccttccatcccggcctacaggcaaatacttgggtcgacatcagcactatctgcatttggaaggtcaatctgttccagaactggctttgcaatctcttctaaagccacatcagcaggaccactggtttcttcgaattgcaagagggttgttgtgagggcaatgtcgcagagaggtgcccaaggacttcccattgatctcacaggtaaaaga

SEQ ID NO: 14201 - DNA, 276 bp, Zea mays
ccaagtgcgtgctccggccgccccctatcccgccggccctgtgtgtgttccccgctaccagccatggcgtcgccgttctccgtgccttcctgatcatggaggaggaaggtcggttcgatgcggatgtggcggatgtggagtcgttgtggggcacggagcggttccggctcaccaagcgcccctacaccgcccgctacgtggtcctcctccggtgcacgctccggcagagctacgcgtccgggggagatggccaagaagctgtggcgcacgctcaat

SEQ ID NO: 14202 - DNA, 279 bp, Zea mays
ggaagagcaaaagtcttgttgcttaccatgaagttgggcatgcaatttgcggaactttgacgcctggccatgatcctgtcacaaaaggttaccttagttccaaggggtcaagctcgtggtcttacatggtttatcccgatggatgacccaacactcatctccaggcagcaactttttgccagaattgttggcggccttggtggtagagctgctgaggaggtcatatttggagagcctgaggtgaccactggagctgctggtgacttgcagcaaattact

SEQ ID NO: 14203 - DNA, 279 bp, Zea mays
ggaccgtggtcatcccacacgaacctggtgaggtaggatgagggcaaataccccacaatgtctccgctcaaggagattgttggcagcatccagtcccaggttgccaagattgaggatgatatgaaggtgcgagcagcggaatataataatgtaaggagccagcttagtgcaatcaacagaaagcaaagtgggagcttagcggttcgtgatctttccaatctggtaaaaccggaggatatgatcacctcggaacatcttgtgacacttcttgcaatcgtt

SEQ ID NO: 14204 - DNA, 283 bp, Zea mays
ggcaggacttcgaattcgtgaagacaagcttggctgccaatggatacgatgtggtttacgacatcaatggacgtgaggctgtgcaagttgagcccataattgaggccttgcctaacctgcaacagtacatctattgctcatcggcaggagtgtacctgaaatctgacattcttccgcactgtgaggttgacgcggtggaccccaagagccgtcacaagggcaagctggagacggagagcctgctgacctcgcgcggcgtgaactggacgtccatcaggcccgt

SEQ ID NO: 14205 - DNA, 272 bp, Zea mays
ctggttggtttcgtaggggggtttggggcggccggatacgtgtacaaggaccagatcaacactttcctcacgcagttctcagggttcattgacggctatggtccagccggatatgctctgttcgtacttgtatatgcaggattggaggttctcgctattcccgcaatacctttaaccatgtcagctggtctattatttggtagtgtgaccggtacaattattgtttcaatcagtggaacactagctgcagcggtggccttccttattgctag

SEQ ID NO: 14206 - DNA, 274 bp, Zea mays
acgtgctcgatctccatctcgaccgtcgctcaccgggaagctacgctacgacgaagcatggcgtccgtcaccgcccgcgccccggtcgcagccctgcgcccgtcgtcgtcgtcggccttccttggccactctagccgcctcggccgcactgctaccgcgtcgccgacgaggcggagctcataggcggaggccaagggcgagtggctcccgggccttccctcccccgcctacctcgacggcagcctgccgggtgacaatggcttcgacccgttgg

SEQ ID NO: 14207 - DNA, 266 bp, Zea mays
ctgagtttcgtttcaaatggggctacgagatgccagttgatgtgttagcaaaatggattgctgacaaagctcaagtttacacgcagcatgcatacatgagaccccttggagtagttgctatggtcttgggctacgatgaagagaaaaatgcccaactattcaaatgcgaccctgctggtcacttctttggacataaggcaactagtgccgggctcaaggagcaggaagcaataaattttctggagaagaaaatgaaggatgacccg

SEQ ID NO: 14208 - DNA, 273 bp, Zea mays
aatgggcatgctcttcttatgaccgacacacgcaaacgtctccttgagatgggttataaaaaccctgttcttctgctccatccactgggaggattcacaaaagcagatgatgtgcctcttagttggagaatgaagcaacatgagaaggttcttgaggaaggtgtcctcaacccagaatcaactgttgttgcgatctttccctctccaatgcattatgctgggccaactgaggtgcagtggcatgctaaggctcgtattaatgctggtgcaaat

SEQ ID NO: 14209 - DNA, 276 bp, Zea mays
ctcaccccgtgtgaccaatgaagaagtccagaaggctgctgctgctctcaagggctctgaccaccgccgtgggaccaacgttagtgctagattggatgcccagcagaagaagcttaacctccccatccttcccaccactacaatcggttcgttcccacaaaccgttgagctcaggagggtccgccgtgagtacaaggcaaaaaagatctctgaggaggaatacgtcactgccatcaaggaggaaatcaacaaggtcgttaagcttcaagaagagct

SEQ ID NO: 14210 - DNA, 276 bp, Zea mays
cgaggaggagctccagaaggagaacatcaagaacgccgcctcctccaccggcaacatcacgttgagcgtcaccaagagcaacccggagaccggcgaggtcatcggcgtcttcgagagcgtgcagccgtccgacaccgacctcggggccaaggcgcccaaggatgtcaagatccagggggtctggtacgctcagctcgagtgattcgagtgtctaactgctaggtgtccgaccgccgtcatggatcttgggaaggtgtatgtataccatggaaaact

SEQ ID NO: 14211 - DNA, 275 bp, Zea mays
caaagatcagatacaggctgtcataagtgctggtattatcgctcctttgttgcaactgcttcaaggagcagagtttgatatcaagaaggaggctgcttgggccatctcaaacgctacctctggtggttcccatgagcaaatcaagtacttggtgtctgagggctgcatcgtgccgctgtgcgaccttcttgtttgccctgatccgagaattgtaacagtttgtctggagggtcttgagaatattcttaaagtaggggagcacgacaagaccatgg

SEQ ID NO: 14212 - DNA, 266 bp, Zea mays
gaaaccctaacgctgccgccgcttcacaggtaagccgccgccatggtgtccggttccggcgtatgcgcgaacgtcgtggtggacgcgcgccaccacatgctgggccgcctgtcgtcgattatcgccaaggaactgctcaatgggcagaaggtggtcgtcgtccgctgcgaggagatctgtatgtcgggtgggctcgtacgccagaagatgaagtacctccgctttctccgcaagcggatgaacaccaagccatcccatggacccat

SEQ ID NO: 14213 - DNA, 267 bp, Zea mays
cggacgcgtgggggcgacatcgatgagtccagccctcgctggttgctgaagcaagaggtcccaaaagttgtcaagtctatcaacaggcagttacgtgaaaaatcaatcaagacaaaggttggggcattttcagtactgaaggagcttgtggttgtattaccagactgttttgctgatcatttcgggtcacttgttcctgggattgagaaggctttgaatgacaagtcttctacctccaacctgaagattgaagcccttgtattaaca

SEQ ID NO: 14214 - DNA, 267 bp, Zea mays
cccacgcgtccgcaagatcgatctggagaccaacaagatcatggacttcatcaagtttgacgtcggcaacgtggtcatggtgaccggcgggaggaacaccgggcgtgtaggtgtgatcaagaacagggagaagcacaagggcggcttcgataccatccacgtcgaggactccatgggccaccagttcgccacccgcatgggcaacgtgttcaccattggcaagggcaacaagccgtgggtgagcctgcccaagggcaagggtatcaa

SEQ ID NO: 14215 - DNA, 267 bp, Zea mays
gatcgtcgctcaggtgggtgtaggtgacacctctaaaggcagcagtcagcctaacgaccattactgctggatgaggccagaggacatcgactacaagaggccggttaccgagtgccactcctgctcagatctagcgtcggaaatggctgccgcactggccgcagcttccatagtgttcaaggacagcaagacctactccgacaagctcgtcaagggcgccaaggccctgtacaagttcggcaggctgcagcgtgggcgatacagccc

SEQ ID NO: 14216 - DNA, 267 bp, Zea mays
ctccctcttgccggtcccgaataaagagcagcagcgcaagaggtcggtagagcgagaagaaggcaatggcggccgagagcttccttttcacctcggagtccgtgaacgaggggcacccgacaagctgtgcgaccaggtgtcggacgccgtgcttgacgcatgcctcgcgcaggaccccgacagcaaggtggcctgcgagacctgcaccaagaccaacatggtgatggtgttcggcgagatcacgaccaaggcgaccgtggactacga

SEQ ID NO: 14217 - DNA, 268 bp, Zea mays
cccacgcgtccgagcaggcgcacacggcaaggacgacaccgaggagctgcttgcagccaccggcagctgtggtgccatgccctgggctacgtcaagtccatggcgctcaagtgcgccctggacctgcgcatccccgacaccatcgaccgctgcggcgggagcgccaccctgggcgagctgctcgccgccagcgagatcccggcgtccaacctcgactacctccggcgggtcatgcgcacgctgacagccatgcgcatcttcgcggcca

SEQ ID NO: 14218 - DNA, 269 bp, Zea mays
agattaaataatgcaaggaataaagtgactctgttcttcgtcagtaactattcatcatcaggactcctacaatatatagttactgacgaagaacagagtcactttattccttgcaataatttaatctggttcccggtacagctagcaagacacaagttttacagatgtaggattatcaggaagcaatccttggaacaaggagaagcttctccttccggcgaacgtatgcccaaaggacctcgtcatggacacccctgctgcagagccgg

SEQ ID NO: 14219 - DNA, 271 bp, Zea mays
cccacgcgtccgcccacgcgtccggcacgagctggatgctgttgtgcttgcccaacaactccgtaagaggtttctgaatcaggtcatgacctcagggcaaagggtgccatttgaattttatggaacacactatgtattcaccgtcaatcaagctttgctagagggtcaagagaattctacaccattggatagaagattcttgtccagtgatacatacatcatatttgaggctgctcctaattcaggaattaaggtgatcaaccaaaaggaa

SEQ ID NO: 14220 - DNA, 273 bp, Zea mays
cttggtgtatgactatgtcccactaggtagcctttgtgctgctttgcatggtaacaaagctgctggaagaaccccattggactgggagaccagggtgaagatagctctgggcactgcacgcggaatggcttatcttcactccgtgggtagcggcgggaagttcattcacgggaacatcaagtcaagcaacatccttctctcacaggaactcggcgcctgcgtcaccgagttcggccttgcccagctcatgtccacgccccacgtccacccgcg

SEQ ID NO: 14221 - DNA, 307 bp, Zea mays
cgctcagtgaagatcaagaggagtaaggatgttgtcaagttcaaggtgcgctgctccaagtacttgtacacgctctgcgtcttcgatgctgagaaggcaaacaagttgaagcaatctcttcccccaggtttgaccgtcgaggaggtctgattggatacatggcaacgccgagttgaactaccccccttctttatcagtagcagagcatgctactctatgtacttttggaacctaagctattagacctgtcagtgttggatgtctggatcttgcatttttggagaaataccaatttacctcgttcaag

SEQ ID NO: 14222 - DNA, 294 bp, Zea mays
gtgctgatgtgtccatgattggccagtttggtgtcggtttctactctgcctaccttgttgcagagagggttgtcgtgaccactaagcacaatgatgatgagcagtacgtgtgggagtctcaggctggtggctccttcactgtcgcacgtgatacctctggggagcaacttggcaggggtacaaagatgaccctctacctcaaggatgatcagttggagtaccttgaggagcgccgcctcaaggatctgatcaagaagcactccgagttcatcagctacccaatctctctctgga

SEQ ID NO: 14223 - DNA, 297 bp, Zea mays
aagaaggctaaagagtacgaatctgagatcattggttttgagctagctattagaaggccatattttcatgtcaagcctcttgacaatccagagcttgaaaattggcatagctaccttgactttatcgagaaggaagaagacattaataaggttatcaaattgtatgaaaggtgtgtgattgcatgtgctagttattcagaattctggatccgctatgtgcaatgtatggaggataaagggagtctagacctagcaaacaatgccctggctcgtgctactcatgtgtttgtcaagaag

SEQ ID NO: 14224 - DNA, 298 bp, Zea mays
ctataacaccccgccctgcttcgccatctacgtctgcggcctcgtcttcgaggacctgctcgcgcgggcggccttgccgaggtcgagaagaagaacgcgcgcaaggccggcgccctctacgacaccatcgacgccagcggagggtactacgtctgccccgtcgacaagtccgtgcgctcgcacatgaacgtgcccttcaccctggccaagggcccggacttcgagaagcagttcatcgccgaggcggccaaggagggcatggtgcagctcaaggggcacaggtctgtcggcggcgtcc

SEQ ID NO: 14225 - DNA, 299 bp, Zea mays
ggaggagggcagagggcggtttcctgggcgcagacgtgatcctgaagcagctccaggaagggccaaagatcaggcgcgtgggcatggtcacgcaggggccgcacgcgcggagccacagcgagctggtgagcggctcgggggagaggatcggcgaggtgaccagcggagggttcagcccgtgcctgaagaagaacatcgctatgggctacgtgaagtcgggaatgcacaaggctgggacggagttgaaggtggtcgttcgcgggaagtcactacgacgccgtggtcaccaagatgccgtt

SEQ ID NO: 14226 - DNA, 301 bp, Zea mays
gcttctatcccttcgtaaacccttctctcttcttcccgcggcctgctcgttctatctgtccagcagacttgaggttccgagcggccggaaaccagcggcaaccgtcggcatggcgctcgtattgcattctggggctggaaacaaaaatgccttcaaggcacttattgctgcagaatacagtggggtcaaggttgagttgaccaaggattttgagatgggtgtctcgaacaagacccctgagtttctaaagatgaacccccttgggaaggttcctgttctggagactcctgatggccctgtt

SEQ ID NO: 14227 - DNA, 300 bp, Zea mays
aagaaatctaagcatatgtacttccaactggcgatgcaaagaaacacttgagaagtatctgattaagaggaacatcatgggaatatatgatgtggatacacgtgctataacacgaagattaagagaagatggtagtcttattggtgtcttgagtactgatcagtctctgacagacaatgagttgttagaaatggcccaaaagtggaaaattgttggagttgatttgattagtggtgtcacatgtgatgctccatatgaatggtcggacaagactgattcagaatgggagtttaagaggga

SEQ ID NO: 14228 - DNA, 296 bp, Zea mays
gttctatctatatatgtggctgaatctatgcaaaggatcgccgctaacaaccggtgccccggccgggataacaaccggtgatgggcgcgcggccggccggatgacgagtgcagttcacgtttaacctgatggcgaagaacataatgagcatggaccccggcgaggaggagacggagcggctgcggctggagtacatcaccttcatgaagggcgtcgtgtcagcgccgctcaacttcccgggcacggcctactggaaggcgctcaagtcacgcgcgtccatacttggagtgatagag

SEQ ID NO: 14229 - DNA, 290 bp, Zea mays
gcctcatcagctggagtgtcggtctccccaagcgagcgcctatcaatggcacgctcctcaagcttctctttccagtcgccctgtgccatggtattggtcacatcactagcaatgtgtccttcgctgctgttgcagtctcatttgctcacactatcaaagctctggagcccttcttcagcgcacggctactcagtttatccttggacagcaagttcccttctctctgtggctttctcttgcccctgtggtcattggtgtttcaatggcatcccttactgagctttcattca

SEQ ID NO: 14230 - DNA, 290 bp, Zea mays
gttgccaaagaattccctcccctagccgccgccgccgccgctcgtctccctgagaggtgccgggaccgaggaactggccgagtactaggtagagaatcggtttttcttgtctcagcccggggtctgctgcgtctggtggtggtgaaggggagaaattcgtgagatctgttccggatcaggcgtgcgagctcgggaatcaggggtttcacacatagcttcgtcgatttgaatttgatgtactaatggagtctaagggtggcaaaaagtctagcagtagtcgttctatgatg

SEQ ID NO: 14231 - DNA, 291 bp, Zea mays
tggacggtggacttggtggcgcaggaggagggtttggaggtggtggcggtgctggaggtggcctcggcggcggtgcaggtggtggagttggaggaggtgacggtggcggtggcggtttcggtggtggtcttggaggtggcagcggttctggaataggtggtggctttggaggaggcaaaggttatggtggcggaggctatggggatggtgctgtaactggtggatctgaaggagaaagggagagagacactcgtcccccgtaccgtggcggaggcagacgtggtggttaca

SEQ ID NO: 14232 - DNA, 302 bp, Zea mays
cgagatccgcaagtaccagaagagcacggagctgctgatccgcaagctcccgttccagcgcctggtccgcgagatcgcgcaggacttcaagacggacctccgcttccagtcctccgccgtcgccgcgctgcaggaggccgccgaggcctacctggtgggcctcttcgaggacaccaacctctgtgccatccacgccaagcgcgtcaccatcatgcccaaggacatccagctcgcgcgccgcatccgcggcgagcgcgcctaggcggttcggttgcggcgcctgctcgctactgctggaggtg

SEQ ID NO: 14233 - DNA, 297 bp, Zea mays
cccacgcgtccgacgagctggacccgctgctgaagcccaagcaggacagatacgcgctccgcacgtcgccgcagtggctgggcccccagatcgaggtcatccgcgccgccaccaagtccatcgagcgcgaggtcaactccgtcaacgacaacccggtcatcgacgtccaccgcggcaaggcgctgcacggcggcaacttccagggcacccccatcggcgtgtccatggacaacgcccgcctcgccatcgctaacatcggcaagctcatgttcgcgcagttctccgagctcgtcaacg

SEQ ID NO: 14234 - DNA, 287 bp, Zea mays
ggaaggcgaaagagtagcagcagcaggcggcgccgagtagcggctccccacctcgagcttgccaccatggctagaggattgaagaagcatttgaagaggctcaatgcgcccaagcattggatgctggacaagcttggcggagcttttgctcccaagccatcttctggacctcacaagtctagggagtgcctgccactgatcctcatcatcaggaacaggctcaagtatgctcttacataccgtgaggtcatttccatcctgatgcaacgccatgtacttgttgatgg

SEQ ID NO: 14235 - DNA, 287 bp, Zea mays
tctcctcgcatttccttgcaaccgattgccttcccccctcccaacccaagaccgatggcgcccaaggccgagaagaagcccgcggcgaagaagccggcggaggaggagcccgcggcggagaagacgaccgccgggaagaagcccaaggcggagaagcggatccccgctggcaagtccgccggcaaggagggcggcgagggcaagcgtggcaagaagaagggcaagaagagcgtggagacgtacaagatctacatcttcaaggtgctgaagcaggtgcacccggacat

SEQ ID NO: 14236 - DNA, 286 bp, Zea mays
gatcgtgatgctgacatggaacaaagacgggcatttcagaagttaatttatgtgtccaatcttgtctttggagatgcatctgtattcctacttccttggaaacgtctgtttggggtgactgattctcagattgacattgctatgagggaaaatgccaagaatttatactcggtgcagctcaagtctattggaagaggtcttgacataggcacactcattgaagtaaggagagcacaacttgcatataaactttctgatgagattgctgctgagatgttccgtgagc

SEQ ID NO: 14237 - DNA, 305 bp, Zea mays
cgagaagaggaggggaggtgcgccaccggaagcggaaacctcgggtgtcgtcgaccaacctcgtcgatccggttgcgacgcggtgtgctagaataactaccgaccatggtagaggaggagatcaccgagggcttgaagaacctcaccgtcaccggagacgcggcggcttcgggcggagaagggcagaagaggggcggcggcatcagcagcaaccgcatccaggtgtccaacaccaagaagcccctcttcttctacgtaaacctcgccaagaggtatatgcagcagcacggcgctgtggagttgtc

SEQ ID NO: 14238 - DNA, 305 bp, Zea mays
tcttgtttctgcaacgccagggcgcaaccatgggtcagcagcagcaagggccggcggcaggcggatggccacgctcgcctcccacctgcgccatccctccgtctctcaccctcagatggaagatgttcccctcttgaggggatccaattgccgtgcaaaaggtgcggcgccaggcttcaaagtcgcgatcttgggtgcagcaggtgggattgggcagccacttgcgctattgatgaagatgaaccctcttgtttcggtgctccatctatacgatgtcgtcaacgcacctggtgtcacagccgaca

SEQ ID NO: 14239 - DNA, 305 bp, Zea mays
  unsure (1)..(305): unsure at all n locations
ggacctggnagtgaaaggctcgccttggatcgattgttcacaagaagaatgcatcagtcttgtgtcttaccactgtcaagaacgagagctgagcttgagttcagcaagattttggaggctattaaggcaaacttcaacgacaagttcgatgaggtcaggaagaagtggggaggtggcatcatgggatccaagtcgcaggccaagaccaaggcccgggaaaagctgctcgccaaggaggctgcgcacggtatgacctagattgtctactgctgtgtctgccctgtagtttaacggggaagaactga

SEQ ID NO: 14240 - DNA, 304 bp, Zea mays
ggtggatctatggttctgtgacggaagatattctcactgggttcaagatgcacgcacgaggctggcggtcgatctactgcatgcctaagcggccggccttcaagggatcggctcccatcaatctctcagaccgtctgaaccaggtgctccggtgggctctcggttcagtggaaatccttttcagccggcattgccccctatggtacggctacggaggacgcctgaagttcttggagagattcgcctacatcaacaccaccatctacccgctcacgtccctcccgctcctcatttactgtatcct

SEQ ID NO: 14241 - DNA, 303 bp, Zea mays
gcactgagcaccatcctccaacgcttctcctttgagctctcaccatcctacactcatgcgccatacaccgtgataactttgcatcctcagcatggtgctcaaatcaggttgaagaagctttgaccatgatggtcatactgaatgctaaaacatgtactcctagtaacatattgtgattgttcacgtatacaggtttgaatttagctttgatatgaataatgagaaccaagtgtgtatgaatggagaaggggtgtaacggatcggatacgaacgaatattgcttgtaccatatttatttcatat

SEQ ID NO: 14242 - DNA, 309 bp, Zea mays
  unsure (1)..(309): unsure at all n locations
ccacgcgtcccctcnaccacccacccactcgcttcagccgcctccgccgcgcgtacaagcaggtggagacaggatgccggctggccacggcctgcgctcgctgacgcgcgacctcttcgcgcgccccttccgcaagaagggctacatcccgctcaccacctacctccgcacctacaagatcggcgattacgtcgatgtcaaggtgaacggcgccgtccacaaggggatgccgcacaagttctaccacggccgcaccggtcgcgtctggaacgtcaccaagcgcgccatcggcgtcgaggtcaacaagca

SEQ ID NO: 14243 - DNA, 292 bp, Zea mays
ggagatgagaggagagactagacccgctagctgaggccgggcggcgcgctggacacgaacatgatggggagagtggcgctcggctgtgctcctcttctcctcctcttggccgccgccgtcgctccggccgagctcagcgtcggggcggcggctgcctcgggcgcggtcacccgggccgacttccccgcggggttcgtcttcggcgtcggctcctccgcgtaccaggtcgaaggtgcagttgcagaggacggaaggaagcctagcaccttggacacattcacacatgaaggct

SEQ ID NO: 14244 - DNA, 302 bp, Zea mays
cccacgcgtccgcccacgcgtccggagagacgtttcagtgtttggattggagggagcattctactgagtttccggttgccatatccttgacacgagcagcttgaggagactcctccagctgctcgtgtcaagttatggcaacgaactcatagagagacgtttcagtgtttggattggagggagcattctagcatctcttgggtcgttccagcagatgtggttctccaaagcagagtatgaagagcatggggtttcagctattcagagaaagtgcccttgaagcaggggaaggaatatgtaca

SEQ ID NO: 14245 - DNA, 308 bp, Zea mays
ggaccgtggtgtaacgacatctcgctgaacgactacctcgctgtgaacgcgacgaagcacgcgatgtacctgccgcacacagctggggcgctactccaagaagcggttccgcaaggcgcagtgcccgatcgttgagcgccttacaaactccctcatgatgcacgggcgcaacaacggcaagaaggtcatggctgtccgcatcatcaagcataccctggagatcattcacctgctcaccgatgccaaccccatccaggtcgtcgtcgacgcgatcatcaacagtgtgccccgtgtagatgccacccgta

SEQ ID NO: 14246 - DNA, 308 bp, Zea mays
cctgtatggcatcaaagttcagccaacgactctgcttccgaaacagatcggcaacatgtatacggcatccctttatgctgcattggcatctgtgctatataacaagcatgatagtctgaatggacaaagaattgtgatgttctcttacggcagcggcttgacatccactatgttttcgttgaggctaaacaatggccagcatcccttcagtctatcaaacataggttcagttcttggtgtcaccgagaagcttcagtcaagacatgagaccttgcctgagaaattcgttgagacgctgaagctgatgg

SEQ ID NO: 14247 - DNA, 311 bp, Zea mays
cccacgcgtccgctggaggggagcgcgccggtgctcccggagacgcagcggctgttcaagaagctcgtctcgctgggcatcaagccggtgttcctgacgggccgcaccgaggaccagagggccatcaccgtcaccaacctccgccgccaagggtactccggctggatgacgctgctgctcaagcccgtcggcctcaaggccaccgccatcgcctacaagtccggcgagcgccagaagctccaggacgccgggtacgtcatcgtcggcaacatcggcgaccagtggagcgacatcctcggcgcgccggaggg

SEQ ID NO: 14248 - DNA, 313 bp, Zea mays
gcaaagcaaagcttgagaggcttttctcaaaaacgcgccgtcgccgtttcttccccctttttctttgagaaaattcgcccgcgagatctttagtttcagaccccgtgtggattagtcgctgtcacgatcgaggcggggcgccaattgcggtggccaccacctccaatccactccccgcggtggcctcgccgagctgttcttgctccgtcctccctccaactccaagatttgtttcgcacccgattcctgagcttccgcggcgcttcttgctgaaaagaaagctccgagttcttcagttctggatcgatagaga

SEQ ID NO: 14249 - DNA, 310 bp, Zea mays
cccgaaagctaagggagacgagcagcctaaaaaccctagcccccgaatcagatcccaccgcccgccggaacgcggaaccctgcccccggccgccatggagatgagcgatgcggacggctgttcttcttcgagatggcctgcaacaactccgaggtcgcgtacgagcagaaccccaacgacgccgacaacttgacgctatggggcggacgctgctggagctatcacagatgcgtaacggccccgacagcctcaagctcctccaagatgcggaagcaagctggaggaggcactgcaaattgatcccaacaag

SEQ ID NO: 14250 - DNA, 309 bp, Zea mays
cccacgcgtccgcccacgcgtccgcccacgcgtccggctgtttggccacaggcatggagctgatcacaaatgtcaccgagtacgagaagctcgcgaaggagaggctgccgaagatggtgtacgactactacgcctccggcgcagaagatcagtggacgctcaaggagaaccgggaggccttctccagaattctgtttaggccacgggtactgatcgacgtctcccgtatcgacatggccacaaacattctgggcttcagcatttccatgcctatcatgatcgctccttcagccatgcagaaaatggctc

SEQ ID NO: 14251 - DNA, 136 bp, Zea mays
gtacgtggattgattgatgctgcgagatgcatgtgtgtcttttgtttcacgttgcattgcataggcaagtcgagatgatgagttggcgttgtacactaagatgaaccatgtttgtgcaatagtggtggtttttgtt

SEQ ID NO: 14252 - DNA, 307 bp, Zea mays
gcgctcgctacccctctccctcgaggcctttgccggcgaagagcgcccagtcgcccaccaggatgaagtttgttgctgcctacctgcttgctgtcctcgctgggaactccagcccctctgccgaggacttgacagccattctggagtcagttggctgtgaagttgacaatgaaaagatggaactccttctgtcccaactgagcggtaaggacattaccgagctcattgctgctggcagggagaagtttgcttcagtcccatgtggcggtggcggtgtggctgttgcggcagctgcccctgctgctgg

SEQ ID NO: 14253 - DNA, 306 bp, Zea mays
tctggttggaaggtttggagaaactccccggctcgaggagatcgtgacattgagaggacgatgggagggcgcgcgctcctcctcctcctcctggtctcggcgttggtctttcagatccacgcctccgacccgctgctgtacgagccgttcgatgaggactttgaggggagatgggtcgactccaagaaggatgaataccaaggtgtgtggaggcatgccaagagtgatggtcatgaggactatggcctccttgttagtgagaaggcaaggaaatacgccataatcaaggagcttgatgagccagtt

SEQ ID NO: 14254 - DNA, 251 bp, Zea mays
ggcgatggaattcagccatactctggtaaattaggttctgatgatattggcaaagttgatatggcttacagagtagtagctgaccacataagaaccctttctttcgctattgctgatggttctcaacctggtaatgagggaagagagtatggtctgaggcgcatacttaggcgagctgttcactttggtcatcagaaattgaaggcaaagcaaagtttttttagctcgcttgtaaatgtttttgtccaact

SEQ ID NO: 14255 - DNA, 249 bp, Zea mays
tggccatacaggtgactttcttgaagtgtggaggtgtggtgttaggaacagctatccaccacgccgccacagacgtttcaagcgcgttccacttttttcagacatggtcggcgttctgcaagcatggtgacagtgctgccgtggagctcccgtgccacgaccgcaccctactccgcgcacggtccccgcccacagtccaccccgacgcgctctcgacattgcagcctcggctcgtcctcactgaacccg

SEQ ID NO: 14256 - DNA, 250 bp, Zea mays
cttgcaacaaacttgttcaagatgcttcttaagtaccgccccgaggacaaagctgccaagaaggagaggctcttgaagagggcccaggctgaaaacgaggggaaaactgttgagtcaaagaaaccaattgttgtgaagtacggccttaaccatgtgacttacctcatcgagcagagcaaggcccagctggttgtcatagctcatgatgttgatccgatcgagctggtcgtgtggctcccggccctttgca

SEQ ID NO: 14257 - DNA, 241 bp, Zea mays
cccaaactttcactcgaaggaaactctagccaacaaggagttagctccttttttaccatattcatctcgcatggctgctctcgattttatcgtatgtgataggagcgatgtcttcgtgacaaacaacaatggcaacatggccagaatgttggctggtcgaaggagatattttgggcacaggaggaccataaggcccaacactaagaaactttactcattatttctgaatcggaccagcatg

SEQ ID NO: 14258 - DNA, 242 bp, Zea mays
cccacgcgtccgcccacgcgtccgcgacccttgcccgccgcctgaactcgcctcccccgcggccggtcccctgcatctgttcgccgcgccgcaacccggaggagactacgactacgagcaccaccaggtagcagcaactgttttgctgcaatctgacaaagtggagggtttaagagtcgctgcttcttttatgtctgaacaatctttgctttatttgggattgctgggagagtattcttgcg

SEQ ID NO: 14259 - DNA, 243 bp, Zea mays
cttttctcggcacctcgcgggtctcccgtccgccccgtcccgcattcgtatcctctcctcactctcgccgccgccgcttcccctgcgccccgagccaagatgaatgttgaaaagctcaagaagatggcaggtgctgtgcgcactggggggaagggtagcatgcgcaggaagaagaaggcagtccacaagactacgaccacagatgataagaggcttcagagcaccctgaaaagaataggagtg

SEQ ID NO: 14260 - DNA, 246 bp, Zea mays
ggagttttaattttggcaagctaataaacagcaacgttacccttggacccactgtccgtgaaggagagtttgtctttggtgttgctcacatctttgcatccttcaatgacaccttcattcatgtcactgatttgtctgggaggcgaactttggttcggatcactggtggcatgaaggttaaggctgatcgtgatgagtcgtctccttatgctgctatgcttgctgctcaagatgttgcacagcgtt

SEQ ID NO: 14261 - DNA, 307 bp, Zea mays
ggcgaaagagtagcagcagcaggcggcgccgagtagcggctccccacctcgagcttgccaccatggctagaggattgaagaagcatttgaagaggctcaatgcgcccaagcattggatgctggacaagcttggcggagcttttgctcccaagccatcttctggacctcacaagtctagggagtgcctgccactgatcctcatcatcaggaacaggctcaagtatgctcttacataccgtgaggtcatttccatcctgatgcaacgccatgtacttgttgatggcaaggtcaggacagacaagaccta

SEQ ID NO: 14262 - DNA, 264 bp, Zea mays
tggaaagtacgggagatccacgcctgcatttatcacaacaatttagaaatggatggcaaaatagcaaatgcactcatcaatgcctattcaaaatctggtgaccttgctggtgcttgtgctgtttttgataggcactcatcaagggacattatttcttggaattgtataattcttgcacacttgctgcatggttctccaagtgaagcactggatcgcttttgtgagatgaaacaagaaggcgtgctggcagattatacaactttg

SEQ ID NO: 14263 - DNA, 295 bp, Zea mays
ctggagcatcccggaggcgctgattaccgcggactgggcaccatgttcccggagaacggcgggtacgtcatgtgggtcgcctcggcgctcggcccctactggggattccagcaagggtgggtgaagtggctcagtggcgtcatcgacaatgccctgtaccccgtcctcttcctggactacctcaagtccgccgtgcctgccctgggcggcggcccgccgatggcgttcgcggtgctcggactcacggcggtcctgacgctgctcaactacagggggctcaccgtcgtcggctggg

SEQ ID NO: 14264 - DNA, 297 bp, Zea mays
ctccgtaaggagttggcaagtacatgattgagggagaccttaaacgtttcaaccgtgtggcgattgagaggctgaaggagattaggtgctacaagggcatccggcacaagcttggactcccagttcgtggccagaggacaaagaacaactgccggacacttaagggaaagagggcttcagttgccaagaagaagtcacccgcctcccaggatgaataaatcgtattgccatgtattgaagttctctctctctctctcgctcacacgctctctctctctctgtgtgtgtgtgtgtgtg

SEQ ID NO: 14265 - DNA, 299 bp, Zea mays
cgccgttgctgctgccgcgtccacagaatggggggtttcgtgaagacccataagaccaatgcgtatttcaaacgtttccaagtgaaattcaagagaaggcgggctggcaagacagactacagggccaggataaggctgattaaccaagacaaaaacaagtacaacacacccaaatacagatttgttgtgcgatttaccaacaaggacatcactgcacaaatcatatctgctagtatagcgggtgatatggttcttgcttctgcctactctcatgagttgccacgatatggtcttgaagt

SEQ ID NO: 14266 - DNA, 299 bp, Zea mays
attaggagaggagagaggaggcctccgagcttgcccccttcgacccgaccaagaagaagaaaaagaagaaggttgtcatccaagaaccttctgatgaagtggacaagcttgcagagaagacagaaacactggcagtcgcagaacccgctgaacttaacttcactggaatgaagaagaaaaagaagaagccggtggatcttgattcaactcttgatgagcttggagatggggaggacactcaagatgatcaagctgtagaggaacaaggggaaggcattgtgctgggaagtgtccctaca

SEQ ID NO: 14267 - DNA, 293 bp, Zea mays
gcctgccctgtcctgccttgttaagcaacacagcgagacatcacgagagctagagagagatggcggccacggtttcctccttcccggtggtgaacatggagaagctggagacagaggagagggccacggccatggaggtcatccgcgacggctgcgagaactggggcttcttcgagctgctgaaccacggcatctcgcacgagctgatggacgaggtggagcggctgaccaaggcgcactacgccaccttccgggaggccaagttccaggagttcgcggcccggacgctggag

SEQ ID NO: 14268 - DNA, 293 bp, Zea mays
aaagagttaacaagttgggtaatatattcagatgaagagaagaagtttaacattgatatcatttttggccttattcgttcggagttgctgaatattggggagtacaatgttcatttggcaaagttaattgatgggggaagaaataaggttgcaacggagtttgcaatgtcccttgtccaagcattgtttgctcatgatcctgttggcttcacagagtttcagaatgttcttgatgcactatcgaagcatacaaagagaccaggttcacctgaatcgttgcaacaattgattga

SEQ ID NO: 14269 - DNA, 294 bp, Zea mays
ctcccatccccctctcaatcctgtccccaaatctctctcttctctctagcggcgaggcgaggcggtgaagacgagcgagcggcgaggatgttgtgggtagacaagtaccggccgaaaaccctagacaaggtcaccgtccacgaccaggttgcgcggaacctcagaaagttcgtgtcggagcaggattgcccgcacctgctgttctatgggccgtcggggtccgggaagaaaaccctaatcctcgcgctcatcaagcagatgtttggcgccggcgcggagaaggctaagctggag

SEQ ID NO: 14270 - DNA, 292 bp, Zea mays
cccacgcgtccgctagtcgcaactcgcaatcaaatcgaacgaacccagccgaagcgcgactgagcaaggcggaagcggcgatggagcggctgcagcggatctttggcgcctccggcatggggcagccgccgacggactcgccgctgctcgactcttccgagcaggtctacatctcctccctcgcgcttctcaagatgctcaagcacgggagggccggcgtgcccatggaggtcatgggtctcatgctcggcgagttcgtcgatgactacaccgtcagggtcgtcgacgtctt

SEQ ID NO: 14271 - DNA, 291 bp, Zea mays
cccacgcgtccgcccacgcgtccgtctcagttggttgccttggtatggataggtgggacaaactgaatgacctattcgagagaacaggagcaattgtcacatttggtgtgaatgcactctacgggaggtataatgttcgacgttccatctgggcaggcaaatggaattccactaatgcatatgattttgtaaaatacacaatctcaaagggatacccagttggctcttgggaatttggcaatgagctgagtgggcatggaatcggagcaaaagttgatgctaaactttatg

SEQ ID NO: 14272 - DNA, 288 bp, Zea mays
tgcctcttctccctcttgccggtcccgaataaagagcagcagcgcaagaggtcggtagagcgagaagaaggcaatggcggccgagagcttccttttcacctcggagtccgtgaacgaggggcaccccgacaagctgtgcgaccaggtgtcggacgccgtgcttgacgcatgcctcgcgcaggaccccgacagcaaggtggcctgcgagacctgcaccaagaccaacatggtgatggtgttcggcgagatcacgaccaaggcgaccgtggactacgagaagatcgtgcg

SEQ ID NO: 14273 - DNA, 288 bp, Zea mays
actattactgctatccagccagtttgtgaaagtattgttgagacttctgtatccactcctaaagaattgacacattttaaagaactagatagagaaaggaataaatccagggtaaagaggattgagaggaaggtgcgatcactcactccaacatctgacgagcttgcatctcttgatctcagagagggcaggaacgtggtaacatttacgttctcaactgcaattgttgggaaacagcaggttgattgccacatatatttatggagatggaatacacgcattgtaata

SEQ ID NO: 14274 - DNA, 284 bp, Zea mays
gttgcatgagaatgtcactgtaacaccccaccttggagctagtactgtcgaggctcaggaaggcgtcgctatcgagattgcggaaccgtggttggtgcgctgagaggggagctcgcagcaaccgctgtgaatgcgcccatggtcccagctgagatcctgtcagagctggctccatatgtttctctggccgagaagctcgggaggctggcggtgcagctcgtggccggcgagagcggcatcaagggcgtgaaggtggtgtacaccacagcgcgtggccccgacga

SEQ ID NO: 14275 - DNA, 286 bp, Zea mays
gagccatcgacacgatcgcgagcgcaagcacgtacgttgtcggaagctcaagttagaagaagcaccagtgcctgatcgatggcggcccaggctctcctctccggccggcagctgctgggccgccccgtgcagtcggccgtctctaggtcgtcggcgaggaaggcgcccttcgtcgtcagggccagctccagccctccagccaagcaaggtgccgacaggcagctgtggttcgcgtccaagcagtccctctcctacctcgatggcacgctgcccggcgactatggct

SEQ ID NO: 14276 - DNA, 109 bp, Zea mays
aatatagaaggcaactcattgaccaagtggtttcgaccgcattgcctgaacacaagagccccgagcaagtctctgctgctgttaatgcattcatgactgctgaccttcc

SEQ ID NO: 14277 - DNA, 302 bp, Zea mays
agcaattgtcaaccgactctatcttagctctctttgcaagccagtaggtcaccactcaaaagcttgtgaagcaggtgagatgggcaaggaggtggatgtgtccactctagatgccggcggcgtccgtgaccgtgactacgcggaccctccgccggcaccgctgatcgacatcgacgagctcggcaagtggtccctgtaccgcgccgtgatcgccgagttcgtggccacgctgctgttcctgtacatcacggttgccacggtgatcgggtacaagcaccagacggacgcgtcgcgttcggggc

SEQ ID NO: 14278 - DNA, 268 bp, Zea mays
ctcactaatcgggggattctgtggctcacctgtgaacttccacgcgaaagatggttctgggtacaagttcttgggtgagatcgttttgcagcttgacaagataaaccctcaggtggcctcccgcatggtttcagcattttctcggtggaggcggtacgacaagaccagacaagctcttgctaaggcccagctggagatgatcgtgtcggccaatgggctctccgaaaacgtgttcgagattgcttcaaaaagcttggcggattagctt

SEQ ID NO: 14279 - DNA, 306 bp, Zea mays
cccacgcgtccgcaacaattgggggcgccccgagttcatcaaaaggaaagatttggaagagtcgaagcatctcctagacgattctttttccattcggtgcgatgtggtcgtgcccaccaacgaagtccgcgtggtagccactgctgcggctgctatggtttccgtgcccccatctgacctgcaccagcatctcggcattctcctgctgaccgagaagggcgccgatgtggtgttcgacgtcgccggtgagacgttcgccgcacaccggtgcgtgctcgcagcccgttcgcctgtcttcagtgcaga

SEQ ID NO: 14280 - DNA, 311 bp, Zea mays
ctgccgcgccgccaccccctacaggtaaggaagaggagggcaggatgtcgcaccgtaagttcgagcacccgaggcacggctccctcggcttccttcccaggaagcgctcctcccgtcaccgcggcaaggtgaagtcattccctagggatgaccccaagaagccttgccatctcactgccttccttggctacaaggctggcatgactcacattgtccgtgaggttgagaagccaggatccaaactccataagaaggaaacttgtgaggctgttaccatcattgaaacccctcctcttgtcattgttgggctc

SEQ ID NO: 14281 - DNA, 390 bp, Zea mays
gcagcaaagctcctaatacgagtccctaccacgtgggagcacggcggtcgtggcctgccccggctggtctccggggtgtgccacgcgtccgcccacgcgtccggtcgcttccagccgccgccgccgcgtccgcctcgcccagcgcagagccgccgcagcacatcgctatctcgatctcagccatggcggaggtggagcagcaacaggacacgccgaagctgttcaaccgctggaccttcgatgatgtccaggtgaacgacatctcgctgaacgactacctcgctgtgaacgcgacgaagcacgcgatgtacctgccgcacaccgcggggcgttactccaagaagcggttccgcaatgcgcagtgcccgatcgtcgagcgcctcacaaact

SEQ ID NO: 14282 - DNA, 298 bp, Zea mays
gtccgttacattggcagtagctgctcccttctggtgattgacagaggaaaccaagcaattagagagattcagctccactttgatgactgtgtgtaccagtatgaagctggttttcctctaggagtcgcactgcttctcgctgccgctttctttggctacatgcttgcactgctccaacgccgagttttagggatgtattcaaatggagatgaacaggaccacgagagcccagtaaaagcaaaattaaccagcattccacctccataccagaagccactgaagccttatgttcaccccc

SEQ ID NO: 14283 - DNA, 299 bp, Zea mays
ggggagagagagagagagaagagagagagaagagagagagagagagaggagtgggagacccgcgagaggctgccgtgtagggaccgtagactcagcgactgcgaaggagggataaggggatggccgggatcggaccgatcaggcaggactgggagccggtcgttgtgcggaagaaggcacccaccgccgccgccaagaaggatgagaaggccgtcaacgccgcgcgccgcgccggtgcggagatcgataccatgaagaagtacaacgctggtacgaacaaggcggcatccagcggtaca

SEQ ID NO: 14284 - DNA, 265 bp, Zea mays
tctccctcctatagttggcttctcgccaccctctgctttcgatcagctttctccgctccccgtttccctctccaactccaatccatggcctccacggatcgctccacgccagcggaggacgagcaacagcagaagcgcccgtctctcttctcgccgtaccagatgccccgcttccgcctcgcccaccgggtggtgctggcgccgatgaccaggtgcagggcgcccgacgcggtcccaggccccgcgctcgcggagtactacgcgc

SEQ ID NO: 14285 - DNA, 300 bp, Zea mays
cccacgcgtccgcctccccactgcctcgtgtggccgtcgtctcccgttcggaacgccaagcccccctccggcgaaatggcccccaagcgaggtggcagggcgccggtgccggccaagaagaagacggataaagtgacgaaccctctgtttgagaagaggccgaagcagttcggcatcggcggcgcgttgccgcccaagaaggacctgcaccggttcgtcaagtggcccaaggtcgtgcgtatccagcgccacgccgcatcctcaagcagcgcctcaatggtacaccggcgctcaaccagt

SEQ ID NO: 14286 - DNA, 308 bp, Zea mays
ctcttgaaaaatggtcacaaatcgtgatgaggaaattacttccccggcacatggaaattattgaggaaattgacaagcggttcaaagaattggtaatctccaaacataaggaaatggagggaaaaatcgattcaatgaaagttttagataattcgaatccccagaagccggtagtgcgcatggcaaatttgtgtgtggtgtcttctcatacggtgaatggagtggctgagttgcatagccacattttgaagccagaactaattgcagattaaggctccatattggctaacaaattcccaaattaaact

SEQ ID NO: 14287 - DNA, 295 bp, Zea mays
tgcctgccgtttccatctccatccagttctccgcccccacccacccgcccactcctttccccaacccatggccgccgccgccgccggcacccgggaggagatggtctacatggccaagctagcggacaggcggagcggtacgaggagatggtggagttcatggagaaggtcgcggccgccgccgagctcaccgtcgaggagcgcaacctgctctccgtcgcctacaagaacgtcatcggcgcgcgcacggcctcctggcgcatcgtctcctccatcgagcacaaggaggagacgc

SEQ ID NO: 14288 - DNA, 289 bp, Zea mays
ggaccgtggctcgaggctgccagaggtcttgctttcctgcacggcgaccaggccaaagttatctaccgcgatttcaagacctccaatatcctactcgactcggagtacaacgcaaaactgtctgatttcggtttggcaaaggacggtccaagcggtgataagagccatgtttctactagggtcatggggacacaaggatacgctgcccctgaatatcttgcgacaggccatttgacagcgaagagcgatgtgtacagctacggtgtggttcttctggagctgctgtctg

SEQ ID NO: 14289 - DNA, 297 bp, Zea mays
ctaaagtggcggcagtaatcgagtcctgctgggtcagggagccctggagacgaccctcttttgtcagtatcatggaatccctgaaacttcttatcaagacattaccacccaatcaactcctcgaagaaaattagttaccaccgaagcaacttgcaaattatgtcacctctagagttttctcgatttgtttagatccgatatgcgccaggcctctcaaaccattcgtcttcggccacttgttccctggtgagaaatattcaaaactacacttgtcacaaaaggggaaaaactatggtt

SEQ ID NO: 14290 - DNA, 128 bp, Zea mays
atagctactcctactactcaaatccatccttattgagcttagtgtttgatccatggactcggaaggagtagcagcaaaggtggcagatgagactactaaaccggcaagccaagaagacggcgagagca

SEQ ID NO: 14291 - DNA, 321 bp, Zea mays
gaaggagctagaagaatagcatttaagcatatagagacctttgtgctcactttctcagatccacaaatgttctctacggctgctgtctcctcagccccggcagcgctgtctcatgttgctgaagcagtgtttatacagggagctggacacctgagatgcagtcgctctgagattggtagatttgttgtcatgcttcggaatccttcaccaattcttcgtgcttgtgctgcctttgcccttcttcagttcacaatcccaggaggtcggcatgcggtgcaccacgcaggtctcttgcaggaagcaggagcaggtcgagtgtta

SEQ ID NO: 14292 - DNA, 291 bp, Zea mays
ctcaacacagcacaggcagctcgagagagagagagagagaaagatgtcgtggttcgggcaccaccaccacaaccagccggctcccccggcgtcgggccccaaccaggtgttcaagatcttctgccgcgccaacgagaactactgcctggccgtccgcgacggcgccgtcgtgctggccccggtcaaccccaaggacgaccaccagcactggtacaaggacatgcgcttcagcacccgggtcaaggacgaggaaggcatgccggcgttcgggctcgtcaacaaggccacggg

SEQ ID NO: 14293 - DNA, 313 bp, Zea mays
cgttctcaataatggcgccgttcccacgtcgtcttccggccgccgtgccacttctcctcctcctcggcgccgcagtggccagcgccggcgcggaggacaccgatggcggcaactcccgccggcggcactcccgcttgctgttcgcgttcggcaactcgctcaccgacacgggaaacggggccatcttcccggtgactgcaggcgggccattcacccggccgccgtacggggagaccttcttcggtcatcccagcggccgggcttgcaccggcaggctcgtcctcgacttcatcgtggaggagctgaaggtgcc

SEQ ID NO: 14294 - DNA, 315 bp, Zea mays
gttccgtccaggcaaccaaaaagcgttgccccgccgcgcagaggaagaagagagcagaggaggatggctcgtacgaagcagaccgcccgcaagtccacgggaggcaaggccccccgcaagcagctcgccaccaaggcggcgaggaagtcggcgccgacgaccggcggcgtgaagaagccccacaggtacaggcccggaaccgtggcgctgcgcgagatccgcaagtaccagaagagcacggagctgctgatccgcaagctgcccttccagcgcctggtgcgcgagatcgcgcaggacttcaagacagacctccgg

SEQ ID NO: 14295 - DNA, 308 bp, Zea mays
gaaaccctagttcgaacgcgccgccgtcaccgtcgtcgctcgcgctctccgcccggatcggagcgagagtaggggcgtgtcggcggtgaaagcgactgcgtcaccatggcgcacgaggagcattcggagaggagagaggaggcctccgagcttgcccccttcgacccgaccaagaagaagaaaaagaagaaggttgtcatccaagaaccttctgatgaagtggacaagcttgcagagaagacagaaacactggcagtcgcagaacccgctgaacttaacttcactggaatgaagaagaaaaagaagaa

SEQ ID NO: 14296 - DNA, 309 bp, Zea mays
gtcttccgcccgggctaccaccatgccgaagcagatccacgagatcaaggacttcctgctgactgcgcggcggaaggacgcacggtcggtgcggatcaagcgggccaaggacgccgtcaagttcaaggtgcgctgctccaggtacctctacaccctctgcgtccacgacgccgacaaggccaacaagctcaagcagtcgctcccgccaggtctgactgtccaggagatttaaggtatcaagccacaaactgtgctttttttgcggtgtcagggacgtttgctccagtgttactttagtttgtaggtggg

SEQ ID NO: 14297 - DNA, 309 bp, Zea mays
ttcctcagcgccgccgctcccagacaccgagcccgactgcccaaccccgatccggcgatccgtctccttcttttcctcctttctgccgtccccgatcactcgcaaccatggcggcggcagcaggcggaggcgcggtgcgtgctctgtcccagaaggagcaggacatacagatgatgctcgccgccgacgtccaccttggcaccaagaactgcgatttccagacggagcgctatgtctttaagcgccgttccgacggcatctacatcatcaatcttggcaagacatgggataaactccagcttgcagcga

SEQ ID NO: 14298 - DNA, 311 bp, Zea mays
caagcacagagagagagagaaccccagcgggcaaacgcctccctccccctgcctccaggccccagatgcggccatccgggtagctccagaccttctccaatggcggtcaaggtctacgtcgtgttttactccacctacgggcacgttgccaagcttgctgaggagatgaagaaaggcgccgcttcagttgaaggcgtggaggtcaaagtatggcaggtcccggagattctgtccgaggaggtgctcggcaagatgggcgcgccacccaagaccgacgcgccggtcatcaccccgcaggagctggcggaggc

SEQ ID NO: 14299 - DNA, 307 bp, Zea mays
gagagatcagcgacttaacaacaataatggccaccgccatagttcccacggacgccgagctgctgcaggcgcaggccgacctgtggcgccacagcctctactacctgacatccatggcgctcaagtgcgcggtggagctccacatcccgaccgccatccacaacctaggcgggtctgccacgctgccggacctcgtggccgcgctgtccctgccagcggccaagctcccgttcctcgggcgcgtgatgcggctgctggtcacgtcgggcgtcttcgcgtcgtccgacgacgtgcagtaccggctgaa

SEQ ID NO: 14300 - DNA, 307 bp, Zea mays
cacactcctcgccatcacataaaaccagtgcaagcagaagcagcgcaatggcgagcagcaccatggccctctcctccacagccttcgccggcaaggcagtgaacgtgccgtcgtctctcttcggcgaggcccgcgtgacgatgcgcaagacggcggcgaaggcaaagccggcggcgagctccggcagcccgtggtacggccccgaccgcgtgctctacctgggcccgctgtccggcgcgcccccgagctacctgacgggcgagttcccgcgcgactacggctgggacaacgcggggctgtcggcgga

SEQ ID NO: 14301 - DNA, 308 bp, Zea mays
cagacgcgtccgcccacgcctccgcccacgcgtccggtcaaaagaaggctgtgaagatattcccccgcccgactgctggtcctctacgccccattgttcaataccagactttaaagtacaacatgaagtcaagggctgggagaggctttacccttgaggagctgaaggctgctggcatcccaaagaagcttgctccaaccattggtatttctgttgatcaccgccgcaagaacaaatcccttgagggactgcaggccaatgtccagaggcttaagacatacaaggccaagctggttatcttcccaagg

SEQ ID NO: 14302 - DNA, 305 bp, Zea mays
gcagactgcaaggattacttcagcaaatccctgttcgtcgtcggggagttcgggggcaacgactacaacgcgccgctcttctccggcgtcccattttctgatgtcaagacttacgtgccccttgttgcaaaggctatcgccaatggcgttgagaaactgatcgagcttggggcaacagacctcctggtgcctggcgttctcccaattggctgcttcccgttgtacctgacgctgtacaacaccagcagcaaagcagattacaacgcccggaccgggtgccttcggaggtacaaccgcctggcctt

SEQ ID NO: 14303 - DNA, 304 bp, Zea mays
cattagagcgcgcgcgccaagctcgtggtgaggttttcgagatgaaggttatcgagaagatcctggaggcggcgggggatggccggacggcgttctcgttcgagtacttccctcccaagacggaggagggggtcgagaacctgttcgagcggatggaccgcatggtggcgcacggcccctccttctgcgacatcacctggggcgccgggggatccaccgctgaccttaccctcgaaatcgccaaccgtatgcagaacatggtgtgtgtggaaaccatgatgcacctgacatgtacaaacatgcc

SEQ ID NO: 14304 - DNA, 305 bp, Zea mays
cggtggtgttgggtttgtgtctaaggaaatgatccaatctcattgtccagcgcctgctgaggacattcagatcctgagatgtggtcctcctccgatgaacaaggccatggctgcacaccttgacgagctcaactacacaaaggagatgcagttccagttctaagcaatgttaagtttgcaaataataattagtgaccgacatggttcttcggtcacaggaatagtacctgactctgctcgttagctgatatcaggaggaattcaggatcacatgatgattagtagtgcgccacacttttttgcaa

SEQ ID NO: 14305 - DNA, 306 bp, Zea mays
cggacgcgtggttgcaatccagccaatgcgccggccaaggaggcgactaggaggcccgtgctgccgacgcccaaggccgagaacaaggtgctagatccgaacaaggcgcagaacattgccatcttgctgcgcgcgctgaatgttaccaaggaagaggtcagcgacgcgctctgtgaaggtaacacggagaactttggagcggatttactggagaccttgctgaagatggctcccactaaggaagaggagattaaactgagagaattcaaagaggagtcttctccagttaagcttaacccagctgag

SEQ ID NO: 14306 - DNA, 299 bp, Zea mays
ggtctccctggtgcgcgcgctgctctacatcgtggcgcagtgcctcggcgccatctgcggcgtcggcctcgtcaaggcgttccacagcgcctacttcgacaggtacggcggcggcgccaactcgctcgcctccggctactcccgcggcaccggcctcggcgccgagatcatcggcaccttcgtgctcgtctacaccgtcttctccgccaccgaccccaagcgcaacgcccgcgactcccacgtcccggttctggctcccctccccatcggcttcgccgtgttcatggtgcacctggcca

SEQ ID NO: 14307 - DNA, 302 bp, Zea mays
cgcggccggctagagctgttagaaatctgtgggttggtggcattagcccatcgatttcaaaggaggagcttgagggggagtttctaaagttcggaaaagttgaaggtgttgcattctcccaagatcagacttcagcatacatagattttgagaagcttgaagacgcaatttctgctcacagatccttgaatggaaaaatgctaggtggcaaggaattgtgtgttgatttccagaggtccaagggaagagcggaatggtcagaagctagcagcttcaatggtagagtaccagggccagtgggt

SEQ ID NO: 14308 - DNA, 208 bp, Zea mays
caccgatgatggcctcgcaagcgatggtaccgctgcggcactctttgtcgacggcgagtggcgcccgctcgcgctaggccgccgcctccccgtcgtcaaccctaccactgaggctcacatcggcgagatcccggctggcacggctgaggacgttgacgccgcggtggcggcagcgcgcgcggcgcgcaagatgaacctcggccgcgat

SEQ ID NO: 14309 - DNA, 301 bp, Zea mays
cccacgcgtccgcccacgcgtccgacaggattcgccccgccggttcgcgtgaaaaggagccgacgaatccacctacccgcattcgggctccagcgccaccccgcgccatcgggctgcgtccgctaacgaccgcccgttcgcgcagggcccagggtgtgggagggagcaatggtcgctgggatggaggcggaggaaggggtgatggcgacggacttcttctggtcgtacacggacgagccgcacgcgtcgcgccgccgggagatcctggccaagtacccgcagatcaaggagctcttcggcc

SEQ ID NO: 14310 - DNA, 296 bp, Zea mays
cccacgcgtccgatgggggcagagaacatgagggtgaagttgcctcatctcatccgtgctgttcgcaatgctggactgattgtcacatggattactgatcctatgcatggaaacaccatcaaggccccttgtggcctgaagactcgtccatttgactccattctggctgaagtgcgtgccttcttcgatgtgcatgaccaagaaggaagccaccctgggggcgtccaccttgaaatgactgggcagaacgtgaccgagtgcatcggtggatcacggaccgtgaccttcgacgatct

SEQ ID NO: 14311 - DNA, 294 bp, Zea mays
gccgtctgccttctgcgcctccatttcggcctctgtcccttgcaagttcaatctcacctccaaccatgggtaaagagaagtcccacatcaacattgtggttattggccatgtcgactctggcaagtcgaccaccacaggacaccttatctacaagcttggaggcattgacaagcgtgtgatcgagaggttcgagaaggaggctgctgaaatgaacaagcggtccttcaagtacgcgtgggtgctcgacaagctcaaggctgagcgtgagagaggtatcaccattgatatcgctc

SEQ ID NO: 14312 - DNA, 286 bp, Zea mays
cccacgcgtccgaaatcgagccaggaaatgcgtctgctcttacacattgtgggatgatttacaaagatgaaggtcacttggttgaagcagctgaggcatatcaaaaagctaggatggctgatccttcctacaaacctgcttcggaatttcctgctattgtgttgactgatcttggaactagcttgaagcctgcgggtaatacagaggaagggattccaaaataatgtgaagctctggaagtagacaaccactatgcgccggcttactacaaccttggagttgttta

SEQ ID NO: 14313 - DNA, 296 bp, Zea mays
gcacattgatcttgggatcaatgctggaatatcaccggatgtgagcccaatgttgccacttgctaccataggtgctctcaaaaagtacaactggggcaatcttgcatttgacaccaaggtctgcaaaacaaatgtctcatcaaaatcagcaatgaggggtcctggagatgttcagggctctttcatcgctgaagccatcattgagcatgttgcctcagcactttcagtcgacactaacaccataaggaggaagaaccttcatgactttgagagccttgtggtgttcttcgaagatg

SEQ ID NO: 14314 - DNA, 295 bp, Zea mays
gaagaagcgaatcgtcgccggagcaggaggaagagcgaggagcaacatgtcgtggcaggcgtacgtcgatgaccacctgctgtgcgacatcgaaggccagcacctcagcgccgccgccatcgtcggccacgacgcagcgtctgggcacagtccgagaacttccccgagttaaagcctgaggaggttgctgggatgataaaggacttcgatgaacctggaactcttgcaccaactggtctttttgttggaggtacgaagtacatggtgatccaaggtgaacctggagttgtcatcc

SEQ ID NO: 14315 - DNA, 293 bp, Zea mays
cccacgcgtccgcccacgcgtccgagagcgcgcgcgccaagctcgtggtgaggttttcgagatgaaggttatcgagaagatcctggaggcggcgggggatggccggacggcgttctcgttcgagtacttccctcccaagacggaggagggggtcgagaacctgttcgagcggatggaccgcatggtggcgcacggcccctccttctgcgacatcacctggggcgccgggggatccaccgctgaccttaccctcgaaatcgccaaccgtatgcagaacatggtgtgtgtggaaa

SEQ ID NO: 14316 - DNA, 292 bp, Zea mays
gcgacgcgaggcacctcatctccggcgaagggaaatggcgaccgttccaggggatctgatctggcagattgtgaggaagaacaactccttcctggtgaagcagtttggcaacggcaatgccaaggtgcagttcaccaaggagcccaacaacctctacaatgtacactcctacaagtactctggcttagcaaacaagaaaactgtaacgatccagccagctgctggaaaggactcggctgtggtcctctctactaccaagaccaagaagcagaacacacccgcgaagtcagcc

SEQ ID NO: 14317 - DNA, 294 bp, Zea mays
gaaccttcccgagagaggatacaaaggcacccggatcgaggaaaccaatccattccattccacacaaggctaggcacaagcgaaccaaacccatggcgtccgacggcagcggcgtggtgacggtgtacggcagcaacggcgcggactcgctggagccgtccaagcagcccaagtcggcgactttctccgtcaaggtggggctggcgcagatgctccggggcggggtcatcatggacgtggtgaccccggagcaggcgcgcctcgcggaggaggccggcgcgtgcgccgtgatgg

SEQ ID NO: 14318 - DNA, 294 bp, Zea mays
tgatttcactgcaccatgtaccccggaggctggatcacaggttgctaaccagccagtggtataaccttgagaagcatgtgattattgatggtgagcagaagaaagagaccaagttttcaagtcggattcacttgagaatatgcctcgaaggtggatatcatgtcttggatgagtcaacacattacagtagtgatttaaggccaactgcgaacctcgtgtggaaacctagcataggcatgcttgagcttggtatcttgacagcacaaggcctgttgccaatgaagaccaaggatg

SEQ ID NO: 14319 - DNA, 293 bp, Zea mays
ggaccctgaggagcaagatggagggttcacatattactgtacaggagatcacacaatgagctattatggcagcagctcttctggtggacgaagcagtaggagagtcgactatgggaggacatatgtggtgaggccaaagggaaggcacctagccaccattgtgtggctccatggcataggtgacaatggtgctagctggtcccagctcctggattctcttcctctaccaaatatcaagtggatatgccccactgctgcaacccggcctgtcgcggcttttggtggattcccct

SEQ ID NO: 14320 - DNA, 292 bp, Zea mays
ccaccgtccggggtttttgattttagccgccgccgctgctcatctcacatccctcgagaagacgcctgctcctcgccgatcgatacgatggccgtcttctccgacctccacaccgccgacggcctcaagtccctcgaggctcacctcgccggcaaaacctatgtgtctggtgactccattactaaggatgacattaaggtcttcgccgcggtgccgtcgaagcctggcgctgagtttcctaatgccgcccgctggtacgagaccgtctctgcggctgtagcctcaagattcc

SEQ ID NO: 14321 - DNA, 293 bp, Zea mays
  unsure (1)..(293): unsure at all n locations
cagtgccgagagcccagctcgacgccgcggacgccggcaccggcacggagaactacaccgccagcgacgccgccgtgtactggggcccctggcagagggcccgggccacctggtacggccagcccaacggcgccggccccgacgacaacggtggcgcgtgcggattcaagcacaccaaccagtaccccttcatgtccatgggctcctgcggcaaccagccattgttcaaggacggcaagggctgcggctcctgctacaagattcggtgcaggaangacccgtcctgctccggg

SEQ ID NO: 14322 - DNA, 289 bp, Zea mays
tcagttttaccgggggactggttgtgggcggagatgttggtgctctttgagacccccgcaggcttcgcctattcaaggtgctcgacgagggtaagctcgacaaggtcgaggatctatggaaggagttcacgacgtcggactcagcaagaaaggtggttgagctgaaggctttcaataagtttgagaacacatctgatgctctatctgcggcaacccttattattgatagcaagcctagcaagggtctgcgcaagttcttacagaaacattgtgagggtgaaacattagc

SEQ ID NO: 14323 - DNA, 289 bp, Zea mays
ggcaccaaccaggattcatgtcacatgtgcgctcgtgccgaaacaacacccgctggaagggtacataagggagtttgctcaacttggattaagaatgctgttccttcggaggagagcaaggaatgcagctgggctccgatatttgtgaggcaatcaaacttcaaactacccgctgatccttcagtaccgattatcatgattggccctgggaccggtcttgcaccctaccgtggcttcttgcaggaaagacttgctcaaaaagaatctggagctgagcttggtcgatctg

SEQ ID NO: 14324 - DNA, 288 bp, Zea mays
cgaaaacaggtcgtgctgtgttaattaatgctggacaagcaaatgctgcaactggtgatcttggctatcaggatgcagtggatagtgcagatgctgttgccaagcttctcaatgtaagcacagataacatactgattcagtctactggtgtcattggtcaaaggataaagaaggaggcacttttaaattcactacctagacttgtgggctcactgtcttcttcagttcagggtgcgaattctgctgctgtggccattacaactacagaccttgttagcaagagcattg

SEQ ID NO: 14325 - DNA, 284 bp, Zea mays
aggtattggtggtggaaatgatgaaagggagcagactctaaatcaactactaactgagatggatggttttgagggcaacaccggaattattgttattgctgccactaaccgagctgacatcttggattccgctttacttagacctgggcgctttgacagacaggtgtctgttgatgttcctgatgtacgtggaaggacagagattctaaaagtgcatggtggcaacaagaaatttgattctgatgtttctctcgatgtcatagcaatgagaacacctgggttca

SEQ ID NO: 14326 - DNA, 282 bp, Zea mays
gcgcggactggagctggagacgctgctgagggcctcggcgtacatgcttggcgccgccggcagcagcatcgtgtacaaggccgttctggccgacggcgcggcgctggcggtgcgccggatcggcagcgagtgttcgggggtccggcgcttcggcgagctggacgcgcacatgcggccgtggcgaactgcggcacgacaacatcctcctcctgctcggcttctactcgggccctgacgatatgctcatcatccacggcttcgccatcaacggcaatctcgcca

SEQ ID NO: 14327 - DNA, 271 bp, Zea mays
tgacgtggcgcgtccatgtccgccaagctgtgcgacttcgggtcggcgcggatggggttctcggccgccgtcagctcgcgctcgtccgcgcgcaccatgctgggctcgccaggctacgtcgacccgcactacgtccgctccggcgtggtcaccaagaagagcgacgtgtgcagcttcggggtcgtgctcctggagctgctcacggggatgggggccttctgcgcggaggaaggccggctcctcaccgccgtcgtcgcgccgcggctcaggg

SEQ ID NO: 14328 - DNA, 284 bp, Zea mays
gtttctctcattccctttcatcactctgctggtctccctcttccacctctggtcttggccatggcctccagcgcctcccggttcatcaagtgcgtcacagtgggggacggcgccgtgggaaagacctgcatgctcatctgctacaccagcaacaagttccccactgattacatacccactgtcttcgataacttcagtgcaaacgtggtagtcgacggtaccacggtgaatttgggcctttgggatactgcagggcaggaagattacaacagactgaggccact

SEQ ID NO: 14329 - DNA, 283 bp, Zea mays
caagaaggtccttgattgatgataccaacacatccaacacaatgtgtgcatgtcacatctttttgttctagtacatacatagaaggatattgcttggtcttgattgatcatgtctgatttaagtcgactattatttcttggaattttcttttggacctggtgctatggttgatggatgtatattggatatgtgcgttctgccaggtgtaagcacaaaggtttagacagaccgagagcaagagcgagtgaacctgttctggttttgcagtggttcagtaaggca

SEQ ID NO: 14330 - DNA, 286 bp, Zea mays
aaaccccaactccacaatgaggccgtcgctgatgagatccacctcccagctcctccgccgccggagctactcctccgcatccgggcagcccgagcggaaggtggccatcctcggggcggcggggggcatcgggcagccgctgtcgctgctcatgaagctcaacccactggtctcctccctctcgctctacgatatcgctggcaccccaggtgtcgcggccgacgtctcccacatcaactcccccgcactggtgaagggtttcatgggtgatgagcaacttggggaa

SEQ ID NO: 14331 - DNA, 306 bp, Zea mays
gaccctccctcagccgcgtcgcgtcgcatcctacgatccaaagctctctctgctcgcagccatggcgaagaactacccgaccgtgagcgccgagtacagcgaggctgtggagaaggccaggcgcaagctccgagccctcatcgccgagaagagctgcgccccgctcatgctccgcctcgcgtggcactccgcggggacgttcgacgtgtcgtcgaggaccggcggtccattcggcacgatgaagcatcagtcggaattggctcacggcgctaacgcggggctggacatcgcggtgcggctgctcga

SEQ ID NO: 14332 - DNA, 302 bp, Zea mays
cccacgcgtccgtgggcaacaacttccccgtcttcttcatccgcgacggcatcaagttcccggacatggtgcacgcgctcaagcccaacccgcggacgcacatccaggacaactggcgcatcctcgacttcttctcgcaccacccggagagcctgcacatgttctccttcctcttcgacgacgtcggcatccccgccgactaccgccacatggacggatccggggtgcacacgtacacgctcgtcagccgcgccggcaccgtcacctacgtcaagttccactggcgccccacctgcggcgtg

SEQ ID NO: 14333 - DNA, 299 bp, Zea mays
cagctcccatatccgctcccctacctctccagcatcctcccgtctccgtcgtctcgtctccgctcctcacctcgccagccatgggcaagatcaagatcggaatcaacggtttcggaaggatcggcaggctcgtggccagggtcgccctgcagagcgaggatgtcgagctcgtcgccgtcaacgaccccttcatcaccacggattacatgacgtacatgttcaagtacgacaccgtgcacggccaatggaagcacagcgacatcgccctcaaggactccaagacgcttctcttcggcgag

SEQ ID NO: 14334 - DNA, 298 bp, Zea mays
gttctagatcgcgagcggccgccctttttttttttttttttatacagccatttcacagccggtctctcattatcatcttcttggtactcatatggaggaaagaatacactacaaactaaaagttttgaaacacactgtcagcctctaaccccccataagaaaataatctcaaaattgacgtctcggctttgactccgcagccgtgactcggatctgtctaccatccaagtcgatgccatcgaggtttgatatggcattgttgacctctttggcggagcagtaggtgacgaaaccaaac

SEQ ID NO: 14335 - DNA, 298 bp, Zea mays
cggacgcgtgggctcaaaaagcttctatcttcagtactcatttcctccatcatgtgttggcgaagttggtcgaattggagcacctagccggagagagattagacatgggatgcttgcagaaagggcactggagccaattttacctctggaagaggattttccgtacactattcgtgttgagagtactatcactgaaagtaatggttcatccagcatggcttctgtttgtggaggttgtttagcacttcaagatgctggggttcctataaagtttcctgttgctggaattgcaatgggc

SEQ ID NO: 14336 - DNA, 295 bp, Zea mays
ctggtatgggtggcctcacggtgttttctgatggtgttcagaatctcattgagaagggctacagaaaaataactcctttcttcatcccatatgctataacaaacatgggttctgccctgcttggaatggatattggtttcatgggtccaaactactccatctcaactgcctgtgctacctcgaactactgtttctatgctgcagcaaaccatatccgtagaggcgaagcggatataatgatagctggaggcactgaagctgcaattattccaattggtgttggtggctttgttgc

SEQ ID NO: 14337 - DNA, 287 bp, Zea mays
aaaaaggagagataacacacacacacacaaaccccaatcccctgcggcggcgatggacccgtcatcggcgggctccggcggcaactccctcccgtccgtcggccccgacgggcagaagcggcgcgtgtgctacttctacgacccggatgtgggcaactactactacgggcagggccatccgatgaagccgcaccgcatccggatgacgcactcgctgctggcgcgctacggcctcctcaaccagatgcaggtgtaccgccccaacccggcccgcgaccgcgacctct

SEQ ID NO: 14338 - DNA, 249 bp, Zea mays
ggctgctgacgctgtcgctggaccgcacgtccggctccgggttccagtcccggcacgagtacctgttcggcgagatcgacatgcagctgcagctggtgccgggcaactccgccggcaccgtcaccgcgtactacctgtcgtcgcaagacggcgcgcacgacgagatcggcttcgagttcctgagcaacgtgtccgatcggccgtacacgctggacaccgacgtgttcacgcggtgacaagttcaacatg

SEQ ID NO: 14339 - DNA, 292 bp, Zea mays
attctcagtagcagcggcatctccatccagaccccggtcggctagccccaacgccgccgccgccgccgccgcccgccgctcggggattgcctgctttcctctgccgaccacatctacaccgcacaactggtccttccaagtgagcttcaatcccctgcgtgtagatggagagggttctcaaggatgacgccgtcgaggagaagggcgaccgcgccagaatggcatcgtttgttggggccatggcaatctcggatttggcgaagaccacattgggtccaaaaggaatggacaa

SEQ ID NO: 14340 - DNA, 291 bp, Zea mays
accgaggagcaggtctttgatctttcagttgtgaagccttcagattttgttcaccatggtttgagttgtttggagaggttagctgaccaaggcgataaccgtgcgaaggctgttcgtgagaaaatgaggattgtggttgctgggggtgacggtacagttggttgggtgcttggatgtctctcagatctttataagatgaaaagggaaccggttccacctacaggaatcattccacttggtacaggaaatgatcttgctagatcgtttggatggggtggctcttttcccttt

SEQ ID NO: 14341 - DNA, 289 bp, Zea mays
ccgccgacaaataaccgccgacgcgttggcggaccgaagtgaggtgcgtggcgaccgagaagcacgacgagacggcggcggtcggggcggcagtgggcgtggatttcgcggacgaggaggactaccgcataggcggcggcggagagctgctctacgtgcaaatgcagtcaaccaagcccatggaaagccagtccaagatcgcttccaagctatcgcccatatctgatgaaaatacagtgcttgatttggttatcattggttgtggtccagctggtctttctctagcttc

SEQ ID NO: 14342 - DNA, 284 bp, Zea mays
gcaatataaagcagatgaagttggatttgggtattgaggactatgaggaacaagatgaggatagctcagattcagaaaatgaatatgacaacgcagtcacctctgttagctatgatgaggatcaagacgattttgacgaatcagctgatgaagatgaatatgatgattacgacgatgaagatgacgagattgacagctagtggtttggaattgtttcttgtgatgtgccgctctgaattagtgattctctggacgttgtacttctgtctctgggacatttcgtg

SEQ ID NO: 14343 - DNA, 284 bp, Zea mays
ctgaaaggagacatgattcttcaattggtttccgagcgcaggttcgttcaaatatgcgatctggtggtgtcataaatgctgagattacatcatcgctactgaaatcagttgaaagtggcgatctcattgcgtatggactaatcccagagtttgttggtagatttccaattcttgttggtctatcctccctcagcgaagatcagcttgttgaggttctcacagagccaaagaatgcccttggcaggcagtataccaagttgttcgaaatgaatgacgtcaaattg

SEQ ID NO: 14344 - DNA, 287 bp, Zea mays
ccgcggtggcgccaagaagcgtaagaagaagacgtacaccaagcccaagaagatcaagcacaagcacaagaaggtgaagctctccgtgctgcagttctataaggtggacgacgccactggcaaggtgacccgcctccgcaaggagtgccccaacacagagtgcggcgcgggcgtcttcatggccaaccacttcgaccgccactactgcggcaagtgcggcctcacctatgtctacaaccagaaggcgtaattgcttgccccgatttgctttatccgccaacctatca

SEQ ID NO: 14345 - DNA, 280 bp, Zea mays
  unsure (1)..(280): unsure at all n locations
cccacgcgtccgcggacgcgtgggcgacgtgggtctcgtcaggaacgaccagcctaggtttgagacatgctaccaaatagctcttgcaatcaaaaaggaggttgaggatcttgacgctgctggtactncggtgatccagatcgatgaggcagctctaagggagggtctgccactacgcaagtcagagcatgcattctacctggactgggctgtccactctttcaggatcaccaactgcggagtccaggacaccacccagatccacacccacatgtgctac

SEQ ID NO: 14346 - DNA, 285 bp, Zea mays
ctcaggtccaagtagttcgtttcgtgagttatccaaagttgcgccgcaaagatgagtactgctaatcgctaccaacacatcaagtcaactaagcctgttgtaggcaaagcaagaaaattgaaggatctcatgataaaaagtgacaataggatatgtgctgactgtggtgcacctgatcccaaatgggcatctgctaatattggagtgtttctttgcttaaaatgtggagatgttcatagggcacttggacctgacatctcaaaggttttatctgtaactttggat

SEQ ID NO: 14347 - DNA, 286 bp, Zea mays
cccacgcgtccgcccacgcgtccgcccacgcgtccgtgtgttgttcggagcgggcagcagcacacagccccatcccaatcctagtcgatcttcttcccctcctcaaggaagaaaagaagctgaaccatggggaagagaaagtcagctgctaagccacctcctaagaagcggatggacaagcttgacactgtcttttcctgcccattctgcaaccacgggagtagtgttgagtgccgaattgacatgaagaatctgattggcgaacatcttgtagaatctgtcagga

SEQ ID NO: 14348 - DNA, 318 bp, Zea mays
cccgagcaggaggcggacaaggtaagcagcaatcgcaggaaccctagcgccgccgcacccgcagaatgggtatcgacctcgtcgccggtgggaggaataagaagaccaagcgcactgcgcccaagtctgacgatgtctacctcaagctcctcgtcaagctctaccgtttcttggtcaggaggaccaagagcaatttcaacgctgtcattctcaagaggcttttcatgagtaaaaccaaccgaccaccaatctccatgcgccgccttgtcaagtttatggaaggaaaggagaagaacattgctgtcattgttggcacag

SEQ ID NO: 14349 - DNA, 314 bp, Zea mays
ggcggaccaggtaagcagcagcaggaaccctagcaccgccgcatccgcagccatgggtatcgacctcgttgccggtgggaggaacaagaagaccaagcgcacacgccgaagtccgacgatgtttatctcaagctccttgtcaagctctaccgtttcttggtcaggaggaccaagagcaacttcaatgctgtcattctcaagaggctcttcatgagcaaaaccaatcgcccaccaatctccatgcgccgccttgtcaagttcatggaaggaaaggagaagaacattgctgtgattgttggcacagtcacagatga

SEQ ID NO: 14350 - DNA, 313 bp, Zea mays
cccacgcgtccgcaggagttgatttatccgctgcagccatgagtaagttgcagtctgagtctgtcaaggatgccatctcccagattgttggggatgccaaggagaagaataggaagttcactgagactgtggaacttcagattggtctgaagaattatgatccacagaaggacaagcgtttcagtggctctgttaagttgccccatatccctcgtcccaagatgaaggtgtgcatgcttggtgatgcccagcatgttgaggaggccgagaagatgggacttgactacatggatgttgaggctctcaagaaaat

SEQ ID NO: 14351 - DNA, 310 bp, Zea mays
ctactcgtctctcatcccttccccgccgtcgcgtcctcttcgaactgaatcgcgccgcgatcacccaccttatggcggacaaggagcctgtcgtggagcgatccgaggcgtctgaggaggaggacgcctccgccgcggccgccgcgtggggaggaagaggacacgggtgcccaggtggcccccatcgtgcggcttgaggaggtactcgtcaccaccggtgaggaggacgaggacgtcctgctcgacatgaaggcgaacgtgtaccggtttgataaagacgggaatcaatggaaggaaagctgcacgggca

SEQ ID NO: 14352 - DNA, 307 bp, Zea mays
ggaccgtggcgacgccgacgcgagatggcagggaacacagccactcgccgacgagaccccggcgcgcgcgagagaaagagactgaggaggatcttttgttcgtgaaaaatattggaggcggagggaaggtgaaggagggggatcggagatgaacgtgttccggctggcgggggacatgacccacctcctcagcgtggtagtgctgctcctcaagatccataccatcaagtcctgcgcaggcatatctctgaagacacaggagctgtatgcacttgtttttgcagcacggtacctggacctgtttgtt

SEQ ID NO: 14353 - DNA, 312 bp, Zea mays
cgacgccatccactccgacaaggccaaggcgctcctcgacacctaccgcatcggcgagctcatcaccacgggcaccggctacagctccgacaactccgtccacggcggctccgtcctgtcgcacctcgcgcccatccgcgtagccgtcagggctcccgcgctctccaacccgcgcgaaaagatccactgccgcctcgtcggcaagaaggagctgtcccgcgacgtccgcctcttccgcttctcgctgccgtcgcccgaccaggtgctcggcctccccatcggcaagcacatcttcgtctgcgccagtattga

SEQ ID NO: 14354 - DNA, 302 bp, Zea mays
gcacgtctcgtctccctcccacaaaaaaaaaaaactgctcggttgctgctcctgctccgccgcgccggcatcatgtgtggcatcttagccgtgcttggttgctccgactggtctcaggcaaagagggctcgcatcctcgcctgctccagaaggttgaagcacaggggccccgactggtcgggcctctaccagcacgagggcaacttcctggcgcacagcggctcgccgtcgtctccccgctgtccggcgaccagccgctgttcaacgaggaccgcaccgtcgtggtggtggccaatggagag

SEQ ID NO: 14355 - DNA, 310 bp, Zea mays
aacagcgaaaccctagttccaactcggccgcctctactataagtagctccactctctgtcctccgcggaaaccttgcccctgctcctcacgccgccgccgccgccgccgtcgccgccaccacatccgtagcgcccagccgccggagaagaggagggagccagcaccagccaccatgggtcgcgtccgcaccaagaccgtgaagaagacctccaggcaggtgatcgagaagtactactcccgcatgaccctcgacttccacaccaacaagaaggtgctggaagaggtctcgatcctcccctcgaagcgcct

SEQ ID NO: 14356 - DNA, 308 bp, Zea mays
cggacgcgtggtgcaagttcaatctcacctccaaccatgggtaaagagaagtcccacatcaacattgtggttattggccacgttgactctggcaagtcgaccaccacaggacacctgatctacaagcttggaggcattgacaagcgtgtgatcgagaggtttgagaaggaggctgctgaaatgaacaagcggtccttcaagtacgcatgggtgctcgacaagctcaaggctgagcgtgagagaggtatcaccattgatatcgctctgtggaagtttgagaccaccaagtactactgcacggtcattga

SEQ ID NO: 14357 - DNA, 308 bp, Zea mays
cacgcagctgaggagctgatcctcaccggcgtcgccatcgtaatcgccttggacagcggcaccagaacctctgcctccgcaggtgcttgctggtatcattacaatctggtagttttagtggttgggcttgacttcctactattcagaaacacagtaccgagaagtctttaggtggggtcaaagatggtgtcgctgaagttgcaaaagcgccttgccgcgagctacctcaagtgtgggaaaggcaaggtgtggcttgacccaaatgaagttagtgagatctccatggcaaactcccgccagaatatccg

SEQ ID NO: 14358 - DNA, 306 bp, Zea mays
gttggaaaggtcgagaggaacattcctgaggatgatcctaggaacccagctgtgattgctgataatgtcggtgacaatgttggtgacattgctggaatgggatctgatctctttgggtcatacgcagagtcttcttgtgctgcccttgttgttgcgtctatttcatctttcggaatcgaccatgatttcactgggatgtgctacccactccttgttagctctgttggtatcattgtctgcttgatcaccaccctttttgctactgatttctttgaagtcaaggctgtgaaagaaattgagcctgca

SEQ ID NO: 14359 - DNA, 310 bp, Zea mays
accagccccatcccctccgtcgctcccaagtcccaactgccgccacctctccgcgagccgacgccgacgcctacggtcaccaggacagagggacggctgctaccgcgggagtatgggggtggactactacaaggtgctgcaggtggggcgcggcgcctctgacgacgagctcaagaaggcttaccggaagctggccatgaagtggcacccggacaagaaccccagcaacaagaaagaagcggaggccaagttcaaacagatctcagaggcatatgaggtgctaagtgattcccaaaagcgggcaatctat

SEQ ID NO: 14360 - DNA, 304 bp, Zea mays
gctgaaatcttccgagcaaaacctattgacgtttctgaccatacagtaacccttcagcttactggagatcttgacaagatggttgcactacaaaggttattagagccatatggcatctgcgaggtcgccagaactggacgagtggcactggtccgtgaatcgaaggtcgactccaagtacctccgcggttactctcttccattgtagcctggcatttgtgattggtggtggacccgataaagagcttggtttgttgttatagatcagaccatctcgcgctgggatgtgttgtgcaattacagga

SEQ ID NO: 14361 - DNA, 303 bp, Zea mays
gtgctcgatctccctccgccactcccatccatctcctcgctcccagtcccccggaagctacgaagcatggcgtccgtcaccgcccgcaccccggtcgcggcccttcgcccgtcgtcggccttccttggccactctagccgcctcggccgcaccgcgtcgcccacgaggcgcagctcaaggcggaggccaagggcgagtggctccccggccttccctccccctcctacctcgacggcagcctggcgggtgacaatggcttcgacccgttgggcctggcggaggaccccgagaacctgcggtggt

SEQ ID NO: 14362 - DNA, 304 bp, Zea mays
tgaggaggccgcacgcagccatggatttcctgcaggagcaaagcgtcgagaccacagtggccgtcgccgtcgatgtcgccgccgtcgccgcagcgcgccttcctcctccttcgatccaggaagcccaagggctgcttggatcctgagaacttcaggaagttcaaacttgttgaaaagaagcaaataagtcataatgttgccaggttcaagttcgctcttccaactccaacttctgtattgggccttccaatcggtcaacatatcagctgcagaggacaagacgctacaggtgaagaagtaatca

SEQ ID NO: 14363 - DNA, 305 bp, Zea mays
tctagatcgcgatctgccgccctttttttttttttttggcggacataagatcactgatcaacattcaaataaccatagcaatacattaccaccaagtctaaattcataacacaggcaaaagccactgcaccacttacacacaccagccaaccaccactactgccatgagaagcggcacatgacagtgcttgcttgagaagcagacaacaacgacgcctacaacaaggcggctaagacgaggtgaacttggtgacggccttggtaccctccgagacggcgtgcttggcgagctcgccggggaggac

SEQ ID NO: 14364 - DNA, 302 bp, Zea mays
aattacaaaagatctgaaggccagaactgtggaaatttccttacggaccgtccgtcgaccaaggtgcaagcagctccaggtggcgactcttcactcggttatctttttagtggcagcaaagatggcaagtgatgtacacctgctgttagtgttcgccatgatcatgggagaaggtttctgcttaacaaaggaaaaagggaaaagaatcttgtattcccatgagtaaatatcaaactgctcatggtatctatgttgttgggattgcttgtatgtgtgtacatgttcgtgtgtgtcgtgtgttg

SEQ ID NO: 14365 - DNA, 305 bp, Zea mays
cggacgcgtggcgtgacgcgtgggttccccgagaccaacactggcatcattgtccttgctgagggtcgcctgatgaaccttgggtgtgctaatgctgccatcctagagcttgtcatgtcctgctcattcactaaccaggtcattgcccaacttgaactgtggaaggagaagagctctggcaagtatgagaagaaggtgtatgtgctccccaagcaccttgatgagaaggttgctgctctccacttgggcaagcttggtgccaagctgaccaagctcaccaagtctcaggccgactacatcagcgt

SEQ ID NO: 14366 - DNA, 302 bp, Zea mays
caagaaaggaaatccgttctcgttctgaggcactacagttgcaggaatgggccgctgagcattgctctgctccttaccgggcccctgaattatgggactgcccaagccatgccgatattgatgagaggacagacatctggtctctaggatgcactctttttgctatcatgtacaatgtttcaccatttgagtatgctcttggtgaatctggaggaagtctgcaacttgccattgtaaacgggcagttgaaatggccagcaggacccaaacctccttatcctgatgagcttcgccattttgtt

SEQ ID NO: 14367 - DNA, 304 bp, Zea mays
catcaagatgtttgttctagatgaagctgatgaaatgctttctcgtggtttcaaggatcagatttacgacatcttccagcttctcccagccaagattcaggttggagtcttctctgctaccatgccccctgaggcccttgagattacccgcaagttcatgaacaagccagtgagaatcctcgtgaagagagatgagctgactcttgagggtatcaagcagttctatgtgaatgtggataaggaagactggaagctggacacactgtgtgacctgtacgagacccttgccatcacccagagtgtc

SEQ ID NO: 14368 - DNA, 116 bp, Zea mays
cggttaaatggacaacggaccgagacataagaagcattacacaaattcatatctagaacaagctgtcggaggataccacacttaggccaccagagtgctcgctgtggttgactcat

SEQ ID NO: 14369 - DNA, 293 bp, Zea mays
cggaccgtgggcggacgcgtgggcagcgacggcatcccgctgccgccgcagaccgggttcgacgccatccgcaccgtcgtcccgcgcatggtcaagctggtgacaggacaccaccaaccacgtcctcgcgttcgaggtgccggagatgatagagagggaccggttctcgtggttcaaggacgaggagttcgcgaggcagacgatcgcggggctcaacccgctgtgcatccagctgctgactgagttccccatcaagagcaagctggacccggaggtgtacgggccagcggagt

SEQ ID NO: 14370 - DNA, 113 bp, Zea mays
cggaccgtggcgttccatttccccatctcccagatccaattcgcgagttctccctcctctgccgccatggcgctctctgtggagaagacctcgtctggacgggagtacaaggt

SEQ ID NO: 14371 - DNA, 95 bp, Zea mays
attcgttccaactcctgagcactttctcctcgtccccgacaagccaatcgaagccgagatacggccatggactccaccggcaccggagcaggggg

SEQ ID NO: 14372 - DNA, 288 bp, Zea mays
cggaccgtgggctcccaacagcaagaagagacggatttgccagatgatggcgaagagagcttccggagcatggattcctctgatgaaggtgtccggagctccttatctggggctagtcaccctccagaggctattgacatggatatcatgaagacagtctatgttgcaatcgacgagaagtccgagccaccggttagtttagtgcgaggagtctcggtgaaggggcctttcatagatgacctctcgatccgtgttacaagcgcaaaggcaaatctggtggtaggtgca

SEQ ID NO: 14373 - DNA, 290 bp, Zea mays
actgcatctccctcgctctcgtcgcctcgttcgcttcgcctcctccccgccccgccccgagccgagcagagcgcacccgtatccggagctgggatggcggacgcgaagcagcagcagcagcagccacagcaggcggcagcggcagccaccggcgtgtggaagacggtcaagcccttcgttaacggcggggcctctgggatgctcgcgacatgcgtcatccagcctatcgacatggtcaaggtgaggatccaattgggtgagggctccgctggtcaggtcacaaggaacat

SEQ ID NO: 14374 - DNA, 297 bp, Zea mays
cggacgcctcacctcaaagagtgatgtttatagttttggagttgttctcttggaactgattacaagaagaaaggctgtcgatggtggttaaattagccttactgaaaacttcagttaagctctagcgaaacgggataagatacgggaattttatgatgtaaaagttgcagatgagaacagtttgaggattcttgatggaattgggaaactagcagcaaaatgtttagcaatggaaatagagaaacgtccagaaatgaaagatgttgcagaacagcttcggatgtttagaaaaactca

SEQ ID NO: 14375 - DNA, 122 bp, Zea mays
gcagccattcttgtaccaggagacattgttagtattaaactcggagatattatacctgcagatgcacgcctccttgagggggatcctttgaagatcggtcagtctgctctgaccggagagtc

SEQ ID NO: 14376 - DNA, 315 bp, Zea mays
  unsure (1)..(315): unsure at all n locations
cgtccatgctctccgctaccaccgtgccactccagcaggggggcggcctgtccgagttctccgggctcaggagctccgcgtcgctgcccatgcgccggaatgccacctccgacgacttcatgtccgccgtctccttcaggacccacgcggtcggcacgagcggcgggtcgcggcgggcgccgacggaggcgaactgnaaggtggccatcaacgggttcggccgcatcgggcgcaacttcctgcggtgctggcacgggcgcggcgacgctcgcccctcgacgtcatcgccatcaacgacaccggcggtgtcaagca

SEQ ID NO: 14377 - DNA, 302 bp, Zea mays
cccacgcgtccgcccacgcgtccgcagtcatccacactaacgaacgaactgaggtcgacgacgactgatcgagcagcgacgatggcggctgtgctgaacagcaggaagacgccgcaggttgttgccgtgctggtggcggcggcgctgctggcgtcgtccgcttcggcggcgatcacctgcgggcaggtggggtcgtcgctggctccgtgcatcccgtacgcgacggggagggccagcgcgctccccgcgtcgtgctgcagcggcgtcaagagcctcaacagcgcggcgcggaccagcgcgga

SEQ ID NO: 14378 - DNA, 305 bp, Zea mays
catccttattggaagggcagctaataaggtaataaggggcgacgaaaatggctccaacgaccgccaccaaggacgacagtggctacggcgacgagcgccggcgcgagctgcaggcgttcgacgacacgaagctgggggtgaaaggcctggtggactccggcgtcaagtccatcccgtccatcttccaccacccgccggaagccctgagcgacataatttctccggcgcctctgccgccgtcgtcgtcgccctccgccgccgccatcccggtggtggacctctcggtgacgcgccgcgaggaccta

SEQ ID NO: 14379 - DNA, 307 bp, Zea mays
ccgtcttctgcgaggtcatgaacggcaagcccgagtacacggaccacctgacccacaagctgaagcaccacccggggtccatcgaggccgcggccatcatggagcacatcctggatggcagctccttcatgaagcaggccaagaaggtgaacgagctggacccgctgctgaagcccaagcaggacaggtacgcgctccgcacgtcgccgcagtggctgggcccccagatcgaggtcatccgcgccgccaccaagtccatcgagcgcgaggtcaactccgtgaacgacaacccggtcatcgacgtcca

SEQ ID NO: 14380 - DNA, 308 bp, Zea mays
gtgctcacctccaacggcgtcgaccacgcgcacggcggcgcgcccaccagggggggattctccgacgtcctggtcgcgagcgagcactacgtggtccgcgtccccgacggcctggcgctggaccgcaccgcgccgctgctctgcgccggcgtcaccgtgtacagccccatgatgcgccacggcctcaacgagcccggcaagcacctcggcgtcgtcggcctcggcggcctcggccacgtcgccgtcaagttcggcaaggccttcgggatgaaggtcaccgtcatcagcacgtccgccagcaagcgcca

SEQ ID NO: 14381 - DNA, 304 bp, Zea mays
ggcttgatcgatctctcgacagcaaatagctagcaataatggagaagtacaccaaagccctagcgtcattgctcaccatgctggtgctggcacctctcctcgccatggccaccgacccagaccccctgcaggacttctgcgtcgccgacctcaacggcaagccatcagtgaacgggtacccatgccagccgccgtcgtcggccggcgaccagttcctcttctcgaccaagatcgccacgggaggcgaccccctggccaacccgaacggctccaacgtgacggagctggacgtttccgagtggcc

SEQ ID NO: 14382 - DNA, 302 bp, Zea mays
ccacgcgtccgtacagttaggggtgttggtgacattggggatgttaaggttatagatctgcagagtccacttaatagcctcatagggaggcaagtatgcaaaatcggcagaagttctggtcacacaactggaactgtggtggcttatgcccttgagtacaatgacgagaaaggaataagcttcttcactgacctccttgttgtcggcgaaaaccgccaaacttttgatctagaaggtgatagtggaagccttattatcctgactggccaggataatgagaagccgtgtcccattgggataat

SEQ ID NO: 14383 - DNA, 299 bp, Zea mays
aatcaaccagcaacactcttctcttataacatagtacagcgaaggtaactcacatggcaacttccatgggttgtctcgtcttgctctgccttgtttcttctctccttcccagtgccgtccttggccacccatggggtggcttgttcccacagttctatgaccattcgtgccccaaggcgaaggagattgtgcagtccattgtggcacaggctgtggccaaggagaccaggatggcggcatctttagtcagactgcatttccatgactgctttgtcaagggctgcgatgcttcggtgctg

SEQ ID NO: 14384 - DNA, 300 bp, Zea mays
agcttgtgcgcgcgcaatggcactcgtgtccgcctcctcgtcctccaccaccgccgtcgcggcgctccccaggaatgggcagcagcgggcgtcgtcgtcgttgttctcctcctcctcctcttcctccttcctcgtcggcaagacgctgctgaggcaggccgaggcagcccggccgtcgttcgccgtgcgcgccgcggcggagttccgacaggccgatctggttccccggcagcacccctccgccgtggctcgacggcagccttcccggcgacttcggctttgatccctggggcctcggat

SEQ ID NO: 14385 - DNA, 300 bp, Zea mays
gttctttgcaatctctacaagcagatgcagataagcaccacatattaatggactcctcgtcatctcctaggttcagcgacaaaacgagcagtaacttggagaggaatgagaacgacttggttattcggccacagaggcttagtgtttctgccggaaggacatctacagacagatcaccgaagcacatagaactagtttcaaatggtcataataacagtcaaaatgaccaggtccgacctctactgagtttattggagaaagaaccaccttctcgacatgtatctggacaactggattatg

SEQ ID NO: 14386 - DNA, 301 bp, Zea mays
cccacgcgtccgctactggagaaggatttcgagcagattgcgggagttcctccaccaggcagtgaccatctgcctgaacatccagaaggagtacggcaagctcctcaaggacttcaacaagggcctggtgaacaacaaggacatcgagaacctcaaggtccaggtggagaagtttgccgactccttcgacatgcctgggttcacgcttgagagcatgaaatacaaggagtagacatgcctcccatgcgcggcaaggtcctcctgtaccgatgtctttccttgtggtggcgcagggtgccat

SEQ ID NO: 14387 - DNA, 298 bp, Zea mays
gcgccgcctactccgacgacgacgactccgacgaggccgctgccccgcgccaggagggagaggtcaagaagcctaagaagcccaaggtgaagaagccgaagtgacggtcgccgaggccgccgtcctgatcgacgccgagaacctcgcagcgcacctcttcgagatctcggcatcgtacgagaatcaacaggacattcagctcatgaggtttgctgattactttggccgggcatttgcagctgtgagcgcatctcaatttccatgggcaaagatgttcaaagaatcaacagtgtccaag

SEQ ID NO: 14388 - DNA, 305 bp, Zea mays
agatctcgcacccgtaagtagcgacgaatctcgcggtgcggaggcgcgacagatgcggtgtcgactccgacggactcgcagccaccggtggagacgccccaccggcgcactcctccaacgttcatagtttaagggcttgatttggataattagtcatcaacagaagtgataaaaaatggtggttcttgcagcatcaatcgtttcaaagtcgggaaaagcacttgtttcaagacagtttgttgacatgtctcgcataagaattgaaggattacttgctgcgatcccgaaactggttggaactggga

SEQ ID NO: 14389 - DNA, 297 bp, Zea mays
cccacgcgtccgttctcattcatgtaaaaaatgaaacggatgacatacgggaatcaccgctagctctgcttttttgggtgaaacgctggccaggactcgatcgaatcagatggaaatgctgttggggatgcccttggcggtgacgccggtgttatcgcccttgtcggaggtgttggggaagagcagggtgtaggggaactgggccgcgctgtagcggttcttgaagcgcgggtccttgttcatggcctccacgcgtttctcgatctcggtcagccgcgcgccgaaccgcttgaacgc

SEQ ID NO: 14390 - DNA, 268 bp, Zea mays
attgctgttaaacttctttttgctggggagcgccaactttgcgaccaagtttttgagtgcagtcaatcgttgagagataagtgctatgctgcaataacaaagaacagtttggctacactactcagttttggagaggctattgctatgagtaaacgatcaccagagaaactctttgttctgttagacatgtacgagataatgtgcgagcttcaaacagagattgataccattttcgttggagaatcaggttcgcaaatgcgcgactctg

SEQ ID NO: 14391 - DNA, 297 bp, Zea mays
ggcaatccccgctccgtctagcggccctgcgcaatcagtcagggttccatggccaacagcaacctcccgcgccgaatcatcaaggagacgcagcggctcctcagcgaaccagcgccggggattagcgcgtcgccgtcggaagagaacatgcggtacttcaatgtcatgatccttggccccgcacagtcaccctatgaaggtggagttttcaagcttgagctattcttgcctgaggaatatccaatggctgccccgaaagttaggtttctcaccaaaatttaccatccgaacattgac

SEQ ID NO: 14392 - DNA, 293 bp, Zea mays
ctcttctcctccctcctgccgggtccttaataaagagcagcagcgcaagaggttggtagagcgagcgagaagaaggcaatggcggcggagagcttcctgttcacctcggagtccgtgaacgaggggcacccagacaagctgtgcgaccaggtgtcggacgcggtgctggacgcctgcctggcgcaggaccccgacagcaaggtggcctgcgagacctgcaccaagacgaacatggtgatggtgttcggcgagatcaccaccaaggcgagcgtggactactagaagatcgtgcg

SEQ ID NO: 14393 - DNA, 294 bp, Zea mays
gcagaggcagcgacacgatcgcgagcgcacgcacgtaagcacgttgtcggaagctcaagttagaagaagcaccagtgcctgatcgatggcggcccaggctctcctctccggccggcagctgctgggccgccccgtgcagtcggccgtctctaggtcgtcggcgaggaaggcgcccttcgtcgtcagggccagctccagccctccagccaagcaaggtgccgacaggcagctgtggttcgcgtccaagcagtccctctcctacctcgatggcacgctgcccggcgactatggctt

SEQ ID NO: 14394 - DNA, 297 bp, Zea mays
cccacgcgtccgatgggttccatcatggagcaacgctgcaacaacgatccgcagcgctgctcgacgctcagctcgagctctggcacagcacgttcgcgttcatcaagtccatggcgttcaagtcggcgctggagctcggcatcgccgacgccatccactgccacggcggcaccgccacgctcacccagatagccaccaaggccgcgctccacccgtccaagacaccgtgcctgcgcaggctcatgcgcgcgctcacagtcgccggcatcttcagcgtcgccaagaactcgtccgacg

SEQ ID NO: 14395 - DNA, 308 bp, Zea mays
gtgaccctccctcagccgcgtcgcgtcgcatcctacgatccaaagctctctctgctcgcagccatggcgaagaactacccgaccgtgagcgccgagtacagcgaggctgtggagaaggccaggcgcaagctccgagccctcatcgccgagaagagctgcgccccgctcatgctccgcctcgcgtggcactccgcggggacgttcgacgtgtcgtcgaggaccggcggtccattcggcacgatgaagcatcagtcggaattggctcacggcgctaacgcggggctggacatcgcggtgcggctgctcga

SEQ ID NO: 14396 - DNA, 330 bp, Zea mays
cggacgcgtgggtgatgagatatttattatacacaccacaaaatagccatttcgttgcaggtacctttccatcttgtaacgcgcctgtgggatacataccttgccgaagcgactatctgccagattttctcgtgtacatatcggccagttttttgctgacgtggtcggacaagctgcagaagctggattttcaagagatggtgatgttcctgcagcacctccccacgaggacctgggcgcaccacgagctggagatggtcctctcgagggcatacatgtggcacacgatgttcaaaagctctcccagccacctcgccggctaggacccac

SEQ ID NO: 14397 - DNA, 330 bp, Zea mays
ccctcttgccggtcccgaataaagagcagcagcgcaagaggtcggtagagcgagaagaaggcaatggcggccgagagcttccttttcacctcggagtccgtgaacgaggggcaccccgacaagctgtgcgaccaggtgtcggacgccgtgcttgacgcatgcctcgcgcaggaccccgacagcaaggtggcctgcgagacctgcaccaagaccaacatggtgatggtgttcggcgagatcacgaccaaggcgaccgtggactacgagaagatcgtgcgcgacacctgccgcgagatcgggttcacctccgacgacgtgggcctcgacgcc

SEQ ID NO: 14398 - DNA, 328 bp, Zea mays
cgctcagtgtcatttgcagttcccggtagcagccatggcgtcggtgcagctgtctgggccgcgggtggtggcggctgcgaaaccggctgcgttgggcgggctcctcctgacgccgtcccttgcggtgccaaacgggcggagggccaggggcctcgtggtgagggccgccacggtcgtgtcacctaagtatacatccataaaaccattgggagacagagtacttgtgaagatcaagacctctgaggctaaatctgatggagggattttacttccagtatcagttcagacaagaccacaaggaggggaaattgttgcggttggagaaggg

SEQ ID NO: 14399 - DNA, 331 bp, Zea mays
cgctcccctacctctccagcatcctcccgtctccgtcgtctcgtctccgctcctcacctcgccagccatgggcaagatcaagatcggaatcaacggtttcggaaggatcggcaggctcgtggccagggtcgccctgcagagcgaggatgtcgagctcgtcgccgtcaacgaccccttcatcaccacggattacatgacgtacatgttcaagtacgacaccgtgcacggccaatggaagcacagcgacatcgccctcaaggactccaagacgcttctcttcggcgagaagccggtcaccgtctttggcatcaggaaccccgaggagatcccg

SEQ ID NO: 14400 - DNA, 289 bp, Zea mays
ggcgagatcacgaccaaggcgaccgtggactacgagaagatcgtgcgcgacacctgccgcgagatcgggttcacctccgacgacgtgggcctcgacgccgaccgctgcaaggtgctggtgaacatcgagcagcagtcccccgacatcgcgcagggcgtgcacgggcacttcacgaagcggcccgaggagatcggcgcgggcgaccagggccacatgttcgggtacgccaccgacgagacccccgagctgatgccgctgagccacgtgctggccaacaagctgggcgcgc

SEQ ID NO: 14401 - DNA, 323 bp, Zea mays
tgaagatgtcgttcagctaaggaaatccattggggcccctgggatggcagttctccagtttgctttcggaggtggttctgacaaccctcatttgccacacaaccatgaaatggatcaagttgtgtacactggaacacatgataacgatacagttcttggctggtggcaaaatttaccagaggaagaaaagaaaattgtgatcaagtatctaccagaagccgagaatattgacataacatggacactgattacggctgccctctcttccgtcgcgaggacttccgtggtaaccatgcaggacattcttggccttgacagttctg

SEQ ID NO: 14402 - DNA, 321 bp, Zea mays
ccacctctcctccggctagggtgttcacgcctgccgcggcgaacttctgccctccccggcgtcgcgctctggtcgtcgtcggccgggaagatggctggcggcttcagggtacttcatctggtcaggccctttctggctttcttgccagaggtgcagagcgcggataggaagataccattcagagaaaaagttatctacactgttatttctctcttcatttttctggtgtgcagccagctcccactctatggcattcattcaacgactggagctgatcctttctactggatgcgtgttatcctcgcatcaaaccgtggcact

SEQ ID NO: 14403 - DNA, 321 bp, Zea mays
cggacggtgggcttcagagtaaaagcggctaaggagctgtacttcaacaaggatgggtcagctatcaagaagctccagactggagtcaataagcttgcagacctagttggagttacactcggaccgaaggaaggaatgtcgttttggagagcaagtacggctctcccaagattgttaacgatggcgttacagttgcaagagaggttgagctggaggaccctgtggaaaacattggagctaaattggtcaggcaagctgcagctaagaccaacgatcttgctggagatgggacaaccacctctgtggtccttgctcaggggc

SEQ ID NO: 14404 - DNA, 322 bp, Zea mays
gaaatatgttgaggcttacaagaaaaccaataatttgcttgatactggaagatatcgcaatataatggacatgaatgctggtctcggcagctttgcgctgcactagagtccccaaagctatgggtcatgaatgttgttccaacaattgcaaatacttccactttaggtgtaatctatgagcgtggattaataggaatgtatcatgactggtatgtactattaacctatttgttatattgctctcctgtatttctcgaatttttcaatttacatattatgtttgatttactatgcaaaattccgaaatcatttttcagcatag

SEQ ID NO: 14405 - DNA, 322 bp, Zea mays
caagtatccatccttattgagtacagtgttgatccatggactcggaaggagttgtagcagcaaaggtggcagatgagactactaaaccggcaatccaagaagacggcgccgagagcaaggccgggatgactgatctgctgatgctgaccgacaagtcgcagctgcaggcgctggcgatgctgctgcggaacaacgaggagctcatgatgagccaggcgatcaagtcggagacggagcgcattgagtacctcaagacggtgagcgactgctacacgcggacgatgaagctcctcgacgattccatggcggccaggaccacgta

SEQ ID NO: 14406 - DNA, 322 bp, Zea mays
agagcctcaacagcgcggcgcggaccagcgcggaccgccaggcggcgtgccgctgcctcaagagcctcgccaacagcgtcaagagcgtcaacatgggcaccgtcgccaccatccccggcaagtgcggcgtctccgtcggattccccatcagcatgtccaccgactgcaacaagatcagctaagttatacgacgaccaagctaataagcctaccgaacgtacacgtacgtcccgcgcgctgcacgagtgatgaagccagggaagaaataaaataaagctagctgtattgccaggagcagcatgcagtatcgatctatatatat

SEQ ID NO: 14407 - DNA, 318 bp, Zea mays
gccttattgaacgacgaaactcgacagcctctatctaggaaagttccacttccttcctccaggataaatccatacaggatggtcattgtgctgcgattgattgttctaagcatcttcttgcactaccgtatcacaaatcctgtgcgcaatgcatacccattatggcttctatctgttatatgtgagatctggtttgctctttcgtggatattggatcaattccctaagtggtttccaatcaaccgggagacgtaccttgataggctggcattaaggtatgaccgggaaggtgagccatctcagttggctgctgttgac

SEQ ID NO: 14408 - DNA, 316 bp, Zea mays
gaacaagatcctgaaggtgatcaggaagaaccttgtgaagaagtgtgttgagctcttctttgagattgctgagaacaaggaggactacaacaagttttacgaggctttctccaagaacctcaagcttggcatccacgaggactcgcagaacaggaccaagatcgccgagcttctgagataccactccaccaagagtggtgatgagctgaccagcctcaaggactacgtgaccaggatgaaggagggacagaatgacatatactatatcactggtgagagcaagaaggcagtggagaactcccccttccttgagaag

SEQ ID NO: 14409 - DNA, 309 bp, Zea mays
cggaccgtggcggacgcgtgggcagacaaccatggggcaccagcaggcgcacacggcaaggacgacaccgaggagctgcttgcagcccaccggcagctgtggtgccatgccctgggctacgtcgagtccatggcgctcaagtgcgccctggacctgcgcatccccgacaccatcgaccgctgcggcgggagcgccaccctgggcgagctgctcgccgccagcgagatcccggcgtccaaccacgactacctccggcgggtcatgcggacgctgacagccatgcgcatcttcgcgggcagccacgacccc

SEQ ID NO: 14410 - DNA, 315 bp, Zea mays
ccacgcgtccggtgcgtcagatcaaccgactggtggcgatgctgcgggaggagatggccggcgaagggaatggggatgaagggtggaggcggacggcatcgaggtcagcgccctgcagttcggctacgacgggcagccgccgctcttcgcgcgcttcaacctctgcgtcgcacccggctcccgctgcctcctcgtcggcgccaacggatcaggcaagaccacactcttgaagattcttgcgggaaagcatatggttggaggaagagatgtggtccgtgtcctcaatggttccgcttttcatgatacacagctagt

SEQ ID NO: 14411 - DNA, 314 bp, Zea mays
cgcgacggaaaccccaaacccaacctcatctcttttctcggcctctaccgccccctcgatcggtcggccggtcagctatgacgccgggaagctcggccgccggatccggcgtcgtcgttcctcggaacttcaggctcctagaagagcttgaacgtggagagaagggcattggagatgggacagtgagctatggaatggatgacgcagatgacatctacatgcgatcatggactggcactattattggccctcataataccgtccatgagggtcgcatctaccagctgaagttgttctgcgacaaggactaccct

SEQ ID NO: 14412 - DNA, 313 bp, Zea mays
atccacccaccggggaccttgttgattccacgggagaccatgaggagctgcgtcattggcggctacgacgtgctgccaggcacaaggattttcgtgaacgtttgggcaatgggaagggatcctagcatctgggatcgcccggaggagttcagtcccgagaggttcgagggaagtcatgtcgactttagaggctccagttttgagctcctcccgttcggctcaggacgaaggtcatgccctgccatcgccatgggtgtcgccaatgtggagcttgtcttggccaacctgttacattgctttgattggcagctcc

SEQ ID NO: 14413 - DNA, 316 bp, Zea mays
atccacacgaccacaccgacccaccaccatctgcatcggcaatggacgccgcgccacccaccataaccaagtccccgccgtccctggttccaccagcggggcccactcccggtggttccctcccgctctcctccatcgacaagaccgccgccgtccgtgtctccgtcgacttcatccaggtcttccccgcccctacgtcggggaaggaggactggagcccctcatctgcgatcgcggccatgcgcgagggctttgccagggcgctcgtgccgtactaccctatcgccggccgcatcgccgagcccgtgcctggtga

SEQ ID NO: 14414 - DNA, 318 bp, Zea mays
tggactgcttgctccctgttgaccattgggtattctgaaccatcgagccatggctgccaagctgactcgcctccacagtcttcgcgaacgccttggtgccaccttctcctcccatcccaatgaactgatagcactcttttccaggtatgttcaccagggcaagggaatgcttcagcgccatcagctgcttgcggagtttgatgccctgtttgatagtgacaaggagaagtatgcaccctttgaagacattcttcgtgctgctcaggaagcaattgtgctccccccatgggttgcacttgctatcaggccaaggcctgg

SEQ ID NO: 14415 - DNA, 307 bp, Zea mays
gcacaccaaggagagtacgtggaggagcagccatggcttcatcggtggccgccgcggcgagcacattcctgggcacccgcctggcggacccggcgccacagaacgggcgcatcgtggcccggttcgggttcgggttgggcggcaaggcgaacatgctccgaagaaggtggcgaagacatcgacctcctctgaccggccgctgtggttccccggcgccgtggcgccgactacctggacggctcgctggtcggcgactacgggttcgacccgttcggtctcgggaagcccgtggagtacctgcagttcg

SEQ ID NO: 14416 - DNA, 305 bp, Zea mays
gtgaaaggggtggacctcttcatggaccagtttgatgataagatgacaacagatgatgtcttcctgtcgtttctcccgcttgctcacatccttgaccgcatgatcgaagagtatttctttcacaaaggggcctcaattggctactaccacggagatctgaatgccttgagggacgacattgtggagctgaagccgactctactggttggggtgccccgagtgtacgaaaggatttatgaaggtatcttgaaggccattgcggaactcagacctctaagaagggtcatctttaatgctttgtacaa

SEQ ID NO: 14417 - DNA, 303 bp, Zea mays
gtcctcgagtcgaagatcatcctggatcgggagacgcagaggtcccgcggcttcggcttcgtcaccttctccacggaggacgcgatgcgcacgtccgtcgagggcatgaacggcaaggagctcgacggccgcaacatcaccgttaacgaggcccagtcccgcggcggccgtggaggcggcggtggcggatacggtggcgggcgccgtgatggaggcggctacggcggtggcggtggaggctacggcggtggtcgtggaggctacggctgcggtgggggatacggtggtgcaaaccgcggcggc

SEQ ID NO: 14418 - DNA, 307 bp, Zea mays
gcttaagccttaggtgcttcatgggcgatgaagcagatggtgttccaggaatccagcacttagttcctggatttggcagaaagaccgcagtaaaactactgcaaaaacatggttcgttagaaaacttgctaaacacggctgcaatcagaactgtcggcagaggttatgcccaggatgctctcactaagcatgcagattacttacggaaaaattaccaagttcttagcctgaagagggatgtaaatgttcagtttgacgacagttggttatccccgaggaacacatgcagtgacgccaatgttctagc

SEQ ID NO: 14419 - DNA, 304 bp, Zea mays
ctcccgtgtcaggcggaagttcaagggatgcaccttgatgcccaacattggatacggctctgacaagaagacgaggcactaccttcccaacaagttcaagaagtttgtcgttcacaacgtctctgagctggagctgctgttgatgcacaacaggacatactgtgccgagattgcccacaacgtgtccacccggaagcgcaaggagatcgtcgaacgtgctgcgcaactggacatcgtggtcaccaacaagcttgccaggcttcgcagccaggaggacgagtgaaatggccattatttccggttg

SEQ ID NO: 14420 - DNA, 303 bp, Zea mays
tgcaaattgatgagtacaattggtgatatgattgatcatgtaaaggcaaaggagcacatggatgcctattttagtatgatgcagataatgtcaacaaatcagaagttgtcttctcgtgtaaggtttatgttgagagattcaatcgacctgaggagaaataaatggcagcaaaggcgtaaagtcgaaggtcccaagaagattgaggaggttcacagagatgcagcacaagaaagacatgcccagtcgagtaggttgggacgtggtccagctgttagttctgttccaagaagagcacatcctatg

SEQ ID NO: 14421 - DNA, 305 bp, Zea mays
ctcatcccccatcagtctcaggggcgccccagccaccccgcccttcactcacctaaccatggcggacgcggcggcgagcgtggtggagagcgcggcgggttccgccgtggcccgcgccaagaggaagagaagtgggttcccgtcaccaagctcggccgccttgtcaaggagaacaagatcaccaagatcgaggagatctacctgcactcgctccccgtcaaggagcaccagatcgtcgagaccctcgtcccggggctcaaggacgaggtcatgaagatcacgcccgtccagaagcagacccgtgc

SEQ ID NO: 14422 - DNA, 290 bp, Zea mays
ggtgggcgccgccgggcacgcacttccagcagttcgtcgtgccgcccatcatcggcttccgccgggactgcacctacggcaagctcgccgccatgcggtatcccaaggacgtgcggggcctcggcgcctgcgagtagtcgctggagcgcgggggtggtgcacgcgtgccaagccggcggggtcgtccgcttcctcgagggctagacgcaccacgaggtgggcgccatcgacgtcgaccggatcgacgtcgtctggtaggcggggttcaagcagggcctccgccccgggtg

SEQ ID NO: 14423 - DNA, 299 bp, Zea mays
ccttcttcgtaagccttcaaaccgacgaatttgagcaactgcacccagagcgcgatccattgccggggaagaagcaacttgttgcgagcctcctctatggcgagctccgaccatggttccaccaccgcccccaaggacgtgccgggcagctacggcctgccgctggtgggcgccgtgcgctaccgcctcgacttctactacttccaggggcaggacaagtacttcgagtcccgcgtggagcgctacggctccaccgtggtgcgcatgaacgtgccgccgggccccttcatggcgcgcga

SEQ ID NO: 14424 - DNA, 297 bp, Zea mays
cccacgcgtccgcttatcattgactccaccactggtggctttgaggctggtatctccaaggatggccagacacgtgatcatgctctccttgcgttcacacttggagtttagcagatgatatgctgctgccacaagatggatgcaaccactcccgaatactccaaggcacgttatgatgagattgtgaacgaagtctcatcttacctcaagaaagttgggtacaaccctgataagatagcatttgttcccatctctggttttgagggtgacaccatgattgagaggtccaccaacctt

SEQ ID NO: 14425 - DNA, 319 bp, Zea mays
cgtttgtcccaccctaccaagtatcaaaggagaagataaaaagcataggcatcgagttgattccactggagacgagcgtcaaggagaccatcgaaagcttgaaagagcaggggttcgctagtttttgactcgagcaagctgtgaaacataagtgttactgtactacgtgatgttgcattgtatacatgcatcggacttcgcagttcccaagctattttggtagctttggtctgtaagattacctaaaataaactgagccacgttgccacgctgtagcttttggacatgttatgctttgatcggattgagacacgtgata

SEQ ID NO: 14426 - DNA, 323 bp, Zea mays
cggaccgtgtgggcttcatcaatgccatgatatcaaacatctcattcacctacaggagcatttattccaagaaagccatgactgacatggatagcaccaacgcgtatgcttacatttcaataattgctctcattgtttgcattccgcctgcagtgatctttgaagggccccggctaatgcagcatggattcagtgatgccattgcaaaagtaggcttgacaaagtttgttagtgacctattcttggttggactgttctaccatctgtacaaccagattgctacgaacaccttggagcgagtggctcctctgacacatgctgtg

SEQ ID NO: 14427 - DNA, 325 bp, Zea mays
ggcgaaaggagatccaaagaagccagagacgctggagctggcgataaaggactacccgtacgcggtggacgggctcgacatgtgggcggcgatcaagaagtgggtggctgactactgcgccatctactacgccgacgacggcgcggtggcgagggacagcgagctgcaggggtggtggagcgaggtcaggaacgtggggcacggcgacctggcggacgcgccgtggtggccggcgatggactgcgtcgccgacctcgtggagacctgcgccaccgtcgtctggctgagctcggcgtaccacgcgtccatcagcttcgggcagtac

SEQ ID NO: 14428 - DNA, 324 bp, Zea mays
ctccccgcgtccgctagccctagccgccgtccgccgacttcatcgtcgccgtcgtctagacctcttcacgcactggaaaggttaaagtccgacatcaatggcgaacatcatcctgatctcatcatgtgccggaagcagcctggcatcgcgattggccgcctttgcgagaaatgtgatggcaagtgtgttgtctgcgactcgtacgtgcgcccatgtacgcttgtccgggtctgcgacgagtgcaattatggttcgttccagggaaggtgtgtgatctgtggaggagtcggcatctcagacgcttactactgcaaggagtgcacc

SEQ ID NO: 14429 - DNA, 323 bp, Zea mays
caggattagcagcttctccgtgctgctgcgtctcctcctcatcgtcctctccagtgtccagctcggccatggcgttcaccgtctccttctcccccgccaacgttcagatgctccaggctaggagtggccacggccacgccacctttggaagctgttccgccgtgccaagagccgggccaaggctgcgctccacggccgtccgggtcagcagcgagcaggaggcggcggcggccgtcagggcgccgtccgggaggaccatcgaggagtgcgaggccgacgccgtcgctgggaagttccctgctcccccgccgctggttaggccg

SEQ ID NO: 14430 - DNA, 323 bp, Zea mays
cccgtgtcgtgtagtgtgtagtcgcagcagctagcgcccggccggccagtcgagtgagtccatcctccatcgccatccaatggccgccaccgccctgagcatgagcatcctccgcgcgccgccgccctgcttctcgtccccactcaggctcagggtcgcggttgccaagccgctggcggcccccatgcggcgccagctgctgcgcgcgcaggccacctacaacgtgaagctgatcacgccggagggggaggtggagctgcaggtgcccgacgacgtctacatcctggacttcgccgaggaggaaggcatcgacctgcccttct

SEQ ID NO: 14431 - DNA, 323 bp, Zea mays
ctctgtggaagtttgagaccaccaagtactattgcaccgttattgatgcccctggacaccgtgactttatcaagaacatgatcactggtacctcccaggctgactgtgctgtccttatcattgactccaccactggtggttttgaggctggtatctccaaggatggccagacacgtgagcatgctctccttgcgttcacacttggagtgaagcagatgatttgctgctgcaacaagatggatgcaaccactcccaaatactccaaggcacgttatgatgagattgtgaaggaagtctcatcttacctcaagaaagttgggtac

SEQ ID NO: 14432 - DNA, 317 bp, Zea mays
cccacgcgtccgatctcgaccgtcgctcaccgggaagctacgctacgacgaagcatggcgtccgtcaccgcccgcgccccggtcgcggccctgcgcccgtcggcgtctctcaagtcgtcgtcgtcgtcggcggcggccttccttggccactctagccgcctcggccgcactgctaccgcgtcgccgacgaggcgcagcctaaaggcggaggccaagggcgagtggctcccgggccttccctcccccgcctacctcgacggcagcctgccgggtgacaatggcttcgacccgttgggcctggcggaggacccggagaa

SEQ ID NO: 14433 - DNA, 317 bp, Zea mays
cccacgcgtccgccatcatggagggcgacgccgaggacctcccgttccccaccgactccttcgaccgatacatctccgccggcagcatcgagtactggccagacccacagcgggggatcaaggaagcctacagggtcctgagatttggtgggctagcttgtgtgatcggcccggtctacccgaccttctggctgtcccgcttcttcgccgacatgtggatgctcttccccaaggaggaagagtacatcgagtggttcaagaaggctgggtttagggatgtcaagctgaagaggattggaccgaagtggtaccgcggt

SEQ ID NO: 14434 - DNA, 316 bp, Zea mays
tgttgatggggtcacaggcggattcaacattaagaacctctcctgcaaagaacaggtttggctgtttcttgctttccatagtgccaagcgatatctctgtaattggaacacctcctgcagtcacacctgttctttgcaggagaggttcttaatgttgatggggtcacaggcggattcaattttcagaatgcatggaccggtgggtatatagctgggacaagcataggcacattggcatcgactagcaatctcccagagcagcagtcatgtttccagctgtaactgggagtttcagagaaggaaatggattgagtta

SEQ ID NO: 14435 - DNA, 319 bp, Zea mays
ctcgtgacgatcggaggccatgtgctgcgcgaaggtgagtggctgtcgctgaatgggtcgactggtgaggtgatccttggaaagcagccgctttccccaccagcccttagtggcgatctgggaactttcatggcctgggtggatgatgttagaaagctcaaggtcctggctaacgccgatacccctgatgatgcattgactgcgcgaaacaatggggcacaaggaattggattatgccggacagagcacatgttctttgcttcagacgagaggattaaggctgtcaggcagatgattatggctcccacgcttgagctga

SEQ ID NO: 14436 - DNA, 318 bp, Zea mays
aagtacctccgcttcctccgcaagcggatgaacaccaagccgtcccacgggcccatccacttccgcgcccccgccaagatcctgtggcgcaccatccgcgggatgattccgcacaagaccaagaggggggaggcggctctggcgaggctcaagacgtacgagggcgtcccgccgccgtacgacaagaccaagcgtatggtcatccctgacgctcttaaggttctgaggctacagcctggacacaagtactgcctcctcggcgagctctctaaggaggtcgggtggaactaccatgacaccatcagggaacttgaggag

SEQ ID NO: 14437 - DNA, 318 bp, Zea mays
cccaatcagaccgaatgggcaccgcatcaccggactccggcgaccttatcgaggtggggccggcgaggccgggatctccggtagccgtggtgaccatcaaccggccttcggcgctcaacgcgctgacgaagcccatgatgatctccatggcggctgcgttccggcggctgggtgccgacgacgccgtggcagcggtggtgctcgcgggccgcggtcgcgcgttctgctccggggtggacctgacggcggcggcggaggtgttcaagggcgatgtgaaggacgtcgccacggaccccgtcgtgcagatggagctctgcc

SEQ ID NO: 14438 - DNA, 318 bp, Zea mays
cccacgcgtccgggaaggccagcgaaggtgtccgtgtccttatgctagtgtgggatgataggacttcggtcggcttgcttaagaaggatggcttgatggctacccatgatgaggagactgcaaattacttccatggcacggacgtcaactgtgtcctgtgccctcgcaaccctgatgattctggcagctttgtccaggacctgcagatatcaactatgttcacgcaccatcagaagatagtagtggtagaccatgagttgccaaacgagggctcccagcagaggaggatcgtcagcttcgttggcggaattgaccttt

SEQ ID NO: 14439 - DNA, 318 bp, Zea mays
gttcggcaacatggggaacacttctggcaccggcgtgctcttcaccaggaaccccaacaccggagagaagaagctgtatggcgagttcctggtgaacgctcagggtgaggatgtggttgccggaataagaaccccagaggaccttgacgccatgaagaacctcatgccacaggcctacgacgagcttgttgagaactgcaacatcctggagagccactacaaggaaatgcaggatatcgagttcactgtccaggaaaacaggctgtggatgttgcagtgcaggacagggaaacgtacgggcataagtgccgtgaagat

SEQ ID NO: 14440 - DNA, 317 bp, Zea mays
gtgctcgatctccatctcgaccgtcgctcaccgggaagctacgctacgacgaagcatggcgtccgtcaccgcccgcgccccggtcgcggccctgcgcccgtcggcgtctctcaagtcgtcgtcgtcgtcggcggcggccttccttggccactctagccgcctcggccgcactgctaccgcgtcgccgacgaggcgcagcctaaaggcggaggccaagggcgagtggctcccgggccttccctcccccgcctacctcgacggcagcctgccgggtgacaatggcttcgacccgttgggcctggcggaggacccggaga

SEQ ID NO: 14441 - DNA, 318 bp, Zea mays
caaccattatgggatgggaacagcggagtggagggcagcaaagagccctgcctactacaagcgtggcgactatgtgcctggattgaaggttgatggaatggatgttcttgctgtgaacaagcgtgcaaattgcaaaagatcatgctgtcgcaaatggcccaattgtccttgagatggatacctacagataccatggccactctatgtcagatccaggaagcacttaccgcaccagggatgagatttcaggtgtcaggcaggaacgggatccaattgaaagggttagaaagttgcttttgactcatgacctggcaaatg

SEQ ID NO: 14442 - DNA, 311 bp, Zea mays
gccatgctcggcgcgctcggctgcgtcttccccgagctgctctcccgcaacggcgtcaagttcggcgaggccgtctggttcaaggccggctcccagatcttcagcgagggcgggctggactaccttggcaaccccagcctgatccacgcgcagagcatcctcgccatctgggcctgccaggtcgtgctcatgggcgccgtcgagggctaccgtattgccggcgggccgctcggcgaggtcgtcgacccgctgtaccctggcggcagcttcgaccccctcggcctggccgacgaccccgaggccttcgccga

SEQ ID NO: 14443 - DNA, 310 bp, Zea mays
gccgggctcaaaatgcaccagggacagggaagcgacctccttcgcccgccgatcggtcgcagcgccgaggcccccgcacgccaaagccgctcgcgtcatccgctccgactccggcgcgggacggggccagcattgctcgccgctgagggccgtcgttgacgccgcgccgatacagacgaccaaaaagagggtgttccacttcggcaagggcaagagcgagggcaacaagaccatgaaggaactgctgggcggcaagggcgcgaacctggcggagatggcgagcatcgggctgtcggtgccgctggggttc

SEQ ID NO: 14444 - DNA, 307 bp, Zea mays
cccacgcgtccgcccacgcgtccgcgcgtgacgatgcgcaagacggcggcgaaggccaagccagcggcggcgtccgggagcccgtggtacggccccgaccgcgtgctgtacctgggcccactgtccggcgagccaccgagctacctgacgggcgagttcccgggcgactacggctgggacaccgcggggctgtcggcggacccggagacgttcgccaagaaccgggagctggaggtgatccactcccgctgggccatgctgggcgcgctcggctgcgtcttccccgagctgcttcgccgcaacggcg

SEQ ID NO: 14445 - DNA, 312 bp, Zea mays
aaacctttcatgcaaaatcccttcaagagagctaacacactcttaagctcagcttttctacaacaatgcatcagggcatcatatttagtatttgctggaattggctcttcatggtacaatttgaagagcaactgttgtgcttccatagcacgtgctgatttactaagcccattaataagcacactgtaagtcacaacatcaggaagaactcctgcctttaccattttatcgtgcagagaaagagccctctccacattaccctccttgcagtggccatcaataagagatgtgtatgtaaattcatcaggttgt

SEQ ID NO: 14446 - DNA, 312 bp, Zea mays
acgcacgcatacacagcacagagtgaggtaagcatccgaaaaaagctgtgatctgatcgacatggccgccgccaccatggctctcacctcccgcgcgctcgtcggcaagccggcgaccagcaccagggacgtcttcggcgaggggcgcatcaccatgcgcaagactgctggcaagcccaagccagcggcgtccggcagcccctggtacggggccgaccgcgtcctgtacctgggcccgctgtccggccagcccccaagctacctgaccggcgagttccccggcgactacggctgggacaccgcggggctgtc

SEQ ID NO: 14447 - DNA, 312 bp, Zea mays
gtttcatcagtgcgatggcatccaacaagtccattgcgctcctcgtccttgccttggcactcatgttaacggtttcagtgcatggacagttatcgtcgccgacgcctgcaccaactcctgctgctgcagccccaacgcctacaccgacaccatcaccatcccctgcaccagcaccagcaccgacgacaacacctgctccggcaccatcccaaaaccgatgtccccctggcttccctaacctaatctccttaattgaaggcattaagacgttccttcaacagggcattactcttgtccccgttccattacctg

SEQ ID NO: 14448 - DNA, 334 bp, Zea mays
cggacgcgtgggcagctcttctcctaatctcactctagccctagccaaatcccagacccatcccagccctagcgacaccaaccagctcgccagcgaccaactgggaaccggagaagctgatgaatcagatcttcgacctcaagttcacctccaagtcgctgcagcggcaggcgcgcaagtgcgagaaggaggagaaggagcagaagctcaaggtcaagaaggcgatcgagaagggcaacatggacggcgcccgcatctacgccgagaacgccatccgcaagcggaccgagcacatgaactacctccgcctcgcctctcgcctcgacgccgtcgt

SEQ ID NO: 14449 - DNA, 327 bp, Zea mays
cttgtttctccatcagagataccatcagaccagtatgcactggaatttggagcttggaaggtgaaagaggaatcaaaaataggacagtgcaaacgaccagaaaagcctatcgagatatatgaatttgaaggttgtccattttgtcggaaggtcagagagatggtaacagtcttggacctagatgtattattttacccctgtcctcaaaaaggcccaacattccgacctaaagtcctcgaaatgggtggaaagaaacaattcccttacatggtagatccaaacacaggggtcgccatgtatgaatccgatgacatcataaaatatcta

SEQ ID NO: 14450 - DNA, 324 bp, Zea mays
cacgcatactgcatacacaacacagatcatcagaaggagctgcgatctgatcgacatggctgccgccaccatggctatcacctcccgcgcgctcatcggcaagccggcggctggcacgagggacgtcttcggcgatggccgcatcaccatgcgcaagaccgccgccaagcctaatccggcggcgtccggcagctcctggtacggtgccgaccgcgtcctgtacctgggcccgctgtccggctctctcccgagctacctgaccggctagttctccggcgactacgggtgggacaccgctttgctgtcggcggacccggagacctt

SEQ ID NO: 14451 - DNA, 324 bp, Zea mays
ggctatcacctcccgcgcgctcatcggcaagccggcggctggcacgagggacgtcttcggcgagggccgcatcaccatgcgcaagaccgccgccaagcccaagccggcggcgtccggcagcccctggtacggtgccgaccgcgtcctgtacctgggcccgctgtccggctcgcccccgagctacctgaccggcgagttccccggcgactacgggtgggacacgcggggctgtcggcggacccggagaccttcgccaagaaccgcgagctggaggtgatccactgccgctgggccatgctcggcgcgctcgggtgcgtgttcccg

SEQ ID NO: 14452 - DNA, 332 bp, Zea mays
aaaagctttcagaagtaaacccgatgcttggcttccgtgggtgcaggcttggtatatcgtaccctgaattgacagagatgcaagcccgggccatttttgaagctgctatagcaatgaccaaccagggtgttcaagtgttcccagagataatggttcctcttgttggaacaccacaggaactggggcatcaagtgactcttatccgccaagttgctgagaaagtgttcgccaatgtgggcaagactatcgggtacaaagttggaacaatgattgagatccccagggcagctctggtggctgatgagatagcggacaggctgaattcttctcct

SEQ ID NO: 14453 - DNA, 316 bp, Zea mays
gcatacacaacacagagcatcagaaggagctgcgatctgatcgacatggctgccgccaccatggctatcacctcccgcgcgctcatcggcaagccggcggctggcacgagggacgtcttcggcgagggccgcatcaccatgcgcaagaccgccgccaagcccaagccggcggcgtccggcagcccctggtacggtgccgaccgcgtcctgtacctgggcccgctgtccggctcgcccccgagctacctgaccggcgagttccccggcgactacgggtgggacaccgcggggctgtcggcggacccggataccttcg

SEQ ID NO: 14454 - DNA, 327 bp, Zea mays
acttcgctcgcaaccttccccagccatggcgaccgcgacgcggaggctgctccccgcgctcctcaagaccctagctccagccggcgcgcgcggcctctccaccgagaaggctgttggtgcagccgccgtcgtcggcagccacaccgctaagtggatgcaggacacgagcaagaagtcgccaatggaactgatcaacgaggtacctccgatcaaggttgatggtcgcattgccgtctgtgaaggggcttctgaaggtgttggacttggccacccaattgagtacatctgccttgatctggaggcacctaatgtgtgcaagtactgtgg

SEQ ID NO: 14455 - DNA, 323 bp, Zea mays
tttgaagtggaaactgatgcatgtgctactggaattggggcagttttgatgcaacatcataagcctattgcatatctcagtaaatccttaagctccaagaatcagttgctttccatttatgagaaagagtttttggctctattgttggcagtcactaaatggaggcagtatttgcagcatactgaatttattattagaactgatcataaggctctgagttttttggaggatcaagtcctccattcggagtggcagaaaaaggcgatgaccaagcttatgggtttgcagtttcgagtggtgtatagagaagggaaggagaatgt

SEQ ID NO: 14456 - DNA, 315 bp, Zea mays
ggcagcgacacgatcgcgagcgcacgcacgtaagcacgttgtcggaagctcaagttagaagaagcaccagtgcctgatcgatggcggcccaggctctcctctccggccggcagctgctgggccgccccgtgcagtcggccgtctctaggtcgtcggcgaggaaggcgcccttcgtcgtcagggccagctccagccctccagccaagcaaggtgccgacaggcagctgtggttcgcgtccaagcagtccctctcctacctcgatggcacgctgcccggcgactatggcttcgacccgctgggcctctcggacccgg

SEQ ID NO: 14457 - DNA, 326 bp, Zea mays
attcgtttttacatttatattcaaggcttggctcaacaatcaaaagttcacatacagaggggggatgactgaggagaaaaagataatgaggaggaaagttcttgccaagtggctaaaggagagtcttttgagattaggccccacattcatcaaaatagggcaacaattctcaaccagggtggatattctcccacaggaatatgtggatcaactatcggagttacaggatcaagttcctccatttccttctgagacagctgtaaaaattgttgaagaagagctgggggcatctgtaaatgagatatttgatcgatttgattttgaac

SEQ ID NO: 14458 - DNA, 322 bp, Zea mays
ctcccagatcttcagcgagggtggactggactacctcgggaacccgagcctcatccacgcgcagagcatcctcgccatctgggcctgccaggtcgtgctcatgggcgccgtcgagggctaccgcatcgccggcggcccgctcggcgaggtcgtcgacccgctctatcccggcggcagcttcgacccgctcggcctcgccgacgaccccgaggccttcgctgagctcaaggtgaaggagctcaagaacggccgcctcgccatgttctccatgttcggattcttcgtccaggccatcgtcaccgggaagggcccgctcgagaac

SEQ ID NO: 14459 - DNA, 317 bp, Zea mays
aagtttttgcagccttctgttgcagggttccttctgcagaaggaactcgactaccttgtcggagctgtttcaagccctaaacgcccttttgctgccatcgtgggtggttcaaaggtgtcatccaagatcggggttattgagtccctgttggagaagtgtgatatccttctcattgggtggtggtatgatcttcacgttttacaaggcacaaggtctccctgttggtgcttcattggtcgaggaagacaaactcgagcttgcgacgtctctccttgcaaaggctaaggaaaagggcgtctcccttatgctgccaactg

SEQ ID NO: 14460 - DNA, 314 bp, Zea mays
gtggtggtgaatccttagtagttgatgcttggagtcttcgtccatcacgtgtttggaaagatgttcaatggatagagtggtcccgtgcaagagaaaggaaatccaagtctaataagggcgattcacctcttgagaaacgccaaaagacagacttgcttcaagcaggtggcaatctatctgttgttgacgaaacgggaggatcttcaaaggacaagaatacaaacaatgcaaaaaaatcggatgaactaaagacattgtctttgtctcagggggaaattgttttcaacattgggaagagtgtagttgagaacaaa

SEQ ID NO: 14461 - DNA, 313 bp, Zea mays
gtcttgccaaagccacatatgaaggatactgcatcgtggagagccatccaaaaggttcttgagaacggtgaaagcattgatttgaaacatttcagaccagtaaggcctttaggatctggtgatactggcagtgtccacttggtggagttgcttggcacaggtgaatactttgccatgaaagctatggataaaagtgtcatgcttaaccgaaacaaggtccatagagctaccgctgaacgacaaatccttgatatgttggaccacccattccttccgacattgtatgcatcatttcagacaaagacacatatat

SEQ ID NO: 14462 - DNA, 317 bp, Zea mays
caaacacttgcgccgccactgcctcacaggtaaggccgccatggtctccggttcgggcgtgtgcgcgaacatgcgtaggtggacgcgcgccaccacatgctgggccgtctctcctcgatcatagccaaggagctgctcaatgggcagaaggtggtcgtcgtccgctgcgaggagatctgcatgtcgggcgacctcgtccgtcagaagatgaagtacctccgcttcctccgcaagcggatgaacaccaagccgtcccacgggcccatccacttccgcgcccccgccaagatcctgtggcgcaccatccgcgggatgat

SEQ ID NO: 14463 - DNA, 109 bp, Zea mays
ccgaccgtgggcgcgacgcgtgggcggacgcgtgggctggtccgtggccatggcgtcgtccatgctctccgctaccaccgtgccactccagcagggggaacccctgtcc

SEQ ID NO: 14464 - DNA, 319 bp, Zea mays
acctcatcaagaagggcaagatgtcctgcctcttcatcaacgacctcgacgccggcgcgggtcgcatgggcggcaccacccagtacacggtgaacaaccagatggtcaacgccaccctgatgaacatcgccgacaaccccaccaacgtgcagctcccggggatgtacaacaaggaggacaacccccgcgtgcccatcatcgtcaccggcaacgacttctccacgctctacgcgccgctcatccgcgacggccgcatggagaagttctactgggcgcccacccgcgaggaccgcatcggcgtctgcaagggcatcttccg

SEQ ID NO: 14465 - DNA, 314 bp, Zea mays
cggacgcgtgggcggacgcgtgggcacgcatactgcatacacaacacagagcatcagaaggagctgcgatctgatcgacatggctgccgccaccatggctaccacctcccgcacgctcatcggcaagccggcggctggcacgagggacgtcttcggcgagggccgcatcaccatgcgcaagaacgcacgcaagcccaagccggcggcgtccggcagcccatggtacggtgccgaccgcgtcctgtacctgggcccgctgtccggactcgccccgagcctactgaacggcgagttccccggcgactacgggtggg

SEQ ID NO: 14466 - DNA, 323 bp, Zea mays
gcgaacaagatactctggccgtctctggtcgccctctacaacccactccaaccggcatgttctaccttgatctcgaccatgtttcttggaacatccaatttacgttggaagtgagattgggggactcttcatcatcgctggcgtttacatggtcacttgggctcgctacaaagacgctcagagcgctatggtagccggttatctgcgacctcttcttctgccgaccaccaaggcagaaggaagctccttcagggggatccattgatccttttacaccccaggcagagatgcagatggatttttgcctcaagtgtttctctagg

SEQ ID NO: 14467 - DNA, 308 bp, Zea mays
agcaccgattacatgacctacatgttcaagtatgacactgtgcacggacagtggaagcaccatgaggtcaaggtgaaggactccaagacccttctctttggtgagaaggaggttgctgtgtttggctgcaggaaccctgaggagatcccatggggttcggttggcgctgaatatgttgttgagtctactggtgttttcactgaccaggagaaggctgcagctcacttgaagggtggtgccaagaaggttgtcatttctgctcctagcaaggatgcccccatgttcgttgctggtgtcaacgagaagga

SEQ ID NO: 14468 - DNA, 300 bp, Zea mays
ccgctattctggtaaggccggagaccagccctgacgacgttggtggcacgcacgctgctgtggggattctcacagacaggggtggcacgacttcccacgctgctgtggtcgcacgtgggtgggggacacgctgcgtctcgggacgctcaggcactcgcgcaaacgacgcggagaagctcgtgacgaccggaggccacgtgctgcgcgaaggcgactggctgtcgctgaacgggtcgaccggcgacgtgaccctcggaaagcagccgctttccccaccagccctcactggcgctctgggaa

SEQ ID NO: 14469 - DNA, 205 bp, Zea mays
cccacgcctcccgcggcgcgccccgcctgagcccgtcgctggtgatcagcctgaccacgggcgtgtcgctcttcctgggccgcttcgtcttcttcaacttccagcgggagaccgtggcgaacagcgtgcccgaccagaacggcaagacgcacttcgacgccggccacgagcgcgccaaggagttctcgggcctgctcaagtccaa

SEQ ID NO: 14470 - DNA, 268 bp, Zea mays
ttttacagatgatggcagtaaggttactgccatattggaggacggtaggatatttgaaggtgaccttttggttggtgccgatggactatggtcaaacgtgaggaagacactattcgggcactcagatgccacctattcaggttacacctgctacactggaattgcagattttgtgccgcctgatatcgatacggttgggtaccgggtatttctgggccacaaacagtacttcgtctcttcggatgtcggtgccggtaaaatgcaatgg

SEQ ID NO: 14471 - DNA, 104 bp, Zea mays
gcgaatgttgctgtgtcaggcgcggccgggatgatatcaaatcacctgctgttcaaactcgcttctggtgaggttttcggacaagaccaaccaatagcacttaa

SEQ ID NO: 14472 - DNA, 303 bp, Zea mays
gccaggcgtaccgcacgctgctggtcacggcgccgggcctgggccagtacatctccggcgccatccttttcgcggagacgctgtaccagtccgccgtcgacggccgcaagatcgtggacatcctggtggagcagggcatcgtgccggggatcaaggtggacaagggccttgtcccgctcgccggctccaacaacgagtcgtggtgccagggcctggacggcctggcgtcccgcgaggccgcctactaccagcagggcgcgcggttcgccaagtggcgcaccgtcgtcagcatgcctaacggcc

SEQ ID NO: 14473 - DNA, 305 bp, Zea mays
gggaaggaaaaacacgtcaaaatctaagaagagctcggaaaagaagaagtcacatagacacgcagacagttctgtaccagtatttaatctcgaagatatagaggaagggattgaaggttctcagtttgatgatgagaaatcgctgattatgtctcaaatgagcttggagaagagatttggccagtccagtgtttttgtagcctctactctgatggaatatggtggtgttccacaatctgcaactccagagtctcttctgaaagacgctattcatgtcatcagctgtggctatgaggacaaaactg

SEQ ID NO: 14474 - DNA, 303 bp, Zea mays
cccggcagtgacaagagatgtatgcttgctggccagaatgatggctgcaaacttgtacatcgatcagattgaagagctgatgtttgagctctctatgtggcgctgcaacgatgagcttcgtgttcgtgccgaagagctccacagttcgtctggttccaaagttaccaagtattacatagaattctggaagcaaattcctccaaacgagccctaccgggtgatactaggccatgtaagggacaagctgtacaacacacgcgagcgtgctcgccatctgctggcttctggagtttctgaaatttc

SEQ ID NO: 14475 - DNA, 273 bp, Zea mays
agctcgatctactactactactagctggtacacatactagccagcctgccagccagcttgccatggcgcccaccgtgatgatggcctcgtcggcaaccgccgtcgccccgttccagggtctcaagtccgccgccagcctccccgtcgcccgccgcagcaccaggagcctcggcaacgtcagcaacggcggaaggatccggtgcatgcaggtgtggccggcctacggcaacaagaagttcgagacgctgtcgtacctgccgccgctgtcgacgg

SEQ ID NO: 14476 - DNA, 303 bp, Zea mays
gcagctgtccagatcgcgtgattccgcatcccgttcgcgagcgcgacacacgctgacagctcacggctgaccttcccgacggcctccagctccatcttgattcttgaggcgaaccacggtgcgtaagagtctgccatggccagcgagaataaggtctttgggttcgaggaagtcgccaagcacaacgtcaccaaggactgctggatcatcatcgccggcaaggtgtatgacgtcactccgtttatggatgagcatcctggtggagacgaggttttgctagctgtaactgggaaagatgctaca

SEQ ID NO: 14477 - DNA, 305 bp, Zea mays
ccagacataatccgccctcgtatcctcacgcccacaaaacacccgaagaaaagaagagactgaacgccgcgagttcacgtgacgatggagaacgccgcctccgccatcgctaagccgtcgctgtccaagaagccctcgccgtcgttccgcctccggaacggcagcctcaacgcactgcgcctgcgccgcgtgttcgacctcttcgaccgcaacggcgacggcgagatcaccctcgacgagatggcctcggcgctcgacgcgctcggcctcggcgccgaccgctccggcctcgaggccgcggttgg

SEQ ID NO: 14478 - DNA, 304 bp, Zea mays
ggactacattgatttgacaccagacattgacacacgcgtcgagctaatcaaaacactgagcagcgtctctgctggcaaaatttatgatgagatagagagagcaagactgatcaaaaggcttgcaaatatcaaagaggagcagggaaagattgacgaggctgctgatttgatgcaagaagttgctgtcgaaacatttggctccatggcaaagacggagaaaattgctttcattcttgagcaggtccggctatgcctagatcgtcaagattatgtccgagcacaaattttatcaaggaaaatcagt

SEQ ID NO: 14479 - DNA, 147 bp, Zea mays
gcccatgctcctcgtgcgcttcggctccaccctcaggtcgccgctcgccaaggtgctcccgtcctggtacttccaccagaacgcgtgcaaggtgttcgagcaggacatggggttcctgtcgtcgcagaacgaggtgctgctccggga

SEQ ID NO: 14480 - DNA, 306 bp, Zea mays
ggaatgcttggagagcatggctttcaatggcattgccacaaacctagttgtgtatctccgttcagttctccatgggggtattgcttccagtgcagcaactgtatctctttggtacgggacaagcttctttgtgccaattcttggagccgccatagcagatacttgcttgggaaattataagaccatcttgatctcccttattatgtacctatttggaatggtactaattacagttgcaacattcatgccttctacttcagtcttgtgcgacgtcagttcatgcttgtcatcaaatggaactcaaac

SEQ ID NO: 14481 - DNA, 311 bp, Zea mays
tgatcctctggtccgtcgccatggcgtcgtccatgctctccgctaccaccgtgccactccagcaggggggcggcctgtccgagttctccgggctcaggagctccgcctcgctgcccatgcgccggactgccacctccgacgacttcatgtccgccgtctccttcaggacccacgcggtcggcacgagccgcgggccgcggcgggcgccgacggaggcgaacgtgaaggtggccatcaatgggttcggccgcatcgggcgcaacttcctgcggtgctggcacgggcgcggcgacgcctcgccactcgacgtc

SEQ ID NO: 14482 - DNA, 224 bp, Zea mays
gggcgtcaatttcttcctcaaggacggcatgggcgttgctgcctcctcgctgcagatcctccaggcctccgccaatctgcccatggtcgccaagccgctcattggcgtcctctcggatgccgtccccatacgcggccatcgccgcctgccctacgtcgccatcggcgctctcttgcaggcaatttcatggctagcaattgcagtttggcaagatatctctcttc

SEQ ID NO: 14483 - DNA, 105 bp, Zea mays
gtcttcgcggacgaggccgtcgccgagttcttcgacaaccccaccgtcccgcgcgaatagaaggccgagctcatcgacgagatcgccaggtcgtccgacctgcag

SEQ ID NO: 14484 - DNA, 301 bp, Zea mays
ccggtccaacactttcacgctcaggcgctcagctctagcaatggctgcctccaccatggcgatctcctccacggcgatggccggtacccccatcaaggtgggctccttcggcgagggccgcatcaccatgcgcaagaccgtgggcaagcccaacgtggcggcgtccggcagcccctggtacggccccgaccgcgtcaagtacctcggccccttctccggcgagcccccgagctagctcaccggcgagttccccggcgactaacgctgggacaccgccgggctgtccgccgaccccgagacc

SEQ ID NO: 14485 - DNA, 294 bp, Zea mays
gcagaactttgtccaatcaacattcaatgcccttcctgtggatcaagtaagacgtgcaacaattgttgtctctggtgatggccgctatttctcaaaagatgctgttcagatcataacaaaaatggctgctgccaatggagtaagacgtgtttgggttggacaaaacagtctcatgtctactcctgctgtaactgctgtcatccgtgaaagagttggtgcagatggatcaaaggctactggtgccttcatcttgacagcgagccataacccaggtggtcctaaagaggacttcgg

SEQ ID NO: 14486 - DNA, 292 bp, Zea mays
cacagtaagaaaagatggcgctgccatccatgagtcttgtggcaaagggtgtgcttcccttctcagcacgtacctcgagtggtgtcacacaaaggccggtgtcagtgactgcttccttggagcacaaaaccagcgatgccagagttcgtgaccttttcaagaaggccaaggagaatgctccttgcatagtgtttgttgatgaaattgatgctgttggaaggcaaagaggtacaggtattggtggtggaaatgatgaaagggagcagactctcaatcaactactaactgagat

SEQ ID NO: 14487 - DNA, 304 bp, Zea mays
ggagaagctcgtgacgatcggaggccatgtgctgcgcgaaggtgagtggctgtcgctgaatgggtcgactggtgaggtgatccttggaaagcagccgctttccccaccagcccttagtggcgatctgggaactttcatggcctgggtggatgatgttagaaagctcaaggtcctggctaacgccgatacccctgatgatgcattgactgcgcgaaacaatggggcacaaggaattggattatgccggacagagcacatgttctttgcttcagacgagaggattaaggctgtcaggcagatgatt

SEQ ID NO: 14488 - DNA, 108 bp, Zea mays
ggaccgacgagcgacgaatcgcgcagaaagagaagaacgtcggaggtgggatggcacaagccatggcgtcggtgagcggcgtctcacagggcgtcgtggccagcaggc

SEQ ID NO: 14489 - DNA, 298 bp, Zea mays
gccatcgacacgatcgcgagcgcaagcacgtacgttgtcggaagctcaagttagaagaagcaccagtgcctgatcgaaggcggcccaggctctcctctccggccggcagctgcagggccgccccgtgcagtcggccgtctctaggtcgtcggcgaggaaggcgcccttcgtcgtcagggccagctccagccctccagccaagcaaggtgccgacaggcagctgtggttcgcgtccaagcagtccctctcctacctcgatggcacgctgcccggcgactatggcttcgacccgctgggc

SEQ ID NO: 14490 - DNA, 293 bp, Zea mays
aaccgcctttaagttcgccatcgacaaggacgtcaggaacttccaggtcctcaaagagatgtacaacgagtggccattcttcagggtcaccctggacctgctggagatggttttcgccaagggagaccccggcaatgccggctatgtatgacgagctgcttgtggcggaagaactcaagccctttgggaagcagctcagggacaaatacgtggagacacagcagcttctcctccagatcgctgggcacaaggatattcttgaaggcgatccattcctgaagcaggggctggtg

SEQ ID NO: 14491 - DNA, 296 bp, Zea mays
gctcggtgtccatctcgaccgtcgctcaccgggaagctacgctacgacgaagcatggcgtccgtcaccgcccgcaccccggtcgcggccctgcgcccgtcggcgtctctcaagtcgtcgtcgtcgtcggcggcggccttccttggccactctagccgcctcgtccgcactgctaccgcgtcgccgacgagcggcagctagaaggcggatgccaagggcgagtggctcccgggccttgcctcccccggctacctcgacggcagcatgccgggtgacaatggcttcgacccgttgggc

SEQ ID NO: 14492 - DNA, 294 bp, Zea mays
cttccccagaccgacgagatcgccgacgtcatcggcgcgttccacgtcctcgcggactcccgcccgacagcttcggcccctacatcatctccatggcgacggccccctcggacgtgctcgccgtggagctcctgcagcgcgagtgcggcgtgcgccagccgctgcccgtagtgccgctgttcgagaggctggccgacctgcagtcggcgcccgcatccgtggagcgcctcttctcggtggactggtacatggaccggatcaagggcaagcagcaggtcatggtcggctactccg

SEQ ID NO: 14493 - DNA, 292 bp, Zea mays
atcttttctcgtttagaacctctaaaatttcccccactcgccagtcgcagcagcacctgtagcagccatggacgccagcggaccggtagcaaggggaagaagggggcggccgggcgcaaggcaggcggccccaggaagaagtcggtgacgcggtccgtcaaggccgggctgcagttccccgtcggccggatcgggcgctacctcaagaagggccggtacgcgcacgcgtgtggcactggcgcccccgtctacctcgccgccgtcctggagtacctcgccgccgaggttctgg

SEQ ID NO: 14494 - DNA, 297 bp, Zea mays
tcaatccatgcaaaatggtgcttaacttatcacaaggaggactttgcatatgaacattgggatgacattcttgacatatgcaatcagtatgatgtggcattatcaattggtgatggtttgaagcatggatccatttaatgatgcaaatgatagtgcacagtttgcagaactgctgactcaaggtgaactaacacgtcgagcataggcgaaagatgtgcaggtaatgaatgaaggcccgggtcacatcccaatgcataaaattcctgaaaacatggagaaacagttggagtggtgtaa

SEQ ID NO: 14495 - DNA, 303 bp, Zea mays
gcttccagcattgcgagaggtcatcagaggatcgtctccagtcgaagcgaaaagcgaaaaggagaaggggcgggggattgcgcacctgtgctgatggcggcagcggcggtggccgcagcggggagcagcaatgtcgggttcatccgcgcgcgcagagcaagcgggagtatcgccgcgtggtgctcgccaacgcgctcgagatcctactaatcagcgaccccgacaccgacaaggcggcggcgtgcatggaggtcgaggtgggctcgttcagcgatccggagggacttgagggcctcgcgcact

SEQ ID NO: 14496 - DNA, 101 bp, Zea mays
cccacgcgtccggcaatccaagcggtgctctcactctatgctagtgggcgtactactggtaatgtactcgactctggtgatggtgtgagccacactgtgcc

SEQ ID NO: 14497 - DNA, 267 bp, Zea mays
gaagaagacaaacgccggcacgcgcacgcagacacgatggcgatctgcagcgcgcacactaccacctccctgcgctccccatgcacgaccgtctcgaacgcaggtctgaggcagaagcaagtcatcttcgtcaccagcaacaggaggagcggcggcggcaggaggcacggaggggcaaggagcatccaggtctcgtgctccgtcgacaagccggtggtgattggcctggcggcagactcagggtgcggcaagagcaccttcatgcgc

SEQ ID NO: 14498 - DNA, 290 bp, Zea mays
ctatagcaaccggtccagcactttcacgctcagctccagcaatggctgcctccaccatggcggtgtcctccacggcgatggccggcacccccatcaaggtgggctccttcggcgagggccgcatcaccatgcgcaagaccgtgggcaagcccaaggtggcggcgtccggcagcccctggtacggccccgaccgcgtcaagtacctcggccccttgtccggcgagcccccgagctacctcaccggcgagttccccggcgagtacggctgggacaccgccgggctgtccgcc

SEQ ID NO: 14499 - DNA, 286 bp, Zea mays
caagcaagcaagctcgatctactactactactagctggtacacatactagccagcctgccagccagcttgccatggcgcccaccgtgatgatggcctcgtcggcaaccgccgtcgccccgttccagggtctcaagtccgccgccagcctccccgtcgcccgccgcagcaccaggagcctcggcaacgtcagcaacggcggaaggatccggtgcatgcaggtgtggccggcctacggcaacaagaagttcgagacgctgtcgtacctgccgccgctgtcgacggacg

SEQ ID NO: 14500 - DNA, 289 bp, Zea mays
cgagcgctctccttgtgcttcctgctcatccaaatttggcttgcaatggcatatgaagccaataggaggcacaaggattgcattgcattgtacaaagagttggagagtagccaccccatgatcaacatcaggcgccaggcagctgagcttagatacattttagaggcacccaagttgaagatatcaaatgacgaggtcgtcacaataccacaaattgggagcagctgggattggtatgctggaacatggagtgacaaaatcaaggaacaagaggacaagaaaaggaaga

SEQ ID NO: 14501 - DNA, 293 bp, Zea mays
cggacgcgtgggcggacgcgatgggggatgagtacctcaacgcgccaggcgagacctactccgtcaccctcaccgtgccgggcacctacggcttctactgcgagcaccaccaaggagcttgggtggtcggccgggtcgcagtcaactagagctaggtatccgttccgtgcatctcggtctgtgtgtactccgcccgtcgatggatgatgcatccatctgtggttgttttcctcgcatgtgcaagagttggtgcggcgaattgggtagggaaaaaaggaaagggcggccgctct

SEQ ID NO: 14502 - DNA, 292 bp, Zea mays
cccacacgtccgcccacgcgtccggatgaaagtaaaatggtggatgctgatgggaaggttgagaatgaaaaagagaagcatgctgagcttcttgctcttcctcctcatggagctgaagtttaagttgggggcatatcttctgatgtatcttctgaagatctcaaacaactatttgaatctgttggagaagttgtggaagtgcgaatgcgaggaaagggggataacaggacttatgcttttattaatttcagaactaaagcgatggccttaaaggccatccaaaatttgagca

SEQ ID NO: 14503 - DNA, 108 bp, Zea mays
gcagatggcgtcgacgatcatggccgccacctcccgcatcgtcgcggccaagacgccgtttcttggccaggatcgcgccgccgccgccgccgccaatgccagccccct

SEQ ID NO: 14504 - DNA, 324 bp, Zea mays
cccacgcgtccgatctcgaccgtcgctcaccgggaagctacgctacgacgaagcatggcgtccgtcaccgcccgctccccggtcgcggccctgcgcccgtcggcgtctctcaagtcgtcgtcgtcgtcggcggcggccttccttggccactctagccgcctcggccgcactgctaccgcgtcgccgacgaggcgcagctagaaggcggaggccaagggcgagtggctcccgggccttccctcccccgcctacctcgacggcagcctgccgtgtgacgatggcttcgacccgttgggcctggcggaggacccggagaacctgagg

SEQ ID NO: 14505 - DNA, 322 bp, Zea mays
gacgaaaataacgagcttgttgcatctgaaactgatgcttatgcaattgctgattttatcaatcgaagtaaatccaaggtttacacaatcaatcttagcatggcatatggtcaggctgcgatgcttctttcccttggtgtcaagggcaaaagaggagtgctgccgaattcaatcactaaattgcacctgcctaaggtgcacaaatctggtggagctgccattgatatgtggattaaggcaaaagagttagataccaacacagattactacctcgaactcttgtctaaaggagttggtaaaccaacagaagagcttgctgaat

SEQ ID NO: 14506 - DNA, 323 bp, Zea mays
ggagcagaagctcaaggtcaagaaggcgatcgagaagggcaacatggacggcgcccgcatctacgccgagaacgccatccgcaagcgcaccgagcacatgaactacctccgcctcgcctctcgcctcgacgccgtcgtggcccgcctcgacacgcaggccaagatgcaggtcatcggcaagtccatgcagtccatcgtcaagtcgctcgactccgcgctcgccaccgggaacctccagaagatgtccgagaccatggacaatttcgagcgccagttcgtcaacatggaggtccaggccgagttcatggagggcgccatggccg

SEQ ID NO: 14507 - DNA, 321 bp, Zea mays
cacagctcccacgctcaccgacgccacagcttgtgcgcgcgcaatggcactcgtgtccgcctcctcgtcctccaccaccgccgtcgcggcgctccccaggaatgggcagcagcgggcgtcgtcgtcgttgttctcctcctcctcctcttcctccttcctcgtcggcaagacgctgctgaggcaggccgaggcagcccggccgtcgttcgccgtgcgcgccgcggcggattccgacaggccgatctggttccccggcagcatccctccgccgtggctcgacggcagccttcccggcgacttcggctttgaatcctggggcct

SEQ ID NO: 14508 - DNA, 322 bp, Zea mays
aggtggtccaggatagcacggcgcttgccagggcgcactgacaatgagatcaagaactactggaggacacacatgaggaagaaagcacaggagaggaagaggaacatgtctccatcatcatcctcatcttcactgagttaccagtcaggctacccagatactccatcaatcattggagttaagggacaggagcttcatggtggcagtggctgcatcacaagcatcctgaagggcacccatccggacatggatggctatcccatggaccagatatggatggaaattgaggcgccagaggtgccctcggaggtgggctttgttg

SEQ ID NO: 14509 - DNA, 150 bp, Zea mays
cttcaagtctcgctacgtagcagtgcaataaaaaaagcagccgcaatggcgagcagcaccatggccctctcctccacggccttcgccggcaaggccgtgaacgtgccgtcgtcgtccgccttcggcgaggcccgcgtgacgatgcgcaag

SEQ ID NO: 14510 - DNA, 322 bp, Zea mays
ttatcctttgagcagtttgggcgctgagcaagtccagtgagagagggagagcggcgagaggatggctgggatggcgtcgctgcagggcgccatggcgtcgctctccatctccgcgctaggtgcggcgacggcgagcagcagcagcttctggggcaaccggctcgccacctactccgcgccgcagcctggggtaaggtttatggtcaagatatgcccaattgaaatgagacttaagagatgggagcgaaagaagtgtaaaccaaacagtcttcctgtgctgcacaagatgcatgttaggatcggggacacggtacaggttatt

SEQ ID NO: 14511 - DNA, 320 bp, Zea mays
cggacgcgtgggcgtgacgcgtgggcgtgctcgatctccatctcgaccgtcgctcaccgggaagctacgctacgacgaagcatggcgtccgtcaccgcccgcgccccggtcgcagccctgcgcccgtcgtcgtcgtcggccttccttggccactctagccgcctcggccgcactgctaccgcgtcgccgacgaggcggagctcagaggcggaggccaagggcgagtggctcccgggccttccctcccccgcctacctcgacggcagcctgccgggtgacaatggcttcgacccgttgggcctggcggaggacccggagaa

SEQ ID NO: 14512 - DNA, 323 bp, Zea mays
cgacctgctgaagcaggtggactacctgctgcgcaacggctggataccctgcctcgagttcagcaaggtcggcttcgtgtaccgcgagaactccacctccccgtgctactacgacggccgctactggaccatgtggaagcatgcccatgttcggctgcaacgacgccacccaggtgtacaaggagctgcaggaggccatcaaatcctacccggacgccttccaccgcgtcatcggcttcgacaacatcaagcagacgcagtgcgtcagcttcatcgcctacaagcccccgggcagcgactagaccgcgcccgccggccgcccc

SEQ ID NO: 14513 - DNA, 321 bp, Zea mays
aataagttggttgaagatgttgttggaaccttggctttcatgccattgatatatccttatgaaccgtggagatttaagcatgaccgacatcatgccaagacaaacatgttgatagaagatactgcatggcaacctgtttggcaaaaggaaattgaatcatcaccttttctaaggaaggcaattatttttggctatggccctatcaggccatggatgtctattgctcactggttgatttggcactttgatctaaaaaaattcagaccaaatgaagttccaagggttaagataagcttagcatgtgtgtttgcattcatggcg

SEQ ID NO: 14514 - DNA, 324 bp, Zea mays
ggaaccacagccacgcgacgcaggacctgtacgactccatcgcggcggggagcttcccggagtggacgctgtacgtgcaggtgatggacccggacacggaggagcagtacgacttcgacccgctggacgacaccaagacgtggccggaggacctgctgccgctccgccccgtggggaggctggtgctggacaggaacgtggacaacttcttcaacgagaacgagcagctggcgttcgggccggggctggtggtgccagggatctactactcggacgacaagatgctgcagtgccgggtgttcgcctacgccgacacgcagcgct

SEQ ID NO: 14515 - DNA, 317 bp, Zea mays
ccccaacagcaatggacgccgcccagcgccgcgtcggtacccacctccagcgcccgccgccgcccgccgggggctacggcctcaccgtcaaccccaccgcggccgagtacgtccacgcgcagggctacagtgtcctcctccctgagaaattgcaaaccggcacgtggaacgtgtaccgatccgcgcgttcaccgttaaggctgataagtagataccctgataccccagacattggaacgctgcatgataatttcacgtatgcagttgagacatttacagactgtaagtacctgggaacaagaatcagagcagatgga

SEQ ID NO: 14516 - DNA, 314 bp, Zea mays
cccacgcgtccgaaaagggtctacctttgacttggttggatactcagattccgactatgctggatgtaaggtcgataggaagagtacatcagggacgtgccaattcttaggaaagtccctggtgtcgtggaactctaagaaacaaacctccgttgccctatccaccgctgaggccgagtatgttgccgcaggacagtgttgcgcgcaactactttggatgaggcaaaccctccgggactttggctacaatctgagcaaagtcccactcctatgtgataatgagagtgctatccgcatggcggaaaatcctgttg

SEQ ID NO: 14517 - DNA, 315 bp, Zea mays
ctcttggaggagttgacccatcagtttgcttgcctatcacaattgatgttggtacaaataacgagaaactgcttaatgatgagttctacattggactccggcaaaaacgtgcgactggcgaggagtatgatgagcttattgaagagttcatgtctgctgttaagcaattctatggtgagaaagtcctcattcagtttgaggactttgccaatcataatgcctttgatttgcttgaaaaatatagcaagagccatcttgttttcaatgatgatatccagggcacagcatcagtggtccttgcaggtttgttagcag

SEQ ID NO: 14518 - DNA, 316 bp, Zea mays
aaactatcatacagagtggttttcccactggagcttaaacttcttaatacagttgataattcggacttggaatactcccttttcgctgtggtagttcatgttggaagtgggccaaaccatggccactatatcagtttggttaagagccacaatcattggttattctttgatgacgagaacgttgagatgactgatgagtccatggtacaggcattctttggctcaccgcaggagttcagtggtaatactgataatggctacatactcttctatgaaagccttgctgaaagaagttgatgtccttctcataccatgt

SEQ ID NO: 14519 - DNA, 246 bp, Zea mays
gcaagggccccctcgagaacctcgccgaccacatcgccgaccccgtcaacaacaacgcctgggcttacgccaccaacttcgtccccggcaagtgagcgagggcatgatgcttgcatgcgtgtaccgtagacgctgcaggttgcaccagtatttgtgaagggagctgtgggagccagaagagattgtaccgctagtgtatttttgtatgcacgctgtggagtggagctgatcaatgaaatatgctgt

SEQ ID NO: 14520 - DNA, 315 bp, Zea mays
ccccggccggttcctccttgccgccgccgtcgctgtgccaagccttgcgaataaccgttgtccgggctgtggggggcagacatggcgctccggaggctgctgcaggggagtgtcctgccgcgggtaaccggcagggtttcggcaccggccgtggcgccgttttcaacggagtccggagagaccatccgtgccacgctctttccgggcgacggcatcgggccagagattgccgagtctgtcaagcaggtattcaatgttgcaggggtaccaattgaatgggaagaacactatgttggtacagaagttgatcccaga

SEQ ID NO: 14521 - DNA, 317 bp, Zea mays
cccacgcgtccgcccacgcgtccgcgccaaggccaccggggagaacgccgtgagggcgcccgcagaggcgaactgaaggtggcgatcaacggcttcggccgcatcggccggaacttcctccggtgctggcacggccgcgaggactcgccgatcgacgtcgtcgtcgtgaacgacagcggaggcgtcaggaacgcgtcccacctcctcaagtacgactcgatgctcggcaccttcaaggccgacgtcaagatcgtggacgacactagcatcagcgtcgacggcaagcccatcacggtcgtctccagcagggacccgct

SEQ ID NO: 14522 - DNA, 318 bp, Zea mays
cttgcggtgtcactggctggtatagcctgagtgtgagtgagtgatcgagctagctgagctccgatcctcgctagctagctaggataccgccataccacaagtcttcttcacaagtttaggagtgacagcaacaagagatctcgatggcctctgccaccgtgctcaagtcctccttccttcccaagaagtccgaatggggcgccaccaggcaggccgccgcgcccaggccgcccaccgtctccatggtcgtccgcgcctccgcctacgccgatgagctcgtgaagaccgcgaaaacgatcgcgtcgccggggcggggca

SEQ ID NO: 14523 - DNA, 306 bp, Zea mays
gtcctgcttgccggcggcggcgccatggcccaggaggtgctgctgggcgcaggcgacggcgggctcgtcttcgagcccagccagttcaccgtcaaggccggcgacaccatcaccttcaagaacaacgccggcttcccgcacaacgtcgtgttcgacgaagacgaggtgccgagcggagtcgacgcctccaagatctcgcaggaggagtacctcaacgcgccaggcgagacctactccgtcaccctcaccgtgccgggcacctacggcttctactgcgagccgcaccaaggagcaggaatggtcggc

SEQ ID NO: 14524 - DNA, 308 bp, Zea mays
cccacgcgtccgcgctgcaacagatccttgctcgagcagttggcgatgacgctatattgaatggaagccatgtagtcgattttacagatgatggcagtaaggttactgccatattggaggacggtaggatatttgaaggtgaccttttggttggtgccgatggaatatggtcaaaggtgaggaagacactattcgggcactcagatgccacctattcaggttacacctgctacactggaattgcagattttgtgccgcctgatatcgatacggttgggtaccgggtatttctgggccacaaacagtac

SEQ ID NO: 14525 - DNA, 308 bp, Zea mays
caatggtggccttgacactgaggaatcttacccttaccaaggtgtcaatggaatctgcaagtttaagaatgagaatgttggagtcaaggttttggactcggttaacatcaccctgggtgctgaggatgaactgaaggatgctgttggtctggttcgcccagttagtgttgccttcgaggtgatcactggtttcaggctgtacaagagcggagtttacactagcgaccattgtggaactacaccgatggatgtgaaccacgctgttctggctgttggctacggtgtcgaagatggtgtaccctactggc

SEQ ID NO: 14526 - DNA, 308 bp, Zea mays
cttactccagtcagttgccctgggaacaccatttgggggtcgcatgagaacccattgttggaggtcccatggcaccaggaggcctgcctctatgttggcagtgtcacttagccgccctgtcaagatgtcagcatttgtgggtctaagatcagtgcatagcttctcggtcacaccgacggtgtccaattccaggtcggcagttgcatcttacaggtcatcgcgacagacaagacgatctcgttttgtcactcgggcaatgtttgagaggttcacggagaaagctattaaggtcatcatgcttgcgcaag

SEQ ID NO: 14527 - DNA, 306 bp, Zea mays
ggacgaccacagggtctgtatgtcagcctgaaggacaaggggaaggtcctagaagttctaaggaactggccacataggaacattcaagttatctgtgttactgatggtgagcgaatcttgggacttggagatttgggttgtcagggaatgggaattcctgtaggcaaacttgctctatacactgctctaggaggagttgacccatcagtttgcttgcctatcacaattgatgttggtacaaataacgagaaactgcttaatgatgagttctacattggactccggcaaaacgtgcgactggcgagg

SEQ ID NO: 14528 - DNA, 308 bp, Zea mays
cagtgcctgatcgatggcggcccaggctctcctctccggccggcagctgctgggccgccccgtgcagtcggccgtctctaggtcgtcggcgaggaaggcgcccttcgtcgtcagggccagctccagccctccagccaagcaaggtgccgacaggcagctgtggttcgcgtccaagcagtccctctcctacctcgatggcacgctgcccggcgactatggcttcgacccgctgggcctctcggacccggaggcaccgggggcttcatcgagcccaagtggctggcctacggcgaggtgatcaacggccg

SEQ ID NO: 14529 - DNA, 311 bp, Zea mays
cttttgctcggaacgcacacaccgcccgtccccgatctccgatcccctcgtcgatccaaagatgcagatcttcgtcaagaccctcactggaaagactatcaccctcgaggtggagtcttctgacaccattgacaacgtcaaggccaagatccaggacaaggagggcatccccccggaccagcagcggctcatctttgctggcaagcagctcgaggacgggcgcacacttgccgactacaacatccagaaggagagcaccctccaccttgttctccgcctcaggggaggcatgcagatcttcgtcaaaaccc

SEQ ID NO: 14530 - DNA, 307 bp, Zea mays
cggacgcgtgggcgcgccaaggccaactccctggcgcactcggcaagtacacctccgacggcgaggccgccgaggccaaggagggaatgttcgtcaagaactacacctactaattaatcgcccggccatcacccgggataccgccgcccctccgagagatacgtgtgtactgatcatggttaagcacgtactccgatccattcccatcccatgaagccatgataatgatgatatgatccatggaccatgcatggtgctctggtcgatgccgtacgtgtgtccctgatacaatactattttagtactg

SEQ ID NO: 14531 - DNA, 112 bp, Zea mays
cggaacgctgggacgctgaaagcggataagggaccccaacttcaaggtgacgccccagccgcggctgtccaaggagttcgccgacgagaacaagcccgatggactggtcaag

SEQ ID NO: 14532 - DNA, 312 bp, Zea mays
ccctgttttgcggcgcgccacgaactcgcgacgctctcgagagatccatggatcggcgcaagggcggcaaccgcgacaccaacggcagcctggtcgaggccacggcgtcgcggctgagggtcgaatccgacgaggacgcggaagaggtggggatggaggtggaagagagcttcgacgcgggggtggaagacgagcaggcggcggcggaggtgattggaagcgaaaagaccagcgccgactactacttcgactcctactcccacttcggtattcatgaagaaatgctaaaagatgtcgttcggacaaaaacat

SEQ ID NO: 14533 - DNA, 313 bp, Zea mays
caaaaagcttgcccccgagtatgaaaaacttggcgccacttcaagaaggctaaatctgtactgatagcaaaggttgactgtgatgagcacaagagtgtatgcagcaagtatggagtttctgggtaccccacaattcaatggtttcccaaaggttccctggagccaaagaagtatgagggtcaacgttctgtggaagcccttgcagaatttgttaacagcgaacgaggtaccaatgtcaagatagctgccattccttcaagcgtcgtggttctgacttcagagacctttgactcaattgtccttgatgaaacca

SEQ ID NO: 14534 - DNA, 315 bp, Zea mays
cttcttcacaagtttaggagtgacagcaacaagagatcgatggcctctgccaccgtgctcaagtcctccttccttcccaagaagtccgaatggggcgccaccaggcaggccgccgcgcccaggccgcccaccggtctccatggtcgtccgcgcctccgcctacgccgatgagctcgtgaagaccgcgaaaacgatcgcgtcgccggggcggggcatcctggcgatggacgagtcgaacgcgacgtgcgggaagcggctggcgtccatcgggctggagaacacggaggccaaccggcaggcgtaccgcacgctgct

SEQ ID NO: 14535 - DNA, 312 bp, Zea mays
catacacagcacagagtgaggtaagcatccgaaaaaagctgtgatctgatcgacatggccgccgccaccatggctctcacctcccgcgcgctcgtcggcaagccggcgaccagcaccagggacgtcttcggcgaggcgcgcatcaccatgcgcaagactgctggcaagcccaagccagcggcgtccggcagcccctggtacggggccgaccgcgtcctgtacctgggcccgctgtccggccagcccccaagctacctgaccggcgagttccccggcgactacggctgggacaccgcggggctgtccgccgac

SEQ ID NO: 14536 - DNA, 312 bp, Zea mays
gagatccccagggcagctctggtggctgatgagatagcggacaggctgaattcttctccttcggaacgaacgacctgacgcagatgacctttgggtacagcagggatgatgtgggaaagttcattcccgtctatcttgctcagggcattctccaacatgaccccttcgaggtcctggaccagaggggagtgggcgagctggtgaagcttgctacagagaggggccgcaaagctaggcctaacttgaaggtgggcatttgtggagaacacggtggagagccttcctctgtggccttcttcgcgaaggctgggc

SEQ ID NO: 14537 - DNA, 115 bp, Zea mays
cggactcgtggcgccatcacatagaaccagtgcaagcagaagcagcgcaatggcgagcagcaccatggccctctcctccacagccttcgccggcaaggcagtgaacgtgccgtcg

SEQ ID NO: 14538 - DNA, 317 bp, Zea mays
gttggagtggtgtaatgaagcgcctttctatacattgggtcctttgacaactgatattgcacctggttatgatcacatcacttcagccattggtgctgccaacattggagctcttggcactgcacttctttgctatggaacaccaaaggagcaccttgggttgcccaatcgtgatgatgtcaagactggtgtaatatcctacaaaatttctgctcatgctgctgatttggcgaagggtcatccctatgcacaagcttgggatgatgcacttagcaaggcaaggtttgagtttagatggcttgaccaatttgctttat

SEQ ID NO: 14539 - DNA, 309 bp, Zea mays
cgtgagtatccaattggaagaggaaaagccttgcagtttatctatggtagcaagcaagtggtaacaaaaggcggcatccttgccacaactgcaacaacaaacttgtaccggacggcacgatacaaggaggggatgacggatatccagtctcaatgctgcagccctgatgaagttgtttttggctctgacttccaccagtccttgtattgtcacttgctctgtggtctaatatactctgatgaggtccatcaggtgttctcgacattcgctcacagcttagtccatgcatttcaaacatttgaggaggtt

SEQ ID NO: 14540 - DNA, 307 bp, Zea mays
ggcgcgttccacgtcctcgcggactcccgcccgacagcttcggcccctacatcatctccatggcgacggccccctcggacgtgctcgccgtagagctcctgcagcgcgagtgcggcgtgcgccagccgctgcccgtggtgccgctgttcgagaggctggccgacctgcagtcggcgcccgcgtccgtggagcgcctcttctcggtggactggtacatggaccggatcaagggcaagcagcaggtcatggtcggctactccgactccggcaaggacgccggccgcctgtccgcggcgtggcagctgta

SEQ ID NO: 14541 - DNA, 106 bp, Zea mays
cacactcctcgccatcacataaaaccagtgcaagcagaagcagcgcaatggcgagcagcaccatggccctctcctccacagccttcgccggcaaggcagtgaacgt

SEQ ID NO: 14542 - DNA, 309 bp, Zea mays
gccatcgacacgatcgcgagcgcaacacgtacgttgtcggaagctcaagttagaagaagcaccagtgcctgatcgatggcggcccaggctctcctctccggccggcagctgctgggccgccccgtgcagtcggccgtctctaggtcgtcggcgaggaaggcgcccttcgtcgtcagggccagctccagccctccagccaagcaaggtgccgacaggtagctgtggttcgcgtccaagcagtccctctcctacctcgatggcacgctgcccggcgactatggcttcgacccgctgggcctctcggacccg

SEQ ID NO: 14543 - DNA, 308 bp, Zea mays
agttaccttaatgatgctgaagcccaagacctacttgctaagctatctattgacccgttggcggtgccacactttacactgaaggatgggctactacgctacaaaacacgcatttggctgggggccgatgcacagcttcaccatcggattttgtcagccttgcactgttctgctatgggggggcattctggcgtgccagtcacttatagtcgggtgaaaggcatatttgcatggaagaatttgaagtcttctgtccaacagtttgttgagcagtgtcaagtgtgccttcaagctaaacctgatcgctc

SEQ ID NO: 14544 - DNA, 312 bp, Zea mays
aggtgccgccctccccgccccgcctgcgccgcttgctcatcgcttctctccccgcggcggcctcccagatccggttggatcgaggggcaaggtcaagagatggggcaggccttccgaaagctgtttgatgccttcttcggcaacaaggagatgcgggtggtgatgcttgggttggatgcagctgggaaaaccaccatactctataagcttcacattggtgaagttctctccactgtccctaccataggtttcaatgttgagaaggttcagtacaagaatgtagtgttcaccgtgtgggatgttggtggccag

SEQ ID NO: 14545 - DNA, 313 bp, Zea mays
ggactggaagacaaacattgaaaccttaagttcctttctggatcagtttgtgtgtgttaatctatctggagggtacagattccggccgtgttgcaatgcttggcgtggccgggatgctcatcccggaggtgctgaccaaagccgggctgatcaacgcgccgcagtggtacgacgccggcaagtcggagtacttcgcgtcgtcgtccacgctgttcgtggtcgagttcatcctgttccactacgtggagatccggcggtggcaggacatccaagaacccggcaacgtcaaccaggaccccatcttcaagagcta

SEQ ID NO: 14546 - DNA, 285 bp, Zea mays
cccacgcgtccgagctgaagcaccacccggggtccatcgaggccgcggctatcatggagcacatcctggagggcagctccttcatgaagcaggctaagaaggtgaacgagctggacccgctgctgaagcccaagcaggacagatacgcgctccgcacgtcgccgcagtggctgggcccccagatcgaggtcatccgcgccgccaccaagtccatcgagcgcgaggtcaactccgtcaacgacaacccggtcatcgacgtccaccgcggcaaggcgctggacggcg

SEQ ID NO: 14547 - DNA, 57 bp, Zea mays
gtctgcccttcgttgcagccgggcaattttccttacatatattgcctttaatcaagt

SEQ ID NO: 14548 - DNA, 306 bp, Zea mays
agaacaggttgagaaggccttcagggaaggtacggcacagcaaaatgcacatagtatttttgtgtcccttgctctaaaacttttggaacagcgagttcatgtcgcatgcaaagaaattattacgttggaaaaacagaacaaacttcttgaggaagaggagaaagaaaagcgtgaagaacaagagcgcaggttgaagaggagaacaagagagagagaaaagaagaacaggagaaaagaaaggctgaaagaaaaggagaataataaagggaaaaaactagttgagtcaaagtcacgaaatgatattcc

SEQ ID NO: 14549 - DNA, 305 bp, Zea mays
agttgatgaaactaagatgatggagaggctatggggtgagaacttctttgaccctgccacaaagaagtggaccaccaagaacacaggttctcctacctgcaagagaggatttgttcagttctgctatgagccaatcaagcaaatcatcaagacctgcatgaatgaccagaaggagaaattgtggcccatgctgcaaaagctcaatgttaccatgaaggctgatgagaaggagttgactggcaaagctttgatgaagcgtgttatgcaaacgtggcttccagctagcactgctctgcttgagatga

SEQ ID NO: 14550 - DNA, 305 bp, Zea mays
gatggagacaagcaaatgcttgctaaacagacgggtttaacacggaaccaggtatccaactggtttattaatgcaagggttcgtctttggaaaccaatggtggaagagatccacaaccttgagatgaggcaggtgcacaaacaccctgttctcgacaagggccagcacgtgctgcatcaccaaacccagcattcgttcgagagcagtggaaagccttctgacccttccgactctcagcttggccaaagcagcagcatcacgaggaaccacaacatccctgcgtcccagggatttgccgatgagct

SEQ ID NO: 14551 - DNA, 305 bp, Zea mays
cccacgcgtccggccaggagctcaggtccatctggatagacctcctcgccaagtgcgacgcgtcgctggggatgaagattgccacccggctcaacatgaagccaaacatgtgatgcatcatgcttgtgctgaataataatgaagacgcatgcatgtcgtcgccaggaacaaagatcgagaaataatacaagaccagcacgcatgcatgggcatactctatatatatatatgtatagcccgtgcccgtgcccgcctttgtaccaatacaagccaaaccaagtggatgtgtattattattattattg

SEQ ID NO: 14552 - DNA, 299 bp, Zea mays
cgcctccctaaggccgggacctgcgacgtggcgagcagcacgccgtgccgctccaaccgtctcgcttccctgcttagcttcccgccgcgccatggcgtcgacctaggaccccggctccaccgaggagcaccactccatcgacgcgcactccgtcagctggtcccaggcaaggtctccgatgacgacaagctcatcgagtacgatgcgctgctcgtcgaccgcttcctcaacatcctccaggacctccacggggcgagccttcgggaatttgtccaggagtgctacgaggtctcggccga

SEQ ID NO: 14553 - DNA, 308 bp, Zea mays
ggaggagctcagcgccacggccagccacgcccgcgacacctcaaggagaccaacgccaacgacccgctcgagaagtactgcaacgacaacccggactccgaggagtgccgcatctacgacaactagctagtcgtatagctatataggccatcgacatgaaggacgaaggttgtagcacactacgaaagaatgatactctcgatcggcgcgtcatacgtggaatgaacttgtttgtatcaagctatctatacctcaatgcttctctacctgccgccgccgcaccccgtatgatatgtgatacacagctg

SEQ ID NO: 14554 - DNA, 308 bp, Zea mays
gagggatatgaaataccagctgggaccgatatatttgtttcggtatacaacctccacagatccccgtatttctgggaccggccaaatgagtttgaacccgagaggttttccgttccgaagaaggacgagagcatagaaggctggtccggttttgaccctgaccggagtcctggcgcaatgtaccccaacgagatcatagcggacttcgctttcctccccttcggcggggggcctcgcaagtgcgtgggggaccagttcgcgctcctggagtcgacggtggctctggccctgctgctgcggaagttcga

SEQ ID NO: 14555 - DNA, 308 bp, Zea mays
tgaagtttatccagcctatcaaggacaaatacccaggtaccacttatgcagatttgttccagttagcaagtgctacggcgattgaggaagctggtggtccaaaaattccaatgaaatatggacgtgttgatgtcacagcagctgaacagtgtccgcccgaagggaggcttcccgatgctggcccacgtgatcctgctgaacaccttagggaggtattttatagaatgggccttgatgacaaggaaattgttgcactatctggagcacacacacttggaagagcaaggcctgaccggagtggctgggga

SEQ ID NO: 14556 - DNA, 307 bp, Zea mays
cagtgcgatggcatccaacaagtccattgcgctcctcgtccttgccttggcactcatgttaacggtttcagtgcatggacagttatcgtcgccgacgcctgcaccaactcctgctgctgcagccccaacgcctacaccgacaccatcaccatcccctgcaccagcaccagcaccgacgacaacacctgctccggcaccatcccaaaaccgatgtccccctggcttccctaacctaatctccttaattgaaggcattaagacgttccttcaacagggcattactcttgtccccgttccattacctgtg

SEQ ID NO: 14557 - DNA, 307 bp, Zea mays
aggagacgtacgctctctgctagcacccatcttgcagcaggcggagcgcccgacccaatccgtgcgtgtgttggtcgagatggctacaacagcttacgctcccatggcgagccgagtgatgaagagcagcccggtgcactcgaggccgaggggcctgtcaggcgctgcgctcacgcggccccggccccggttcagcgtcgtcaaggccgccatccagcccgagaaggcaacgtaccaggtggtgcagcccatcaacggcgacccgttcatcggcagcctggagacgcccgtcacctccaacccgctc

SEQ ID NO: 14558 - DNA, 309 bp, Zea mays
caagcaagcaagcagcgagtacatacatactaggcagccaggcagccatggcgcccaccgtgatgatggcctcgtcggccaccgccgtcgctccgttccaggggctcaagtccaccgccagcctccccgtcgcccgccgctcctccagaagcctcggcaacgtcagcaacggcggaaggatccggtgcatgcaggtgtggccggcctacggcaacaagaagttcgagacgctgtcgtacctgccgccgctgtcgacggacgacctgctgaagcaggtggactacctgctgcgcaacggctggataccct

SEQ ID NO: 14559 - DNA, 306 bp, Zea mays
ctctcggacccggagggcaccggtgggcttcatcgagcccaagtggctggcctacggcgaggtgatcaacggccgctacgccatgctgggcgcggtgggcgccatcgccccggagatcttcggcaagatgggcatcatcccgccggagaccgcgctgccgtggttcaagacgggcgtcatcccgcccgcgggcacctacaactactgggccgactcctacacgctcttcgtcttcaacatggcgctcatgggcttcgccgagcaccgccgcctccaggactggtacaacccgggctccatgggcaa

SEQ ID NO: 14560 - DNA, 306 bp, Zea mays
gctgagcgtgaaagtgctggctgcctccaccatggcgatctcctccacggcgatggccggcacccccatcaaggtgggctccttcggcgagggccgcatcaccatgcgcaagaccgtgggcaagcccaaggtggcggcgtccggcagcccctggtacggccccgaccgcgtcaagtacctcggccccttctccggcgagcccccgagctacctcaccggcgagttccccggcgactacggctgggacaccgccgggctgtccgccgacccctagaccttcgccaagaaccgcgagctggaggtgat

SEQ ID NO: 14561 - DNA, 306 bp, Zea mays
cgcatactgcatacacaacacagagcatcagaaggagctgcgatctgatcgacatggctgccgccaccatggctatcacctcccgcgcgctcatcggcaagccggcggctggcacgagggacgtcttcggcgagggccgcatcaccatgcgcaagaccgccgccaagcccaagccggcggcgtccggcagcccctggtacggtgccgaccgcgtcctgtacctgggcccgctgtccggctcgcccccgagctacctgaccggcgagttccccggcgactacgggtgggacaccgcggggctgtcgg

SEQ ID NO: 14562 - DNA, 305 bp, Zea mays
cccacgcgtccggccgtctccttcaggacccacgcggtcggcacgagcggcgggccgcggcgggcgccgacggaggcgaactgtaaggtggccatcaatgggttcggccgcatcgggcgcaacttcctgcggtgctggcacgggcgcggcgacgcctcgcccctcgacgtcatcgccatcaacgacaccggaggcgtcaagcaggcgtcccacctgctcaagtacgactccacgctcggcatcttcgatgccgacgtcaagcccgtcggcgacaacgccatctccgtcgacggcaaggtcatcaa

SEQ ID NO: 14563 - DNA, 304 bp, Zea mays
gaagtattgggctgtctcctacagcagtaacatttgcaaatagagctatggcatatcttaaactaagaagattcaaggaggcagaggacgattgcactgaagctctgaatctggatgatcgctatattaaagcatactcacgccgaattactgcacgaaaagaacttgggaagcttaaggaggcaatggatgatgctgaattttctatcagtcttgatccaaacaattcagagctaaggaagcagtattctgagataaaagctttgcacatggagaaaatggctaaaaaggttccagtgccagc

SEQ ID NO: 14564 - DNA, 292 bp, Zea mays
ctcaaggtcaaggagctcaagaacggccgcctcgccatgttctccatgttcggattcttcgtccaggccatcgtcaccgggaagggcccgctcgagaacctcgctgaccacattgccgaccccgtcaacaacaacgcttgggcctacgccaccaacttcgtccccggcaagtgagggaggcgccgccggtgacctttaggtgtccggatgcatgtgagcgcacgctggttttcggtttgtaccatgatgtaaactattgttcaatcgacaaggaataattgtgttcattgtc

SEQ ID NO: 14565 - DNA, 302 bp, Zea mays
cccacgcgtccgctttttgcagaggagcttggcctcattattgaagtacactcgaaatatctcaacattgtgaagcaaaagcttgaaatagcaggcatttctgctaatgttattggagaagttactagctcaccagaaatagaagtttttattgatggcaatctgcatctcaaggaaaaaacttcagatctcagggatctgtgggaggaaacaagcttccagcttgaggagttacaacgtctgaaatcttgtgtaaaacttgagaaagaaggattaaaatgcaggacaacaccatcatggtc

SEQ ID NO: 14566 - DNA, 302 bp, Zea mays
ggcaagttcttccgagtttctggttgatttgatctgccacgcgctgcaaaacaccgtctcagctcgtaataatttaatctatgcagaatccccagagggcaggagaaattcctctgcatcgttgatctcaagggctgggggtactcaaactgtgacgtccgggcatacattgccgctatagagatcttgcaggtatacgttcatgttcatccatcacttactactaggtcctcttgaattttttacaattccagaaacttatctatcaaagtgaaataatatgatactcctatcatctcatt

SEQ ID NO: 14567 - DNA, 304 bp, Zea mays
cccacgcgtccgcccacgcgtccgcccacgcgtccgcccacgcgtccgagcccggcaagtaccagatgaagaagctgtgcctggagccgacgtccttcaccgtcaaggcggagggcatcgccaagaacgcgccgcccgagttccagaagaccaagctcatgacccgcctcacctacacgctggacgagatcgagggcccgctcgaggtcgcctccgacggcaccctcaagttcgaggagaaggacggcatcgactacgccgccgtcaccgtgcagctcccgggcggcgagcgcgtgcccttcct

SEQ ID NO: 14568 - DNA, 300 bp, Zea mays
tcatcaaaaggttttaggttctctacgtattctcactggtggatcaaacaagcaatgcgtaaatctgtctcagagcaatcccaaatatttcgcttgcctgctcacatggttgaagcaagctaccgtgtaaaggagtgtacaaaacgacttcgccgtaagcttagaagacgacccaccaatgaagaaattgcagtggacactggtattccaattaaacgagttgaggcagcagtaaacctcccaaaatatagtgtgtcccttgatagcaaaattggttccaccgacatgacatatcaggag

SEQ ID NO: 14569 - DNA, 300 bp, Zea mays
ggtgttgcgttcaagaagacgttttcatatgcaggatttgagcaacaaccaaagaagttccttaatccaaagattcttttgttaaacattgaactagaattgaaatctgagaaggaaaatgcagagatcagattgtctgaccctctgcaataccaatcaattgttgatgctgagtggaacattatttatgacaaactggataaatgtgtgaaaagtggagcaaagatagttctgtctcggctagctattggtgatcttggaacacagtattttgcagatcgagacattttctgtgctggc

SEQ ID NO: 14570 - DNA, 301 bp, Zea mays
ttcagctacaaattgtctcgtgggctacgggctacattccatctagccagcccaatccacatcaccagcccacctcgtcgaactcgtcgtcttccgtccatccatcgtcgtcggcggcggcggagagagagcagatgacgtcctcggggacggtcgcgcagagctgccgcggacggaggcgcggtcgctgtcgggtcacgagggagcggtgttggccgtgcggttcaaccgggacggcaattactgcctgagttgcggcaaggaccgcactctccgcctctggaatcctcacacaggcgcc

SEQ ID NO: 14571 - DNA, 294 bp, Zea mays
gtcgcgtttgcagctaggcagatctgagttagccggcggatccgatccgtgcgcgtgcgcagtgtgtgtgtgtgtgtgtgtgtgtgtgtgtgtcggtggagagatggccacagcttacgctcccatggcgagccaggtgatgaagagcagcctcgtcgtgcactcgaggccgaggggcctgtcaggcgctgctgcgctcacgaggcggcccggccggttcaccgtcaaggccatccagcccgagaaggcaacgtaccaggtggtgcagcccatcaacggcgaccccttcatcgg

SEQ ID NO: 14572 - DNA, 296 bp, Zea mays
tgcacgtacgcacgcaccgggacaccagcaacccccaacagcgccactgtccagtgcgcgcgtcaagcttgcttagctagccgccatggcctccctcgccgccgtctccgtgaagcccgtggccatcaagggtctcgccggcagctccatctccggaaggaagctcgccgtcgccaggccgtcggcccgctccatccgcaggccccgcgcaccgccgtggtggccaagtacggcgacaagagcgtctactttgacctcgacgacatcggcaacaccaccggacagtgggacctcta

SEQ ID NO: 14573 - DNA, 295 bp, Zea mays
aaagaagcaaaagtatgagaaaattagcgagaagaaagttgcaacatcaattgaggctctatgccgtgggtatcctactgagtttgcatcatatttccattattgccgttcactgcgatttgatgacaagcctgactattcctatctcaagcgattattccgtgacctttttatccgcgaaggttttcagtttgattatgtctttgactggacaatattgaagtaccaacaagctcaaattgccactgctccaccccgtgcgggccatggcgctgggccttctgggttggcacct

SEQ ID NO: 14574 - DNA, 295 bp, Zea mays
cacatacatagtttcttctactacacgacgacaaacatggggaagcctgcgaagatcggagagtggggtggatacgccggcgatcgtcgggatctgagggctactccggaccggctgatcgaggtgaaggtcacggcggacaacagcagctgcatccgctccatctccttcatctacatcggagccgatggcaaaccgtacgaggaggggccatggggtttcggccatgctggcacggagtacaagattgatctgtgcaggttcgacgagagcttgacggagatctccgggacca

SEQ ID NO: 14575 - DNA, 295 bp, Zea mays
  unsure (1)..(295): unsure at all n locations
gctcgatctccatctcgaccgtcgctcaccgggaagctacgctacgacgaagcatggcgtccgtcaccgcccgcgccccggtcgcagccctgcgcccgtcgtcgtcgtcggccttccttggccactctagccgcctcggccgcactgctaccgcgtcgccgacgaggcggacctcnaaggcggaggccaagggcgagtggctcccgggccttccctcccccgcctacctcgacggcagcctgccgggtgacaatggcttcgacccgttgggcctggcggaggacccggagaacct

SEQ ID NO: 14576 - DNA, 294 bp, Zea mays
cacgacatcacccacctgacgtgcgccgacttcctgcgcgcgcccggggtgcagacgcccgtcatcgtccgcttctccacggtgatccacgagcgcgggagccccgagacgctgcgcgacccgcgcgggttcgccgtcaagttctacacccgggagggcaactgggacctggtgggcaacaacttccccgtcttcttcatccgcgacggcatcaagttcccggacatggtgcacgcgctcaagcccaacccgcggacgcacatccaggacaactggcgcatcctcgacttcttc

SEQ ID NO: 14577 - DNA, 295 bp, Zea mays
cccacgcgtccgcgctccgcgcgtccaccgaggaggcggtggaggcgcccaaggggttcgtggccccgcagctggaccccagcacgccgtccccgatcttcggcggacagacgggcgggctgctccgcaaggcgcaggtggaggagttctacgtcatcacgtggacgtcccccaaggagcaggtgttcgagatgcccaccggcggcgccgccatcatgcgggagggccccaacctcttgaagctggcgcgcaaggagcagtgcctggcgctcggcaccaggttgcgctccaagta

SEQ ID NO: 14578 - DNA, 294 bp, Zea mays
agaagacgagtgtcaagtgaacctgaaacttgcggtgtcactggctggtagcctgagtgtgagtgagtgatcgagctagctgagctccgatcctcgctagctaggataccgccataccacaagtcttcttcacaagtttaggagtgacagcaacaagagatcgatggcctctgccaccgtgctcaagtcctccttccttcccaagaagtccgaatggggcgccaccaggcaggccgccgcgcccaggccgcccaccgtctccatggtcgtccgcgcctccgcctacgccgatga

SEQ ID NO: 14579 - DNA, 329 bp, Zea mays
ggcagcgacacgatcgcgagcgcacgcacgtaagcacgttgtcggaagctcaagttagaagaagcaccagtgcctgatcgatggcggcccaggctctcctctccggccggcagctgctgggccgccccgtgcagtcggccgtctctaggtcgtcggcgaggaaggcgcccttcgtcgtcagggccagctccagccctccagccaagcaaggtgccgacaggatgctgtggttcgcgtccaagcagtccctctcctacctcgatggcacgctgcccggcgactatggcttcgacccgctgggcctctcggacccggaggcaccgggggct

SEQ ID NO: 14580 - DNA, 326 bp, Zea mays
cggaccgtgggtcgttccccgcctcaccccgagccagccgtctcgctagggtttcgccgccgccgccgccgccgccgccgctatgcctcgccgcacctcaggaaggtctgccccacgcccagctacccgtgctgctccagtgaggaacccgccacagccagcacgccaggctcctcctccagctcctgttcgagatggtggtggctccatgtttggaggaattgggtccaccattgctcaaggtatggcgtttggcacgggtagtgcatggcacacagggctgttgatgctgtattaggtccccggaccattcagcatgagactgt

SEQ ID NO: 14581 - DNA, 325 bp, Zea mays
cacgcacgcatacacagcacagagtgaggtaagcatccgaaaaaagctgtgatctgatcgacatggccgccgccaccatggctctcacctcccgcgcgctcgtcggcaagccggcgaccagcaccagggacgtcttcggcgaggggcgcatcaccatgcgcaagactgctggcaagcccaagccagcggcgtccggcagcccctggtacggggccgaccgcgtcctgtacctgggcccgctgtccggccagcccccaagctacctgaccggcgagttccccggcgactacggctgggacaccgcggggctgtccgccgacccgga

SEQ ID NO: 14582 - DNA, 324 bp, Zea mays
cggacggtgggttttttttttttttttttgaagaggaaacagatatgcacttctatattgattactgaatgaagaacttgtatgtttgtttcaattctagagttgactaataattgaaatccaatggaaacatttggccggtatattcggacgacctcgccgaaacgggtgaatttcaccgaaagtgagtcatttcggggtgaatcccaaagcccggtggagggtgaggagttacaaagtgctattacaatgcaacgcttcacttccactggttggcgcagatgtcagcgaggtcgacgaccctctgcgagtagccccactcgt

SEQ ID NO: 14583 - DNA, 340 bp, Zea mays
cgccatcgccccggagatcttcggcaagatgggcatcatccccccggagaccgcgctgccgtggttcaagacgggcgtcatcccgcccgcgggcacctacaactactgggccgactcctacacgctcttcgtcttcaacatggcgctcatgggcttcgccgagcaccgccgcctccaggactggtacaacccgggctccatgggcaagcagtacttcctcggcctcgagaagttcctcgccggctccggcgacccgtcctaccccggcgggcccctcttcaacccgctcggcttcggcaagaccgagaaggagatgaatgagctcaagctcaaggagatc

SEQ ID NO: 14584 - DNA, 326 bp, Zea mays
gctcgatctactactactactagctggtacacatactagccagcctgccagccagcttgccatggcgcccaccgtgatgatggcctcgtcggcaaccgccgtcgccccgttccagggtctcaagtccgccgccagcctccccgtcgcccgccgcagcaccaggagcctcggcaacgtcagcaacggcggaaggatccggtgcatgcaggtgtggccggcctacggcaacaagaagttcgagacgctgtcgtacctgccgccgctgtcgacggacgacctgctgaagcaggtggactacctgctgcgcaacggctggataccctgcc

SEQ ID NO: 14585 - DNA, 328 bp, Zea mays
  unsure (1)..(328): unsure at all n locations
atcgtactggaccaatctgccaccacactttgatcacacacaggaagttgagatcagaaaaatgcaggctgccgctactgccgccgggttctcggccgtgctgcccgccaagggcaggccggcggcgaggagcagggtggtggcccgtgtccccgccacaaggaggagcgtccgtgtagctgccgtcgtcgcgaccgaggccgcgcagatcgactacagctcaagcgtctcggtgttcccgatggaggcctgcgacctgcttggtggcgacgcgtgcaacgggcccatgttcccggnagccaagcccgcctcggcggcggcggcggcg

SEQ ID NO: 14586 - DNA, 328 bp, Zea mays
ctagttctaagatcgcgatctactcggacgcgtgggcggacgcgtgggcggaccgtgggcggaccgtgggccaccatcgaccttcaagtctcgctacgtagcagtgcaataaaaaaagcagccgcaatggcgagcagcaccatggccctctcctccacggccttcgccggcaaggccgtgaacgtgccgtcgtcgtccgccttcggcgaggcccgcgtgacgatgcgcaagacggcggcgaaggccaagccagcggcggcgtccgggagcccgtggtacggccccgaccgcgtgctgtacctgggcccactgtccggcgagccaccga

SEQ ID NO: 14587 - DNA, 125 bp, Zea mays
cccacgcgtccgagaagcttgagcacatgaaggaatccaaggggctgaagaacgacaccgacctcacggcctctgacctcaaagagctcgtgggtcagtacaaggaggtctacctctcagccaag

SEQ ID NO: 14588 - DNA, 324 bp, Zea mays
ggcttctacatagccaagggcttcatggacaagctcgtcgtccacctctccaagaacttcatgaccctgccaaacatcaaggttcccctcatcctgggtatctggggaggcaaaggccagggaaaatcgttccaatgcgagctggtcttcgccaagatgggcatcacccccatcatgatgagcgccggcgagctggagagcggcaacgccggagagcccgccaagctcatcaggcagcgctaccgtgaggcctccgacctcatcaagaagggcaagatgtcctgcctcttcatcaacgacctcgacgccggcgcgggtcgcatg

SEQ ID NO: 14589 - DNA, 319 bp, Zea mays
atccgatcccacccggcagccgcgcgcgcaatggccacccacgcagctctcgccgcctcccgccggcgtcgtccaggcacggcgtgcagaggctggacttcgccgacttctccgggctcaggccggggtcgtgctccgtgagcgctgccgcgccggaggcgtccttctccgacgtccttggcgcgcagtcagtcgccaaggccaccggggagaacgccgtgagggcgctcgcagaggcgaactgacaggtggcgatcaacggcttcggccgcatcggtcggaacttcctccggtgctggcacggccgcgaggactcgcc

SEQ ID NO: 14590 - DNA, 319 bp, Zea mays
gagctgaggagctgcgtaatcttttgacccagctcagaccattttttgcagttattcctaaggcaaagactgcaaaaattgtccgtggaataattgatgctgtcgccaagatacctggaacatcagatcttcagatttcactctgcaaggaaatggtagaatggacccgggcagagaagcgtactttcctccggcagcgtgtggaggcaatgttggcagctctcctgttagagaatcaggagtatactgaagcccttaccctgcttactagtcttatcaaggaagtcaggagacttgatgacaagttacttcttgtgga

SEQ ID NO: 14591 - DNA, 317 bp, Zea mays
gctactgatggtggcttttgtacaggaagtgtcagagttgttgatcatcagcgtctaagcagctctgggtatgttttctctgcatctctgccaccttatcttgccagtgctgctgtttctgctgttaactatctcgaggaaaatccctcagttcttgcaaacctaaggagcaatattgctcttttgcataaagaactatcagatactccagggcttgaaatttccagccatgttctgtcacctatcgtcttccttaagctgaagaagtcgactggttctcctaccactgatctagaccttcttgaaactattgctga

SEQ ID NO: 14592 - DNA, 320 bp, Zea mays
cccacgcgtccggcagcagctaacatccctcactctcggtacctgacctgaccacgagagcaacatgggcggaggacacgacatgcacgggcagcactacggccacaacggcggcgtgaagggcttcgtgtccaacctcgtccacggcggcggcggccatggccatggaagcggctacggccatggccatggaaacggctacggccatgggaatggcggctacggcggcggccacgggtaccctcctcccgccgccgccggcgtgtaccctcatccgcacggcgcgtaccctcacccgcacggcggccacgggtaccctc

SEQ ID NO: 14593 - DNA, 316 bp, Zea mays
agcaagcaagcagcgagtacatacatactaggcagccaggcagccatggcgcccaccgtgatgatggcctcgtcggccaccgccgtcgctccgttccaggggctcaagtccaccgccagcctccccatcgcccgccgctcctccagaagcctcggcaacgtcagcaacggcggaaggatccggtgcatgcaggtgtggccggcctacggcaacaagaagttcgagacgctgtcgtacctgccgccgctgtcgacggacgacctgctgaagcaggtggactacctgctgcgcaacggctggataccctgcctcgagt

SEQ ID NO: 14594 - DNA, 315 bp, Zea mays
agcacaaggagaggccgagaagcgctttagccgtagccgtagcgataagagtgagctagctggtgcacaccggcatggcggccacggcgtactccgtggcgctcctcggcggcgcgcgcctccccgccgctccgcgctccgccctcctccctcggcgcacgtctgccagcttcgcttccaagatgcaccgaggctctccctgctccgtgcgaaggccgcttccgaggacacatcggcctccggcgacgagttgatcgaggacctcatagcgaagtgggacgccgttgaggacaagcccaccgtcctcttgtacgg

SEQ ID NO: 14595 - DNA, 315 bp, Zea mays
cccacgcgtccgcccacgcgtccgcccacgcgtccgcaaacgatgggcttgaagaaaagcggtggaagatgattggacagtatatttcatcaaatggtggagttgttacagctgaagaactggcaccatttcttgatgtgccacctccatcagaagagtccaaggacgatgaatcatttgttcttccagttcttttacgctttcagggacatccagaaattgatgagcagggaaatatcctgtatcgattcccatcgctgcaacgtactgcttcatcaaaaagtggtaggagcagggaatatgtgggtaccaaat

SEQ ID NO: 14596 - DNA, 313 bp, Zea mays
ctcttggaggagttgacccatcagtttgcttgcctatcacaattgatgttggtacaaataacgagaaactgcttaatgatgagttctacattggactccggcaaaaacgtgcgactggcgaggagtatgatgagcttattgaagagttcatgtctgctgttaagcaattctatggtgagaaagtcctcattcagtttgaggactttgccaatcataatgcctttgatttgcttgaaaaatatagcaagagccatcttgttttcaatgatgatatccagggcacagcatcagtggtccttgcaggtttgttagc

SEQ ID NO: 14597 - DNA, 314 bp, Zea mays
tcgtactggaccaatctgccaccacactttgatcacacacagacacaggaagttgagatcagaaaaatgcaggctgccgctactgccgccgggttctcggccgtgctgcccgccaagggcaggccggcggcgaggagcagggtggtggcccgtgtccccgccacaaggaggagcgtccgcgcactgtccgtcgtcgcgaccgaggccgcgcagatcgactacagctcaagcgtctcggtgttcccgatggaggcctgcgacctgcttggtggcgacgcgtgcaacgggcccatgttcccggaagccaagcccgc

SEQ ID NO: 14598 - DNA, 315 bp, Zea mays
ctcgtgtccgcctcctcgtcctccaccaccgccgtcgcggcgctccccaggaatgggcagcagcgggcgtcgtcgtcgttgttctcctcctcctcctcttcctccttcctcgtcggcaagacgctgctgaggcaggccgaggcagcccggccgtcgttcgccgtgcgcgccgcggcggattccgacaggccgatctggttccccggcagcacccctccgccgtggctcgacggcagccttcccggcgacttcggctttgatccctggggcctcggatctgacccggagagcctgcggtggaacgtgcaggcggac

SEQ ID NO: 14599 - DNA, 322 bp, Zea mays
aacaagttgtgaggagtggacagaacagtggaggcttgggaaagaacatcgataggatgttcaaggatgcaatcactgctggaaagcgtgtccgcagcgagaccaacatatcatctggtgctgtttctgtcagttcagcggcggttgaactggccctgatgaagcttccgaagtctgaagcactgtcagctaggatgcttctgattggtgctggtaaaatgggaaagctagtgatcaaacatctggttgccaaaggatgcaagaaggttgttgtggtgaaccgctccgtggaaagggtggatgctattcgtgaggagatgaa

SEQ ID NO: 14600 - DNA, 320 bp, Zea mays
ggagggtgaggcttaaggtcctcggcctgcaggtgagcccgttcgtgctccgcgtgtgcttggcgctgaacatgaaaggagtgagatacgagtacgtcgaggaggacgtatccaacaagagtgagctcctgctcaagtccaacccggtgcacaagaaggtgcccgtgctcatccacaacggtaagcccatctgcgagtcacccgtcatcatgcagtacgtcgacgagctgttcgccggccggccgatcctcccaaccgacccctacgagcgcgccactgctcgcttctgggctgcctacgccgacgacaagctgttccca

SEQ ID NO: 14601 - DNA, 317 bp, Zea mays
cggacggtggggcttcggggtcttctgcaccacctacgacctcaaggcggaggacaagaccaagtcgtggaagaagctagtgaatgttgctgtgtcaggcgcacccgggatgatatcaaatcacctgctgttcaaactcgcttctggtgaggttttcggacaagaccaaccaatagcacttaagctactcggctcagaaagatcgtttcaggccctcgaaggtgtagctatggaactggaggactcgctgtatccactgctgagggaagtcagcattggcatagatccttacgtagtctttcaagatgtagattggg

SEQ ID NO: 14602 - DNA, 321 bp, Zea mays
ctcagaggtgggttggcttctcctcccccaccggttcgtgttcaggttctggttcgtgggcgagagggaagagatggcggcgtcggacgttgagtaccgttgcttcgttggcggcctcgcctgggccaccgacgaccactccctcaacaacgccttcagcacctacggcgaggtcctcgagtcgaagatcatcctggatcgggagacgcagaggtcccgcggcttcggcttcgtcaccttctccacggaggacgcgatgcgcacgccgatcgagggcatgaacggcaaggagctcgacggccgcaacatcaccgttaacga

SEQ ID NO: 14603 - DNA, 310 bp, Zea mays
cgagtgcacaccacctttccccactccgatcgaatcgatggccgccgagggcgagaagaagatgataaccctcaaaagctccgatggcgaggagttcgaggtggaagaggcggtggcgatggagtcgcagaccatccgccacatgatcgaggatgactgcgccgacaacggtatccctcttcctaacgtcaactccaagatcctatccaaggtaatcgagtactgcaacaagcacgtacatgccgccgccgccgccgccgccgcctcgaaggccggttccgacgacgtgggtgccgcctccgccaacagc

SEQ ID NO: 14604 - DNA, 316 bp, Zea mays
atcagttcaaggagctcgcacaagcctatgaggttttgagtgatccagagaaacgtgagatttatgatcagtatggtgaagatgcccttaaggaaggaatgggtggtggtgggtcccatgctgatccatttgacattttctcatcattctttggaccctcttttggaggaggtggtggaagcagcaggggaagaaggcaaaggaggggagaagatgtagtccactcacttaaagtttctctggaagatctttacaatggaatctcaaagaagctctctctttcgcgcaatgtcatctgctccaagtgcaagggcaa

SEQ ID NO: 14605 - DNA, 315 bp, Zea mays
cccacgcgtccgcaaaggtgtcatccaagatcggggttattgagtccctgttggagaagtgtgatatccttctcttgggtggtggtatgatcttcacgttttacaaggcacaaggtctccctgttggtgcttcattggtcgaggaagactaactcgagcttgcgacgtctctccttgcaaaggctaaggaaaagggcgtctcccttatgctgccaactgatgttgtcattgctgacaagtttgcccctgatgctaacagccagattgttccagcatctgcaattcctgattgttggatagggctggatattggcc

SEQ ID NO: 14606 - DNA, 315 bp, Zea mays
gacgctagctcaccaccaacctcagcacatcgaggagaagaggagtggccatggcttcgtcggtggccaccgcggcgagcacattcctgggcacccgcctggcggacccggcgccgcagaacgggcgcatcgtggcccggttcgggttcggcggcggaaagcccaaggctgccgtcccgaagaaggtggcgaagacgtcgatctcctctgaccggccgctgtggttccccggcgccgtggccccgactacctcgacggctcgctggtcggcgactacgggttcgacccgttcgggctcgggaagcccgtggagta

SEQ ID NO: 14607 - DNA, 308 bp, Zea mays
accacggctggtgcttcgacggcgccggcgcctgcaagttcatcccccaggcacccgccctcggcccgccggtgcacacgagcagcagggcgtgcgtggcgtcgtacccctgcgtggtgcagaacaacatcctgtggttctacccgagggctgaccccgagcatagcgacgtgctgcagaggaagcgcccgccgctcatccctgagattgacgacccggacttcgtcaccgtctatggcatcagagacctcccttacgggtatgatattttggttgagaacctcatggaccctgctcatgtcccgtat

SEQ ID NO: 14608 - DNA, 312 bp, Zea mays
gaagaagacgagtgtcaagtgaacctgaaacttgcggtgtcactggctggtagcctgagtgtgagtgagtgatcgagctagctgagctccgatcctcgctagctaggataccgccataccacaagtcttcttcacaagtttaggagtgacagcaacaagagatcgatggcctctgccaccgtgctcaagtcctccttccttcccaagaagtccgaatggggcgccaccaggcaggccgccgcgcccaggccgcccaccgtctccatggtcgtccgcgcctccgcctacgccgatgagctcgtgaagaccgcg

SEQ ID NO: 14609 - DNA, 311 bp, Zea mays
gcacaccaaggagagtacgtggaggagcagccatggcttcatcggtggccgccgcggcgagcacattcctgggcacccgcctggcggacccggcgccacagaacgggcgcatcgtggcccggttcgggttcgggttgggcggcaaggcgaactgctccgaagaaggtggcgaagacatcgacctcctctgaccggccgctgtggttccccggcgccgtggcgccgactacctggacggctcgctggtcggcgactacgggttcgacccgttcggtctcgggaagcccgtggagtacctgcagttcgagttg

SEQ ID NO: 14610 - DNA, 314 bp, Zea mays
cactgggcctcgccgacgaccccgtcaccttcgccgagctcaaggtcaaggagatcaagaacggccgcctcgccatgttctccatgttcggcttcttcgtccaggccatcgtcaccggcaaggggcccctcgagaacctgctcgaccacctcgacgaccccgtcgccaacaacgcctgggtctacgccaccaagttcgcaccagggtcttaagctagctaccgggccgcggcgtgccaggacattgtgttgtacactactcgtttctgtcgtgatctgtaccatgaacgaatgcaaatattcttgtgctctccc

SEQ ID NO: 14611 - DNA, 116 bp, Zea mays
ggcttctcctccccctccggttcgggttcgggttcgtgaggttctccggggttcggtttcgtgggtgggcggatcgagatggcggcgtcggatgttgagtaccgctgcttcgtcgg

SEQ ID NO: 14612 - DNA, 312 bp, Zea mays
gaagctggtggccgccgccaaggtccggcgcgcgcaggaggccgtcgtctcctctcgccctttctcggaggcgctggtggaggtgctctacaacatgaaccaggagatccagacggaggacatcgacctgcccctcaaccgcacccgcccgtcaagaaggtggccctcgtggtcctgaccggcgagcgcggcctctgcgggagcttcaacaacaacgtgctcaagaaggcggaaacccgcatcgatgagctcaagcagctgggcctccagtacaccgtcgtcagcgtggggaagaagggcaacgcctacttc

SEQ ID NO: 14613 - DNA, 310 bp, Zea mays
cccacgcgtccgacctgcaccaagaccaacatggtcatggtctttggtgagatcaccaccaaggccaatgttgactacgagaagattgtcagggagacctgccgcaacattggttttgtgtcaaacgatgttgggcttgacgccgaccactgcaaggtgctcgtgaacattgagcagcagtcccctgatattgctcagggtgtgcatggccacttcaccaagcgccccgaggagattggagctggtgaccagggacacatgttcgggtatgcgaccgatgagacccctgagttgatgcccctcagccatg

SEQ ID NO: 14614 - DNA, 301 bp, Zea mays
cggacggtgggcggactcgtgggtggacgcgtgggatcgacctttaagtctctctacgtagcagtgcaataaaaaaagcagtcgtaatggcgagctacaccatggccctctccttcatggccttctccggcacggccgtgaacgtgctgtcgtcgtccgccttcggcgatgcccgcgtgacgatgcgcaagacggcggtgataggctaagccggctgcggtgatcgtgagcccgttgtacggctccgaccgcgtgctgtacctgtggccactgtccgtctgatcgccgagctacctgacgg

SEQ ID NO: 14615 - DNA, 309 bp, Zea mays
agcgccactgtccagtgcgcgcgtcaagcttgcttagctagccgccatggcctccctcgccgccgtctccgtgaagcccgtggccatcaagggtctcgccggcagctccatctccggaaggaagctcgccgtcgccaggccgtcggcccgctccatccgcaggccccgcgcaccgccgtggtggccaagtacggcgacaagagcgtctactttgacctcgacgacatcggcaacaccaccggacagtgggacctctacggctctgacgcgccctcgccctacaatccgctacagagcaagttcttcgag

SEQ ID NO: 14616 - DNA, 310 bp, Zea mays
  unsure (1)..(310): unsure at all n locations
gctagccttcctgtagcgcggcagagatggctgcccctgcctccaccacggcggcggcggcggcagcgctgctgctgctgctcctcctgtcgctcgccgcggcggcggacatgtcgatcgtgtcctacggggagcgcacgcncgaggaggcgcggcggatgtacgcggagtggatggcggcgcacggccggacctacaacgccgtcggcgaggaggagcggcggtaccaggtgttccgggacaacctccgctacatcgacgcgcacaacgccgccgccgacgcgggcgtccactccttccgcctcggcct

SEQ ID NO: 14617 - DNA, 308 bp, Zea mays
gccagtcattgctactcttttgcgtgaagttttgcaagctcttgtctacctacattctcaaggacatattcacagagatgtcaaggctggaaacatcttaatagatacaaatggggctgttaagctaggagactttggtgtgtcagcctgtatgttcgatactggaaataggcaaagagcaagaaatacatttgtagggacgccttgctggatggctcctgaagtcatgcaacaactgcatggttatgattacaaagctgacatttggtcctttggaataacggcattagaactagcacatggtcatg

SEQ ID NO: 14618 - DNA, 307 bp, Zea mays
gtgatgattctgcacagcttcttgctgcagcaaacgccgcaaacagtgctcaaggaattgtcgcaactctcttggaggaatatgagggcatttttcatgatgaacacctcagatgttccttgtcacctgaatctcaaattgaagatagtggtactgaagcatcaactgatgatggtaatttggaagccaagggcaatggatttcatgatgcagaaaatgatgtagatcaagaaatggatgatgacaatggcgtggagcgtatacttagtgggaaattgagtgagagcagtggatatgctggcagtga

SEQ ID NO: 14619 - DNA, 308 bp, Zea mays
ctcctacgactacatcagccagggccaaaagtcttacaacttcgacaacatgatggatggcttctacatagccaagggcttcatggacaagctcgtcgtccacctctccaagaacttcatgaccctgccaaacatcaaggttcccctcatcctgggtatctggggaggcaaaggccagggaaaatcgttccaatgcgagctggtcttcgccaagatgggcatcacccccatcatgatgagcgccggcgagctggagagcggcaacgccggagagcccgccaagctcatcaggcagcgctaccgtgagc

SEQ ID NO: 14620 - DNA, 306 bp, Zea mays
ccgacgtggtgatcgtgggcgccgggtccgcgggcctgtcctgcgcgtacgagctgtccaaggaccccaccgtgagcgtcgccatcgtggagcagtccgtgtccccgggcgacggcgcgtggctgaccgggcagctgttctcggccatggtggtgcgcaggccggcgcacctgttcctggacgagctgggcgtgggctacgacgaggccgaggactacgtggtggtcaagcacgcggcgctgttcacgtccaccgtgatgagccggctcctggcgcggcccaacgtgaagctgttcaacgccgtgg

SEQ ID NO: 14621 - DNA, 306 bp, Zea mays
ggaaaatggcaaaggtgatgggaaggaggaccagagaagtgaagagaaggcagttgctgcagcttcaaaatcaagtcttgggcttgaaacacagcaaggatgagtatgagtctgatgattctaatgagggtgagtgattatctcctgaagaaggcaatgttgtgatttgaagggtatggtgcagaaaagttttgtctgcatgtcatgacagtttcatacaatgcacgggcgaacgcaccgggagcctaccacctcccgtggtcaccattgctgtgtttgatacctgactactactgctgttacttt

SEQ ID NO: 14622 - DNA, 307 bp, Zea mays
catcccgtcgcatcccatcccactaccacccatctcgtcgtccgccgattcgatccggttcttccaacccaggggcagtgatggcgacgaagaggagcgtgggcaccctcggcgaagcggatctgaaggggaagaaggtgttcgtgcgcgccgacctcaacgtcccgctcgacgatgcccagaagatcaccgacgacacccgcatccgcgcctccgtccccaccatcaagttcctcatcgagaagggcgccaaggtcatcctcgccagcctactgggtcgtccaaaaggtgtcaccccaaagtacag

SEQ ID NO: 14623 - DNA, 313 bp, Zea mays
cccacgcgtccgtgcatatgaggttgcattgaaattcgagcatcgtaacagtaaaggatgcaattatggccccccatatgagtggcaagtttataacactctcaatggttgctatggcataccatcggtccactacaagggtcgtcagggcgaatactatatacttgtaatggatatgcttggtcccagcctttgggatgtgtggaattcgatggggcaggcgatgactccaaatatggctgcttgcattgctgtagagagcatatcaattcttgagaagctccattctaaagggtttgtgcatggtgatgtg

SEQ ID NO: 14624 - DNA, 311 bp, Zea mays
cttgtacttgggggtgatggccggtactttaacaaggaggctgctcagatcatcattaagattgcagctggaaatggagttcagaagatcatagttggcaggaatggtctactgtcaacacctgctgtatctgctgtaattcgtaaaagaaaagccaatggcggctttatcatgagtgcaagccataatccaggtggaccagacaatgactggggtattaagtttaactacagcagtggacagccagcaccggagacgattactgatcaaatttatggaaacacactatcaatttctgaaataaaaacagc

SEQ ID NO: 14625 - DNA, 310 bp, Zea mays
gcaagccacttagctggaacactcgtatcaagatcgcactcggctctgcccgtgcactggagtaccttcatgaaatatgttctccatccatcatccataagaatttcaagtcgtcaaacattttgctggactcagaattcaatccacacctttcagatgctggacttgcaagctttattcctgatgctgaattccaggcagcagaacaaagtgccggatacactgccccagaagtggacatgaccggtcagtacaccctcaagagtgatgtctacagctttggagttgtcatgcttgaactattgacagg

SEQ ID NO: 14626 - DNA, 305 bp, Zea mays
  unsure (1)..(305): unsure at all n locations
cccacgcgtccgctctggtccgtggccatggcgtcgtccatgctctccgctaccaccgtgccactccagcaggggggcggcctgtccgagttctccgggctcaggagctccgcgtcgctgcccatgcgccggaatgccacctccgacgacttcatgtccgccgtctccttcaggacccacgcggtcggcacgagcggcgggtcgcggcgggcgccgacggaggcgaactgnaaggtggccatcaacgggttcggccgcatcgggcgcaacttcctgcggtgctggcacgggcgcggcgaccctcg

SEQ ID NO: 14627 - DNA, 309 bp, Zea mays
cagtttgaggactttgccaatcataatgcctttgatttgcttgaaaaatatagcaagagccatcttgttttcaatgatgatatccagggcacagcatcagtggtccttgcaggtttgttagcagcactcaagatggttggtgggaccctggcagagcagacttatttgttccttggtgctggggaggctggaactggtattgcagaacttattgctcttgagatttcgaaacagacgaatgctccaattgaagagtgccgcaagaaggtttggctggtggactcaaagggtttgattgttgactctcgt

SEQ ID NO: 14628 - DNA, 311 bp, Zea mays
gaagggcacgggcacggcgaaccagtgcccgaccatcgacggcggcgtggagtcgttcccgttcaaggccggcaagtaccagatgaagaagctgtgcctggatccgacgtccttcaccgtcaaggcggagggcatcgccaagaacgccccgcccgagttccagaagaccaagctcatgacccgcctcacgtacacgctggacgagatcgagggcccgctcgaggtcggctccgacggcacgctcaagttcgaggagaaggacggcatcgactacgccgccgtcaccgtgcagctcccggggggcgagcgcg

SEQ ID NO: 14629 - DNA, 308 bp, Zea mays
ctctgccttgttacgatttgcaaagctgactaatatcccagtactcttgactggacatgttacgaaaactggcgatattgctggtcctcgcctcttggagcacatagtggatgttgttctgtatatggagggagagaggtgctcatcccatcgattgttgcggtcagtgaagaaccgttttggttcagctgatgagcttggtgcatttgagatggctgaatttggtctgcaagctgttctgaatccaagccagatgttcttaactgagcatgactctgattctgaaattatggctggtcttgctgtag

SEQ ID NO: 14630 - DNA, 310 bp, Zea mays
ggagagtacgtggaggagcagccatggcttcatcggtggccgccgcggcgagcacattcctgggcacccgcctggcggacccggcgccacagaacgggcgcatcgtggcccggttcgggttcgggttgggcggcaaggcgaacttgctccgaagaaggtggcgaagacatcgacctcctctgaccggccgctgtggttccccggcgccgtggcgccgactacctggacggctcgctggtcggcgactacgggttcgacccgttcggtctcgggaagcccgtggagtacctgcagttcgagttggactcgc

SEQ ID NO: 14631 - DNA, 316 bp, Zea mays
agcagcctcatccccttgcccacttctacagcccctctgctgcagcaagaaggaaagaagctagcgcttatagcttgtcagccatggccaccgccgccgcgtctagcctcctcaagtcctccttcgcgggctcccggctcccggccgccacgcggaccacaccggcgtccctcgtggtggccaccggcccgcgccgcgccggcgtcgggcccatctgcgcgtccatgtccatgtcctcctccaacccgccctacgacctgacgtccttccggttcagccccatcaaggagtccatcgtgtcccgcgagatgacccg

SEQ ID NO: 14632 - DNA, 309 bp, Zea mays
cccacgcgtccgggtgtcgctcaagtcgacgacggacggggagaccgtgtaccgggtgagcttcgagtgggacgggtcgcagggcgtcccgggcgccgtcctggtcaggaacctgcagcacgccgagttcttcctcaagtcgctcaccctcgagggcgtccccggcaggggcaccgtcgtcttcgtcgccaactcgtggatctacccgcacaatctctactcccaggaacgcgtcttcttcgccaacgacgtgagtattcttccccttcggtttcttttttgggttcgctggcgacgtgagtattctta

SEQ ID NO: 14633 - DNA, 305 bp, Zea mays
cggacgcgtggcgtgacgcgtggggacatctcggaggaccctgctgaagagattagggaggcgcccaagcgcgactcgagtgaggggcagtaactccggctttaagtgcctagaaactagtagctagtgtttgctgctgtcgaatgacactatgcaatgtgatctggaacctggtttcttgggtgcgacgcttgtagccgtgttatgactgtcgtccgtaaaatttgggggctccccgtaaggcatgctgcctggcaaggcctcggtgtcccacctcgtctgtggcgtggggcgctggagcccgg

SEQ ID NO: 14634 - DNA, 307 bp, Zea mays
catcccgtcgcatcccatcccactaccacccatctcgtcgtccgccgattcgatccggttcttccaacccaggggcagtgatggcgacgaagaggagcgtgggcaccctcggcgaggcggatctgaaggggaagaaggtgttcgtgcgcgccgacctcaacgtcccgctcgacgatgcccagaagatcaccgacgacacccgcatccgcgcctccgtccccaccatcaagttcctcctcgagaagggcgccaaggtcatcctcgccagccacctgggtcgtccaaaaggtgtcaccccaaagtacag

SEQ ID NO: 14635 - DNA, 292 bp, Zea mays
ccacagtccgcaaccgtcgccatagcgtccgggacctggcgagcgcgtacgtacgtacgtagatcgatccatcgatcgcacagctagctgacgaccatggagctccctctcctctgccgccatcaccgcccctagcttcacggccgctcccgctcgcgcagtggtcagcaggaggtccttcaccgtgcgtgcctctctccgcaaggccactgccaccgccgccgtggccgttgccgccagcgtcctgcttgccggcggcggcgccatggcccaggaggtgctgctgggcgca

SEQ ID NO: 14636 - DNA, 306 bp, Zea mays
cccacgcgtccgagaagacgagtgtcaagtgaacctgaaacttgcggtgtcactggctggtatagcctgagtgtgagtgagtgatcgagctagctgagctccgatcctcgctagctagctaggataccgccataccacaagtcttcttcacaagtttaggagtgacagcaacaagagatctcgatggcctctgccaccgtgctcaagtcctccttccttcccaagaagtccgaatggggcgccaccaggcaggccgccgcgcccaggccgcccaacgtctccatggtcgtccgcgcctccgcctac

SEQ ID NO: 14637 - DNA, 310 bp, Zea mays
agtgcagcctcgccgtcgcggcgaaggacacggcattccttagcgtatcccagaagaaggtgcaggcggcgtcgctgtcggtgagaacgcgggtggcgacgacggcgcctgtggccacgccggggtccagcacggcggccaaggatgggaagaagaccgtgcggcagggcgtggtggtgatcacgggcgcgtcgtcggggttgggcctggcggcggccaaggcgctggcggagaccggcaagtggcacgtggtgatggcctgccgcgacttcctcaaggcggccaatgcggccaagggcgccggcatggc

SEQ ID NO: 14638 - DNA, 301 bp, Zea mays
gtcggcgccgcctttaagttcgccatcgacaaggacgtcaggaacttccaggtcctcaaagagatgtacaacgagtggccattcttcagggtcaccctggacctgctggagatggttttcgccaagggagaccccggcattgccggcttgtatgacgagctgcttgtggcggaagaactcaagccctttgggaagcagctcagggacaaatacgtggagacacagcagcttctcctccagatcgctgggcacaaggatattcttgaaggcgatccattcctgaagcaggggctggtgctgc

SEQ ID NO: 14639 - DNA, 277 bp, Zea mays
aaaggcacccggatcgaggaaaccaatccattccattccacacaaggctaggcacaagctaaccaaagccatggcgtccgacggcagctgcgtggtgacggtgtacggcagcaacggcgcggactgctggagccgtccaagcagcccaagtcggcgactttctccgtcaaggtggggctggcgcagatgctccgtggcggggtcatcatggacgttgtgaccccggatcaggctcgcctcgctgaggaggccggcgcgtgcgtcgttatggcgctgg

SEQ ID NO: 14640 - DNA, 301 bp, Zea mays
cccacgcgtccgccagagtgctctgctctcgctggaggccgtggttcattcacgttcatggaggccgccgccattcccaccagtgccccggaaaccaggattgccgttgtcaccggcggcaacaaagggatcgggctagaggtgtgccggcagctggccggcgccggcgccaccgtcgtcgtcttaacagccagggacgagacgaggggtgcagccgctgcacaagagctcagagaatctgggctctccgatgtcatcttccatcagctggacatcaccgacgctgcgagcgtcagtcggc

SEQ ID NO: 14641 - DNA, 304 bp, Zea mays
cgagatcgagcttgagcaaaaacgagtggattttgaagagagaaaaaaacttgatcaacaacgagcgaaatttaagtcgcagacagctcagtatgaggatgagctaaagaggaagcgactgcaggctgaacatgaggcgcaaaggttaagaaaccaagagctcgtgaagatgcaagaggaatctgggattaggctagagcagatcaggcgggcgactgaggagcaaatccaggaacaacggaggcagacagagaggcaaagggctgatctagagcaggcgaccctttcaaagaaagccatggca

SEQ ID NO: 14642 - DNA, 299 bp, Zea mays
atcattccctggtggcaaggaatacatgtgcagagcagaatttagtcttcctagcataacagcggaagaaggggccccagaaaagaaggcgccgatacgggtgaaatttgagataccatatttcaccgtatcaggtattcaggtccgttatctgaagataattgaaaagagtggttatcaggcactcccctgggttagatatatcacaatggctggtgaatatgagctgagacttatatgagttctctcttctctggctgccggacgacttttgaagctgcaggacactaaagatacat

SEQ ID NO: 14643 - DNA, 300 bp, Zea mays
agaagctctttggaacattcttgccacttgaagattcagactcgtcgaatccaaatgtcaaaggaatatcaatgcttgctcgagatttgcagtctattgtgttgtatgatcaagatggtaagtttgtaggggtccgtcggccaagctcaaaactgcctattgagatcaatggcaatgaaatactcattgaagatgctattggtagtactggactggatcttaagactgatccaggagttcctattgtttatgctggttttggtgcgcttatgttaacgacctgcattagctatctttcac

SEQ ID NO: 14644 - DNA, 301 bp, Zea mays
cccacgcgtccggcgacaggtgtctatgcccgcggccggggatgctgtggcggccccgaagcggaagaaggaggcgggctcatgaagacgctgtggctcggctcgctcttcggcctctggtacctgttcaacatctacttcaacatctataacaagcaggtactcaaggttttcccataccctataaacatcacagaagttcaatttgctgtcggaactgtagcagctctgttcatgtggatcactggtattattaagaggccaaagatttctggagcacagcttgtagccatcctacctc

SEQ ID NO: 14645 - DNA, 304 bp, Zea mays
cggacgcgtggctggtacatggaccggatcaagggcaagcagcaggtcatggtcggctactccgactccggcaaggacgccggccgcctgtccgcagcgtggcagctgtacagggcgcaggaggagatggcgcaggtggccaagcgctacggcgtcaagctcaccttgttccacggccgcggaggcaccgtgggcaggggtggcgggcccacgcaccttgccatcctgtcccagccgccggacaccatcaacgggtccatccgtgtgacggtgcagggcgaggtcatcgagttctgcttcgggg

SEQ ID NO: 14646 - DNA, 309 bp, Zea mays
cccacgcgtccgcccacgcgtccggcctcggcaacgtcagcaacggcggaaggatccggtgcatgcaggtgtggccggcctacggcaacaagaagttcgagacgctgtcgtacctgccgccgctgtcgacggacgacctgctgaagcaggtggactacctgctgcgcaacggctggataccctgcctcgagttcagcaaggtcggcttcgtgtaccgcgagaactccacctccccgtgctactacgacggccgctactggaccatgtggaagctgcccatgttcggctgcaacgacgccacccaggtgt

SEQ ID NO: 14647 - DNA, 308 bp, Zea mays
caacttggacgcttcaatctcgcatgctcatgaatggcacttccatgtcatctccttctgcctgtggtggggtagctcttcttgttagtggcatgaaggctgaaggcattccattaagcccttattctgtaagaaaagcaatagagaatacagccgcatctataagtaatgcacctgaggagaaactgaccacaggaaatgggcttttgcaagttgatagggcttttgaatatgcacagcaggctaagaagttgccacttgtttcttatagaatctcaatcaatcaagtgggaaagtcagttccaaaa

SEQ ID NO: 14648 - DNA, 308 bp, Zea mays
aacacgcagaagatcacggaggccatgaagctggtggccgccgccaaggtccggcgcgcgcaggaggccgtcgtctcctctcgccctttctcggaggcgctggtggaggtgctctacaacatgaaccaggagatccagacggaggacatcgacctgcccctcacccgcacccgccccgtcaagaaggtggccctcgtggtcctgaccggcgagcgcggcctctgcgggagcttcaacaacaacgtgctcaagaaggcggaaacccgcatcgatgagctcaagcagctgggcctccagtacaccgtcgt

SEQ ID NO: 14649 - DNA, 304 bp, Zea mays
agctagttgattctgctcgagagagctgctttggaaaagcgacgtcctcctcttctgaatgctgcctgggttgcatagactggaccctcaagtcagtaaatcgaaatgcctacattatgattgccatcgccgggaaaggtttcttcaaagcttcagtgctcgcaactggattaataatgaagaacattctgcgcatcggaaaagtcaacgtcattggagatgtcatcctcttcctgggaaaactctgtgtgagcctattctgtgcgcttttcgcctttctgatgttagacacccacaagtacaa

SEQ ID NO: 14650 - DNA, 303 bp, Zea mays
cgccgtctgccttctgcgcctccatttcggcctctgtcccttgcaagttcaatctcacctccaaccatgggtaaagagaagtcccacatcaacattgtggttattggccacgttgactctggcaagtcgaccaccacaggacacctgatctacaagcttggaggcattgacaagcgtgtgatcgagaggtttgagaaggaggctgctgaaatgaacaagcggtccttcaagtacgcatgggtgctcgacaagctcaaggctgagcgtgagagaggtatcaccattgatatcgctctgtggaag

SEQ ID NO: 14651 - DNA, 303 bp, Zea mays
gaagacttcggaaggcgggtggggcctccacgacatcataaaccagaacgactggaagctgcagggcatcgtgaacggcatcgacatgagcgagtggaaccccgctgtggacgtgcacctccactccgacgactacaccaactacacgttcgagacgctggacaccggcaagcggcagtgcaaggccgccctgcagcggcagctgggcctgcaggtccgcgacgacgtgccactgatcgggttcatcgggcggctggaccaccagaagggcgtggacatcatcgccgacgcgatccactggat

SEQ ID NO: 14652 - DNA, 301 bp, Zea mays
cccacgcgtccgccttcccctgcagataaagcggctggttgccctggaagccttgcggtggagacggtctcggtctcgaatccaggggagacacgcggatttgctgccatggtgaggtggggcgagatggtggaggaggaggaggacgacgagtacgctaagctggtcaggaggatgaatccaccgagagtggtcatcgacaacgactcgtgtggcaacgcaactgtcatccgggttgatagggtcaataagcatggcattttactggaagcagttcaggtccttgtcgatctcaacctcg

SEQ ID NO: 14653 - DNA, 300 bp, Zea mays
cgctacttcttgcaggcaacacagcaactgagcgatcgttggaaacttatgcgcatgggagaagatccaccagttgaagcatggattgctgataatctggctgatgaagctgtcattggaatcaatccatggtgcatctctgttgattctgctcaaagatatgagaactcattttcaaagaggcaccagactttgtttcagctttcttctgatttggtggatgaagtatggaaggatcgcccgctagttgaacctaggcctgtaattgtacacccagtagaatttgcagggcgcagtgta

SEQ ID NO: 14654 - DNA, 299 bp, Zea mays
gatcaaagcagagttgatgctgatgggcttcatctcgctgctcctcgccgtggggcagacgcccatctccaagatatgcatcccggccaaggctggcagcatcatgctgccgtgcaagccgccgaaagccgccgccgccgacgacgacgacaagagcgacggccgccggagactcctctggtacccgccgtaccctggatacgatgagcccggccaccaccgccgtttcctcgccggcgcggctccggacgacaactactgcagtgaccaaggcaaggtgtccctcatctcctcggccg

SEQ ID NO: 14655 - DNA, 294 bp, Zea mays
cggcgtacaaggatcaagtcattgccactggtctgccagcctcacctggggctgctgtgggccaggttgtgttcactgctgaggatgctgaagcatggcattcccaagggaaagctgctattctggtaagggcagagaccagccctgaggacgttggtggcatgcacgcagctgtggggattcttacagagaggggtggcatgacttcccacgctgctgtggtcgcacgtcggtgggggaaatgctgcgtctcgggatgctcaggcattcgcgtaaacgatgcggagaagctcg

SEQ ID NO: 14656 - DNA, 295 bp, Zea mays
gcctcgcccgatcgggatggcaagtgccgccagcgacaggtgtcatgcagcgcggccggggatgctgtggcggcccgaagcggaagaaggaggcgggctcatgaagacgctgtggctcggctcgctcttcggcctctggtacctgttcaacatctacttcaacatctataacaagcaggtactcaaggttttcccataccctataaacatcacagaagttcaatttgctgtcggaactgtagcagctctgttcatgtggatcactggtattattaagaggccaaagatttctgga

SEQ ID NO: 14657 - DNA, 296 bp, Zea mays
caaggagagtacgtggaggagcagccatggcttcatcggtggccgccgcggcgagcacattcctgggcacccgcctggcggacccggcgccacagaacgggcgcatcgtggcccggttcgggttcgggttgggcggcaaggcgaagctgctccgaagaaggtggcgaagacatcgacctcctctgaccggccgctgtggttccccggcgccgtggcgccgactacctggacggctcgctggtcggcgactacgggttcgacccgttcggtctcgggaagcccgtggagtacctgca

SEQ ID NO: 14658 - DNA, 133 bp, Zea mays
cccacgcgtccgctccagcggttccgcgagtgcgagctcatccacggccgatgggccatgctcgccaccctcggcgccctcaccgtcgagtggctcaccggcgtcacctggcaggatgctggcaaggtggagc

SEQ ID NO: 14659 - DNA, 129 bp, Zea mays
ggaaagaagctagcgcttatagcttgtcagccatggccaccgccgccgcgtctagcctcctcaagtcctccttcgcgggctcccggctcccggccgccacgcggaccacaccggcgtccctcgtggtgg

SEQ ID NO: 14660 - DNA, 132 bp, Zea mays
gttggaaggaacgatggagcagaccttcatcatgatcaagcccgacggcgtccagcggggcctgatcggggacatcatcagtcgcttcgagaagaaagggttctacctcaaggggatgaagttcatgaacgt

SEQ ID NO: 14661 - DNA, 89 bp, Zea mays
ggctaaccagggttgcagcgtttcctattgggatagactctgatcgtttcaagcgagcattggagcttccagcagtgaaaaggcacgtc

SEQ ID NO: 14662 - DNA, 327 bp, Zea mays
cggacgcgtgggctcaaccaacgaagcaccgacagaaagacaaactcgatcttgcaacatctctacttgcaaaggctaaggaaaagggtgtctcccttatgttgccaaccgatgttgtcatcgctgataagtttgctcctgatgctaacagccagattgttccagcatctgcaattcctgatggttggatggggctggatattggcccagattccattgctgcattcaacgcagccctggaaacaacccagactgtcatctggaacgggcccatgggtgtttttgaatatgacaagttcgctataggaactgaggctgtggcaaaga

SEQ ID NO: 14663 - DNA, 346 bp, Zea mays
ctgttcggcctgctgagagagaaacacggcaagggcttccagcagttcgtagaggccaaggtcgtcgctttggccggagacatcgtatacgacggcctggggctggaggcagccgtgctggacgcgctggccaaggacgtcgacgtcatcgtcaacatcgcagcaaccaccaacttctacgaaagatacgatgtttcgctggacgtgaacgtgctgggagtgaagcacctgtgcatgttcgccaagcagtgcgcgaggctcaggatgctcatgcacgtctccactgccttcgtctcgggcttcagggagggcctcatcctggagaagcccatcaagcccggcgagt

SEQ ID NO: 14664 - DNA, 325 bp, Zea mays
agctcgatctactactactactagctggtacacatactagccagcctgccagccagcttgccatggcgcccaccgtgatgatggcctcgtcggcaaccgccgtcggcccgttccagggtctcaagtccgccgccagcctccccgtcgcccgccgcagcaccaggagcctcggcaacgtcagcaacggcggaaggatccggtgcatgcaggtgtggccggcctacggcaacaagaagttcgagacgctgtcgtacctgccggcgctgtcgacggacgacctgcttaagcaggtggactacctgctgcgcaacggctggataccctg

SEQ ID NO: 14665 - DNA, 328 bp, Zea mays
ccatggcctccctctcctctgccgccgtcaccgccccttccttcgccgcaccagcgccacccgcgccgtggtcagaaggaggtccttcaccgtgcgcgcctctctccgcaaggccaccggcaccgccgccgtggcaatggctgccagcgccctgcttgccggcggtgccatggcccaggaggtgctgctgggcgcaggcgacggcgggctcgtcttcgagcccagccagttcaccgtcaaggccggcgacaccatcacattcaagaacaacgccggcttcccgcacaacgtcgtcttcgacgaagacgaggtgccgagcggcgtcgac

SEQ ID NO: 14666 - DNA, 327 bp, Zea mays
gttcggcaacgtcgtcatggacatcccccgctcactgttcgaagagaagcttgagcacatgaaggaatccaaggggctgaagaacgacaccgacctcacggcctctgacctcaaagagctcgtgggtcagtacaaggaggtctacctctcagccaagggagagccattcccctcagaccccaagaagcagctggagctagcagtgctggctgtgttcaactcgtgggagagccccagggccaagaagtacaggagcatcaaccagatcactggcctcaggggcaccgccgtgaacgtgcagtgcatggtgttcggcaacatggggaa

SEQ ID NO: 14667 - DNA, 96 bp, Zea mays
cccacgcgtccggccgcttcctcgacatgttcggcaacgtcgtcatggacatcccccgctcactgttcgaagagaagctttagcacattaaggaat

SEQ ID NO: 14668 - DNA, 320 bp, Zea mays
cagtgcgatggcatccaacaagtccattgcgctcctcgtccttgccttggcactcatgttaacggtttcagtgcatggacagttatcgtcgccgacgcctgcaccaactcctgctgctgcagccccaacgcctacaccgacaccatcaccatcccctgcaccagcaccagcaccgacgacaacacctgctccggcaccatcccaaaaccgatgtccccctggcttccctaacctaatctccttaattgaaggcattaagacgttccttcaacagggcattactcttgtccccgttccattacctgtgacgaaccaacaag

SEQ ID NO: 14669 - DNA, 322 bp, Zea mays
caggcattcgcgtaaacgatgcggagaagctcgtgacgatcggaggccatgtgctgcgcgaaggtgagtggctgtcgctgaatgggtcgactggtgaggtgatccttgggaagcagccgctttccccaccagcccttagtggtgatctgggaactttcatggcctgggtggatgatgttagaaagctcaaggtcctggctaacgccgatacccctgatgatgcattgactgcgcgaaacaatggggcacaaggaattggattatgccggacagagcacatgttctttgcttcagacgagaggattaaggctgtcaggcagat

SEQ ID NO: 14670 - DNA, 325 bp, Zea mays
gcaaccggtccagcactttcacgctcagctccagcaatggctgcctccaccatggcgatctcctccacggcgatggccggcacccccatcaaggtgggctccttcggcgagggccgcatcaccatgcgcaagaccgtgggcaagcccaaggtggcggcgtccggcagcccctggtacggccccgaccgcgtcaagtacctcggccccttctccggcgagcccccgagctacctcaccggcgagttccccggcgactacggctgggacaccgccgggctgtccgccgaccccgagaccttcgccaagaaccgcgagctggaggtga

SEQ ID NO: 14671 - DNA, 326 bp, Zea mays
cattccttccccaactctgcaggctgctcgtcgccctccctccacgccggacgcgccccgatccagatccaggggcgtaacatggcatcaaaacgtatcctcaaggaattaaaggacctgcaaaaggaccctccaacgtcatgcagtgctggtcctgctggtgaggatatgttccactggcaggcaaccatcatgggtcctcctgatagtccatatgctggaggtgttttcttagtgaacattcatttccccccggactaccctttcaagcctccaaaggtatcttttaagacgaaggtcttccatccaaacatcaatagtaatgg

SEQ ID NO: 14672 - DNA, 319 bp, Zea mays
cagccgtcttggcccgcttctcccctgctgcggccatggcgacctccgccgcgctctcgaccgccgccaaccccacccagctctgccggtcccgcgctgcgctgggcaagccagtgaaggggcttggcctggggatggggcgggagcgcgcaagccagcggagcatcacgtgccaggcggcgagcagcatccccgccgaccgcgtccccgacatggagaagcggaagctgatgaacctcctcctcctgggcgccatatcgctgcccaccgtcggcatggtcgtcccctacggcgccttcttcgtccccgccggctccgg

SEQ ID NO: 14673 - DNA, 308 bp, Zea mays
cggacggtgggaatggagggagacttatcttctatgacttcgggatgatgggaagtatcagtcaaaatatccgggaaggattgcttgaagtattctatggagattatgaaaaggatcctgacaaagtgcttcaagcaatggttcaaatgggtgtccttgttcctactggagatatgactgctgtcagaagaaccgctcaatttttccttaatagctttcaagagcgcctagcagcacaaaggaaggagagagaaatggcaaccgcagagcttggattcaaaaagcaattaactaaggaggagaagttt

SEQ ID NO: 14674 - DNA, 318 bp, Zea mays
  unsure (1)..(318): unsure at all n locations
agcggtgcgagcggaggaggcgaccgaagcgccacttgcttgagtagcgaacgcngagagcaatggcgtcgctgtcgtgcgcctccacgctgccctggacccccgcctcctccctgcgagcctcggcggaccgccgcctcacggcctctcgccgggctccgtcgctggtcatcgtcgcccaggggaaggtgaagaatcaccctcaggtcatattgacagatgacatagaagaggtggggaagaaaggggatacaatgaaggtgcgagctggattctaccgcaactccttgcttcccaagggcaaggctgcgcttctaa

SEQ ID NO: 14675 - DNA, 317 bp, Zea mays
gtccctcacacactcactatacactgctctgctgcagcaagaaggaagaagctagcgcctccctagctctcgttgtcagcaatggccaccaccgccgcgtccagcctcctcaagtcctccttcgcgggctcccggctcccttcggccacgcgcaccaccaccccgtcgtccgtggccgtggccaccccgcgcgccggcgagggccccatccgcgcgtccatctcctcctcccccaccccgccctacgacctgacgtccttccggttcagccccatcaaggagtccatcgtgtcccgcgagatgacccggcgctacat

SEQ ID NO: 14676 - DNA, 313 bp, Zea mays
acctaatattggagttgtctatagtgggatgggtccagatttccgtgttctggtgaggaaaagtcgaaagcaggcacaacaatattatcggttgtacaaggaacatatacctgtaacacagcttgtacgagagactgctgctgtcatgcaggagttcacacagtcaggtggtgtgagaccatttggagtatcactgttgattgctgggtatgatgacaatggcccgcagttgtatcaggttgatccctcaggatcatacttctcctggaaggcatcagccatgggaaaaaatgtgtccaatgcaaagacgttt

SEQ ID NO: 14677 - DNA, 315 bp, Zea mays
caacgctataacaaggttattgtctgtgtgatctttgtgaccctgtggttgaagtgaatatctagaccttgagcgagagctctgatgacagggtcgtagccattcaccataagaccatacaacgctataacaaggttattgtctgtgtggaagatggggcgagttttgtcgcagacgctgctatagtaaccgtccctctcggggtactcaaggcaaacatcatcaagtttgagcctgagctaccgaaagagaagctctcggcaatcgccgaccttggcgtcggtatcgagaacaagatagctctcaagttcgaca

SEQ ID NO: 14678 - DNA, 254 bp, Zea mays
atttgaccagctgaagtcaacaggcatgccgaacggtggcggcaagaggtggctgctgctgctgccgctgtcgcggtacgtggaggtggacgagcagcaaggtgtgcagctcttctactacttcgtgcgctcggagcgcgacccctacgaggacccgctgctgctgtggctgtccggcggcccaggctgctccggcatctccggccttgcctacgagataggacccttaaaatttgatgcccgagggcaaggtg

SEQ ID NO: 14679 - DNA, 102 bp, Zea mays
caacttcgacgccttccacggcgacaaggaccacggcggcgtgcacgacggcaccgcgtcgtgctctgggagtggtgcaagggcgagaaccagagctggaag

SEQ ID NO: 14680 - DNA, 325 bp, Zea mays
tttttgatggtatccagcgccctctaaaaaccattgccattaagtcaggagatgtgtatattcctcgtggtgtttcagttcctgcccttgacaaagatgcattatgggaatttcagccaaagaaactaggtgttggagatgtcatcacaggtggagatctatacgctactgtctttgagaacacattgatgcagcaccatgttgctcttccaccgggttctatggggaaaataagttacattgcaccagctggtcagtacaaccttcaggacacagtgctagaattggaatttcagggcataaaaaagaattttaccatgcttca

SEQ ID NO: 14681 - DNA, 322 bp, Zea mays
ccgcaactatgtctcatatgctaccttcctcctccaggaaaggagaattaaagagattgttttgaaggccatgggacaggcaatcagtaagtctgttgctgttgcagagattatcaagaaaagggcccctgagttacaccaggataccaacatcagctctgtcagcatcactgatgtctgggaacccatagaagaaggacttgtcccattggagatgactcggcatgtttctatgatatcaattactttgtcccccagagagctggacaagcacactcctgggtaccaagctccagcatatgttgaacatcccaggcaacag

SEQ ID NO: 14682 - DNA, 325 bp, Zea mays
cccacgcgtccggaccatgactccgtctcgctgcactccatctcacaaacttctggtggcaccttctcattcatcgagacagaggccgctatccaagatgcatttgctcagtgcattggtggacttttgagtgtggttgcacaaggtctgcatgtaaaggtggagagcctccaccccgacgtgcactttggctccatcagatcaggcagctattctagcagggtttcagatgataagaggaatgggtccatagatgttggggacctgtatgctgaagaagaaagggattttcttgtgtctgtaaacgtcccaccaggctacgggg

SEQ ID NO: 14683 - DNA, 328 bp, Zea mays
cgtgctattccccgccgtgccgctcgccatcgccgcccagtgcgcgcacttcggccaggtgtgggtgtttacgctcagcctactcggcctcatccccctcgccgagcgtgtcagcttcctcaccgagcagatcgcgatatacaccggccccaccgtgggcggcctcctcaacgcgacgtgcggcaacgccacggagctcatcatcgcgctcttcgcgctcatggggggccagatcgaggtcgtcaagtgctccctcctcggctccgtcctctccaacctgctgctcgtgctcggcacgtccctcttctgcggcggcgtcgtcaacctc

SEQ ID NO: 14684 - DNA, 326 bp, Zea mays
gctcaacaaggagttgttcggctacacggaggggaggataaatatcgagaagcatggaaaaaaatttgtgacattagcaggagcgaatttgacttggtctacaagcgcctaaatgtggtgcttgaagaaaagggggagagtttctataatccttatattcctcaagtgctggaggaattgagtaacaaaggcttgatcaaggagagtgagggtgcccgagttatatttattcaaggtcatcaaatccctttgattgttgttaagagtgatggtggcttcaactatgcctcaacagacttaactgctctttggtatcggctcaatgt

SEQ ID NO: 14685 - DNA, 320 bp, Zea mays
aagagagtacgtggaggagcagccatggcttcatcggtggccgccgcggcgagcacattcctgggcacccgcctggcggacccggcgccacagaacgggcgcatcgtggcccggttcgggttcgggttgggcggcaaggcgaacctgctccgaagaaggtggcgaagacatcgacctcctctgaccggccgctgtggttccccggcgccgtggcgcccgactacctggacggctcgctggtcggcgactacgggttcgacccgttcggtctcgggaagcccgtggagtacctgcagttcgagttggactcgctggaccag

SEQ ID NO: 14686 - DNA, 320 bp, Zea mays
gaagaagacaacgcaaagggagaggacagaggaggagcagaggacgatgggcagcggcggcgctaacactgcccccctcctcaccccctacaagatgggaaaattcgatgtttcccacagggtagtcctcgcaccactgacgagacagcggtcctacggcaatgttcctcagcctcatgccatactgtactatcagcagagggcgactaaaggaggtcttctgatcgctgaggccacgggggtttcagacactgctcaagggtacaaggacactcctggcatttggacccatgagcaagtcgaagcatggaagccgatcg

SEQ ID NO: 14687 - DNA, 319 bp, Zea mays
ggcgaggccatcggcggctacatcttcgtgtggagcaacgccaccatggacgagaacctcaggagggagctgttcgggctgccgtcgaggtacagggactcggtgcgggccatccgcccggggctgcgcctcttcctctacaactactccacccaccagctgcacggcatcttcaaggccgccagcttcggcgggaccaacatcgacccgacggcgtgggaggacaagaagtgccccggcgagtcgcgcttccctgcacaggtgcgagtggcaacgcggaagatctacgatccactggaggaggacgccttccgcccca

SEQ ID NO: 14688 - DNA, 323 bp, Zea mays
atctcttctaggtcacttgcgtactagaactttagaagcatttaatgagtcctttgacaaggctctagaaaaggagggatttgctgcagccgctcgcaattgtactcaaactttcttggagaagtttgataaaggatctgaagatgctgctattcaacaagtgaattgggacacctcaaaagtgaaggataagcttagacgtgacattgaggctcatgtagcttcagttcgagctgctaaattatctgaactttgtgccaaatatgaggcacaacttaccaaagctctggcggaaccagttgaatctcttctagattcagcca

SEQ ID NO: 14689 - DNA, 316 bp, Zea mays
atggtacttgttgctcctgctggtattttgttgcatgcctaggatccttcgtatcttgatggtagagttgatgaattcttcaagatgtttgaaagcaaaatctatgaactctccgacaaggacttcaagagaaatgtgaaatcactaattgattctaaactggagaagtttaaaaacttatgggaggaatcagatttctactggggagagattcaggcaggaactctgaagtttgatagggtcgagtctgaggtcactatgctaagagagctcaagaaagaagaattcatagagtacttcgaccagtacataaaag

SEQ ID NO: 14690 - DNA, 313 bp, Zea mays
cacgtcacaggccagctcggcctcctccctagcaccgtcccatttcctccctgcaccggatcccctttcccttgcgtgccggactttcctccactcctccatccatggctctctgctgcgtcgcgccctggccccttctctgcgcgctcctccaagccggcgtcctctgcacgccatggccgccgcgccccgggtcgcatgctccaccgtgccgagctccctagcgcttgccctgccctctgccatggacgtcgtcggccttgactccctctggctgcggcatccgtcttgctccctgctccgaccaatccgc

SEQ ID NO: 14691 - DNA, 313 bp, Zea mays
ggggaaggaggacaagagcttggcggcgctatcgccgagcccccggcctgatggcaaggcggcaccagtacgatcaaattcacgtgcttcgagctccaggaaggaagattctgtacctgttcgcagaggaggaaacactgcacatggcccggcacagattttcagtttccgggagttggctgttgccaccaaaaatttcagaagagattgcctgttgggagaaggtggctttggtcgtgtgtataaaggacatatggaaaatgggcaggtcattgctgtgaagcaacttgatagaaatggttttcaaggaaat

SEQ ID NO: 14692 - DNA, 311 bp, Zea mays
ggccgccgccgacaggatggagggcccgctccgccagatcttcgtagagttcctcgagcgctcctgcaccgccgagttctccggcttccacctctacaaggagctcggccgcagctcaagaaaaccaacccggtcgtggcggagatcttctcgctcatgtcaagggacgaggcgcgccatgctgggttcttgaacaaggggctgtctgacttcaacttggcgctggacctggggttcctgaccaaggctaggaagtacaccttcttcaagcccaagttcatcttctacgccacctacctgtccgagaagat

SEQ ID NO: 14693 - DNA, 314 bp, Zea mays
cgctgggccatgctcggcgcgctcgggtgcgtgttcccggagctgctcgcccgcaacggcgtcaagttcggcgaggcggtgtggttcaaggcgggctcccagatcttcagcgagggcgggctcgactacctcggcaacccgagcctggtccacgcgcagagcatcctggccatctgggcgtgccaggtggtgctcatgggcgccgtcgaggggtaccgcgtcgccggcgggccgctcggagaggtggtcgacccgctgtaccctggcggcagcttcgacccgctcgggctcgccgacgacccggaggcgttcgc

SEQ ID NO: 14694 - DNA, 143 bp, Zea mays
gaggtgggctggcttctcctccccctcttaccaagtcctcctcgggttagggttccttagggttttgtggaggtgcgatggcggcggctgatgtggagtaccgttgcttcgtcggctggcttgcctgggccaccagcaacgag

SEQ ID NO: 14695 - DNA, 314 bp, Zea mays
  unsure (1)..(314): unsure at all n locations
ggtacttcttctgccacaaggaccgcaagtacccgacggggatgcgcaccaaccgcgccaccgccagcgggtactggaaggccacgggcaaggacaaggagatcttccgcggcagtagtcnccgccgcgtgctcgtcggcatgaagaagacgctcgtcttctacacgggccgcgcgccgcgcggaggcaagacgccgtgggtcatgcacgagtaccgcctcgagggcagcctgccgcccaacctccaccgcggggccaaggacgaatgggctgtgtgtaaggtgatcaacaaagacttggcgggcaaggctggg

SEQ ID NO: 14696 - DNA, 313 bp, Zea mays
aggccgagaaggacttgcagccttggattgctagagacgacgaacaaggccagaagatgtggagagtcaaccaacgtatagtgaagcttatagcggactcatgaggaaccatgacagccctgaagccttggtgatactcgctagtgcttctgaccttctacttcgtgctactgatggaatgcttgttgacggtgaagcttgtactttgccacagcttgagcttctcgaagtaaccgctcgagcagtccatcttattattgaatggggagatccaggtttatcagttgctgatggcctttctaatctgctaaag

SEQ ID NO: 14697 - DNA, 318 bp, Zea mays
ctgagcagttcgaccaggcagccatccacctccaaccccccttcgcctgcgcaaatcgttaccatcccagcgagaaagatggcgcgcgtctccaatgccaagaagcggcagggcgccaagcccgcctccgcgctcagcagcaccgacaccagcaccgccgcaaagaggaaggccgaggacgaccgccccgtgcgcgtctacgccgacggcatcttcgatctcttccacttcggccacgcccgcgccctcgagcaggccaagatgctgttccccaacacctatcttctcgtcggatgctgcaacgacgagctaacctac

SEQ ID NO: 14698 - DNA, 348 bp, Zea mays
agacatctcaattaattagctaatgagcaagcggctgagctgcactcaagacaaactaccatggatcagtcaaacattagcaacaagcacatgacgatgacaaccctaatgctcctcctctgtgtcatagccattgcagattgcatttgccacgccgcagtggcagcccgggtggagccatccaccaccgtcggcagaactacaggaggagacgaggcgatgatgatggcgaggtacaagaagtggatggcgcagtatcgccggaagtacaaggacgacgccgagaaagcacaccgtttccaggtattcaaggcgaacgcggagtttattgacaggtctaacgctgga

SEQ ID NO: 14699 - DNA, 163 bp, Zea mays
cccggcgactacgggtgggacaccgcggggctgtcggcggacccggagaccttcgccaagaaccgcgagctggaggtgatccactgccgctgggccatgctcggcgcgctcgggtgcgtgttcccggagctgctcgcccgcaacggcgtcaagttcggcgagg

SEQ ID NO: 14700 - DNA, 340 bp, Zea mays
  unsure (1)..(340): unsure at all n locations
cggcaccttcaaggccgacgtcaagatcgtggacgacacgaccatcagcgtcgacggcaagcccatcacggtcgtctccagcagggacccgctcaagctcccatggggtgagctcggcattgacatcgtcatcgagggcaccgtagtcttcgtcgacggccccggcgccggcaagcacatccaggccggcgcgaagaaggtgatcatcacggctcncgccaagggcgccgacatcccgacctatgtcgtcggcgtcaacgagggcgactacgaccacagcgtcgccgacatcatcagctacgcgtcctgcacgaccaactgcctcgcgccattcgtcaaa

SEQ ID NO: 14701 - DNA, 123 bp, Zea mays
gttcgagaggctggccgacctgcagtcggcgcccgcgtccgtggagcgcctcttctcggtggactggtacatggaccggatcaagggcaagcagcaggtcatggtcggctactccgactccgg

SEQ ID NO: 14702 - DNA, 335 bp, Zea mays
aattgatgttggtacaaataacgagaaactgcttaatgatgagttctacattggactccggcaaaaacgtgcgactggcgaggagtatgatgagcttattgaagagttcatgtctgctgttaagcaattctatggtgagaaagtcctcattcagtttgaggactttgccaatcacaatgcctttgatttgcttgaaaaatatagcaagagccatcttgttttcaatgatgatatccagggcacagcatcagtggtccttgcaggtttgttagcagcactcaagatggttggtgggaccctggcagagcagacgtatttgttccttggtgctgggg

SEQ ID NO: 14703 - DNA, 333 bp, Zea mays
gacctccgcggcgctctccaccgccgccaatcccacccagctctaccggtcccgcgctttgctgggcaagccggtgaaggggcttggcctgagcatgggccgcgagcgcgcccaccggagcattgtgtgccaggcggcgagcagcatctccgccgaccgcgtccccgacatggagaagcggaagctgatgaacctcctcctcctcggcgccatctcgttgcccaccgtcggcatggtcgtcccctacggcgccttcttcgtccctgccggctccgggaacgccggcggcgggacctacgcgaaggacaagctgggcaacgacatcacggtgga

SEQ ID NO: 14704 - DNA, 330 bp, Zea mays
ggacgctagctcaccaccaacctcagcacatcgaggagaagaggagtggccatggcttcgtcggtggccaccgcggcgagcacattcctgggcaccgcctggcggacccggcgccgcagaacgggcgcatcgtggcccggttcgggttcggcggcggaaagcccaaggctgccgtcccgaagaaggtggcgaagacgtcgatctcctctgaccggccgctgtggttccccggcgccgtggcgccgactacctcgacggctcgctggtcggcgactacgggttcgacccgttcgggctcgggaagcccgtggagtacctgcagttcgaact

SEQ ID NO: 14705 - DNA, 332 bp, Zea mays
cggacgcgtgggtgcatacacaacacagagcatcagaaggagctgcgatctgatcgacatggctgccgccaccatggctatcacctcccgcgcgctcatcggcaagccggcggctggcacgagggacgtcttcggcgagggccgcatcaccatgcgcaagaccgccgccaagcccaagccggcggcgtccggcagcccctggtacggtgccgaccgcgtcctgtacctgggcccgctgtccggctcgcccccgagctacctgaccggcgagttcccggcgactacgggtgggacaccgcggggctgtcggcggacccggaagacttcgccaa

SEQ ID NO: 14706 - DNA, 312 bp, Zea mays
agcaagctcgatctactactactactagctggtacacatactagccagcctgccagccagcttgccatggcgcccaccgtgatgatggcctcgtcggcaaccgccgtcgccccgttccagggtctcaagtccgccgccagcctccccgtcgcccgccgcagcaccaggagcctcggcaacgtcagcaacggcggaaggatccggtgcatgcaggtgtggccggcctacggcaacaagaagttcgagacgctgtcgtacctgccgccgctgtcgaaggacgacctgctgaagcaggtggactacctgctgcgc

SEQ ID NO: 14707 - DNA, 341 bp, Zea mays
cacccgtctcctcctccgcagcttccccgcgatcccgaccatggagggcgacggtaccaaccttgatgcggcgatagagtcgctcctgaatgtcgagaagcagatgaggctggccggagatgtcgccggcactcggaaggccgtcatcgacatcgtcgagctctgctacaaggccggcgcgtggaagacgctaaacgaccagatcgttctcctatctaagaggagaggccagcttaagcaggctattactgctatggttcagaaagcaatggagtacattgatttgacaccaggcattgacacaagcatcgagctaataaaaacactgagcagtgtctctg

SEQ ID NO: 14708 - DNA, 235 bp, Zea mays
cagagaccatcatcaagcaaattccccgtctccttggtcctggtctcaacaaggcaggcaagttccccactctggtcactcaccaggaatccctggaatccaaggtgaatgagacgaaggctacagtcaagtttcaactgaagaaagtcctttgcatgggtgtcgcggtcggtaacctgtctatggaggagaagcagatccaacagaacatccagatgagcatcaacttcctcgt

SEQ ID NO: 14709 - DNA, 332 bp, Zea mays
cccacgcgtccgcgcctagccgccggagaagcgccgctcgctcaggaggacagccatggcgccggagccggaggatgatattatgaacgagaagaatccccgcccgctcgaagaggatgacatcgcgctcctcaaaacctatggactggggccgtattcgaccagcattaagaaggtcgagaaggagatcaaggaaatggccaagaaaatcaacgacctctgtgggataaaggagtctgatacagggctggctccacctagccagtgggatttggtttcagataagcagatgatgcaagaagaacaaccgttacaagtagcaagatgtacaa

SEQ ID NO: 14710 - DNA, 330 bp, Zea mays
cacgcatactgcatacacaacacagagcatcagaaggagctgcgatctgatcgacatggctgccgccaccatggctatcacctcccgcgcgctcatcggcaagccggcggctggcacgagggacgtcttcggcgagggccgcatcaccatgcgcaagaccgccgccaagcccaagccggcggcgtccggcagcccctggtacggtgccgaccgcgtcctgtacctgggcccgctgtccggctcgcccccgagctacctgaccggcgagttccccggcgactacgggtgggacaccgcggggctgtcggcggacccggagaccttcgccaa

SEQ ID NO: 14711 - DNA, 324 bp, Zea mays
  unsure (1)..(324): unsure at all n locations
cggacgcgtgggcggacgcgtgggatgaaggaatccaaggggctgaagaacgacaccgacctcacggcctctgacctcaaagagctcgtgggtcagtacaaggaggatctacctctcaggcanaggagagccattcccctcagaccccaagaagcagctggagctagcagtgctggctgtgttcaactcgtgggagagccccagggccaagaagtacaggagcatcaaccagatcactggcctcaggggcaccgccgtgaacgtgcagtgcatggtgttcggcaacatggggaacacttctggcaccggcgtgctcttcactag

SEQ ID NO: 14712 - DNA, 330 bp, Zea mays
gcttgccatggcgcccaccgtgatgatggcctcgtcggcaaccgccgtcgccccgttccagggtctcaagtccgccgccagcctccccgtcgcccgccgcagcaccaggagcctcggcaacgtcagcaacggcggaaggatccggtgcatgcaggtgtggccggcctacggcaacaagaagttcgagacgctgtcgtacctgccgccgctgtcgacggacgacctgctgaagcaggtggactacctgctgcgcaacggctggataccctgcctcgagttcagcaagctcgggttcgtgtaccgcgagaactccacctccccgtgctacta

SEQ ID NO: 14713 - DNA, 329 bp, Zea mays
cttcaagtgccactcccatccaccacaaggcttggcttggtgggaagaagacaaacgccggcacgcgcacgcagacacgatggcgatctgcagcgcgcacactaccacctccctgcgctccccatgcacgaccgtctcgaacgcaggtctgaggcagaagcaagtcatcttcgtcaccagcaacaggaggagcggcggcggcaggaggcacggaggggcaaggagcttccaggtctcgtgctccgtcgacaagccggtggtgattggcctggcggcagactcagggtgcggcaagagcaccttcatgcgccggctcaccagcgtcttcg

SEQ ID NO: 14714 - DNA, 327 bp, Zea mays
cccacgcgtccgaatggagcagtgggagaaaagctactacataacaacaattgctggatcatccaacgggagctcattggttgtcatgtccaaaggaactccttacacccagcaatcatacaaggttagtgagtcgtttccttacaagtggatcaataagaagtggaaagaagggttccatgtgacatccatggccaccgctgggaatcgctggggcgtagtcatgtcaaggaattcagggttctctactcaggttgtagagttggatttcctgtaccccagcgaaggcatccaccgacgctgggagagcggctacaggataacttc

SEQ ID NO: 14715 - DNA, 326 bp, Zea mays
tgttcgagtcggcctccggctacggcctattccatgcgtacggtatcgatgagatcgggcagagcgttgaggccgtgcgctcctccgtgctggacctcgaccgcttcggcaagccgtcaagctcactgccttcaatcctttctcctctgccgtcgacgcgctcaaccagtgcaacgctatctctgaaggaatcatgaccgatgagttgaggagcttcctggagctgaacctgccgaagcctaaggaggggaagaaggccaaatacagcctcggcgttgtcgagcccaaggtcggctcccacatctccgaggtcaccggcatcccct

SEQ ID NO: 14716 - DNA, 329 bp, Zea mays
gcttgctccatgacgtacgtacgtacgtagatcgatccatcgatcgctagctagctgacgaccatggcgtccctctcctctgccgccatcaccgccccttccttcacggccgcgcccgctcgcgcagtggtcagcaggaggtccttcaccgtgcgtgcctctctccgcaaggccactgccaccgccgccgtggccgttgccgccagcgtcctgcttgccggcggcggcgccatggcccaggaggtgctgctgggcgcaggcgacggcgggctcgtcttcgagcccagccagttcaccgtcaaggccggcgacaccatcaccttcaagaa

SEQ ID NO: 14717 - DNA, 209 bp, Zea mays
cccacgcgtccgcccacgcgtccgcttggcgcgcactcgtcgccaaggccaccggggagaacgccgtgagggcgcccgcagaggcgaactgaaggtggcgatcaacggcttcggccgcatcggccggaacttcctccggtgctggcacggccgcgaggactcgccgatcgacgtcgtcgtcgtgaacgacagcggaggcgtcaggaacg

SEQ ID NO: 14718 - DNA, 328 bp, Zea mays
agcaaccggtccagcactttcacgctcagctccagcaatggctgcctccaccatggcgatctcctccacggcgatggccggcacccccatcaaggtgggctccttcggcgagggccgcatcaccatgcgcaagaccgtgggcaagcccaaggtggcggcgtccggcagcccctggtacggccccgaccgcgtcaagtacctcggccccttctccggcgagcccccgagctacctcaccggcgagttccccggcgactacggctgggacaccgccgggctgtccgccgaccccgagaccttcgccaagaaccgcgagctggaggtgatc

SEQ ID NO: 14719 - DNA, 320 bp, Zea mays
aaaaaatggtagatccagtgccgtagtaccacatgagagcttgtaccatataagagcttgttcggttaggagtggattgaaggagattggaggggattaaatccattcctagtcaaaattgaataagaggggatttaatcccctcaatccactccgatcctcatgcaaccaaacaagacctgagtggggtctgagaaatgaataaaccgagacaatcccacatgagtggggtctagggaagggataaatcgagataggccttcttagatgcggagagacagctctcaccgctacaccatgcttttccttactttattatt

SEQ ID NO: 14720 - DNA, 321 bp, Zea mays
tccacgcgtccgggcaaaagccaaaaggcatcaccgccgcgacgacgatggcagcctcgctccaagccgcggccaccctgatgcagccggccaagatcggcggccggtcgccctttgcctcgctgccgtcccgcccgtcgtcgcaactcgcctgcagggcgttcggcgtcgacgccggcgccgccaggatcacgtgctccctgcaggacgtcgccagcaggtgcgtcgacgccgcgaactcgccggcttcgcgctcgccacctcggcgctcctcgtctcgggcgcgagcgctgatggcacgcccaagaggctgacctacga

SEQ ID NO: 14721 - DNA, 320 bp, Zea mays
cagatcatgataattgactacaaattaacttacccaagtggtactgcaacagctgttcttataaatggattccacacaactcatggagatgcaacggcaaagcagcaagtgaatgggttcacaaaatactttgcaatcagcttcttttggagcttcttccagtggttttactcaggtggagacaactgtgggttttcacagtttcccacttttggacttagagcttggaaacaaacatttttcttcgatttcagtctaacatatgttggcgctgggatgatttgctctcacctcgttaatctatctctccttcttggtgc

SEQ ID NO: 14722 - DNA, 103 bp, Zea mays
cggaccgtgggcggacgcgtgggcggacgcgtgggcggacgcgtgggtgtggcgctgcaacgatgagcttcgtgttcgtgccgaagagctccacagttcgtct

SEQ ID NO: 14723 - DNA, 318 bp, Zea mays
agtaaatggtattgctgaaaatctgagctgggaaatttttagggataccttgattgaacaagctgagcagggcgttgattacttcacaatccatgctggtgtcctgcttcgttacattcctcttacagcaaagagaatgacgggcatagtttcacgtggtggctcaatccatgcaaaatggtgcttaacttatcacaaggagaactttgcatatgaacattgggatgacattcttgacatatgcaatcagtatgatgtggcattatcaattggtgatggtttgacggctggttccatttatgatgcaaatgatagtgc

SEQ ID NO: 14724 - DNA, 320 bp, Zea mays
gcagcagaggcagcgacacgatcgcgagcgcacgcacgtaagcacgttgtcggaagctcaagttagaagaagcaccagtgcctgatcgatggcggcccaggctctcctctccggccggcagctgctgggccgccccgtgcagtcggccgtctctaggtcgtcggcgaggaaggcgcccttcgtcgtcagggccagctccagccctccagccaagcaaggtgccgacaggcagctgtggttcgcgtccaagcagtccctctcctacctcgatggcacgctgcccggcgactatggcttcgacccgctgggcctctcggacc

SEQ ID NO: 14725 - DNA, 255 bp, Zea mays
gcgcaccaaggtgttcgagatgccgccgctcacggtggaggaggcgctggagcagctggagaacgtggaccacgacttctactgcttcagggacgaggccacggggcaggtgaacatcctctaccgcagaaggaaggcggatacggcctcatcatccccaagaacgacggcaaagtggataccgttggcgttgtgccaccacccgccgtcgctgcggagccggagccgtcctacgcagtgcacgccgctgacaaa

SEQ ID NO: 14726 - DNA, 312 bp, Zea mays
cgcgacggaggcgcacgtcgcggaaggagtgcttcggggtcttctgcaccacctacgacctcaaggcggaggacaagaccaagtcgtggaagaagctagtgaatgttgctgtgtcaggcgcggccgggatgatatcaaatcacctgctgttcaaactcgcttctggtgaggttttcggacaagaccaaccaatagcacttaagctactcggctcagaaagatcgtttcaggccctcgaaggtgtagctatggaactggaggactcgctgtatccactgctgagggaagtcagcattggcatagatccttacg

SEQ ID NO: 14727 - DNA, 313 bp, Zea mays
gctgatcccgtccaagtggaaccccagcaaggagcgggagttccccgggcaggtgctccgctacgaggacaacttcgacgccaacagcaatgtgtccgtcatcatccagcccacgtccaagaagaccatcgccgactacggctctcccgaggagttcctctcccaggtcgactacctgctcggcaggcaggcctacggcggcaagaccgactccgagggcgggttcgagaccggcgccgtggccaccgccaacgtcctggagagctccacccccgtgatcgacggcaagcagtactacgccgtgtccgtgctc

SEQ ID NO: 14728 - DNA, 309 bp, Zea mays
cagacgcgtgggcgccaacaaagccctaacctgcacaacctttcccccctcgcaagcaaagccaaacagatctcctcgtcgtcgcctcgctgtctcctccgccgtagcctgcgatcccgatcatggagggcgacagtaccaacctcgacgcggctatagagtcgctcctgaacgtggagaagcagatgaggctggcaggcgatgtcgccggcacgcggaaggccgtcatcgacatcgtcgagctctgctacaagaccggcgcgtggaagacgctaaacgaccagatcgttctcctctccaagaggagag

SEQ ID NO: 14729 - DNA, 311 bp, Zea mays
ctcgaagctcctcccgaaccggccgcatcgccgccatggcagccgccgctcctgcaagctccgtgaaggaagtgctgccgtctcccctgacctccgcctccgagccccctccccttttcgatggcaccaccaggttgtacgtggcctatctttgcccgttcgcgcagcgcttggattgctagaaactacaagggtctgcaggacaagattaagatagctgccatcgatctcgctgacaggccagcgtggtacaaggagaaggtttatccagaaaacaaggtgccttctctagagcacgacaaccaggtgaa

SEQ ID NO: 14730 - DNA, 305 bp, Zea mays
ccgcctcctcgtcctccaccaccgccgtcacggcgctccccaggaatgggcagcgggcgtcgtcctccttcctcggcggcaagacgctgctgagacaggccgaggcggcccggccgtcgttcgccgtgcgcgccagggcggaccccaacaggccgatctggttccccggcagcacccctccgccgtggatcgacggcagccttcccggcgacttcggctttgatccctggggcctcggatctgacatcatcaagcccggaagcgtcaacaccgaccccatcttccccagcaacaagctcaccggc

SEQ ID NO: 14731 - DNA, 306 bp, Zea mays
cccacgcgtccgggttaacgagggccttgttgagccccgctcagcgatcaagatggtagagccaggccacctggaccagcttctccatcctcagtttgagaacccgtcggcgtacaaggatcaagtcattgccactggtctgccagcctcacctggggctgctgtgggccaggttgtgttcactgctgaggatgctgaagcatggcattcccaagggaaagctgctattctggtaagggcggagaccagccctgaggacgttggtggcatgcacgctgctgtggggattcttacagagaggggtgg

SEQ ID NO: 14732 - DNA, 304 bp, Zea mays
aacagttccgatcctccacaccagcacccgccgccgccgcctcttcccttgcgcacctgctgctgtgcggatcggtgaggcggaggagtaggatggcgagcgcggccggagcggagcggcgggggaaggggagtggcttaaggtatcccagctcaggcccatggtggaagcgcaggaccccaacgccaaggcagtggacaacctgacgctgcgtcggttcctgcgcgcgcgcgaccacgacgtggacaaggcctccgccatcatcctcaagttcctcaagtggcggagggaggcggcgcccggc

SEQ ID NO: 14733 - DNA, 306 bp, Zea mays
cccacgcgtccgcgccatccccaccgaaccctacccgcgacttcgctccgcttccgccgatcggcttgccccgtcgatttcgccaacccctcgacccgatcgactccattgatcgtacctcgtcgtccggttgtcgatggccaggacatctttcaaaatggagcacgacctcgagaaaaggcagtccgaatctgccaggatcagggataagtatcccgacagaattcctgtgattgttgagaaagctggcaaaactgatgtccccgagattgataagaagaagtaccttgtccctgctgatctcac

SEQ ID NO: 14734 - DNA, 123 bp, Zea mays
cggacggtgggtcgatctactactactactagctggtacacatactagccagcctgccagccagcttgccatggcgcccaccgtgatgatggcctcgtcggcaaccgccgtcgccccgttcca

SEQ ID NO: 14735 - DNA, 304 bp, Zea mays
agaccgtcctccgcccgagtctcgctcgctagctagggtttccaccaatggcggcgcccaccacctcccgccgcggccccggcggcgcgcgcaacatggacgacgagaacctaaccttcgagacctccccgggggtcgaggtcgtcagcagcttcgaccagatgggcatcaaggacgacctcctccgcggcatctacggctacggtttcgagaagccctccgccatccagcagcgcgccgtgctccccatcatcaacggccgcgacgtcatcgcgcaggcccagtccggtaccggcaagacgtc

SEQ ID NO: 14736 - DNA, 302 bp, Zea mays
cccaaatccacccgtcggcacctccgcttcaagatgcagatctttgtgaaaaccctgactggcaagactatcaccctcgaggtggagtcgtctgacaccattgacaacgttaaggccaagatccaggacaaggagggcatccccccagaccagcagcggctcatctttgctggcaaacagcttgaggacgggcgcacgcttgctgactacaacatccagaaggagagcaccctccaccttgtgctccgtctcaggggaggcatgcagatctttgtgaaaaccctgaccggcaagactatcac

SEQ ID NO: 14737 - DNA, 296 bp, Zea mays
gtttcactcgcaggcgaacttttcggcgcgacattaacgacgcggacccttcggggatgacagcgagcgcgtctctactgaaggtggaccggaattcttctttcctaacagctcaggcggcggcgctaggtcccaagaaggctttggaggctgctcaacctcccagggagattttgttggaagtgcacaatgcccagacgattgtggcggctgcccatggtcctgaggcggcaccgacggctgcccatgctcccgaggcgatgctcgcagcggactcgactctgatggcgggattc

SEQ ID NO: 14738 - DNA, 302 bp, Zea mays
gtcttggcccgcttctcccctgctgcggccatggcgacctccgccgcgctctcgaccgccgccaaccccacccagctctgccggtcccgcgctgcgctgggcaagccagtgaaggggcttggcctggggatggggcgggagcgcgcaagccagcggagcatcacgtgccaggcggcgagcagcatccccgccgaccgcgtccccgacatggagaagcggaagctgatgaacctcctcctcctgggcgccatatcgctgcccaccgtcggcatggtcgtcccctacggcgccttcttcgtccc

SEQ ID NO: 14739 - DNA, 298 bp, Zea mays
cccacgcgtccgcctttgagtaatgtgcagtttgttctatccagcgaaaccttaagcatggtattgacatgttggaaagtatccagtctggctcgaagacagcactaaaaggaaatcactgaaggatattgctacggaaaatgagtttgaaaagaggcttcttgcagatgttatccctccacatgaaatcggtgttacctttgaggacattggagctttagaaagtgtcaaagatactctgaaggagttagtgatgcttcctttgcaaagacctgaactttttaaccgaggacaactt

SEQ ID NO: 14740 - DNA, 295 bp, Zea mays
ctcgtggccaggctggtggactcacattctttgctccaagcgaagaaaggctagaatctggattgtacagcaggagctatcttgagaaccaaatggctgtagcccttggtggcagggttgctgaggaggtgatctttggccaagacaacgtgacaacaggagcttccaacgacttcatgcaagtgtcgcgtgtcgcaaggcagatggtcgaaagatttggattcagtaagaagatcggccaagttgcaatcgggggaccgggtggaaaccctttcttggggcaacagatgtcaag

SEQ ID NO: 14741 - DNA, 297 bp, Zea mays
cggacgcgtgggcggacgcgtgggcacgcatactgcatacacaacacagagcatcagaaggagctgcgatctgatcgacatggctgccgccaccatggctatcacctcccgcgcgctcatcggcaagccggcggctggcacgagggacgtcttcggcgagggccgcatcaccatgcgcaagaccgccgccaagcccaagccggcggcgtccggcagcccctggtacggtgccgaccgcgtcctgtacctgggcccgctgtccggctcgcccccgagctacctgaccggcgagttccc

SEQ ID NO: 14742 - DNA, 298 bp, Zea mays
gcttcccaccgatccatttcagccgccgccgcgcgtacaagcaggagcagcaaggatgccggctggccacgggctgcgctcgcggacgcgcgacctgttcgcgcgccccttccgcaagaagggctacatcccgctcaccacctacctccgcacctacaagatcggcgactacgtcgacgtcaaggtgaacggcgccgtccacaaggggatgccgcacaagttttaccacggccgcaccggtcgcgtctggaacgtcaccaagcgcgccatcggcgtcgagataaacaagcaggtgaat

SEQ ID NO: 14743 - DNA, 300 bp, Zea mays
gccagcctcgcccgatcgggatggcaagtgccgccagcgacaggtgtcatgcagcgcggccggggatgctgtggcggccccgaagcggaagaaggacgcgggctcatgaagacgctgtggctcggctcgctcttcggcctctggtacctgttcaacatctacttcaacatctataacaagcaggtactcaaggttttcccataccctataaacatcacagaagttcaatttgctgtcggaactgtagcagctctgttcatgtggatcactggtattattaagaggccaaagatttctgga

SEQ ID NO: 14744 - DNA, 334 bp, Zea mays
cggccccttctccggcgagcccccgagctacctcaccggcgagttccccggcgactacggctgggacaccgccgggctgtccgccgaccccgagaccttcgccaagaaccgcgagctggaggtgatccactcccgctgggccatgctcggcgcgctcggctgcgtcttccccgagctgctctcccgcaacggcgtcaagttcggcgaggccgtctggttcaaggccggctcccagatcttcagcgagggcgggctggactacctcggcaaccccagcctgatccacgcgcagagcatcctcgccatctgggcctgccaggtcgtgctcatgggt

SEQ ID NO: 14745 - DNA, 333 bp, Zea mays
caacaagagatctcgatggcctctgccaccgtgctcaagtcctccttccttcccaagaagtccgaatggggcgccaccaggcaggccgccgcgcccaggccgcccaccgtctccatggtcgtccgcgcctccgcctacgccgatgagctcgtgaagaccgcgaaaacgatcgcgtcgccggggcggggcatcctggcgatggacgagtcgaacgcgacgtgcgggaagcggctggcgtccatcgggctggagaacacggaggccaaccggcaggcgtaccgcacgctgctggtcacggcgccgggcctgggccagtacatctccggcgccatc

SEQ ID NO: 14746 - DNA, 332 bp, Zea mays
cgcgagtgagtgaacaccagccgtattgtcccgaccccgaccgatcctcgcctgctgcagccatggcgacctccgcggcgctctccaccgccgccaatcccacccagctctaccggtcccgcgctttgctgggcaagccggtgaaggggcttggcctgagcatgggccgcgagcgcgcccagcggagcattgtgtgccaggcggcgagcagcatctccgccgaccgcgtccccgacatggagaagcggaagctgatgaacctcctcctcctcggcgccatctcgttgcccaccgtcggcatggtcgtcccctacggcgccttcttcgtccct

SEQ ID NO: 14747 - DNA, 326 bp, Zea mays
tctggaagcaaattcctccaaacgagccctaccgggtgatactaggccatgtaagggacaagctgtacaacacacgcgagcgtgctcgccatctgctggcatctggagtttctgaaatttcagcggaatcgtcatttaccagtatcgaagagttccttgagccacttgagctgtgctacaaatcactgtgtgactgcggcgacaaggccatcgcggacgggagcctcctggacctcctgcgccaggtgttcacgttcgggctctccctggtgaagctggacatccggcaggagtcggagcggcacaccgacgtgatcgacgccatc

SEQ ID NO: 14748 - DNA, 334 bp, Zea mays
gtgaacaccagccgtattgtcccgaccccgaccgatcctcgcctgctgcagccatggcgacctccgcggcgctctccaccgccgccaatcccacccagctctaccggtcccgcgctttgctgggcaagccggtgaaggggcttggcctgagcatgggccgcgagcgcgcccaccggagcattgtgtgccaggcggcgagcagcatctccgccgaccgcgtccccgacatggagaagcggaagctgatgaacctcctcctcctcggcgccatctcgttgcccaccgtcggcatggtcgtcccctacggcgccttcttcgtccctgccggctccgg

SEQ ID NO: 14749 - DNA, 335 bp, Zea mays
ctctctccatctccctgctcctccgcctccttcttgatccagccaagccagggatcgccatgtcggactcggaggagcaccacttcgaatcgaaggccgacgccggagcgtccaagacctacccgcagcaggctggcaccgtccgtaagaacggcttcatcgtcatcaagaaccgcccctgcaaggttgtggaggtttctacctcaaagactggtaagcatggccatgccaaatgccactttgttgccatagacatattcaacgggaaaaagcttgaagatattgttccttcatcacacaactgtgatattccgcatgtgaaccgtactgagtac

SEQ ID NO: 14750 - DNA, 328 bp, Zea mays
gggcagcagagaaagcagctgagctgactgtggatctcatccgtatcgtatatacgtcgtcctgtttggatccaccgcgttttgctaattcccttcgaaccggccggtggccttcgttctcccaccaggcctgtctgtctgctgtatccgccagagcttccatggattccaccctcttcatcatcggcgtcataggcaacatcatctcagttctcgtcttcatatcgcctatcaagacgttctggaggatcgtgcggggcgggacgacggaggagttcgagccggcgccgtacgtgttgacgctgctcaacgcgctgctgtggctcta

SEQ ID NO: 14751 - DNA, 331 bp, Zea mays
  unsure (1)..(331): unsure at all n locations
cccacgcgtccggttcttgttcctggaacacatgtccagattgataagctcttggctgagagacggaagaaggctaagtatgctggtcgctaccgcattactgattcagattcattagatgctgcaatggaggcagctggccgaatacggctaactatagaagcgaactgntctcctggaccaccaatgttaaatctccgtaggcatggtgttaatggccgttggcatgaaatctctgataatgttgcaagtggaaatttccttggtgctaagaggcgaggggttgttggtggcattgattatggattcaccggtgaagttaaaaaaatag

SEQ ID NO: 14752 - DNA, 314 bp, Zea mays
ccagagagaaatttatgtgcatgtacaaaatcacaagaaaaacgaatacatcgattttagagcaagagagattattgagtccacggtgaatgaagcatgcaataaattacatgatgattgtggagattaagctattacaagattgatgttgtgacgctagcagctaacgtagcagctaggcagcagcctcacttcacaactacaaatcacacaggagcatggggtccttgagcagactggcctcactcatttcacctcgaggatctcgtccaaggcgtagttgttggtagacacgccggcgtagttcaccttgt

SEQ ID NO: 14753 - DNA, 329 bp, Zea mays
agtacgtggaggagcagccatggcttcatcggtggccgccgcggcgagcacattcctgggcacccgcctggcggacccggcgccacagaacgggcgcatcgtggcccggttcgggttcgggttgggcggcaaggcgaagctgctccgaagaaggtggcgaagacatcgacctcctctgaccggccgctgtggttccccggcgccgtggcgccgactacctggacggctcgctggtcggcgactacgggttcgacccgttcggtctcgggaagcccgtggagtacctgcagttcgagttggactcgctggaccagaacctggccaagaat

SEQ ID NO: 14754 - DNA, 145 bp, Zea mays
ggcggtgctcttctgtgcggccgacgaggctgcgctttgccggccttgcgacgagaaggtacacatgtgcaacaagcttgctagtcggcatgtgagagttgggcttgcagaccctaataaactggcacgttgtgatatatgcgag

SEQ ID NO: 14755 - DNA, 329 bp, Zea mays
  unsure (1)..(329): unsure at all n locations
gcctcatccccttgcccacttctacagcccctctgctgcagcaagaaggaaagaagctagcgcttatagcttgtcagccatggccaccgccgccgcgtctagcctcctcaagtcctccttcgcgggctcccggctcccggccgccacgcggaccacaccggcgtccctcgtggtggccaccggctcgcgcggcgccggcgcggggctcatctgcgcgtccatgtccatgtcctcctccaacccgccctacgacctgacgtccttccggttcagctccatcaaggagtccatcgtgtcncgcgagatgacccgtcgctacatgacggaca

SEQ ID NO: 14756 - DNA, 328 bp, Zea mays
  unsure (1)..(328): unsure at all n locations
gctcagataaactggaatggaaagacattaaaatgggaacttgtggacatgggcagcttgaatggaactttcttgaactcccaggcggttcaccatccaagtgctgggtctaggcattggggtgaacctgctgaacttgcacatggtgatattataactctagggacttcatctaaactgtctgttcaaattttactgcaaaatcaacgagttcctgctggtgttggtatggcatccgatccaatggtggcacgtagaagtgganagaaacttccaatggaagacataagcttttgccagtgtcctctgcaaggtgttgaacattttg

SEQ ID NO: 14757 - DNA, 326 bp, Zea mays
cggacgcgtgggctgacgcagatgacctttgggtacagcagggatgatgtggggaagttcattcccgtctatcttgctcagggcatcctccaacatgaccccatcgaggtcctggaccagaggggagtgggcgagctggtgaagtttgctacagagaggggccgcaaagctaggcctaacttgaaggtgggcatttgtggagaacacggtggagagccttcctctgtggccttcttcgcgaaggctgggctggattacgtttcttgctcccctttcagggttccgattgctaggctagctgcagctcaggtgcttgtctgaggctg

SEQ ID NO: 14758 - DNA, 327 bp, Zea mays
cgtgatccgaggtggggccggtgctacgagagctacagcgaggaccaccgtatcgtgcaggccatgactgagctcatcccgggcctgcagggcgacgtcccgcagaacttcaccagcggcatgcccttcgccgccggaaaggacaaggtcgcggcgtgcgccaagcacttcgtcggcgacggtggcacgcagaacggcatcaacgagaacaacaccatcatcgaccggcagggcctgatgaccatccacatgccggcctacctggacgcgctccgcaagggcgtctccaccgtcatgatctcctactccagctggaacgggctcaag

SEQ ID NO: 14759 - DNA, 332 bp, Zea mays
  unsure (1)..(332): unsure at all n locations
cgtccatgctctccgctaccaccgtgccactccagcaggggggcggcctgtccgagttctccgggctcaggagctccgcgtcgctgcccatgcgccggaatgccacctccgacgacttcatgtccgccgtctccttcaggacccacgcggtcggcacgagcggcgggtcgcggcgggcgccgacggaggcgaactgnaaggtggccatcaacgggttcggccgcatcgggcgcaacttcctgcggtgctggcacgggcgcggcgacgcctcgcccctcgacgtcatcgccatcaacgacaccggcggtgtcaagcaggcgtcccacctgctc

SEQ ID NO: 14760 - DNA, 323 bp, Zea mays
cacacaccacacctcccgaactccgaactacaagtttcgcttctcgtcgcgacgactgggcgagaccgccgccgccgccgccgcctgagttctttagaaatggctgatggtgaggacatccagcctcttgtctgcgacaatggcactggaatggtcaaggctggttttgctggcgacgatgcaccaagggctgttttccctagtattgttggccgtcctcgccacactggtgttatggtagggatgggacagaaggatgcgtatgttggcgacgaggcacagtccaagagaggtattctcacgctcaagtatccgatcgagca

SEQ ID NO: 14761 - DNA, 324 bp, Zea mays
cccacgcgtccgcccacgcgtccgcggcaggagtcggagcggcacaccgacgtgatcgacgccatcaccacgcacctcggcatcgggtcgtaccgcgagtcgcccgaggacaagaggcaggagtggctgctgtcggagctgcgaggcaagcgcccgctgctgcccccggaccttccccagaccgacgagatcgccgacgtcatcggcgcgttccacgtcctcgcggagctcccgcccgacagcttcggcccctacatcatctccatggcgacggccccctcggacgtgctcgccgtggagctcctgcagcgcgagtgcggcgtg

SEQ ID NO: 14762 - DNA, 321 bp, Zea mays
gagaggctggccgacctgcagtcggcgcccgcgtccgtggagcgcctcttctcggtggactggtacatggaccggatcaagggcaagcagcaggtcatggtcggctactccgactccggcaaggacgccggccgcctgtccgcggcgtggcagctgtacagggcgcaggaggagatggcgcaggtggccaagcgctacggcgtcaagctcaccttgttccacggccgcggaggcaccgtgggcaggggtggcgggcccacgcaccttgccatcctgtcccagccgccggacaccatcaacgggtccatccgtgtgacggtg

SEQ ID NO: 14763 - DNA, 194 bp, Zea mays
gcctgcggtggaacgtgcaggcggagctggtgcactgccggtgggcgatgctcggcgcggcgggtatcttcatcccggagttcctgaccaagatcggcgtcctcaacacgcccttctggtacaccgccggcgaacagcagtacttcaccgacaccaccaccctcttcatcatcgagctcatcctcatcggctgg

SEQ ID NO: 14764 - DNA, 138 bp, Zea mays
cccaacgagaagagcggcggcgcgggcggacaaggagcaggcggaggaggagctgtgccaagccacaatgggtatctcacgcgactcgatgcacaagcgccgtgccaacggtggaaagctgaaggcctggaggaagaa

SEQ ID NO: 14765 - DNA, 128 bp, Zea mays
cccacgcgtccgagcgcttcgcctaagactccttccggcggttcctcgacatgttcggcaacgtcgtcatggacatcccccggtcactgttcgaagagaagcctgagcacatgaagggatccaaaggg

SEQ ID NO: 14766 - DNA, 302 bp, Zea mays
gcaggtgctcaacgagtgcctcaacgagatctcgcgcgcgctcctacaggccgatgtccagttcaagatggtccgcgcacatgcaggctaacatcaagcgcatcgtcaacctcgaggcgcttgccgcaggagccaacaagcgccgcatcatgcggcaagcgggcgccacgggaacccgggaccaggtagaacccgggaaggcctctttcactcccaaaaagggcaagccaagcgtagtcatgttcgttggtctgcaaggttctggtaaaactactacttgtacaaaatatgcttattatcat

SEQ ID NO: 14767 - DNA, 306 bp, Zea mays
ctgaggtccgtgatcaaactttgagcagaataaagagcaacattgaactcatggtagcaacaaatggtggaaatagggtggtggtgatcccacactccatgggggtcctctattttttgcattttatgaaatgggtcgaagcacctcctcccatggggggtggcggtggtccagactggtgtgagaagcatattaaagctgtaatgaatattggaggacctttcttaggagttcctaaggctgttgctggcctttcctcactgaagccaaagatgttgccgttgctagagctatcgctcctgatgt

SEQ ID NO: 14768 - DNA, 130 bp, Zea mays
aatctttgaggtcaaggccacagctggtgacacccatcttggtggtgaggactttgacaacaggatggtcaaccacttcgtccaggagttcaagaggaagaacaagaaggatatcactggcaaccccagg

SEQ ID NO: 14769 - DNA, 129 bp, Zea mays
ctccgcgacgcgtggcaaggcgaagatcgacatgtactcgccggccttctatgccgcctgccctgccggacgaatcgccagccgccggctcacccacatggccgtcatgcctctcgacctcgtcaagtg

SEQ ID NO: 14770 - DNA, 308 bp, Zea mays
cctccctctctgcctgaccagctaggatcagcggaagcagcaatggtgatggcgtcgtcgagcgggctgaggagctgcagcgccgtgggcgtgcccagcctgctggctccgtcgtcccggtccggccgcctggcgccgttctgcgccatggtcagctgtggtggggaggtgtgtgcgtccgccgtcgggtgtgggtgcggtcatccacgccctgcccacctcgacggctcctctcccggggacttcggcttcgatccgctgggactcgcgaccgtgccggagaacttcgagcggtttaaggagtcaga

SEQ ID NO: 14771 - DNA, 130 bp, Zea mays
gcttggcttccgtgggtgcaggcttggtatatcgtaccctgaattgacagagatgcaagcccgggccatttttgaagctgctatagcaatgaccaaccagggtgttcaagtgttcccagagataatggtt

SEQ ID NO: 14772 - DNA, 127 bp, Zea mays
ccacctccaaagccactcccaaacccccgcttccagaaccttctcgaagctccccgccgcctcctccactcgcaccgatggcgaaggaaccaatgcgcgtgctcgtcactggcgccgcaggacaaat

SEQ ID NO: 14773 - DNA, 291 bp, Zea mays
caagactcctattttcatgcgggagatagaggttatcataaactttgggatagtcggctgttcaactatgctaactgggaggtattaaggtttcttctttctaacctgagatattggttggatgaattcatgtttgatggcttccgatttgatggggggacagcaaggccgtatcatcaccatggtatcaatgtggggtttactggaaactaccaggaatatttcagtttggacacagctgtggatgcagttgtttacatgatgcttgcacaacatttaatgcacaaactc

SEQ ID NO: 14774 - DNA, 309 bp, Zea mays
ccacagcctcatccccttgcccacttctacagcccctctgctgcagcaagaaggaaagacgctagcgcttatagcttgtcagccatggccaccgccgccgcgtctagcctcctcaagtcctccttcgcgggctcccggctcccggccgccacgcggaccacaccggcgtccctcgtggtggccaccggcccgcgccgcgccggcgcggggcccatctgcgcgtccatgtccatgtcctcctccaacccgccctacgacctgacgtccttccggttcagccccatcaaggagtccatcgtgtcccgcgag

SEQ ID NO: 14775 - DNA, 298 bp, Zea mays
acaccaaggagagtacgtggaggagcagccatggcttcatcggtggccgccgcggcgagcacattcctgggcacccgcctggcggacccggcgccacagaacgggcgcatcgtggcccggttcgggttcgggttgggcggcaaggcgaagctgctccgaagaaggcggcgaagacaacgaccgcctccgaccgggctgcgagggtccccggcgccgaggcgcacgaccacctggacggcacgctggtcggcgactacgggttcgacccgttcggtctcgggaagcccgtggagtacct

SEQ ID NO: 14776 - DNA, 122 bp, Zea mays
cggacgcgtgggtggacacggtgctcaacctggggctcaacgacgaagtggccgccgggctggcggccaagagcggggagcgcttcgcctacgactccttccgcaccttcctcgacatgttc

SEQ ID NO: 14777 - DNA, 124 bp, Zea mays
gttgacccgaagaagttcagcgttctgggtaactggcagcgtgattactcaatggaatacatcctaacccatctcaagaaagagatgacatcgccacagaaccgcaagctagttcagcctccgg

SEQ ID NO: 14778 - DNA, 130 bp, Zea mays
ctccgcgcgacgcgatgggcccgcgacaagatccccttcgtgcccatctctgggttcgagggtgacaacatgatcgacaggtcgacgaacctggactggtacaagggccccaacctccttgaggcgctgg

SEQ ID NO: 14779 - DNA, 290 bp, Zea mays
cttatctacgagttcatgccccatggatctctcgacaagtacatcttctcgtcggagaagagtttctcatgggacaaacttaatgagatcgctctgggcattgctagaggtctcaactacctacatcacgggtgcgatatgcagattgtacacttcgacatcaagccacacaacatccttcttgacagcaactttgttccaaaagttgctgattttgggcttgccaaactgttcccaagagacgatagtttcgtgccactgagcgctatgcggggaacgataggctatat

SEQ ID NO: 14780 - DNA, 304 bp, Zea mays
gagaaagtcctcattcagtttgaggactttgccaatcacaatgcctttgatttgcttgaaaaatatagcaagagccatcttgttttcaatgatgatatccagggcacagcatcagtggtccttgcaggactgttagcagcactcaagatggttggtgggaccctggcagagcagacgtatttgttccttggtgctggggaggctggaactggtattgcagaacttattgctcttgagatttcgaaacagacgaatgctccaattgaagagtgccgcaagaaggtttggctggtggactcaaagg

SEQ ID NO: 14781 - DNA, 299 bp, Zea mays
gcaaccggtccaacactttcacgctcaggcgctcagctctagcaatggctgcctccaccatggcgatctcctccacggcgatggccggtacccccatcaaggtgggctccttcggcgagggccgcatcaccatgcgcaagaccgtgggcaagcccaaggtggcggcgtccggcagcccctggtacggccccgaccgcgtcaagtacctcggccccttctccggcgagcccccgagctacctcaccggcgagttccccggcgactacggctgggacaccgccgggctgtccgccgacccc

SEQ ID NO: 14782 - DNA, 297 bp, Zea mays
gcgggctgctccgcaaggcgcaggtggaggagttctacgtcatcacgtggacgtcccccaaggagcaggtgttcgagatgcccaccggcggcgcgccatcatgcgggagggccccaacctcttgaagctggcgcgcaaggagcagtgcctggcgctcggcaccaggttgcgctccaagtacaagatcacctaccagttctaccgcgtcttccccaacggcgaggtgcagtacctccaccccaaggacggcgtctacccggagaaggtcaaccccggcagggagggcgtcggccagaa

SEQ ID NO: 14783 - DNA, 296 bp, Zea mays
ggacgcgtgggcagcgccgtgcccgggatgaaggcgctcgacatgaacgccgccgaggacgagatcgtgcgcctcacgcgcgacgtcgtgcccggcatgatcgtcaccgggatggaggtcgccgagatcgacggcgccccgaggatgggcccgacgttcggcgccatgatgatctccggccagaaggcggcgcacctggcgctgaaggcactgggcaggcccaacgccgtggacgggaccatccccgaggtgtcgccggcgctgcgcgaggagttcgtgattgcgtccaaggacga

SEQ ID NO: 14784 - DNA, 296 bp, Zea mays
ctcctcacggcccccaagccctccgccgcggcctccgacctccccgagggcgctcagtggcgctacagcgagttcctctccgccgtcaagcgcggcaaggtcgagcgcgtgcgcttttccaaggacggcggtctgctccagctcaccgccgtcgacggccgccgcgccaccgtcgtcgtccccaacgaccccgacctcatagacatcctcgccaccaacggcgtcgacatctccgtctccgagggcgagtcggcgggcccgggcggcttcgtcggcttcgtcggcaaactcctctt

SEQ ID NO: 14785 - DNA, 296 bp, Zea mays
aggagatggcgcaggtggccaagcgctacggcgtcaagctcaccttgttccacggccgcggaggcaccgtgggcaggggtggcgggcccacgcaccttgccatcctgtcccagccgccggacaccatcaacgggtccatccgtgtgacggtgcagggcgaggtcatcgagttctgcttcggggaggagcacctgtgcttccagactctgcagcgcttcacggccgccacgctggagcacggcatgcatccgccggtctctcccaagcccgagtggcgcaacctcatggacgagatg

SEQ ID NO: 14786 - DNA, 300 bp, Zea mays
ctcagtcattgattcagtgcttgaaggatttgctagattgaagggcctggatgggaagtatgcactagcaaagcctttatctcaacattctgtaaagcaaacatatcgatctgttattcctaatggacgagtcagaaagtatgaacttgttgatttgccacaagattcaagaccactgctggtattcatcaatggcaagagtggaggtcgaaatggaccttctcttagaagaaggctgaacatgttgttgaatccaatacagatatttgagctaagtgcttctcaggcacctgaagttgg

SEQ ID NO: 14787 - DNA, 288 bp, Zea mays
cggacgcgtgggcggacgcgtgggttttttttttttttgtacgggaatggagctctccttagtctttgttctcatgtacagtcgaaggaacacacaaacgtgctcagcccggcctggcctagccaagctctctacgtagtgcgtgcatcccatcccatcgaagaaataaaattacatcatcatgcgacgctgaaggaggaggcggccttctcgactcccttcctggcgcccttgaaccacctcttgtcgccggcctgcgccttgcagatgtagagcttgccgtcggag

SEQ ID NO: 14788 - DNA, 289 bp, Zea mays
acattaacgtatttgatgttgttactgatatagatatcctgaaacaatgttctcaaatgcaccaatcaggctcatcggcggcgatgtggcgcccgaggattggcaaggaggcgatggcgcggtggcctataggtttgggcctggcccggcagtgctcaatctgacctacacagggaatgagacgatggttactattcagaatgtcatttcggtgattgaagggggagaagaacctgaacggtatgtaatccttggaaatcaccgtgatgcatggacatttggggcagtt

SEQ ID NO: 14789 - DNA, 294 bp, Zea mays
gaagtttcagatcctcgcatcgtccgcaccttatcctctcgactttacagtacctgctctcagctcctccctatctcaatggcatccgcgaatgccatctccaccgcctcccccttccggcccctctctcagggcagggcgacgaggtcacagcggttcgtggtgcgtgcgaacgccaaagacattgcctttgaccagaaatccagggtagcgctgcaggccggcgtcgagaagctcgcaaacgccgtcggtgtcaccctcgggccacgagggaggaatgtggtgctcgatgag

SEQ ID NO: 14790 - DNA, 294 bp, Zea mays
cggacgcgtgggggggactactaccacttcgacccgacccctgttgccaaggcgacctggcgcgaggccagggagtgcatctacgtcgagcccgaggaccgctaaggcgtcttctggtacaacaagaagttctagccgccgccgctcgcagagctgagaggacgctaccataggaatgggagcaggaaccaggaggaggagacggtactcgccccaaagtctccgtcaacctatctaatcgttagtcgtcagtcttttagacgggaagagagatcatttgggcacagagacgaa

SEQ ID NO: 14791 - DNA, 296 bp, Zea mays
catcgttgttgaccatggcactgaatgatgccatgacatacgacaagaccacaaaaactggaggcgcaaatggatctatcaggctagaaacaagcagacctgagaacagtgggctctcttccgcgttggatttgctgactgaagccaaaaaggagatcgattccttttccaagggaggtcccatttcgtttgcagatctgatccagtttgcagcacaatcagcactgaagagatcgtttcttgacgctgccattgccaaatgtggcggaaatgaagagaagggaagaacactgtac

SEQ ID NO: 14792 - DNA, 291 bp, Zea mays
gcttggagtttgtggtgtggtgacacttaatgaatcatacgagaggcttgttcccacatccctgtacgaggctcatggaattgaaaatctggtgctaccaacaagggattacctttatgcgccttcatttgttaacctttgtgaagctgctgactttatccacagaaacgcttcatgtgggaaattgacgtatgtgcactgcaaagctggacgagggcgtacactacagttgtcatttgctatttggtgcaatataaaaatatgactcctgctgaagcttatgaacatgtc

SEQ ID NO: 14793 - DNA, 293 bp, Zea mays
ccgtctcctacccctcgttcctcgccgccgtccgctccctcgcggggggcctctggtccgttctcggtctccgccccggggacgtcgtcctcgtagtctccccgtcccgcatcgacgtccccgtcatagacttcgcgctcatgtccatcggcgctgtcgtctcgcctgccaacccggcgtccaccgccgaggagtacacgcacatggtcgcgctctccagaccggtcgtcgcgctcgcggctcccgaggtggccgctaagcttccgaggaacctcaggtgcgttgatcatcgg

SEQ ID NO: 14794 - DNA, 291 bp, Zea mays
cccacgcgtccggcaagcaagcagcgagtacatacatactaggcagccaggcagccatggcgcccaccgtgatgatggcctcgtcggccaccgccgtcgctccgttccaggggctcaagtccaccgccagcctccccgtcgcccgccgctcctccagaagcctcggcaacgtcagcaacggcggaaggatccggtgcatgcaggtgtggccggcctacggcaacaagaagttcgagacgctgtcgtacctgccgacgctgtcgacggacgacctgctgaagcaggtggact

SEQ ID NO: 14795 - DNA, 288 bp, Zea mays
tcaccctggagctgttcatgaagctcctctactacacgcccatggcggtgctcgcctccatcatcctgtcggctcttccgggactgatcgacatcaaggaggcctgcagcatatggaagatcgacaagatggatttcctcacctgcctcggtgcgtttgttggcgtcctgtttgggtcggtggagattgggcttgcagttgcacttggcatttccttcgcaaagatcatcatacagtcgcttcggcctcaggtggagatccttggcaggctacaagggacagatatct

SEQ ID NO: 14796 - DNA, 290 bp, Zea mays
agcgacacgatcgcgagcgcacgcacgtaagcacgttgtcggaagctcaagttagaagaagcaccagtgcctgatcgatggcggcccaggctctcctctccggccggcagctgctgggccgccccgtgcagtcggccgtctctaggtcgtcggcgaggaaggcgcccttcgtcgtcagggccagctccagccctccagccaagcaaggtgccgacaggcagctgtggttcgcgtccaagcagtccctctcctacctcgatggcacgctgcccggcgactatggcttcgac

SEQ ID NO: 14797 - DNA, 290 bp, Zea mays
cccacgcgtccgcaacccctgtcgcaccgcagccgccggccatggcctgcctcaccgacctcgtcaacctcaacctctcggacaacaccgagaagatcatcgcggaatacatatggatcggtggatctggcatggatctcaggagcaaagcaaggaccctctccggcccggtgaccgatcccagcaagctgcccaagtggaactacgacggctccagcacgggccaggcccccggcgaggacagcgaggtcatcctgtacccgcatgccatcttcaaggacccattcagg

SEQ ID NO: 14798 - DNA, 287 bp, Zea mays
cccacgcgtccgcccacgcgtccgcccacgcgtccggttcgcgtccaagcagtccctctcctacctcgatggcacgctgcccggcgactatggcttcgacccgctgggcctctcggacccggacgcaccgggggcttcatcgagcccaagtggctggcctatggcgaggtgatcaacggccgctacgccatgctgggcgcggtgggcgccatcgccccggagatcttcggcaagatgggcatcatccccccggagaccgcgctgccgtggttcaagacgggcgtcat

SEQ ID NO: 14799 - DNA, 289 bp, Zea mays
atctacgtcaccccgataaagcgcttcctccaggcgctgtgggcggccggggcgctcggctccgtcgggacctacctcgtcgccgcccgcccgctggatgagggcctcgtgcagtacgtgctggaccaccccaccgcgctctggttcgtcggccccacgttcgccgcgctcactggcctcgtcttcaaagaaggtctctgctatgggaaactggaagctggcatcttgacgtttcttatccctgggcttcttcttgggcatttgtctggtttaatggataacagcacaa

SEQ ID NO: 14800 - DNA, 114 bp, Zea mays
cgatccattcctgaagcaggggctggtgctgcgcaacccctacatcaccaccctgaacgtgttccaggcctacacgctgaagcggataagggaccccaacttcaaggtgacgcc

SEQ ID NO: 14801 - DNA, 97 bp, Zea mays
cccacgcgtccgcggacggtgggctgctggcggccggatcaccatgggcaacgacctgtggtacggcccggaccgcgtcaagtacctggggcccttc

SEQ ID NO: 14802 - DNA, 320 bp, Zea mays
cagagcaggcgcacggcgcaccgcacacctcactgccgctcccttctcgtctcgtctcctctcctctcctcggcggatccggcaccgacccaccgcccctctgctcgctccttccgccggaatcgctgctcctctctgtgtgctgtcgatttgtgcggcgactgttagtttggttcggtcccatccttctgttgatcaatggctgacggtgaggatatccagccacttgtgtgtgacaatggcactggaatggtcaaggctggctttgctggcgatgatgcgcccagagcagtgttccctagtatagtcggccgccctcg

SEQ ID NO: 14803 - DNA, 318 bp, Zea mays
cctcaacgtcatattcaacatcctcaacaagaagatctacaactacttcccctatccatactttgtgtccttgatccatctagtagtgggtgtcgtatactgcctcatcagctggagtgtcggtctccccaagcgagcgcctatcaatggcacgctcctgaagcttctctttccagtcgccctgtgccatggtattggtcacatcactagcaatgtgtccttcgctgctgttgcagtctcatttgcccacactatcaaagctctggagcccttcttcagcgcagtgcctactcagtttatccttggacagcaagttcc

SEQ ID NO: 14804 - DNA, 315 bp, Zea mays
ccaagcccgagtggcgcaactcatggacgagatggcggtcgtggccacggaggagtaccgctccgtcgtcgtcaaggagccgcgcttcgtcgagtacttcagatcggctacaccggagaccgagtacgggaggatgaacatcggcagccggccagccaagaggaggcccggcggcggcatcacgaccctgcgcgccatcccctggatcttctcgtggactcagaccaggttccaccttcccgtgtggctgggagtcggcgccgcctttaagttcgccatcgacaaggacgtcaggaacttccaggtcctcaaaga

SEQ ID NO: 14805 - DNA, 317 bp, Zea mays
ggcttggcttggtgggaagaagacaaacgccggcacgcgcacgcagacacgatggcgatctgcagcgcgcacactaccacctccctgcgctccccatgcacgaccgtctcgaacgcaggtctgaggcagaagcaagtcatcttcgtcaccagcaacaggaggagcggcggcggcaggaggcacggaggggcaaggagcttccaggtctcgtgctccgtcgacaagccggtggtgattggcctggcggcagactcagggtgcggcaagagcaccttcatgcgccggctcaccagcgtcttcggtggcgccgcggaccg

SEQ ID NO: 14806 - DNA, 313 bp, Zea mays
gccaagaaccgggagctggaggtgatccactcccgctgggccatgctgggcgcgctcggctgcgtcttcccggagctgctcgcccgcaacggcgtcaagttcggcgaggccgtgtggttcaaggccggctcccagatcttcagcgagggtggactggactacctcgggaacccgagcctcatccacgcgcagagcatcctcgccatctgggcctgccaggtcgtgctcatgggcgccgtcgagggctaccgcatcgccggcggcccgctcggcgaggtcgtccgaccgctctatcccggcggcagcttcgacc

SEQ ID NO: 14807 - DNA, 287 bp, Zea mays
agccaccgagctacctgacgggcgagttcccgggcgactacggctgggacaccgcggggctgtcggcggacccggagacgttcgccaagaaccgggagctggaggtgatccactcccgctgggccatgctgggcgcgctcggctgcgtcttccccgagctgctcgcccgcaacggcgtcaagttcggcgaggccgtgtggttcaaggccggctcccagatcttcagcgagggcgggctggactacctcgggaacccgagcctcatccacgcgcagagcatccttgct

SEQ ID NO: 14808 - DNA, 320 bp, Zea mays
gccaaaaggcatcaccgccgcgacgacgatggcagcctcgctccaagccgcggccaccctgatgcagccggccaagatcggcggccgggcgccctttgcctcgctgccgtcccgcccgtcgtcgcaactcgcctgcagggcgttcggcgtcgacgccggcgccgccaggatcacgtgctccctgcaggacgtcgccagcaggtgcgtcgacgccgcgaactcgccggcttcgcgctcgccacctcggcgctcctcgtctcgggcgcgacgcggagggcacgcccaagaggctgacctacgacgagatccagagcaaaacg

SEQ ID NO: 14809 - DNA, 332 bp, Zea mays
gaagaaggagcggctgcagctggcggagatcaagcacgcgcggctcgctatggtcgccttcctcggcttcgccgtgcaggccgccgccaccggcaaggggccgctcaacaactgggccacccacctgagcgacccgctccacaccaccatcttcgacacgttcggagggtcctcttaagcccgccattgctccgccccgtccatcgaccggccggaacgtgttcttggattaattaactacgatctctatgagcctggggatggatcaacccgtcgtgcgtggtctcgttttgtgatgagtgggagagagaggatggcaagatcgatccttt

SEQ ID NO: 14810 - DNA, 314 bp, Zea mays
cgcgagtgagtgaacaccagccgtattgtcccgaccccgaccgatcctcgcctgctgcagccatggcgacctccgcggcgctctccaccgccgccaatcccacccagctctaccggtcccgcgctttgctgggcaagccggtgaaggggcttggcctgagcatgggccgcgagcgcgcccagcggagcattgtgtgccaggcggcgagcagcatctccgccgaccgcgtccccgacatggagaagcggaagctgatgaacctcctcctcctcggcgccatctcgttgcccaccgtcggcatggtcgtcccctac

SEQ ID NO: 14811 - DNA, 310 bp, Zea mays
cccacgcgtccgcccacgcgtccgaagagcacagaagaagtctgaaagagagatggagttgaaggagaaatttgaaaagaatgttcaagaggtagctgagaagttccaaaacacaaacttgtatttgaagaacttagaggagaacattgatgatgagaaattgcgtgaactctttgctgagtatggcaatattacttcctgcaaggttatgcgggattcgaatggtgtcagcagaggttctggatttgttgctttcaaatctgctgaagatgctaaccgagctcttacggagatgaatggcaaaatggtt

SEQ ID NO: 14812 - DNA, 306 bp, Zea mays
cggccggttcaccgtcaaggccatccagcccgagaaggcaacgtaccaggtggtgcagcccatcaacggcgaccccttcatcggcagcctggagacgccggtcacctcgagcccgctcgtggcgtggtacctctccaaccttccggcctaccgcaccgccgtgagcccgctgctgcggggcgtcgaggtcggcctcgcgcacggctacctcctcgtggggcccttcgcgctcacgggcccgctccgcagcacgcccgtgcacggccaggccggcgcgctcggcgcgccggcctcgtcgccatcctc

SEQ ID NO: 14813 - DNA, 306 bp, Zea mays
agctcccacgctcaccgacgccacagcttgtgcgcgcgcaatggcactcgtgtccgcctcctcgtcctccaccaccgccgtcgcggcgctccccaggaatgggcagcagcgggcgtcgtcgtcgttgttctcctcctcctcctcttcctccttcctcgtcggcaagacgctgctgaggcaggccgaggcagcccggccgtcgttcgccgtgcgcgccgcggcggattccgacaggccgatctggttccccggcagcacccctccgccgtggctcgacggcagccttcccggcgacttcggctttga

SEQ ID NO: 14814 - DNA, 249 bp, Zea mays
tggaagcaaattcctccaaacgagccctaccgggtgatactaggccatgtaagggacaagctgtacaacacacgcgagcgtgctcgccatctgctggcttctggagtttctgaaatttcagcggaatcgtcatttaccagtatcgaagagttccttgagccacttgagctgtgctacaaatcactgtgtgactgccgcgacaaggccatcgcggacgggagcctcctggacctcctgcgccaggtgttc

SEQ ID NO: 14815 - DNA, 311 bp, Zea mays
ctgcaattgcgatattctcgtgatcttatctatacaaaggcaggacctgttctgattgctgtcaatccattaaaagaagttgctctctatgggaagtcttcaatcatgcaatacaagcaaaaggccaacgatgacccacatgtgtatgcagttgctgatttggcatttaacgagatgctgcaagatggcataaaccaatctataataataagtggtgaaagtggatcaggaaaaaccgagacagctaaaattgcaatgcaatatttgtctgatcttgggggtgctagtggtacggagtctgaggttcttca

SEQ ID NO: 14816 - DNA, 301 bp, Zea mays
ccgaggacggtttcagctatgccagttatgaggttatgggcttggatgccactgctctgtcttatggtgaccttgtcaagagggtccttcggtgctttggcccctcggagttttccgttgccgtgaccatcttcggcgggcgtggccatgccgggacatggggaaaggcacttggtgcagaggtctatgactgcaacaacatggtggagcaggagctgcctggaggcgggctcctcgtgtaccagagcttctgtgctgctgaagacgctgttgctacctcgcccaaatctgttttccactg

SEQ ID NO: 14817 - DNA, 302 bp, Zea mays
cggacggtgggcaactccctggcgcactcggcaagtacacctccgacggcgaggccgccgaggccaaggagggaatgttcgtcaagaactacagctactaattaatcgcccggccatcacccgggataccgccgcccctccgagagatacgtgtgtactgatcatggttaagcacgtactccgatccattcccatcccatgaagccatgataatgatgatatgatccatggaccatgcatggtgctctggtcgatgccgtacgtgtgtccctgatacaatactattttagtactgatgctag

SEQ ID NO: 14818 - DNA, 302 bp, Zea mays
cgctggtcggcgactacgggttcgacccgttcggtctcgggaagcccgtggagtacctgcagttcgagttggactcgctggaccagaacctggccaagaatgaggccggcggcatcatcggcacccggttcgagtcctccgaagtcaagtccaccccgttgcagccctacagcgaggtgttcggcctccagcggttccgcgagtgcgagctcatccacggccgctgggccatgctcgccaccctcggcgccctctccgtcgagtggctcaccggcgtcacctggcaggacgccggcaaggtg

SEQ ID NO: 14819 - DNA, 302 bp, Zea mays
cggacggtgggcgtttgcctcttctccctcttgccggtcccgaataaagagcagcagcgcaagaggtcggtagagcgagaagaaggcaatggcggccgagagcttacttttcacctcggagtccgtgaacgaggggcaccccgacaagctgtgcgaccaggtgtcggacgccgtgcttgacgcatgcctcgcgcaggaccccgacagcaaggtggcctgcgagacctgcaccaagaccaacatggtgatggtgttcggcgagatcacgaccaaggcgaccgtggactacgagaagatcgtgc

SEQ ID NO: 14820 - DNA, 300 bp, Zea mays
gtgggacaggcgttgcctttcaggggaaaagtcagcaggtattttgacaggtcatttagatggagttacatttatcgatagccgtggtgatgggcgttatttcatctccaattgcaaggatcagagaatcaaactttgggacatcaggaaaatgtcttccgtcgtgagatctcgcccagtgagtctagtggactgggactataggtggatgccatttccatcagaagctcataatcttaagcatccaggtgatcagtctgtggccacatacagaggccattcagttctgcgaacacttat

SEQ ID NO: 14821 - DNA, 299 bp, Zea mays
ggagaccttcgccaagaaccgcgagctggaggtgatccactgccgctgggccatgctcggcgcgctcgggtgcgtgttcccggagctgctcgcccgcaacggcgtcaagttcggcgaggcggtgtggttcaaggcgggctcccagatcttcagcgagggcgggctggactacctcggcaacccgagcctggtccacgcgcagagcatcctggccatctgggcgtgccaggtggtgctcatgggcgccgtcgaggggtaccgcgtcgccggcggcccgctcggagaggtggtcgacccgc

SEQ ID NO: 14822 - DNA, 297 bp, Zea mays
cccacgcgtccgatggctcccacgcttgagctgaggcagcaggcgctcgaccgtctcttgccgtatcagaggtctgacttcgaaggcattttccgtgctatggatggactcccggtgaccatccgactcctggaccctcccctccacgagttccttccagaagggaacatcgaggacattgtaagtgaattatgtgctgagacgggagccaaccaggaggatgccctcgcgcgaattgaaaagctttcagaagtaaacccgatgcttggcttccgtgggtgcaggcttggtatatcg

SEQ ID NO: 14823 - DNA, 308 bp, Zea mays
cgctgctcatgagcaccacggcggcagcggtgaccaaggcgcgggagagcccgtacctgctggcgctggcggccaacccgaccttcgtgtcggggctgctggcgtgggccgcggctcaggccgccaaggtccttctcacctccgtcgtcgagcggcgctgggacctgcggatgctcttcagctccggcgggatgccgtcctcgcacaccgcgctctgcaccgcgctcactgcttccgtcgcgctctgccatggtgtcagcgacgcgctcttccctgtttgtctcggtttcactctgatagttatgtac

SEQ ID NO: 14824 - DNA, 326 bp, Zea mays
aaggaactctggatactctgaacaggtagtggagttggattttctttatcctagtgaaggtattcaccgacgatgggagaacggatatagaataacttctacagcagctactggcgatcaagctgctttcatattgagtatacctaaaagaaagttaatggatgagacacaagaaactcttagaacatctgcttttccaagcaaccatgtgaaggagaaatgggccaagaacctttacattgcttcaatatgctatggccggacagtgtcatgaggcttgctcggctgcatccctagttgggaagagcatgttctgatgagtatat

SEQ ID NO: 14825 - DNA, 327 bp, Zea mays
ggaaaatgagaggaagaaactcgccatattcacagcccttgcattttctcagaagctatcagggcttcctcctgagactgtgttccagccattgctcaaggataatcttgttgccaaagggatagtactttcattcattactgagtttttcaaggagtaccttgaggaaaacagcttggatgatttgattgcacttttgaagaaaggcaaaatggaggacaatctgttggacttcttcccatcagctaagagatcttctgaggctttatctgagcatttcaccaaagaaggtctgactagccttgttgagtacaacgaaaagaagat

SEQ ID NO: 14826 - DNA, 319 bp, Zea mays
atggtccagccggatatgctctgttcgtacttgtatatgcagggttggaggttctcgcaattcccgcaatatcctttaaccatgtcagctggtctattatttggtaatgtgactggtacaattattgtttcagtcggtggaacgctagctgcagcggtggccttccttattgctagatactttgccagagagagaattcttaaattggttgaaggaaataagaagtttctggcaattgataaggcaataggtgaaaatgggtttaaggttgttactttgctacgcttgagtcccctgttacctttctcccttgggaact

SEQ ID NO: 14827 - DNA, 327 bp, Zea mays
agagaaagggagacagggaaagctctcttcctcctcctcctcctctcgaattccgtctcttgtccctgtcgtcctcgcccggtttccccggtttttgagaggggaaagaggaggcggaggagagggatggggagggacgagaggttcccggtgtgggaggccgcgctcggcgccggagtcgccgccgccttcgccgctggactcgtcggtgtctacctttccatgccggactccgactacagcttcctcaagttaccacgtaatctcgaggaactccaaatcctcactggccaccttgagaactatactagtgactacaccctacag

SEQ ID NO: 14828 - DNA, 324 bp, Zea mays
accggatcaagggcaagcagcaggtcatggtcggctactccgactccggcaaggacgccggccgcctgtccgcggcgtggcagctgtacagggcgcaggaggagatggcgcaggtggccaagcgctacggcgtcaagctcaccttgttccacggccgcggaggcaccgtgggcaggggtggcgggcccacgcaccttgccatcctgtcccagccgccggacaccatcaacgggtccatccgtgtgacggtgcagggcgaggtcatcgagttctgcttcggggaggagcacctgtgcttccagactctgcagcgcttcacggccg

SEQ ID NO: 14829 - DNA, 321 bp, Zea mays
agcagcctcatccccttgcccacttctacagcccctctgctgcagcaagaaggaaagaagctagcgcttatagcttgtcagccatggccaccgccgccgcgtctagcctcctcaagtcctccttcgcgggctcccggctcccggccgccacgcggaccacaccggcgtccctcgtggtggccaccggcccgcgcggcgccggcgcggggcccatctgcgcgtccatgtccatgtcctcctccaacccgccctacgacctgacgtccttccggttcagccccatcaaggagtccatcgtgtcccgcgagatgacccgtcgct

SEQ ID NO: 14830 - DNA, 318 bp, Zea mays
cccacgcgtccgcctccttccgttttccagccggcgccgcagggtgcatccgccctcactgcttggccccactggcggcccccacaacgctctctttggcggccacgcagcggtacctcgccggctcctcctcccagtggcggccggcatttgggacctgatctccggcggagctggcgccgccgccgctgcgtccctcgccgtccggcgaggtatgcagcttttccggcagggagatgtagctggctcgttggcagaatttgacaaggcgatcgagatggacccgcgacagaagcaatatctttggcaacggggcct

SEQ ID NO: 14831 - DNA, 322 bp, Zea mays
agaacccagtaaaatattgccagtcccgccgtcgagatggccccacgccgcctgctcgtcctcgccgtcctcgccctcgcggccaccgccgccgcggccaactccggcttcgcggactccaacccgatccgccctgtcaccgaccgcgcggcctccgcgctcgagtccacggtcttcgccgcgctcggccgcacccgcgacgcgcttcgcttcgcacgcttcgccgtcaggtacggcaagagctacgagagcgcggcggaggtccataagcggttcaggatcttctccgagagcctccagctggtccgctccaccaaccgca

SEQ ID NO: 14832 - DNA, 321 bp, Zea mays
gcggcgtcgccgtcgtcgtcgtcttgactgccagggacgaggcgaggggagcagctgccgtcgggaagctcagaggcctggggctctccaacgtcttcttccaccagctggacatcacggacgccccgagcatcgctcggctggccgatttcttgaagtcccggtttgggaagctggatatcctggtgaataacgccgggtttgttggccttgagtacatccaagatcgtatagatggcacttcaacgacgagcgaggagttttgtggcatggacatggacaagaggctggagctgctgctgaaatggtgcctccgggaga

SEQ ID NO: 14833 - DNA, 322 bp, Zea mays
agcagcctcatccccttgcccacttctacagcccctctgctgcagcaagaaggaaagaagctagcgcttatagcttgtcagccatggccaccgccgccgcgtctagcctcctcaagtcctccttcgcgggctcccggctcccggccgccacgcggaccacaccggcgtccctcgtggtggccaccggcccgcgcggcgccggcgcggggcccatctgcgcgtccatgtccatgtcctcctccaacccgccctacgacctgacgtccttccggttcagccccatcaaggagtccatcgtgtcccgcgagatgacccgtcgcta

SEQ ID NO: 14834 - DNA, 322 bp, Zea mays
gtggaaagctcagggcccaaagagccaagtccatgaagttcaaggatggctacatgatctcatctggtcagccagtgaacgagtacattgactcggctgtgagacacgttcttctcagacagggtgttctcggtatcaaggtgaagatcatgcttgactgggacccgaaggtcaaggttggcccgatcactcctcttccggacctggtgaccatccacaccccgaatgacgaggacgagccgcgccctccggtcttggcacctcctgaggtgtaaggtcccaactgtgtccttgaaatggcagtttgatcgggtcatagata

SEQ ID NO: 14835 - DNA, 324 bp, Zea mays
cccacgcgtccggaaagaggaatcaaaaataggacagtgcaaacgaccagaaaagcctatcgagatatatgaatttgaaggttgtccattttgtcggaaggtcagagagatggtaacagtcttggacctagatgtattattttacccctgtcctcaaaaaggcccaacattccgacctaaagtcctcgaaatgggtggaaagaaacaattcccttacatggtagatccaaacacaggggtcgccatgtatgaatccgatgacatcataaaatatctagctgatacatatggcgatggaactgttccaattatgctatcacttgg

SEQ ID NO: 14836 - DNA, 312 bp, Zea mays
ggcgtccttctccgacgtccttggcgcgcactcgtcgccaaggccaccggggagaacgccgtgagggcgcccgccgaggcgaactgaaggtggcgatcaacggcttcggccgcatcggccggaacttcctccggtgctggcacggccgcgaggactcgccgatcgacgtcgtcgtcgtgaacgacagcggaggcgtcaggaacgcgtcccacctcctcaagtacgactcgatgctcggcaccttcaaggccgacgtcaagatcgtggacgacacgaccatcagcgtcgacggcatagccatcacggtcgtct

SEQ ID NO: 14837 - DNA, 314 bp, Zea mays
tgaagcgcaactagaggatacagccatccattggtagtacacagggtcccacccacaagagaggcatggcggccacatcgtccctgaagagcagccttctcctcccgtctaccatctccgacttcagtggcgcagcgcagccgtctccatctcaacgcagaagaggagatcacggggggcgagggtgcaggtctcagcggctgcggactccaagaacattctggtcatgggggggactaggttcatcggggtcttcctgtccaggctccttgtcaaggagggccaccaggtcacattgttcaccaggggaaagg

SEQ ID NO: 14838 - DNA, 314 bp, Zea mays
cggacggtgggtctgaggaggcggcgttgctccctggacattaatgttcttaacgccatggtatccatatacgggaaaaataagatggttaagaaggtggaggaggtcctttcactcatgatggagaattctatcaaccacagtgctgcaacctataatagtttgatgcatatgtattctcgtttaggcgattgtgaaaagtgtgaatcaatcctcactgagatcaagtcaagtggcatgcgccctgatagatactcttataacactgtgatatatgcatatggaagaaaaggacagatgaaagaagcctcaag

SEQ ID NO: 14839 - DNA, 316 bp, Zea mays
gatctatcgagagattttggagtatcatccacagatgctggaggagcacatgcaaggtggagaacagattagcttcctctacccgagtggagttgatcggttcaaacggcagtttgcacatcttgaggagcattatagcaagggagaaagaggttctccactgcaaagaaagcatgcttctttaccaagggaaagagtggttgtatcgaaggacggtgatactgagcaacatattaatgaccaggagagaagtgcagattctgtcgcccgcaccactgtgagccctccaaggtcagaagacgacgacatgagcgat

SEQ ID NO: 14840 - DNA, 315 bp, Zea mays
gaactagcgcctccctagctctcgttgtcagcaatggccaccaccgccgcgtccagcctcctcaagtcgtccttcgcgggctcccggctcccttcggccacgcgcaccaccaccccgtcgtccgtggccgtggccaccccgcgcgccggcggcggccccatccgcgcgtccatctcctcctcccccaccccgccctacgacctgacgtccttccggttcagccccatcaaggagtccatcgtgtcccgcgagatgacccggcgctacatgacggacatgatcacccacgccgacaccgacgtggtgatcgtgggc

SEQ ID NO: 14841 - DNA, 312 bp, Zea mays
atcacagcacaaatcatatctgctagtatagcaggtgatatggttcttgcttctgcttactcgcatgagttgccacgatatggtctcgaagttggtctgaccaactatgcagctgcctactgcactggccttctgttggctcgccgtgtgctcaagacccgtggtttagataaggaatatgagggcaatgttgaggccactggtgaggacttctctgttgagccagctgatgagaggaggcctttccgtgctctcttggatgttggccttattaggactacaactgggaaccgtgtctttggtgccctcaag

SEQ ID NO: 14842 - DNA, 310 bp, Zea mays
ccgtaagaacggcttcatcgtcatcaagaacgtccctgcaagttgtggaggtttctacctccaagactggtaagcatggccacgccaaatgccactttgtcgccatagacatattcaatgggaaaaagcttgaagatattgttccttcatcacacaactgtgacattccgcatgtgaaccgtactgagtatcagctgattgatatttctgaggatggatttgtgagccttcttacttcagatggcaacactaaggatgatcttgttgtgactgtccagtctgcgatgccggaggagcagatctgcgcgct

SEQ ID NO: 14843 - DNA, 311 bp, Zea mays
cacgcacgcatacacagcacagagtgaggtaagcatccgagaaaagctgtgatctgatcgacatgtccgccgccaccatggctctcacctcgcgcgcgctcgtcggcaagccggcgaccagcaccagtgacgtcttcggctaggggcgcatcaccatgcgcaagactgctggcaagcccaagccagcggcgtccggcagcccctggtacggggccgaccgcgtcctgtacctgggcccgctgtccggccagccctcaagctacctgaccggcgagttccgctgcgactactgctgggacaccgctgggctt

SEQ ID NO: 14844 - DNA, 309 bp, Zea mays
cggacgcgtgggggagaccagggacttcgatggacacatcctcttcatcgaggaggaccactacatcttccccaatgcgtaccggaatgctcagctgcttgtcgatttgaagccgaagaagtgcccccagtgctacgctatcaatttggccccgtccgatgtcaagtcgagaggcgaaggttgggagagcttggttgccgagaagatgggtaacattggctatgccttcaatagaacagtgtggaggaagatccatgccaaggctaagcagttttgcgcgtttgacgagtacaattgggatataaccat

SEQ ID NO: 14845 - DNA, 307 bp, Zea mays
cccacgcgtccggttcactgtccaggaaaacaggctgtggatgttgcagtgcaggacagggaaacgtacgggcaaaagtgccgtgaagatcgccgtggacatggttaacgagggccttgttgagccccgctcagcgatcaagatggtagagccaggccacctggaccagcttctccatcctcagtttgagaacccgtcggcgtacaaggatcaagtcattgccactggtctgccagcctcacctggggctgctgtgggccaggttgtgttcactgctgaggatgctgaagcatggcattcccaaggg

SEQ ID NO: 14846 - DNA, 309 bp, Zea mays
ggccgctgcgtcttcaacaacatccagaagttcatccagttccagctcaccgtcaacgtcgccgcgctcatcatcaacttcgtgacggcgatgacctctggcaagatgccgctcacgaccgtgcagctgctgtgggtgaacctgatcatggacaccatgggcgccctggcgctggcgacggacacgcctaccaaggcgctcatgcgcgcccgcccatcggccgcactgcaccgctcatcagcaacgccatgtggcgcaacctcgccgcgcaggcggcgttccaggtcgccgtccttctggcgctgcagt

SEQ ID NO: 14847 - DNA, 308 bp, Zea mays
ggaagtctcatcttacctcaagaaagttgggtacaaccctgataagatagcatttgttcccatctctggttttgagggtgacaacatgattgagaggtccaccaaccttgactggtacaaaggcccaaccctgcttgaggctcttgaccagatcaccgagcccaagagaccctcggacaagcccctgcgtctccccctccaggatgtgtacaagattggtggtattggaactgtgccagttggtcgtgtggagactggtgtcatcaagcctggtatggttgtcacctttggtccaactggcctgacta

SEQ ID NO: 14848 - DNA, 101 bp, Zea mays
atcgaccttcgagtctcgctacgtagcagtgcagtagaaaaagcagccggaatggcgagcagcaccatggcgctctcctccacggccgtcgccggcaaggc

SEQ ID NO: 14849 - DNA, 313 bp, Zea mays
gttggagccttatactctgcatttctggctatgcatatagcggccggtgttcctagtgtgctgtcagcacttgctttggcattcaacacaaatctgttcggtgcaatcactcattatagtagtgggcaggctgcagtatacttcggagccgggtatatggagcttccagatgttttcaggctgggttttataacagccttggctaacacgttaatctggggagttgttggaaccatctggtggaaatttttgggtctgtactgacagtggcagacatgtggttgaccaaaattttcatttggcactggtcgaa

SEQ ID NO: 14850 - DNA, 302 bp, Zea mays
cgacgcctcgcccctcgacgtcatcgccatcgtacgcgtgggtggtgtgtcgcaggtgttctacatggtcaagtacgtttccatgatcggcatcttcgacgccgacgtcaagcccgtcggcgacaacgccatctccgtcgacggcaaggtcatcaaggtcgtgtccgaccgcaaccccagcaacctgccgtggggcgagctcggcatcgacctcgtcatcgagggcaccggcgtcttcgtcgaccgcgcaggcgcggggaagcacatccaggcgggggccaagaaggtgctcatcacggcgc

SEQ ID NO: 14851 - DNA, 244 bp, Zea mays
gccaaaccgtccgttgacatccagcccgagtggtcggtgaaggagcagatccctttctcatccttctccaagctctccttcgccgtcgccgaccagcccgaggatctcctcgtctgtggcgcagtcgagtactacgaccggacctacgatcgcgtcacccccagggccgagcgtcgctcgagcgcttcaagtcgcgaacttctcaaagtcacactacgacgacccgatatcggcgtttgctgag

SEQ ID NO: 14852 - DNA, 302 bp, Zea mays
gaggttttcaaggagttctatcaaacaagaacaaagcacaggaagctgacatggatttattccttgggaacctgcaacatcaatgctaagtttgatgctaaacctattgaacttattgttacaacatatcaggctgcattgctactactgtttaatggatctgacaggcttagttattctgagattgtaacacaattaaacctgtcagatgatgatgtagtgcgtttgctccattctctttcttgtgcgaagtacaagatccttaacaaggaaccggctagtagatccatctctcccaatga

SEQ ID NO: 14853 - DNA, 300 bp, Zea mays
ccttcaggacccacgcggtcggcacgagcggcgggccgcggcgggcgccgacggaggcgaactgaaggtggccatcaatgggttcggccgcatcgggcgcaacttcctgcagtgctggcacgggcgcggcgacgcctcgcccctcgacgtcatcgccatcaacgacaccggaggcgtcaagcaggcgtcccacctgctcaagtacgactccacgctcggcatcttcgatgccgacgtcaagcccgtcggcgacaacgccatctccgtcgacggcaaggtcatcaaggtcgtgtccgaccg

SEQ ID NO: 14854 - DNA, 301 bp, Zea mays
cccacgcgtccgcccacgcgtccggtttgagctctctatgtggcgctgcaacgatgagcttcgcgttcgtgccgaagagctccacagttcgtctggttccaaagttaccaagtattacatagaattctggaagcaaattcctccaaacgagccctaccgggtgatactaggccatgtaagggacaagctgtacaacacacgcgagcgtgctcgccatctgctggcatctggagtttctgaaatttcagcggaatcgtcatttaccagtatcgaagagttccttgagccacttgagctgtgc

SEQ ID NO: 14855 - DNA, 303 bp, Zea mays
cttcaagtctcgctacgtagcagtgcaataaaaaaagcagccgcaatggcgagcagcaccatggatctctcctccacgcgccttcggaggtctggccgtatacgtgtcgtcatcgtccagcttctgtgagtgaagcttatcattgacaccatgggcgccctagcgctggcgagcgagggcgtccgggagcccgtggtacggccccgaccgcgtgctgtacctgggcccactgtccggcgagccaccgagctacctgacgggcgagttcccgtgcgactacggctgggacaccgcggggctgtc

SEQ ID NO: 14856 - DNA, 300 bp, Zea mays
ggactagttcaggagatttagcaagcaaagatctgatgtataatatcttgactcttgaaactaacatagtatccatagtcaagatattatacatcagatctttgcttgctaaatcacctgaactacagtccatcaaggtctctccagttgagcgtttcttggagaaatcaaatactggtcgaagtagaagttctagtaggggaagtagtcttggcagatctcctgttcaccaccatggttaaggttcccgaactgcgcttgttgatgaacatgtgcatggtttcaaggtgaacattaaac

SEQ ID NO: 14857 - DNA, 299 bp, Zea mays
cggacggtgggggtttgctacagagaggggccgcaaagctaggcctaacttgaaggtgggcatttgtggagaacacggtggagagccttcctctgtggccttcatcgcgaaggctgggctggattacgtttcttgctcccctttcagggttccgattgctaggctagctgcagctcaggtgcttgtctgaggctgcctcctcattggcaaccggattgcctgctgctggtggatgtggtgatcaacagtattattacagagccatgctatgtgaacattactagtagcagtgctcataa

SEQ ID NO: 14858 - DNA, 298 bp, Zea mays
acccgatgcttggcttccgtggctgcaggcttggtatatcgtaccctgagctaacagaaatgcaagcccgtgccatctttgaagctgctatagcgatgaccaaccagggcgttcaagtctttccagagataatggttcctcttgttggaacaccgcagaattgggacatcaggtggcccttatccgtcaagtcgctaacaaagttttcaccagtatggggaaaactattgggtacaagatcggaacgatgattgagattcccagggcagctctagtggctgacgagatcgcggacagg

SEQ ID NO: 14859 - DNA, 312 bp, Zea mays
gcgccactgtccagtgcgcgcgtcaagcttgcttagctagccgccatggcctccctcgccgccgtctccgtgaagcccgtggccatcaagggtctcgccggcagctccatctccggaaggaagctcgccgtcgccaggccgtcggcccgctccatccgcaggccccgcgcagcgccgtggtggccaagtacggcgacaagagcgtctactttgacctcgacgacatcggcaacaccaccggacagtgggacctctacggctctgacgcgccctcgccctacaacccgctacagagcaagttcttcgagacgt

SEQ ID NO: 14860 - DNA, 298 bp, Zea mays
cgaggctcaacacgcacggtcccaacgaccgcacgctcgcgcaggggctcaagggtgaccccacgtacctggtggtggagcaggacaagacgctggccacctacgggatcaacgccgtgtgcactcacctcggctgcgtcgtgccgtggaacggcgctgagaacaagttcatctgcccctgccacggatcccagtacaacaaccagggcaaggtggtccgtggaccggcgcctctgtcgctggccctggttcacgccgacgtcgacgacggcaaggtcctcttcgtcccgtgggtgga

SEQ ID NO: 14861 - DNA, 294 bp, Zea mays
ctcatcgatctacacacatacatagtttcttctactacacgacgacaaacatggggaagcctgcgaagatcggagagtggggtggatacgccggcgatcgtcgggatctgagggctactccggaccggctgatcgaggtgaaggtcacggcggacaacagcagctgcatccgctccatctccttcatctacatcggagccgatggcaaaccgtacgaggaggggccatggggtttcggccatgctggcacggagtacaagattgatctgtgcaggttcgacgagagcttgacgg

SEQ ID NO: 14862 - DNA, 295 bp, Zea mays
cagtacaccgtcgtcagcgtggggaagaagggcaacgcctacttccagcgccgcccctacatcccgttggagcgcgatctggaggtgagcagcgtgcccaccgtcaaggactcgcaggccatctgcgacctcgtctactcgctcttcgtctccgaggaggtggacaaggtggagctgctctactccaagttcgtgtcgctggtgcgctccgaccccatcatccagacgctgctccccatgtcgcccaagggcgagatctgcgacgtcaacggcgtctgcgtggacgccacggagg

SEQ ID NO: 14863 - DNA, 294 bp, Zea mays
gcactgaacacttgattgattcagtaggtagctagctagctgaatcacaatggatcctaccaagttccgtccgtccagtagccacgacacgacggtgacgacgacgaacgctggcgctcctgtgtggaacgacaacgaggcgctgactgtggggcctcgcggtcccatcctgctggaggactaccacctgatcgagaaggtggcgcacttcgcgcgcgacgcatcccggagcgcgtggtgcacggcgcggcgcctcggccaagggcttcttcgagtgcacccacgacgtgacgt

SEQ ID NO: 14864 - DNA, 298 bp, Zea mays
gagaaatggcaaccgcagaactgggtttcaaaaagcaattaactaaggaggagaagtttgaaaagaggaagcagagacttgctacaatcggagaggatcttttggcgattgctgctgatcaaccatttcgcttccctgccacatttacatttgtggtcagagcattctcagttctagatggtactgggaaaggccttcatcctagaaatgccaaggaattgctaagatttaatgacgctggtgttgaaatagttgtgaaggtgtgtggagagacatgtgtattcctcctatgacgaat

SEQ ID NO: 14865 - DNA, 298 bp, Zea mays
caccatcgaccttcaagtctcgctacgtagcagtgcaataaaaaaagcagccgcaatggcgagcagcaccatggccctctcctccacggccttcgccggcaaggccgtgaacgtgccgtcgtcgtccgccttcggcgaggcccgcgtgacgatgcgcaagacggcggggaaggccaagccggcggcggcgtccgggagcccgtggtacggccccgaccgcgtgctgtacctgggcccactgtccggcgagccgccgagctacctgacgggcgagttcccgggcgactacggctgggac

SEQ ID NO: 14866 - DNA, 302 bp, Zea mays
cccgctacagagcaagttcttcgagacgttcgcggctccgttcaccaagagaggtctgctgctcaagttcctgctgctgggcggcggctcacttctggcctacgtcagcgcgtcggcgtcaccggacctcctgccgatcaagaagggacctcaggagccgccgcagccgggcccgcgcggcaagatctaagctcagcttctccatttgcatggtctagtagcttgctttgtactgctagcgccggtcgatccgtcgcaatcgtcatggatcatctctctatcttgttgttacgctgttcata

SEQ ID NO: 14867 - DNA, 281 bp, Zea mays
gaactggagcagctactaatgtcatttttgggcttgctttgggttacaaatcagtcattatcccaatttttgctattgcgtttagtatcttcctcagcttcagccttgctgccatgtatggtgttgctgtggctgctcttggaatgctgagcaccattgccacaggtcttgctattgatgcatatggccctatcagtgataatgctggaggaatagctgaaatggctgggatgagccataggattcgtgagacgactgatgctctagatgctgcagaaata

SEQ ID NO: 14868 - DNA, 331 bp, Zea mays
cgtcgtgctcaagttgctgcgcaagaagcggctctggagtgagaccgaggcgctatgggccgagatgctgcgggacggcgtgcagcccgacaacgccaccttctcgaccgtcatcagctgcgcgcgcgcctgcggcctacacagcaaggccgtcgagtggttcgacaagatgccggagttcggctgctcgccggacatgctcacatactctgcggtgatcgacgcgtacggccacgctgggaactccgaggcggccctccgcttgtacgatcgcgctcgcgccgagaaatggcagctggaccctgtgatctgctctacagtgatcaaggta

SEQ ID NO: 14869 - DNA, 329 bp, Zea mays
ggcaaaaaagaatagccgctatagtgagaaagatgctgcagtggtagtccgccaaatgctcaaagtagctgctgaatgccatctgcgtgggttagttcaccgagatatgaagcctgagaacttccttttcaaatcgaacaaggaggattcaccactaaaggcgacagattttggtttgtcagatttcattaagccagggaagaagttccatgacattgttggaagtgcttactatgtcgcaccagaagtactaaaacgacggtctggtcctgagtcagatgtttggagcataggagtcataacctacattttgctctgtgggaggcgcc

SEQ ID NO: 14870 - DNA, 323 bp, Zea mays
  unsure (1)..(323): unsure at all n locations
cagcattggcatagatccttacgtggtctttcaagatgtagattgggcccttcttattggcgctaaccccgaggtcccggcatggagcgagctgcgctactggatatcaatggccaaatctttgctgaccaggggaaagcacttaatgcggtcgcctcgcggaaccgnaagtcttagttgtcggaaatccctgtaacactaatgcgctgatttgtttgaaaaatgccccaaacataccggcaaaaaactttcatgcattgacgaggttggatgaaaatagagcaaagtgccagctggcactaaaagcaggtgtattttatgac

SEQ ID NO: 14871 - DNA, 323 bp, Zea mays
ggaagatttgatttccatattgagctttctgctcttgcagtacctgagcgcaaagcactattgcaacatcaagttgcggagcatgatttattgtgttctgaggaagttctgtcagagatagcatcaaaatgtgaaggttatgatgcatatgacttggaaattttggttgatagggctgtgcacactgctgcttatcgctttcttctgccttctaatgcttgtcacaactctctgaaacgaactttgttgatggaagatttctttaaagcaatgcatggcttccttccagtcgccatgcgtgatcttaggaaatatgctcctga

SEQ ID NO: 14872 - DNA, 325 bp, Zea mays
cggacgcgtgggcggacgcgtgggcgtgacgcgtgggcgaccttcaagtctcgctacgtagcagtgcaataaaaaaagcagccgcaatggcgagcagcaccatggtcctctcctcaacggccttcgccggcaaggccgtgaacgtgccgtcgtcgtccgccttcggcgaggcccgcgtgacgatgcgcaatacggcggggaaggccaagccggcggcggcgtccgggagcccgtggtacggccccgaccgcgtgctgtacctgggcccactgtccggcgagccgccgagctacctgacgggcgagttcccgggcgcactacggct

SEQ ID NO: 14873 - DNA, 325 bp, Zea mays
gccattgaatcagaaggaaactttgtgcaacaacaattgtggaaattacacgttctgcaccagttgtgaaagaagaactctttggtcctgtcctttatgttatgaaatttcagaccttgaaggaagcaattgaaatcaataactctgttcctcaaggattgagcagttttatatttacaaagtggccagatattatttttaagtggctcgggccccatggtagtgattgtggtatagtgaatgtgaacatacctactaatggtgctgaaattggtggagcatttggtggagaaaaagcagctggtggtggacgagaagcagggag

SEQ ID NO: 14874 - DNA, 316 bp, Zea mays
gtgattcttactagggatggactagtatatacttgtggaagtaatacacatggccaacttggtcatggtgacaccatagacagggccactccaaagcttattgaattgtttgaaggctccactccggtggtgcagattgcagccggtgcaagctacacgtttgctgtaacagatgacggaacagttcattcctttgggtcttgtactaatttctgccttggacatggggatcagcatgatgaacttcttccacgtgcaatccaatcatttaagtggagaaacattcatgtagtccgtgtttctgctggagatgagc

SEQ ID NO: 14875 - DNA, 322 bp, Zea mays
gaggaaaagggcaaaagccaaaaggcatcaccgccgcgacgacgatggcagcctcgctccaagccgcggccaccctgatgcagccggccaagatcggcggccgggcgccctttgcctcgctgccgtcccgcccgtcgtcgcaactcgcctgcagggcgttcggcgtcgacgccggcgccgccaggatcacgtgctccctgcaggacgtcgccagcaggtgcgtcgacgccgcgaactcgccggcttcggctcgccacctcggcgctcctcgtctcgggcgtgacgctgagggcacgcccaagatgctgacctacgacgagat

SEQ ID NO: 14876 - DNA, 323 bp, Zea mays
agctcccacgctcaccgacgccacagcttgtgcgcgcgcaatggcactcgtgtccgcctcctcgtcctccaccaccgccgtcgcggcgctccccaggaatgggcagcagcgggcgtcgtcgtcgttgttctcctcctcctcctcttcctccttcctcgtcggcaagacgctgctgaggcaggccgaggcagcccggccgtcgttcgccgtgcgcgccgcggcggattccgacaggccgatctggttccccggcagcacccctccgccgtggctcgacggcagccttcccggcgacttcggctttgatccctggggcctcggat

SEQ ID NO: 14877 - DNA, 316 bp, Zea mays
aacacgcgtccgggacgcgtggtgttgataagaagaatgcccaggaagtgagaaaatctgttgccgagagattggacaaacgtgggctagatgccaaaataatatatagtggtggccaggaccttgatatattacctcaaggagctggaaagggccaagcacttgcatatttgcttaaaaagctaagttcatgtggaaaaccgcccaacaatactcttgtttgtggtgactctggtaatgatgcagaattattcagcatccctggtgtacatggtgtcatggtcagcaatgcccaagaggaactacttcagtggta

SEQ ID NO: 14878 - DNA, 318 bp, Zea mays
agaagacgagtgtcaagtgaacctgaaacttgcggtgtcactggctggtagcctgagtgtgagtgagtgatcgagctagctgagctccgatcctcgctagctaggataccgccataccacaagtcttcttcacaagtttaggagtgacagcaacaagagatcgatggcctctgccaccgtgctcaagtcctccttccttcccaagaagtccgaatggggcgccaccaggcaggccgccgcgcccaggccgcccaccgtctccatggtcgtccgcgcctccgcctacgccgatgagctcgtgaagaccgcgaaaacgat

SEQ ID NO: 14879 - DNA, 320 bp, Zea mays
gtggtttacgacatcaatggacgtgaggctgtgcaagttgagcccataattgaggccttgcctaacctgcaacagtacatctattgctcatcggcaggagtgtacctgaaatctgacattcttccgcactgtgaggttgacgcggtggaccccaagagccgtcacaagggcaagctggagacggagagcctgctgacctcgcgcggcgtgaactggacgtccatcaggcccgtgtacatctacggcccgctcaactacaaccccgtcgaggagtggtttttccaccgcctcaaggccggccgccccatccccatccccgg

SEQ ID NO: 14880 - DNA, 315 bp, Zea mays
gcctcaagagcttggctgacggcggcacgcccgcggttcctgatcatcgacgacgggtggcagcagatcggcagcgagaacaaggaggagtccgccaacgccgtcgtccaggaaggggcgcagttcgccagtaggctgacggggatcaaggagaacgccaagttccagaagaagacgaagacgaaggagagcggcggcggcggcggcggcgagcagcaggcgcaaacgccgggcctgaagctgctggtggaggaggcgaacgcgagcacggcgtcaggtacgtgtacgtgtggcacgccatggcggggtactggg

SEQ ID NO: 14881 - DNA, 301 bp, Zea mays
gttccaaaaatggccaacatgttagaaggtggtggtaaaactcctattctgagccctgttgaactggaagaaataggttataaaatcatagcctatccattatctctaattggtgtatcgatgcgtgcaatggaggatgctcttattgctataaagggtggtcgcatacctcctccaagcagcttgccaacatttgaggagatcaaaaatactcttggcttcaaccactattatgaagaagacaaacgatatgcggtgacaccagcccaatcattgtacgggactggctatgataattata

SEQ ID NO: 14882 - DNA, 316 bp, Zea mays
gtaccgccaggtcatattgacagacgacatagaagaggaggggaagaaaggggatacactgaaggtgcgagctggattctaccgcaacttcctccttcccaagggcaaggctacacttctgaccccagaagtcctcaaggaaatgcagctggagcaggagagaatagaagctgaaaagaagcgggtaaaagaagacgcgcaacaacttgctcgagtttttgaaaccattggcgctttcaaactccctcgcaaaggtggaaaaggaaaacagatctttgggagtgtcacggcacaggatgttgttgacataataaag

SEQ ID NO: 14883 - DNA, 315 bp, Zea mays
ctgaaaacagaaggctccggcctccggcatccgccaaaaaggggaaaaaaggagagataacacacacacacacaaaccccaatcccctgcggcggcgatggacccgtcatcggcgggctccggcggcaactccctcccgtccgtcggccccgacgggcagaagcggcgcgtgtgctacttctacgacccggatgtgggcaactactactacgggcagggccatccgatgaagccgcaccgcatccggatgacgcactcgctgctggcgcgctacggcctcctcaaccagatgcaggtgtaccgccccaacccggc

SEQ ID NO: 14884 - DNA, 327 bp, Zea mays
cgtccgcacacgcgtccgcccacgcgtccgcccacgcgtccgcggacgctgggtttttttttaataacaacaacaataataaagctaacccaagggaattcgatcgattcatcattgaacaacaaggcaattaagataagacgctgcaggcgtcgatcctcctctctgcttgccgcactcaggcgtccacgacctcgtcgtccttgtacgcaatcatcaactcctcgcgcaacggcggcgacatggtcccgtccacggcgttgggcctgcccagggccttgagcgccaggtgcgccgccttctggccggagatcatcatggcgccaa

SEQ ID NO: 14885 - DNA, 323 bp, Zea mays
ccgaagtctgagtgcagcaagactacccagttgggtattagctttgctggtggttacattgccggtgtcttctgtgctattgtttctcacccggctgacaaccttgtgtctttcctgaacaatgccaagggagctacagtgggagatgctgttaagaagcttggtctctggggtctcttcactagaggacttcctcttcgtatcgtcatgattggtacccttactggtgctcagtggggaatttacgatgcattcaaagtgatggttggactcccaacaacgggaggtgttacacctgccccagcagcagaggctgaattgaa

SEQ ID NO: 14886 - DNA, 326 bp, Zea mays
cggacgcgtgggctcgtgtgcaagagctaccaccacgagagcctcgacaaggccaacatctccgaccacctcgaggtctacctcggcgactacgtcccgctaacagcgtccgacgtgcagatggagcagttccaggtctgactgtgaatcccatagcttctttctgtcttttatcactgctcgccaatccatcctctgatgccggaattctcctgttaccaccggcagccaggtaatctgtaattgtgtacgtacagcaggcagcaggtgatgaacatacttgcgttaagtaggaagaattgggaatttttgtcttgggtgtacaa

SEQ ID NO: 14887 - DNA, 326 bp, Zea mays
ggcctgattcagcaagatccagttattttctcaacgacaataagagagaacattatctatgcaaggcacaatgcaaccgaggctgagatgaaggaagctgcaaggatagcaaatgcccatcatttcatcagcagcttgccacatggatacgacacccatgtgggaatgagaggggttgatctgacacctggacagaagcaacggattgccatcgctagggtggttttgaagaacgcacctatattgctgttggacgaggccagctctgcgatcgagtctgaatcgagtagagtggtgcaagaagctctagacactctggtcatggg

SEQ ID NO: 14888 - DNA, 325 bp, Zea mays
tcaagttagaagaagcaccagtgcctgatcgatggcggcccaggctctcctctccggccggcagctgctgggccgccccgtgcagtcggccgtctctaggtcgtcggcgaggaaggcgcccttcgtcgtcagggccagctccagccctccagccaagcaaggtgccgacaggagctgtggttcgcgtccaagcagtccctctcctacctcgatggcacgctgcccggcgactatggcttcgacccgctgggcctctcggacccggaggcaccgggggcttcatcgagcccaagtggctggcctatggcgaggtgatcaacggccg

SEQ ID NO: 14889 - DNA, 325 bp, Zea mays
atccgctgcgtcagtagcccaccggccgtcgacacatctttcaagactaatgtcccgcgcaatgctaatatggccaaactccaagcaggatatttgtttcctgagattgccaggagaagagccgctcatttgctgaagtttccagatgccaaaattataagccttggaataggcgacactaccgagcccattccaaatgtcataacaaatgccatggcagagagagcacataccttgtcaacaattgatggctactccggttatggagctgagcaaggtgaaaagaaactcagagcagcaattgctgcaacctactatgcggacc

SEQ ID NO: 14890 - DNA, 326 bp, Zea mays
atgggatgtacgaggctaaggccgatggttttcttcctggtggcgccagccttcacagctgcatgacaccgcatgggccagacaccaagacgtacgaggcaacgatcagccgtgctgctgccaacgagccatccaggctcagtggtacgttggcgttcatgtttgagtcttggcttatccctcgcgtgtgcccatgggctctggattccccgtgtcgggacctcgactactaccagtgctggatcggattgaagtcacacttttcacctcctgctgctgctgttgatgatgagaacgagtagctgcttacagcagcagtcttggaa

SEQ ID NO: 14891 - DNA, 327 bp, Zea mays
gacgccggcgccgccaggatcacgtgctccctgcaggacgtcgccagcaggtgcgtcgacgccgctaagctcgccggcttcgcgctcgccacctcggcgctcctcgtctcgggcgcgacgcggagggcacgcccaagaggctgacctacgacgagatccagagcaaaacgtacatggaggtgaagggcacgggcacggcgaaccagtgcccgaccatcgacggcggcgtggagtcgttcccgttcaaggccggcaagtaccagatgaagaagctgtgcctggatccgacgtcctacaccgtcaaggcggagggcatcgccaagaacg

SEQ ID NO: 14892 - DNA, 328 bp, Zea mays
gtcgtcggcgaggaaggcgcccttcgtcgtcagggccagctccagccctccagccaagcaaggtgccgacagcagctgtggttcgcgtccaagcagtccctctcctacctcgatggcacgctgcccggcgactatggcttcgacccgctgggcctctcggacccggagggcaccgggggcttcatcgagcccaagtggctggcctatggcgaggtgatcaacggccgctacgccatgctgggcgcggtgggcgccatcgccccggagatcttcggcaagatgggcatcatccccccggagaccgcgctgccgtggttcaagacgggcg

SEQ ID NO: 14893 - DNA, 320 bp, Zea mays
gctaatgatttgactcactgggaccttaccttctggagtgaacgactgagagagtctaaatatgatatcaatgaggaagagctgcgcccttattttgcactacccaaggttatggatggcctcttcactctggcacataagctttttgaagttactgttgaacctgcagatgggctggctccggtctggcacagtgatgtcaaattttattgtgtcaaagactcttccagtagccctgttgcttacttttacttcgatccttattcaagaccatctgaaaagcgtggaggggcttggatgaatgtagtcttttctcgaag

SEQ ID NO: 14894 - DNA, 313 bp, Zea mays
gaccaagttgatcccgaggcaacactgtcatcccgaccaagaagtcgcaggtgttcaccacctaccaggaccagcagaccactgtctccatccaggtctttgagggtgagcgcagtatgaccaaggactgccgtcttctcggcaagttcgacctcaacggcattgcgccactccaaggggcacaccccagatcgaggtgaccttcgaggtggacgccaacggtatcctaaacgtgaaggcggaggacaagggcacgggcaagtcggagaagatcacgatcacgaacgagaaggggcggctgagccaggaggag

SEQ ID NO: 14895 - DNA, 320 bp, Zea mays
ccacggaggagtaccgctccgtcgtcgtcaaggagccgcgcttcgtcgagtacttcagatcggctacaccggagaccgagtacgggaggatgaacatcggcagccggccagccaagaggaggcccggcggcggcatcacgaccctgcgcgccatcccctggatcttctcgtggactcagaccaggttccaccttcccgtgtggctgggagtcggcgccgcctttaagttcgccatcgacaaggacgtcaggaacttccaggtcctcaaagagatgtacaacgagtggccattcttcagggtcaccctggacctgctggag

SEQ ID NO: 14896 - DNA, 319 bp, Zea mays
ggccaagcttgcggacaggcggagcggtacgaggagatggtcgagttcatggagcgcgtcgcggctacgccgggcgcgccggcgacggggaggagctctcggtggaggagcgcaacctgctgtccgtcgcctacaagaacgtcatcggcgcccgcaggccatcgtggcggatcatctcctccatcgagcagaaggaggaaggccgcgggaacgaggcgcacgccgcatccatccgcgcctaccgctccaagctcgaggccgagctcgcccgcatctgcgacggcatcctcgcgctcctcgactcccacctcgtcccatc

SEQ ID NO: 14897 - DNA, 318 bp, Zea mays
attcctctcggttcttgcagcttgcagtcatgctggtttggttgatgaagggcagaaatattttgctagcatgaagaaggactatgggcttgaacctggaatggagcactacggtaccatggtggatctacttggacgagctgggaagctagacgaagcttggtctttcatcaaaaacatgcctatagaacctggcattagtgtttatggtgcaatgttaggtgcttgcaagttgcacaagaatgttgaattggctgaagaatcagcacagataatctttgagctgggcccagaggagggggtgtatcatgtcctttt

SEQ ID NO: 14898 - DNA, 321 bp, Zea mays
caacagcgccactgtccagtgcgcgcgtcaagcttgcttagctagccgccatggcctccctcgccgccgtctccgtgaagcccgtggccatcaagggtctcgccggcagctccatctccggaaggacactcgccgtcgccaggccgtcggcccgctccatccgcacggccccgcgcaccgccgtggtggccaagtacggcgacaagagcgtctactttgacctcgacgacatcggcaacaccaccggacagtgggacctctacggctctgacgcgccctcgccctacaacccgctacagagcaagttcttcgagacgttcg

SEQ ID NO: 14899 - DNA, 318 bp, Zea mays
gcacaccaaggagagtacgtggaggagcagccatggcttcatcggtggccgccgcggcgagcacattcctgggcacccgcctggcggacccggcgccacagaacgggcgcatcgtggcccggttcgggttcgggttgggcggcaaggcgaagctgctccgaagaaggtggcgaagacatcgacctcctctgaccggccgctgtggttccccggcgccgtggcgcccgactacctggacggctcgctggtcggcgactacgggttcgacccgttcggtctcgggaagcccgtggagtacctgcagttcgagttggactc

SEQ ID NO: 14900 - DNA, 321 bp, Zea mays
caaaaaggtacatgttgatgacataggtgaaactgaatttgagatatatccagaagaaatcactgaggctatcaaggcaggtcttgaggaacctatttacccagagcctgagcttgaggtgccaaaggaattgatcactcaatcaaagctcgatgaactgaaattgcaacacaatccatcatttgttcctttaaccaaagaggagaatgcggtgaaagtgtttgacagtgaaactggtatatcacaacgccgtctttctaacggaatttccatcaactacaagattacacaaaatgaagctagggttggtgtcatgcggct

SEQ ID NO: 14901 - DNA, 323 bp, Zea mays
gtaatctggtccactagcgctccattcgaccccacccacagccatggctgccgtgaccgcagcggccgtctctctgccctcctcctcctcctcccctgccgccgccaaggccaaggcgtccgcatccgcgtccccgtcgtctccatgcggccacctccagttcccgcggcggcacggcggcccgcgcgcggtgcggctgcgggtgcaggtgtccaccaccgagaccgcggaggcggagctggtcaagaagctggagaaggtgtccaagaagcaggaggaggggctcgtcaccaacaagtacaagcccaaggagccgtacgtcg

SEQ ID NO: 14902 - DNA, 313 bp, Zea mays
cggaccgtgggctcaaggtcatgatatcaggagctccggcgtccggcaagggcacacagtgcgagctcatcaagaccaaatatcaactggcgcacatctccgccgacgatttgttgcgggcggagatcgctgctggctctgagaatgggaagcgggccaaggaattcatggagaagggccagctcgtgcctgatgagattgtcgttaatatggtgaaggaacgccttcggcaaccagacgctcaagaaaatggctggcttttggacgggtacccaagaagctattcacaggccatggccttggaaactcttga

SEQ ID NO: 14903 - DNA, 317 bp, Zea mays
ccaggacaagatgatctgccgcaaatgctatgcacgactgcaccctagggctgtcaactgccgcaagaagaagtgtggtcacagcaaccagctgagggccaagaagaagatcaagaactgaggtgctgctcctagtcagtttcatggacaatgttgggctgtattgctgtgtggttgttgaacggtgtttgtttacccaacatttgggccttctgttatgttttaccttgttgtcgatgacactactatatgacaatagcaactctgttattgtagttttggtcactgttcacctgatatgtgccatatttcggtaa

SEQ ID NO: 14904 - DNA, 317 bp, Zea mays
cacgcatactgcatacacaacacagagcatcagaaggagctgcgatctgatcgacatggctgccgccaccatggctatcacctcccgcgcgctcatcggcaagccggcggctggcacgagggacgtcttcggcgagggccgcatcaccatgcgcaagaccgccgccaagcccaagccggcggcgtccggcagcccctggtacggtgccgaccgcgtcctgtacctgggcccgctgtccggctcgcccccgagctacctgaccggcgagttccccggcgactacgggtgggacccgcggggctgtcggcggacccgga

SEQ ID NO: 14905 - DNA, 319 bp, Zea mays
ggatgccctcgcgcgaattgaaaagctttcagaagtaaacccgatgcttggcttccgtgggtgcaggcttggtatatcgtaccctgaattgacagagatgcaagcccgggccatttttgaagctgctatagcaatgaccaaccagggtgttcaagtgttcccagagataatggttcctcttgttggaacaccacaggaactggggcatcaagtgactcttatccgccaagttgctgagaaagtgttcgccaatgtgggcaagactatcgggtacaaagttggaacaatgattgagatccccagggcagctctggtggct

SEQ ID NO: 14906 - DNA, 319 bp, Zea mays
gaagaatgacccagagtttgcgcagaagcttgcctccgtagcagatctttacgttaatgacgcgtttggaacagcccacagggcacatgcatcgactgagggagttacaaagttcttgaagccttctgttgcagggttccttttgcagaaggagcttgactaccttgtcggagctgtttcaagccctacacgcccatttgctgccatcgtgggtggttcaaaggtgtcatccaagatcggggttattgaatccttgttggagaagtgtgatatccttctcttgggtggtggtatgatcttcacattttacaaggcacaa

SEQ ID NO: 14907 - DNA, 194 bp, Zea mays
aaaaaagcagccgcaatggcgagcagcaccatggccctctcctccacggccttcgccggcaaggccgtgaacgtgccgtcgtcgtccgccttcggcgaggcccgcgtgacgatgcgcaagacggcggcgaaggccaagccagcggcggcgtccgggagcccgtggtacggccccgaccgcgtgctgtacctggg

SEQ ID NO: 14908 - DNA, 315 bp, Zea mays
accaaggagagtacgtggaggagcagccatggcttcatcggtggccgccgcggcgagcacattcctgggcacccgcctggcggacccggcgccacagaacgggcgcatcgtggcccggttcgggttcgggttgggcggcaaggcgaagctgctccgaagaaggtggcgaagacatcgacctcctctgaccggccgctgtggttccccggcgccgtggcgcccgactacctggacggctcgctggtcggcgactacgggttcgacccgttcggtctcgggaagcccgtggagtacctgcagttcgagttggactcg

SEQ ID NO: 14909 - DNA, 311 bp, Zea mays
cccacgcgtccgtataagtctaagtaacccttctatacttcttattgaggatgatcccttgagctagcatatatattttaaacttatacttttgtaatcacttcgataaactaatgtaaaatttattttaacctgtaaaatttggtagaaagatttccgctgcaacaatattggtgtgtgtgatttgtgttacttaatcccgcgattctggttgtaagtggtttatccgatgtccttagggcaatcggacggatcctgttaagttatctggtgcacatgcatagcagtctgaggtctttgagacaaggaca

SEQ ID NO: 14910 - DNA, 312 bp, Zea mays
gttctagatcgcgagcggccgcccttttttttttttttttttttttcaacaatccacacccaacacaggcggtggacacaacccatccaataatctttcatgagtacagtgtcggagtcatcggccaatttcttcaaaattatcattaatttatgatgttcatgtaactatagtcgtaggataaggcagggccggtttggtttcatcacgcggatgggagcaccttcttgacgatctcatcactgagcgaggcgatctgggcgtcgagcgccttaacagcctcctccttctgcgcctcgaggttggcgagcg

SEQ ID NO: 14911 - DNA, 314 bp, Zea mays
cgtccggtcagaccaatcaacaaagtgacgcgagcacgagcatccatcgtttccccttcttccccatcgcgtgccctcgccgcagccatcttccatggcggaccagctcacggacgagcagatcgcggagttcaaggaggccttcagcctcttcgataaggatggcgacggctgcatcactaccaaggagcttggaactgtgatgcgctcccttggccagaaccccactgaagcagagctgcaggacatgatcaacgaggttgatgctgatggcaatgggaccattgacttcccagagttcctgaacctgatgg

SEQ ID NO: 14912 - DNA, 297 bp, Zea mays
tcgacgacatcggcaacaccaccggacagtgggacctctacggctctgacgcgccctcgccctacaacccgctacagagcaagttccacgagacgttcgcggctccgttcaccaagagaggtctgctgctcaagttcctgctgctgggcggcggctcacttctggcctacgtcagcgcgtcggcgtcaccggacctcctgccgatcaagaagggacctcaggagccgccgcagccgggcccgcgcggcaagatctaagctcagcttctccatttgcatggtctagtagcttgctttg

SEQ ID NO: 14913 - DNA, 317 bp, Zea mays
cggacgcgtgggcggcctcccccacttcctccctcgccccgccggtggtgcctatggagcttcacgccggcaaccgctaccgcctcgtcgccgcgctccgcgccaccatctccgcctccgcgcgcccgctccacggcctcgtcctccttcagggcggggaggagaagacacggtactgcaccgatcacctcgagctcttcaggcaggagagctacttcgcctatctctttggagtgcaggaaccagggttctacggcgcaattgacatcgcctctggacagtcaattttgttcgctccaagattgccagctgactat

SEQ ID NO: 14914 - DNA, 104 bp, Zea mays
ggtttctgatcgcgaccatgggaccccgctccgtcgccctagcgctcctcgctgcggcgctgctccatgccctcgcccccgcgtcatcggcggggggcctggtg

SEQ ID NO: 14915 - DNA, 311 bp, Zea mays
cttgcacagcggacgcccgacccaatccgtgcgtgtgttggtcgagatggctacaacagcttacgctcccatggcgagccaggtgatgaagagcagcccggtgcactcgaggccgaggggcctgtcaggcgctgcgctcacgcggccccggccccggttcagcgtcgtcaaggccgccatccagcccgagaaggcaacgtaccaggtggtgcagcccatcaacggcgacccgttcatcggcagcctggagacgcccgtcacctccagcccgctcatcgcgtggtacctctccaacctgccggcctaccgca

SEQ ID NO: 14916 - DNA, 306 bp, Zea mays
cggacgcgtgggcggacgcgtggggttatgcaagtcagaactgttgatggaaccagtgaccttcgaatacctccaggtatccaacctggtgatgtaattgtcttagcgaacataggagttccatcattgaataagccgtctatacgtggtgatcatctcttcactgttaaagtcgcaatacccaagcgcataagtgggcgtgaaagagaattacttgaggaacttgcatctttgagtaatggtcgctttgcacgaacagacactaagccaaaagctgcccagccaaaagccatacatcaagagaaa

SEQ ID NO: 14917 - DNA, 241 bp, Zea mays
attgacagacaggcgcgcagatggcgacgccgtcgtcgtcgctttgctccagcttcgcctccctgcggaccgcctccatcggccacccccgtggcatcgcctcctccacgcccaggaaggcattccatgtgagggcatcagctcgggttgacaaattctcaaagagtgacatcatcgtgtccccttcgattctgtctgcaaactttgcgaagcttggtgatcaggtaaaagctgtggaggt

SEQ ID NO: 14918 - DNA, 304 bp, Zea mays
cagcgactcagcgagcgagagcagcacacacgcagctagctaggagcagcagcagagcagcggcgatggcggcctccatgatctcctcgtcagctctggcggtggcgcctcagggcctgccgcccctcggccgccgcgcctcctccttcgccgtcgtctgctccaagaagaagatcaagaccgacaagccctacgggattgggggtggcctgaccgtcgacgtcgacgccaacgggagaaagggcaagggcaagggcgtgtaccagttcgtcgacaagtacggcgcgaacgtcgacggatacag

SEQ ID NO: 14919 - DNA, 305 bp, Zea mays
gaagacgagtgtcaagtgaacctgaaacttgcggtgtcactggctggtatagcctgagtgtgagtgagtgatcgagctagctgagctccgatcctcgctagctagctaggataccgccataccacaagtcttcttcacaagtttaggagtgacagcaacaagagatctcgatggcctctgccaccgtgctcaagtcctccttccttcccaagaagtccgaatggggcgccaccaggcaggccgccgcgcccaggccgcccaccgtctccatggtcgtacgcgcctccgcctacgccgatgagctc

SEQ ID NO: 14920 - DNA, 308 bp, Zea mays
agcagcacgagcagcacgtcgtgccgctccaaccatctcgcttccgtgcttagcttcccgccgtcgccatggcgtcgaccaaggctcccggccccggcgagaagcaccactccatcgacgcgcactccgtcagctggtcccaggcaaggtctccgaggacgacaagctcatcgagtacgatgcgctgctcgtcgaccgcttcctcaacatccttcaggacctccacgggcctagccttcgcgaatttgtccaggagtgctacgaggtatcggccgactacgagggcaaaggagacacgacgaagctgg

SEQ ID NO: 14921 - DNA, 292 bp, Zea mays
aaatcaaaaaacacataattaataaaaagatgcatcaacgtcattggtggtacaatattttttaagactacataacactttaaaatgttcaaaaagaatagaccaatatgtatctcatttgctaattcctggacaggctagtcaactagatatcaccatttggtcacacgcccgaaggccttggtgtgcgtagtatcttacatctacatctgggtcctcactgagctcaactaagcatggtttcactgtcttctccacaacagattgatcaaggattggtacaagtgattgc

SEQ ID NO: 14922 - DNA, 307 bp, Zea mays
cccacgcgtccggtccttccggttcagccccatcaaggagtccatcgtgtcccgcgagacgacccggcgctacatgacggacatgatcacccacgccgacaccgacgtggtgatcgtgggcgccgggtccgcgggcctgtcctgcgcgtacgagctgtccaaggaccccaccgtgagcgtggccatcgtggagcagtccgtgtccccgggcggcggcgcgtggctgggcgggcagctgttctcggccatggtggtgcgcaggccggcgcacctgttcctggacgagctgggcgtgggctacgacgag

SEQ ID NO: 14923 - DNA, 307 bp, Zea mays
cgtctctcttcggcgaggcccgcgtgacgatgcgcaagacggcggcgaaggcaaagccggcggcgagctccggcagcccgtggtacggccccgaccgcgtgctctacctgggcccgctgtccggcgcgcccccgagctacctgacgggcgagttcccgggcgactacggctgggataccgcggggctgtcggcggacccggagacgttcgccaagaaccgggagctggaggtcatccactcccgctgggccatgctgggcgcgttgggctgcgtgttcccggagctgctcgcccgcaacggcgtcaa

SEQ ID NO: 14924 - DNA, 242 bp, Zea mays
cccacgcgtccgtgtttttctctgtgaacacaagtggtcagtttgttggtgttgctgaaatggttggtcctgttgactttgataagactgtggagtattggcaacaagacaagtggaatggttgttttccactcaagtggcacatagtcaaggatgtgcccaacaacactttgaagcatattacactggataacaatgataataagcctgtgacaaacagccgtgacacacaagaggttaag

SEQ ID NO: 14925 - DNA, 306 bp, Zea mays
cccacgcgtccgaaactccgcagccagtctgcgcgagttggatggccttcttcttggccctcgtgtgcatcctcgtcttgctagccatcgcctcctacgtccagtacactcgctggcagacggggaaacgccgcttcggcggccatgggaggtcagctcccttgaagctgcctcctggctccatgggctggccttaccttggcgagaccctccagctttactcccaggaccccagcgtcttcttcgcttccaaacagaagaggtacggcgagatcttcaagacgcaccttctgggctgcccgtgcg

SEQ ID NO: 14926 - DNA, 312 bp, Zea mays
gaatcatatcgcaggtcatgttgggacaaaatcaaaagcacaatgtattcaccatttcattcgtctcccggtggcagatggtttgttagagaacattgaagtgccagaagcatcccttccatctggaatgcaaagcagtggatttttgcattcagattccaatggcagtacttcaggtagccaacctggaaaccagattccattcattaattctgctaatccagtcatgtcactggttgcatttttagctgctgaagtaggaccaagagttgcagcatcctgtgcaagtgcagcattatcggttttgacaag

SEQ ID NO: 14927 - DNA, 333 bp, Zea mays
tgcgcgtacgcgtacacagccccgatccgaatcgtcctcctcgcgagcctcgccgatcccccactcccctcccctcgcttcaagatgcagatctttgtgaagaccctcaccggcaagactatcaccctcgaggtggagtcttctgacaccattgacaatgtcaaggctaagatccaggacaagcgagggcatccctcctgaccagcagcgccttatcttcgccggcaagcagcttgaggacggccgcacacttgctgactacaacatccagaaggagtcaacccttcatttggtgctgcgccttaggggaggcatgcagatctttgtcaagac

SEQ ID NO: 14928 - DNA, 325 bp, Zea mays
cgtcactcaacacagcacaggcagctcgagagagagagagagagaaagatgtcgtggttcgggcaccaccaccacaaccagccggctcccccggcgtcgggccccaaccaggtgttcaagatcttctgccgcgccaacgagaactactgcctggccgtccgcgacggcgccgtcgtgctggccccggtcaaccccaaggacgaccaccagcactggtacaaggacatgcgcttcagcacccgggtcaaggacgaggaaggcatgccggcgttcgcgctcgtcaacaaggccacggggctcgcaatcaagcactccctcggccagt

SEQ ID NO: 14929 - DNA, 329 bp, Zea mays
  unsure (1)..(329): unsure at all n locations
cggacgcgtgggtgcgtgaactctttgctgagtatggcaatattacttcctgcaaggttatgcgggattcgaatggtgtcagcagaggttctggatttgttgactttcaaatctgctgaagatgctaaccgagctcttacggagatgaatggcaaaatggttggaagcaagcccctttatgtagctcttgcgcacngtaaagaagacagaaaggcaaagctacaggcacaattttcacaaatgcgtcctgttgcaatggcgccttcagtaggtcctcgcatgcccatgtttccacctggtgtccctggagttggtcagcagctgttcta

SEQ ID NO: 14930 - DNA, 327 bp, Zea mays
  unsure (1)..(327): unsure at all n locations
angccatcgccgcgtacccggacgccttccaccgcgtcatcggcttcgacaacgtcaggcagacgcagtgcgtcagttcatcgcctacaagccccccggcagcgagtagagaccgtggctagatcgacccatggccatgcctctgcctgttgatcggatcaccttcttgcattggttcnnnnnnnnnnnnnnnnncttttttttccctttatctcatcatttcttttctcctgcatgcaatggntccttttgcttccaacaattctcctgctgatgtatccagcatggcatcatccatctacaattacgtacgtagtgcaacgactg

SEQ ID NO: 14931 - DNA, 327 bp, Zea mays
cccacgcgtccggtttctgaattccttgagaagcatgatttggacctcatctgccgagcccatcaggttgtcgaagatggatatgagtttttcgctagccgccaactcgtaacaatgttttcagcccctaactactgtggagaatttgataacgctggtgccatgatgagtgtagatgagacattgatgtgctccttccaaatactgaaacctgcgaggaaggtgttgggtggttcaactaataacaaatctggcttcaagtcatcgagaggatggtgacaatggcaagcctgatatcaggttggttggtgagcagcaggccgtggt

SEQ ID NO: 14932 - DNA, 328 bp, Zea mays
attgaacccaatgaagcaaacaatatcgttcaacatgttgaagatgtcttattcaatgcaccaattagtgcttgcaagccactatccccatcgcagcatcttgccaagaggattgtaaagcttgagaagggtttgagatactattatccagcaatgtgctcaaatcaccaagatgaaaattctgctcttctgcactatattcagactcatcaggataatgttaagcaaaatgttctacttcaactacttgctcttgttggcaagcagccagcttttcatcaattgcgatcagttgagcaacttggctacatagcgcttcttaggcaaa

SEQ ID NO: 14933 - DNA, 325 bp, Zea mays
aaagcacagtagtgactggcatctgtgcagctgctcttgctttcttcatggatgtctctcaactggctggaatggttagtgtaggcacgctactcgcgttcactatagttgctgtgtccatcttgattcttagatacgttcctccagatgaggtacccctcccatcttccctgcaagcatcattccgcttgagccaagaaaatgacgaggaaaagctgaggggtacccttggagatgatgatcatgagcaaggctcagctgaaataagtgatgttgtagtagaaccaatcactgaccccctgatcgagaagcagctatacgcaag

SEQ ID NO: 14934 - DNA, 327 bp, Zea mays
cccacgcgtccgccttctctctcggcgacgactgggtggccgtagctgcctccatacgcctggtgccctggtcttcttcgggccattcgccggccgcgagcaccaccaagtacgcccacctcatgaagggagagcttcccaggtagagaaacagtttctccgtactctagcagatggcaaggataaagcctaagcaattgctaatccaaagcaaaacaaagaaggctccatctcgaatcagctactctactatcatcacatggaacttgattgtcatattggttgtgctatctctctatgctacctacagccattggcatcaaaggt

SEQ ID NO: 14935 - DNA, 324 bp, Zea mays
cccacgcgtccgaagaagctagcgcttatagcttgtcagccatggccaccgccgccgcgtctagcctcctcaagtcctccttcgcgggctcccggctcccggccgccacgcggaccacaccggcgtccctcgtggtggccaccggcccgcgcggcgccggcgcggggcccatctgcgcgtccatgtccatgtcctcctccaacccgccctacgacctgacgtccttccggttcagccccatcaaggagtccatcgtgtcccgcgagatgacccgtcgctacatgacggacatgatcacctacgccgacaccgacgtcgtcatcg

SEQ ID NO: 14936 - DNA, 324 bp, Zea mays
aattccaaatcttgaaaatgctttacaaactctcattcatttacttttgactatttgcaaaagaactttgaaaaggatttacaaaagaatttgcaaaaacaaaactcgtggtgcaaacgtggtccaaaatactaaataagaaagaaacattccatgcatatcttgtaagtagtaatattggctcaattccaagcaacctttacacttacattatgcaaactagttcaattatgcacatctctatttgctttggtttgtgttggcatcaatcaccaaaaagggggagattgaaagggaattaggcttacacctagttcctaaata

SEQ ID NO: 14937 - DNA, 322 bp, Zea mays
cccacgcgtccggtattgaaaagaattttgtcatcaccgacccgaggttaccagataatccaattatatttgcatcggatagctttttgcgtttgacagagtattgccgcgaagaaatattgggaagaaactgcaggtttcttcaaggacctgaaactgaccgtgggacagtaaagaagataagagatgccatagataaccaaacagaagttactgttcagctgataaattatacaaagagcggtaagaaattctggaacctctttcacttgcagcctatgcgtgatcagaagggtgatgttcaatacttcattggggttca

SEQ ID NO: 14938 - DNA, 321 bp, Zea mays
ccaaagaggccttcagacaagcccctgcgtctcccccttcaggatgtgtacaagattggtggtattggaactgtccctgttggacgtgttgagactggtgtcattaagcctggtatggttgttacttttgggcctactggtcttactactgaggttaagtccgttgagatgcaccatgaggctctccaggaggcccttcccggtgacaatgttggcttcaacgtgaagaatgttgctgtgaaggatctgaagcgtgggtatgtggcctccaactccaaggatgaccctgccaaggaggctgctagctttacctcccaggtc

SEQ ID NO: 14939 - DNA, 320 bp, Zea mays
agtctctgctgtactaactaatgctccttatttgctgaacttggattgtgatcactatatcaataatagtaaggctataaaggaagcaatgtgttttatgatggatcctttgcttggaaataaagtttgctatgtgcagtttcctcaaagatttgatgggattgatcgccatgatcgatatgctaacagaaatgttgtctttttcgatatcaacatgaaaggtttggatggtatccagggcccaatttatgtgggtactggatgtgtcttcagaaggcaggcattatatggctacgatgctcccaaaacaaagaagccac

SEQ ID NO: 14940 - DNA, 308 bp, Zea mays
ccactccctcctctcctctcccgtcctatccatccggcacgcccagcatccatccactcctcccctgctccggctccggctccggctccgccatgggcctttcaacagtttactccccggccggaccgcgcctcgtgccggcccctctcggccgctgccgctctgcccagccccgccgcccgcgccgagccccgctcgccaccgtcccgtgctccgtcgacgccaccaagcaggcgcaggatggcgtggcgaccgcggtcgtgacggaggcgccggcgtcgcggaaggagtgcttcggggtcttctgc

SEQ ID NO: 14941 - DNA, 318 bp, Zea mays
cgccctacgacctgacgtccttccggttcagccccatcaaggagtccatcgtgtcccgcgagatgacccgtcgctacatgacggacatgatcacctacgccgacaccgacgtcgtcatcgtgggcgccggctccgcggggctgtcctgcgcgtacgagctctccaaggaccccgccgtgagcatcgccatcgtggagcagtcggtgtcgccgggcgacggcgcgtggctgggcgggcagctgttctcggccatggtggtgcgcaaccaggcgcacctgttcctggacgagctgggcgtggcgtacgacgaggccgagg

SEQ ID NO: 14942 - DNA, 315 bp, Zea mays
ccggacgctagctcaccaccaacctcagcacatcgaggagaagaggagtggccaatggcttcgtcggtggccgccgcggcgagcacattcctgggcacccgcctggcggacccggtgccgcagaacgggcgcatcgtggcccggttcgggttcggcggcggaaagccaaaggctgccgtcccgaagaaggtggcgaagacgtcgatctcctctgaccggccgctgtggttccccggcgccgtggcgcccgactacttcgacggttcgctggtcggcgactacgggttcgacccgttcgggctcgggaagcccgtg

SEQ ID NO: 14943 - DNA, 315 bp, Zea mays
caagcaagcaagcagcgagtacatacatactaggcagccaggcagccatggcgcccaccgtgatgatggcctcgtcggccaccgccgtcgctccgttccaggggctcaagtccaccgccagcctccccgtcgcccgccgctcctccagaagcctcggcaacgtcagcaacggcggaaggatccggtgcatgcaggtgtggccggcctacggcaacaagaagttcgagacgctgtcgtacctgccgccgctgtcgacggacgacctgctgaagcaggtggactacctgctgcgcaacggctggataccctgcctcg

SEQ ID NO: 14944 - DNA, 312 bp, Zea mays
gctctgcgtccagtgactgatcttccgttggatgtacatctgatgattgtggaacctgagcagcgagtccccgattttatcaaggcaggtgctgatattgttagtgtccactgtgaacagacatcgaccatccatttgcaccgaacagtcaatcagattaaaagtctaggagcaaaggcaggagttgttttgaatccagcgactccactcactgcaattgattatgttcttgatgttgttgacctggtgctgattatgtctgtgaatcctgggtttggtggccagagctttatcgagagtcaagtaaagaaa

SEQ ID NO: 14945 - DNA, 307 bp, Zea mays
cggacgcgtgggcggacgcgtgggagaagacgagtgtcaagtgaacctgaaacttgcggtgtcactggctggtatagcctgagtgtgagtgagtgatcgagctagcagagctccgatcctcgctagctagctaggataccgccataccacaagtcttcttcacaagtttaggagtgacagcaacaagagatctcgatggcctctgccaccgtgctcaagtcctccttccttcccaagaagtccgaatggggcgccaccaggcaggccgccgcgcccaggccgcccaccgtctccatggtcgtccgcg

SEQ ID NO: 14946 - DNA, 111 bp, Zea mays
ctgcaacgggtgccgcgtgcttcgcaaggggtgcagcgacgcgtgcgtgctgcggtcgtgcctgcagtggatcgacggcgccgatgcgcagggccacgccaccgtcttcgt

SEQ ID NO: 14947 - DNA, 313 bp, Zea mays
cgagtgagtgaacaccagccgtattgtcccgaccccgaccgatcctcgcctgctgcagccatggcgacctccgcggcgctctccaccgccgccaatcccacccagctctaccggtcccgcgctttgctgggcaagccggtgaaggggcttggcctgagcatgggccgcgagcgcgcccagcggagcattgtgtgccaggcggcgagcagcatctccgccgaccgcgtccccgacatggagaagcggaagctgatgaacctcctcctcctcggcgccatctcgttgcccaccgtcggcatggtcgtcccctacg

SEQ ID NO: 14948 - DNA, 313 bp, Zea mays
ccgccaaccggcagctgagccggctgcacccggtgtaccgcctgctgcacccgcacttccgctacaccatggagatcaacgcgctggccagggaggcgctcatcaacgccgacggcatcatcgaggagtccttctggccgggcaagtacgccgtcgagctcagctccgtggcgtacggcgcgacgtggcagttcgacacggaggcgctgcccaacgacctcatcaagcgcgggctggccgtgcgcggggaggacggggagctggagctcaccatcaaggactacccctacgcccacgacgggctcctggtctg

SEQ ID NO: 14949 - DNA, 316 bp, Zea mays
ggcagtcctcatctcattctcatccaaccgggaggttgggaacgagatcacagctacagttacctgagtagtaggatcctcctcagatcggcttcaaaaatcaaagtcggggggacaacaaggcaggggatgagtgcagctgcaaccaaggtgaagagacgtgtgggcaagtacgagctcggccgaaccataggcgaaggcacattcgccaaggtcaggttcgccaagaacaccgagaccggggagccggtggccgtcaagatcctcgacaaggagaaggtcctcaggcacaagatggccgagcagattaagaggg

SEQ ID NO: 14950 - DNA, 313 bp, Zea mays
gcaactagaggatacagccatccattggtagtacacagggtcccacccacaagagaggcatggcggccacatcgtccctgaagagcagccttctcctcccgtctaccatctccgacttcagtggcgcagcgcagccgtctccatctcaacgcagaagaggagatcacggggggcgagggtgcaggtctcagcggctgcggactccaagaacattctggtcatgggggggactaggttcatcggggtcttcctgtccaggctccttgtcaaggagggccaccaggtcacattgttcaccaggggaaaggcaccc

SEQ ID NO: 14951 - DNA, 307 bp, Zea mays
cagcgagcagcatgcccacagcattgttagcaagatgatgatgcatgaagagcttcatgctagctgggaccagccaacaaagtgcatcgtattccatagtgttgaccaaactaggcttcaggggctactcttccagatggcagataagctctcggtcctggtggagatcaatgagagggcatacgaggcaagaactggtggtgctctcgagggggtaccgcccaggcgcaggggtgagggtcaggataatatgggaaagtggcaggataactttgtctcgtcacaggggcggcagggtggtggcaac

SEQ ID NO: 14952 - DNA, 312 bp, Zea mays
ggcttcctcggcaaacctttgggcactcatcatggacgcaggaactggtttctgttctcaggtttatgagctctcaccagttttcctccaaaaggactggataatggagcagtgggagaaaagctactacataacaacaattgctggatcatccaacgggagctcattggttgtcatgtccaaaggaactccttacacccagcaatcatacaaggttagtgagtcgtttccttacaagtggatcaataagaagtggaaagaagggttccatgtgacatccatggccaccgctgggaatcgctggggcgtagt

SEQ ID NO: 14953 - DNA, 315 bp, Zea mays
ggcggcccaggctctcctctccggccggcagctgctgggccgccccgtgcagtcggccgtctctaggtcgtcggcgaggaaggcgcccttcgtcgtcagggccagctccagccctccagccaagcaaggtgccgacagcagctgtggttcgcgtccaagcagtccctctcctacctcgatggcacgctgccgggagataatgctttcgacccgctgggcctctcggacccggagggcaccgggggcttcatcgagcccaagtggctggcctatggcgaggtgatcaacggccgctacgccatgctgggcgcggtg

SEQ ID NO: 14954 - DNA, 93 bp, Zea mays
ctccttactccctcacagaacccagtaaaatattgccagtcccgccgtcgagatggccccacgccgcctgctcgtcctcgccgtcgtcgccct

SEQ ID NO: 14955 - DNA, 286 bp, Zea mays
aggctgaaccttcaccattttattttagtcaggcagagtgttgtgccctttgcatcacggtattccattcagttacaggtgaattaataccgctgtgtaccggcaaccggatttacttaaagaagccaaatttgtatcgctgccaattccacaaacagaatttgcagacttttaatcaccagactgggaacaaacaatggatcgactgactcaagatgaaaacaaaacaaggtatagaagtaggtcgtgattgtcgacgatgttgtgtccgaggaaggtcccgata

SEQ ID NO: 14956 - DNA, 286 bp, Zea mays
ttggcttctcctccccctccggttcgggttcgggttcgtgaggttctccggggttcggtttcgtgggtgagcggatcgagatggcggcgtcggatgttgagtaccgctgcttcgtcggcggcctcgcctgggccacggacgaccactccctccacaacgccttcagcacctacggcgaggtcctcgagtccaagatcatcctcgatcgggagacgcagaggtcccgcggcttcggcttcgtcaccttctccacggaggaggcgatgcggaacgcatcgagggcatg

SEQ ID NO: 14957 - DNA, 304 bp, Zea mays
tggaccgtggtccgcagtcgccatggcgctcgccgtcgccgtgctcgtggccggcacgccccggtacaggtaccgccgcccgcatgagcccgctgacggcggtcggccgggtgctcgccgcggcgtggaggaagcgccggctgccgctgcccgccgacgccgccgagctccacgggttcgccgcggccaaggtcgcccacactgacaggctcaggtggcttgacaaggccgcgatcgtggaggccgagctggcggggaatcagcgggcgagcgcggcggcagcgtcgacggtgacggaggtcga

SEQ ID NO: 14958 - DNA, 301 bp, Zea mays
cccacgcgtccgtaaactgaacaacctatgcaatggagaatgtactgaaattgatactggttcttgatactttgataggtgatgtattatctggaacaacatcaggcgatgttcatcatcgtggtatattggagggctggtttggagctcatttgtggaattctcgtgccattgttcttcttgccacagctcttttggtgttcgctccgttggtgagctttaagcgcttggattcattaagatacacatctgcgctatcagttgccctggcagtagtttttgtcgtaattactgctgggat

SEQ ID NO: 14959 - DNA, 307 bp, Zea mays
tttctctatgtacatacaccaataataactacgagtgactgtgaaggtgctggtgagatgtttcaagtgacaactttatttagccaggctgagaaaactgagaaggaattgagagagaacccaaaaccttctgattctgaaattgaggcagctaaagttcttgtcaaggaaaaaggtgatgtggtcgcacagcttaaagctgcaaaagccagcaaacaagagatatcaactgctgtcgatgagcttaatagggcaaaggaaattgtttcaaaactggaggagaggttcaagttaaagcctgggattc

SEQ ID NO: 14960 - DNA, 309 bp, Zea mays
cgccggcaaggccgtgaacgtgccgtcgtcgtccgccttcggcgaggcccgcgtgacgatgcgcaagacggcggggaaggccaagccggcggcggcgtccgggagcccgtggtacggccccgaccgcgtgctgtacctgggcccactgtccggcgagccgccgagctacctgacgggcgagttcccgggcgactacggctgggacaccgcggggctgtcggcggacccggagacgttcgccaagaaccgggagctggaggtgatccactcccgctgggcatgctgggtcgcgctcggctgcgtcttccc

SEQ ID NO: 14961 - DNA, 300 bp, Zea mays
gtcacgggcacgacgagattcggcggggatggcgcggtggcgggcgcggcgcctgccgcctctggccaccttcgtcacactcggcatgatccttggatctttgcttcagttagcacttcttcatcgactagatggctattcagtgcatgcagatagtgatccagaggctgttcttcttcgccttggatatgtgaagcctgaagttatcagctggacgccaaggataattgttttccataattttcttagttcagaggagtgtgattacctaatggcaattgctagaccaagactccaaat

SEQ ID NO: 14962 - DNA, 299 bp, Zea mays
ataatagtagataagaatgataaattctcttctctgtatatcattcaaagaggtcgtgtgagacttatattggctactgatcaaatgacttcagatacttgggatctcattagtgctgaaacaaagcaggcacaaagtagtcgggaaaatggtaattatgtgcttgatatagatgacggagggcacttcggagagtggtctctcattggtgagactattgctttcactgctattgctgttggtgatgttacttgttctactatcacaaaggagaaatttgactcaattgttgggccttt

SEQ ID NO: 14963 - DNA, 301 bp, Zea mays
cctcagcccgccgccaggagagccggctcggtcggttcgtcgaagatcccggatctgctctgtcacgaggtctttcggcgggtgttgtctcgcgaggtgtagcgagccaagttcaggagagtttcgagaagctgaaatggctcctaaagctgctcctgccaagaagggtgatgccaagacccaggccttgaaggttgccaaggctgtgaagtctgggtcagtaaagaagaccaagaagatccgcacgtccgtgacatttcaccgccccaagaccctgaagaaggctagggaccccaagtac

SEQ ID NO: 14964 - DNA, 301 bp, Zea mays
cttcaagtctcgctacgtagcagtgcaataaaaaaagcagccgcaatggcgagcagcaccatggccctctcctccacggccttcgccggcaaggccgtgaacgtgccgtcgtcgtccgccttcggcgaggcccgcgtgacgatgcgcaagacggcggcgaaggccaagccagcggcggcgtccgggagcccgtggtacggccccgaccgcgtgctgtacctgggcccactgtccggcgagccaccgagctacctgacgggcgagttcccgggcgactacggctgggacaccgcggggctgt

SEQ ID NO: 14965 - DNA, 318 bp, Zea mays
caagccctttgggaagcagctcagggacaaatacgtggagacacagcagcttctcctccagatcgctgggcacaaggatattcttgaaggcgatccattcctgaagcaggggctggtgctgcgcaacccctacatcaccaccctgaacgtgttccaggcctacacgctgaagcggataagggaccccaacttcaaggtgacgccccagccgccgctgtccaaggagttcgccgacgagaacaagcccgccggactggtcaagctgaacccggcgagcgagtacccgcccggcctggaagacacgctcatcctcaccat

SEQ ID NO: 14966 - DNA, 315 bp, Zea mays
agcagatcattgtctcttgtgtacagtggaatgtaccttgggtcagttacaggacttgcattttcccccttgctgatacataagttcggttggccatcagtcttcttttcatttggatccctagggcttgtttggttcacgacatgggcaaccaaggcatatagttccccacttgaagatcctggaatcagcgctgcagaaaagaagcttattgctagtcagagcacagcaggcgaacctgttaaaacaattccatggagattaatactatcaaaaccacctgtttgggcacttatagtttctcatttctgccat

SEQ ID NO: 14967 - DNA, 317 bp, Zea mays
ggcacacacaccacaccacacctcctcgcttccactccgctcgtctgacatctcgtcccgtcctttcgtttcgaagcctcgcgagccccgacgatggccaccgccgcggtgtcggtcgacgagaagctcgacaagcttcgcgccgaggtcgccaagctcgaccagatcagcgagaacgagaagtccgggttcatcagcctcgtgtcacgctacctcagtggggaagcggagcagatcgagtggagcaagatccagacccctacggatgaggtggtggtgccctacgataccgtcgcgtcgcctcccgaagatctcga

SEQ ID NO: 14968 - DNA, 317 bp, Zea mays
cggacgcgtgggcgagacgcgtgggcgacgagcaactgctggcgtactctgagctgcccatacatggccgcgacatggcggaggtgttcgccgtgcgcatcccggccatcgccggaagagacccgccgccccgtggcatcatctctttctacggcggccactgctgcagcgatttcatttacagctggaactcactggaagaggaagaagacacctcgaagcaaacctgcgacaccagcccgcaagccggagaagccgctgaggacgacgaggacatcgggaggataatctgcgactgcatcggcgacgacttctcc

SEQ ID NO: 14969 - DNA, 315 bp, Zea mays
cgctactgcgacctccccaccccactcccccgcaggagcggcggcggcggcggcggcgaggtcgtaccccacatcggcgagcggcggcggcaccgcggaggcaaaggcaagatgttcgggcgcgcgccgaagaagagcgacaacaccaagtactacgagatcctcggggtgcccaagtcggcgtcccaggacgacctcaagaaggcctaccgcaaggctgctatcaagaaccaccccgacaagggcggtgaccccgagaagttcaaggagctcgcacaagcctatgaggttttgagtgatccagagaaacgtgag

SEQ ID NO: 14970 - DNA, 311 bp, Zea mays
cggacggtgggtcaaacgccggcacgcgcacgcagacacgatggcgatctgcagcgcgcacactaccacctccctgcgctccccatgcacgaccgtctcgaacacaggtctgaggcagaagcaagtcatcttcgtcaccagcaacaggaggagcggcggcggcaggaggcacggaggggcaaggagcttccaggtctcgtgctccgtcgacaagccggtggtgattggcctggcggcagactcagggtgcggcaagagcaccttcatgcgccggctcaccagcgtcttcggtggcgccgcggagccgccca

SEQ ID NO: 14971 - DNA, 312 bp, Zea mays
tcttagtaatgaggagataatgaatccaaagaccaaaaacatccgattgtatgtcaaaagagtgttcatatcagatgattttgatggcgagctgttccccagatacttgagctttgtgaaaggtgtagttgactcaaatgatctccctctcaatgtttctcgcgagatccttcaagaaagtagaattgtcagaattatgcgtaagagacttgttaggaagacatttgacatgattcaagagattgccgagaaggatggcaaagaggactacaacaaattctgggagagctttggcaagttcatgaagcttgg

SEQ ID NO: 14972 - DNA, 310 bp, Zea mays
caacccccaacagcgccactgtccagtgcgcgcgtcaagcttgcttagctagccgccatggcctccctcgccgccgtctccgtgaagcccgtggccatcaagggtctcgccggcagctccatctccggaaggaagctcgccgtcgccaggccgtcggcccgctccatccgcaggccccgcgcaccgccgtggtggccaagtacggcgacaagagcgtctactttgacctcgacgacatcggcaacaccaccggacagtgggacctctacggctctgacgcgccctcgccctacaacccgctacagagcaa

SEQ ID NO: 14973 - DNA, 310 bp, Zea mays
ggcaagcaaacatctccggcagccatggcgtccactgtaacagccgccaatagcagccatggaagcgccctgcgtacccgtaccgcctccccaaggccggtcgcgggctggagctgcagacgcacgctttccacgcctgcacaccaccaccacgcgcggccgtcacccagagctcgggttgtcgccgtccgagccgccggcactcagcgggcgacctggttgcccggactggacccgcccccatacctcgacggcacactaccaggtgacttcggcttcgaccctctgggcctcggcgaggagcccgaag

SEQ ID NO: 14974 - DNA, 307 bp, Zea mays
cccacgcgtccgaccaaggagagtacgtggaggagcagccatggcttcatcggtggccgccgcggcgagcacattcctgggcacccgcctggcggacccggcgccacagaacgggcgcatcgtggcccggttcgggttcgggttgggcggcaaggcgaagctgctccgaagaaggtggcgaagacatcgacctcctctgaccggccgctgtggttccccggcgccgtggcgccgactacctggacggctcgctggtcggcgactacgggttcgacccgttcggtctcgggaagccgtggagtactgc

SEQ ID NO: 14975 - DNA, 309 bp, Zea mays
gatggacccggacacggaggagcagtacgacttcgacccgctggacgacaccaagacgtggccggaggacctgctgccgctccgccccgtggggaggctggtgctggacaggaacgtggacaacttcttcaacgagaacgagcagctggcgttcgggccggggctggtggtgccagggatctactactcggacgacaagatgctgcagtgccgggtgttcgcctacgccgacacgcagcgctacaggctgggaccaaactacctgatgctgcccgtcaacgcgccgcgctgcgcgcaccacaacaacca

SEQ ID NO: 14976 - DNA, 302 bp, Zea mays
ctccactccagcactgaacacttgattgattcagtaggtagctagctagctgaatcacaatggatcctaccaagttccgtccgtccagtagccacgacacgacggtgacgacgacgaacgctggcgctcctgtgtggaacgacaacgaggcgctgactgtggggcctcgcggtcccatcctgctggaggactaccacctgatcgagaaggtggcgcacttcgcgcgggaggcatcccggagcgcgtggtgcacggcgcggggcctccgccaagggcttcttcgggtgcatccacgaccgtac

SEQ ID NO: 14977 - DNA, 306 bp, Zea mays
cgaaggctagggatgtggagcccgagcccgaggcagagccgatggatttgactgatgaggaaaaggaccgcaagcagacgaaagctgctgctcagaaagagaaggagttaggtaacgcagcttacaagaagaaggacttcgaggtggcaatccagcattacaccaaagccttggaacttgacgacgaggatatttcctatctgactaaccgagcagcagtctacattgagatgggaaagtacgatgaatgcatcaaggactgtgataaggctgtggagaggggaagagaacttcgtgctgatttca

SEQ ID NO: 14978 - DNA, 302 bp, Zea mays
cccacgcgtccggagctcaccatcaaggactacccctacgcccacgacgggctcctggtctgggactccatcaggcagtgggcgtccgagtacgtcaacgtctactacaagtccgacgaggccgtggccgccgaccccgagctgagggcgttctgggacgaggtgcgcaacgtggggcacggcgacaagaaggacgagccgtggtggcccgtgctggacacccgcgacagcctggtggagacgctgaccaccatcatgtgggtcacctccggccaccactcggccgtcaacttcggccagta

SEQ ID NO: 14979 - DNA, 303 bp, Zea mays
cccacgcgtccgccatcctcgtggcgagctccatcctgcacatgctcaacctcgccaacctggccgaggaggtgcagatcgcgcaccgccgccgcaacagcaaactcaagaaaggtggcttcgccgacgaaggctccgccaccaccgagtccgacatcgaggagacgctcaagcgcctcgtgtccgaggtcggcaagtcccccgaggaggtgttcgaggcgctcaagaaccagaccgtcgacctcgtcttcaccgcgcatcccacgcagtccgcccgccgctcgctcctgcagaaaaacgcga

SEQ ID NO: 14980 - DNA, 104 bp, Zea mays
atcaagggtcacatgaccaccacccactcctacacctgcgaccagaggctgctggacgcgatccaccgcgacctgctccgctcccgcgccgccgcgctcaacat

SEQ ID NO: 14981 - DNA, 300 bp, Zea mays
gcagcctcatccccttgcccacttctacagcccctctgctgcagcaagaaggaaagaagctagcgcttatagcttgtcagccatggccaccgccgccgcgtctagcctcctcaagtcctccttcgcgggctcccggctcccggccgccacgcggaccacaccggcgtccctcgtggtggccaccggcccgcgcggcgccggcgcggggcccatctgcgcgtccatgtccatgtcctcctccaacccgccctacgacctgacgtccttccggttcagccccatcaaggagtccatcgtgtc

SEQ ID NO: 14982 - DNA, 301 bp, Zea mays
accggcgccaccactccaacacggggtccctggagcgcgacgaggtgttcgtgcccaagaagaaggaggcgctgccgtggtacaccccgtacgtgtacaacaacccggtcggccgggtggtgcacatcgtggtgcagctcaccctcgggtggccgctgtacctggcgaccaacgcgtcggggcggccgtacccgcgcttcgcctgccacttcgacccctacggccccatctacaacgaccgggagcgcgcccagatcttcgtctcggacgccggcgtcgtggccgtggcgttcgggctgta

SEQ ID NO: 14983 - DNA, 299 bp, Zea mays
gaacgaactgaggtcgacgacgactgatcgagcagcgacgatggcggctgtgctgaacagcaggaagacgccgcagtggttgccgtgctggtggcggcggcgctgctggcgtcgtccgcttcggcggcgatcacctgcgggcaggtggggtcgtcgctggctccgtgcatcccgtacgcgacggggagggccagcgcgctccccgcgtcgtgctgcagcggcgtcaagagcctcaacagcgctgcgcggaccagcgcggaccgccaggcggcgtgccgctgcctcaagagcctcgccaa

SEQ ID NO: 14984 - DNA, 303 bp, Zea mays
agcagtcgccatgtctggcatcatccacaagatcgaggagaagctccacatggggggcgaccacaagaataaggaggaggagcaccacaagaaggccgaggagcaccacaagaaggggagggggagcaccacaagaaggacggcggggagcacaaggaaggcatcgtggagaagatcaaggacaagatcaccggcgagcacggcgacaagtccggcgaccacaaggagaagaaggacaagaagaagaaggataagaagaagcacggcgagggccacgaccacgacggcggccacagtagcagc

SEQ ID NO: 14985 - DNA, 301 bp, Zea mays
gcagcttctccgtgctgctgcgtctcctcctcatcgtcctctccagtgtccagctcggccatggcgttcaccgtctccttctcccccgccaacgttcagatgctccaggctaggagtggccacggccacgccacctttggaagctgttccgccgtgccaagagccgggccaaggctgcgctccacggccgtccgggtcagcagcgagcaggaggcggcggcggccgtcagggcgccgtccgggaggaccatcgaggagtgcgaggccgacgccgtcgctgggaagttccctgctcccccgc

SEQ ID NO: 14986 - DNA, 295 bp, Zea mays
gagatttcggtgatgaagttggtaaaacatccaaacattgtccaattgtatgaggttatggctaccaaaaccaagatatattttgtgatagagtatgtcaagggaggagagttgttcaaaaaggttcaacgtggaaggttaaaagaagatgttgctcgtacatatttccaacaattgatcagtgctgttgacttctgccatactagacaagtttatcatagagatctaaagcccgaaaatcttcttcttgacggaagtcacaacttaaagatttcagactttggtttgagtgcac

SEQ ID NO: 14987 - DNA, 298 bp, Zea mays; identical to SEQ ID NO: 10687

SEQ ID NO: 14988 - DNA, 120 bp, Zea mays
cacgcacgcatacacagcacagagtgaggtaagcatccgaaaaaagctgtgatctgatcgacatggccgccgccaccatggctctcacctcccgcgcgctcgtcggcaagccggcgacca

SEQ ID NO: 14989 - DNA, 120 bp, Zea mays
caagctcgattgcccggcgattggcaagcagttcgcagctgaggagatctccgcacaggtgctgagaaagctggtggatgatgcatcaaagtttttgaatgacaaggtcacaaaggcagt

SEQ ID NO: 14990 - DNA, 72 bp, Zea mays
tcttcattcaataatcaatatagaacttgtatgtttgtttcaactctagagttgactagttctagatcgcga

SEQ ID NO: 14991 - DNA, 153 bp, Zea mays
cccacgcgtccgggagacacagcagcttctcctccagatcgctgggcacaaggatattcttgaaggcgatccattcctgaagcaggggctggtgctgcgcaacccctacatcaccaccctgaacgtgttccaggcctacacgctgaagcggat

SEQ ID NO: 14992 - DNA, 121 bp, Zea mays
cccccttcaggtaaggaagacgaggagggcaggatgtcgcaccgtaagttcgagcacccgaggcacggctccctcggcttccttcccaggaagcgctcctcccgccaccgcggcaaggtga

SEQ ID NO: 14993 - DNA, 314 bp, Zea mays
cccacgcgtccgcccacgcgtccgcccacgcgtccgcctcctgattattttgacaagaatggacaaaattggggttttcctacatataactgggaggagatgtcaaaggataattatgggtggtggcgagctcgtctgacacagatggcaaagtacttcacagcatacaggatagaccacatcttgggtttctttaggatatgggagcttcaagatcatgctgcaacaggtttagttgggaaatttagaccttccatccctcttagtcaggaggagcttctaagtgaaggtctatgggattttaatcggatgag

SEQ ID NO: 14994 - DNA, 117 bp, Zea mays
gcgaggagtatgatgagcttattgaagagttcatgtctgctgttaagccattctatggtgagacagtcctcattcagtttgaggactttgccaatcataatgcctttgatttgcttg

SEQ ID NO: 14995 - DNA, 117 bp, Zea mays
gccaccatcgaccttcaagtctcgctacgtagcagtgcaataaaaaaagcagccgcaatggcgagcagcaccatggccctctcctccacggccttcgccggcaaggccgtgaacgtg

SEQ ID NO: 14996 - DNA, 120 bp, Zea mays
cacgcatactgcatacacaactcagagcatcagaaggagctgcgatctgatcgacatggctgccgccaccatggctatcacctcccgcgcgctcatcggcaagccggcggctggcacgag

SEQ ID NO: 14997 - DNA, 324 bp, Zea mays
cgaacgtgtccgtggtggacctggtgatcaacaccgtgaagactggcatcacggccgacgacgtgaacgcggcgttccgcaatgccgccgccggcccgctgcagggcatcctggatgtctgcgacgtgccgctcgtgtccgtcgacttcaggtgctccgacgtgtcctgcaccatcgacgcgtcgctcagcatggtcatgggcgacgacatggtcaaggtcgtcgcctggtacgacaacgagtgggggtacagccaacgcgtggttgatctggcgcacctggtggcggccaagtggcccggcgcggcggcggccggcagcggcg

SEQ ID NO: 14998 - DNA, 325 bp, Zea mays
gtctggagagacaggacctatggtcaatgaagaagatatccagcacatagtatcttcatggactggcatccctgtggagaaggtttccagcgatgaatctgataagcttcttaagacggaagagactttgcacaagcgtgtcattggccaagatgaggctgtggtagcaattagtcgctccatccgccgtgctcgtgtgggtctcaagaaccccaacaggccaattgcaagctttatttttgctggtcccaccggcgttgggaagtctgagcttgcaaaggctcttgcagcctattactttggctctgaggaggctatgatccgg

SEQ ID NO: 14999 - DNA, 323 bp, Zea mays
ggagaagaagacgagtgtcaagtgaacctgaaacttgcggtgtcactggctggtagcctgagtgtgagtgagtgatcgagctagctgagctccgatcctcgctagctaggataccgccataccacaagtcttcttcacaagtttaggagtgacagcaacaagagatcgatggcctctgccaccgtgctcaagtcctccttccttcccaagaagtccgaatggggcgccaccaggcaggccgccgcgcccaggccgcccaccgtctccatggtcgtccgcgcctccgcctacgccgatgagctcgtgaagaccgcgaaaacgat

SEQ ID NO: 15000 - DNA, 319 bp, Zea mays
gtgcatgactggtctggacaagaagaaagcttgtgtctttttcaagactaatgctgatgggaacacaacatgtgccaaggaaatgacaaagctctctggcatctctgaaatcatccccgagatggagatctgcgattttgacttcgaaccctgtggctactccatgaatgcgatccatggctctgcattctccacaatccatgtgacgcccgaggacggtttcagctacgccagttacgaggttatgggcttggatgccactgctctgtcttatggtgaccttgtcaagagggtcctccggtgctttggcccctcagag

SEQ ID NO: 15001 - DNA, 321 bp, Zea mays
  unsure (1)..(321): unsure at all n locations
cggacgcgtgggcggacgcgtgggctagcagccgctcactccagccattacccgcagctagcaaacaaatggccaccgtcctgagcagcccccgcgcgccggcctctctcttctccctccgcgccgcgccaggcnccactaccgtggccatgacccgtggcggtggcgcagcagcaggctgcgcgcgcaggccacctacaacgtgaagctcatcacgccggatccggaggtggagctgcaggtgcccgacgacgtctacatcctggactaccccgaggaggaaggcatcgacctgccctactcctgccgcgcggggtcctg

SEQ ID NO: 15002 - DNA, 322 bp, Zea mays
  unsure (1)..(322): unsure at all n locations
caagatcaggataccttatcgacccgtggagtgtaatctttcttcacttcccactgaccgtgataaattgccctctggcaagcaaattattgccctgaccttaacttacaagttcaaattagaagacaatgctgaaataaagccccatgtgccactgcttaacaacagaatatatgaccataaatttgagtctcagttttatagaatatcagattcaaacaagcgtatttactcgtccggagacgtttaccctagttatgtcagactttccanaggagaatacacgttgcaactgtacataaggcatgagaatgtgcaattc

SEQ ID NO: 15003 - DNA, 317 bp, Zea mays
  unsure (1)..(317): unsure at all n locations
ggcagagaagaagtcgccgtgctcaaggctcagccgcagttcctcaatgactggaaggccaagctctggtcacggttcttctgcctctcggtacatggtcacatacaccgagacgcagaagaaccgtgaccagagcttggccttctgcctctcggtgtatgtgaccatgtacctgaatgactgccaacgcactgcattctatgagggaattggtctggacatcaaagaattcgacatgcatgtgatcatcgagaccaaccgcacaacggcgaggatcttccctgctgtcctagaccccgaganacccgagttcaaga

SEQ ID NO: 15004 - DNA, 317 bp, Zea mays
ctcgccacacacaccccctctccagctccgttggagctccggacagcagcaggcgcggggcggtcacgtagtaagcagctctcggctccctctccccttgctccatatgatcgtgcaacccatcgagctacgcgcgtggactgccttccctgggtcggcgcaggaggggatcggaaggatggcggcgtcggtttccagggccatctgcgttcagaagccgggctcaaaatgcaccagggacagggaagcgacctccttcgcccgccgatcggtcgcagcgccgaggcccccgcacgccaaatccgccggcgtcatcc

SEQ ID NO: 15005 - DNA, 311 bp, Zea mays
ctctctcctactgtactgctgcctaccgctcgtctcgtcccttcgctgccgctctatctatctcggccggatccatggtctgcggtggcgcggcgcttctgctgctggtgatgttggctgtcttggcgtcgtcggccgtgtacgaggtgggcggcacgattgggtggaccgtcatgggcaacccctactactccgcctggtccagctccatgcagatcgtcatcggcgacaccgttgtgttcacgtataacaagcagttccacaacgttctggctgttagcaatgcggactacaagaactgcttcgccacc

SEQ ID NO: 15006 - DNA, 312 bp, Zea mays
  unsure (1)..(312): unsure at all n locations
gagaggagaaagggcaaaatgcaacaccgcccgcgacgaccacgatggcagcctcgctccaagtccaagccgcggccaccttgatgcaaccggccaagatcggctgccggtcgccgtccgtctcgctgccgtcgtcccgcccgtcgtcgcaactcgcctaggcgntcggcgtcgacgccggcgccgccaggatcacgtgctccctccagtccgacgtcagggacgtcgccagcaagtgcgtcgacgccgccaagctcgccggcttcgcgctcgccacctcggctctccgcgtctctggctcgacgcggaggg

SEQ ID NO: 15007 - DNA, 285 bp, Zea mays
cccacgcgtccgaagaagacgagtgtcaagtgaacctgaaacttgcggtgtcactggctggtagcctgagtgtgagtgagtgatcgagctagctgagctccgatcctcgctagctaggataccgccataccacaagtcttcttcacaagtttaggagtgacagcaacaagagatcgatggcctctgccaccgtgctcaagtcctccttccttcccaagaagtccgaatgggtgcgcaccaggcaggccgccgcgctcaggccgcccacagtctcaatggtcgtcc

SEQ ID NO: 15008 - DNA, 306 bp, Zea mays
gatgctcaggcattcgcgtaaacgatgcggagaagctcgtgacgatcggaggccatgtgctgcgcgaaggtgagtggctgtcgctgaatgggtcgactggtgaggtgatccttggaaagcagccgctttccccaccagcccttagtggcgatctgggaactttcatggcctgggtggatgatgttagaaagctcaaggtcctggctaacgccgatacccctgatgatgcattgactgcgcgaaacaatggggcacaaggaattggattatgccggacagagcacatgttctttgcttcagacgaga

SEQ ID NO: 15009 - DNA, 311 bp, Zea mays
gactaatgtggctttcaagtgtatttcaagctcagtcatagattgaaaggggaaatggagtcttcggcgaagacaaggcttccactccactccatcgaattattcatccttcgccgtcgctccgcaccgctctccaactttgagaccttccttcctgatataggaaggcagggttcatgagcggcggcacgcatgcagcaagcagtagcctgcgggcagcactctcatactgcgtgaggcaagtccgcgcctatgactaccaccactacctctgccttctccacctggccccggccgtgcgcaaggccgcg

SEQ ID NO: 15010 - DNA, 320 bp, Zea mays
agcggttctacctgcagccgctgccgccggcggaggcggtggcgagggtgaagacgtcggcgcaggacatcatcaacctcaagccactcatcgacaagaaggcgtggccgtacgtccagaacgacctccgcctccgggcctcctacctgcgctacgacctcaagaccgtcatcgcttccaagcccaaggaggagaagcagagcctcaaggagctcaccggcaagctcttcagcaccatcgacgatcttgaccatgccgcaaagatcaagagcaccccgagagccgagaaatacttcgcagcaaccaaagatgcgctcggc

SEQ ID NO: 15011 - DNA, 314 bp, Zea mays
ccaaggatggacagacccgtgagcatgctctccttgctttcacgcttggagtgaagcagatgatttgctgttgcaacaagatggatgccaccacacccaagtactccaaggcccgttatgatgagattgtgaaggaagtctcttcctacctgaagaaggttggatacaaccctgacaagatccacttcgttcccatctctggtttcgaaggtgacaacatgattgagaggtccaccaaccttgactggtacaagggcccaaccctacttgaggctttggacttgatcaatgagccgaagaggccttcagacaag

SEQ ID NO: 15012 - DNA, 311 bp, Zea mays
cctagctcccgcaactgccgccgccactcccacgcccgcagccatgccgcccaagctcgacccgtcgcaggtggtggaggtgttcgtccgtgtgaccggcggcgaggtcggcgcacgtcttcgctggcccccaagatcggcccgctcggtctttcccccaagaagatcggagaggacatcgccaaggagacggccaaggactggaagggcctccgcgtcaccgtcaagctcaccgtccagaaccggcaggccaaggtctccgtcgtcccctccgccgcggcgctcgtcatcaaggcgctcaaggagccaga

SEQ ID NO: 15013 - DNA, 301 bp, Zea mays
atcgggctcccccaccatccgtggcccgacgacgtccccatttccaagctcctcctcgcgattccaatccacgcacgcctcctccgcttccgcctcgctcaggcttatagtcagtgatggaacacaaggaggcgggctgccagcagccggagggcccaatcctatgcatcaataactgcggcttcttcggcagtgctgcgacgatgaacatgtgctccaagtgccacaaggagatgataacgaagcaggagcaggcccagctggctgcctcctccatcgatagcattgtcaatggcggtga

SEQ ID NO: 15014 - DNA, 301 bp, Zea mays
cccacgcgtccggggcagctctggtggctgatgagatagcggacaggctgaattcttctccttcggaacgaacgacctgacgcagatgacctttgggtacagcagggatgatgtgggaaagttcattcccgtctatcttgctcagggcattctccaacatgaccccttcgaggtcctggaccagaggggagtgggcgagctggtgaagcttgctacagagaggggccgcaaagctaggcctaacttgaaggtgggcatttgtggagaacacggtggagagccttcctctgtgagcttcttc

SEQ ID NO: 15015 - DNA, 269 bp, Zea mays
ggctctcttgagcgttataaggtcacttgatcacccgtggcttccagcaggaacattattgtgactacgatgatacttttgcgatgttgctcaaatgaccactgttcacactcttcttgatgtgacctctgttcgtgagtggtctatctctaaacttgatgtcaataatgtcttccttaatggtgaactgcatgaagaggtctacatgcatccaccacctggttattatgtcactgtgggcatggtttgtcgcctatgatgctcccttt

SEQ ID NO: 15016 - DNA, 301 bp, Zea mays
cgacgatatctgctcctcacatgcatgcgacctgcttagagctattgaaggatcatttgcaaccaggaatgcatgctctggatgtcggatcaggtagtggctacctgacagcttgttttgccatgatggttggaccagaaggccgtgcagtgggaattgaacacgttcccgagatcgttgcttcttctgttgaaaatgtgcaaagaagcgctgctgctccactactgagggatggatcgctctcttttcatgttacagatggcaggcttggctttccagacgcggcaccctacgacgctat

SEQ ID NO: 15017 - DNA, 304 bp, Zea mays
cgccatcacataaaaccagtgcaagcagaagcagcgcaatggcgagcagcaccatggccctctcctccacagccttcgccggcaaggcagtgaacgtgccgtcgtctctcttcggcgaggcccgcgtgacgatgcgcaagacggcggcgaaggcaaagccggcggcgagctccggcagcccgtggtacggccccgaccgcgtgctctacctgggcccgctgtccggcgcgcccccgagctacctgacgggcgagttcccgggcgactacggctgggacaccgcggggctgtcggcggactcgga

SEQ ID NO: 15018 - DNA, 302 bp, Zea mays
cgcagttccccgaccacaccgttcctccgagcccaggagcagccccgcgccatgaggaagtttgttcttttaacaatatgtcgagggaggagaatgtttacatggccaagttggctgagcaggctgaaaggtatgacgagatggttgagtatatggagaaggtggctaagactgtagatgtggaagaggtcactgttgatgagcgtaaccttctgtctgttgcatacaataatgttattggggctcgccgcgcttcatggcgcattgtttcttccattgaacaaaaggaggagtcccgtaag

SEQ ID NO: 15019 - DNA, 268 bp, Zea mays
ccctttcagggttccgattgctaggctagctgcagctcaggtgcttgtctgaggctgcctcctcattggcaaccggattgcctgctgctggtggatgtggtgatcaacagtattattacagagccatgctatgtgaacattactagtagcagtgctcataaaagctacaatcccatgtcctttttttaccccagtcatgtaaaacttccaaactgctccatggttcaaaactctgttcttcaatacatcatcaattatcgattataaa

SEQ ID NO: 15020 - DNA, 99 bp, Zea mays
gacattttcattacagacggagcaaatcctggggtccacatgatgatgcaattactgattaggaatgagaaagatggcattctgtgcccaattcctcag

SEQ ID NO: 15021 - DNA, 296 bp, Zea mays
cccgaagaaggtggcgaagacgtcgatctcctctgaccggccgctgtggttccccggcgccgtggcgccgactacctcgacggctcgctggtcggcgactacgggttcgacccgttcgggctcgggaagcccgtggagtacctgcagttcgaactggactcgctggaccagaacctggccaagaacgaggccggcggcatcatcggcacccggttcgagtcctccgacgtcaagtccaccccgctccagccctacagcgaggtgttcggcctccagcggttccgcgagtgcgagct

SEQ ID NO: 15022 - DNA, 296 bp, Zea mays
gtgtagtgtgtagtcgcagcagctagcgcccggccggccagtcgagtgagtccatcctccatcgccatccaatggccgccaccgccctgagcatgagcatcctccgcgcgccgccgccctgcttctcgtccccactcaggctcagggtcgcggttgccaagccgctggcggcccccatgcggcgccagctgctgcgcgcgcaggccacctacaacgtgaagctgatcacgccggatggggaggtggagctgcaggtgcccgacgacgtctacatactggacttcgccgaggaggaa

SEQ ID NO: 15023 - DNA, 179 bp, Zea mays
  unsure (1)..(179): unsure at all n locations
gatccaccactccaccagtccggtccatctgctggacctcgattggtttcttcttacctaggaacatccggggatgtcgactcctgcgaggaagaggctgatgagggatttcaagcggttgatgcaggaccctccggccggcataagtggcgccccgcangataacaacataatgctgt

SEQ ID NO: 15024 - DNA, 326 bp, Zea mays
gttgcatcttcagacgcgacaaatatagaatgctcaatatccaggcaaggagatttttttgtgataaatggaaggaagtggtggaccagtggagctatggatcctaggtgcaaaatcctgatattaatgggaaagacagatttttctgcacctaagcataagcagcagtccatgattttagtggacatcaacactcctggggtgcagataaagagaccattgttagtctttggttttgatgatgcacctcatggacacgcagagattacatttgaaaatgtgcgtgttccagtaacaaatatcctgctaggagaagggcgtggttt

SEQ ID NO: 15025 - DNA, 334 bp, Zea mays
gcttcctcaacatccttcaggacctcctgcgccaggtgttcacgttcgggctctccctggtgaagctggacatccggcaggagtcggagcggcacaccgacgtgatcgacgccatcaccacgcacctcggcatcgggtcgtaccgcgagtggtccgaggacaagaggcaggagtggctgctgtcggagctgcgaggcaagcgcccgctgctgcccccggaccttccccagaccgacgagatcgccgacgtcatcggcgcgttccacgtcctcgcggactcccgcccgacagcttcggcccctacatcatctccatggcgacggccccctcggac

SEQ ID NO: 15026 - DNA, 331 bp, Zea mays
cccacgcgtccggcgagccatcgacacgatcgcgagcgcaacacgtacgttgtcggaagctcaagttagaagaagcaccagtgcctgatcgatggcggcccaggctctcctctccggccggcagctgctgggccgccccgtgcagtcggccgtctctaggtcgtcggcgaggaaggcgcccttcgtcgtcagggccagctccagccctccagccaagcaaggtgccgacagcagctgtggttcgcgtccaagcagtccctctcctacctcgatggcacgctgcccggcgactatggcttcgacccgctgggcctctcggacccggaggcac

SEQ ID NO: 15027 - DNA, 325 bp, Zea mays
cggacgcgtgggtggcgaactcttctctgtactagctttcttcttcttcctcctcttcctcctcccaaacagactggatttcatcaagataatcctgaaacatggagccaacaagcagacagagaaagaagagcaagaagaccggctcccagccgatacaaggtaggagtgagcagcgttagatcagttttcatcacaggatcgatatggtgacagtgagagaggagactcgcaaggggccatggacagagcaggaggacatgcaactgggctcaaccggacaggcaagagctgccggctgcgctgggtcaactacctccaccct

SEQ ID NO: 15028 - DNA, 310 bp, Zea mays
agcaagcagcgagtacatacatactaggcagccaggcagccatggcgcccaccgtgatgatggcctcgtcggccaccgccgtcgctccgttccaggggctcaagtccaccgccagcctccccatcgcccgccgctcctccagaagcctcggcaacgtcagcaacggcggaaggatccggtgcatgcaggtgtggccggcctacggcaacaagaagttcgagacgctgtcgtacctgccgccgctgtcgacggacgacgtgctgaagcaggtggactacatgctgcgcaacggctggataccctgcctcga

SEQ ID NO: 15029 - DNA, 121 bp, Zea mays
cacacgcgtccgcacacgcgtccgcccacgcgtccgcccacgcgtccgcccacgcgtccgggacatcccccgctcactgttcgaagagaagcttgagcacatgaaggaatccaaggggctg

SEQ ID NO: 15030 - DNA, 321 bp, Zea mays
cggaccgtgggagaaagggcaaaaggcaacaccgcccgcgacgaccacgatggcagcctcgctccaagtccaagccgcggccaccttgatgcaaccggccaagctcggcggccgggcgccgtccgcctcgctgccgtcgtcccgcccgtcgtcgcaactcgccagggcgttcggcgtcgacgccggcgccgccaggatcacgtgctccctccagtccgacgtcagggacgtcgccagcaagtgcgtcgacgccgccaagctcgccggcttcgcgctcgccacctcggcgctcctcgtctcgggcgcggcgcggagggcacg

SEQ ID NO: 15031 - DNA, 327 bp, Zea mays
agcaatagcctgcaaagctctgtcagtaacagcctttgaacctaggctggtgtgatgatgttacagataagggagtgaccagcttagcgtcaggatgccctgatctcagagccgtagacttgtgcggttgtgttcttataacagatgagagtgtggttgctcttgccaacggatgtccgcacctgcgctcgctgggcctctacttctgccagaacatcacggaccgcgccatgtactccctcgcaaacagccgcgtgaagagcaagcgtgggaggtgggatgcagtgaaagacgggctcgcgaacctcaacatcagccagtgcaccg

SEQ ID NO: 15032 - DNA, 318 bp, Zea mays
gccatcgacacgatcgcgagcgcaacacgtacgttgtcggaagctcaagttagaagaagcaccagtgcctgatcgatggcggcccaggctctcctctccggccggcagctgctgggccgccccgtgcagtcggccgtctctaggtcgtcggcgaggaaggcgcccttcgtcgtcagggccagctccagccctccagccaagcaaggtgccgacaggcagctgtggttcgcgtccaagcagtccctctcctacctcgatggcacgctgcccggcgactatggcttcgacccgctgggcctctcggacccggagggcacc

SEQ ID NO: 15033 - DNA, 261 bp, Zea mays
cgctgacatctgcgccaaccagtggaagtgaagcgttgcattgtaatagcactttgtaactcctcaccctccacagggctttgggattcaccccgaaatgactcactttcggtgaaattcacccgtttcggcgaggtcgtccgaatataccggccaaatgtttccattggatttcaattattagtcaactctagagttgaaacaaacatacaagttcttcattcaataatcaatatagaagtgcatatctgtttcctcttc

SEQ ID NO: 15034 - DNA, 326 bp, Zea mays
gcgactggcgaggagtatgatgagcttattgaagagttcatgtctgctgttaagcaattctatggtgagaaagtcctcattcagtttgaggactttgccaatcataatgcctttgatttgcttgaaaaatatagcaagagccatcttgttttcaatgatgatatccagggcacagcatcagtggtccttgcaggtttgttagcagcactcaagatggttggtgggaccctggcagagcagacttatttgttccttggtgctggggaggctggaactggtattgcagaacttattgctcttgagatttcgaaacagacgaatgctcc

SEQ ID NO: 15035 - DNA, 330 bp, Zea mays
acgagatcacgcttctcgttggatcgaacagctagggtttccaagatgttcgggcgcgcgccgaagaagagcgacaacacacggtactacgagatcctcggggtctccaaggacgcgtcccaagatgacctcaagaaagcctaccgcaaggccgccatcaagaaccaccccgacaagggcggcgatcccgagaagttcaaggagctagctcaggcttatgaggtcctcagtgatcctgaaaagcgggagatttatgatcaatatggtgaggatgccctcaaggagggaatgggaggtggtggagggatgcacgatccctttgacatattc

SEQ ID NO: 15036 - DNA, 217 bp, Zea mays
agtatgtattggacagagcaacagttctactcactgatcaccatgtggcttctaactacagcatgcggaatcgatctctatggcaggcatcattcgacgccttttttgggctgcttacacagtactgcatgagtaagtttgatcgtgtggttcatactgcccaattgcaacctgctgctgcaaccgttataaccagggaaatgccagtagagcttct

SEQ ID NO: 15037 - DNA, 206 bp, Zea mays
tgggcgcaggcgacggcgggctcgtcttcgagcccagccagttcaccgtcaaggccggcgacaccatcacattcaagaacaacgccggcttcccgcacaacgtcgtcttcgacgaagacgaggtgccgagcggcgtcgacgccaccaagatctcgcaggaggagtacctcaacgcgccaggcgagacctactccgtcaccctcacc

SEQ ID NO: 15038 - DNA, 317 bp, Zea mays
gctgtacaacacacgcgagcgtgctcgccatctgctggcatctggagtttctgaaatttcagcggaatcgtcatttaccagtatcgaagagttccttgagccacttgagctgtgctacaaatcactgtgtgactgcggcgacaaggccatcgcggacgggagcctcctggacctcctgcgccaggtgttcacgttcgggctctccctggtgaagctggacatccggcaggagtcggagcggcacaccgacgtgatcgacgccatcaccacgcacctcggcatcgggtcgtaccgcgagtggtccgaggacaagaggc

SEQ ID NO: 15039 - DNA, 319 bp, Zea mays
agctagcgcttatagcttgtcagccatggccaccgccgccgcgtctagcctcctcaagtcctccttcgcgggctcccggctcccggccgccacgcggaccacaccggcgtccctcgtggtggccaccggcccgcgcggcgccggcgcggggcccatctgcgcgtccatgtccatgtcctcctccaacccgccctacgacctgacgtccttccggttcagccccatcaaggagtccatcgtgtcccgcgagatgacccgtcgctacatgacggacatgatcacctacgccgacaccgacgtcgtcatcgtgggctccggc

SEQ ID NO: 15040 - DNA, 320 bp, Zea mays
cccacgcgtccgcaaggatatcatcatggttgaccacatgaggaagatgaagaacaatgccattgtctgcaacattggccactttgacaatgaaattgatatgctcggccttgagacctaccctggcgtcaagcgcatcaccatcaagccccagactgaccgctgggtgttccccgagaccaacactggcatcattgtccttgctgagggtcgcctgatgaaccttgggtgtgctactggccatcctagctttgtcatgtcctgctcattcactaaccaggtcattgcccaacttgaactgtggaaggagaagagctctg

SEQ ID NO: 15041 - DNA, 322 bp, Zea mays
gggcgactacgaccacagcgtcgccgacatcatcagcaacgcgtcctgcacgaccaactgcctcgcgccattcgtcaagatcttggacaaggagttcggaatcgtgaaggggaccatgacgacgacgcactcgtacaccggcgaccagaggctgctggacgcgtcccaccgcgacctccggcgggcccgcgcagcggcgctgaacatcgtgccgacgagcacgggcgccgccaaggccgtggcgctggtgctgcacgagctcaaggggaagctgaacggcatcgcgctgcgggtgccgaccccgaacgtgtccgtggtggac

SEQ ID NO: 15042 - DNA, 318 bp, Zea mays
cgcacccgccccgtcaagaaggtggccctcgtggtcctgaccggcgagcgcggcctctgcgggagcttcaacaacaacgtgctcaagaaggcggaaacccgcatcgatgagctcaagcagctgggcctccagtacaccgtcgtcagcgtggggaagaagggcaacgcctacttccagcgccgcccctacatcccgttggagcgcgatctagaggtgagcagcgtgcccaccgtcaaggactcgcaggccatctgcgacctcgtctactcgctcttcgtctccgaggaggtggacaaggtggagctgctctactccaag

SEQ ID NO: 15043 - DNA, 214 bp, Zea mays
gagcaagaagctcatggttaagaaagaggaatccttggacaaccttaatctcttctctatcattacagtgatgtcatttttccttttggcccctgttaccttctttacagaaggtgtcaaaattactcctacatttttgcaatctgctggtctgaatgtaaaccaagtccttacaaggtgtcttttcgctggactgtgtttccatgcataccaa

SEQ ID NO: 15044 - DNA, 151 bp, Zea mays
gaggccgtgtggttcaaggccgggtcccagatcttcagcgagggcgggcttgactacctcggcaacccgagcctgatccacgcgcagagcatcctggccatctgggcgtgccaggtggtgctcatgggcgccgtcgaggggtaccgcatcg

SEQ ID NO: 15045 - DNA, 261 bp, Zea mays
cagagaccagccctgaggacgttggtggcatgcacgcagctgtggggattcttacagagaggggtggcatgacttcccacgctgctgtggtcgcacgtgggtgggggaaatgctgcgtctcgggatgctcaggcattcgcgtaaacgatgcggagaagctcgtgacgatcggaggccatgtgctgcgcgaaggtgagtggctgtcgctgaatgggtcgactggtgaggtgatccttgggaagcagccgctttccccaccag

SEQ ID NO: 15046 - DNA, 281 bp, Zea mays
ccaagagcaacccggagaccggcgaggtcatcggcgtcttcgagagcgtgcagccgtccgacaccgacctcggggccaaggcgcccaaggatgtcaagatccagggggtctggtacgctcagctcgagtgattcgagtgtctaactgctaggtgtccgaccgccgtcatggatcttgggaaggtgtatgtataccatggaaaactttggagagcagaggaggaatcgtgtatgtaatgtacttgttaatgcaaattcgggctgtcgcttttttactccgct

SEQ ID NO: 15047 - DNA, 331 bp, Zea mays
  unsure (1)..(331): unsure at all n locations
ccccacgcgtccgccgacgcgtgggcgactgactgcctcgagcagcagagatcagggaggccgagggcgggatgacgatccggttcgtgctgttcgtcaacaagcagggccagacgcgcctggcgcagtactangagcanctctccctcgacgagcgacgggccctcgagggcgagatcgtccgcaagtggctcgcccgcactgaccagcagtgttcgtttgtggagcaccggaactacaaggtcgtttacaggcgctacgcctcccttttcttcctcgtcggcgtcgacagcgatgagaatgagttagctatccttgaattcatacatct

SEQ ID NO: 15048 - DNA, 288 bp, Zea mays
acggcccgctcgacaacctcgctgaccacatcgctgacccagtcaacaacaacgcatgggcctacgccaccaacttcgtccccggcaactaagctcaacggctatgctatgcaacttcattgtctttcggatcggagagggtgtacgtacgtggattgattgatgctgcgagatgcatgtgtgtcttttgtttcacgttgcattgcataggcaagtcgagatgatgagttggcgttgtacactaagatgaaccatgtttgtgcaatagtggtggtttttgtttcctgc

SEQ ID NO: 15049 - DNA, 129 bp, Zea mays
gcaaccggtccagcactttcacgctcagctccagccatggctgcctccaccatggcgatctcctccacggcgatggccggcacccccatcaaggtgggctccttcggcgagggccgcatcaccatgcgc

SEQ ID NO: 15050 - DNA, 328 bp, Zea mays
ccgacggtgggcggacgcgtggggccgttgctgctgccgcgtccacagaatggggggtttcgtgaagactcataagaccaatgcgtatttcaaacgtttccaagcgaaattcaagaaaaggcgggctggcaagacagactacagggccaggataaggctgattaaccaagacaaaaacaagtacaacacacccaaatacagatttgttgtgcgatttaccaacaaggacatcactgcccaaatcatatctgctagtatagcgggtgatatggttcttgcttctgcctactcgcatgagttgccacgatatggtcttgaagttggtctg

SEQ ID NO: 15051 - DNA, 189 bp, Zea mays
ccaccaccggacgctagctcaccaccaacctcagcacatcgaggagaagaggagtggccaatggcttcgtcggtcgccgccgcggcgagcacattcctgggcacccgcctggcggacccggtgccgcagaacgggcgcatcgtggcccggctcgggttcggcggcggacagcccaaggctgccgtcccg

SEQ ID NO: 15052 - DNA, 200 bp, Zea mays
tgtgcttccagactctgcagcgcttcacggccgccacgctggagcacggcatgcacccgccggtctctcccaagcccgagtggcgcaagctcatggacgagatggcggtcgtggccacggaggagtaccgctccgtcgtcgtcaaggagccgcgcttcgtcgagtacttcagatcggctacaccggagaccgagtacggg

SEQ ID NO: 15053 - DNA, 252 bp, Zea mays
gcaagacactgtccctcactccctcccctgtgcttctgctagctaggtgcctgccgaggagagatacggatacgatggccggcggtggcatcgtgaacacgggcggtggcaaggactaccccggcaagctcaccctcttcgtgttgctcacctgcatcgtcgccgccaccgggtgtctcatcttcggatatgacatcggtatctcaggcggcgtgacgtccatgaacccgttcctggagaagttcttcccgg

SEQ ID NO: 15054 - DNA, 253 bp, Zea mays
caaaacatgaatgggtcatgattggcacgatgcttcttgcagtctcactatggatttttggggaaactattggcgtatccagcgttgttgctgcaatgattggactctcaatacttcttgtgcttggagtgctaaactgggaggattgtctgaatgagaagtctgcatgggacaccctagcttggtttgctattttagttggtttggctgggcagcttactaaccttgggattgtgtcctggatgtcgaattg

SEQ ID NO: 15055 - DNA, 120 bp, Zea mays
cccacgcgtccgctctggtccgtggccatggcgtcgtccatgctctccgctaccaccgtgccactccagcaggggggcggcctgtccgagttctccgggctcaggaagctccgcgtcgct

SEQ ID NO: 15056 - DNA, 306 bp, Zea mays
cggacgcgtgggcaacatggcgctcatgggcttcgccgagcaccgccgcctccaggactggtacaacccgggctccatgggcaagcagtacttcctcggcctcgagaagttcctcgccggctccggcgacccgtcctaccccggcgggcccctcttcaacccgctcggcttcggcaagaccgagaaggagatgaatgagctcaagctcaaggagatcaagaacggcaggctcgccatgctcgccatcctcggttacttcatccaggggctcgtcaccggcgtcggcccgttccagaacctgctcga

SEQ ID NO: 15057 - DNA, 303 bp, Zea mays
ggactaccttggcaaccccagcctgatccacgcgcagagcatcctcgccatctgggcctgccaggtcgtgctcatgggcgccgtcgaaggctaccgtattgccggcgggccgctcggcgaggtcgtcgacccgctgtaccctggcggcagcttcgaccccctcggcctggccgacgaccccgaggccttcgccgagctcaaggtgaaggagctcaagaacggccgcctcgccatgttttccatgttcggcttcttcgtccaggccatcgtcaccggcatatgcccgctcgagaacctcgctga

SEQ ID NO: 15058 - DNA, 304 bp, Zea mays
ctgtcatccgtgaaagaattggtgcagatggatcaaaggctactggtgccttcatcttgacagcgagccataacccaggtggtcctacggaggactttggtatcaaatacaatatgggaaatggtggacctgcccctgaatccgttaccgacaagattttctctaatacaacgacaatctctgaatacctcatctctgaagaccttccagatgttgatatttctgttgtcggtgtcaccagcttcagtggacccgaagcccctttgatgtggatgtctttgactctagtgtaaattacataaag

SEQ ID NO: 15059 - DNA, 309 bp, Zea mays
aagacaaacgccggcacgcgcacgcagacacgatggcgatctgcagcgcgcacactaccacctccctgcgctccccatgcacgaccgtctcgaacgcaggtctgaggcagaagcaagtcatcttcgtcaccagcaacaggaggagcggcggcggcaggaggcacggaggggcaaggagcttccaggtctcgtgctccgtcgacaagccggtggtgattggcctggcggcagactcagggtgcggcaagagcaccttcatgcgccggctcaccagcgtcttcggtggcgccgcggagccgcccaagggcg

SEQ ID NO: 15060 - DNA, 251 bp, Zea mays
ataattttgaatgtaatatataagctgtttataattcaactctttacgatgcatgaaactttacgtacataccgttttttagccttcggcgaaaaccttccctatttttcatgcttcgtgaagaatatccaaattccgtaaaaatatacagtttccgaaaaaacattatgctttgtgaacaatggatctccttttcatatcagagtgacgaagctgtatttcttgaaaacttattttgtgccttggcactt

SEQ ID NO: 15061 - DNA, 305 bp, Zea mays
gcatcctcgccgcccggaccctctctgtctctgtctccgccgcggcgggctcctcctccatccccgtcaagatgactgcgcggtcggcgctggacgaggtcaccgacacgggcgccttcgaccggtcgccgtccaccttccggagctccgtttccagggacgggcggttccccgccgtggcggggcggtaccacctctacgtctcgtacgcgtgcccctgggcgtcccggtgcctcgccttcctcaagctcaagggcctcgaccacgccatcgggtcacggccgtgaagcctatcttcgagcgga

SEQ ID NO: 15062 - DNA, 302 bp, Zea mays
cccacgcgtccgcggacgcgtgggtatcagctagctagccttccctacagcaactgcatacatacaacacttccatctgcccgctcgtcttcgatcaattcccaagtcaaatcatataacagcaatggacgttcccgtgatcgacttctccaagctggacggcgctgagagggccgaaaccctggcgcagatcgccaatggctgcgaggagtggggattcttccagctcgtgaaccacggcatcccgctggagctgctcgagcgcgtcaagaaggtgtgctccgacagctaccgcctccggg

SEQ ID NO: 15063 - DNA, 301 bp, Zea mays
tgtgcttccagactctgcagcgcttcacggccgccacgctggagcacggcatgcacccgccggtctctcccaagcccgagtggcgcaagctcatggacgagatggcggtcgtggccacggaggagtaccgctcggtcgtcgtcaaggagccgcgcttcgtcgagtacttcagatcggctacaccggagaccgagtacgggaggatgaacatcggcagccggccagccaagaggaggcccggcggcggcatcacgaccctgcgcgccatcccctggatcttctcgtggactcagaccaggtt

SEQ ID NO: 15064 - DNA, 301 bp, Zea mays
cttctacaagggcgccgagaaggtgcacgaggaggaggccatcggccccgagcggctcgcgggcgacgtcctctactacggcgacagcactcggcggtggtgcagctgcactcgcgggaggacgtggaggcgctcatcgacgagcaccgcggcgacaagggcaagctcgtcgtgctggacgtgggcctcaagcactgcgggccctgcgtcaaggtgtaccccaccgtgctgaagctgtcgcggtccatggtcgacaacaccgtcttcgcgcgcatgaacggcgacgagaacgacagctgca

SEQ ID NO: 15065 - DNA, 304 bp, Zea mays
caatacgtgggactcattcacatgcatttgtgagctccttcatgggtcttgatgaaattactgacaaaacacttactagttctgatggttcaaacacatgtgaagattttatctctctggtgcagaactggctgatcaggattcaggattctagttcattgcatggcacctttggagaaacgagccaaagtgagttggctgcattcacgtcatatgcactggcatttccaaattccttcctggccttggttgacacatatgatgtcatgagaagcggagtgccaaacttctgtgctgttgcttt

SEQ ID NO: 15066 - DNA, 303 bp, Zea mays
tcctcctagctcctctactcgccagtcgccatgggcaagattaagatcggaatcaacggcttcggaaggatcggcaggctcgtggccagggtcgccctccagagcgaggatgtcgagctcgtcgccgtcaacgaccccttcatcaccacggactacatgacctacatgttcaagtacgacaccgtccacggccactggaagcacagcgacatcacactcaaggactccaagacccttctcttcggtgacaagccggtcaccgtctttggcatcaggaaccctgaggaaatcccgtggggtgag

SEQ ID NO: 15067 - DNA, 297 bp, Zea mays
cggacgcgtgggtctggattcatggctagatacagaagcgatcttcagggagagctttcgtcactggacgacagcatggaggatccaaatggatacttgcgctttgaagtgggcgggattgaagagctcgagaactatttcatattcaatgatcggcatagaggaatgaggatggatatcgacggcatgtcctacgaagagttgcttgctttaggggagcgaattggtatcgtaaacacaggtctttcagacgacgcgttatccgcgtgcctgaacaggaggctctacatgcccaca

SEQ ID NO: 15068 - DNA, 292 bp, Zea mays
ggagggactcaacgaccacaacgtcgtcgtcaagtgcgccgagatccagaccgccatctctgaaggagctacatctttccttttcactgagtacaagtatgttggattattcatgggcatctttgcaatccttatattcctcttccttgggtctgtcgagggattcagcacgaagagtcaaccttgccactatatcaaggaccagacttgcaagcctgcccttgctaatgccatcttcagtactatagcttttgtgcttggtgcagtcacctcactagtttccggctttctt

SEQ ID NO: 15069 - DNA, 292 bp, Zea mays
aacctccgacgttttgcatctccaagtagcatcgtctcctccccagatccatcaattcgttcggaccgcccttctcgtgtccccgttccaaagcgcggcaggctgagcggttccgtcagatttgagtcgtcatgaatcccgagtatgattaccttttcaaacttctgcttatcggtgattctggtgttggaaaatcatgcttgcttctcagatttgcagatgattcatatctggacagctacatcagcacaattggagttgactttaaaattaggacagtagagcaagacgg

SEQ ID NO: 15070 - DNA, 294 bp, Zea mays
cgagaacaacaccatcatcgaccagcagggcctgatgagcatccacatgccggcctacctggacgcgctccgcaagggcgtctccaccgtcatgatctcctactccagctggaacgggctcaagatgcacgccaaccacgacctcatcacaggcttcctcaagggcaggctcaacttccagggcttcacgatctcggattgggagggcatcgacaggatcaccagccctccaggggcgaactactcctactctgtgcaggcttcgattcttgctggcattgacatgatcatggt

SEQ ID NO: 15071 - DNA, 293 bp, Zea mays
gcaagaagctgtccctcactccctcccctgtgcttctgctagctaggtgcctgcggaggagagataaggatacgatggccggcggtggcatcgtgaacacgggcggtggcaaggactaccccggcaagctcaccctcttcgtgttgctcacctgcatcgtcgccgccaccggggtctcatcttcggatatgacatcggtatctcaggcggcgtgacgtccatgaacccgttcctggagaagttcttcccggaggtgtaccggaagaagcaggaggccaagacgaaccagtact

SEQ ID NO: 15072 - DNA, 299 bp, Zea mays
cggacgcgtgggtaaggctgaggaagctgaattgattgcaagtaaaatgttaggccagattctgataacgaaacaaactggtccagagggaaagattgtgagcaaggtctacttgtgtgagaaactatctcttactaatgagatgtactttgccatcacccttgataggaaaactgctggtccgctcattattgcttgcagcaagggaggaaccagtattgaagatcttgcggagaagtatcctgatatgattattaaggttcctattgatgtatttaaaggaatcacagatgaggatg

SEQ ID NO: 15073 - DNA, 335 bp, Zea mays
caaggagagtacgtggaggagcagccatggcttcatcggtggccgccgcggcgagcacattcctgggcacccgcctggcggacccggcgccacagaacgggcgcatcgtggcccggttcgggttcgggttgggcggcaaggcgaagctgctccgaagaaggtggcgaagacatcgacctcctctgaccggccgctgtggttccccggcgccgtggcgccgactacctggacggctcgctggtcggcgactacgggttcgacccgttcggtctcgggaagcccgtggagtacctgcagttcgagttggactcgctggaccagaacctggccaagaa

SEQ ID NO: 15074 - DNA, 309 bp, Zea mays
cggacggtgggcgagacgcgtggggaggtagagcgggagcagcgccaccgacaacgccatcgagctccgcaagaacctctccatcgcctacaaccgacagcgacaggccaagatacacggggagatcctcgagatcgtcgccggtgccgacgccctcgctggctgagcctgagtccccttggtggtgcggtgctcctgctatatataattctttttcctcattttctccactctgcctgtaattcctgataatagcacaaacgcaacggagttctgtgttccttgcgacacacaagaatttcaatccag

SEQ ID NO: 15075 - DNA, 333 bp, Zea mays
ctcgcctcgggcatcaccgttggagtcatgcttgtgccccaggcaatgtcatatgcaaagctggctgggctgcacccaatttatgggctctacacaagctttgtcccgttatttatatatgcaatatttggctcgtcacgacaactagcagtaggtccagtggcacttgtttctcttcttgtatccaatgttcttgggggtatagttaattcatctagtaagctgtacacagaattagccatattactggcattcatggttgggatattggagtgcttgatgggactgctaaggcttggttggctcattcgtttcattagccattctgtaata

SEQ ID NO: 15076 - DNA, 331 bp, Zea mays
cgcacgcatacacagcacagagtgaggtaagcatccgaaaaaagctgtgatctgatcgacatggccgccgccaccatggctctcacctcccgcgcgctcgtcggcaagccggcgaccagcaccagggacgtcttcggcgtagggcgcatcaccatgcgcaagactgctggcaagcccaagccagcggcgtccggcagcccctggtacggggccgaccgcgtcctgtacctgggcccgctgtccggccagcccccaagctacctgaccggcgagttccccggcgactacggctgggacaccgcggggctgtccgcctgaccggagactttcg

SEQ ID NO: 15077 - DNA, 330 bp, Zea mays
cgcttcgccgacctcaccaacgacgagtaccgcgccacctacctcggcgccaggaccaggccgcagagggagaggaagctcggcgccaggtaccacgccgccgacaacgaggacctgccggagtccgtcgactggagggccaagggcgccgtcgccgaggtcaaggaccagggcagctgcgggagctgttgggctttctcaacaatagcagctgtggaaggcatcaaccagattgttacaggcgacttgatctccttgtctgaacaagagcttgtcgactgtgacacttcgtacaatcaggggtgcaatggaggtctgatggactatgca

SEQ ID NO: 15078 - DNA, 337 bp, Zea mays
cccacgcgtccggccgccgcctctcctactgcatctccctcgctctcgtcgcctcgttcgcttcgcctccgcaccgccccgccccgagcagagcgcagccctatccggagctgggatggcggacgcgaacagcagcagcagcagcagcagcagccacagcacgcggcagctgcagccaccggcgtgtggaagacggtcaagcccttcgttaacggcggggcctctgggatactcgcgacctgcgtcatccagcctatcgacatggtcaaggtgaggatccagctgggtcagggctctgctggtcaagtcacaaggaacatgcttgcatatgaaggtg

SEQ ID NO: 15079 - DNA, 335 bp, Zea mays
cccacgcgtccgcccacgcgtccgggattattcgcaactctccggttcctattgggactgttcctatttaccaagcacttgaggaagtaaatggtattgctgaaaatctgagctgggaaatttttagggataccttgattgaacaagctgagcagggcgttgattacttcacaatccatgctggtgtcctgcttcgttacattcctcttacagcaaagagaatgacgggcatagtttcacgtggtggctcaatccatgcaaatggtgcttaacttatcacaaggaggactttgcatatgaacattgggatgacattcttgacatatgccatcagt

SEQ ID NO: 15080 - DNA, 306 bp, Zea mays
gcacagatggcgtcgacgatcatggccgccacctcccgcatcgtcgcggccaagacgccgtttcttggccagggtcgcgccgccgccgccgccgccaatgccagccccctccgcgacgtcgtcgccgccgctgctggcggccggatcatcatgggcaacgacctgtggtacggcccggaccgcgtcaagtacctggggcccttctccgcgcagacgccctcgtacctgactggcgagttccccggcgactactgcttggacaccgctgggctgtccgctgacccggaggcggttctcgcggaacag

SEQ ID NO: 15081 - DNA, 325 bp, Zea mays
caagcacgtccggttcctccccgcgtcaagctcggcatccagggattcgaggtgtccaagctggggttcgggtgcatggggctgacgggcgcgtacaactccccgctggacgacgaggccggcatcgccgtcatcgcgcacgctttcagccgcggagtcaccttgttcgacacctccgacgtatacgggcccctcaccaacgaaatcctcctcggcaaggcgctgaagcagctgccgcgggagcaggtgcaggtggccaccaagttcgggatacggcatgacgagagcggcacgcggaccgtgtgcggccggccggaatacgttc

SEQ ID NO: 15082 - DNA, 325 bp, Zea mays
cttgctctgatagcttgctccaggacgtacgtacgtacgtagattgatccatcgatcgctagctagctgacgaccatggcgtccctctcctctgccgccatcaccgccccttccttcacggccgcgcccgctcgcgcagtggtcagcaggaggtccttcaccgtgcgtgcctctctccgcaaggccactgccaccgccgccgtggccgttgccgccagcgtcctgcttgccggcggcggcgccatggcccaggaggtgctgctgggcgcaggcgacggcgggctcgtcttcgagcccagccagttcaccgtcaaggccggcgaca

SEQ ID NO: 15083 - DNA, 327 bp, Zea mays
cggacgcgtgggggcgacgaaaccctcgccagtccccaactcgaacctcagtcaggcagcgtgaggagggagagttcaaggaccgaggcggcgtcgggcgagataatagcttaacgtcaagaccctcaagggcaccaacttcgagatcgaggcgagccccgatgcatcggttgctgatgtgaagaggatcattgagaccactcaaggtcagagtacctaccgggcggaccagcaaatgctcatataccaagggaaaattctcaaggatgaaaccactttggaaagcaacggagttgcttgagaacagcttccttgttataatgttgt

SEQ ID NO: 15084 - DNA, 278 bp, Zea mays
cacacgcgtccgcggacgcgtggggttctgtcgttcactcgacgcgttctccgctactcctcgtcctcctgccgaggaaaattttgcagcgggagctactactagctagagctagcatgggaggtacatagcggcgcagtcccgagccacggcctcgcctgcgcgcccccggcagccgtcactctgaatccgcgggcgcggcggcggcgcgcttcctcgggcagcggcggccacaggagccagccccaacaagcactggtgagcggactgctaccccc

SEQ ID NO: 15085 - DNA, 303 bp, Zea mays
atcgcagcagcacgagcagcacgtcgtgccgctccaaccatctcgcttccgtgcttagcttcccgccgcgccatggcgtcgaccaaggctcccggccccggcgagaagcaccactccatcgacgcgcactccgtcagctggtcccaggcaaggtctccgaggacgacaagctcatcgagtacgatgcgctgctcgtcgaccgcttcctcaacatccttcaagacctccacgggcctagccttcgcgaatttggtcaggagtgctacgaggtatcggccgactaagagggcaaaagatacacga

SEQ ID NO: 15086 - DNA, 315 bp, Zea mays
  unsure (1)..(315): unsure at all n locations
gcgcgcacgcgtccgcggacggtgggcgaccgtgggcacgcacgcatacacagcacagagtgaggtaagcatccgagaaaagctgtgatctgatcgacatggccgccgccaacatggttctcnactccgacgcgctcgtcggcaagccggcgaccagcaccaggggcgtcttcggcgaggggcgcatcacaatgcgcgagactgctggcaagcccaagccagcggcgtccggcagcacctggtacggggcggaccgcgtcctgtacctggggccgctgtccgggcagcccccaagctacctgaccgggggttccc

SEQ ID NO: 15087 - DNA, 319 bp, Zea mays
gcaagcagcgagtacatacatactaggcagccaggcagccatggcgcccaccgtgatgatggcctcgtcggccaccgccgtcgctccgttccaggggctcaagtccaccgccagcctccccgtcgcccgccgctcctccagaagcctcggcaacgtcagcaacggcggaaggatccggtgcatgcaggtgtggccggcctacggcaacaagaagttcgagacgctgtcgtacctgacgccgctgtcgacggacgacctgctgaagcaggtggactacctgctgcgcaacggctggataccctgcctcgagttcagcaag

SEQ ID NO: 15088 - DNA, 318 bp, Zea mays
aaccgagaagagaccaggccgaaggaaaacaatcctgaaaccaagccatgggtctgcaggaggaatttgaggagcatgctgagaaggcaaagaccttgcctgagaacacgagcaatgagaacaagctgatcctatacgggctctacaagcaagccacggttggagatgtgaataccgatcgtccgggcatattctaccaaaaggacagggccaagtgggatgcctggaaggctgttgaaggcaaatcgaaggatgaggcgatgaatgactacatcaccaaggtgaagcagctccaggaggaggctgccgcctcttaaa

SEQ ID NO: 15089 - DNA, 314 bp, Zea mays
gatcctggagaatgctggacagctacctcttgcttatgttactgctgtcactcatgggctcacagaaattgctgagaggattgcttctgaattaggcgaaaatgttccttctctgcctgaaggaaaatcccactcactactgatcccccctgcacctctcacagcgtgtggtgattggccattgcttagggtagtgcgcggtatttttgaaggtggactggatgctactggaagggcagatcttgaggaagacgatgaagctgctggtgctgattggggtgatgaagacttggatattgttgatgtaagtgagg

SEQ ID NO: 15090 - DNA, 312 bp, Zea mays
  unsure (1)..(312): unsure at all n locations
aggctctcctctccggccggcagctgctgggccgccccgtgcagtcggccgtctctaggtcgtcggcgaggaaggcgcccttcgtcgtcagggccagctccagccctccagccaagcaaggtgccgacagcagctgtggttcgcgtccaagcagtccctctcctacctcgatggcacgctgcccggcgactatggcttcgacccgctgggcctctcggacccggagggcaccgnggggcttcatcgagcccaagtggctggcctatggcgaagtgatcaacggccgctacgccatgctgggcgcggttggcg

SEQ ID NO: 15091 - DNA, 327 bp, Zea mays
aagagagtacgtggaggagcagccatggcttcatcggtggccgccgcggcgagcacattcctgggcacccgcctggcggacccggcgccacagaacgggcgcatcgtggcccggttcgggttcgggttgggcggcaaggcgaagcctgctccgaagaaggtggcgaagacatcgacctcctctgaccggccgctgtggttcccggcgccgtggcgcacgactacctggacggctcgctggtcggcgactacgggttcgacccgttcggtctcgggaagctcgtggagtacctgcagttcgaagttgactcgctggaccagaacctgg

SEQ ID NO: 15092 - DNA, 324 bp, Zea mays
cccacgcgtccgtttccccactcccgggtctccagcattcctatcctctccccgcccgcccgtgccgccgccgcggcttcccttcctctcccgagccaagatgaatgttgaaaagctcaagaagatggcaggtgctgtgcgcaccggggggaagggtagcgtgcgcaggaagaagaaggcagtccacaagactacaaccacagatgacaaacggcttcaaagcaccttgaaaagaataggagtgaacagcattcctggtattgaagaggtcaacatctttaaggatgatgttgttattcagtttgtaaatcctaaagtgcaagc

SEQ ID NO: 15093 - DNA, 319 bp, Zea mays
cggaccgtgggtcgcgggcgaggagggtgaggcttaaggtcctcggcctgcaggtgagcccgttcgtgctccgcgtgtgcttggcgctgaacatgaaaggagtgagttacgagtacgtcgaggaggacgtatccaacaagagtgagctcctgctcaagtccaacccggtgcacaagaaggtgcccgtgctcatccacaacggtaagcccatctgcgagtcacccgtcatcatgcagtacgtcgacgagctgttcgccggccggccgatcctcccaaccgacccctacgagcgcgccactgctcgcttctgggctgccta

SEQ ID NO: 15094 - DNA, 318 bp, Zea mays
gagagtacgtggaggagcagccatggcttcatcggtggccgccgcggcgagcacattcctgggcacccgcctggcggacccggcgccacagaacgggcgcatcgtggcccggttcgggttcgggttgggcggcaaggcgaagctgctccgaagaaggtggcgaagacatcgacctcctctgaccggccgctgtggttccccggcgccgtggcgcccgactacctggacggctcgctggtcggcgactacgggttcgacccgttcggtctcgggaagcccgtggagtacctgcagttcgagttggactcgctggaccag

SEQ ID NO: 15095 - DNA, 320 bp, Zea mays
cccagggcgacgcgcacgacgagatcgacttcgagttcctgggcaacgtgagctgggagccctacacgctgcacaccaacgtgttcacgcgcggacagggccagcgggatcagcagttccgcctctggttcgaccctaccactgccttccacacctactccatcctgtggaacccgcagcacgtgatcttcgcggtggacggcaccccggtgcgggacttcaagaaccacgaggcgcgctgggtggcgttcccgaggacgcagcccatgatgctgtacgccagcctgtggaacgccgacgactggtccacgcagggcggg

SEQ ID NO: 15096 - DNA, 313 bp, Zea mays
gtggtggtgggtggcgggcccggaggtacgtggcggcgatcaaggccgcgcactaggggctcaagaccacctgcatcgagaagaggggcaccctcggcgggacctgtctcaacgtcggatgcattccatccaaggctcttctgcattcatcacatatgtaccatgaagcaaagagttcttttgcacatcatggagtaaagttttcaaatctggaagtggacctcccagccatgatggctcagaaagacaaagctgtggcaggactaacaaaaggaattgaagggctctttaaaaagaacaaggtgacttatgt

SEQ ID NO: 15097 - DNA, 306 bp, Zea mays
cccacgcgtccgcccacgcgtccgacaagactgacttgcagccacttgaagggctttctgaggatgacatgaagctagtcatggagatgaaggcagaggctttgaagactataatccaagctggtggtcctaatgatgagggtgttttgttgactatgagcactttaactgatgatggtgtaatggctgtcaaaaatgctgcatgcgagaggcttcttgaacagagggtggatgtaaagatgaagtcaaaaaagatgatggattgcttgaatagatttcatgttgctctgccaaagcctcgtgaca

SEQ ID NO: 15098 - DNA, 313 bp, Zea mays
ctgggcgtggcgtacgacgaggccgaggactacgtggtcatcaagcacgccgcgctcttcacgtccacggtcatgagcctgctcctggcgcgccccaacgtgaagctgttcaacgccgtggccgtggaggacctcatcgtcaggggagggcgcgtcggcggcgtcgtcaccaactgggcgctcgtgtccatgaaccacgacacgcagtcctgcatggaccccaacgtcatggaggccaaggtcgtggtcagctcctgcggccacgacgggcccttcggcgccaccggcgtcaagaggctccaggacatcggca

SEQ ID NO: 15099 - DNA, 304 bp, Zea mays
gacaagctgtacaacacacgcgagcgtgctcgccatctgctggcttctggagtttctgaaatttcagcggaatcgtcatttaccagtatcgaagagttccttgagccacttgagctgtgctacaaatcactgtgtgactgcggcgacaaggccatcgcggacgggagcctcctggacctcctgcgccaggtgttcacgttcggggtctccctggtgaagctggacatccggcaggagtcggagcggcacaccgacgtgatcgacgccatcaccacgcacctcggcatcgggtcgtaccgcgagt

SEQ ID NO: 15100 - DNA, 324 bp, Zea mays
atttgctgttgcaacaagatggatgccaccacacccaagtactccaaggcccgttatgatgagattgtgaaggaagtctcttcctacctgaagaaggttggatacaaccctgacaagatccactttgttcccatctctggtttcgaaggtgacaacatgattgagaggtccaccaaccttgactggtacaagggcccaaccctacttgaggctttggacttgatcaatgagccgaagaggccttcagacaagcccctgcgtctccccctacaggatgtgtacaagattggtggtattggaactgttcctgttgggcgtgttgag

SEQ ID NO: 15101 - DNA, 320 bp, Zea mays
catcgaccttcaagtctcgctacgtagcagtgcaataaaaaaagcagccgcaatggcgagcagcaccatggccctctcctccacggccttcgccggcaaggccgtgaacgtgccgtcgtcgtccgccttcggcgaggcccgcgtgacgatgcgcaagacggcggggaaggccaagccggcggcggcgtccgggagcccgtggtacggccccgaccgcgtgctgtacctgggcccactgtccggcgagccgccgagctacctgacgggcgagttcccgggcgactacggctggtacaccgcggggctgtcggcggacccgg

SEQ ID NO: 15102 - DNA, 316 bp, Zea mays
ggcaagggcgccaaagtcatcctctcaagccacttgggtcgccctaagggttttacacccaagtttagcttagccccccttgttgcacggttgtctgagcttcttggcattcaggtgcaaaaagccgacgatgttattggccctgaagttgagaagctggtggccgccttgcccaatggtggggttttgctccttgagaacgtaagattctacaaggaagaggagaagaatgacccagagtttgcgcagaagcttgcctccgtagcagatctttacgttaatgacgcgtttggaacagcccacagggcacatgcat

SEQ ID NO: 15103 - DNA, 310 bp, Zea mays
  unsure (1)..(310): unsure at all n locations
cccacgcgtccgctgaagaaggcctatcttgggttgcccgacctgttcggggacaaagtgctcttggaagcgcgttaggtctcatctctcgtcatgggagtatggcggctagtcagggtaagcccctcgtggatcctatggtcactcttttcggaagtgttcatgaaaagatgcctgagatcatggggagcatgaggagcacattgtttcccaactttggcagcatgtttagtgttgccgaccagcagcaggtgaaagctgactgggacgccgagagtcanagggtaagtgaagattatgcttcggatca

SEQ ID NO: 15104 - DNA, 267 bp, Zea mays
  unsure (1)..(267): unsure at all n locations
tccactcgtcctactccctcctctcctctcccgtcctatccatcctgcacgctcagcatccatccactcctcccctgctccggctcctgctcctgctccgccattggcctttcaacagtttactccccgtccggaccgctcctcgttccggcccctctcggccgctgccgctctgcccagccccgctgcccgctccgagccccgctcgctaccgtccggagctccgtcgacgccaccaagcaggctcatgatgtcgnggcgactgcg

SEQ ID NO: 15105 - DNA, 308 bp, Zea mays
cgccgtgtgccgtgcagcagcttcttgagcgcctgctcccgctgcaggaaggagctcagcggcaaggacgacgtgttcatgtacagaggcgaccaggggttctgcagcgaggagtgccggtgtgagcagatcttggtagacgaggcgagggagcgtgaagccatgttcggcgggaagcagcgcatgcgccgtgggttgcctcgccgtctccaccacgggccacggtcggcgatgggggcgatcggcggtggtgcgtcgaggaggctagttgcgacagcctactaggatctagcatctgtctgtcgtct

SEQ ID NO: 15106 - DNA, 308 bp, Zea mays
gacgccgcgccgatacagacgaccaaaaagagggtgttccacttcggcaagggccagaaccgagggaacaagaccatgaagaactgctgggcggcaagggcgcgaacctggcggagatggcgagcatcgggctgtcggtgccgccggggttcacggtgtcgacggaggcgtgccagcagtaccaggacgccgggtgcgccctccccgcggggctctgggccgagatcgtcgacggcctgcagtgggtggaggagtacatgggcgccaccctgggcgatccgcagcgcccgctcctgctctccgtccgc

SEQ ID NO: 15107 - DNA, 314 bp, Zea mays
atcgacaccgagaaggattacccttacaagggcacggacggacggtgtgatgtcaacaggaaaaacgcgaaggttgtcactattgacagctacgaagatgtaccagcgaacgatgagaagagtctgcagaaggcagttgcaaaccagcctgtcagtgtcgcaattgaggctgctggcacagcatttcagctctacagctcgggtatcttcactggaagctgtggaacagcgctggaccatggtgtcacggccgtcggctacgggacagagaacggcaaggactactggatcgtgaagaactcatggggcagcag

SEQ ID NO: 15108 - DNA, 315 bp, Zea mays
gaagcttcgttctgattataaagatgaatttgtcacaaagcatggtgtaaaattgggtcttatgtcttgctttgtcaaggctgctgtttctgcacttcaaaaccagccaattgtcaatgctgtcattgatggtgatgacatcatatacagagactacgtagacatcagtgttgctgttggcacttccaagggccttgtggttcctgttatccgagatgctgataccatgaactttgctgacattgagaaagggataaacaaccttgcaaagaaagcaactgagggggcgctctcaattgatgacatggcaggagg

SEQ ID NO: 15109 - DNA, 302 bp, Zea mays
gctagcgcttatagcttgtcagccatggccaccgccgccgcgtctagcctcctcaagtcctccttcgcgggctcccggctcccggccgccacgcggaccacaccggcgtccctcgttgtggccaccggcccgcgctgcgccggctctgggctcatctgcgcgtccatgtccatgtcctcctccaacccgccctacgacctgacgtccttccggttcagccccatcaaggagtccatcgtgtcccgcgagatgacccgtcgctacatgacggacatgatcacctacgccgacaccgacgtcgt

SEQ ID NO: 15110 - DNA, 297 bp, Zea mays
agcggcacagaggtgcgacgtacgacgacgacgacgcaggcgccacacatggcatcccagctctccgccgccgtgccccggttccacggcctccggggctacgccgcgcccaggtccgcggtggcagcgctgccgtccgtgagggtgggcaggaagaggtcgtcgtcgcagggcatccgctgcgactacatcggctccgccaccaacctgatcatggtgacgacgacgacgctgatgctgttcgcggggcggttcgggctggcgccgtcggcgaaccgcaaggcgacggcggggctg

SEQ ID NO: 15111 - DNA, 308 bp, Zea mays
cactcctaaacccagaacccagcccgccgcaaccctagccgccgccgcgcgcaggttgcagcaggcggtcggggcgggcgcgggtggcgccgcgagggaggagctgcggcaggcggtggtgaacacgctggagcggaagctgttctacataccttccttcaagatctaccgcggtgtcgcggggctctacgactacgggccgcccgggtgccgcgttaaggccaacgtgctttccttctggcgccacactttgttttggaagagaacatgttggaggttgactgcccctgtgtgacgcctgaggttgt

SEQ ID NO: 15112 - DNA, 309 bp, Zea mays
cgctcggcgaggtcgtcgacccgctgtaccctggcggcagcttcgaccccctcggcctggccgacgaccccgaggccttcgccgagctcaaggtgaaggagctcaagaacggccgcctcgccatgttttccatgttcggcttcttcgtccaggccatcgtcaccggcaagggcccgctcgagaacctcgctgaccacatcgctgacccagtcaacaacaacgcatgggcctacgccaccaacttcgtccccggcaactaagctcaacggctatgctatgcaacttcattgtctttcggatcggagaggg

SEQ ID NO: 15113 - DNA, 306 bp, Zea mays
caactccactcctcttggccgccgcatcacctcctcttcgccgctgccgccaccgctccaccgggcagccagccagccatggatgaggagtacgacgtgatcgtgcttggcacggggctcaaggagtgcatcctcagtggtctcctttccgtcgacggcctcaaggttttgcatatggacagaaacgactactatggaggagattccacctcgctcaaccttaatcagctctggaagaggtttagaggggaagacaagcccccagcacatctaggtgcaagcagagactacaatgtggacatggtg

SEQ ID NO: 15114 - DNA, 304 bp, Zea mays
cccaatcgaaggacctagcgagcggcacggcggcggcgatcggagaagatggtgcgcaaggcgaaggttgagttcgacgagcagccgccggataacttcgacccgaagaacccgtatgccgacccggtggcgatgctcgagtaccgggaacacctggtgcgagagaagtggatccagatcgagaccgccaagatcatccgggagcgcctccgctggtgctaccgcatcgagggcatcaaccaccaccagaagtgccgccacctcgtcgaccaatacctagaggctacccgcggcgtgggttggg

SEQ ID NO: 15115 - DNA, 324 bp, Zea mays
cccacgcgtccgccagtgcctgatcgatggcggcccaggctctcctctctggccggcagctgctgggccgccccgtgcagtcggccgtctctaggtcgtcggcgaggaaggcgcccttcgtcgtcagggccagctccagccctccagccaagcaaggtgccgacaggagctgtggttcgcgtccaagcagtccctctcctacctcgatggcacgctgcccggcgactatggcttcgacccgctgggcctctcggacccggaggcaccgggggcttcatcgagcccaagtggctggcctatggcgaggtgatcaacggccgctac

SEQ ID NO: 15116 - DNA, 68 bp, Zea mays
ttcaagtctcgctacgtagcagtgcaataaaaaaagcagccgcaatggcgagcagcaccatggccctc

SEQ ID NO: 15117 - DNA, 324 bp, Zea mays
agccagttcaccgtcaaggccggcgacaccatcacattcaagaacaacgccggcttcccgcacaacgtcgtcttcgacgaagacgaggtgccgagcggcgtcgacgccaccaagatctcgcaggaggagtacctcaacgcgccaggcgagacctactccgtcaccctcaccgtgccgggaacctacggcttctactgcgagccgcatcaaggagccggaatggtcggcaagatcaccgtcaactaattaagctagctatcgatcgatatccattcatgtattagctgttgcttcctgctttgtactccgccgatctgtccatct

SEQ ID NO: 15118 - DNA, 315 bp, Zea mays
aagaacactgcccttccaagttaaaggtggtgagtgggaaatcgacaaacgacttctgaagatgggagggatggttgcttctggttcttgtggggacttgtatcacgggacttaccttggtgaggatgtagctgttaaagttataagagctgagcatttgaataagaatgtttggaacgagtttacgcaagaagtatatatactaagagaagttcaacataaaaatgttgtgcgattcattggtgcatgcacaaaaccaccccaattttgcataattacagaatacatgtctggaggaaagctatatgactttgt

SEQ ID NO: 15119 - DNA, 101 bp, Zea mays
ttcacgcgtccgcggacgcgtggcgagcgtggcacgcacgcatacacagcacagagtgaggtaagcatccgaaaaaagctgtgatctgatcgacatggccg

SEQ ID NO: 15120 - DNA, 136 bp, Zea mays
ggccaagctcgagctgcaggaggtcgtggatttcctcaagaaccccgacaagtacaccgcgctcggagccaagatccccaagggttgtctcctcgtcggcccgcctgggaccgggaagaccctccttgcgcgtgcc

SEQ ID NO: 15121 - DNA, 316 bp, Zea mays
caccaccaccggacgctagctcaccaccaacctcagcacatcgaggagaagaggagtggccaatggcttcgtcggtggccgccgcggcgagcacattcctgggcacccgcctggcggacccggtgccgcagaacgggcgcatcgtggcccggttcgggttcggcggcggaaagcccaaggctgccgtcccgaagaaggtggcgaagacgtcgatctcctctgaccggccgctgtggttccccggcgccgtggcgctcgactacctcgacggctcgctggtcggcgactacgggttcgacccgttcgggctcgggaa

SEQ ID NO: 15122 - DNA, 311 bp, Zea mays
cggacgcgtgggcggacgcgtgggggctactaccaagaaaaggaagaggatggacaagaagaggcatgacgtgagggtgggctcggccggagcggcggcggacgccatccggccgacgacggctacagctggaggaagtacggccagaaggagatccttggagccaagcacccaaggggctactaccgctgcacgcacaagagctctcagggatgtgcggcgacgaagcaagtgcagcgcaccgacgaggacccggccttcttcgacgtcgtctacctcggcgaccacacctgcgttcagagccagagggc

SEQ ID NO: 15123 - DNA, 312 bp, Zea mays
cccacgcgtccgcgccgaaaagctcatcagtgctcatcccctgctggcccgttctcagtcccagtgagaggctccatgaagatcctggtcgcggtgaagcgggtggtggactacgctgtcaaagtgcgcgtgaggccggacgggaggggcgtggagacggccaacgtgaagatgtccatgaatccattctgcgagatcgccgttgaggaggcgctgcggctccgggaggccggcgtcgccgctgaggtcgtcgccgccaccgtaagccctgcccagtccgccgacacgctccgcaccgcactcgccatgggc

SEQ ID NO: 15124 - DNA, 310 bp, Zea mays
cacgcgcgcggggcctccgccaagggcttcttcgagtgcacccacgacgtgacgtcgctgacgtgcgccgacttcctgcgcgcgcccggcgtgcggacgcccgtgatcgtgcgcttctcgacggtgatccacgagcgggggtccccggagacgatccgcgacccgcgcgggttcgccgtgaagttctacacccgcgacggcaactcggacctgctgggcaacaacttccccgtcttcttcatccgcgacggcatcaagttccccgacgtgatccacgcgttcaatgccaacccgcggtcgcacgtgcagg

SEQ ID NO: 15125 - DNA, 185 bp, Zea mays
cccacgcgtccgcctacgacgagatccagagcaaaacgtacatggaggtgaagggcacgggcacggcgaaccagtgcccgaccatcgacggcggcgtggagtcgttcccgttcaaggccggcaagtaccagatgaagaagctgtgcctggagccgacgtccttcaccgtcaaggcggagggcatc

SEQ ID NO: 15126 - DNA, 316 bp, Zea mays; identical to SEQ ID NO: 15102

SEQ ID NO: 15127 - DNA, 307 bp, Zea mays
gctcaacctcgccaacctggccgaggaggtgcagatcgcgcaccgccgccgcaacagcaaactcaagaaaggtggcttcgccgacgaaggctccgccaccaccgagtccgacatcgaggagacgctcaagcgcctcgtgtccgacgtcggcaagtcccccgaggaggtgttcgaggcgctcaagaaccagaccgtcgacctcgtcttcaccgcgcatcccacgcagtccgcccgccgctcgctcctgcagaaaaacgcgaggatccggaattgtctgacccagctgaatgccaaggacatcactgac

SEQ ID NO: 15128 - DNA, 304 bp, Zea mays
cggacgcgtgggcggacgcgtgggcgccaagggcaggccggcggcgaggagcagggtggtggcccgtgtccccgccacaaggaggagcgtccgtgtagctgccgtcgtcgcgaccgcggccgcgcagatcgactacagctcaagcgtctcggtgttcccgatggaggcctgcgacctgcttggtggcgacgcgtgcaacgggcccatgttcccggaggccaagcccgcctcggcggcggcggcggcgagcaggagtgtggtcggggtggacagggactacctgtcctacgacgagccaaagacg

SEQ ID NO: 15129 - DNA, 221 bp, Zea mays
cccacgcgtccggtctaatgtaccttcttcagtcatatctagccaaagcatgcacctcggagtccttgcgactgcatggcacgccattaacacgaagtccatgttcactgtctactacaagcctaggacgagcccttcagagttcatcataccgtacgatcaatatatggagtcggtaaaaaataattattctattggcatgagattcaggatgaggtttg

SEQ ID NO: 15130 - DNA, 304 bp, Zea mays
tgttggtacaccacagttgaccgactccattgtgctaccagagaagtttgagttatttggacagaacatcgacctgagtccactgaaaggcatattttcttccatcgaaaatgcagcatcctcggttgcaaagaccatatctgagcagcctccgctcaaaataccgatcaggacaaacaatgctgaatcgtggttgcttacgacataccttgacgaagagctcaggatctccagaggcgatggcagcagcatctttgtgctgttcaaggagggaagtactcttctatactgagatccaaatccc

SEQ ID NO: 15131 - DNA, 303 bp, Zea mays
gccctcgtggtcctgaccggcgagcgcggcctctgcgggagcttcaacaacaacgtgctcaagaaggcggaaacccgcatcgatgagctcaagcagctgggcctccagtacaccgtcgtcagcgtggggaagaagggcaacgcctacttccagcgccgcccctacatcccgttggagcgcgatctggaggtgagcagcgtgcccaccgtcaaggactcgcaggccatctgcgacctcgtctactcgctcttcgtctccgaggaggtggacaaggtggagctgctctactccaagttcgtgtcg

SEQ ID NO: 15132 - DNA, 300 bp, Zea mays
gaccttcccaactctggaccctcgtacaggggaggtgattgctcatgtggctgagggtgacgcagaggacattaaccgtgcagtagctgcggctcgcaaggcttttgatgaagggccatggccgaagatgactgcctatgagaggtcccgtatcctactgcggtttgctgatttgatagagaagcacaatgacgagcttgctgctttggagacatgggacaacgggaagccatatgagcaagcagcccagattgaagtacccatggtggcccgtctaatgcgttactatgctggttgggc

SEQ ID NO: 15133 - DNA, 307 bp, Zea mays
tgcacttggtggtatctacggtgttctgaaccagaagagaggtcatgtctttgaggagatgcagaggccgggtacccgctctacaacatcaaggctttcctccctgtcatcgagtccctttggtttctccagccaactgagggccgcaacctctggtcaggcgttcccccagtgtgtctttgaccattgggacatgatgggctcagatcctttggaggccggctcccaggctgctcagctggtgctggatatccgcaagaggaagggtctcaaggaacagatgacccctctttctgagtttgaggac

SEQ ID NO: 15134 - DNA, 308 bp, Zea mays
cgaaatgggcgtggagcggtggtgagagtagcgtgtaccctccgtggcaagacgctggacggtggtgtatctgtgctctcggtttgcgtgaacctgatctggtcttaagaaccccggtggcggggttgacatatgcaagggttaagtgctacatatgtcgtgtgattggagatcctcagctgagtataatcgattcggatcgtcgtaccttcgcggttatgaagacttggtcactgccctgcaacctaagtcaggatgtgaacattatgaataaaaatggatgttgtattgatgagatggtgaaagta

SEQ ID NO: 15135 - DNA, 307 bp, Zea mays
aacagcggcgcgccgttccccgtcgtgcctcaggtcatttcagtgaacccgacacattggcggaaggacgaagagttcgcgcggcagatgatcgccggggcgaacccggtgtgcatcaagcgcgtcaccaagttcccgctggcgagcgagcttgaccgcggggtgttcggcgaccaggacagcaagataaccaaggaccatgtcgagaagaacatgggcggcatgacggtggagcaggccgtagaggaggggaggctgtacgtcgtggaccaccacgactgggtgatgccatacctgaagcgcatca

SEQ ID NO: 15136 - DNA, 307 bp, Zea mays
gctgaaggagcggcagacgactacgaagcgtgcttgaagcagcttgttaagaacggtgtgatttctatgtcagcggcgactggatttcctaggtttgatctccagcttctgggaatgggacctgatggccacattgcgtctctcttccctggccaccctcttgttaacgagaaagataggtgggtgacatacattaaggattctccaaagccacctccagagagaatcacattcacgtttccagtaatcaactcatccgcatacgttgcgatggtggtgactggagctggaaaggccgcagcggtgc

SEQ ID NO: 15137 - DNA, 305 bp, Zea mays
gccaccatcgcggacaggccggtaaggtcgtccacgtcagcaacgtcttctacaccaaaccccaggtggagcttgccaagcggctcgttgaggtgtcgttcgcggaccgcgcctatcttcgccagcactggcacggaggccaacgaggcggccatcaaattctcccgcaagttccagcgggccgcacacccggagagcggcgacccgcccacggagttcctggcgttcagcagcagcttccacggccggaccatgggcgccgtcgcgctcaccagcaagtcgcagtaccgggagcccttcgcgcc

SEQ ID NO: 15138 - DNA, 305 bp, Zea mays
cacgcaacttgaccgatccatcgccgcatcgcggacctcgaccccgccctcactgagctaggagcagacgaggcttgagaacgagcgacggagacctagccgaagcaggagctcgcccatgggcgaccggcaacctgggcgagcgtggtggtgggctgtagacggcagcgaggagagcatgaacgcgctgcagtgggcgctcgacaacctgcggctgctccccgaccgcgagctcgtcgtgctgcacgtccagccgccgcccaacatcgccgcgggactcaacccgggcgccatccccttcggcg

SEQ ID NO: 15139 - DNA, 308 bp, Zea mays
gggatgccattgaaacaccgatgacaacaggggcaagagaaagccacagagagaagggaacttgctgtccaaggataaactgagtagcagctgcgctgaagaaaggctccagagctttggatagtgtgggcagatgagactgcaacagcagcgaaggacacattgctagtgatgtgaccaataccatggcacagggcgactggaaagagaagcttcaggagcgtgccattgataggcgctcgcttggggagaccgacactccagctgatgaggatagcaccaacgtgtatgcttacatttcaataatt

SEQ ID NO: 15140 - DNA, 298 bp, Zea mays
cttgcaggaacacagttgctaagcaccacagtgggcgtgaaagagtatgtgcaaagcgaatttgatagtgttcaagcagagatcataagcacaaataaggacctgttcccaggtagcataacatttgatgatttcctatgggcatttggaatgctcagatcaagggtgtttccagagctccgcggagataagcttgctctcataccatttgctgatttggtaatatgcaatacatattggcgttttccagattctaatcccacttgctacgattcttcttattgttgttaaatggtcc

SEQ ID NO: 15141 - DNA, 297 bp, Zea mays
cccgacagccggccgcgcccgccgcacagccttcctccccttcaggctgccgccgcgcgctgtctcggcgccgggtaggcgggtcttcgaggccgtggccgtcgcggtgtcgtcggagtacaagacggagggcgcggacaggagggggaggatggatccgaggagttctccgaggacctgaagctgttcgtcggcaacctaccgttcagcgtcgacagcgcgcactcgcagggctcttcgagcaggccggctccgtcgagatggtcgaggttgtatatgacagaatgactggacgga

SEQ ID NO: 15142 - DNA, 302 bp, Zea mays
gagaagagggacgagatccgcagcaacccttactgctacaaggacaagccgcgactcaagaccgcctacgagctgctcaaagtcagcttggacctcgagcacaacctcctccaaccaggtggtcgttgccgttcctgatcgtgcacggcgggtgcagacaaggtgacggacccgtcggtgagcgagctgctgtaccaatcggcggcgagccaggacaagacgctcaagttctatccgggcatgtggcacgccctcacctctggcgagtcgccgacaacatccaagccgttttccaagacatc

SEQ ID NO: 15143 - DNA, 298 bp, Zea mays
gccatcgacacgatcgcgagcgcaacacgtacgttgtcggaagctcaagttagaagaagcaccagtgcctgatcgatggcggcccaggctctcctctccggccggcagctgctgggccgccccgtgcagtcggccgtctctaggtcgtcggcgaggaaggcgcccttcgtcgtcagggccagctccagccctccagccaagcaaggtgccgacaggcagctgtggttcgcgtccaagcagtccctctcctacctcgatggcacgctgcccggcgactatggcttcgacccgctgggcc

SEQ ID NO: 15144 - DNA, 296 bp, Zea mays
ctcagatgaatgagctcgaacaaatggatcaccgagcacggagacaaaatcgttctgctgttggaactcctgattatttagcaccagaaatccttttggggacggacatggttgcagtgcagattggtggtctgttggtgtcattctgtttgagctcattgttggcatacctccattcaatgcagaacaccccgaggcaatttttgaaaatattatgaatcgcaaaataccttggccacatgtcccagaagagatgagttttgatgcacaagatttaatacacagattattgacag

SEQ ID NO: 15145 - DNA, 298 bp, Zea mays
cgttccgctccttcctccccctatctagctagccttcccgttcctgcatcgcggcggagatgggcgcctccaccacgccgctcgcctcggcggcggcgctgcttctgctgcatgctcgccccgctcgccgcggcggcggacagcatgtcgatcgtctcctacggcgagcggacagggaggaggtgcggcggatgtacgccgagtggatggcggcgcacggccggacctacaacgccgtcggcgaggaggcgcccaggttcgaggtgttcagggacaacctccgctacgtcgacgccca

SEQ ID NO: 15146 - DNA, 298 bp, Zea mays
ggcagcgacacgatcgcgagcgcacgcacgtaagcacgttgtcggaagctcaagttagaagaagcaccagtgcctgatcgatggcggcccaggctctcctctccggccggcagctgctgggccgccccgtgcagtcggccgtctctaggtcgtcggcgaggaaggcgcccttcgtcgtcagggccagctccagccctccagccaagcaaggtgccgacaggagctgtggttcgcgtccaagcagtccctctcctacctcgatggcacgctgcccggcgactatggcttcgacccgctg

SEQ ID NO: 15147 - DNA, 301 bp, Zea mays
cccacgcgtccgcgcatactgcatacacaacacagagcatcagaaggagctgcgatctgatcgacatggctgccgccaccatggctatcacctcccgcgcgctcatcggcaagccggcggctggcacgagggacgtcttcggcgagggccgcatcaccatgcgcaagaccgccgccaagcccaagccggcggcgtccgacagcccctggtacggtgccgaccgggtcctgtacctgggcccgctgtccggctcggccccgagctagctgaccggcgagttccccggcgactacgggtggga

SEQ ID NO: 15148 - DNA, 311 bp, Zea mays
aaccggtccaacactttcacgctcaggcgctcagctctagcaatggctgcctccaccatggcgatctcctccacggcgatggccggtacccccatcaaggtgggctccttcggcgagggccgcatcaccatgcgcaagaccgtgggcaagcccaaggtggcggcgtccggcagcccctggtacggccccgaccgcgtcaagtacctcggccccttctccggcgagcccccgagctacctcaccggcgagttccccggcgactacggctgggacaccgccgggctgtccgccgaccccgagaccttcgccaa

SEQ ID NO: 15149 - DNA, 306 bp, Zea mays
gttttagttctactaaagataaagtgttgagtgttctaaatgttaaaagcatgataagtgtagaagttaaataagatctaagttagagttcttgctgtttggactgcatgtccaattttattacgtggctagttaagtaaagtaaaccgtgttttctgtagaaatgttatatataaaacttgtagataatctttttatcttgcttgtgtaaaaatttcatgaccataggttcagtagtttaggagttatgatttttccaagtccagtttcagaatctgtccagattctgtactgatttcgaaaatg

SEQ ID NO: 15150 - DNA, 303 bp, Zea mays
ggaccgtggtggcgttggccgaagaagaggagaagcgacaagcaggcttcgagaacaagactgcagggggagggggaggagcaagcgaaaggggaactagagcaagatgggcggcgcactgctgcttgcgctcctcctcgtctctgctgctgccgcccctcaggtacttggagttggcaatggagacaatcacatgagaatcatccaggaggacatcatcgagacagtcaacaaccatcccagtgctgggtggacagcctcacgtaatccttacttttcaaactataccattgcgcaatttaa

SEQ ID NO: 15151 - DNA, 306 bp, Zea mays
ccacaacgaagctactattagcaatgatctatatgatttcctgcaggccttttttgctgagcacccaaagtatgctaaaaatgatttcttcataactggggaatcatatgctgggcattacattcctgcctttgcaagtcgtgtgcaccagggaaacaagaacaatgagggcattcacattaacttgaagggttttgctattggcaacggactaacagatccagcaatacagtacaaggcataccctgattacgcattggatatgggattaattacaaaaacacaatttaacaggatcaataaaat

SEQ ID NO: 15152 - DNA, 306 bp, Zea mays
cccacgcgtccgtgaagtttctactgcttcccagcgatcctctagattcacgcaacatcttacttgaagtaagagcaggtgctggtggtgatgaagctgggattttggctggtgaccttgttcgcatgtaccagagatactgtgagcgcaacaattggaagtttaagccagtttcttgctcagaagcagaaatgggtgggtacaagacatacgtgatggaggtcaaggggaaacaagtctatagtaaactgaagtttgagtcaggtgtacaccgtgttcagcgtgttcccttgacagaagctatgg

SEQ ID NO: 15153 - DNA, 301 bp, Zea mays
ccaccaccgagcccatggcggaccagctcaccgacgaccagatcgccgagttcaaggaggccttcagcctcttcgacaaggacggggatggttgcatcacgaccaaggagctgggcactgtcatgcgctcgctggggcaaaatcctacagaggctgagctccaggacatgatcaacgaggtcgatgctgatggcaacggcaccatcgatttcccagagtttctcaaccttatggctcgcaagatgaaggacaccgactctgaggaagagctcaaggaggccttccgtgtgtttgacaagga

SEQ ID NO: 15154 - DNA, 305 bp, Zea mays
gtcaagcaggcgtcccacctgctcaagtacgactccacgctcggcatcttcgatgcgacgtcaagcccgtcggcgacaacgccatctccgtcgacggcaaggtcatcaaggtcgtgtccgaccgcaaccccagcaacctgccgtggggcgagctcggcatcgacctcgtcatcgagggcaccggcgtcttcgtcgaccgcgcaggcgcggggaagcacatccaggcgggggccaagaaggtgctcatcacggcgcccggcaaggggacatccccacctacgtcgtcggcgttaatgccgaccagt

SEQ ID NO: 15155 - DNA, 297 bp, Zea mays
gttggcttctcctccccctccggttcgggttcgggttcgtgaggttctccggggttcggtttcgtgggtgggcggatcgagatggcggcgtcggatgttgagtaccgctgcttcgtcggcagggtcgcctggggcacggacgaccactcactccacaacgccttcagcacctacggcgaggtcctcgagtccaagatcatcctcgatcgggagacgcagaggtcccgcggcttcggcttcgtcaccttctccacggaggaggcgatgcggaacgcactcgagggcatgaacggcaag

SEQ ID NO: 15156 - DNA, 305 bp, Zea mays
  unsure (1)..(305): unsure at all n locations
cccacgcgtccggcacaccaaggagagtacgtggaggagcagccatggcttcatcggtggccgccgcggcgagcacattcctgggcacccgcctggcggacccggcgccacagaacgggcgcatcgtggcccggttcgggttcgggttgggcggcaaggcgaactgnctccgaagaaggtggcgaagacatcgacctcctctgaccggccgctgtggttccccggcgccgtggcgccgactacctggacggctcgctggtcggcgactacgggttcgacccgttcggtctcgggaagcccgtgga

SEQ ID NO: 15157 - DNA, 211 bp, Zea mays
gcgagatctgcgacgtcaacggcgtctgcgtggacgccacggaggacgagctcttccgcctcaccaccaaggaggggaagctcaccgtggagcgcgagaaggtgaagatcgagacgcagcccttctcccccgtggtgcagttcgagcaggaccccgtgcagatcctggacgcgctgctcccgctctacctcaacagccagatcctccgtgc

SEQ ID NO: 15158 - DNA, 308 bp, Zea mays
cccacgcgtccgcccacgcgtccgcccacgcgtccgcaagaagtttcaggccgccacgcgcctccgcgccaaggacaagattgagggcggcaagatcatccgcgtcgaggcgcaccccatccccgagcaccccaggcctaagagggtgtccgggcgggtgacgctggtgggcgatgccgcggggtacgtgaccaagtgctctggcgagggcatctacttcgcggcgaagagcgggcggatgtgcgccgaggccatcgtggcgggctccgccaacgggacgcggatggtggaggagagcgacctgcgca

SEQ ID NO: 15159 - DNA, 305 bp, Zea mays
gccatcacataaaaccagtgcaagcagaagcagcgcaatggcgagcagcaccatggccctctcctccacagccttcgccggcaaggcagtgaacgtgccgtcgtctctcttcggcgaggcccgcgtgacgatgcgcaagacggcggcgaaggcaaagccggcggcgagctccggcagcccgtggtacggccccgaccgcgtgctctacctgggcccgctgtccggcgcgcccccgagctacctgacgggcgagttcccgggcgactacggctgggacaccgcggggctgtcggcggacccggaga

SEQ ID NO: 15160 - DNA, 305 bp, Zea mays
caccgccgcaaggactcgcgacggacggagcaacggaggaagcaactacgcggcaccatggtgaacgttccgaaaaccaagaagacctactgtaagaacaaggaatgcaggaagcacaccctgcacaaggttacccagtacaagaaaggtaaggatagcctttcagctcaagggaagcgacgttatgaccgcaaacagtctggatatggtggtcagacaaagcctgttttccacaagaaggcaaaaacaacaaagaagattgtgctgaagctgcagtgccagagctgcaagcactactctcaaca

SEQ ID NO: 15161 - DNA, 300 bp, Zea mays
ggaccgtggcaaaccactacctgatttgtttaccccccgaaaatttgccgtctcctcgtctcgctcctctccctgcgcagccccagctatccggcaccgcccgctcctcgatccccgcaccccacgcccgcagccgggaccggcggggtcgcgcgccgggtaggaggaggagaagaggaagggcggtatggcggcgcgccggcgagggcccgggccgactacgactaccttatcaagctgctcctcattggagacagcggtgttggcaagagttgcctcctgttgcggttctctgatggt

SEQ ID NO: 15162 - DNA, 299 bp, Zea mays
ccgacgtgatcgacgccatcaccacgcacctcggcatcgggtcgtaccgcgagtggcccgaggacaagaggcaggagtggctgctgtcggagctgcgaggcaagcgcccgctgctgcccccggaccttccccagaccgacgagatcgccgacgtcatcggcgcgttccacgtcctcgcggactcccgcccgacagcttcggcccctacatcatctccatggcgacggccccctcggacgtgctcgccgtggagctcctgcagcgcgagtgcggcgtgcgccaccgctgcccgtggtgcc

SEQ ID NO: 15163 - DNA, 306 bp, Zea mays
cggacgcgtggcgtgacgcgtgggcggacgcgtgggctgtgcttccagactctgcagcgcttcacggccgccacgctggagcacggcaaccacccgccgagctctcccaagcagctgagtggcgcaagctcatggacgagatggcggtcgtggccacggaggagtaccgctccgtcgtcgtcaaggagccgcgcttcgtcgagtacttcagatcggctacaccggagaccgagtacgggaggatgaacatcggcagccggccagccaagaggaggcccggcggcggcatcacgaccctgcgcgcca

SEQ ID NO: 15164 - DNA, 303 bp, Zea mays
ctcttctcgcagaaggcggccgggcgcgggtgtggcctgcgggtggtgcggtgcatggcagcgtcggacgcggcgcactacaaggccgcgcgggaggacatcaaggaactccttaagagcacatactgccaccccatcatggtccgtctggggtggcatgattctggtacctatgacaaggatattaaggactggccacagcgaggtggagctaatggaagtttaaggttcgatgctgagctgagtcatggagccaatgccggcctgattaatgcattgaagcttatccagcctatcaaggac

SEQ ID NO: 15165 - DNA, 301 bp, Zea mays
cccacgcgtccggtccgtggccatggcgtcgtccatgctctccgctaccaccgtgccactccagcaggggggcggcctgtccgagttctccgggctcaggagctccgcgtcgctgcccatgcgccggaatgccacctccgacgacttcatgtccgccgtctccttcaggacccacgcggtcggcacgagcggcgggtcgcggcgggcgccgacggaggcgaactgtaaggtggccatcaacgggttcggccgcatcgggcgcaacttcctgcggtgctggcacgggcgcggcgacgcctcg

SEQ ID NO: 15166 - DNA, 301 bp, Zea mays
gcgggaaagggtgagacgatttatccagtacaagtggcttgcaacaagaggagtgaacgaagagtcaatattgcatgctctgcctgcagaccttcgacgtgacattaagcgccacctttgcctgggtcttgttcgacgggttccttttttctcccagatggatgatcagcttcttgatgccatctgtgagcgtcttgtatcatcactgtgcacaaaaggcacatacattgtccgtgagggtgatccggtgacagagatgctcttcatcatccgtggaaaactggaaagctccacaacaaat

SEQ ID NO: 15167 - DNA, 301 bp, Zea mays
gctcaagcgcctcgtgtccgaggtcggcaagtcccccgaggaggtgttcgaggcgctcaagaaccagaccgtcgacctcgtcttcaccgcgcatcccacgcagtccgcccgccgctcgctcctgcagaaaaacgccaggatccggaattgtctgacccagctgaatgccaaggacatcactgacgacgataagcaggagctcgatgaggctttgcagagagagatccaagcagccttcagaaccgatgaaatcaggagggcacaacccaccccgcacgacgaaatgcgctatgggatgagc

SEQ ID NO: 15168 - DNA, 299 bp, Zea mays
tcgccatcaacgacaccggaggcgtcaagcaggcgtcccacctgctcaagtacgactccacgctcggcatcttcgatgcgacgtcaagcccgtcggcgacaacgccatctccgtcgacggcaaggtcatcaaggtcgtgtccgaccgcaaccccagcaacctgccgtggggcgagctcggcatcgacctcgtcatcgagggcaccggcgtcttcgtcgaacgcgagggcgcggggaagcacatccagtcgggggccaagaaggtgctcatcacggcgcccggcaagggcgacatcccca

SEQ ID NO: 15169 - DNA, 298 bp, Zea mays
accgacggtgtccaattccaggtcggcagttgcatcttacaggtcatcgcgacagacaagacgatctcgttttgtcactcgggcaatgtttgagaggttcacggagaaagctattaaggtcatcatgcttgcgcaagaggaagcaaggcgcctgggccacaactttgttggaactgagcagatcctcttgggtctgattggagagggcactggtattgcagctaaggtgctcaagtccatgggaataaatcttaaggatgcacgtgtggaggtggagaagattattggccgcggcaat

SEQ ID NO: 15170 - DNA, 296 bp, Zea mays
gaaggaactgctgggcggcaagggcgcgaacctggcggagatggcgagcatcgggctgtcggtgccgccggggttcacggtgtcgacggaggcgtgccagcagtaccaggacgccgggtgcgccctccccgcggggctctgggccgagatcgtcgacggcctgcagtgggtggaggagtacatgggcgccaccctgggcgatccgcagcgcccgctcctgctctccgtccgctccggcgccgccgtgtccatgtccggcatgatggacacggtgctcaacatggggctcaacgacg

SEQ ID NO: 15171 - DNA, 294 bp, Zea mays
cccacgcgtccgcaacgtgtctgatgtccctggtgatagtcttgtgctggcataagagcatatttctggcaattggcttcattgtgttctttggaaccattgaggcactgtacttctcagcggcactcatcaagttcagggagggggcctgggtcccaatcgtccttgcttttatcttcattttgataatgtgcatctggcactatggcaccatcaagaggtatgagtttgacgtccagagcaaggtttccatcaactggctccttggtctcagcccgaacctcggcatagttc

SEQ ID NO: 15172 - DNA, 298 bp, Zea mays
cccacgcgtccgagcgagcgagagcagcacacacgcagctagctaggagcagcagcagagcagcggcgatggcggcctccatgatctcctcgtcagctctggcggtggcgcctcagggcctgccgcccctcggccgccgcgcctcctccttcgccgtcgtctgctccaagaagaagatcaagaccgacaagccctacgggattgggggtggcctgaccgtcgacgtcgacgccaacgggagaaagggcaagggcaagggcgtgtaccagttcgtcgacaagtacggcgcgaacgtcga

SEQ ID NO: 15173 - DNA, 299 bp, Zea mays
gatacctctcctgcccagcagtatcccagattggcccccatgtattataggggtgcagccgccgccattgttgtctatgacatcacaaatccggcctccttcacccgtgccaagaaatgggttcaagaacttcaagctcaaggaaatccgaatacaatagtggctcttgctggtaacaaggttgatatgctagatgcgaggcacgtggcagtagaggaagcaaagacgtatgcccaggagaacggtctcttcttcatggagacatctgctaaaactgcaatcaatgtgaatgacatatt

SEQ ID NO: 15174 - DNA, 288 bp, Zea mays
tatcagcctcatccccttgcccacttctacagctcctcttctgcagcaagatggatagatgctagctcttatagcttgttagccatggccacctctgcctcgtctagcctcctcaagtcctccttcgctggctccctgctcccggccgccacgctgactacaccggcttcccccgttgtggccacctgctcgcgctgcgccggcgtggggcccatctgctcgtccatgtccatgtcctcctccaacccgccctacgacctgactgccttccggttcagccccatcaag

SEQ ID NO: 15175 - DNA, 300 bp, Zea mays
cgcaagacactgccgtttggcatctgcacctgccgcctcgtctctgggccacggcctacttcgaggggacgaggtacggtcatctgacggcgagcatcacggagtcgctgagctcttggatattggacgccgctggcctccctgtgacccagatgatggagtgcatcctgcgccagcagatgacctggttcaacgagctgcgtgatgcgagcatgcagtggagcacgatcctggtgcccgccgccgagcgccgcgttcaggaggccatcgagcgcgcgcgctggtaccatgtggcccggg

SEQ ID NO: 15176 - DNA, 297 bp, Zea mays
gcaatctcatatccagattaatgagtaccgtgatcgtataattttgcctaggctgacacaacagtttgagcggcctgttgtcaggtgcataaaagttctggatatgactggtttgaagctatcagcactgagccaaataaagatgttaacttccatatcaacagttgatgatttaaattaccctgaaaagacagagacctattatgttgtcaacgttccatacatattttctgcttgttggaaggttgtgaagcccttattgcaggagaggacaaaaaagaaggttaaagttttgag

SEQ ID NO: 15177 - DNA, 275 bp, Zea mays
  unsure (1)..(275): unsure at all n locations
gctaagtccctgccccctctctttttcttacattcaggtcctcgcagctcctctcttttttcttgtttctttctttcgatctgcgagctgtccaggtccagtactctcctttccgtgaaggaactcttgcagccggcccctctggtttcctcgaattcttgttccccggtccctcctcctgttcccgcgtagatccgtccgtccgatgagcacaccttacccaaccccatgnttacccaccagttcctctgatggctgccgtgctccgatgaagc

SEQ ID NO: 15178 - DNA, 296 bp, Zea mays
acgggcgcccctacgcccatgaacaactacctctactggttcggcctcggtattttccactccggaatcgaagtccacggcatggagtacggatatggagcacacgagtttccaacaagtggggtatttgaggtggaaccaaagagttgtcctggtttcacctacagaagatctgtgtggatgggcacaactgacttgtctagagcagagttccgctcgttcattgaaaatcttgcaggaaagtacaatggcaacacataccatttgatttcaaagaactgcaaccattttacaga

SEQ ID NO: 15179 - DNA, 293 bp, Zea mays
ctcgtcctccaccaccgccgtcgcggcgctccccaggaatgggcagcagcgggcgtcgtcgtcgttgttctcctcctcctcctcttcctccttcctcgtcggcaagacgctgctgaggcaggccgaggcagcccggccgtcgttcgccgtgcgcgccgcggcggattccgacaggccgatctggttccccggcagcacccctccgccgtggctcgacggcagccttcccggcgacttcggctttgatccctggggcctcggatctgacccggagagcctgcggtggaacgtgc

SEQ ID NO: 15180 - DNA, 295 bp, Zea mays
gcccggccgtcgttcgccgtgcgcgccgcggcggattccgacaggccgatctggttccccggcagcacccctccgccgtggctcgacggcagccttcccggcgacttcggctttgatccctggggcctcggatctgacccggagagcctgcggtggaacgtgcaggcggagctggtgcactgccggtgggcgatgctcggcgcggcgggtatcttcatcccggagttcctgaccaagatcggcgtcctcaacacgcccttctggtacaccgccggcgagcagcagtacttcaccg

SEQ ID NO: 15181 - DNA, 294 bp, Zea mays
ggacgcgtgggccattcttcagggtcaccctggacctgctggagatggttttcgccaagggagaccccggcattgccggcttgtatgacgagctgcttgtggcggaagaactcaagccctttgggaagcagctcagggacaaatacgtggagacacagcagcttctcctccagatcgctgggcacaaggatattcttgaaggcgatccattcctgaagcaggggctggtgctgcgcaacccctacatcaccaccctgaacgtgttccaggcctacacgctgaagcggataaggg

SEQ ID NO: 15182 - DNA, 296 bp, Zea mays
cggacgcgtgggcgtgacgcgtgggccccacgcccccacggaagtttcggcggcgccggcgtgctcgtgatctcaaccaaggcgtgcctccgctccggtcacccgtctccacgcaaccatgtcgagaaggaagaccagggagcccaaggaggagaacgtcactcttggacccactgtccgtgaaggagagtatgtctttggtgtcgctcacatctttgcatccttcaatgacaccttcattcatatcactgatttgtctgggagggaaactctggttcggatcaccggtggcatga

SEQ ID NO: 15183 - DNA, 290 bp, Zea mays
ggggcagttaaccagtgtcttgcttctaatcgtatggctgatgctttggttatagcccatgccggtggttctgctctctgggaaagcacaagaaaccattatctcaagaacagtatctcgccctacttaaaggttgtctctgctatggtgggcaatgatttaatgagttttgtgagtacctggccactaagttcatggaaggaaactcttgctctgctttgcacatttgcacagaaagaggagtggcatattttgtgtgacacacttgcgtctaggcttctgaatgtcgg

SEQ ID NO: 15184 - DNA, 291 bp, Zea mays
tccttttcgaggagacgctgtaccagtccgccgtcgacggccgcaagatcgtggacatcctggtggagcagggcatcgtgccggggatcaaggtggacaagggccttgtcccgctcgccggctccaacaacgagtcgtggtgccagggcctggacggcctggcgtcccgcgaggccgcctactaccagcagggcgcgcggttcgccaagtggcgcaccgtcgtcagcatccctaacggcccctccgagctcgccgtcaaggaggccgcgtgggggctcgcacgctacgccg

SEQ ID NO: 15185 - DNA, 289 bp, Zea mays
gaagctgtatggcgagttcctggtgaacgctcagggtgaggatgtggttgccggaataagaaccccagaggaccttgacgccatgaagaacctcatgccacaggcctacgacgagcttgttgagaactgcaacatcctggagagccactacaaggaaatgcaggatatcgagttcactgtccaggaaaacaggctgtggatgttgcagtgcaggacagggaaacgtacgggcaaaagtgccgtgaagatcgccgtggacatggttaacgagggccttgttgagccccgc

SEQ ID NO: 15186 - DNA, 294 bp, Zea mays
gaaatgtcagacaagcatcgaaagcactgaacaatgggagaagcttaattcttgctggccttgctgaaccaaaaagagcaaatggagaagagttgttgaataagttggctgttggatttgaggagcttcaaagaattgtggaagacagaaatagggatgcagtagctccaaagcagaaagagcttctccagtatgttggaactgtagaagaagacatggtcgatggctttccctttgaaataccagaagagtacagcaacatgcctcttctcaaaggaagagctactgtggata

SEQ ID NO: 15187 - DNA, 285 bp, Zea mays
aagataaccaaggaccatgtcgagaagaacatgggcggcatgacggtgcagcaggccgtagaggaggggaggctgtacgtcgtggaccaccacgactgggtgatgccatacctgaagcgcatcaacgagctccctgcgagctaggagaaggcggaggtgtcgcagaggaaggtgtacgccgccagaacgctcctgttcctggacggcgaggactcgtcgatgctcagaccgctggcgatcgatctcagctcgccgcacccggagaaggagcagctcggcgcggtc

SEQ ID NO: 15188 - DNA, 284 bp, Zea mays
gtcagctacctccatccaccagaccagaccagaccaatggccctgcgcctaccaatctcatcgtcccacgggctggcctccacgccggcgccaatctccacgacgacgtgccggccggccgtcttggcgacggccgcggcccagaagaggagcctgctgctggcgacggcctccgagacgaggggagtcgcgccggtgaggtccagcgggatcgagacgagcacggtgggtctgggatgtgaggccgtcaccgggcaggtcacggaggtcaacaaggacacctt

SEQ ID NO: 15189 - DNA, 285 bp, Zea mays
cggacgcgtgggcgcacgaggagctccagaaggagaacatcaagaacgccgcctcctccaccggcaacatcacgttgagcgtcaccaagagcaacccggagaccggcgacgtcatcggcgtcttcgagagcgtgcagccgtccgacaccgacctcggggccaaggcgcccaaggatgtcaagatccagggggtctggtacgctcagctcgagtgattcgagtgtctaactgctaggtgtccgaccgccgtcatggatcttgggaaggtgtatgtataccatggaa

SEQ ID NO: 15190 - DNA, 281 bp, Zea mays
aggattttgagtgttcagaagtctccagtgatccatttgtttagtgaatcaattgctggtgctgctacaataaggggttttggtcaagagaagcggtttatgaaaaggaatctttatcttcttgactgttttgctcgccctttattttccagccttgctgctattgaatggctctgcctgcgaatggaattgctttcgactttcgtctttgctttttgcatggcaatacttgtgagctttcctcctggcacaatcgaaccaagtatggctggcctcgctgt

SEQ ID NO: 15191 - DNA, 315 bp, Zea mays
ctcctctaaacccttcctctccctccggcgccggcgccgacatggccatccactacctcctccgccgcggggtctccggtggctcactgctccaccctatccgcggtctcttcctcgcctccaaggagcttgggaggcgtccgttgggctctgcggcggcgggagaccagcggccgagctgaggggcgcgcgggaggacgtcaggcagctgctcaaggccacctcctgccatcccatcctggttcgattaggttggcatgatgctggtacatatgacaagaacattaccgagtggcccaagtgtggtggagctaa

SEQ ID NO: 15192 - DNA, 313 bp, Zea mays
cccacgcgtccgagcacaacgaacaaccatattatcagctagcttgacgtcaatcctcacagtccaacagctctcaactggaattacagggattgatagtttggtttcaagttctttacctattggataccaggctggaaaatttaccaaaagatacctgactgaaaacttcaatgttcctctctctcgactggtaccgctgaattcgatccaggaatatgctgatgcccttaaccgcggaccaaaaaatggcggtgttgctgcaattgttgatgagaagccatacattgatatcttcctgtcaaactactgc

SEQ ID NO: 15193 - DNA, 254 bp, Zea mays
ggtcgctgaggggaggcagagaactgcatgtacactcccgtctaccgcaactaccggtagtgctgcggggatcaattttgcagtaataaaaaatctactatcaacgcggatggtactctgttgtttatagtccctgctgctaaccacccttgttgctggtgctgctggagaggcattgtacctgtccatgcatatatgatatatatatgttgtaacgttgtgaaagcaaacaatcttgggtaccaatgtttgtt

SEQ ID NO: 15194 - DNA, 314 bp, Zea mays
atctccgtctccacgccgcgtcctcccgcacgaatccgcgctccggccaacgggccaagccctagccacccccgcccattcatggtgggcgggccgtgagatctctagggaggcttgtcggcttcgtctggcgggaggggaggagatgggcgcccggaacagcgctgccgccacgccggtgctgctcaacgtgtacgaccttacggccgcgaacgattacctctactggctcggcttcggcgtcatccactccggaatctaagtccatggcacggaatatggggttggagcccacgactacccatccagtggtg

SEQ ID NO: 15195 - DNA, 315 bp, Zea mays
cggagttacggggtgcgccccacggagcggaccctcctgctcgccgcacagttcctgcacaaggagctccccatccgcatcgcaccacgggcgctcgacctcgactcgctccccttcggcctctccaccaagcccgccatcctcaaggtgagagattggtatgtggagtcattccgtgacatccggtccttcccagaggtgaagaaataggaagatgaactcgccttcacccagatgatcaatatgatcaaggtgcggcacaccaatgtggtgcctgcggttgcattgggtgtgcaacagctgaagaaggacttg

SEQ ID NO: 15196 - DNA, 312 bp, Zea mays
ggcgtcgccggccatcgggcagatgtacttccagcgcgccgtcgacgacatcggcgacctcctcggcaagacgctgctgctcgagctcgtcagctccgagctcgacgcaaagtcgggcgtggagaagacgcgggtgacggcgtacgcgcacaagacgctgcgggagggccactacgaggcggagttcaaggtgccggcgtcgttcgggccgttgggcgcggtgctggtggagaacgagcaccacaaggaggtcttcatcaaggagatcaagctcgtcaccggcggcgacacagcaccgccgtcaccttcgac

SEQ ID NO: 15197 - DNA, 331 bp, Zea mays
atctcgtggaaggggtatccaagttgagccacctcagcaaacttgctcgtgacaacaacacggcaagcaggacagttgaagcagatcgcttgcatacgatgctcctcgcaatggcggatgcgcgcgctgttctaataaagcttgcggatcggctgcataacatggagaccttagaagctttgccttgtgccaaacaagaaagattcgccaaggaaacaatggagattttcgtgcctctagctaaccggctaggggttgctagctggaaagaccagctggagaatctctgtttcaagtatctgaatccggaagagcacgaggagttgtcgtc

SEQ ID NO: 15198 - DNA, 224 bp, Zea mays
gcaccatcgacgatcttgaccatgccgcgaagatcaagagcacccctgaggccgagaaatacttcgcagcaaccaaagatgctcttggcgatgttttcgccaagctaggctagacgcaatggctaataatggccatgtaatttcggacttgtgtttgttcatatggacccggcaaggcaatgtaccattttctgttgatattgtatcaggaagcacttaactac

SEQ ID NO: 15199 - DNA, 309 bp, Zea mays
aaaaaagaattttaccatgcttcagacatggcctgtgcgttcaccaaggcctgttgcgtcgaagcttgctgcggatacacctcttctgacagggcagcgtgtactggatgcactattcccctcagttctgggaggcacttgtgctattccaggggcatttggttgtggtaaaactgtcattagtcaggcactttccaagtactccaattctgaagctgtggtttatgtgggctgtggtgaacgaggaaatgagatggctgaggttctcatggacttcccccagttgacgatgacattgcctgatggccg

SEQ ID NO: 15200 - DNA, 309 bp, Zea mays
cccgaccgcgtcaagtacctcggccccttctccggcgagcccccgagctacctcaccggcgagttccccggcgactacggctgggacaccgccgggctgtccgccgaccccgagaccttcgccaagaaccgcgagctggaggtgatccactcccgctgggccatgctcggcgcgctcggctgcgtcttccccgagctgctctcccgcaacggcgtcaagttcggcgaggccgtctggttcaaggccggctcccagatcttcagcgagggcgggctggactacctcggcaaccccagcctgatccacgcg

SEQ ID NO: 15201 - DNA, 310 bp, Zea mays
cagtccctcacacactcactatacactgctctgctgcagcaagaaggaagaagctagcgcctccctagctctcgttgtcagcaatggccaccaccgccgcgtccagcctcctcaagtcgtccttcgcggactcccggctcccttcggccacgcgcactattttcccgtcgtccgttgccgttgcctccccgcgcgccggctgctgccccatccgctcgtccatctcctccttttccaccccgctctacgatctgacgtccttccggttcagccccatcaaggagtccatcgtgtcccgcgagatgacccg

SEQ ID NO: 15202 - DNA, 307 bp, Zea mays
tgctgcagctggaccacaaggtgtcgccgttcctcaaggagaccctggacctctcgtgctaccacaacctggaggcgcacctgcacctgctggacggcttccgcggctccggcgcggggttcgagccccgcgggagggaccccgcgctggtgaacaagtccaccgacttcctccgggaggaccacatggtgccgcccgtgtggtaccaggcggagaacaagggcatggtgaggacggaggacggccggtgggtgctgccgccgcggcagagggtgctcgacgaccacccggaggacactgaccatca

SEQ ID NO: 15203 - DNA, 306 bp, Zea mays
gggaaatgctgcgtctcgggatgctcaggcattcgcgtaaacgatgcggagaagctcgtgacgatcggaggccatgtgctgcgcgaaggtgagtggctgtcgctgaatgggtcgactggtgaggtgatccttggaaagcagccgctttccccaccagcccttagtggcgatctgggaactttcatggcctgggtggatgatgttagaaagctcaaggtcctggctaacgccgatacccctgatgatgcattgactgcgcgaaacaatggggcacaaggaattggattatgccggacagagcacatg

SEQ ID NO: 15204 - DNA, 307 bp, Zea mays
cggaccgtggcggacagagtctggaagagacaggacctatggtcaatgaagaagatatccagcagatagtatcttcatggactggcatccctgtggagaaagtttccagcgatgaatctgatgagcttcttaagatggaagagactttgcacaagcgtgtcattagccaagatgaggctgtggtagcaattagtcgctccatccgccgtgctcgagtgcggtctcaagaagcccaacaggctaattgcaagctttattttagctggtcccacaggcgttaggaagtctgagattgcaaaggctcttg

SEQ ID NO: 15205 - DNA, 305 bp, Zea mays
acggcggcgtggagtcgttcccgttcaaggccggcaagtaccagatgaagaagctgtgcctggagccgacgtccttcaccgtcaaggcggagggcatcgccaagaacgccccgcccgagttccagaagaccaagctcatgacccgcctcacgtacacgctggacgagatcgagggcccgctcgacgtcggctccgacggcacgctcaagttcgaggagaaggacggcatcgactacgccgccgtcaccgtgcagctcccggggggcgagcgcgtgccgttcctcttcaccgtcaagcagctcgtc

SEQ ID NO: 15206 - DNA, 300 bp, Zea mays
ggcctgctcttcgggacaatggtcgtcagcatcttccttgagagggctgacatgtttaagtacctcgggaacctgctctcgtggaagagcagaggcagcaaggacctgctcttccgagtctgcatcgtgtccgcgtttgccagcgcgcttttcaccaatgacacatgctgtgttgtcctcaccgagttcatcctcaaggttgctaggcaaaacaacctgccaccacagcctttccttctggcccttgccactagttcgaacatcggttctgctgcaaggcggaatggaaaccttaggaac

SEQ ID NO: 15207 - DNA, 315 bp, Zea mays
agcagccatgtcgtgctcccacctctccaccgcctggtcctcctcggcgctcgccagcagcgcctccaccacccgtcggcgctcccccccgcgctcgggtctcctggtgcggtgttccctccgtgagctccgcacccgcatcgactccgtcaggaacacgcagaagatcacggaggccatgaagctggtggccgccgccaaggtccggcgcgcgcaggacgccgtcgtctcctctcgccctttctcggaggcgctggtggaggtgctctacaacatgaaccaggagatccagacggatgacatcggactgcccct

SEQ ID NO: 15208 - DNA, 161 bp, Zea mays
ggacctggtgcaacgcaagccattgcttaacattgccatgcagctgcgcaagtgctgcaaccatccatatttgttccaaggagcactacctggcccaccctacacaactggtgaacatctagttgagaatgcaggaaaaatggttctactagataaattgc

SEQ ID NO: 15209 - DNA, 313 bp, Zea mays
ggcatgtcgggtaaggatgaccaaaaacttgagaggggtaatcttgtactagagaggagtttgcatagaggtaatccaatcagagtcattcgtagcgtaaaagacttgacttgtccaactggcaagatttacatatatgatggtctttacaagatcaaagaagcctgggtagagaaagggaaatctggtttcaatgtgtttaaacacaagttgcttagggaacctggccaacctgatggcattgcagtgtggaagaagactgaaaaatggagggaaaatccatcatctagagaccatgttatattacttgaca

SEQ ID NO: 15210 - DNA, 308 bp, Zea mays
cacacgcgtccgggaccgtggtatgatctacacattttacaaggcacaaggatattctgttggaaaatctctcgtggaagaggataaacttgaactcgcaacttctcttattgagaaggcgaaggcaaagggggtttctcttttgcttcccactgatattgtagtagcggacaagtttgcagccgatgctgagagcaagattgtccctgccactgctatccctgatgactggatgggtcttgatgttggccctgatgccacgaaaaccttcaacgaagcattggacaccaccaagactgttatttgga

SEQ ID NO: 15211 - DNA, 314 bp, Zea mays
cccacgcgtccgagcaaccggtccaacactttcacgctcaggcgctcagctctagcaatggctgcctccaccatggcgatctcctccacggcgatggccggtacccccatcaaggtgggctccttcggcgagggccgcatcaccatgcgcaagaccgtgggcaagcccaaggtggcggcgtccggcagcccctggtacggccccgaccgcgtcaagtacctcggccccttctccggcgagcccccgagctacctcaccggcgagttccccggcgactacggctgggacaccgccgggctgtccgccgaccccga

SEQ ID NO: 15212 - DNA, 312 bp, Zea mays
ctagccaaagcatgcacctcggagtccttgccactgcatggcacgccattaacacgaatccatgttcactgtctactacaagcctaggacgagcccttcagagttcatcataccgtacgatcaatatatggagtcggtaaaaaataattattctattggcatgagattcaggatgaggtttgaaggagaagaggcgccagagcagaggtttactggtacaatagttggttgtgaaaatcttgacccactatggcctgattccagttggagatacttgaaggtgcgttgggatgagccttctactatcccgcg

SEQ ID NO: 15213 - DNA, 303 bp, Zea mays
ccacgcgtccgactagttctagatcgccaccagactgccttctttttttttttttttttgttttttttttttttttaagaccagcaagatttcctgttccatcaaaatcagtttaggcaaacgacattacgacgagtgcagaccaccactcgtcagaatctagagagattgaaaaaaaagggttcttttctgcttttggtgctcccacgacaaaatcacctgagtagctctcgagcaaacacgaccatacatttattgcgaccgtacaaacattgtaacaaaaggcagcagcgagctagtata

SEQ ID NO: 15214 - DNA, 310 bp, Zea mays
gtacgaagccgacgagcagccgacgctaaagcttggtccggtgagcttcagagaaggggcgggtacgtcaagatgcagatcttcgtgaagaccctgacgggaaagaccatcaccctcgaggtcgagagcagcgatacaatcgacaatgtcaaggccaagatccaggacaaggaaggtatcccgccggaccagcagcgactaatcttcgcggggaagcagctcgaagacggccgcaccttggccgactacaacatccagaaggagtccacccttcaccttgttcttcgccttcgcggtggcatcattgaac

SEQ ID NO: 15215 - DNA, 310 bp, Zea mays
gtcagagtggaaccagagttccagttggtggtggagacaacaacgttgttcacaaagccgaggacgttgtgagcactatgcttgccaagggtttcgtgctaggcaaagacgcggttggcaaggccaaagcattcgatgagaagcatggcttcacatccacagccggtgctacagtggcctcaattgacaagaagattgggctgactgataagatcacgacaggcacttccttggttagcgggaaggtgaaggagatggaccagaagttccaggtctccgacaagaccaagtctgcactcgctgccgccga

SEQ ID NO: 15216 - DNA, 303 bp, Zea mays
attggcaaccgtgatgctgcgtccttggttaacaatgatgatccaacttgtattgagatatggaaccttgtattcattcagttcaatagggaggcagatggcacattgagacctttgccagcaaaacatgtggacactgggctgggctttgagcgtttaacttctattcttcagaataaaatgagcaattatgatacagatatattcatgccaatatttgatgccatccaccaattggctggcgatggaattcagccatactctggtaaattaggttctgatgatactggcaaagctgatatg

SEQ ID NO: 15217 - DNA, 306 bp, Zea mays
gtatgacgcaatcactgtgaatggtgaccttgattggcaggataagctccacaagtacaataagccattctttgatgtatgtgatgggctattttctaactatacatggcaggaaaatgacccacaagattcagctacagttgctggcgacagacaatatgatgtatacatgggtattgatgtttttggacgaaatacatttggcggtggtcaatggactacaaatgttgcccttgatctacttaagacagttgatatctcagctggcatatttgctcctggatgggtatatgacactaagcaacc

SEQ ID NO: 15218 - DNA, 304 bp, Zea mays
gctttcttcagacatggcttcagctggtgtagccccatctgggtacaaaaacagcagcagcactagcattggtgccgagaagttgcaagatcagatgaacgagctaaagactagagatgataaggaagttgaagcaaccataattaatgggaaagggactgaaactgggcacataattgtcaccactactggtggcaagaatggtcaaccaaaacagacagtgagctacatggctgagcgcattgtaggtcaaggttcttttgggatcgtcttccaggctaagtgtttggagacgggtgagact

SEQ ID NO: 15219 - DNA, 302 bp, Zea mays
cctgcagcagcgcatggctgggtgcacgcaagtacatgacctacaactactgcaccgaccccaagcgctaccagcagggcctccccgccgagtgctccatgcactagcgcccggctattcctcgcccgtccaacaatggcgcgcgcgcgcgtgtgtgtgcatgtggtccgctctactgctaccgctacgacgatcggtgtcgatcaccggatcaaggcaagacgaaaggcatcgaaacatggtagataaataaaggacttgacgatttgtaacgcagtaggtggtgcgtgcgtggtgtggtg

SEQ ID NO: 15220 - DNA, 310 bp, Zea mays
gaagaagacgagtgtcaagtgaacctgaaacttgcggtgtcactggctggtatagcctgagtgtgagtgagtgatcgagctagctgagctccgatcctcgctagctagctaggataccgccataccacaagtcttcttcacaagtttaggagtgacagcaacaagagatctcgatggcctctgccaccgtgctcaagtcctccttccttcccaagaagtccgaatggggcgccaccaggcaggccgccgcgcccaggccgcccaccgtctccatggtcgtccgcgctccgcctacgccgatgagctcgtg

SEQ ID NO: 15221 - DNA, 309 bp, Zea mays
ccgccgctgaaacaatctgcacccccacgcacaagcacgaagcagtcagcagtggagtacaaatcctcgcctgcttcctggttttctctccccgccactccagcggaacggcggcgagggagtgagtgacggcagcgaggcaagatggcgaggaggaggccgatggactacgaggagctgaacgagaaagtcaagaaggcgcagtacgcggtgcgcggggagctgtacctccgcgcctccgagctccagaaggagggcaagaagatcatcttcaccaacgtcggcaacccgcacgccctcggccagaag

SEQ ID NO: 15222 - DNA, 308 bp, Zea mays
cccacgcgtccgaaagaaacccttaagaatgtcacaaactacattactgatatcatctgcaagcgtgcagatcttggttacaactatggtgttatccttataccagaaggcctgattgatttcatcccagaggttcaaaaactcatcgcggaattgaatgaaattttagcacatgatgttgttgatgaggcaggggcctggaaaagcaagcttcaggctgaatcaagggagctgtttgagtttttgcccaaaactattcaggagcaacttatgcttgaaagagatccccatggcaatgttcaggttgc

SEQ ID NO: 15223 - DNA, 313 bp, Zea mays
gcaccaccactgcgcggcattgcagcgagcgagcgggagggatctggggcatggtggcggtcgctgccgctgccgctcggatctagagggccgcacggtatccgccggcctcgtcggtgtcggtgtcggtgtcggtggagtgtgaatcggtgtctgtaggaggagcgcgaagatggcggccaacaaggggatggtggcaggctctcacaaccgcaacgagttcgtcatgatccgccacgacggcgacgcgcctgtcccggctaagcccacgaagagtgcgaatgggcaggtctgccagatttgtggcgacact

SEQ ID NO: 15224 - DNA, 314 bp, Zea mays
caacacgctcatcagtgacaccacgacagtcatatgcctcgacgactaccattccctggacaggaacggcaggaaggagaaaggtgtgaccgccctcgaccctagggccaacaactttgatctcatgtatgagcaggtgaaggcgatcaaggaaggccaggcagtcgagaagcccatctacaaccatgtcactggcctcctcgaccctccggagcttatcgcgccaccaaagattttcgtcattgaaggtctgcacccaatgttcgatgagcgagtgagggacctcttagatttcagtatctacttggacatca

SEQ ID NO: 15225 - DNA, 311 bp, Zea mays
gagaattgtagattggctcgctgggaacttcaagaatgatgagggtattgatttgctaaaagataagcaagcactgcagcgattgacagaagcagctgagaaggcaaagatggaactgtcatctttgacccaaacaaacatgagcttgccttttattacagctactgcagatggtcccaagcatattgagactactcttaccagggctaaatttgaagagctatgctcagatctccttgacaggctgaggacccctgtggacaatgcccttagagatgcaaagttgcaattcaaagatattgatgaggtta

SEQ ID NO: 15226 - DNA, 310 bp, Zea mays
gtgtacgtgccacaagcagcagcagcagcagcaatggccgccgccgccgccacctcctcatcctcccacctgctcctcctctcccgccagcaggcggcctccctacgatgccgcctctccttcctcggccagcccagaaggcccggcagggtcacggcccaggcgccggccgctaaggacgtgcggtgcatggcggccgtggacactactgcggcgtccacggcggcggaggagacgagccccaagtcgagcagctacgagatcgtgacgctcacgacgtggctgctgcagcaagagcggaccggcgcga

SEQ ID NO: 15227 - DNA, 308 bp, Zea mays
  unsure (1)..(308): unsure at all n locations
gtcgaaaccctagtcccctcgctttccttccactcgccgtcgcggcgccgatagagccagagctgaaaggcgtaggaaaagctggtggaggaggggatggaccggatcgtaggcagcaagtacaagctgggtcgcaagatcggaagcggttccttcggggagatctacctcgcgacgcacgtcgacacctacgagatcgtcgccgtcaagattgcaagcagcaaaaccaatcatccacagttgctatatgaggccanactgtacaatgctcttcaggagggactggtatcgcaaacataaaatggtgc

SEQ ID NO: 15228 - DNA, 306 bp, Zea mays
ggccagtcaccggtattctccaaggcaaggtacactgtgaggtcgtttgggatccggcgcaatgagaagatcgcatgctatgtgacggtgcggggtgagaaggcaatgcagctgctggagagtggcttgaaggtgaaggagtacgagctgctgaggaggaacttcagtgacactggctgctttggatttggtatccaagagcacatagatcttggcatcaagtatgatccatctactggtatctacggcatggacttctacgtcgtccttgagcgtgctgggtaccgtgtcgcccgtcgccgcagg

SEQ ID NO: 15229 - DNA, 305 bp, Zea mays
cggacggtgggcgtgacgcgtgggcggacgcgtgggcgccgctgccgccaccgctccaacgggcagccagccagccatggatgaggagtacgacgtgatcgacgcttggcacgacgctcaaggagatcagcctcagtggtctcctttccgtcgacggcctcaaggttttgcatatggacagaaacgactactatggaggagattccacctcgctcaaccttaatcagctctggaagaggtttagaggggaagacaagcccccagcacatctaggtgcaagcagagactacaatgtggacatggtg

SEQ ID NO: 15230 - DNA, 307 bp, Zea mays
cccacgcgtccgaagaagcaatgtgttttatgatggatcctttgcttggaaataaagtttgctatgtgcagtttcctcaaagatttgatgggattgatcgccatgatcgatatgctaacagaaatgttgtctttttcgatatcaacatgaaaggtttggatggtatccagggcccaatttatgtgggtactggatgtgtcttcagaaggcaggcattatatggctacgatgctcccaaaacaaagaagccaccatcaagaacttgcaactgctggccaaagtggtgcatttgctgttgctgttttgg

SEQ ID NO: 15231 - DNA, 308 bp, Zea mays
cccacgcgtccggccatcgacacgatcgcgagcgcaacacgtacgttgtcggaagctcaagttagaagaagcaccagtgcctgatcgatggcggcccaggctctcctctccggccggcagctgctgggccgccccgtgcagtcggccgtctctaggtcgtcggcgaggaaggcgcccttcgtcgtcagggccagctccagccctccagccaagcaaggtgccgacaggcagctgtggttcgcgtccaagcagtccctctcctacctcgatggcacgctgcccggcgactatggcttcgacccgctggg

SEQ ID NO: 15232 - DNA, 308 bp, Zea mays
cccacgcgtccgcccacgcgtccgcccacgcgtccgcccacgcgtccgcccacgcgtccgcccacgcgtccgcaagtcattgccactggtctgccagcctcacctggggctgctgtgggccaggttgtgttcactgctgaggatgctgaagcatggcattcccaagggaaagctgctattctggtaagggcagagaccagccctgaggacgttggtggcatgcacgcagctgtggggattcttacagagaggggtggcatgacttcccacgctgctgtggtcgcacgtgggtgggggaaatgctgcgt

SEQ ID NO: 15233 - DNA, 301 bp, Zea mays
acacacgcgtccgcggacgcgtggcgcatatcacatcctttaagagcagacccacatcgtacagagtttcaccgtgcagcaattagatgggtgcttgatgatggatctggtcgacctggttttgttgctgagagtactggccatcaggctagtagccgtcttcttagtatgaaatctgctaatgccctgctggaaataccatccactggacaaatattggcagctgggacatctatccaagccatacttatttcagacataataacttcttcagataaactgcctactccttcaaatccgt

SEQ ID NO: 15234 - DNA, 302 bp, Zea mays
cccacgcgtccgcgtggagacacagcagcttctcctccagatcgctgggcacaaggatattcttgaaggcgatccattcctgaagcaggggctggtgctgcgcaacccctacatcaccaccctgaacgtgttccaggcctacacgctgaagcggataagggaccccaacttcaaggtgacgccccagccgccgctgtccaaggagttcgccgacgagaacaagcccgccggactggtcaagctgaacccggcgagcgagtacccgcccggcctggaagacacgctcatcctcaccatgaagg

SEQ ID NO: 15235 - DNA, 303 bp, Zea mays
gcagaccgctcgcaagtccactggaggaaaagctcctaggaagcaactcgctacaaaggcagcccgtaagtctgcacccacaactggaggagtgaagaagcctcaccgttaccgcccagggactgttgctcttcgtgagatccgcaagtaccagaagagcactgagttgctgattaggaagctgccgttccagaggcttgtcagggagattgctcaggatttcaagacggatctgcgcttccagagccatgccgtgcttgctctgcaggaggcagcagaggcctacctggttggtctcttcga

SEQ ID NO: 15236 - DNA, 302 bp, Zea mays
cgccaagttgctgagaaagtgttcgccaatgtgggcaagactatcgggtacaaagttggaacaatgattgagatccccagggcagctctggtggctgatgagatagcggacaggctgaattcttctccttcggaacgaacgacctgacgcagatgacctttgggtacagcagggatgatgtgggaaagttcattcccgtctatcttgctcagggcattctccaacatgaccccttcgaggtcctggaccagaggggagtgggcgagctggtgaagcttgctacagagaggggccgcaaagct

SEQ ID NO: 15237 - DNA, 303 bp, Zea mays
cccacgcgtccgtgaagaaaggggacaagatatgttttatggccaatggaaaggaatatgttgctgaagaaattggtgtactatccccaaatcagatgcaagtttctgaactatatgctggcgaggttggttatctctctgcttctataagatcagtagcagatgccagggttggtgatactattacacattattcaaaaaaagcacatcatgctttaccaggatattctgaagccactccaatggttttttgtggcttgttccctatagatgctgatcagtttgaggagttgcgggaagcgc

SEQ ID NO: 15238 - DNA, 299 bp, Zea mays
cccacgcgtccgcccacgcgtccgccatggcgtcgtccatgctctccgctaccaccgtgccactccagcaggggggcggcctgtccgagttctccgggctcaagagctccgcgtcgctgcccatgctccggaatgccacctccgacgacttcatgtccgccgtctccttcaggacccacgcggtcggcacgagcggcgggtcgcggcgggcgccgacggaggcgaactgtaaggtggccatcaacgggttcggccgcatcgggcgcaacttcctgcggtgctggcacgggcgcggcgac

SEQ ID NO: 15239 - DNA, 296 bp, Zea mays
agagcaagagagattattgagtccacggtgaatgaagcatgcaataaattacatgatgattgtggagattaagctattacaagattgatgttgtgacgctagcagctaacgtagcagctaggcagcagcctcacttcacaactacaaatcacacaggagcatggggtccttgagcagactggcctcactcatttcacctcgaggatctcgtccaaggcgtagttgttggtagacacgccggcgtagttcaccttgttgaaccgcaccaccaccgggtaacgggtgttaggatcctg

SEQ ID NO: 15240 - DNA, 299 bp, Zea mays
gcgccactgtccagtgcgcgcgtcaagcttgcttagctagccgccatggcctccctcgccgccgtctccgtgaagcccgtggccatcaagggtctcgccggcagctccatctccggaaggaagctcgccgtcgccaggccgtcggcccgctccatccgcaggccccgcgcaccgccgtggtggccaagtacggcgacaagagcgtctactttgacctcgacgacatcggcaacaccaccggacagtgggacctctacggctctgacgcgccctcgccctacaacccgctacagagcaag

SEQ ID NO: 15241 - DNA, 301 bp, Zea mays
cgaccacctcgcgcaagagttcggcctgccgctgctgccgccgtccaaggccaagaacgccagcttcgcgcacggcgccaacttcgccatcaccggcgccaccgcgctcgacacgccctacttcgaggccaaggggctcggtgccgtcatctggaactccggagcgctcatgacccaaatccagtggttccgtgatctcaagcctttcttctgcaacaccacggaggcatgcaagaaattctttgcgaaggcgctgtttgtggtgggtgagtttggaggcaacgactacaatgctcccctc

SEQ ID NO: 15242 - DNA, 115 bp, Zea mays
cccacgcgtccgcgaacctggcggagatggcgagcatcgggctgtcggtgccgccaaggttcacggtgtcgacggaggcgtgccagcagtaccaagacgacgggtgcggcctccc

SEQ ID NO: 15243 - DNA, 298 bp, Zea mays
atcgcgggctggccgtgcacatggaggacggggagctggagctcaccatcaaggactacccctacgcccacgacgggctcctggtctgggactccatcaggcagtgggcgtccgagtacgtcaacgtctactacaagtccgacgatgccgtggccgccgaccccgagctgagggcgttctgggacgatgtgcgcaacgtggggcactgcgacaagaaggacgagccgtggtggcccgtgctggacacccgcgacagcctggtggagacgctgaccaccatcatgtgggtcacctccgg

SEQ ID NO: 15244 - DNA, 297 bp, Zea mays
atcaatttggcacagacagttttacatctatgtcctctccatgccatctcactagttcgttcctagagcagtctgaagttaccattccatctaactacgaccctctttttttgttatgtttcattttgaacaggtggttggaactctaggctacacagctccagaatacatgcagactggacacctcacggcgaagagcgacatatggagctacggagtcgtcctgtacgagctcatcacaggccgccgccccatcgaccagaaccgtccaaagagcgagcagaagcttctggactg

SEQ ID NO: 15245 - DNA, 301 bp, Zea mays
cccacgcgtccggaggcgaactgtaaggtggcgatcaacggcttcggccgcatcggcggaacttcctccggtgctggcacggccgcgaggactcgccgatcgacgtcgtcgtcgtgaacgacagctgaggcgtcaggaacgcgtcccacctcctcaagtacgactcgatgctcggcaccttcaaggcagacgtcaagatcgtggacgacactaccatcagcgtcgacggcaagcccatcacggtcgtctccagcagggacccgctcaagctcccatggggtgagctcggcattgacatcgt

SEQ ID NO: 15246 - DNA, 298 bp, Zea mays
agcttagctccgtggcgtacggcgcgacgtggcagttcgacacggaggcgctgcccaacgacctcgtcaagcgcgggctggccgtgcacagggaggacggggagctggagctcaccatcaaggactacccctacgcccacgacgggctcctggtctgggactccatcaagcagtgggcgtccgagtacgtcaacgtctactacaagtccgacgaagccgtggccgccgaccccgagctgagggcgttctgggacgaggtgcgcaacgtggggcacggcgacaagaaggacgagccgtg

SEQ ID NO: 15247 - DNA, 295 bp, Zea mays
tcttggtcagagctttgattccaatgttacgctcacccattatgagtccaatgcaaaagcacagggagttctttttgttggggacttgtcatatgcagataactacccatatcatgataatgtgagatgggatacgtgggcaagatttgtagaaaggagcgtcgcgtaccagccttggatctggactgctggaaatcatgagatagatttcgctcctgaacttggtgaaacaaagccattcaagccattcagccataggtaccccacaccctacaaggcttctggtagcacggca

SEQ ID NO: 15248 - DNA, 295 bp, Zea mays
cggaccgtggtcgctacgtagcagtgcaataaaaaaagcagccgcaatggcgagcagcaccatggccctctcctccacggccttcgccggcaaggccgtgaacgtgccgtcgtcgtccgccttcggcgaggcccgcgtgacgatgcgcaagacggcggggaaggccaagccggcggcggcgtccgggagcccgtggtacggccccgaccgcgtgctgtacctgggcccactgtccggcgagccgccgagctacctgacgggcgagttcccgggcgactacggctgggacaccgcg

SEQ ID NO: 15249 - DNA, 293 bp, Zea mays
gcatcatgcatcgagatgtcaagccccataatgtcatgatagatcacgagcttcgcaaacttcggttgatagactggggcttagctgagttttaccatccaggcaaggaatataatgtccgcgttgcatcgaggtatttcaagggacctgaactccttgttgatttacaagactatgattattctttggacatgtggagtcttggttgcatgtctgctggaatgatatttcgcaaggaaccattcttttatggccatgacaaccatgaccaacttgtgaagattgcaaaggtc

SEQ ID NO: 15250 - DNA, 294 bp, Zea mays
gtgccagcagtaccaggacgccgggtgcgccctccccgcggggctctgggccgagatcgtcgacggcctgcagtgggtggaggagtacatgggcgccaccctgggcgatccgcagcgcccgctcctgctctccgtccgctccggcgccgccgtgtccatgcccggcatgatggacacggtgctcaacctggggctcaacgacgaagtcgccgccgggctggcggccaagagcggggagcgcttcgcctacgactccttccgccgcttcctcgacatgttcggcaacgtcgtcat

SEQ ID NO: 15251 - DNA, 296 bp, Zea mays
tgaggatgctgaagcatggcattcccaagggaaagctgctattctggtaagggcggagaccagccctgaggacgttggtggcatgcacgctgctgtggggattcttacagagaggggtggcatgacttcccacgctgctgtggtcgcacgtaggtgggggaaatgctgcgtctcgggatgctcaggcattcgcgtaaacgatgcggagaagctcgtgacgatcggaggccatgtgctgcgcgaaggtgagtggctgtcgctgaatgggtcgactggtgaggtgatccttggaaagc

SEQ ID NO: 15252 - DNA, 291 bp, Zea mays
gcgccggcgcccaccgccgtggcgctgcctgcggccaaggtgggcatcatgggccgtagcgccacagcaggggcaggctgcgcgcgcaggccacctacaacgtgaagctgatcacgccggacggggaggtggagctgcaggtgcccgacgacgtgtacatcctggaccaggccgaggaggacggcatcgacctgccctactcctgccgcgcggggtcctgctcctcctccgccggcaaggtcgtctccggctccgtggaccagtccgaccagagctacctcgacgacggcc

SEQ ID NO: 15253 - DNA, 293 bp, Zea mays
cctaccccacacagaagcggcggcggcggagcaaacgcaggcgaaggcgagggtgtgagggaaggagcaccagccatggtgcacgtcaacttctaccgcaactatggtaagacgttcaagaaaccaaggcgtccttatgagaaggagcgtcttgatgctgaactgaagctggttggtgagtatgggctgaggtgcaagcgtgagctttggagggtccagtatgcactgagcaggatccgtaatgctgcaaggcacttgctcacccttgacgagaagaacccccgtcgtatctt

SEQ ID NO: 15254 - DNA, 291 bp, Zea mays
cggacgcgtggcttcacactcctcgccatcacataaaaccagtgcaagcagaagcagcgcaatggcgagcagcaccatggccctctcctccacagcctacgccggcaaggcagtgaacgtgccgtcgtctctcttcggcgaggcccgcgtgacgatgcgcaagacggcggcgaaggcaaagccggcggcgagctccggcagcccgtggtacggccccgaccgcgtgctctacctgggcccgctgtccggcgcgcccccgagctacctgacgggcgagttccctggcgacta

SEQ ID NO: 15255 - DNA, 290 bp, Zea mays
cccacgcgtccggcgacgctgtcgtccgctgatcgacctagtccgcagcaccggcgccacccacctctttttcaaccgactctacgacccgctatcgctggtccgggaccaccgcgtgaaggagcagctgtcggcggagggcatcactgtgcagtccttcaacgccgatctgctgtacgagccgtgggaggtcctcgacgacgacggcttccccttcaccatgttcgcgccattctggaacaggtgcctgtgcatgccggaccctgccgcaccactgctgccgcccaaga

SEQ ID NO: 15256 - DNA, 290 bp, Zea mays
cacgcggtcggcacgagctgcgggccgcggcgggcgccgacggatgcgaactgtaaggtggccatcaatgggttctgccgcatcgggcgcaacttccctctgtgctggcacgggcgctgcgacgcctcgcccctcgacgtcatcgccatcaacgacaccggaggcgtcaagcaggcgtcccacctgctcaagtacgactccacgctcggcatcttcgatgccgacgtcaagcccgtcggcgacaacgccatctccgtcgacggcaaggtcatcaaggtcgtgtccgaccg

SEQ ID NO: 15257 - DNA, 291 bp, Zea mays
atcgacacgatcgcgagcgcaacacgtacgttgtcggaagctcaagttagaagaagcaccagtgcctgatcgatggcggcccaggctctcctctccggccggcagctgctgggccgccccgtgcagtcggccgtctctaggtcgtcggcgaggaaggcgcccttcgtcgtcagggccagctccagccctccagccaagcaaggtgccgacaggcagctgtggttcgcgtccaagcagtccctctcctacctcgatggcacgctgcccggcgactatggcttcgacccgctg

SEQ ID NO: 15258 - DNA, 289 bp, Zea mays
ctgtggggaaaagtgagctgcagaacgcggggaaagctggccttgtgaccatccaagggaagatttctgtagtccttgggactgtattgattagtgcctacctgtttataacattcttcccagaccaggctgagaagctttttgacttggctggcatcagcttgtgatcagagctgatgttcttcggtactccacttcataatcaggatggttgatcaagtcagattcactcagatgtttccagactgaaaaggaatttttgctctgtgtactattagggaattcttga

SEQ ID NO: 15259 - DNA, 291 bp, Zea mays
agcagctattgtggtcgtccctcagccgcgtcgcaccgcatcgcattctacgattcgaagctctctctgctcgcagccatggcgaagaattacccaaccgtgagcgccgagtacagcgaggccgtcgagaaggccaggcgcaagctccgcgccctcatcgccgagaagagctgcgcgcccctcatgctccgcctcgcgtggcactccgcggggacgttcgacgtgtcgtcgaggaccggcggtcccttcggtactatgaagtgcccggcggaactggctcacggcgccaac

SEQ ID NO: 15260 - DNA, 284 bp, Zea mays
aaacacacgtccgcggacgcgtgggaagtggtcgagacgcgtggcgcggtctgctcgttcgatctgtgcagcagatctgaggtcccgggcgaccgtgaagcagcttcaatcgtcggcccagcgctcgtaatgcatagtggggctggaaacaagaatgccttcaaagcacttattgctgcagaatacagtgggatcaaggttgagttgaccaaggattttgagatgggtgtctccaacaagacccctgagtttcttaagatgaacccccttgggaaggttcctgt

SEQ ID NO: 15261 - DNA, 290 bp, Zea mays
atcgcatgcaggtagcaatggcaaaggatacgaagaagggcctggtgctgctggacttctgggtgatcccgttcgggcagcgctgccgcatcgcgctggcggagaagggcatcgcctacgagtactcggagcaggagctgctggtcggcgccaagagcgacatcctcctccgctccaacccggtgcacaagaagatccccgtgctcctccacgacggccgccccgtctgcgagtccctcgtcatcctcgagtacctcgaggaggccttcccggaggcctcccccaggctg

SEQ ID NO: 15262 - DNA, 325 bp, Zea mays
  unsure (1)..(325): unsure at all n locations
cgccatcacataaaaccagtgcaagcagaagcagcgcaatggcgagcagcaccatggccctctcctccacagccttcgccggcaaggcagtgaacgtgccgtcgtctctcttcggcgaggcccgcgtgacgatgcgcaagacggcggcgaaggcaaagccggcggcgagctccggcagcccgtggtacggccccgaccgcgtgctctacctgggcccgctgtccggcgcgccnccgagctacctgactggcgagttcccgggcgactaatgctgggacaccgcggggctgtcggcggacccggagacgttcgccaagaaccggga

SEQ ID NO: 15263 - DNA, 316 bp, Zea mays
cttgtcggagctgtttcaagccctaaacgcccttttgctgccatcgtgggtggttcaaaggtgtcatccaagatcggggttattgagtccctgttggagaagtgtgatatccttctcttgggtggtggtatgatcttcacgttttacaaggcacaaggtctccctgttggtgcttcattggtcgaggaagacaaactcgagcttgcgacgtctctccttgcaaaggctaaggaaaagggcgtctcccttatgctgccaactgatgttgtcattgctgacaagtttgcccctgatgctaacagccagattgttccag

SEQ ID NO: 15264 - DNA, 301 bp, Zea mays
ggcgtcgacgccggcgccgccaggatcacgtgctcgctgcaggacgtcgccagcaggttcgtcgacgccgcgaactcgccggtttcgcgctcgccacctcggcgctcctcgtctcgggctcgactcggagggcacgcccaatatgctgacctacgacgggatccagagctaaacgtacatggaggtgaagggcacggtcacggcgaaccagtgcccgaccatcgacggcggcgtggagtcgttcccgatcaaggccggcaagtatcatatgaagaagctgtgcctggagccgacgtccttc

SEQ ID NO: 15265 - DNA, 301 bp, Zea mays
gacaaacgccggcacgcgcacgcagacacgatggcgatctgcagcgcgcacactaccacctccctgcgctccccatgcacgaccgtctcgaacgcaggtctgaggcagaagcaagtcatcttcgtcaccagcaacaggaggagcggcggcggcaggaggcacggaggggcaaggagcttccaggtctcgtgctccgtcgacaagccggtggtgattggcctggcggcagactcagggtgcggcaagagcaccttcatgcgccggctcaccagcgtcttcggtggcgccgcggaccgcccaa

SEQ ID NO: 15266 - DNA, 316 bp, Zea mays
ctaacgtcctgtccgtggagcacgcgctggaacgcatggagctcgtgcactcctgcgtcgagaaggtgcgcatgaacctgcgcacgggcgccgtgtcacgaaccccgctctcggcgggtaacctcgacttcggcgtgatccacccgggctaccttggccggcgcaaccggtacggatacctcggcatcggcgaccccatgccgaagatctccggagtggccaagctggacttggaccgcgccggcacgggcgactgcactgtggcgcgacgcgacttcgggcccgggtgcttcgcgggggagccgttcttcgtccc

SEQ ID NO: 15267 - DNA, 320 bp, Zea mays
cccacgcgtccgcgatctacacacatacatagtttcttctactacacgacgacaaacatggggaagcctgcgaagatcggagagtggggtggatacgccggcgatcgtcgggatctgagggctactccggaccggctgatcgaggtgaaggtcacggcggacaacagcagctgcatccgctccatctccttcatctacatcggagccgatggcaaaccgtacgaggaggggccatggggtttcggccatgctggcacggagtacaagattgatctgtgcaggttcgacgagagcttgacggagatctccgggaccacggg

SEQ ID NO: 15268 - DNA, 320 bp, Zea mays
ggaccgtggcggccagcagacactgccatgaggactctactaccggtggccgccggccgcgggaccgtcgcctgctcggccacgcccgtcccccggaggtcgctgctcctctccagcgctgccgcatgtgctgcgctgcagccggagcaggtggccggcacgacgccgttgatgctgaccaggagcgaggccagcgccgtggcaaagcccaggaccttggccgacgaggccatctcgtgggcgaagaaagacaaccgccgcctcctccacgtcgtctaccgggtcggcgacctcgacaagacgatcaagttctacaccgg

SEQ ID NO: 15269 - DNA, 316 bp, Zea mays
tccacgcgtccgcccacgcgtccgcacacgcgtccgcggacgcgtgggtgaaaatcttactctgctagatctcagccagaataatctgaccggtgctattccagataacttcacgagtctctccaagcttgagactttgctcctttctggcaacaaattgattggggaaataccatcgagtctgtctaatgtgacaacactgtctaggtttgcagctaaccagaacggtttaactggacccatccatagctggattaccaagcatatagggatgttggatttgagttacaacaagctgaatgggacaatcccctca

SEQ ID NO: 15270 - DNA, 311 bp, Zea mays
agaagcctccgttcactctgggtcagatcaagaaggccatcccgccacactgcttcgagcgctcggtgctcaagtccttctcgtacgtggtccacgacctggtgatcgccgcggcgctcctctacttcgcgctggccatcataccggcgctcccaagcccgctccgctacgccgcctggccgctgtactggatcgcgcaggggtgcgtgtgcaccggcgtgtgggtcatcgcgcacgagtgcggccaccacgccttctcggactactcgctcctggacgacgtggtcggcctggtgctgcactcgtcgctc

SEQ ID NO: 15271 - DNA, 312 bp, Zea mays
ccaacgtgctcgatctccatctcgaccgtcgctcaccgggaagctacgctacgacgaatcatggcgtccgtcaccgcccgctccccggtcgcagccctgcgcccgtcgtcgtcgtcggccttccttggccactctagccgcctcggccgcactgctaccgcgtcgccgacgaggcggagctcgacggcggaggccaagggcgagtggctcccgggccttccctcccccgcctacctcgacggcagcctgccgggtgacaatggcttcgacccgttgggcctggcggaggacccggagaacctgaggtggtac

SEQ ID NO: 15272 - DNA, 308 bp, Zea mays
cccggctggaccacaacagggctcttggccagatttctgagagacttagtgtccaagtcagtgatgtgaagaatgttatcatctggggtaaccactcgtccactcagtaccctgatgttaaccatgccacagtgaagacttccactggggagaagcctgttcgtgagcttgttgctgatgatgagtggctcaatggcgaattcatcacaactgtccaacagcgtggtgctgcaatcatcaaagcgagaaagttctccagcgctctctcagctgctagctctgcttgtgaccatattcgtgattgggtt

SEQ ID NO: 15273 - DNA, 310 bp, Zea mays
catcacataaaaccagtgcaagcagaagcagcgcaatggcgagcagcaccatggccctctcctccacagccttcgccggcaaggcagtgaacgtgccgtcgtctctcttcggcgaggcccgcgtgacgatgcgcaagacggcggcgaaggcaaagccggcggcgagctccggcagcccgtggtacggccccgaccgcgtgctctacctgggcccgctgtccggcgcgcccccgagctacctgacgggcgagttcccgggcgactacggctgggataccgcggggctgtcggcggacccggagacgttcgc

SEQ ID NO: 15274 - DNA, 315 bp, Zea mays
gacaacatggccgcctccgcctccaccgtctccggcctcgccggcgcctccctggccagccgcccggcgttctccaccagcttcacgcggggcagccgggtgtcggcgaggaaccccctgatgagcaggaacctggagaggaatggcaggatcacctgcatgacgtttccccgggactggctgcggagggacctgagcgtcatcggcttcgggctcatcggctggatggggccgtccagcgtcccggccatcaacggcaacagcctcacggggctcttcttctccagcatcggccaggagctggcccacttcccc

SEQ ID NO: 15275 - DNA, 318 bp, Zea mays
cccacgcgtccgaaagaagctggaaatcgatgacgaccagaagctgcgtgccttttatgaccgaagatatcccacgaggtcagtggtgatgctctgggtgatgagttcaagggttatgtcttcaagatcatgggtggatgtgacaagcaaggcttcccaatgaagcaaggagttttgacttctggtcgtgttcgtcttctgctccatagggggactccctgcttccgtggttatggcaggcgtaatggtgagcgcaggaggaagtctgtccgtggttgcatcgtgagccaagacctatctgttatcaacttggtgatt

SEQ ID NO: 15276 - DNA, 311 bp, Zea mays
cccacgcgtccgagaaactgaaacagaggggcctacttaacagggagtcagaggaatctgacgaagaagagaactacttttccattgaattgacgccaagtttgtttacatctgctgtcgataatgcataccagtccatacatgaattttcaaagcctttgatcaacatgatgaaggctgcaggttgggatcttgatggggctgccaatgcgatcgaacctggtgtggtttacacaagaagggctcacaagaagtttgcttttgaatcctatatttgccaaagaatgttcagtgggttccaagaggagagc

SEQ ID NO: 15277 - DNA, 305 bp, Zea mays
atcaaagaaggaattacagagtgtctcaaagagtgggggataaaagagaagatgtttactatcacattagataatgtttctaacaatctgtcagtgcgtgaccttcttctagaaagtgggcgttcgaacatgttatttggaggcgagcatcttcatgtccaatgttgtgcacacatattgattctcttagttcaagatggaatggcaattgctcatggagcaatatataagattcgtgagctggtcagacatataaattcctcaccctcctgcatacaagcttttaatgggattgctgagaagtc

SEQ ID NO: 15278 - DNA, 307 bp, Zea mays
ctgcgccaggtgttcacgttcgggctctccctggtgaagctggacatccggcaggagtcggagcggcacaccgacgtgatcgacgccatcaccacgcacctcggcatcgggtcgtaccgcgagtggcccgaggacaagaggcaggagtggctgctgtcggagctgcgaggcaagcgcccgctgctgcccccggaccttccccagaccgacgagatcgccgacgtcatcggcgcgttccacgtcctcgcggactcccgcccgacagcttcggcccctacatcatctccatggcgacggccccctcgga

SEQ ID NO: 15279 - DNA, 306 bp, Zea mays
cccacgcgtccgtgctcgatctccatctcgaccgtcgctcaccgggaagctacgctacgacgaagcatggcgtccgtcaccgcccgctccccggtcgcggccctgcgcccgtcggcgtctctcaagtcgtcgtcgtcgtcggcggcggccttccttggccactctagccgcctcggccgcactgctaccgcgtcgccgacgaggcgcagctataaggcggaggccaagggcgagtggctcccgggccttccctcccccgcctagctcgacggcaggctgccgggtgacaatggcttcgacccgttg

SEQ ID NO: 15280 - DNA, 304 bp, Zea mays
ggagaagaagacgagtgtcaagtgaacctgaaacttgcggtgtcactggctggtatagcctgagtgtgagtgagtgatcgagctagctgagctccgatcctcgctagctagctaggataccgccataccacaagtcttcttcacaagtttaggagtgacagcaacaagagatctcgatggcctctgccaccgtgctcaagtcctccttccttcccaagaagtccgaatggggcgccaccaggcaggccgccgcgcccaggccgcccaccgtctccatggtcgtccgcgcctccgcctacgccga

SEQ ID NO: 15281 - DNA, 304 bp, Zea mays
ggaatcctatgaggttgaaatcaatgggaaagttttccaagttaaaagtgttcggaacctcaatggacacagcatcgggccataacaaatccatgctgggaaatcagttccaatagtgaaaggtggagagcaaacaaaaatggaggaaggggagttttatgccattgaaacttttggatctacgggaaagggatttgtcagggaggacttggaatgcagtcattacatgaagaactttgatgtcggacatgtgcctttaaggttagcaaaggccaagcaactgcttgggaccatcaaccacaac

SEQ ID NO: 15282 - DNA, 302 bp, Zea mays
ctggtggggttctcactgggaagtatcttgacgctaacgctgacatctcaaagagcaggctaaatctcttccctggatacatggcacgctacaatgactctttggctaaagaagcgacattagagtacgttaagcttgccaagaagcacgggctaactccagtccagcttgcccttggcttcgtgcgtgatcgtccattcaccgctagctccatcattggagcgaccaccatggagcaagtgaaagagaacatcgacgcgtttaccagcactccacggcctctatcacaggaagttcttgac

SEQ ID NO: 15283 - DNA, 317 bp, Zea mays
ctgcgtgcagggcgcgagcgcggagggcacgcccaagaggctgacctacgacgagatccagagcaaaacgtacatggaggtgaagggcacgggcacggcgaaccagtgcccgaccatcgacagcggcgtggagtcgttcccgttcaaggccggcaagtaccagatgaagaagctgtgcctggacccgacgtccttcaccgtcaaggcggagggcatcgccaagaacgccccgcccgagttccagaagaccaagctcatgacccgcctcacgtacacgctggacgagatcgaggggccgctcgaagtcggctccgacg

SEQ ID NO: 15284 - DNA, 301 bp, Zea mays
ctgatagatagttttctaaagatggcactaccaggaacaagttctggtttgcacattgtccacatagcagcagagatggctcctgtcgcaaaggttggtggtctggcagatgtgatctctggtcttgggaaggcacttcaaaaaaaggggcaccttgtagagattattcttcccaaatatgattgcatgcagcataaccaaataaataatcttaaggttctagatgttgtggtgaagtcttactttgaaggaaatatgtttgccaacaagatatggactggaactgttgaaggtcttccgg

SEQ ID NO: 15285 - DNA, 301 bp, Zea mays
acgacctgcagccaaccatctaccagcgactcagcgagcgagagcagcacacacgcagctagctaggagcagcagcagagcagcggcgatggcggcctccatgatctcctcgtcagctctggcggtggcgcctcagggcctgccgcccctcggccgccgcgcctcctccttcgccgtcgtctgctccaagaagaagatcaagaccgacaagccctacgggattgggggtggcctgaccgtcgacgtcgacgccaacgggagaaagggcaagggcaagggcgtgtaccagttcgtcgacaag

SEQ ID NO: 15286 - DNA, 299 bp, Zea mays
atcctcctcactgaaagtggagacgtgaaggttgcggactttggtgtttctgcacagctgactaaaacaatgtctaggaggaagacatttgttggaactcccttttggatggcacctgaggttattcaaaattctgaagggtacaatgagaaggcagatatctggtctttaggtatcactgccattgaaatggctaaaggtgaaccccctctggcagatattcatcccatgagagttcttttcatcatacctcgtgaaaatcctccgcagcttgatgagcatttctcgaaaccaatgaa

SEQ ID NO: 15287 - DNA, 299 bp, Zea mays
gatgggcgccttggacctacaccttgactttgcttctgctcaacatggacaagccaagttaaaggaatatgccaagagctctttgttgtctgatggaaactacaatacagacaagatcaatggttcaaaccctgatgactatgagaaatttgagaaagggataatgcactatgggtgtccacattatagaaggagatgccgcataagagctccttgctgcaatgaaatttttgattgccgacactgccacaatgaaactaagaattccattaaaattgataaaatgaagaggcatgaac

SEQ ID NO: 15288 - DNA, 276 bp, Zea mays
  unsure (1)..(276): unsure at all n locations
ccaacaccgtctacaccaagacgctgtacgccggcgacatcatggtgttcccccagggcctgctccactaccagtacaacgccggcaccgggctgccgtgggcctcgtcgccttcagcagccccaaccccggcctgcagatcaccgactttgcgctctttgccaacaacctcccgtccgccgtcgtggagaaggtcaccttcttggacgacgcgcangtgaagaagctcaagagtgtgctcggcggcacggttaacttgtttttcgagacaataca

SEQ ID NO: 15289 - DNA, 301 bp, Zea mays
gagagaggcgcgcagatggcgacgccgtcgtcgtcgctttgctccagcttcgcctccctgcggaccgcctccatcggccacccccgtggcatcgcctcctccacgcccaggaaggcattccatgtgagggcatcagctcgggttgacaaattctcaaagagtgacatcatcgtgtccccttcgattctgtctgcaaactttgcgaacttggtgatcaggtaaaagctgtggaggtggcaggatgcgactggattcatgtcgatgtcatggacgggcgctttgtgccaaacatcacaattgg

SEQ ID NO: 15290 - DNA, 300 bp, Zea mays
gaagagctagagggatgggtggcggcacggtggtgtgtgtcaccggcggcacggctacctcgggagctggctcgtcaggaagctcctcggcagaggctgcgtcgtccacgccaccctgcggacctcgcgcacgagaagaagacggggctgctccgggcgctccccggcgcggcggacggctgcggctgttcgaggcggacatgtacgacgccgacaccttcgagcccgccatcgccggctgccacttcgtcttcctcgtcgccacgcccctgacgcacgaccccccaagcaccaagtaca

SEQ ID NO: 15291 - DNA, 302 bp, Zea mays
cacactgatccggcctggagcgctggacagcagcagcagcatcgagctcgaggccgctccgccaccccgcactcgcctgtcgcctcttctcgctttcgccaccggggcagcgctccgccatggctggacctgctgttctcaatgagcgtatcctttcttccatgtcccagaaacatgttgctgctcacccatggcatgatttggagataggaccaggggctcctgaattcttcaattgtgtggttgagattcctagaggcagcaaggttaagtacgagttggacaaggcatctggtctgatc

SEQ ID NO: 15292 - DNA, 292 bp, Zea mays
aacacgcgtccgggacgcggcttcagccgccacctcacggtcgtcgacgtcggcggcggcacggggttcaccacgctctgaatcgtcaaactcgtcaacccggagaacgtcacgctgctcgaccagtccccgcaccagctcgacaaggcccggcagaaggaggccctcaagggggtcaccatcatggagggcgacccgaggacctcccgttccccaccgactccttcgaccgatacatctccgccggcagcatcgagtactggccagacccacagcgggggatcaaggaagc

SEQ ID NO: 15293 - DNA, 291 bp, Zea mays
ttcaagttcgccatcgacaaggacgtcaggaacttccaggtcctcaaagagatgtacaacgagtggccattcttcagggtcaccctggacctgctggagatggttttcgccaagggagaccccggcattgccgggcttgtatgacgagctgcttgtggcggaagaactcaagccctttgggaagcagctcagggacaaatacgtggagacacagcagcttctcctccagatcgctgggcacaaggatattcttgaaggcgatccattcctgaagcaggggctggtgctgcg

SEQ ID NO: 15294 - DNA, 294 bp, Zea mays
ggagagtacgtggaggagcagccatggcttcatcggtggccgccgcggcgagcacattcctgggcacccgcctggcggacccggcgccacagaacgggcgcatcgtggcccggttcgggttcgggttgggcggcaaggcgaactagcaccgaagaaggtggcgaagacatcgacctcctctgaccggccgctgtggttccccggcgccgtggcgccctactacctggacggctcgctggtcggcgactacgggttcgacccgttcggtctcgggaagcccgtggagtacctgca

SEQ ID NO: 15295 - DNA, 296 bp, Zea mays
acaagaggaagaagtggaggtgagcttcgatgaacttggcctggacgagcagctgaagagggcgttgaggaagaagggcatcctcaaggccacccgatacagcgggaagccatcccgctcatcctggaagggaaggatgtggttgcaaaggccaagactggctctgggaagacctttgcctatcttctcccacttctgcacgagctactgaagttgtcctcagaaggacgtatacgaaaacctgcaccaaatgctttcatcctggttcctactcgagatttatgccaccaggtgta

SEQ ID NO: 15296 - DNA, 294 bp, Zea mays
atttcttccaaaatgatcacatgttctaaagatgcatattatttggcagtactttcaaggttttctgtcaaggttgatggtgtgaaatgcttcacatttgacgaaatggctgtggcaacaagggattttgatatttcagctcaagttggtcaagggggttatggaaaagtttacagaggaaatttagctgatggaacaacagtggcaatcaaacgtgcacatgaagattctctgcaaggttcaaaggagttctgcacagaaatagaattgctgtcaagattacatcatcgcaat

SEQ ID NO: 15297 - DNA, 292 bp, Zea mays
gcactgctgcttgcgctcctcctcgtctctgctgctgccgcccctcaggtacttggagttggcaatggagacaatcacatgagaatcatccaggaggacatcatcgagacagtcaacaaccatcccagtgctgggtggacagcctcacgtaatccttacttttcaaactataccattgcgcaatttaagcacatacttggagtgaaacagcaccacagaatgcactaagcaatgttcctgtcaaaacttattcaagatcactggaacttccaaaagagtttgacgctagatc

SEQ ID NO: 15298 - DNA, 297 bp, Zea mays
cccacgcgtccgcatcgtcgccctcaaattcgttccgtccaggcaaggaagaaatcgagcagccaaggagaggagaagatggctcgtacgaagcagaccgcccgcaagtccaccggaggcaaggccccgcgcaagcagctcgccaccaaggcggcgaggaagtctgcgccgacgaccggcggcgtgaagaagccccacaggtacaggcccgggacggtggctctgcgcgagatccgcaagtaccagaagagcacggagctgctgatccggaagttgcccttccagcgcctggtccgt

SEQ ID NO: 15299 - DNA, 294 bp, Zea mays
tctactactactactagctggtacacatactagccagcctgccagccagcttgccatggcgcccaccgtgatgatggcctcgtcggcaaccgccgtcgccccgttccagggtctcaagtccgccgccagcctccccgtcgcccgccgcagcaccaggagcctcggcaacgtcagcaacggcggaaggatccggtgcatgcaggtgtggccggcctacggcaacaagaagttcgagacgctgtcgtacctgccgccgctgtcgacggacgacctgctgaagccagtggactacct

SEQ ID NO: 15300 - DNA, 293 bp, Zea mays
cccacgcgtccgcccacgcgtccgggaactcgttataaaggatatccaagatgcgtgcaaactttttgagcccatctacgacgagactgatggggctgatgggtatgtctccgtagaggtgtctcctaggttggcaaatgacactcaaggaactgttgaagcggcaaagtggttacacaaagtggtcaaccgccccaatgtctacataaagatcccagctactgcagaatgtgttccttccatccaggaagttatcgctaatggcattagcgtcaacgtcacgcttttctcaa

SEQ ID NO: 15301 - DNA, 289 bp, Zea mays
cggaccgtggcgtgacgcgtgggtgtcaagaaagcaacggcagcaagaaaccttgtaaacatcggagcatagatcgaggcggtgatgactgccaaggtgaggacggagctggacgtgggcgccgacgggtggccgtaatcaccatctacaatccgcccgtcaactccctctccatcgacgtcttacatagcttaaaagaaagctatgaagaagcacttcggagaaacgatgttaaagctattgtcgttacagggaaaggagggaaattttctggaggatttgatattag

SEQ ID NO: 15302 - DNA, 289 bp, Zea mays
cagcgccactgtccagtgcgcgcgtcaagcttgcttagctagccgccatggcctccctcgccgccgtctccgtgaagcccgtggccatcaagggtctcgccggcagctccatctccggaaggaagctcgccgtcgccaggccgtcggccgctccatccgcagccccgcgcaccgccgtggtggccaagtacggcgacaagagcgtctactttgacctcgacgacatcggcaacaccaccggacagtgggacctctacggctctgacgcgccctcgccctacaacccgct

SEQ ID NO: 15303 - DNA, 291 bp, Zea mays
acttccatgactgcttcgtcagaggctgcgacggctcggtgctgatcgactccacggccaacaacaaggcggagaaggactcgatccccaacagcccgagcctgaggttcttcgacgtggtggaccgcgccaaggcgtccctggaggcgcggtgccccggcgtggtgtcctgcgccgacatcctcgccttcgcggccagggacagcgtcgtgctcaccggcggcctcggctacaaggtgccgtccggacgccgtgacggccggatatccaatgccacgcaggccctgaacg

SEQ ID NO: 15304 - DNA, 281 bp, Zea mays
cgtacgcacgcaccgggacaccagcaacccccaacagcgccactgtccagtgcgcgcgtcaagcttgcttagctagccgccatggcctccctcgccgccgtctccgtgaagcccgtggccatcaagggtctcgccggcagctccatctccggaaggaagctcgccgtcgccaggccgtcggccgctccatccgcagccccgcgcagcgccgtggtggccaagtacggcgacaagaggctactttgactcgacgacatcggcaacaccaccggacagtggga

SEQ ID NO: 15305 - DNA, 291 bp, Zea mays
aaatatgacataggcgaagggttcggccatttcggcatcgcagtcgaggacgtggccaagacggtagagctcataagagcaaaggctggaaaggtcatcagggaagccggtcctgtgaagggcggcgagaccgtcatcgccttcgtggaggaccccgacggctacaagtttgagatcatcgagaggcctggaactccggaacccttgtgccaggtgatgctccgcgtcggcgaccttgaccgtgccataagcttctatgagaaggcctgcggcatggaactgctccggaag

SEQ ID NO: 15306 - DNA, 288 bp, Zea mays
ccaagacgaactcggtgaactctttccggttcgttcccctacgcccgtttctctctcgtcgcgcaacatcagagcacaagcgaggaacccagtccagtcccgggaatggagtgcgtattgggcgtggttggccgcgacttcgtgctggtggcggccgacacctccgccgtgcagagtattctcgtccacaagaccgacgaggacaaggtgatggtgctcgactcgcaaaagctgatgggcgcttcaggggagcctggtgatcgggtgaatttacggattcatacagag

SEQ ID NO: 15307 - DNA, 197 bp, Zea mays
aatattcttcccgtcgaaagacgagagaggaaaagggacaagggcaaggcaagagagaggcgtcgtcgtttgatctgctgccggagtgcgaagaggaagaggaagaggagcgccggagttgtaaagatgttcctggtggactggttctatggggtgctggcatcgcttgggctgtggcagaaggaggctaagatcct

SEQ ID NO: 15308 - DNA, 317 bp, Zea mays
gttcctgtccgatgtgtttcttcgtgaagtatacgatggacggcttgtcgtcaggctgaagaaaggcataaaccttcctgcaatggatccatggggtactagtgatccttatgtaattctacaactgaatggccaaactgcaaaaagccaaattaaatgggcgacaaaggagccaacatggaatgaagatttcacgtttaacattagaaaatctcgtgaaaatcttctgcaggttgcagcttgggatgcaaaccttgttaccccacacaaacgcatgggaaatgctggattataccttgaatcattttgtgatggta

SEQ ID NO: 15309 - DNA, 300 bp, Zea mays
gtatgcatgtcctcgttcagctgcaattatatattacaaaactatccaagtaatatatatattcacctcctcgatcctatgccggcctcgcgcctagctagcaataacaaagagttgctttctacttgaagaaggagccagtcttcatggcgtcctcgttggcttcaccaagagcagcctcgttgaggtacttgtcagcaagctgcacacgcttgacgttctcctgctccgccaccagcatgtgtccgtactccaagagcttctcgatcgttatcttgggctgctcgaacgtgggcgggc

SEQ ID NO: 15310 - DNA, 321 bp, Zea mays
ggaagagttctcggcttctcgcgagtcgcgacagagagaggcggagttgcggagaatatgcagagcagcagcatgaagagggagatcagcgaggcccacgacaccattcgcttcggcatcaacgccggcgtcaaagccgacctcgccccgccgcacccgctccagtctaccatccaatcggagaccaagttctgggcggacaagaagaagttcgggacagatgccatatatggatccgccctcaacatccgcacagatctcgatgcccaaatcctctccaggttccaaaggccccctggtgctttgccgtcatctctgctt

SEQ ID NO: 15311 - DNA, 321 bp, Zea mays
ggcacatcatcttcgacatcctatacaacaacgaccgggtgatcgaaatcaatgtgcacactgatcagagtgcattggttgacctgacagaggataaggagaccaatgtggaattcctgtactcagccaagtggaaggagacaccaacaccattcgagaagaggatggagaagtactccagctcctccaacatgccacaccacctggaggttcattggttctcaattataaactcttgtgttactgtcctcctcctcacagggttccttgcaactatcctcatgcgagtattgaagaatgattttgtcaagtatgcccatg

SEQ ID NO: 15312 - DNA, 295 bp, Zea mays
  unsure (1)..(295): unsure at all n locations
ggtacccaagattgtttgctttcacaacgttacaacatatatatatcatatatgcatggacaggtacaatgcctctccagcagcaccagcaacaagggtggttagcagcagggactataaacaacagagtaccatccgcgttgatagtagattttttattactgcaaaattgatccccgcagcactaccggtagttgcggtagaccggagtgtacatgcagttctctgcatatttcaccaggtcgctggggggangcagacgggtcgccagaccgagctcgtaggcttttgcagc

SEQ ID NO: 15313 - DNA, 307 bp, Zea mays
cccacgcgtccgcccacgcgtccgccaatggtggcgcgtggttggcgactgctgttctagtgacaaacatgaggaacttcccagtcagcagaggtgctgttgctggcattctgaaagggtactcgggtttaagtgctgctgtttacaccgaaatatacactggagtgctccgtgattcacccatcaaccttttgctctttcttactctcggaattcctgctgtgtgccttctggcaatgtactttgttcagccttgtgaaccctctctggtggagacgaatgcagagcaagtccattttatgtttgc

SEQ ID NO: 15314 - DNA, 310 bp, Zea mays
cctttgggtgcttatgaagaggataaccttatctatcctcatgtctccaaaaaaactcatagagaggaagtgctggtacaaccacgtgcatttgttcttgaaataggaacagaagagttgccaccccgtgacgtcgtagaagcaactgaacagcttgagaaatctctagttaatacattggagaaacgtagattgacccatgggaaagtgcacacttacgggacaccaaggagattggcgattgttgttgaaaatcttagtatgaagcaaacagaggtagaggtggaactacgtggcccaccagttgcga

SEQ ID NO: 15315 - DNA, 314 bp, Zea mays
caaggttttcccataccctataaacatcacagaagttcaatttgctgtcggaactgtagcagctctgttcatgtggatcactggtattattaagaggccaaagatttctggagcacagcttgtagccatcctacctctggctattgttcatactatgggcaatctcttcaccaacatgagccttgggaaagttgcagtgtcatttacgcacaccatcaaggctatggagcctttcttttctgttattctttctgcaattttccttggcgagctacctactatttgggtagtatcttctcttcttccaattgttg

SEQ ID NO: 15316 - DNA, 224 bp, Zea mays
cggaccgtgggccttaaagctatcaagagactcgtagaggctgaggcacttaagatggaaattattccaaaccccaaggaagttgatggtgtgaaagtccttcaactcgaaaccgcagctggtgcagctattcggttcttcgacaaagcgattggaattaatgttccccgctcaaggtttctcccagtgaaggctacatctgatctgttgcttgtgcagtctga

SEQ ID NO: 15317 - DNA, 166 bp, Zea mays
gcgccgcctttaagttcgccatcgacaaggacgtcaggaacttccaggtcctcaaagagatgtacaacgagtggccattcttcagggtcaccctggacctgctggagatggttttcgccaagggagaccccggcattgccggcttgtatgacgagctgcttgtggc

SEQ ID NO: 15318 - DNA, 303 bp, Zea mays
cgccaattaggataattatattggatctgagcacctgctccttggactgcttcgtgagggtgaaggtgtggcggctcgtgtgcttgagagtctcggagctgaccccagcaatatccgtacacaagttattcgaatgattggtgagaccacagaagctgttggtgctggagttggcggcggcagcagtggtaataagatgccaactcttgaggagtatggaactaatttaacaaaattagcagaggagggaaaattagatcctgttgttggaaggcagccacaaattgagcgtgtggtacaaat

SEQ ID NO: 15319 - DNA, 207 bp, Zea mays
ggttgctcggcagcagctagcaatggccgccaagggaggtgatgagctgaagctgctgggcgtgtgggacagcccgtacgtcaacagggtccagatcgtgctcaacctcaagggcctcagctacgagtacgtggaggaggacctcctcaacaagagctagctcctcctcgattccaacccggtgcacaagaaagtgcccgtactcat

SEQ ID NO: 15320 - DNA, 302 bp, Zea mays
ccatcaaggactacccctacgcccacgacgggctcctggtctgggactccatcaggcagtgggcgtccgagtacgtcaacgtctactacaagtccgacgaggccgtggccgccgaccccgagctgagggcgttctgggacgaggtgcgcaacgtggggcacggcgacaagaaggacgagccgtggtggcccgtgctggacacccgcgacagcttggtggagacgctgaccaccatcatgtgggtcacctccggccaccactcggccgtcaacttcggccagtaccacttcgccggctacttc

SEQ ID NO: 15321 - DNA, 305 bp, Zea mays
gatgggcgccttggacctacaccttgactttgcttctgctcaacatggacaagccaagttaaaggaatatgccaagagctctttgttgtctgatggaaactacaatacagacaagatcaatggttcaaaccctgatgactatgagaaatttgagaaagggataatgcactatgggtgtccacattatagaaggagatgccgcataagagctccttgctgcaatgaaatttttgattgccgacactgccacaatgaaactaagaattccattaaaattgataaaatgaagaggcatgaacttccac

SEQ ID NO: 15322 - DNA, 304 bp, Zea mays
cggacgcgtgggcggacgcgtgggcggccagccaagacgaggcccggcggcggcatcacgaccctgcgcgccatcccctggatcttctcgtggactcagaccaggctccaccttcccctgtggctgggagtcggcgccgccttcaagttcgccatcgacaaggacgtcaggaacttccaggtcctcaaagagatgtacaacgagtggccattcttcagggtcaccctggacctgctggagatggttttcgccaagggagaccccggcattgccggcttgtatgacgagctgcttgtggcggaag

SEQ ID NO: 15323 - DNA, 296 bp, Zea mays
cgaagagttccttgagccacttgagctgtgctacaaatcactgtgtgactgccgcgacaaggccatcgcggacgggagcctcctggacctcctgcgccaggtgttcacgttcgggctctccctggtgaagctggacatccggcaggagtcggagcggcacaccgacgtgatcgacgccatcaccacgcacctcggcatcgggtcgtaccgcgagtgcgtcgaggacaagaggcaggagtggctgctgtcggagctgcgaggcaagcgtccggtgctgcccccggaccttccccaga

SEQ ID NO: 15324 - DNA, 303 bp, Zea mays
tggtttgcaactcatggaacatctatgagtcgtacaaattctttgataagtggtgataacaaaggagtagccgcacgtttcatggaagattgggcagaacaaaatggcattccaaaacaggcagctcatgtaaatcacgatggcttggaatcttcacacatgacctctcgacttccgagaagagtctccccaataattcctgaaccaaatgagataactgatgacttagtacaattggcgtcatcctacgaagcctcaggtggacggcgattatcaagttcaagtatcaccaagcgtatcaga

SEQ ID NO: 15325 - DNA, 300 bp, Zea mays
cagacggtgggcgaagcgcgtgccgggcaccgacgacgtggaggaggagtacagcgacctggtggccgccagccacgagtccaagctggtggcgcacccctggcgcaacatcctgcagccgcgctaccgcccgcagctcgtcatggccatcgccatccccatgttccagcagctcacgggcatcaacgtcatcatgttctacgccccggtcctcttcaagacgctgggcttcgcggacgacgcctccctcatgtacgccgtcatcacgggcctcgtcaacgtcttcgccagcttcgtgtc

SEQ ID NO: 15326 - DNA, 301 bp, Zea mays
ccggtccagcactttcacgctcagctccagcaatggctgcctccaccatggcgatctcctccacggcgatggccggcacccccatcaaggtgggctccttcggcgagggccgcatcaccatgcgcaagaccgtgggcaagcccaaggtggcggcgtccggcagcccctggtacggccccgaccgcgtcaagtacctcggccccttctccggcgagcccccgagctacctcaccggcgagttccccggcgactacggctgggacaccgccgggctgtccgccgaccccgagaccttcgccaa

SEQ ID NO: 15327 - DNA, 303 bp, Zea mays
ggcacaaggaattggattatgccggacagagcacatgttctttgcttcagacgagaggattaaggctgtcaggcagatgattatggctcccacgcttgagctgaggcagcaggcgctcgaccgtctcttgccgtatcagaggtctgacttcgaaggcattttccgtgctatggatggactcccggtgaccatccgactcctggaccctcccctccacgagttccttccagaagggaacatcgaggacattgtaagtgaattatgtgctgagacgggagccaaccaggaggatgccctcgcgcg

SEQ ID NO: 15328 - DNA, 305 bp, Zea mays
ctctctgttcctacgccgtttcctctcccgactctctcctcgccggcgacgccgcggagtaggtgcaacagaaactgctcgaggcggaggcggagctgcggctgcacagacatgggtgatcacgaggcgcgcggtgatgacttcgagaagaaggcggagaagaagctctcgggctggggcctcttcggctccaagtacgaggacgccgccgacctcttcgacaaggctgcgaactccttcaagctcgccaagaactggagcagagctgcatcagtttacatcaagattgctaactgtcatttgaa

SEQ ID NO: 15329 - DNA, 198 bp, Zea mays
gcggcgcggcgcggggcccatctgcgcgtccatgtccatgtcctcctccaacccgccctacgacctgacgtccttccggttcagccccatcaaggagtccatcgtgtcccgcgagatgacccgtcgctacatgacggacatgatcacctacgccgacaccgacgtcgtcatcgtgggcgccggctccgcggggctgtc

SEQ ID NO: 15330 - DNA, 148 bp, Zea mays
ctatcaacgcggatggtactctgttgtttatagtccctgctgctaaccacccttgttgctggtgctgctggagaggcattgtacctgtccatgcatatatgatatatatatgttgtaacgttgaaaaaaaaaaaaaaaagggcggccg

SEQ ID NO: 15331 - DNA, 296 bp, Zea mays
ggggtcctttgcgaggctcctgttctacccgctcttctacggctgcctgcacgggccgagctttttccgcaccgagatccccgtcaccatgctgacgtgcctcctggggctcactaacgggtacctgacctccgtcctcatgatcctcgcgcccaaggctgtgcccatccaccactcggagactgccgggattgtcatcgtgctgttcctcgttgttggccttgtcattggttccattgtggcttggttctgggtcatctgataccggggtacgttctctgtcacgtcgatgtatc

SEQ ID NO: 15332 - DNA, 296 bp, Zea mays
cgatggtttcaggggtcgcggttgggggcggatggcagggcctcgtcgcctacatcaacctcggctgctactatatcttcggcctgcccctgggctacttgctcggatacaagttcagctttggagttggggggatttggtccggcatgctttgtggtatcacccttcagacgctcatcttgctaggtgtggtttggaggacagattggaaagcagaggccgcacaagcttcaggccgtgtgcaaaagtggggcggcaaaggcaccgatgaagtcaagcctctcctggaatagaat

SEQ ID NO: 15333 - DNA, 293 bp, Zea mays
cggaccgtgggtctgacgcgtggggttggcttctcctccccctccggttcgggttcgggttcgtgaggttctccggggttcggtttcgtgggtgagcggatcgaaatggcggcgtcacatgttgagtaccgctgcttcgtcggcagcctcgcctgggccacggacgaccactccctccacaacgccttcagcacctacggcgaggtcctcgagtccaagatcatcctcgatcgggagacgcagaggtcccgcggcttcggcttcgtcaccttctccacggaggaggcgatgcg

SEQ ID NO: 15334 - DNA, 297 bp, Zea mays
tcgagaagacaaagcggcggttcgagaactacggcaagttcggcctgctctgcggcgccgacggcctgccgcacctcatcgtcagcggcgaccagcggcactggggcgagttcgtcaccccgggcctgctcttcctctacatcgccgggtggatcgggtgggtcggcaggagctacctcatcgccgtcagcggcgagaagaagcccgccatgagggagatcatcatcgacgtcgagctcgccacccgcctcctccccagggggttcatctggcccgtcgcggcctaccgcgagctca

SEQ ID NO: 15335 - DNA, 300 bp, Zea mays
cgcctcctcgtcctccaccaccgccgtcgcggcgctccccaggaatgggcagcagcgggcgtcgtcgtcgttgttctcctcctcctcctcttcctccttcctcgtcggcaagacgctgctgaggcaggccgaggcagcccggccgtcgttcgccgtgcgcgccgcggcggattccgacaggccgatctggttccccggcagcacccctccgccgtggctcgacggcagccttcccggcgacttcggctttgatccctggggcctcggatctgacccggagagcctgcggtggaacgtgca

SEQ ID NO: 15336 - DNA, 302 bp, Zea mays
cccaaactgcggatagagcagcagaggcagcggcacgatcgcgagcgcacgcacgtaagcacgttgtcggaagctcaagttagaagaagcaccagtgcctgatcgatggcggcccaggctctcctctccggccggcagctgctgggccgccccgtgcagtcggccgtctctaggtcgtcggcgaggaaggcgcccttcgtcgtcagggccagctccagccctccagccaagcaatgtgccgacaggcagctgtggttcgcgtccaagcagtccctctcctacctcgatggcacgctgcccgg

SEQ ID NO: 15337 - DNA, 212 bp, Zea mays
cgcttcacggccgccacgctggagcacggcatgcacccgccggtctctcccaagcccgagtggcgcaactcatggacgagatggcggtcgtggccacggaggagtaccgctcggtcgtcgtcaaggagccgcgcttcgtcgagtacttcagatcggctacaccggagaccgagtacgggaggatgaacatcggcagccggccagccaagagg

SEQ ID NO: 15338 - DNA, 289 bp, Zea mays
attcgccacgaagccgcactgtgagagagggacgcggcccgttgtcctcggcttgtacgcaatccttccgtcgctgcgaactgatccctcgtgttcgccatggcccccagcgtcgccgtggaaaacctcaaccccaaggtcttgaaatgtgagtatgcagtccgtggcgagattgtcatccatgctcagcgcttgcagcaacaactacaaacacaaccagggtctcttccttttgatgagatcctgttctgcaacattgggaatcctcaatcccttggtcagcaacctg

SEQ ID NO: 15339 - DNA, 288 bp, Zea mays
gaacatcgtgccgacgagcacgggcgccgccaaggccgtggcgctggtgctgccgcagctgaaggggaagctgaacggcatcgcgctgcgggtgccgaccccgaacgtgtccgtggtggacctggtgatcaacaccgtgaagactggcatcacggccgacgacgtgaacgcggcgttccgcaatgccgccgccggcccgctgcagggcatcctggatgtctgcgacgtgccgctcgtgtccgttgacttcaggtgctccgacgtgtcctgcaccatcgacgcgtcgct

SEQ ID NO: 15340 - DNA, 288 bp, Zea mays
gctgctcgcccgcaacggcgtcaagttcggcgaggcggtgtggttcaaggcgggctcccagatcttcagcgagggcgggctggactacctcggcaacccgagcctggtccacgcgcagagcatcctggccatctgggcgtgccaggtggtgctcatgggcgccgtcgaggggtaccgcgtcgccggcggcccgctcggagaggtggtcgacccgctgtaccctggcggcagcttcgacccgctcgggctcgccgacgacccggaggcgttcgccgagctcaaggtgaa

SEQ ID NO: 15341 - DNA, 291 bp, Zea mays
cacaacacaccctcctcgtcctccaatccaatcaacctggtagactcgcttcgcttctcccccagccgtcggacggagctcctcgcagtcgcagcagccgccgatcagcctgcgctcgggctcagcgctggaaggtgttggaagagaataacctgaaggttcacagtaaccttcatctgtcggaagatgtatcgggctaagagggctgcattgtcaccgaagtgaagcgccgcgtcggcaagtacgagctcggacgcaccattggggaagggaccttcgccagggtccggt

SEQ ID NO: 15342 - DNA, 292 bp, Zea mays
gaaatgctgcgtctcgggatgctcaggcattcgcgtaaacgatgcggagaagctcgtgacgatcggaggccatgtgctgcgcgaaggtgagtggctgtcgctgaatgggtcgactggtgaggtgatccttgggaagcagccgctttccccaccagcccttagtggtgatctgggaactttcatggcctgggtggatgatgttagaaagctcaaggtcctggctaacgccgatacccctgatgatgcattgactgcgcgaaacaatggggcacaaggaattggattatgccgg

SEQ ID NO: 15343 - DNA, 293 bp, Zea mays
attggaccaggacttagtctatgccttagagttggtgttcataaagctagacaggtagcaaaagcatttggcttgcctattgttggagttcatcatatggaagcacacgcattagtttccaggctagcgaataaggaccttgatttcccatttctggctcttctaatttccggaggacacaaccttcttgttctcgctcatggtcttgggcattacattcaactggggactactatagatgatgcgattggtgaggcatatgacaaatcagcaagatggttgggccttgatat

SEQ ID NO: 15344 - DNA, 312 bp, Zea mays
gtccaccgaggaggcggtggaggcgcccaaggggttcgtggccccgcagctggaccccagcacgccgtccccgatcttcggcggcacacgggcgggctgctccgcaaggcgcaggtggaggagttctacgtcatcacgtggacgtcccccaaggagcaggtgttcgagatgcccaccggcggcgccgccatcatgcgggagggccccaacctcttgaagctggcgcgcaaggagcagtgcctggcgctcggcaccaggttgcgctccaagtacaagatcacctaccagttctaccgcgtcttcgccaacggg

SEQ ID NO: 15345 - DNA, 308 bp, Zea mays
ctctggtccgtggccatggcgtcgtccatgctctccgctaccaccgtgccactccagcaggggggcggcctgtccgagttctccgggctcaggagctccgcgtcgctgcccatgcgccggaatgccacctccgacgacttcatgtccgccgtctccttcaggacccacgcggtcggcacgagcggcgggtcgcggcgggcgccgacggaggcgaactgaaggtggccatcaacgggttcggccgcatcgggcggaagttcctgcggtgctggcacggtcgcagcgacgcctcggccctcgacgtcatc

SEQ ID NO: 15346 - DNA, 310 bp, Zea mays
cgagtgtcaagtgaacctgaaacttgcggtgtcactggctggtatagcctgagtgtgagtgagtgatcgaactagctgagctccgatcctcgctagctagctaggataccgccataccacaagtcttcttcacaagtttaggagtgacagcaacaagagatctcgatggcctctgccaccgtgctcaagtcctccttccttcccaagaagtccgaatggggcgccaccaggcaggccgccgcgcccatgccgcccaccgtctccatggtcgtccgcgcctccgccatagccgatgagctcgtgaagaccg

SEQ ID NO: 15347 - DNA, 100 bp, Zea mays
gagaccgtgggtcggcgtgtcgaagtctgggtacgtagcagtgcagtaaaaaaagcagccacaatggcgagcagcaccgtggccgtctcctccacggggt

SEQ ID NO: 15348 - DNA, 309 bp, Zea mays
gcagatcttcgtgaagaccctgaccggcaagactatcaccctcgaggtggagtcttcagacaccatcgacaacgtcaaggccaagatccaggacaaggagggcattcccccagaccagcagcggctcatctttgctggaaagcagcttgaggacgggcgcacgcttgccgactacaacatccagaaggagagcaccctccacttggtgctgcgcctcaggggaggcatgcagatcttcgtgaagaccctgaccggcaagactatcaccctcgaggtggagtcttcagacaccatcgacaatgtcaaggc

SEQ ID NO: 15349 - DNA, 305 bp, Zea mays
cagctcccatatccgctcccctacctctccagcatctcccgtctccgtcgtctcgtctctgctcctcacctcgccgccagccatgggcaagatcaagatcggaatcaacggtttcggaaggatcggcaggctcgtggccagggtcgccctgcagagcgaggatgtcgagctcgtcgccgtcaacgaccccttcatcaccacggattacatgacctacatgttcaagtacgacaccgtgcacggccaatggaagcacagcgacatcaccctcaaagactccaagacgcttctcttcggcgagaagc

SEQ ID NO: 15350 - DNA, 307 bp, Zea mays
cggacgcgtgggcaacatggcgctcatgggcttcgccgagcaccgccgcctccaggactggtacaacccgggctccatgggcaagcagtacttcctcggcctctagaagttcctcgccggctccggcgacccgtcctaccccggcgggcccctcttcaacccgctcggcttcggcaagaccgagaaggagatgaatgagctcaagctcaaggagatcaagaacggcaggctcgccatgctcgccatcctcggttacttcatccaggggctcgtcaccggcgtcggcccgttccagaacctgctcgac

SEQ ID NO: 15351 - DNA, 301 bp, Zea mays
cccacgcgtccggagccatcgacacgatcgcgagcgcaacacgtacgttgtcggaagctcaagttagaagaagcaccagtgcctgatcgatggcggcccaggctctcctctccggccggcagctgctgggccgccccgtgcagtcggccgtctctaggtcgtcggcgaggaaggcgcccttcgtcgtcagggccagctccagccctccagccaagcaaggtgccgacaggcagctgtggttcgcgtccaagcagtccctctcctacctcgatggcacgctgcccggcgactatggcttcga

SEQ ID NO: 15352 - DNA, 301 bp, Zea mays
tgcactcgctgaacgcgtgggaggaggccgacggcgaggagctggtgctggtggcgcctaacgtcctgtccgtggagcacgcgctggagcgcatggagctcgtgcactcctgcatcgagaaggtgcgcatgaacctgcgcacgggcgccgtgtcacgaaccccgctctcggcgggtaacctcgacttcggcgtgatccacccgggctaccttggccggcgcaaccggtacggatacctcggcatcggcgaccccatgccgaagatctccggagtggccaagctggacttggaccacgccgg

SEQ ID NO: 15353 - DNA, 298 bp, Zea mays
cgaaatgcgctatgggatgagctacatccatgagactgtatggaagggcgtgcctaagttcttgcgccgtgtggatacagccctgaagaatatcggcatcaatgagcgccttccctacaatgtttctctcattcggttctcttcttggatgggtggtgaccgcgatggaaatccaagagttaccccggaggtgacaagagatgtatgcttgctggccagaatgatggctgcaaacttgtacatcgatcagattgaagagctgatgtttgagctctctatgtggcgctgcaacgatgag

SEQ ID NO: 15354 - DNA, 291 bp, Zea mays
gcaagctcgatctactactactactagctggtacacatactagccagcctgccagccagcttgccatggcgcccaccgtgatgatggcctcgtcggcaaccgccgtcgccccgttccagggtctcaagtccgccgccagcctccccgtcgcccgccgcagcaccaggagcctcggcaacgtcagcaacggcggaaggatccggtgcatgcaggtgtggccggcctacggcaacaagaagttcgagacgctgtcgtacctgccgccgctgtcgacggacgacgtgctgaagc

SEQ ID NO: 15355 - DNA, 298 bp, Zea mays
ggcgtcgacgccggcgccgccaggatcacgtgctccctgcaggacgtcgccagcaggtgcgtcgacgccgcgaactcgccggcttcgcgctcgccacctcggcgctccgcgtctcgggcgcggcgcggagggcacgcccaagaggctgacctacgacgagatgcagagcagaacgtacatggaggtgaagggcacggtcacggcgaaccagtgcccgaccatcgacggctgcgtggagtcgttcccgttcaagtccggcaagtagcagatggagaagcgtgtcctggagccgacgtcc

SEQ ID NO: 15356 - DNA, 303 bp, Zea mays
taccggcggacggaaccctgatgtgctgttcttgcaagtgaactacgaggagcacaagtctatgtgctacagccttcgtgtccatgtgctacccttcttcaggttctacagaggagcacagggacgactctgcagcttcagctgtacaaacgcaactattaagaagttcaaggatgcacttgcgaacacaagccagatagatgtagctttggcccaacccgggggctagacgaatcggagttattagccttggcagcaaacaaggaactgcagttcacctacaccagggagccagaactgact

SEQ ID NO: 15357 - DNA, 298 bp, Zea mays
caaaaggggctgttcgttgacaggggtgttggctcttctatgcttccaaaatcagccagtgcatgctccttggcatctgggtttagttttggatcagcaaagacaatgccagaagcagcaggagctgttgcagctgcagctgtagctgatcgtttgcatgggtcaaaggaggaccggaagctggccattgttttggttggcctaccagctcgtggtaaaaccttcactgcagttaagcttacaaggtaccttcgttggttgggccatgaaactagacatttcaatgttgggaagtatc

SEQ ID NO: 15358 - DNA, 319 bp, Zea mays
cggacgcgtgggaccaacgttttcccagtgggcggcacagccggaaccgatgagaacactctgcggagacgcctgaatcatggagtctactgcaagaacaggatggtgaaatctaacgtgcggcttgtaatctcgattgcaaaagaacacgaaggccccgggatggagttctctgatcttattcaggatggaatgcaaggcctgataagaggcgcggaaaagttcgacgcttccaagggttttagattctccacctactctcactggtggatcaaacaagcaatacgcaagtccgttttagaacaaacccagataatcc

SEQ ID NO: 15359 - DNA, 249 bp, Zea mays
aaacaaatgtgctggtcaaacgcaatgaagtggagaatgtttatcattgggcttgtgggcgcccgacatctttacatgaccgtggtagggacagcgatgatgatgacttccgggacagggattacgacgtggcagctcttgctaataacttaagtcaggcatttcgttatgggatatatagcaacgatgacattgaagaggcacaaggatcacttgaacgagatgatgaggatgtgtattttgatgatg

SEQ ID NO: 15360 - DNA, 312 bp, Zea mays
ggaccgggggctctgatagcttgctccaggacgtacgtacgtacgtagatcgatccatcgatcgctagctagctgacgaccatggcgtccctctcctctgacgccatcaccgccccttccttcacggccgcgcccgctcgcgcagtggtcagcaggaggtccttcaccgtgcgtgcctctctccgcaaggccactgccaccgccgccgtggccgttgccgccagcgtcctgcttgccggcggcggcgccatggcccaggaggtgctgctgggcgcaggcgacggcgggctcgtcttcgagcccagccagttc

SEQ ID NO: 15361 - DNA, 251 bp, Zea mays
  unsure (1)..(251): unsure at all n locations
acgcgtcgcatccgctccacaggatcctctgcgccaccgcaaccgtgtgaccgcccgtgccgccggcgatcccgatccgccgacccgtcccagccccgctcgcagccatgtcgccgtcggagccgacgcgggaggagagcgtgtacatggccaagcttgcggacaggcggagcggtacgaggagatggtcgagttcatggagcgcgtcgccgctacgccgggcgcgccggcggcgnggacgagctctcggt

SEQ ID NO: 15362 - DNA, 316 bp, Zea mays
ctcgtgaatggcctcttatctcgaaatacagagcttctgtccgcacccaatcacctaaaatggaaatgattgactcattgtttaagccacgggaagctgaagatgatggtctgatccgggagtgtctgattgacttctacaccagttctgggaagagaaagcctgaccaagttatcatattcagggacggtgttagcgaaagtcagtttaatcaggtgctgaacattgagttgcaacaaatcatcgaggcttgcaaatttcttgatgagaaatggaatcccaagttcacgttgattattgcccagaagaatcatca

SEQ ID NO: 15363 - DNA, 311 bp, Zea mays
ggaggagatcgtgcgcggcgccgaggccgtcgggttcgaggcggtggtgtcggaggggacgcacgacgtggcgcccttcgcggagctggccaacggctgcgacgccatcatgggcgtgcacggcgccgggctgaccaacatggtgttcctgcccacgggcggggtggtcatccaggtggtgccgctgggagggctggagttcgtggccggatacttccgaggcccgtccgtggacatggggctgcgctacctcgagtaccggatcgagccggaggagagcacgctggtggaccagtacccgcgcgaccacc

SEQ ID NO: 15364 - DNA, 311 bp, Zea mays
cccacgcgtccgatcgaaggagcggtcaagaggggttacctcaagacggacgaggagttcctcaagagggacgagagcgggggcgcgtgctgcgtcacagccgtcctccaaaagggtggactggtcgtctccaacgctggagactgccgtgcggtgctcagccgagcagggaaggcagaggcgctcacctctgaccaccgggcgtccagggaggatgagaaggaaaggattgagaatttgggtggatttgtggtgaattaccgtggaacatggcgagtccagggctccctggcagtgtctaggggcattgg

SEQ ID NO: 15365 - DNA, 306 bp, Zea mays
cccacgcgtccgcccacgcgtccgcccacgcgtccgcccacgcgtccgggacaagttccctgatattgttatctacacagacgtcgcgttagacccttattcatctgatggtcatgatggtattgtgagggaagatggtgtaattatgaatgatgaaacagtttatcagttgtgcaaacaggctgtttcacaggctcgtgccggtgctgatgttgtcagccctagtgacatgatggatggccggattggagcacttcgctctgctctggacgccgagggcttccatgatgtctccattatgtccta

SEQ ID NO: 15366 - DNA, 310 bp, Zea mays
cggacgcgtgggtattgctagcattgttgattattatcaatggaaaagggtgactgctatattcgttgatgatgattatgggcgaggtggtgtagaagccctcggatgatgcgcttgcattaaagagggcaaagatttcatataaagcagctattcctccaaattcaaatacagacgtgatcaacgatgtactatttaaagcaaatatgatggaatcaagggtcatgattgtgcatgtcaatcctgacacagggatgaggattttttctgtagctaagaacctccaaatgatggccagtggctatgtctg

SEQ ID NO: 15367 - DNA, 309 bp, Zea mays
gacacgatcgcgagcgcacgcacgtaagcacgttgtcggaagctcaagttagaagaagcaccagtgcctgatcgatggcggcccaggctctcctctccggccggcagctgctgggccgccccgtgcagtcggccgtctctaggtcgtcggcgaggaagggcgccttcgtcgtcagggccagctccagccctccagccaagcaaggtgccgacaggcagctgtggttcgcgtccaagcagtccctctcctacctcgatggcacgctgcccggcgactatggcttcgacccgctgggcctctcggacccgg

SEQ ID NO: 15368 - DNA, 120 bp, Zea mays
cccacgcgtccgcacgcacgcatacacagcacagagtgaggtaagcatccgaaaaaagctgtgatctgatcgacatggccgccgccaccatggctctcacctcgcgcgcgctcgtcggca

SEQ ID NO: 15369 - DNA, 307 bp, Zea mays
  unsure (1)..(307): unsure at all n locations
cgctaccaccgtgccactccagcaggggggcggcctgtccgagttctccgggctcaggagctccgcgtcgctgcccatgcgccggaatgccacctccgacgacttcatgtccgccgtctccttcaggacccacgctgtcggcacgagcggcgggccgcggcgggcgccgacggaggcgaactgnaaggtggccatcaatgggttcggccgcatcgggcgcaacttcctgcggtgctggcacgggcgcggcgacgcctcgcccctcgacgtcatcgccatcaacgacaccggatgcgtcaagcaggcg

SEQ ID NO: 15370 - DNA, 302 bp, Zea mays
cccacgcgtccgcggacgcgtgggctcgtgccactttctcagtcccctctagccgccgcctaccgctcgcgctctcctcgcgttcgggaaggtcgtttcgccatggcctcggagacggacacgttcgcctaccaggcggagatcaaccagctgctctcgctcatcatcaacaccttctactccaacaaggagatcttcctcagggagctcatctccaactcctccgatgccttggacaagatcaggtttgagagtttgacggacaagaccaagctggatgcacagccagagctgttcatcca

SEQ ID NO: 15371 - DNA, 300 bp, Zea mays
cggacgcgtgggaccgacgcgtgggcagggcgacatatccatgagacgcgggaatggattattcgcaactctccggttcctattgggactgttcctatttaccaagcacttgagaaagtacatggtattgctgaaaatctgagctgggaaatttttagggataccttgattgaacaagctgagcagggcgttgattacttcacaatccatgctggtgtcctgcttcgttacattcctcttacagcaaagagaatgacgggcatagtttcacgtggtggctcaatccatgcaaaatggtgc

SEQ ID NO: 15372 - DNA, 299 bp, Zea mays
gagaggattaaggctgtcaggcagatgattatggctcccacgcttgagctgaggcagcaggcgctcgaccgtctcttgccgtatcagaggtctgacttcgaaggcattttccgtgctatggatggactcccggtgaccatccgactcctggaccctcccctccacgagttccttccagaagggaacatcgaggacattgtaagtgaattatgtgctgagacgggagccaaccaggaggatgccctcgcgcgaattgaaaagctttcagaagtaaacccgatgcttggcttccgtgggtg

SEQ ID NO: 15373 - DNA, 302 bp, Zea mays
gccgacgtcaagatcgtggacgacactaccatcagcgtcgacggcaagcccatcacggtcgtctccagcagggacccgctcaagctcccatggggtgagctcggcattgacatcgtcatcgagggcaccggagtcttcgtcgacggccccggcgccggcaagcacatccaggccggcgcgaagaaggtgatcatcacggctcccgccaagggcgccgacatcccgacctatgtcgtcggcgtcaacgagggcgactacgaccacagcgtcgcggacatcatcagcaacgcgtcctgcacgac

SEQ ID NO: 15374 - DNA, 300 bp, Zea mays
caaggaaggcattccaccagaccagcagcggctcatctttgctggcaagcagctggaggatggccgtacccttgcggattacaacatccagaaggagagcaccctccacttggtgctgcgtctcaggggcggcatgcagatcttcgtgaagacacttactggcaagacaatcacccttgaggtggagtcctcggacaccattgacaacgtcaaggccaagatccaggacaaggagggcatcccaccggaccaacagcgcctgatcttcgccggcaagcagctggaggatggtcgcactct

SEQ ID NO: 15375 - DNA, 298 bp, Zea mays
cggacgcgtgggcgtggtccgtggccatggcgtcgtccatgctctccgctaccaccgtgccactccagcaggggggcggcctgtccgagttctccgggctcaggagcaccgcgtcgctgcccatgcgccggaatgccacctccgacgacttcatgtccgccgtctcgttcaggacccacgcggtcggcacgagcggcgggtcgcggcgggcgccgacggaggcgaagctgaaggtggccatcaacgggttcggccgcatcgggcgcaacttcgctgggtgctggcacgggcgcggcga

SEQ ID NO: 15376 - DNA, 303 bp, Zea mays
gataaatgagaagccacaggtgattcaggagtatgaatcaggcaaggcaatccccaaccagcagatcattagcaagctcgagagggccctgggaaccaagttgcgtggcaagaaatagctttcctacgagtttgtgtcccggagcatcataatagggggaagacaaggcaagctgtctgcttatttgtctatgtttggtatctcaagtcctgcggactgtttctgttggcacaagagggaataaatgtgttcacggacctgtaatgcttgctccttgtcatatgaccttgctctaaacatttg

SEQ ID NO: 15377 - DNA, 117 bp, Zea mays
cacgcacgcatacacagcacagagtgaggtaagcatccgaaaaaagctgtgatctgatcgacatggccgccgccaccatggctctcacgtcccgcgcgctcgtaggcagaccggcga

SEQ ID NO: 15378 - DNA, 161 bp, Zea mays
ctgatgatgcattgactgcgcgaaacaatggggcacaaggaattggattatgccggacagagcacatgttctttgcttcagacgagaggattaaggctgtcaggcagatgattatggctcccacgcttgagctgaggcagcaggcgctcgaccgtctcttg

SEQ ID NO: 15379 - DNA, 319 bp, Zea mays
cggaccgtgggtggaagtctggatgaagtgcttcatgaaaaatctgaacagttggattgggatgcacgtattaacattatacttggagctgcaaaaggcttgtcttacttgcatcatgactgttcgcctcgaataatacatcgtgatattaagtcgagcaacatcttgcttgatggcagtttcgaggcccgtgtatcagactttggacttgcaaagcttttagaggatgaagaatcacatattactacaatagttgcaggaacatttggctaccttgcaccagagtatatgcaatttggcagagccaccgagaagactg

SEQ ID NO: 15380 - DNA, 325 bp, Zea mays
cggacggtgggcggacgcgtgggttttttttttttttttttttgtttttttttttgtgtattttttttgttttttcgcttccagtgtctcattatcagcatcttatttgttactcagagggaggatagggtagccgctgcaaactagaccttgtgaacacacgctattgacctctaaaccaccttaacagaatctcaaaattcacgcctgggctttgattctgcaaccgtgactcgggtctgtctaccatccaggtctatgccatcaaggtttgatatggcattgttgacctcctcggcagagccataggtgacgaaaccaaacc

SEQ ID NO: 15381 - DNA, 321 bp, Zea mays
aggacccttctttgtgatcgttgtggttcacagcctgcatcagtccgatgtcttgaggacaacgcatcactttgccaaaactgtgactggaatgggcatgatgcagaatcaggggcttctgggcataaaaggcaagccataaactgctactcagggtgcccatcatctgcagagctttcgagaatctggtcatttattactgatatcccgactgtagcagctgagcccgactatgaggatggactaagcatgatgacaattgatggcagtgacgttactaatcgtcacgatacttcagatgataaaagattgttggaaata

SEQ ID NO: 15382 - DNA, 320 bp, Zea mays
ggcacgagcagctgcagtgctggtgcctcaactttcgcgggcgcgtcaccgtggcctcggtcaagaacttccagctgatagctcctgcaaagacgcagccgcagccgcaggcctccggccccccgccgccgccgccgccgtcgtcgtcgtcgtaccatgacccggtgatcctgcagttcggcaaggtcgggagggacatgttcaccatggactaccggtacccgctgtcggccttccaggccttcgccatatgtctgacgagcttcgacaccaagctggcctgtgaatgaatgaatgaatgaatgaatgaacgaacgaac

SEQ ID NO: 15383 - DNA, 128 bp, Zea mays
gcaaccggtccagcactttcacgctcagctccagcaatggctgcctccaccatggcgatctcctccacggcgatggccggcacccccatcaaggtgggctccttcggcgagggccgcatcaccatgcg

SEQ ID NO: 15384 - DNA, 313 bp, Zea mays
ggactagttcaggtgatttagcaagcaaagatctgatgtataatatcttgactcttgaaactaacatagtatccatagtcaagatattatacatcagatctttgcttgctaaatcacctgaactacagtccatcaaggtctctccagttgagcgtatcttggagaaatcaaatactggtcgaagtagaagttctagtaggggaagtagtcttggcagatctcctgttcaccaccatggttatggttcccgaactgcgcttgttgatgaacatgtgcatggtttcaaggtgaacattaaacaggaaaagaaatc

SEQ ID NO: 15385 - DNA, 317 bp, Zea mays
ctcccagcctctcttactctccgccgtcgccctgctcgcccgaagcagctgccggcaaaatggccccgaagagaggcggtagggcgccggtccccgccaagaagaaggcggtggtgacgaacccgctcttcgagaagaggccgaagcagtttgggatcggcggcgcgcttccgcccaagaaggacctccaccgctacgtcaagtggcccaaggtcgtgcgcatccagcgccagcgccgcatcctcaagcagcgcctcaaggtgcccccggcgctcaaccagttcacacgtaccctcgacaagaaccttgcaacaaac

SEQ ID NO: 15386 - DNA, 316 bp, Zea mays
gcgagccatcgacacgatcgcgagcgcaacacgtacgttgtcggaagctcaagttagaagaagcaccagtgcctgatcgatggcggcccaggctctcctctccggccggcagctgctgggccgccccgtgcagtcggccgtctctaggtcgtcggcgaggaaggcgcccttcgtcgtcagggccagctccagccctccagccaagcaaggtgccgacaggcagctgtggttcgcgtccaagcagtccctctcctacctcgatggcacgctgcccggcgactatggcttcgacccgctgggcctctcggacccggag

SEQ ID NO: 15387 - DNA, 317 bp, Zea mays
gagacgccggcgcaggaagctgtggagccgccgaagctggctgagggctacttcgagatcgaggccatccgccgccgccgcctccgcaagggccagctccagtacctcgtcaagtggcgtgggtggccagagagtgctaacacatgggaaccccttgaaaacctgaaggcctgttctgacattgttgatgctttcaataagcggtcaaggtcgcccagatcctgtggaaagcgaaagcgcaagactccaacaactccaacatccgatcctaacccttctcgtggcaaacgtggtcgaccacctcggtcggaggcccg

SEQ ID NO: 15388 - DNA, 317 bp, Zea mays
agctcccacgctcaccgacgccacagcttgtgcgcgcgcaatggcactcgtgtccgcctcctcgtcctccaccaccgccgtcgcggcgctccccaggaatgggcagcagcgggcgtcgtcgtcgttgttctcctcctcctcctcttcctccttcctcgtcggcaagacgctgctgaggcaggccgaggcagcccggccgtcgttcgccgtgcgcgccgcggcggattccgacaggccgatctggttccccggcagcacccctccgccgtggctcgacggcagccttcccggcgacttcggctttgatccctggggcc

SEQ ID NO: 15389 - DNA, 316 bp, Zea mays
gctaaatctggcacttcaggaacaggagctgctcgagtctcttgtcgaagctgatacgagaaggcaggaaagagctaaaaagatggaagaaaagaaagtgtatctgcaactatacgaagcaatggaggcgttggtcaagatcaatctggagacgaacaagatcatggacttcatcaagtttgacgtcggcaacgtggtcatggtgactggcgggaggaacaccgggcgtgtaggagtcatcaagaacagggagaagcacaagggcagctttgagaccatccacgtgctgcttggagctttttgctatgtctagttt

SEQ ID NO: 15390 - DNA, 316 bp, Zea mays
cggaaaacaaagaaggccttgaactattgaaggcagccatagaaaaggctggctacactggaaaggtggtcattggaatggatgttgatgcttctgaattcttcggtgagaaagacaagacttatgatcttaatttcaaggaggagaacaacgatggctcaaacaaaatttcaggcgacagcctgaacagacctgtacaagtcctttgtttctgagtaccctatcgagtcgatcgaagacccatttgatcaggatgactggagcacttatgccaaactcactgatgagattggacagaaagtgcagattgtaggag

SEQ ID NO: 15391 - DNA, 299 bp, Zea mays
cccacgcgtccgggcgtcgtccatgctctccgctgccaccgtgccactccagcaggggggcggcctgtccgagttctccgggctcaggagctgcgcgtcggtgcacatgcgccgggatgccacttccggcgagttcatgtccgccgtgtccttcgagacgcacgcggtcggcacgagcggcgggtcgcggcgggcgccgacggaggcgaactgaaggtggccatcaacgggttcggccgcatcgggcgcagcttcctgcggtgctggcacggtcgcggcgacgcctcgcccctcgacgt

SEQ ID NO: 15392 - DNA, 314 bp, Zea mays
gcggcgtgcgccagccgctgcccgtggtgccgctgttcgagaggctggccgacctgcagtcggcgcccgcgtccgtggagcgcctcttctcggtggactggtacatggaccggatcaagggcaagcagcaggtcatggtcggctactccgactccggcaaggacgccggccgcctgtacgcggcgtggcagctgtacagggcgcaggaggagatggcgcaggtggccaagcgctacggcgtcaagctcaccttgttccacggccgcggaggcaccgtgggcaggggtggcgggcccacgcaccttgccatcctg

SEQ ID NO: 15393 - DNA, 152 bp, Zea mays
  unsure (1)..(152): unsure at all n locations
ggcgcaggagggaaggtatccttcaagatcatcctcacctccgaccccaagctccctttcaaagtgttcagcgtgcccgaagcgngcgacttcaccgcggtgctcaagtacgccgcggaggagttcaaggtcccgccccagaccagtgccat

SEQ ID NO: 15394 - DNA, 309 bp, Zea mays
tcgaccttcaagtctcgctacgtagcagtgcaataaaaaaagcagccgcaatggcgagcagcaccatggccctctcctctacggccttcgccggcaaggccgtgaacgtgccgtcgtcgtccgccttcggcgaggcccgcgtgacgatgcgcaagacggcggcgaaggccaagccagcgacggcgtccgggagcccgtggtacggccccgaccgcgtgctgtacctgggcccactgtccggcgagccaccgagctacctgacgggcgagttcccgggcgactacggctgggacaccgcggggctgtcgg

SEQ ID NO: 15395 - DNA, 141 bp, Zea mays
aggacctgcagatatcaactatgttcacgcaccatcagaagatagtagtggtagaccatgagttgccaaacgagggctcccagcagaggaggatcgtcagcttcgttggcggaattgacctttgtgatggaaggtatgata

SEQ ID NO: 15396 - DNA, 311 bp, Zea mays
cgcacgcgtccgcttatccccacctccctcgcggatcactcgccgccgccgccggccgcagccatcgccgtgatgctgtccctgtcgagggcgatcgggaggcggctcttctcgtccgccgaggccgcgtcgacggctgcggtgaggacggcgcagaacccgctcgaggagttcttcgaggtcgagcggacaccgaggagggcaagcctcctccccactacggtcgcagctggaaggcttctgaactgcgactaaaatcttgggatgaccttcagaaattgtggtatgttcttctaaaggaaaagaacatg

SEQ ID NO: 15397 - DNA, 307 bp, Zea mays
tcgacagagaaggaatggatggatctgtcaaaatttgttactgattctaaaggcacttatgttccggccactgagggattgcttgaactagtactgcgtaatagattgcaagagtggcttgttgaaaaattaattgaaggccacaagtcgactggccgcgatgatctaggacaagggcctatccatctgtgttcttgcttgggctatacttgggccattcacttattttctttgtcaggattctccttggatttccgtgattcttctggttggacagctttgcattgggccgcatactgtggaaggg

SEQ ID NO: 15398 - DNA, 309 bp, Zea mays
cccacgcgtccgcccacgcgtccgcgccacctcggcgctcctcgtctcgggcgcgagcgcggagggcacgcccaagaggctgacctacgacgagatccagagcaaaacgtacatggaggtgaagggcacgggcacggcgaaccagtgcccgaccatcgacggcggcgtggagtcgttcccgttcaaggccggcaagtaccagatgaagaagctgtgcctggagccgacgtccttcaccgtcaaggcggagggcatcgccaagaacgccccgcccgagttccagaagaccaagctcatgacccgcctcac

SEQ ID NO: 15399 - DNA, 223 bp, Zea mays
ggttgtcacctttggtccaactggcctgactactgaggtgaagtctgttgagatgcaccatgaggctcttcaggaggcccttcctggtgacaatgttggcttcaacgtgaagaacgtcgctgtgaaggatatcaagcgtggttatgtggcctccaactccaaggatgaccctgccaaggaggctgccagcttcacctcccaggtcatcatcatgaaccaccct

SEQ ID NO: 15400 - DNA, 347 bp, Zea mays
cggacggtggggccgagaaggacttgcagccttggattgctagagatgacgaacaaggtcagaagatgtggagagtcaaccagcgtatagtgaagcttatagctgagcttatgaggaaccatgacagccctgaagcgttggtgatactcgctagtgcctccgaccttctacttcgtgctaccgatggaatgctcgtcgatggtgaagcttgtactttgccacagcttgagcttctggaagtgaccgctcgggctgtccatcttatcatcgaatggggagattcaggtttatcagttgcagatggtctttcaaatctgctgaagtgccgtctatcaaccaccatccgg

SEQ ID NO: 15401 - DNA, 342 bp, Zea mays
cgctctatcactgcaactactgcaacaaggacatctccgggaagatacggatcaagtgctccaagtgccctgacttcgacctttgcgtggagtgtttctctgtcggcgctgaagtcaccccgcaccgcagcaaccatccttacaaagtcatggacaacttgtctttcccacttatttgcccggattggaatgcagatgaagaaattctcctccttgagggaattgaaatgtatggtctgggaaactggcttgaagttgcagagcatgttggtaccaagtctaagttacagtgtattgatcattacacatcagcatacatgaactcagcttgttatcccctcc

SEQ ID NO: 15402 - DNA, 345 bp, Zea mays
cggacgcgtgggctgaaacgtttggaagaaggcaatctggatccaaatgaattaaacattgcaagagatgggaagaagaaggattttcctgatggcatagcagaatgtggtaccgatgctctacgctttgcactgatatcgtacacttcccagtctgacaggataaatcttgatattaagagggtggttggatacagacagtggtgcaacaaattatggaatgccatccgttttgcgatgggcaaactgggtgaccattacattccgccggcaactgttgatgtgtctcttatgccaccaatctgcaagtggatactctcggtgcttagcaaggccgttgggaaa

SEQ ID NO: 15403 - DNA, 117 bp, Zea mays
ggcggcggtttccagggccatctgcgtccagaaaccgggctccaaatgcagcagggacagggaagcgacctccttcgcccgccgaacggtcgcggcgccgaggcccccgcgcgccaa

SEQ ID NO: 15404 - DNA, 221 bp, Zea mays
gggcctcgatcgctcatcaatcgccagaggagttgttgatcgaggtgagtgaggttgaaaagcacaccatcgtcatggacggcggatactacggcggtcgcgatcagcgctacagcggcgggtactacggcggcggtggcatcgcaacgccggggtacgctccggcggtcccgtacgggatgtcgcaggtgaacatcgagggcaacgggtgcgggcgggcg

SEQ ID NO: 15405 - DNA, 347 bp, Zea mays
gctgctgctcctggcctgctacgacctcacggccacctctgtcctgtcccactagactagctgcagctagcgcctctttccctcgccgccgccccctatccgagagcgacgagcatggcgcactccctcgccgcctccttctcgccggccgccgcgcggcgccaggtgacaaatgtgatttcaagccggagctcggtttccttccagagccacaggatgacttctgtatccatccgttcaagaccaagttctcttcggttcaagatttgctgttcggctaagaaggagacagtcgacaaggtctgtagtatagtgaaggagcagctggctcttcccgatgggactgc

SEQ ID NO: 15406 - DNA, 342 bp, Zea mays
  unsure (1)..(342): unsure at all n locations
cgacaaccccaccgtcccgcgcgaggagaaggccgagctcatcggcgagatcgccaagtcgtccgagctgcagccgcacgtcgtcaacttcctcaacgtcgtcgtcgacaacttccgcgcgtccatcgtgccgcagatcgtcgtcgagttcgagaacgtctacaactcgctcacgggcaccgaggtcgccaccgtcacctccgtcgtgcagctcgagtcgcaggacctcgcgcagatcgcgcacancgtccagaagatgaccggcgccaagaacgtccgcctcaagacgcagctcgaccaggcgctcatcgccggcttcaccgtgcagtacggccgcgacgg

SEQ ID NO: 15407 - DNA, 270 bp, Zea mays
cgccctggcgctggggccggagggcccctggtggaggagttctgggacaacatgcggcgttacgcgctgtacgtggtgacggtgagcacaggggtggcgtatacggtgctgcagcccatagtggagctgctcaagaaccccatcacggcgctgctcatcgtggccgtcctcgccggcagcggcttcctcgtctcgcaggtgctcaatgccatggtcggcaactccgacttcatctacatgtacgagtaggtagagcaggccggccagggg

SEQ ID NO: 15408 - DNA, 132 bp, Zea mays
gcaagcaagcagcgagtacatacatactaggcagccaggcagccatggcgcccaccgtgatgatggcctcgtcggccaccgccgtcggtccgttccagggggtcaagtccaccgccagcctccccatcgccc

SEQ ID NO: 15409 - DNA, 228 bp, Zea mays
gcagcacaaaggaaggagagagaaatggcaaccgcagaactgggattcaaaaagcaattaactaaggaggagaagtttgaaaagaggaagcagagacttgctgcaatcggagaggatcttttggcgattgctgctgatcaaccatttcgcttccctgccacatttacatttgtggtcagagcattctcagttctagatggtattgggaaaggccttgatcctaggttt

SEQ ID NO: 15410 - DNA, 335 bp, Zea mays
cccacgcgtccgagaagctagcgcttatagcttgtcagccatggccaccgccgccgcgtctagcctcctcaagtcctccttcgcgggctcccggctcccggccgccacgcggaccacaccggcgtccctcgtggtggccaccggcccgcgcggcgccggcgcggggcccatctgcgcgtccatgtccatgtcctcctccaacccgccctacgacctgacgtccttccggttcagccccatcaaggagtccatcgtgtcccgcgagatgacccgtcgctacatgacggacatgatcacctacgccgacaccgacgtcgtcatcgtgggcgccggct

SEQ ID NO: 15411 - DNA, 332 bp, Zea mays
cagcgactcagcgagcgagagcagcacacacgcagctagctaggagcagcagcagagcagcggcgatggcggcctccatgatctcctcgtcagctctggcggtggcgcctcagggcctgccgcccctcggccgccgcgcctcctccttcgccgtcgtctgctccaagaagaagatcaagaccgacaagccctacgggattgggggtggcctgaccgtcgacgtcgacgccaacgggagaaagggcaagggcaagggcgtgtaccagttcgtcgacaagtacggcgcgaacgtcgacggatacagcccaatctacaacgaggatgactggtct

SEQ ID NO: 15412 - DNA, 332 bp, Zea mays
ctttcagaagtaaacccgatgcttggcttccgtgggtgcaggcttggtatatcgtaccctgaattgacagagatgcaagcccgggccatttttgaagctgctatagcaatgaccaaccagggtgttcaagtgttcccagagataatggttcctcttgttggaacaccacaggaactggggcatcaagtgactcttatccgccaagttgctgagaaagtgttcgccaatgtgggcaagactatcgggtacaaagttggaacaatgattgagatccccagggcagctctggtggctgatgagatagcggacaggctgaattcttctccttcgga

SEQ ID NO: 15413 - DNA, 174 bp, Zea mays
cacgcatactgcatacacaacacagagcatcagaaggagctgcgatctgatcgacatggctgccgccaccatggctatcacctcccgcgcgctcatcggcaagccggcggctggcacgagggacgtcttcggcgagggccgcatcaccatgcgcaagaccgccgccaagcccaa

SEQ ID NO: 15414 - DNA, 347 bp, Zea mays
tttaataccgctgtgtaccggcaaccggatttacttaaagaagccaaatttgtatcgctgccaattccacaaacagaatttgcagacttttaatcaccagactgggaacaaacaatggaccgactgactcaagatgaaaacaaaacaagatatagaagtaggtcgtgattgtcgacgatgttgtgtccgaggaaggtctcgataatattattcacagcagtcatgcgctctttttccttttctcctcttcaatcttagccttaatgtaagagtacatagcaacaccagctatggcaatggacgtgccaattccagtttgtgtgctaattttgttgccaaaaacaatg

SEQ ID NO: 15415 - DNA, 333 bp, Zea mays
cccacgcgtccgcaagaacttctggtgcagcaacacctgatgagatacaagagaacctatcagtatgatgctgtgtttgctcttggattcgtcactgtctatgatcagctcatggaagggtaccccagcatcgaggacagggattccatcttcaaggcatatataacagcattaaatgaagatcctaatcaatacagagctgatgcactaaagatggaagagtgggcacgttcccagaatggcagttccttagttgatttttcttctagagatggtgaaattgaatccattctgaaagatatatcagaaagggccaagggtaagggaaacttc

SEQ ID NO: 15416 - DNA, 321 bp, Zea mays
ggggtcctttgcgaggctcctgttctacccgctcttctacggctgcctgcacgggccgagctttttccgcaccgagatccccgtcaccgtgctgacgtgcctcctggggctcactaacgggtacctgacctccgtcctcatgatcctcgcgcccaaggctgtgcccatccaccactcggagactgccgggattgtcatcgtgctgttcctcgttgttggccttgtcattggttccattgtggcttggttctgggtcatctgataccggggtacgttctctgtcacgtcgatgtatcatagcaccatgatcgtgttcttttg

SEQ ID NO: 15417 - DNA, 321 bp, Zea mays
cggacgcgtgggcggacgcgtgggcagagctctcgctcaaggtctagatattcacctcaaccacagggtcacaaagatcatacaacgctataacaaggttattgtctgtgtggaagatggggcgagttttgtcgcagacgctgctatagtaaccgtccctctcggggtactcaaggcaaacatcatcaagtttgagcctgagctaccgaaagagaagctctcggcaatcgccgaccttggcgtcggtatcgagaacaagatagctctcaagttcgacactgtgttttggcccgacgttgaagtgataggtagggtggcccc

SEQ ID NO: 15418 - DNA, 325 bp, Zea mays
cccacgcgtccgctgagtcattagcccaagctcaagaggctaaggatgcttcagagtccatttcaatcctttaccgtgtcattcaggacccatcttcttctgctgatgcactgagaacaaaagaagttgcaattacaaatcttacaaactacctcactaaagaaaacagagctgaggagctgcgtaatcttttgacccagctcagaccattttttgcagttattcctaaggcaaagactgcaaaaattgtccgtggaataattgatgctgtcgccaagatacctggaacatcagatcttcagatttcactctgcaaggaaatggt

SEQ ID NO: 15419 - DNA, 322 bp, Zea mays
gcagaggcagcgacacgatcgcgagcgcacgcacgtaagcacgttgtcggaagctcaagttagaagaagcaccagtgcctgatcgatggcggcccaggctctcctctccggccggcagctgctgggccgccccgtgcagtcggccgtctctaggtcgtcggcgaggaaggcgcccttcgtcgtcagggccagctccagccctccagccaagcaaggtgccgacaggcagctgtggttcgcgtccaagcagtccctctcctacctcgatggcacgctgcccggcgactatggcttcgacccgctgggcctctcggacccggag

SEQ ID NO: 15420 - DNA, 315 bp, Zea mays
cccacgcgtccgcggacgcgtggtccgtcgacaagccggtggtgattggcctggcggcagactcagggtgcggcaagagcaccttcatgcgccggctcaccagcgtcttacgtggcgccgcggatccgcccaagggcgggaacccggactccaacacgctcatcagtgacaccacgacagtgatatgcctcgacgactaccattccctggacaggaacggcaggaaggagaaaggtgtgaccgccctcgaccctagggccaacaactttgatctcatgtatgagcaggtgaaggcgatcaaggaaggccaggcag

SEQ ID NO: 15421 - DNA, 314 bp, Zea mays
cccacgcgtccgcctcgatggcacgctgcccggcgactatggcttcgacccgctgggcctctcggacccggagggcaccgggggcttcatcgagcccaagtggctggcctatggcgaggtgatcaacggccgctacgccatgctgggcgcggtgggcgccatcgccccggagatcttcggcaagatgggcatcatccccccggagaccgcgctgccgtggttcaagacgggcgtcatcccgcccgcgggcacctacaactactgggccgactcctacacgctcttcgtcttcaacatggcgctcatgggcttcg

SEQ ID NO: 15422 - DNA, 333 bp, Zea mays
agctagctaccaggggggaaaatggctccacttctcgccgcagccatgaaccacgctacccatccagtccttagaagccatctaggacccaacaatgagagtttctcacgacaccacctatcttcttcaccacaaagcagtaagcgaaggtttaaccttagctttacgccacgatctgcaagggtaggcaatgaaaatggagtccaattgttgagcccctcggaaatccctcgaagggactggttcccctctgacttcatctttggtgccgccacttcagcgtaccaaattgaaggtgcatggaacgaagatggaaagggggaaagcaattgg

SEQ ID NO: 15423 - DNA, 316 bp, Zea mays
cgcctcgggtcaaaccctaagcagggagttgatttatccgctgcagccatgagtaagttgcagtctgagtctgtcaaggatgccatctcccagattgttggggatgccaaggagaagaataggaagttcactgagactgtggaacttcagattggtctgaagaattatgatccacagaaggacaagcgtttcagtggctctgttaagttgccccatatccctcgtcccaagatgaaggtgtgcatgcttggtgatgcccagcatgttgaggaggccgagaagatgggacttgactacatggatgttgaggctctca

SEQ ID NO: 15424 - DNA, 316 bp, Zea mays
cccacgcgtccgttttttttttttttttttttccagtctctcattatcagcatcttcttgttactcatacggaagaaagaatagacgctacaaactagaacttgtgaacacacgctattgacctctaaaccaccttaacaaaatctcaaaattcacgcctgggctttgattctgcaaccgtgactcggatctgtctaccatccaagtctatgccatcaaggtttgatatggcattgttgacctcctcggcagagccataggtgacgaaaccaaacccccttgacctgccgctatccctgtcgtagatgaccttagc

SEQ ID NO: 15425 - DNA, 319 bp, Zea mays
gccaaaccatcctcctctccgccgcccgccgcagcagcacccaccgggcaagatgaagacgatcctggcgtcggagacgatggacatcccggagggcgtcatggtcacggtggccgccaagctggtcacggtggagggcccccgcggcaagctcacccgcaacttcaagcacctcaacctcgacttccagctgcaggaggccggccgcaagctcaaggtggacgcctggttcggcacccgccgcaccatggccgccatccgcaccgccatctcccacgtccagaacctcatcaagggggtcaccaagggctaccgctac

SEQ ID NO: 15426 - DNA, 311 bp, Zea mays
caccaaggagagtacgtggaggagcagccatggcttcatcggtggccgccgcggcgagcacattcctgggcacccgcctggcggacccggcgccacagaacgggcgcatcgtggcccggttcgggttcgggttgggcggcaaggcgaacttgctccgaagaaggtggcgaagacatcgacctcctctgaccggccgctgtggttccccggcgccgtggcgccgactacctggacggctcgctggtcggcgactacgggttcgacccgttcggtctcgggaagcccgtggagtacctgcagttcgagttgga

SEQ ID NO: 15427 - DNA, 314 bp, Zea mays
gttgtcggaagctcaagttagaagaagcaccagtgcctgatcgatggcggcccaggctctcctctccggccggcagctgctgggccgccccgtgcagtcggccgtctctaggtcgtcggcgaggaaggcgcccttcgtcgtcagggccagctccagccctccagccaagcaaggtgccgacagcagctgtggttcgcgtccaagcagtccctctcctacctcgatggcacgctgcccggcgactatggcttcgacccgctgggcctctcggacccggagggcaccgggggcttcatcgagcccaagtggctggc

SEQ ID NO: 15428 - DNA, 312 bp, Zea mays
cccacgcgtccgatggaccggatcaagggcaagcagcaggtcatggtcggctactccgactccggcaaggacgccggccgcctgtccgcggcgtggcagctgtacagggcgcaggaggagatggcgcaggtggccaagcgctacggcgtcaagctcaccttgttccacggccgcggaggcaccgtgggcaggggtggcgggcccacgcaccttgccatcctgtcccagccgccggacaccatcaacgggtccatccgtgtgacggtgcagggcgaggtcatcgagttctgcttcggggaggagcacctgtgc

SEQ ID NO: 15429 - DNA, 311 bp, Zea mays
cccacgcgtccggagctgagctgagctgagctcaccaccaccacacacgggagatagctatagctagcatagcaagccagccagtcagcgacttagcagcagctagctagccatgctgccgtccttcgtgtcgccgacggcgagcgccgcggcctcggtgacgcctccgccgcggccgataccaggcagctacgggccaccggtgctgggcccgctacgggaccggctcgactacttctggttccagagccaggacgagttcttccggaagcgcgcggcggcacaccgcagcaccgtgttccgcaccaaca

SEQ ID NO: 15430 - DNA, 308 bp, Zea mays
ctggtccgtggccatggcgtcgtccatgctctccgctaccaccgtgccactccagcaggggggcggcctgtccgagttctccgggctcaggagctccgcgtcgctgcccatgcgccggaatgccacctccgacgacttcatgtccgccgtctccttcaggacccacgcggtcggcacgagcggcgggccgcggcgggcgccgacggaggcgaactgtaaggtggccatcaatgggttcggccgcatcgggcgcaacttcctgcggtgctggcacgggcgcggcgacgcctcgcccctcgacgtcatcg

SEQ ID NO: 15431 - DNA, 312 bp, Zea mays
cccacgcgtccgccccgctaccgaagattatcccgtgcagaggcccactagtatatcagcttggagttgaggagaatggctgttggtgggactcaaccagtccttaggaagtacctaggcgccctcaaggacacgacgactgtgagcttggcaaaagtgaacagtgattataaggaattggacattgcaatcgtcaaggccacaaaccatgttgagcgcccatcgaaggagaagtacataagagaaattttccattccatttctgctgctaggccacgggcagatgtagcctattgcattcatgcccttgct

SEQ ID NO: 15432 - DNA, 194 bp, Zea mays
cttgaccatgccgcaaagatcaagagcaccccggaggccgagaaatacttcgcagcaaccaaagatgcgctcggcgacgtcctcgccaagctagcctagatggaagctaatagatgggttaacgatggccacgtaatttcggacttgtgtttgttcatatggagccggcaaatgtaccgtttcctgttcatatt

SEQ ID NO: 15433 - DNA, 307 bp, Zea mays
cccacgcgtccggggtatcaagcagttctatgtgaatgtggataaggaagactggaagctggacacactgtgtgacctgtacgagacccttgccatcacccagagtgtcatctttgtcaacacccgccgcaaggtggactggctcactgacaagatgaggagcagggaccacactgtttctgccactcatggtgacatggaccagaacactagagacatcatcatgagggagttccggtctggctcctcccgtgtgctcatcaccaccgacctgcttgctcgaggtattgatgttcagcaggtgtcc

SEQ ID NO: 15434 - DNA, 308 bp, Zea mays
cccacgcgtccgcccacgcgtccgcgaggtggaggaggaggtcggggagtacgttgagccgcccgaggaggccaaggtctacgtcggaaacctgccctacgacgtcgacagcgagcgcctcgctcagctcttcgaccaggccggcgtcgtcgaggtcgcagaggtcatttacaacagagaaacagatcaaagtcgtgggtttgggtttgtcactatgagcactgttgaggaggctgagaaggctgtggagatgttccatcgctatgatgtcaatggaaggcttctgactgtaaataaagcagctccta

SEQ ID NO: 15435 - DNA, 307 bp, Zea mays
cggtccaacactttcacgctcaggcgctcagctctagtaatggctgcctccaccatggcgatctcctccacggcgatggccggtacccccatcaaggtgggctccttcggcgagggccgcatcaccatgcgcaagaccgtgggcaagcccaaggtggcggcgtccggcagcccctggtacggccccgaccgcgtcaagtacctcggccccttctcggcgagcccccgagctacctcaccggcgagttccccggcgactacggctgggacaccgccgggctgtccgccgaccccgagaccttcgccaa

SEQ ID NO: 15436 - DNA, 314 bp, Zea mays
ctatgagcttcgcgttcgtgccgaagagccccacagttcgtctggttccaaagttaccaagtattacatagaattctggaagcaaattcctccaaacgagccctaccgggtgatactaggccatgtaagggacaagctgtacaacacacgcgagcgtgctcgccatctgctggcatctggagtttctgaaatttcagcggaatcgtcatttaccagtatcgaagagttccttgagccacttgagctgtgctacaaatcactgtgtgactgcggcgacaaggccatcgcggacgggagcctcctggacctcctgc

SEQ ID NO: 15437 - DNA, 316 bp, Zea mays
cggcaaattcccgaggttcagagcagtccatctgtgttcataacatttatagcttggagcatatctgaggtcatccgttactctcactatgctctgactaccttaaaagtttgtccagcatggctgacttatctcaggtacactgcttttatcccgctgtatccaatcggggttggcccaggagaaatgtggacaatgtaccaagccctcccgtttgtgaagaagagggacctttactcaggtttcttcgagaagttctccatgagctaccgttcctttctagtgggtgtgctggtgctctacccgttcctgtggc

SEQ ID NO: 15438 - DNA, 308 bp, Zea mays
cccacgcgtccgggctgtcaggcagatgattatggctcccacgcttgagctgaggcagcaggcgctcgaccgtctcttgccgtatcagaggtctgacttcgaaggcattttccgtgctatggatggactcccggtgaccatccgactcctggaccctcccctccacgagttccttccagaagggaacatcgaggacattgtaagtgaattatgtgctgagacgggagccaaccaggaggatgccctcgcgcgaattgaaagctttcagaagtaaacccgatgcttggcttccgtgggtgcaggcttgg

SEQ ID NO: 15439 - DNA, 302 bp, Zea mays
ctacggtccgggaatcggaagctcacggcagaagccatgaggcagacgcatcttttgttgctcgcttgtttctgggtcctgtcaacatgctcctagctacttgatgcttcctccgatggactgttaagaatcaacctgaacaagaagagactggacaatgaagctttgactgctgctaaattggcgaagaaggagagccaccttcgaaggtctgtgggtgctgaccagtatctcagtgcctcaactgatgacatagtccctttggacaactacctggacacccagtactttggacagatcag

SEQ ID NO: 15440 - DNA, 301 bp, Zea mays
cccacgcgtccgcggacgcgtgggtggccatggcgtcgtccatgctctccgctaccaccgtgccactccagcaggggggcggcctgtccgagttctccgggctcaggagctccgcgtcgctgcccatgcgccggaatgccacctccgacgacttcatgtccgccgtctccttcaggacccacgcggtcggcacgagcggcgggtcgcggcgggcgccgacggaggcgaactgtaaggtggccatcaacgggttcggccgcatcgggcgcaacttcctgcggtgctacgggcgcggcgacgc

SEQ ID NO: 15441 - DNA, 308 bp, Zea mays
cccacgcgtccgcccacgcgtccgagcaaccggtccagcactttcacgctcagctccagcaatggctgcctccaccatggcgatctcctccacggcgatggccggcacccccatcaaggtgggctccttcggcgagggccgcatcaccatgcgcaagaccgtgggcaagcccaaggtggcggcgtccggcagcccctggtacggccccgaccgcgtcaagtactcggccccttctccggcgagcccccgagctacctcaccggcgagttccccggcgactacggctgggacaccgccgggctgtccgc

SEQ ID NO: 15442 - DNA, 311 bp, Zea mays
atcattttgttttcttcgaagtaatccaagaaaagttgcttccagatgtcaactgcaaaagtgttagatcctgcttttcaaggggctggccaaaaagttgggacagaaatatggcggattgaagattttaagccagttctgctgccaaaatctgattatggtaaattctactgtggagattcatacatagttctgcagacgacctgtactaaaggtggtgcctatctatatgatatccacttctggattgggaaagattcgagtcaagatgaagctgggactgcagcaatcaagacagttgaacttgatgc

SEQ ID NO: 15443 - DNA, 313 bp, Zea mays
cgccatggcctccctctcctctgccgccgtcaccgccccttccttcgccgcaccagcgccacccgcgccgtggtcagaaggaggtccttcaccgtgcgcgcctctctccgcaaggccaccggcaccgccgccgtggcaatggctgccagcgccctgcttgccggcggtgccatggcccaggaggtgctgctgggcgcaggcgacggcgggctcgtcttcgagcccagccagttcaccgtcaaggccggcgacaccatcacattcaagaacaacgccggcttcccgcacaacgtcgtcttcgacgaagacgagg

SEQ ID NO: 15444 - DNA, 302 bp, Zea mays
agcgcttatagcttgtcagccatggccaccgccgccgcgtctagcctcctcaagtcctccttcgcgggctcccggctcccggccgccacgcggaccacaccggcgtccctcgtggtggccaccggcccgcgcggcgccggcgcggggcccatctgcgcgtccatgtccatgtcctcctccaacccgccctacgacctgacgtccttccggttcagccccatcaaggagtccatcgtgtcccgcgagatgacccgtcgctacatgacggattgatcacctacgccgacaccgacgtcgtcatc

SEQ ID NO: 15445 - DNA, 313 bp, Zea mays
gtggatgatgttagaaagctcaaggtcctggctaacgccgatacccctgatgatgcattgactgcgcgaaacaatggggcacaaggaattggattatgccggacagagcacatgttctttgcttcagacgagaggattaaggctgtcaggcagatgattatggctcccacgcttgagctgaggcagcaggcgctcgaccgtctcttgccgtatcagaggtctgacttcgaaggcattttccgtgctatggatggactcccggtgaccatccgactcctggaccctcccctccacgagttccttccagaaggga

SEQ ID NO: 15446 - DNA, 110 bp, Zea mays
aaaagaagataactatttctttgccttgtcaaagtaccaacataaattggaagggctactgaccagaaatcctgattttgtaaggccatcatatcgcttgaacgaggtcc

SEQ ID NO: 15447 - DNA, 298 bp, Zea mays
caagcaagcaagcagcgagtacatacatactaggcagccaggcagccatggcgcccaccgtgatgatggcctcgtcggccaccgccgtcgctccgttccaggggctcaagtccaccgccagcctccccgtcgcccgccgctcctccagaagcctcggcaacgtcagcaacggcggaaggatccggtgcatgcaggtgtggccggcctacggcaacaagaagttcgagacgctgtcgtacctgccgccgctgtcgacggacgacctgctgaagcaggtggactacctgctgcgcaacgg

SEQ ID NO: 15448 - DNA, 297 bp, Zea mays
cagagccatgacgtcgcttattggtcaaagagcttcatcatagacttggaaagggtttgtaaggatcacttcaagaggacttgttggggcatagggttgggttttggtttcagggtggtggccttggaccctcatttcacaaagcttaacatggattcaatcattattgctaagagctttcagagagcagggctatattgctcgattatgatggaactctggttccccaaacttccctcaacaaggaacctagtccacaggttttgagcatcatcaataccctttgctcagatagta

SEQ ID NO: 15449 - DNA, 300 bp, Zea mays
ctggtgaggtgatccttgggaagcagccgctttccccaccagcccttagtggtgatctgggaactttcatggcctgggtggatgatgttagaaagctcaaggtcctggctaacgccgatacccctgatgatgcattgactgcgcgaaacaatggggcacaaggaattggattatgccggacagagcacatgttctttgcttcagacgagaggattaaggctgtcaggcagatgattatggctcccacgcttgagctgaggcagcaggcgctcgacgtctcttgccgtatcagaggtctga

SEQ ID NO: 15450 - DNA, 290 bp, Zea mays
gtggatgatgttagaaagctcaaggtcctggctaacgccgatacccctgatgatgcattgactgcgcgaaacaatggggcacaaggaattggattatgccggacagagcacatgttctttgcttcagacgagaggattaaggctgtcaggcagatgattatggctcccacgcttgagctgaggcagcaggcgctcgaccgtctcttgccgtatcagaggtctgacttcgaaggcatttttccgtgcaaggatggactcccggtgaccatccgactcctggaccctcccct

SEQ ID NO: 15451 - DNA, 307 bp, Zea mays
cggacgcgtgggtagagcagcagaggcagcgacacgatcgcgagcgcacgcacgtaagcacgttgtcggaagctcaagttagaagaagcaccagtgcctgatcgatggcggcccaggctctcctctccggccggcagctgctgggccgccccgtgcagtcggccgtctctaggtcgtcggcgaggaaggcgcccttcgtcgtcagggccagctccagccctccagccaagcaaggtgccgacaggcagctgtggttcgcgtccaagcagtccctctcctacctcgatggcacgctgcccggcgacta

SEQ ID NO: 15452 - DNA, 307 bp, Zea mays
cgaccgtcgctcaccgggaagctacgctacgacgaagcatggcgtccgtcaccgcccgcgccccggtcgcggccctgcgcccgtcggcgtctctcaagtcgtcgtcgtcgtcggcggcggccttccttggccgggatgctgatcccggaggtgctgaccaaggccgggctgatcaacgcgccgcagtggtacgacgccggcaagtcggagtacttcgcgtcgtcgtcgacgctgttcgtgatcgagttcatcctgtttcactacgtggagatccggcggtggcaggacatcaagaaccccggcagcg

SEQ ID NO: 15453 - DNA, 331 bp, Zea mays
cccacgcgtccgagcgccactgtccagtgcgcgcgtcaagcttgcttagctagccgccatggcctccctcgccgccgtctccgtgaagcccgtggccatcaagggtctcgccggcagctccatctccggaaggaagctcgccgtcgccaggccgtcggcccgctccatccgcacgccccgcgcaccgccgtggtggccaagtacggcgacaagagcgtctactttgacctcgacgacatcggcaacaccaccggacagtgggacctctacggctctgacgcgccctcgccctacaacccgctacagagcaagttcttcgagacgttcgcgg

SEQ ID NO: 15454 - DNA, 322 bp, Zea mays
ctcatctccggcgaagggaaatggcgaccgttccaggggatctgatctggcagattgtgaggaagaacaactccttcctggtgaagcagtttggcaacggcaatgccaaggtgcagttcaccaaggagcccaacaacctctacaatgtacactcctacaagtactctggcttagcaaacaagaaaactgtaacgatccagccagctgctggaaaggactcggctgtggtcctctctactaccaagaccaagaagcagaacacacccgcgaagctcagccacaagtctgtaatgcgcaaggagttccgcaagatggccaaggc

SEQ ID NO: 15455 - DNA, 103 bp, Zea mays
cgtgacgcgtgggtcagaccccaagaagcagctggagctagcagtgctggctgtgttcaactcatgggagagccccagggccaagaagtacaggagcattaac

SEQ ID NO: 15456 - DNA, 142 bp, Zea mays
cttcaagtctcgctacgtagcagtgcaataaaaaaagcagccgcaatggcgagcagcaccatggccctctcctccacggccttcgccggcaaggccgtgaacgtgccgtcgtcgtccgccttcggcgaggcccgcgtgacga

SEQ ID NO: 15457 - DNA, 325 bp, Zea mays
atttgggctgaggagagcttacagcgaaggagacattcagaaccttggagccaacacgcctcgaccagcagcaaatgtttgtgtgaccatcagtgacctcaagaccgaagaaaggaagcaaaagctttccaggtataggaagaagaagatcaagcggaactttggcaggaagatcaagtacgcgtgcaggaaggctctggcagacagccagccaagagtgcgagggagatttgccaagatcgaagaatgcgacctgctgaagccaagcaagtagatccaagtatgcttggttttggcttctagctaggcgccgctccatcgtcct

SEQ ID NO: 15458 - DNA, 320 bp, Zea mays
  unsure (1)..(320): unsure at all n locations
ggaagaagggcctcctgtatcctctcacttccctcagtcctcgtccgtctgctccctcctctctctacctagctctagctagccttcctgtagcgcggcagagatggctgcccctgcctccaccacggcggcggcggcggcagcgctgctgctgctgctcctcctgtcgctcgccgcggcggcggacatgtcgatcgtgtcctacggggagcgcacacngtaggaggcgcggcggatgtacgcggagtggatggcggcgcacggccggacctacaacgccgtcggcgaggaggagcggcggtaccaggtgttccgggaca

SEQ ID NO: 15459 - DNA, 317 bp, Zea mays
gcagaccccagcagaagaagcgaagtcgtcgccggagcaggaggaagagcgagcagcaagatgtcgtggcaggcgtacgtcgatgaccacctgctgtgcgacatcgaaggccagcacctcagcgccgccgccatcgtcggccatgacggcagcgtctgggcacagtccgagaacttccccgagttaaagcctgaggaggttgctgggatgataaaggactttgatgaacctggaactcttgcaccaactggtctttttgttggaggtacgaagtacatggtgatccaaggtgaacctggagttgtcatccgaggaaa

SEQ ID NO: 15460 - DNA, 315 bp, Zea mays
gagaggccgagaagcgctttagccgtagccgtagcgataagagtgagctagctggtgcacaccggcatggcggccacggcgtactccgtggcgctcctcggcggcgcgcgccttcccgccgctccgcgctccgccctcctccctcggcgcacgtctgccagcttcgcttccaagatgcaccgaggctctccctgctccgtgcgaaggccgcttccgaggacacatcggcctccggcgacgagttgatcgaggacctcaaagcgcaatgggacgccgttgaggacaagcccaccgtcctcttgtacggcggcggcg

SEQ ID NO: 15461 - DNA, 318 bp, Zea mays
gtagcgataagagtgagctagctggtgcacaccggcatggcggccacggcgtactccgtggcgctcctcggcggcgcgcgccttcccgccgctccgcgctccgccctcctccctcggcgcacgtctgccagcttcgcttccaagatgcaccgaggctctccctgctccgtgcgaaggccgcttccgaggacacatcggcctccggcgacgagttgatcgaggacctcaaagcgaagtgggacgccgttgaggacaagcccaccgtcctcttgtacggcggcggcgcgtcgtcgtcctttggctgacgtccgtggtcgt

SEQ ID NO: 15462 - DNA, 309 bp, Zea mays
ctacgataccgtcgcgtcgcctcccgaagatctcgaggagacgaagaagctgctggataagctcgttgtgctcaagcttaacggagggctcgggacgaccatgggctgcactgggcccaagtctgtcattgaagtccgcaatgggttcacattccttgaccttattgtgattcaaattgagtccctgaacaagaagtatggatgcaatgtccctttacttctgatgaactctttcaacacccatgatgacacacagaagattgttgagaagtattccaactccaacatcgaaattcatactttcaatca

SEQ ID NO: 15463 - DNA, 309 bp, Zea mays
cccacgcgtccgcccacgcgtccgctattgtctcccttccaattcgatgcctttgtagcgctgctgcctcgccgcgtcgtcgcgggtccccgatttccgcttgctgctgcgcttccaacaccatggacggcgggggatccggcaatgcctccggcggcagcggcggcgcatcgacgtgctgctactacgcgctcctcggcatccgcaagaacgcctccgccaccgacatacgctccgcttaccggaggctcgcgatgaagtggcacccggaccggtgggtcagcgaccccggctcggccggcgaggcca

SEQ ID NO: 15464 - DNA, 308 bp, Zea mays
gcgagcgtctctcctctcccacgcatcgcgccaaggaagagagagagatcgccgctccccttctcggcgtcggtggtgcgggtgccctccctcctcgagcgagatctgtctggtcacagatctatctgacaaaatggtgaagatctgctgcatcggtgctggctatgtcggtggcccaaccatggccgtcattgccctcaagtgcccagacattgaggtcgtcgtcgttgacatctccaagccccgcattgaggcctggaacagtgacaccctgccaatctacgagcctggtctcgatgatgttgtga

SEQ ID NO: 15465 - DNA, 309 bp, Zea mays
tttacttcttacgatgatcatacgatatagttggacatgaaacagagtaccatatcatcgttatctttccttccgtgtgtaggtttgacatggaagcccttcctcctaccttgacatctgcttctgagcagccacctctctatgatggcacaaccagagctgcagattgtatatgtcctacgtttgcccgtatgcgcaacgggcatggatcacgaggaattacaagggtttgcaggagaagatcaagctagtccctatgaacatggcagataagcctggatggtataaggaggtttaccccaacaacca

SEQ ID NO: 15466 - DNA, 307 bp, Zea mays
gctggaccccagcacgccgtccccgatcttcggcggcagcacgggcgggctgctccgcaaggcgcaggtggaggagttctacgtcatcacgtggacgtcccccaaggagcaggtgttcgagatgcccaccggcggcgccgccatcatgcgggagggccccaacctcttgaagctggcgcgcaaggagcagtgcctggcgctcggcaccaggttgcgctccaagtacaagatcacctaccagttctaccgcgtcttccccaacggcgaggtgcagtacctccaccccaaggacggcgtctacccggag

SEQ ID NO: 15467 - DNA, 313 bp, Zea mays
cggacgcgtgggttgtagttgcaggcagacgcgccatgcggatgcgggtgcttcccgcgtcctggtcatcttcctccgccaagcatagcagcggcagtccgagtcaaaggagcacccttcttcctcctctgctacggccgcggtgtacctcaacatctacgacatctcccccctcaaccactacctctactggttcggactcggcatcttccactccgggatccaagtccatggcatggagtatggctttggagctcatgaataccccaccagcggagtcttccaagtagaacccaaaagctgccccgggttt

SEQ ID NO: 15468 - DNA, 116 bp, Zea mays
ggactcgttcccgttcaagcccggcaagtaccagatgaagaagctgtgcctggagccgacgtccttcaccgtcaaggcggagggcatcgccaagaacgcgccgcccgagttccaga

SEQ ID NO: 15469 - DNA, 289 bp, Zea mays
aaatatagcaagagccatcttgttttcaatgatgatatccagggcacagcatcagtggtccttgcaggtttgttagcagcactcaagatggttggtgggaccctggcagagcagacgtatgtgttccttggtgctggggaggctggaactggtattgcagaacttattgctcttgagatttcgaaacagacgaatgctccaattgaagagtgccgcaagaaggtttggctggtggactcaaagggtttgattgttgactctcgtaaaggctcccttcagccattcaaga

SEQ ID NO: 15470 - DNA, 317 bp, Zea mays
ctcgactccatccaggtccatctcgccaacgtggagtccaagttcgccggagccctgtccgacgcgggccacatctgcgtggagggcaaggtcagggacggcggcgcgtcgcacctcacgctcgtcgggtccttgagcgtcgacgttagccttgagggcaacctgatactgtgcggccagctcgaccacccgggcatcattgggagagtggggtcgatcctgggaaagatgaacgtgaacgtgagctttatgagcgtcagtaggactgctcccgggaagcaggcgataatggccattggagtcgacgaggagcctgg

SEQ ID NO: 15471 - DNA, 317 bp, Zea mays
gaaattctctggcccgaggtgggaggcgttggccaagaaaggtgccaagaaacagaggttgttgtgggcatccaccggtgtcaagaacccagcttatcccgacactctttacatcgacagtctcattggacctgacacggtcaacacgatgcccgaccaagctttgcacgcattcatagaccacggcactgtctcgaggacagttgatgcgaatgtgtccgaggcggaaggtgtatacagcgccttggagaagcttggcattgactggggcgaggtcggaaagcagcttgagctggaaggtgtggactccttcaaga

SEQ ID NO: 15472 - DNA, 318 bp, Zea mays
gacgagtgtcaagtgaacctgaaacttgcggtgtcactggctggtagcctgagtgtgagtgagtgatcgagctagctgagctccgatcctcgctagctaggataccgccataccacaagtcttcttcacaagtttaggagtgacagcaacaagagatcgatggcctctgccaccgtgctcaagtcctccttccttcccaagaagtccgaatggggcgccaccaggcaggccgccgcgcccaggccgcccaccgtctccatggtcgtccgcgcctccgcctacgccgatgagctcgtgaagaccgcgaaaacgatcgcg

SEQ ID NO: 15473 - DNA, 314 bp, Zea mays
ctccgaagcaaaaggttggcaaatttgcttggttgttgctgtgaaggtgatgagagattgcttgttgcagaatacatgcccaatgatacgctagcgaacaccttttccattgggagtcacaatcaatgaaatggaccatgagattaagggttgttctctgtctcgctgaggctttagaatattgcactaacaggggccgtgctctctaccatgatctcaatgcctatagagctctgtttgatgatgactgtaaccctagactttcctgtttcggcctcatgaagaacagtcgggatggaaaaagttacagtacc

SEQ ID NO: 15474 - DNA, 256 bp, Zea mays
caattactatcgaattccgcgtgacacaaaccctcgttaacgagcgagaaggatatgggagtaagatactatatagcactttacatcgacttgaggacagagacccacagacaagaaactctgatacaaaacacgttatcctacaatcttgtagcttgggttgacaaggttgtccaagcctgagacgacttggattgattcgatgacatctccaactttgacgtcagccaggtagtcctcattctcagttacatat

SEQ ID NO: 15475 - DNA, 316 bp, Zea mays
gccgccgcgtctagcctcctcaagtcctccttcgcgggctcccggctcccggccgccacgcggaccacaccggcgtccctcgtggtggccaccggcccgcgcggcgccggcgcggggcccatctgcgcgtccatgtccatgtcctcctccaacccgccctacgacctgacgtccttccggttcagccccatcaaggagtccatcgtgtcccgcgagatgacccgtcgctacatgacggacatgatcacctacgccgacaccgacgtcgtcatcgtgggcgccggctccgcggggctgtcctgcgcgtacgagctct

SEQ ID NO: 15476 - DNA, 311 bp, Zea mays
  unsure (1)..(311): unsure at all n locations
ggagaacggcaaccagtacacctggggccccgtcaccgtgaagctcgcggaggcctacgggttctgctggggcgtcgagcgcgccgtgcagatcgcgtacgaggcgcgcaacagttccccgaggagcgcatctggctcaccaacgaaatcatccacaaccccaccgtcaacaagaggttggatgagatgggtgtagaaatcattcctgttgacgcgggtatcaaggatttcaatgtcgtcgagcaaggtgatgttgttgtgttgcctgcatttggagctgctgtggaggagatgtatacgctanatgagaa

SEQ ID NO: 15477 - DNA, 311 bp, Zea mays
cccacgctcaccgacgccacagcttgtgcgcgcgcaatggcactcgtgtccgcctcctcgtcctccaccaccgccgtcgcggcgctccccaggaatgggcagcagcgggcgtcgtcgtcgttgttctcctcctcctcctcttcctccttcctcgtcggcaagacgctgctgaggcaggccgaggcagcccggccgtcgttcgccgtgcgcgccgcggcggattccgacaggccgatctggttccccggcagcacccctccgccgtggctcgacggcagccttcccggcgacttcggctttgatacctgggg

SEQ ID NO: 15478 - DNA, 310 bp, Zea mays
cccacgcgtccgagcagcacgagcagcacgtcgtgccgctccaaccatctcgcttccgtgcttagcttcccgccgcgccatggcgtcgaccaaggctcccggccccggcgagaagcaccactccatcgacgcgcactccgtcagctggtcccaggcaaggtctccgaggacgacaagctcatcgagtacgatgcgctgctcgtcgaccgcttcctcaacatccttcaggacctccacgggcctagccttcgcgaatttgtccaggagtgctacgaggtatcggccgactacgtgggcaaaggagacacga

SEQ ID NO: 15479 - DNA, 325 bp, Zea mays
aagctcactagttaatttttcacatttctctaattcctgagcataagcattttttactttaacatgccttttgttttccttaataaggaattcctcttggctatccaagagttcatccttctcatgaatagcacctatcaattcatttaatttttctttttgttgcatatttaggttggcaaaaagagcaagcaaattgtcttcatcatcactagagctatcctcatcactagatgttgcatatttagtggaggctctagattttaccttcttcattttgccatcctttgccatgaggcacttgtggccgacgttggggaagagg

SEQ ID NO: 15480 - DNA, 308 bp, Zea mays
gtcaaggcttgtttctctacattcgcagttgccgcctaagagctttcgccctgccaggcttgagagctagtgctgccaaatccttccttggatgtctgatgcaatgcaatacctatgtttgatacttgtatttagcttgtgctgtttaatccttccttggatgtctgagacatacctgttcttgtccagctcatgattttttttccagtacattctgtatatcctgctgttttattagctgttgtgcattgcaagtgatgacaaaatcaaggcttgtttctcgacattcgcagttgccgcctaagagc

SEQ ID NO: 15481 - DNA, 311 bp, Zea mays
cccacgcgtccgacagcacaggcagctcgagagagagagagagagaaagatgtcgtggttcgggcaccaccaccacaaccagccggctcccccggcgtcgggccccaaccaggtgttcaagatcttctgccgcgccaacgagaactactgcctggccgtccgcgacggcgccgtcgtgctggccccggtcaaccccaaggacgaccaccagcactggtacaaggacatgcgcttcagcacccgggtcaaggacgaggaaggcatgccggcgttcgcgctcgtcaacaaggccacggggctcgccatcaagc

SEQ ID NO: 15482 - DNA, 307 bp, Zea mays
cacgcacgcatacacagcacagagtgaggtaagcatccgaaaaaagctgtgatctgatcgacatggccgccgccaccatggctctcacctcccgcgcgctcgtcggcaagccggcgaccagcaccagggacgtcttcggcgaggggcgcatcaccatgcgcaagactgctggcaagcccaagccagcggcgtccggcagcccctggtacggggccgaccgcgtcctgtacctgggcccgctgtccggccagcccccaagctacctgaccggcgagttccccggcgactacggctgggacaccgcggg

SEQ ID NO: 15483 - DNA, 306 bp, Zea mays
cggacgcgtgggtctggtttcgctgccccgattcgccacgaagccgcactgtgagagagggacgcggcccgttgtcctcggcttgtacgcaatccttccgtcgctgccaactgatccctcgtgttcgccatggcccccagcgtcgccgtggaaaacctcaaccccaaggtcttgaaatgtgagtatgcagtccgtggcgagattgtcatccatgctcagcgcttgcagcaacaactacaaacacaaccagggtctcttccttttgatgagatcctgttctgcaacattgggaatcctcaatccctt

SEQ ID NO: 15484 - DNA, 307 bp, Zea mays
aagtgaacctgaaacttgcggtgtcactggctggtatagcctgagtgtgagtgagtgatcgagctagctgagctccgatcctcgctagctagctaggataccgccataccacaagtcttcttcacaagtttaggagtgacagcaacaagagatctcgatggcctctgccaccgtgctcaagtcctccttccttcccaagaagtccgaatggggcgccaccaggcaggccgccgcgcccaggccgcccaccgtctccatggtcgtccgcgcctccgcctacgccgatgagctcgtgaagaccgcgaaa

SEQ ID NO: 15485 - DNA, 214 bp, Zea mays
gttcttggattaattaactacgatctctatgagcctggggatggatcaacccgtcgtgcgtggtctcgttttgtgatgagtgggagagagaggatgacaagatcgatcctttgttaatggagatctcgttaattaggagagctaccgctgggacttggtggtttgtaatatatgatccaaccagtgatgaatcaatgcattcacttgtgtacac

SEQ ID NO: 15486 - DNA, 304 bp, Zea mays
atcttttcactgtcaaacccaacctcgcattctgaatgcactgctgaacaagcatatacctggagtcagggccgttcaatctttgccagtggcagtccatttgcccccgtggagtacgaaggaaagacttttgtgcctgggcagtcgaacaatgcctacattttccctggactcggcctcggtcttgtgatctctggagccgtccgtgtccacgaggacatgcttctcgccgcctcgaaagcgctagctgatcaggccacacaggacaacttcgagaagggctccatcttcccacccttcacca

SEQ ID NO: 15487 - DNA, 304 bp, Zea mays
gtcgaaatccccaaggcgaggcgttgaaacccttaaccctcttccacctcgaagcggcgcgaggagggagagtgtgagtggactcaggaggcggcgggcgaaatgaagcttaacgtcaagaccctcaagggcaccaacttcgagatcgaggcgagccccgatgcgtcggttgctgaggtgaagaggatcatcgaaactactcagggtcagagtacctacccagcagaccagcaaatgctcatataccaagggaaaattctgaaggatgagaccactttggaaagcaacggagttgctgagaaca

SEQ ID NO: 15488 - DNA, 306 bp, Zea mays
cccacgcgtccgcgtgacttcccctccccttctcctcccctctccactccatcgtcaaggaaggaacacggccctaactaaaccctagctaagggaagggaaacaagaccatggatgcctccaagctccgcgagcttcgcgacttcgtcgaggcgtgcaagaagaatccttcgctcctcgccgaccccaacctctccttcttccgggattacctccagagtttgggtgccaaaattcccgccgccgccccctctttcgaaagtcccaagagatcttccatggacgacattgatgacgacggtgatg

SEQ ID NO: 15489 - DNA, 313 bp, Zea mays
agctcgcggaccccaaaaccctaaccccgcggacccacctggcggcggcggcggcggcgatggcggacggcggaggagaaggaggacctcctgcggcgtcggcggcgctcaaggaccaggggaatgagcagttcaaggcggggagctacctcaaggctgccgcgctctacacgcaggccatcaagctcgaccccgacaacgccaccctctacagcaaccgagctgcagcattcctgcagttggttaagcttagcaaagcgcttgctgatgcagagacaacagtcaggctgaagccacaatgggagaagggtca

SEQ ID NO: 15490 - DNA, 313 bp, Zea mays
ggattcttagataagactcataagaggattgtaaatgattacaaaaacttcgctaaggtgtgcttcgacaactttggtgacaaggtgaagaattggttgacctttaatgagccccagacatttacttcattttcctatggaaccggggtctttgccccaggacgatgctcaccgggactagactgtgccatcccaactgggaattcactcgtcgaaccttacattgctggccacaacattcttctagcccacgctgaggctgttgatctttacaacaagtattacaagggcgagaacggccgcataggtcttg

SEQ ID NO: 15491 - DNA, 319 bp, Zea mays
cacctttgggcattcgaagtgactattttcgatggtgtggcggtgtaatgggaaaatatgctgctggtggagagttgaagcctccaactactgcttgcagccgaggatctgggaagcacccacagcttatgccttccacccccagatgggctgttgccaatggagctggagttatattaagtgtctgtgatgaggaggtagctcgttatgagacagcaaatttaacagcagcagctgttcctgcgcttctgctacctccaccaacaacacccttggacgagcatttggtggctggcctgccccctcttgaaccatatgc

SEQ ID NO: 15492 - DNA, 319 bp, Zea mays
agcagcctcatccccttgcccacttctacagcccctctgctgcagcaagaaggaaagaagctagcgcttatagcttgtcagccatggccaccgccgccgcgtctagcctcctcaagtcctccttcgcgggctcccggctcccggccgccacgcggaccacaccggcgtccctcgtggtggccaccggcccgcgctgcgccggcgcggggcccatctgcgcgtccatgtccatgtcctcctccaacccgccctacgacctgacgtccttccggttcagccccatcaatgagtccatcgtgtcgcgcgagatgacccgtcg

SEQ ID NO: 15493 - DNA, 323 bp, Zea mays
cggacgcgtgggacaagaagacgagtgtcaagtgaacctgaaacttgcggtgtcactggctggtagcctgagtgtgagtgagtgatcgagctagctgagctcagatcctcgctagctaggataccgccataccacaagtcttcttcacaagtttaggagtgacagcaacaagagatcgatggcctctgccaccgtgctcaagtcctccttccttcccaagaagtccgaatggggcgccaccaggcaggccgccgcgcccaggccgcccaccgtctccatggatcgccgcgcctccgcctacgccgatgagctcgtgaagaccg

SEQ ID NO: 15494 - DNA, 321 bp, Zea mays
cttagtgttagagatccctttttaacccccttcgataagaaagatcttgcagagtcagctaagttgcagttttcatgccgggactacagtgatcatcttgcacttgttcgtgcatatgatggatggagggaggctgaaagagaccgtgctggttatgactactgctggaaaaattttctttcggtgcaaacattgaaagcaatagattctcttcggcggcagtttctctttcttctgaaggatactggtttggttgacgaaaacatgactatgtgcaataaatggagtcgtgatgaaaatctagttcgggcggtaatttgt

SEQ ID NO: 15495 - DNA, 320 bp, Zea mays
cttcgcgctcacgggcccgctccgcagcacgcccgtgcacggccaggccggcgcgctcggcccgccggcctcgtcgccatcctcatcgtctgcctcaccatgtactgcgtcgcctccttcaacgagggggacccgtccacggcgccttgggtcacggtcaccggcaggaagaaggaggccgacaagctgcagacctccgacggctgggccaagttcaccgggggattcttcttcggcggcatctccggcgtgctctgggcctactttctcctctacgtgctcgacgtccgctacttcttcaagtagatatcatcgaggat

SEQ ID NO: 15496 - DNA, 314 bp, Zea mays
cccacgcgtccggtccaagctcccacgactccaccgcgaccgggagagagtcagagagagacgcccgcctccagatcgtccggcggggatggcggcgtcggtctttccagcgctgctgctggccgtagcggcggtgcttctcctaccggtggcagaggccgtgtggctcgagctcccgccgtcggggaccaagtgcgtctccgaggagatccagcccaacgtcgtagtgctcgccgactacgctatcatgtacgagtcccaccccagctcgcatcccaccgtcgccgtcaaggttacatcaccctatggcaata

SEQ ID NO: 15497 - DNA, 316 bp, Zea mays
attacctgatgcttaatttgcaacttggcataaggtacacagtaggtaaaatcacccctgtgcctttgcgtgaagtccgttcaaatgattttggacctcgagcacggataagaatgtacttccctactgaaggctcacagtatacccctccacactgctctgtcaatttcttttggaaggattattgtcctatggttttccggaaccttcgagaaatgttccacattgatgctgcagattacatgatgtccatatgtggtgatgacagtctgaaagagctttcttcacctgggaaaagtggcagtattttctatct

SEQ ID NO: 15498 - DNA, 317 bp, Zea mays
agcaagcaagcaagcagcgagtacatacatactaggcagccaggcagccatggcgcccaccgtgatgatggcctcgtcggccaccgccgtcgctccgttccaggggctcaagtccaccgccagcctccccgtcgcccgccgctcctccagaagcctcggcaacgtcagcaacggcggaaggatccggtgcatgcaggtgtggccggcctacggcaacaagaagttcgagacgctgtcgtacctgccgccgctgtcgacggacgacctgctgaagcaggtggactacctgctgcgcaacggctggataccctgcctcg

SEQ ID NO: 15499 - DNA, 301 bp, Zea mays
tggccaaggcgcacgtgctgacccacgacacggggtaccaccagctggtgagccactggctgcgcacgcactgctgcgtggagccctacatcatcgccgccaaccggcagctgagccggctgcacccggtgtaccgcctgctgcacccgcacttccgctacaccatggagatcaacgcgctggccagggaggcgctcatcaacgccgacggcatcatcgaggagtccttctggccgggcaagtacgccgtcgagctcagctccgtggcgtacggcgcgacgtggcagttcgacacggaggc

SEQ ID NO: 15500 - DNA, 303 bp, Zea mays
gtggttttgcagcttccagagcttgagattgagaccagcgcggcagttctttcttggtcgatggcgctgaggaggatcatcaaggagctcaaggacctgcagagggatccacccacgtcctgcagcgcaggcctgtgtccgacgacatgttccactggcaagcgacgatcatggggcccagcgacagccctactcggggggcgtgttcctggtcgccatccacttccctccggactacccgttcaagcctcccaaggtgcgtgcgcctgcctgcctgatactctcatctcatggctcgctcga

SEQ ID NO: 15501 - DNA, 305 bp, Zea mays
caaggagagtacgtggaggagcagccatggcttcatcggtggccgccgcggcgagcacattcctgggcacccgcctggcggacccggcgccacagaacgggcgcatcgtggcccggttcgggttcgggttgggcggcaaggcgaagctgctccgaagaaggtggcgaagacatcgacctcctctgaccggccgctgtggttccccggcgccgtggcgcccgactacctggacggctcgctggtcggcgactacgggttcgacccgttcggtctcgggaagcccgtggagtacctgcagttcgagt

SEQ ID NO: 15502 - DNA, 307 bp, Zea mays
gggtactgctgatgcagttcggcagttcgactggcttttcgatgatgcaaaatctaaagacattgaagatgtgctgattctttctggtgaccatctctaccgtatggactacatggactttgttcagagtcatcggcaaagaggtgcaggcatcagcatctgttgtttgccaattgatggcagccgggcatctgattttggcctaatgaagatagacgacactggaagggtaatttcattcagtgagaaaccaaaaggagacgaattaaaggcaatgcaagttgacaccacagtgcttggcttatca

SEQ ID NO: 15503 - DNA, 306 bp, Zea mays
cccacgcgtccgggagaagctcaggcccctgtggaggcactacttcaacaacactgatgctctgatttacgtggttgattcactggatagagagagaatcgggagagccagggcggagtttcaggctataatcaatgacccttttatgcttaacagtgtgttattggtgtttgctaacaagcaagacatgaggggagcaatgactccgatggaagtgtgtgagggccttgggctgtatgacctgacgaaccgcatctggcacatccagggcacctgtgctctaaaaggcgatggcctgtatgaagg

SEQ ID NO: 15504 - DNA, 307 bp, Zea mays
gaagaagacgagtgtcaagtgaacctgaaacttgcggtgtcactggctggtagcctgagtgtgagtgagtgatcgagctagctgagctccgatcctcgctagctaggataccgccataccacaagtcttcttcacaagtttaggagtgacagcaacaagagatcgatggcctctgccaccgtgctcaagtcctccttccttcccaagaagtccgaatggggcgccaccaggcaggccgccgcgcccaggccgcccaccgtctccatggtcgtccgcgcctccgcctacgccgatgagctcgtgaaga

SEQ ID NO: 15505 - DNA, 310 bp, Zea mays
ctccggcgtccggcaagggcacacagtgcgagctcatcaagaccaaatatcaactggcgcacatctccgctggagatttgttgcgggcggaaatcgctgctggctctgagaatgggaagcgggccaaggaattcatggagaagggccagctcgtgcctgatgagattgtcgttaatatggtgaaggaacgccttcggcaaccagacgctcaagaaaatggttggcttttggacgggtacccaagaagctattcacaggccatggccctggaaactcttgaaatccggcctgatactttcattctgttaga

SEQ ID NO: 15506 - DNA, 307 bp, Zea mays
gtttagttgcaccctggatggttgtgatatgaggttcagtatgaaggcagatatgcaacggcatgttaaggaaatccatgatagtaagaacccccatcaatttgtttgtaaggaggacggctgtaacaaggttttcaggtattcatcaaagctgaagaaacatgaggaatctcatgttaaattggactatgtggaggtagtgtgctgtgagccaggttgcatgaagatgttcagaaatgttgaatatctgagggctcataaccaatcttgccatcagtatgttcagtgtgagatatgtggagaaaag

SEQ ID NO: 15507 - DNA, 308 bp, Zea mays
aagtgaacctgaaacttgcggtgtcactggctggtagcctgagtgtgagtgagtgatcgagctagctgagctccgatcctcgctagctaggataccgccataccacaagtcttcttcacaagtttaggagtgacagcaacaagagatcgatggcctctgccaccgtgctcaagtcctccttccttcccaagaagtccgaatggggcgccaccaggcaggccgccgcgcccaggccgcccaccgtctccatggtcgtccgcgcctccgcctacgccgatgagctcgtgaagaccgcgaaaacgatcgcg

SEQ ID NO: 15508 - DNA, 310 bp, Zea mays
cccacgcgtccgggaagggttcggcgtgaacacgtacacgttcgtgagcgcggcggggaaggcgcagtacgtcaagttccactggaagccgacgtgcggcgtgcggtgcatcctgacggacgaggaggcggcgctggtcgggggacggaaccacagccacgcgacgcaggacctgtacgactccatcgcggcggggagcttcccggagtggacgctgtacgtgcaggtgatggacccggacacggaggagcagtacgacttcgacccgctggacgacaccaagacgtggccggaggacctgctgccgctc

SEQ ID NO: 15509 - DNA, 310 bp, Zea mays
caagcaagcaagcaagcagcgagtacatacatactaggcagccaggcagccatggcgcccaccgtgatgatggcctcgtcggccaccgccgtcgctccgttccaggggctcaagtccaccgccagcctccccatcgcccgccgctcctccagaagcctcggcaacgtcagcaacggcggaaggatccggtgcatgcaggtgtggccggcctacggcaacaagaagttcgagacgctgtcgtacctgccgccgctgtcgacggacgatctgctgaagcaggtggactacctgctgcgcaacggctggatac

SEQ ID NO: 15510 - DNA, 310 bp, Zea mays
tcccgcttccgagcttagggagcacctgttcatcttgcgaagcagtgatgccacacgccatctgtttgaggtgtcagctggccttgactctttggttctcggtgaaggacaaatccttgctcaggttaaacaagttgtgaggagtggacagaacagtggaggcttgggaaagaacattgataggatgttcaaggatgcaatcactgctggaaagcgtgtccgctgcgagaccaacatatcatctggtgctgtttctgtcagttcagcggcggttgaactggccctgatgaagcttccgaagtctgaagca

SEQ ID NO: 15511 - DNA, 313 bp, Zea mays
cccagaaggtgactggttttctacaggggtttatacgactggaaatccttatggcatagcagaggatatcgtgttcagcatgccatgcagatcgaagggtgatggtgattacgaactagctagtgatgtgttgatggacgattttctctgggaacggattaaaaagagcgaactgtaattgcttgctgagaagaaatgcgttgcccatcttacaggagaggggaatgcattctgtgatcttccggaagataccatgctaccaggagaagtgtagtttagttacagaagcaacagcagcggaatgcatttgcca

SEQ ID NO: 15512 - DNA, 316 bp, Zea mays
gccgtcacggcgctccccaggaatgggcagcgggcgtcgtcctccttcctcggcggcaagacgctgctgagacaggccgatgcggcccggccgtcgttcgccgtgcgcgccgcggcggaccccaacaggccgatctggttccccggcagcacccctccgccgtggctcgacggcagccttcccggcgacttcggctttgatccctggggcctcggatctgacccggagagcctgcggtggaacgtgcaggcggagctggtgcactgccggtgggcgatgctcggcgcggcgggcatcttcatcccggagttcctga

SEQ ID NO: 15513 - DNA, 303 bp, Zea mays
aatacaatggtggccttgacactgaggaatcttacccttaccaaggtgtcaatggaatctgcaagtttaagaatgagaatgttggagtcaaggttttggactcggttaacatcaccctgggtgctgaggatgaactgaaggatgctgttggtctggttcgcccagttagcgttgccttcgaggtgatcactggtttcaggctgtacaagagcggagtttacactagcgaccattgtggaactacaccgatggatgtgaaccacgctgttctggctgttggctacggtgtcgaagatggtgtcc

SEQ ID NO: 15514 - DNA, 305 bp, Zea mays
cccacgcgtccggagccatcgacacgatcgcgagcgcaacacgtacgttgtcggaagctcaagttagaagaagcaccagtgcctgatcgatggcggcccaggctctcctctccggccggcagctgctgggccgccccgtgcagtcggccgtctctaggtcgtcggcgaggaaggcgcccttcgtcgtcagggccagctccagccctccagccaagcaaggtgccgacaggcagctgtggttcgcgtccaagcagtccctctcctacctcgatggcacgctgcccggcgactatggcttcgacccg

SEQ ID NO: 15515 - DNA, 306 bp, Zea mays
atcccgtcgcatcccatcccactaccacccatctcgtcgtccgccgattcgatccggttcttccaacccaggggctgtgatggcgacgaagaggagcgtgggcaccctcggcgaggcggatctgaacgggaagaaggtgttcgtgcgcgccgacctcaacgtccctctcgacgacgcccagaagatcaccgacgacacccgcatccgcgcctccgtccccaccatcaagttcctcctcgagaagggcgccaaggtcatcctcgccagccacctgggtcgtccaaaaggtgtcaccccaaagtacag

SEQ ID NO: 15516 - DNA, 296 bp, Zea mays
cagctccgttggagctccggacagcagcaagcgcggggcggtcacgtagtaagcagctctcggctccctctccccttgctccatatgatcgtgcaacccatcgagctacgcgcgtggactgccttccctgggtcggcgcaggaggggattcggaaggatgacggcatcggtttccaggggcatctgcgtacagaagccgggctcaaaatgcaccagggacagggaagcgacctccttcgcccgccgatcggtcgcagcgccgaggcccccgcacggcaaagtccgcggcgtcatcc

SEQ ID NO: 15517 - DNA, 307 bp, Zea mays
actttgaggaagaacccggaaccagaaccagggaggtgtcggcgaacagatggtaagaaatggcgatgttggagaaacactatcccaaacgagaaatactgcgaacgtcacatgcatcgtggccgcaagcgtcctgtacaggttttcctggaggacgacgagcccgattctgcttcagggtcaaaacccgccgctcctggcaaggctaccgaagtgccaagaaggccgatgacaagagcccaagcagcaagaagcttgcagtggcagcgcctgccgctgtgcagtctacatagtcaattgcagcttt

SEQ ID NO: 15518 - DNA, 308 bp, Zea mays
catttttgagaacatacatactatggaagatttgctaaagatgactgaatggacagaagaaaggccactacgtgttgttactggatttggatatctaggcaataagttcttaagagagaaaggttttaagcatgttcgttttttatctgccgatggagctcttgagtcatatcctcctatgggtatggctgatgctattgtggatctcgtgagtagcggaacgaccttgcgtgagaataacctaaaggaaattgatggtggagtagttctggaaatccaggccactcttgtagcaagtaggaaatctc

SEQ ID NO: 15519 - DNA, 310 bp, Zea mays
gctagcgcttatagcttgtcagccatggccaccgccgccgcgtctagcctcctcaagtcctccttcgcgggctcccggctcccggccgccacgcggaccacaccggcgtccctcgtggttgccaccggcccgctcggcgccggcgcggggcccatctgcgcgtccatgtccatgtcctcctccaacccgccctacgacctgacgtccttccggttcagccccatcaaggagtccatcgtgtcccgcgagatgacccgtcgctacatgacggacatgatcacctacgccgacaccgacgtcgtcatcgtgg

SEQ ID NO: 15520 - DNA, 310 bp, Zea mays
caaccggtccagcactttcacgctcagctccagcaatggctgcctccaccatggcgatctcctccacggcgatggccggcacccccatcaaggtgggctccttcggcgagggccgcatcaccatgcgcaagaccgtgggcaagcccaaggtggcggcgtccggcatcccctggtacggccccgaccgcgtcaagtacctcggccccttctccggcgagcccccgagctacctcaccggcgagttccccggcgactacggctgggacaccgccgggctgtccgccgaccccgagaccttcgccaagaaccg

SEQ ID NO: 15521 - DNA, 312 bp, Zea mays
cactaaagcattgagcacacttcaaagatcatcactcgttgagaaatctaggcagaaaccacaagaaaggatgtctgttttgtctgatgtgctgcaaagaagcaactatgatgcagaacccatgctgaaggcttgtgggattacaattgctagaaatttcatagaagttgatggtagggtactgcagccccctaagcttaaagctgggaacggagaagacatttttacgcgcaatggcagatggaatttcaataataagaagctcattagagctagcagtgtcgagaaatgggcagtagtaaacttttctgc

SEQ ID NO: 15522 - DNA, 108 bp, Zea mays
gtcttcacactcctcgccatcacataaaaccagtgcaagcagaagcagcgcaatggcgagcagcaccatggccctctcctccacagccttcgccggcaaggcagtgaa

SEQ ID NO: 15523 - DNA, 298 bp, Zea mays
cggaccgtgggcggacgcgtgggcaagaacaagggcagaatggctcgttacctggcaaacaaatgctcgattgcttcacgcattgactgctactcggaggctagtacctctgtcttacggcaaaagttgcgcgacaagtcgaggagagactggaattctatgacaagggtgttgcgcctcgtaaaaatcttgatgtgatgaaagctgctattgacagtatggtcaatgacaccttaatggatgatgatggtaaggcagataatgagaaggcggacacatctgccaagaaaagcaagaa

SEQ ID NO: 15524 - DNA, 299 bp, Zea mays
cccagagataatggttcctcttgttggaacaccacaggaactggggcatcaagtgactcttatccgccaagttgctgagaaagtgttcgccaatgtgggcaagactatcgggtacaaagttggaacaatgattgagatccccagggcagctctggtggctgatgagatagcggacaggctgaattcttctccttcggaacgaacgacctgacgcagatgacctttgggtacagcagggatgatgtggggaagttcattcccgtctatcttgctcagggcatcctccaacatgacccctt

SEQ ID NO: 15525 - DNA, 298 bp, Zea mays
accacgcgtccgcggacgcgtgggcgaccgtggaggagcgccatgctcgtcaaccactacaagtaccaggtctgggaggtgttcaaggacaagttctccgggcgcgtcgcgacctacgtcgccgactgctgggacgaggagaacgtcgggtccagggacagggcgccggggctggggactaggccggtggagccggaggactggccgcgccggttctgcgaagtgtacgacaccgggcttaaggatttcgtgcagaaggcgttcgcagacccggccactggaagccttccatggtaga

SEQ ID NO: 15526 - DNA, 302 bp, Zea mays
cacaccacaccacacctcctcgcttccactccgctcgtctgacatctcgtcccgtcctttcgtttcgaagcctcgcgagccccgacgatggccaccgccgcggtgtcggtcgacgagaagctcgacaagcttcgcgccgaggtcgccaagctcgaccagatcagcgagaacgagaagtccgggttcatcagcctcgtgtcacgctacctcagtggggaagcggagcagatcgagtggagcaagatccagacccctacggatgaggtggtggtgccctacgataccgtcgcgtcgcctcccga

SEQ ID NO: 15527 - DNA, 225 bp, Zea mays
ctgacgcgtgggcggacgcgtgggacgagggcgactacgaccacagcgtcgcggacatcatcagctacgcgtcctgcacgaccaactgcctcgcgccattcgtcaagcatcttggacgagtgagttcggaattgtcaaggggaccatgacgacgacgcactcgtacaccggcgaccagaggctgctggacgcgtcccaccgcgacctccggcgggcccgctcggc

SEQ ID NO: 15528 - DNA, 303 bp, Zea mays
cgaagattcgttctacttcttcaatgagatgcagaaggaccacgtccagcctagcgtggttaccatgtctgtgttgctgcgggcttgcgcagggctggctttgctggcgaaagggaaggagctgcattgcttcgcactgcgaagaagagcgtatgaccacgacatggttgttgcaacagccctaatcgacatgtactccaagtcaggaaacctggcaagtgcaacgcggatattcgaaaggattcaggaggagaagaatttggtgtcctggaatgcgatgctcaccgggctggcagcacatgg

SEQ ID NO: 15529 - DNA, 303 bp, Zea mays
ctctctgcaggtgcagccatggcgaagccgtctccatccaggtgtggaaccccagcggcaagtaccgcgtggtgagcaccaagtccatgccgggcacacgatggatccgcctgctcaccgacaacgactgccgccttgagatatgcaccgagcacaagaccatcctctccgtggacgacatcctggcgctcatcggcgatcgctgcgacggcgtcattggacagctcaccgaggactggggggacgtgctcttctctgcgctcaagcgcgccggaggcacggtcttcagcaacatggccgtcg

SEQ ID NO: 15530 - DNA, 305 bp, Zea mays
gcaaccggtccaacactttcacgctcaggcgctcagctctagcaatggctgcctccaccatggcgatctcctccacggcgatggccggtacccccatcaaggtgggctccttcggcgagggccgcatcaccatgcgcaagaccgtgggcaagcccaaggtggcggcgtccggcatcccctggtacggccccgaccgcgtcaagtacctcggccccttctccggcgagcccccgagctacctcaccggcgagttccccggcgactacggctgggacaccgccgggctgtccgccgaccccgagacc

SEQ ID NO: 15531 - DNA, 318 bp, Zea mays
gtcgcccgccgcagcaccaggagcctcggcaacgtcagcaacggcggaaggatccggtgcatgcaggtgtggccggcctacggcaacaagaagttcgagacgctgtcgtacctgccgccgctgtcgacggacgacctgctgaagcaggtggactacctgctgcgcaacggctggataccctgcctcgagttcagcaagctcgggttcgtgtaccgcgagaactccacctccccgtgctactacgacggccgctactggaccatgtggaagctgcccatgttcggctgcaccgacgccacgcaagtgtacaaggagctg

SEQ ID NO: 15532 - DNA, 316 bp, Zea mays
cacacagaaaaccctagccgccgccaccgaagcggcctcccaggtaagcaggagcgtccaccccgccgccgtcatgaagcgcaatccccgcgtcacgagctcccgccggaagtgccgcaagcgcactttacggccccgtcctccgtccgccgcgttctcatgtccgccgggctgtcgacggagctccgccacaagtacaacgtgcgctccatcccgatccgcaaggacgacgaggtgcaggtcgtgcgcggcacctacaagggccgcgaggggaaggtggtgcaggtctaccgccgccgctgggtcatccacgtcg

SEQ ID NO: 15533 - DNA, 311 bp, Zea mays
atccttttccccactcccgggtctccagcattcctatcctctacccgcccgcacgtgccgccgccgcgcttcccttcctctcccgagccaagatgaatgttgaaaagctcaagaagatggcaggtgctgtgcgcaccggggggaagggtagcgtgcgcaggaagaagaaggcagtccacaagactacaaccacagatgacaaacggcttcaaagcaccttgaaaagaataggagtgaacagcattcctggtattgaagaggtcaacatctttaaggatgatgttgttattcagtttgtaaatcctaaagtg

SEQ ID NO: 15534 - DNA, 312 bp, Zea mays
ggagatcaaatactcgaagtctcaaggaaatggcattgcttttacgtggtggttcacagttaatttggattgcaccgagtggtggtagagaccgcccaaatccctcatcaggagaatggtacccggcaccattcgattcatctgcagtggacaatatgaggaggcttctggagcatgctggtgttcctgggcacatatatccactatcattgctgtgctatgaggttatgcctccaccacaacaggttgagaaggagattggtgagcagagggtgatatccttccatggagcaggcttgtcagtaactgaag

SEQ ID NO: 15535 - DNA, 287 bp, Zea mays
catacttcgctacctgtggtggactggtggtaaagtgaaccaggaacaatttgatttcaaatatacagttttggtttgattttatggcacttatccttggtgttttgtttcgattgccattattggttgatgctttttagttttcacaattctgaatttaaattttatctttatgttatgcatgtagtaccagaagtacttcagaaaaggaacttgtaagagagcaggtctttgtccttggtcgaatgggaaatgctaaggaacctctttcgacaattataaataaa

SEQ ID NO: 15536 - DNA, 307 bp, Zea mays
agcgactcagcgagcgagagcagcacacacgcagctagctaggagcagcagcagagcagcggcgatggcggcctccatgatctcctcgtcagctctggcggtggcgcctcagggcctgccgcccctcggccgccgcgcctcctccttcgccgtcgtctgctccaagaagaagatcaagaccgacaagccctacgggattgggggtggcctgaccgtcgacgtcgacgccaacgggagaaagggcaagggcaagggcgtgtaccagttcgtcgacaagtacggcgcgaacgtcgacggatacagccca

SEQ ID NO: 15537 - DNA, 307 bp, Zea mays
agaggctggacttcgccgacttctccgggctcaggccggggtcgtgctccgtgagcgctgccgcgcgtgtaggcgtccttctccgacgtccttggcgcgcactcgtcgccaaggccaccggggagaacgccgtgagggcgcccgccgaggcgaactgtaaggtggcgatcaacggcttcggccgcatcggccggaacttcctccggtgctggcacggccgcgaggactcgccgatcgacgtcgtcgtcgtgaacgacagcagaggcgtcaggaacgcgtcccacctcctcaaatacgactcgatgct

SEQ ID NO: 15538 - DNA, 306 bp, Zea mays
cggacgcgtgggcaagccagcggcggcgtccgggagcccgtggtacggccccgaccgcgtgctgtacctgggcccactgtccggcgagccaccgagctacctgacgggcgagttcccgggcgactacggctgggacaccgcggggctgtcggcggacccggagacgttcgccaagaaccgggagctggaggtgatccactcccgctgggccatgctgggcgcgctcggctgcgtcttccccgagctgctcgcccgcaacggcgtcaagttcggcgaggccgtgtggttcaaggccggctcccagat

SEQ ID NO: 15539 - DNA, 300 bp, Zea mays
cccacgcgtccgcgttgtcggaagctcaagttagaagaagcaccagtgcctgatcgatggcggcccaggctctcctctccggccggcagctgctgggccgccccgtgcagtcggccgtctctaggtcgtcggcgaggaaggcgcccttcgtcgtcagggccagctccagccctccagccaagcaaggtgccgacaggcagctgtggttcgcgtccaagcagtccctctcctacctcgatggcacgctgcccggcgactatggcttcgacccgctgggcctctcggacccggagggcaccg

SEQ ID NO: 15540 - DNA, 296 bp, Zea mays
ggaccaatctgccaccacactttgatcacacacaggaagttgagatcagaaaaatgcaggctgccgctactgccgccgggttctcggccgtgctgcccgccaagggcaggccggcggcgaggagcagggtggtggcccgtgtccccgccacaaggaggagcgtccgtgtagctgccgtcgtcgcgaccgaggccgcgcagatcgactacagctcaagcgtctcggtgttcccgatggaggcctgcgacctgcttggtagcgacgcgtgcaacgggcccatgttcccggaggccaag

SEQ ID NO: 15541 - DNA, 298 bp, Zea mays
catgatcgtgtccctttgaaggaaatgaaatcagattggcatgcttgcctggacaacaaagttgggttcaagggttttgcagtgccaaaggagcagcaggataaggttgtcaaatttgactttcatgggcagccagcagaaatcaagcatggtagtgttgttatagcagcaataactagctgcacaaacacctcaaatcctagtgttatgcttggtgctggtcttgtagctaagaaagcttgcgagttgggtcttgaggttaaaccatgggtgaagacaagccttgcccctggatcag

SEQ ID NO: 15542 - DNA, 297 bp, Zea mays
cgttgccatggccaaaatggtgttgctctgcgtgctcgtctccttcctcctgatgcccttggcctccctagccctgacgcaggacttctgcgtcgccgacctgacctgcagcgacacgccggcggggtaccgtgcaagtccagcgtcaccgccaacgacttctacttccacggcctggccggccagggcaaaataaacccactcatcaaggccgccgtgaccccggccttcgtgggccagttcccgggcgtcaacgggcttggcatctctgcggccaggctcgacatcgaggtgggc

SEQ ID NO: 15543 - DNA, 300 bp, Zea mays
aaagagctcgtgggtcagtacaaggaggtctacctctcagccaagggagagccattcccctcagaccccaagaagcagctggagctagcagtgctggctgtgttcaactcgtgggagagccccagggccaagaagtacaggagcatcaaccagatcactggcctcaggggcaccgccgtgaacgtgcagtgcatggtgttcggcaacatggggaacacttctggcaccggcgtgctcttcactaggaaccccaacaccggagagaagaagctgtatggcgagttcctggtgaacgctcag

SEQ ID NO: 15544 - DNA, 300 bp, Zea mays
ccatgctctccgctaccaccgtgccactccagcgggggggcggcctgtccgagttctccgggctcaggagctccgcgtcgctgcccatgcgccggaatgccacctccgacgacttcatgtccgccgtctccttcaggacccacgcggtcggcacgagcggcgggtcgcggcgggcgccgacggaggcgaactgcaaggtggccatcaacgggttcggccgcatcgggcgcaacttcctgcggtgctggcacgggcgcggcgacgcctcgcccctcgacgtcatcgccatcaacgacaccg

SEQ ID NO: 15545 - DNA, 299 bp, Zea mays
cgcctcctcgtcctccaccaccgccgtcacggcgctccccaggaatgggcagcgggcgtcgtcctccttcctcggcggcaagacgctgctgagacaggccgaggcggcccggccgtcgttcgccgtgcgcgccgcggcggaccccaacaggccgatctggttccccggcagcacccctccgccgtggctcgacggcagccttcccggcgacttcggctttgatccctggggcctcggatctgacccggagagcctgcggtggaacgtgcaggcggagctggtgcactgccggtgggcga

SEQ ID NO: 15546 - DNA, 300 bp, Zea mays
cggaccgtgggcgagacgcgtgggtccgcctccgcctgatccatccaagacagggatcgccatgtcggactcggaggagcaccacttcgaatcgaaggccgacgcaagggcgtccaaaacctacccgcagcaggctggcaccgtccgtaagaacggcttcatcgtcatcaagaaccgtccctgcaaggttgtggaggtttctacctccaagactggtaagcatggccacgccaaatgccactttgtcgccatagacatattcaatgggaaaaagcttgaagatattgttccttcatcaca

SEQ ID NO: 15547 - DNA, 299 bp, Zea mays
tgctcgatgagtgcctcaccgtgctcggtgtggaacggctcagtatcgacgaggtgcagcgcatcgagtggaagcatctcaatgacaagatgaagaagtgggtgcatggggtcaagacagttgttcgctgcctgctcaccggtgagcgccggctctgtgaccaggtgcttgctgtgtccgacgagctccgggatgagtgctttgtggagtccaccaagtgctgcatcatgcagatccgtaactttggggatgctgtctctgtgtgcactcgctcgcccgagaagctttcccggatcctt

SEQ ID NO: 15548 - DNA, 303 bp, Zea mays
cactcctcgccatcacataaaaccagtgcaagcagaagcagcgcaatggcgagcagcaccatggccctctcctccacagccttcgccggcaaggcagtgaacgtgccgtcgtctctcttcggcgaggcccgcgtgacgatgcgcaagacggcggcgaaggcaaagccggcggcgagctccggcagcccgtggtacggccccgaccgcgtgctctacctgggcccgctgtccggcgcgcccccgagctacctgacgggcgagttcccgggcgactacggctgggacaccgcgaggctgtcggcg

SEQ ID NO: 15549 - DNA, 297 bp, Zea mays
gacgcggcccgttgtcctcggcttgtacgcaatccttccgtcgctgcgaagtgatccctcgtgttcgccatggccacctacgtcgccgtggaaaacctataccccaaggtcttgaaatgtgagtatgcagtccgtggcgagattgtcatccatgctcagcgcttgcagcaacaactacaaacacaaccagggtctcttccttttgatgagatcctgttctgcaacattgggaatcctcaatcccttggtcagcaacctgtgacgttcttcagggaagttcttgctctttgtgatcat

SEQ ID NO: 15550 - DNA, 314 bp, Zea mays
ggtttatgtggatggcacaacaaccatgtcgactcatgagaggaaagccagcatcagagcattctatgctgtgatatttccttatttgctgcaactgcaaagggggatcactgatgtcgaggacaagaagcagaaggccgtatgcatggagaagtacagaaagaaagatgaggatggacgggacaccttatctgatattgatgttgagagggaagaggagtgtgggatttgcatggagatgaacagcaaagttgtgttgcccaactgcacccatgatatgtgtatcagatgttaccaggactggagttcaagat

SEQ ID NO: 15551 - DNA, 301 bp, Zea mays
ccgaggagagactctcagatgacaagtggccagaatactatgaaaaccggtctgggaggttcgtagggaagcaatcccgatcttatcagacatggactattgctggtttcctgacctcaaaaatgttgctggagaaccccgagctggcttctattcttacctgcgatgaggaccttgagcttctccaaggctgtgcttgctgcctgtccaagaagaggaccaggtgctcacgccgggtggccaagccacatgctggggtgaagctgtgaagctcatgttgttctttctactgcagacgcac

SEQ ID NO: 15552 - DNA, 306 bp, Zea mays
ccacggatctggaaatggcaaccgaacagagcgagctggatctatcctatgggatgcggtacaatgacgtaaaaatcccagaagcatacgagcgtctcatcttggacacgataagaggagaccagcagcacttcgttcgccgagatgagctgagggccgcatgggaaatcttcactcctttgcttcacgacatcgatggtggcaagctcaggtccgttccgtacaagccgggaacccgaggaccgcatgaagccgacgagttgagcaggaggatggggtatgtgcagacccatgggtatgtatggg

SEQ ID NO: 15553 - DNA, 277 bp, Zea mays
ggcgtgctcttcaccaggaaccccaacaccggagagaagaagctgtatggcgagttcctggtgaacgctcagggtgaggatgtggttgccggaataagaaccccagaggaccttgacgccaatgaagaacctcatgccacaggcctacgacgagcttgttgagaactgcaacatcctggagagccactacaaggaaatgcaggatatcgagttcactgtccaggaaaacaggctgtggatgttgcagtgcaagacagggaaacgtacgggcaaaagt

SEQ ID NO: 15554 - DNA, 281 bp, Zea mays
caagggcctcctgtctgctctcacttcctcagtcctcgtccgtctctgctccgatcgctcctctctctacctagctagctagccagccttcctgtagcgcggcagatatggctgcctccaccacggcggcggcggcggcgtcgctgctgctgctgctgctcgtgtcgctcgccgcggcggcggacatgtcgatcgtgtcctacggggagcgcacgccgagggaggcgcggcggatgtacgcggagtggatggcggcgcacggccggacctacaacgccgtc

SEQ ID NO: 15555 - DNA, 296 bp, Zea mays
caaagtttgttagtgacctattcttggttggactgttctaccatctgtacaaccagattgctacgaacaccttggagcgagtggctcctctgacacatgctgtgggcaatgtgttgaagcgtgtgtttgtcattggcttctcaatcgttgtttttggcaacaaaattagcacacaaactggaattggcacgtccattgccatagctggtgttgctatgtactcttacattaaggctaagattgaagaggagaaaaggaaaaagagcgcatgatgagctgactgctgtgaatatttt

SEQ ID NO: 15556 - DNA, 337 bp, Zea mays
cggacgcgtggggcagcctcatccccttgcccacttctacagcccctctgctgcagcaagaaggaaagaagctatcgcttatagcttgtcagccatggccagcgtcggccgggtctagcctcctcaagtcctccttcgcgggctcccggctcccggccgccacgcggaccacaccggcgtccctcgtggtggccaccggcccgcgcggcgccggcgcggggcccatctgcgcgtccatgtccatgtcctcctccaacccgccctacgacctgacgtccttccggttcagccccatcaaggagtccatcgtgtcccgcgagatgacccgtcgctacat

SEQ ID NO: 15557 - DNA, 325 bp, Zea mays
tgggcaagacccatgctggcgacgagccatggaggaggaactgcgcgccatagaggacaaccacacctggacactcactgagttgccatctgggcagcgagccatttggctcaagtgggtattcaaagtcaagaaggatgaacacggtgccgtggtacggcacaaggcacggctcgtcgcaaaaggctacgctcagcgccaaggaatcgactacgacgaggtgtttgcaccggtcgctcgcttggaagcggtacggctgctgctggcgttggcggcgcaggagggatggcaagtccatcacatggacgtcaagacagcgttcttg

SEQ ID NO: 15558 - DNA, 330 bp, Zea mays
cgtcactcaacacagcacaggcagctcgagagagagagagagagaaagatgtcgtggttcgggcaccaccaccacaaccagccggctcccccggcgtcgggccccaacccaggtgttcaagatcttctgccgcgccaacgagaactactgcctggccgtccgcgacggcgccgtcgtgctggccccggtcaaccccaaggacgaccaccagcactggtacaaggacatgcgcttcagcacccgggtcaaggacgaggaaggcatgccggcgttcgcgctcgtcaacaaggccacggggctcgccatcaagcactccctcggccagtccca

SEQ ID NO: 15559 - DNA, 325 bp, Zea mays
cccacgcgtccgtgggaactttcatggcctgggtggatgatgttagaaagctcaaggtcctggctaacgccgatacccctgatgatgcattgactgcgcgaaacaatggggcacaaggaattggattatgccggacagagcacatgttctttgcttcagacgagaggattaaggctgtcaggcagatgattatggctcccacgcttgagctgaggcagcaggcgctcgaccgtctcttgccgtatcagaggtctgacttcgaaggcattttccgtgctatggatggactcccggtgaccatccgactcctggaccctcccctcca

SEQ ID NO: 15560 - DNA, 325 bp, Zea mays
cagctattaaatcagtatttggacaagaggtccaacagcaggatgcagcgaacaaattagagcaactcagagaaaggatggtcaaagtaagagagcttttccgcgacacggaatcaacagagtttataatcgtgacaatcccaacggtgatggcaatcagtgagtcatcaagactgcattcttcgttgcaaaaggaaagtgttcctgtaaggagactcattgtgaaccaagttctgccaccttcaacatcggactgtaaattctgttctataaaaagaaaggatcaaacgcgtgcattggatatgatacggactgacccagagtt

SEQ ID NO: 15561 - DNA, 323 bp, Zea mays
tgctgaggatgctgaagcatggcattcccaagggaaagctgctattctggtaagggcggagaccagccctgaggacgttggtggcatgcacgctgctgtggggattcttacagagaggggtggcatgacttcccacgctgctgtggtcgcacgtgggtgggggaaatgctgcgtctcgggatgctcaggcattcgcgtaaacgatgcggagaagctcgtgacgatcggaggccatgtgctgcgcgaaggtgagtggctgtcgctgaatgggtcgactggtgaggtgatccttggaaagcagccgctttccccaccagccctta

SEQ ID NO: 15562 - DNA, 327 bp, Zea mays
ggaaactatgattccttttatgagatgggcattgagttttcctctgagcagatactgaagctaacaagggaaacaaggaagatgcttccagacatcaccttatccataacaagttcctcacacacttagtttgccagatcagatgagactagcagagctactcgaagaggaaggagctgatataatccaaactgagggtgggaaatgttctagcccgacaaaacctggagtgcttggattgattgaaaaggcaacaccaacactcgccgcagcatactccatctctcgggctgttagtattccagtgatgtgctcgtcagggttaag

SEQ ID NO: 15563 - DNA, 321 bp, Zea mays
catatgtagacttccttcattcttctctagtgcccttttcaagaaaatcgatgttgcatgcactggaactgtctcgagggatgcatttgttgagtactggatggatgacaataagattacaatggatatggctagtcaaatatttgaaattttaagaaagccaggttgcacatatctcactcaggatgacttcaagcctgtcctgaaagaactacttgcaactcaccctggcttagagtttttacaagggacccccgagtttcaggagagatatgcggagactgtaatatacagaatcttttactccataaatagatctgg

SEQ ID NO: 15564 - DNA, 321 bp, Zea mays
cccacgcgtccgaccacgcgtccgcggacgcgtgggaagaagacgagtgtcaagtgaacctgaaacttgcggtgtcactggctggtatagcctgagtgtgagtgaatgatcgagctagctgagctccgatcctcgctagctagctaggataccgccataccacaagtcttcttcacaagtttaggagtgacagcaacaagagatctcgatggcctctgccaccgtgctcaagtcctccttccttcccaagaagtccgaatggggcgccaccaggcaggccgccgcgcccaggccgcccaccgtctccatggtcgtccgcgc

SEQ ID NO: 15565 - DNA, 318 bp, Zea mays
acagcacagagtgaggtaagcatccgaaaaaagctgtgatctgatcgacatggccgccgccaccatggctctcacctcccgcgcgctcgtcggcaagccggcgaacagcacagggacgtcttcggcgaggggcgcatcaccatgcgcaagactgctggcaagcccaagccagcggcgtccggcagcccctggtacggggccgaccgcgtcctgtacctgggcccgctgtccggccagcccccaagctacctgaccggcgagttccccggcgactacggctgggacaccgcggggctgtccgccgacccggagactttc

SEQ ID NO: 15566 - DNA, 315 bp, Zea mays
agcaagcagcgagtacatacatactaggcagccaggcagccatggcgcccaccgtgatgatggcctcgtcggccaccgccgtcgctccgttccagggggtcaagtcggccgccagcctccccgtcgcccgccgctcctccagaagcctcggcaacgtcagcaacggcggaaggatccggtgcatgcaggtgtggccggcctacggcaacaagaagttcgagacgctgtcgtacctgccgccgctgtcgacggacgacctgctgaagcaggtggactacctgctgcgcaacggctggataccctgcctcgagttca

SEQ ID NO: 15567 - DNA, 314 bp, Zea mays
ccatgaagaacctcatgccacaggcctacgacgagcttgttgagaactgcaacatcctggagagccactacaaggaaatgcaggatatcgagttcactgtccaggaaacaggctgtggatgttgcagtgcaggacagggaaacgtacgggcaaaagtgccgtgaagatcgccgtggacatggttaacgagggccttgttgagccccgctcagcgatcaagatggtagagccaggccacctggaccagcttctccatcctcagtttgagaacccgtcggcgtacaaggatcaagtcattgccactggtctgccag

SEQ ID NO: 15568 - DNA, 268 bp, Zea mays
accacgcgtccgaccacgcgtccgcggacgcgtggggatcaactggttggactacaagaagcagctcaagaagagcgagcaatggaacgtcgaagtctactgatgatgatccttcattgaattgttcagctcaagcaatctggtggtgatgagtttgcattgcattgtacgtagtattgcggagatcaatcgaatcgtttggctcgtcgtcattctatcgatgtacatacattatatatgatgaaagacatatataatcgtttctttc

SEQ ID NO: 15569 - DNA, 314 bp, Zea mays
catcgatctacacacatacatagtttcttctactacacgacgacaaacatggggaagcctgcgaagatcggagagtggggtggatacgccggcgatcgtcgggatctgaaggctactccggaccggctgatcgaggtgaaggtcacggcggacaacagcagctgcatccgctccatctccttcatctacatcggagccgatggcaaaccgtacgaggaggggccatggggtttcggccatgctggcacggagtacaagattgatctgtgcaggttcgacgagagcttgacggagatctccgggaccacgggccc

SEQ ID NO: 15570 - DNA, 321 bp, Zea mays
agccccgccggccgccggtcggcccgctcgtcgcctcgcagcaccaaggctgtggtggcagcgttggctgatcctcgtcaagggtcatgggtatcagggagctccgggcgtccgggcaaggccacgcagtgcgagctcatcaagaccaaatatcaactggcgcacatctccgccggagatttgttgcgggcggagatcgctgctggctctgagaatgggaagcgggccaaggaattcatggagaatggccagctcgtgcctgatgagattgtcgttaatatggtgaaggaacgccttctgcaaccagacgctcaagaaaat

SEQ ID NO: 15571 - DNA, 313 bp, Zea mays
cgacacgatcgcgagcgcacgcacgtaagcacgttgtcggaagctcaagttagaagaagcaccagtgcctgatcgatggcggcccaggctctcctctccggccggcagctgctggggccgccccgtgcagtcggccgtctctaggtcgtcggcgaggaaggcgcccttcgtcgtcagggccagctccagccctccagccaagcaaggtgccgacaggcagctgtggttcgcgtccaagcagtccctctcctacctcgatggcacgctgcccggcgactatggcttcgacccgctgggcctctcggacccggag

SEQ ID NO: 15572 - DNA, 312 bp, Zea mays
cggacgcgtgggcggacgcgtgggctcgctggaccagaacctggccaagaatgaggccggcggcatcatcggcacccggttcgagtcctccgaagtcaagtccacgccgttgtcagccctacagcgaggtgttcggcctccagcggttccgcgagtgcgagctcatccacggccgctgggccatgctcgccaccctcggcgccctctccgtcgagtggctcaccggcgtcacctggcaggacgccggcaaggtggagctggtggacgggtcctcctacctgggccagccgctgccgttctccatctcgacgc

SEQ ID NO: 15573 - DNA, 310 bp, Zea mays
cacgatcgcgagcgcacgcacgtaagcacgttgtcggaagctcaagttagaagaagcaccagtgcctgatcgatggcggcccaggctctcctctccggccggcagctgctgggccgccccgtgcagtcggccgtctctaggtcgtcggcgaggaaggcgcccttcgtcgtcagggccagctccagccctccagccaagcaaggtgccgacaggcagctgtggttcgcgtccaagcagtccctctcctacctcgatggcacgctgcccggcgactatggcttcgacccgctgggcctctcggacccggagg

SEQ ID NO: 15574 - DNA, 310 bp, Zea mays
ggatgcgaacctgcttatcctacaccaaagtgtgaaaagaaatgcaaggagcagaaccaagtttggcaggaaaagaagcatttcagcattgatgcgtacagaataaattcagatccacatgacataatggcagaggtctacaaaaatggtcctgtagaagttgctttcacagtttacgaggatttcgcacactacaaatctggagtgtacaagcacatcaccggtggcattatgggtggccatgccgtcaagttgattggatggggaaccagtgatgctggagaggattactggcttctggcaaatcagt

SEQ ID NO: 15575 - DNA, 309 bp, Zea mays
gttaaagaagtgctgacacattctggcatgaagatcgatgacatctatgctgtagaactaataggaggagctacccgggttccaaaactgcaggctaagctgcaggaatttctgggtaggcgtggcctggataaacatcttgatgctgatgaagcaattgttctcggagcttcacttcatgctgctaacctgagtgacgggattaagttgaaccgtaagttgggaatgattgatggctctacttatgcttttgtacttgagatagatggcctagattatgtcaaggatgaaagtattgcccaaattttg

SEQ ID NO: 15576 - DNA, 314 bp, Zea mays
gcgcaacactttcggctgctgctgcttctgctgctcgcagcggcagcggcggaggcgcgcttcgttgtggagaagaacagcctgatggtgacgtcgccgacttcgttgcggggacgacacgacagcgctatagggaacttcggaatcccacagtacggcgggagcatggcgggcgccgtcgtctaccctaaggacaacgccaaggcttgcgacgatttcgacggcaggcaccccttccgtgccaagccatgcgcgatgccacgttcctcctcatcgaccgcggtgagtgcttaattgcgaagaaggtttggaat

SEQ ID NO: 15577 - DNA, 316 bp, Zea mays
cccacgcgtccggttttcgaggtgctgtctacatcaggtgacactcaccttggtggtgatgactttgacaagagaattgtagattggctcgctgggaacttcaagaatgatgagggtattgatttgctaaaagataagcaagctctgcagcgattgacagaagcagctgagaaggcaaagatggaactgtcatctttgacccaaacaaacatgagcttgccttttattacagctactgcagatggtcccaagcatattgagactactcttaccagggctaaatttgaagagctatgctcagatctccttgacaggc

SEQ ID NO: 15578 - DNA, 318 bp, Zea mays
cccacgcgtccggctgatcccacactgcaacaagactgacaaagcatctatactagacgagacgattgagtacctgaagtccctccaaatgcaagttcagatcatgtggatgacttctgggatggtgccaatggtgtttcctggtgctcaccaatacatgccaccaatggctctaggcatgaattcaggttgcatccctgcagcacaaggcctaagtcagatgcgaagattaccatacatgaaccaccccatgccaaatcatatccctctgaactcgtctccagctatgaatccaatgaatccactgaacactgtgaa

SEQ ID NO: 15579 - DNA, 317 bp, Zea mays
cccatatccgctcccctacctctccagcatctcccgtctccgtcgtctcgtctctgctcctcacctcgccgccagccatgggcaagatcaagatcggaatcaacggtttcggaaggatcggcaggctcgtggccagggtcgccctgcagagcgaggatgtcgagctcgtcgccgtcaacgaccccttcatcaccacggattacatgacctacatgttcaagtacgacaccgtgcacggccaatggaagcacagcgacatcaccctcaaggactccaagacgcttctcttcggcgagaagccggtcaccgtctttggc

SEQ ID NO: 15580 - DNA, 318 bp, Zea mays
gtgccgtcgtctctcttcggcgaggcccgcgtgacgatgcgcaagacggcggcgaaggcaaagccggcggcgagctccggcagcccgtggtacggccccgaccgcgtgctctacctgggcacgctgtccggcgcgcccccgagttacctgacgggcgagttcccgggcgactacggctgggacaccgcggggctgtcggcggacccggagacgttcgccaagaaccgggagctggaggtcatccactcccgctgggacatgctgggcgcgttgggctgcgtgttaccggagctgctcgcccgcaacggcgtcaagttc

SEQ ID NO: 15581 - DNA, 323 bp, Zea mays
gagaacgggaagttcctgctagcagcgaaaaggagccgcaggatggcgcacacggagtatgcaatttttatggactcgaggaatttctcccgatcgagcactggctacattgggaagctaaggtcaaatttccttggaactagatttatcatctacgacacacaggctccgtacaatggcgggagagtttgcacacaggaacgtgcccccagccgtcggttgtcttccaggaaagtttcaccaagagttccaagcggcagctaccccgtcgctcaggtgaactacggagctgaatgtgctgggaacccgagggcccaggcgga

SEQ ID NO: 15582 - DNA, 325 bp, Zea mays
cggacgcgtggggcgcgagaaggtgaagatcgagacgcagcccttctcccccgtggtgcagttcgagcaggaccccgtgcagatcctggacgcgctgctcccgcactacctcaacagccagatcctccgtgccctgcaggagtcgctcgccagcaagctcgccgcccggatgagcgccatgagcagcgccaccgacaacgccatcgagctccgcaagaacctctccatcgcctacaaccgacagcgccaggccaagatcaccggggagatcctcgagatcgtcgccggtgccgacgccctcgctggctgagcctgagtccccttg

SEQ ID NO: 15583 - DNA, 306 bp, Zea mays
  unsure (1)..(306): unsure at all n locations
caccaaggagagtacgtggaggagcagccatggcttcatcggtggccgccgcggcgagcacattcctgggcacccgcctggcggacccggcgccacagaacgggcgcatcgtggcccggttcgggttcgggttgggcggcaaggcgaactnggtccgaagaaggtggcgaagacatcgacctcctctgaccggccgctgtggttccccggcgccgtggcgcccgactacctggacggctcgctggtcggcgactacgggttcgacccgttcggtctcgggaagcccgtggagtacctgcagttcga

SEQ ID NO: 15584 - DNA, 303 bp, Zea mays
gccaggtgttcaacgagataaacagcagggagatgcagaagatcaacgtcttccgcggcatgttcagcaactggatcttcatcggaatcatagccgcgacggtggcgttccaggtggtgatcgtcgagttcctcggcacctttgccagcaccgtcccactcggctggcagctgtggctggtgagcgtcggcctcggatccgtcagcatggtcgtcggcgccgtcctcaagtgcgttccagttgaaccggacgatggagttcgcgccagtccaaatggctacgcgccgctgccacgcggccctg

SEQ ID NO: 15585 - DNA, 310 bp, Zea mays
gacaaacgccggcacgcgcacgcagacacgatggcgatctgcagcgcgcacactaccacctccctgcgctccccatgcacgaccgtctcgaacgcaggtctgaggcagaagcaagtcatcttcgtcaccagcaacaggaggagcggcggcggcaggaggcacggaggggcaaggagcttccaggtctcgtgctccgtcgacaagccggtggtgattggcctggcggcagactcagggtgcggcaagagcaccttcatgcgccggctcaccagcgtcttcggtggcgccgcggagccgcccaagggcggga

SEQ ID NO: 15586 - DNA, 305 bp, Zea mays
agcaagcagcgagtacatacatactaggcagccaggcagccatggcgcccaccgtgatgatggcctcgtcggccaccgccgtcgctccgttccaggggctcaagtccaccgccagcctccccgtcgcccgccgctcctccagaagcctcggcaacgtcagcaacggcggaaggatccggtgcatgcaggtgtggccggcctacggcaacaagaagttcgagacgctgtcgtacctgccgccgctgtcgacggacgacctgctgaagcaggtggactacctgctgcgcaacggctggataccctgc

SEQ ID NO: 15587 - DNA, 303 bp, Zea mays
agcaagcaagcagcgagtacatgcatactgggcagccaggcagccatggcgcccaccgtgatgatggcctcgtcggccaccgccgtcgctccgttccaggggctcaagtccaccgccagcctctgcgtcgcccggcgctcctccagaagcctcggcaacgtcagcaacggcggaaggatgcggtgcatgcaggtgtggccggcctacggcaacaagaagttcgagacgctgtcgtacctgccgccgctgtcgacggacgacctgctgaagcaggtggagtacctgctgcgcaaccgctggata

SEQ ID NO: 15588 - DNA, 311 bp, Zea mays
ggctggccgacctgcagtcggcgcccgcgtccgtggagcgcctcttctcggtggactggtacatggaccggatcaagggcaagcagcaggtcatggtcggctactccgactccggcaaggacgccggccgcctgtccgcggcgtggcagctgtacagggcgcaggaggagatggcgcaggtggccaagcgctacggcgtcaagctcaccttgttccacggccgcggaggcaccgtgggcaggggtggcgggcccacgcaccttgccatcctgtcccagccgccggacaccatcaacgggtccatccgtgtg

SEQ ID NO: 15589 - DNA, 296 bp, Zea mays
cgcaatggcactcgtctccgcctcctcgtcctccaccaccgccgtcacggcgctccccaggaatgggcagcgggcgtcgtcctccttcctcggcggcaagacgctgctgagacaggccgaggcggcccggccgtcgttcgccgtgcgcgccgcggcggaccccaacaggccgatctggttccccggcagcacccctccgccgtggctcgacggcagccttcacggcgacttcggctttgatccctggggcctcggatctgacccggagagcctgcggtggaacgtgcaggcggact

SEQ ID NO: 15590 - DNA, 311 bp, Zea mays
ccgacgtggtgatcgtgggcgccgggtccgcgggcctgtcctgcgcgtacgagctgtccaaggaccccaccgtgagcgtggccatcgtggagcagtccgtgtccccgggcggaggcgcgtggctgggcgggcagctgttctcggccatggtggtgcgcaggccggcgcacctgttcctggacgagctgggcgtgggctacgacgaggccgaggactacgtggtggtcaagcacgcggcgctgttcacgtccaccgtgatgagccggctcctggcgcggcccaacgtgaagctgttcaacgccgtggcggtg

SEQ ID NO: 15591 - DNA, 309 bp, Zea mays
caacacagagcatcagaaggagctgcgatctgatcgacatggctgccgccaccatggctatcacctcccgcgcgctcatcggcaagccggcggctggcacgagggacgtcttcggcgagggccgcatcaccatgcgcaagaccgccgccaagcccaagccggcggcgtccggcagcccctggtacggtgccgaccgcgtcctgtacctgggcccgctgtccggctcgcccccgagctacctgaccggcgagttccccggcgactacgggtgggacaccgcggggctgtcggcggacccggagaccttcg

SEQ ID NO: 15592 - DNA, 298 bp, Zea mays
agttggtctaggccatggccatgtccgcttcctcctcctcgcgcaccctcctccgccggatcggcggcgcgctcctccgccgctccttctcctcctcatccgccgccgccgccgcagggtaccacgtcgcgggcgggcccagctacatgcgcggcgccgtcttctgggagcccggccgcccgctcacgctcgaggagttccgcatgccgcgccccaaggccggcgagctcctcatcaagaccaaagcctgcggggtctgccactccgatctccatgtcctcaaaggcgagctcccttt

SEQ ID NO: 15593 - DNA, 297 bp, Zea mays
cccacgcgtccgttttttttttcatttacatccctgtacatatatttgagtattatgttcatgaaatttccttgtttacatgttttcatgcagaatcaatagccaatttcatttaaactataaaattgctaaatgaaatagcttctgctatatttcactatatctttttatagatcctggaggatttgccacgctatttgcatatatatagatgaaatactggagctcactggaaggaccattgtatctcctcgagagttcttccctttgtctccggcacccaaaggatgacaaaga

SEQ ID NO: 15594 - DNA, 299 bp, Zea mays
cccacgcgtccggacacgatcgcgagcgcacgcacgtaagcacgttgtcggaagctcaagttagaagaagcaccagtgcctggtcgatggcggcccaggctctcctctccggccggcagctgctgggccgccccgtgcagtcggccgtctctaggtcgtcggcgaggaaggcgcccttcgtcgtcagggccagctccagccctccagccaagcaaggtgccgacaggcaggtgtggttcgcgtccaagcagtccctctcctacctcgatggcacgctgcccggcgactatggcttcgac

SEQ ID NO: 15595 - DNA, 303 bp, Zea mays
accacacacgcgtccgcggacgcgtgggcggccgccgccgccgccgggagcagaaaatccctttttccggctggcccagcggcgcagtccgtacatttccccaaggcacggacccctgtcaccaccgccgtctccaccgcgactgcgggtgttcacgcggaggatagggtttcgtcgctgactcaagtctccggcgtgctggggtcgcagtggggcgacgatggaaagggcaagctcgtcgacgtgctcgccccccgcttcgacatagtcgcgcgttgccaggagggagcgaacgctggacat

SEQ ID NO: 15596 - DNA, 295 bp, Zea mays
cgacacgatcgcgagcgcacgcacgtaagcacgttgtcggaagctcaagttagaagaagcaccagtgcctgatcgatggcggcccaggctctcctctccggccggcagctgctgggccgccccgtgcagtcggccgtctctaggtcgtcggcgaggaaggcgcccttcgtcgtcagggccagctccagccctccagccaagcaaggtgccgacaggcagctgtggttcgcgtccaagcagtccctctcctacctcgatggcacgctgcccggcgactatggcttcgacccgctgg

SEQ ID NO: 15597 - DNA, 299 bp, Zea mays
atacctgaacaacttcccctttgttgctgtcggcgcgttacttctatatgtcggtgcttaccaggtctcatttggtccaattagttggctaatggtatctgagatctttccactccggacaagagggcgtgggatcagcctcgcagtactaacaaatttcggctcgaacgctctggtgacatttgcgttttcacccttgaaggagctcctcgggccagccaatatatttttcctgttcagcgtcatagcagtgctctccctcgtttttgtgaatctcgtcgttccagagaccaaagact

SEQ ID NO: 15598 - DNA, 314 bp, Zea mays
gagcagcagaggcagcgacacgatcgcgagcgcacgcacgtaagcacgttgtcggaagctcaagttagaagaagcaccagtgcctgatcgatggcggcccaggctctcctctccggccggcagctgctgggccgccccgtgcagtcggccgtctctaggtcgtcggcgaggaaggcgcccttcgtcgtcagggccagctccagccctccagccaagcaaggtgccgacaggcagctgtggttcgcgtccaagcagtccctctcctacctcgatggcacgctgcccggcgactatggcttcgacccgctgggcct

SEQ ID NO: 15599 - DNA, 313 bp, Zea mays
ggagaagaaggagcggctgcagctggcggagatcaagcacgcgcgcctcgccatggtcgccttcctcggcttcgccgtgcaggccgccgccaccggcaaggggccactcaacaactgggccacccaccttagcgacccactccataccaccatcttcgacacgttcggaggatcctcttaagcccgccattgctccgctccgtccatcgatcgaaacgtggtcttgaattaactatgatctctatgagcctggagatggatcaacccgtcgtgcgttgtttcattttgtgatgaatgggagagagggtatggg

SEQ ID NO: 15600 - DNA, 306 bp, Zea mays
tggtgctagcgcgcaacgtgcgctcccgcctccgcccaccgctcgccgcctccgcgggtgtctcgtcggccgcggcgcaggcggagagggcgatacgggacgggccgcggaacgagtggagcaggcccggggtggaggccgtctacgactcaccggtggtcgaggtggtgtttgacggggctcaggtgcacagaagtgtccatagattcagagaagtgcaacaatggagagttgtttgagtcaagagtggtggatgcagtggagattgttgttagtgtcgtgagtcatgaagatacaacagtggat

SEQ ID NO: 15601 - DNA, 318 bp, Zea mays
ggcagcgacacgatcgcgagcgcacgcacgtaagcacgttgtcggaagctcaagttagaagaagcaccagtgcctgatcgatggcggcccaggctctcctctccggccggcagctgctgggccgccccgtgcagtcggccgtctctaggtcgtcggcgaggaaggcgcccttcgtcgtcagggccagctccagccctccagccaagcaaggtgccgacaggacgctgtggttcgcgtccaagcagtccctctcctacctcgatggcacgctgcccggcgactatggcttcgacccgctgggcctctcggacccggagg

SEQ ID NO: 15602 - DNA, 323 bp, Zea mays
cccacgcgtccgaggacgcacacgagctcctcctcccggccttcgcagagttctgcttctccaacttcgcagacaagctgaggcagcacaggtcggtcatggccgcggccgacctcacggccccgcacacctggtaccccttcgcgcgcgctatggccgccgtatcgtgtaccactgcgggcccacgaacagcggcaagacgcacaacgcgctcacccgctttgccgcagccaagtctggggtctactgcagcccgctccgtctcctcgccatggagatcttcgacaaggtcaatgcgctcggtgtctactgcagcctgcgca

SEQ ID NO: 15603 - DNA, 311 bp, Zea mays
ccaccaaccggcagctcagcgtgacgcaccccgtgcacaggctgctgctgcctcactaccgcgaagtcgggcattccgacctcaaggactagcactggtggcccaagatgcagacggtgccggagctcgtgaaggcctgcaccaccatcatctggatcgcgtcggcgctacacgccgccgtcaacttcgggcagtacccgtactgcgggtaccacccgaaccggccgtccgtgagccggcggcccatgccggtgccgggctccgacgcgtacaaggagctggagaagaacccggagaagttcttcgtgcgc

SEQ ID NO: 15604 - DNA, 310 bp, Zea mays
gttgccaaagaattccctcccctagccgccgccgccgctcgtctccctgagaggtgccgggaccgaggaactggccgagttctaggtagagaatcggttttgcttgtctcagcacggggtctgctgcgtctggtggtggtgaaggggagaaattcgtgagatctgttccggatcaggcgtgcgagctcgggaatcaggggtttcacacatagcttcgtcgatttgaatttgatgtactaatggagtctaagggtggcaaaaagtctagcagtagtcgttccatgatgtatgaagctccccttggctacag

SEQ ID NO: 15605 - DNA, 308 bp, Zea mays
caccaaggagagtacgtggaggagcagccatggcttcatcggtggccgccgcggcgagcacattcctgggcacccgcctggcggacccggcgccacagaacgggcgcatcgtggcccggttcgggttcgggttgggcggcaaggcgaactgcgtccgaagaaggtggcgaagacatcgacctcctctgaccggccgctgtggttccccggcgccgtggcgccgactacctggacggctcgctggtcggcgactacgggttcgacccgttcggtctcgggaagcccgtggagtacctgcagttcgagtt

SEQ ID NO: 15606 - DNA, 286 bp, Zea mays
gaaaaaaacatctctttttgttggctcgttttgatgactgcagctgcagacatagatatctgaatcgtgcctattgattgtcacaaatgtacatgtatagttatctgccgagtgagtagcagtaaagcctttcaaggatgatgtaccctatgtttccgagtatatacagccactgcatttgtgtaaacgaaaaacatctcactcaataatcctcaagcaatgcgttcaaatgcttcctcctcgcagcatgcttcagcttctccatcgcaacgagtcctacttgcct

SEQ ID NO: 15607 - DNA, 309 bp, Zea mays
cctgcgccaggtgttcacgttcgggctctccctggtgaagctggacatccggcaggagtcggagcggcacaccgacgtgatcgacgccatcaccacgcacctcggcatcgggtcgtaccgcgagtggtccgaggacaagaggcaggagtggctgctgtcggagctgcgaggcaagcgcccgctgctgcccccggaccttccccagaccgacgagatcgccgacgtcatcggcgcgttccacgtcctcgcggactcccgcccgacagcttcggcccctacatcatctccatggcgacggccccctcggac

SEQ ID NO: 15608 - DNA, 306 bp, Zea mays
cgctcaccgacgccacagcttgtgcgcgcgcaatggcactcgtgtccgcctcctcgtcctccaccaccgccgtcgcggcgctccccaggaatgggcagcagcgggcgtcgtcgtcgttgttctcctcctcctcctcttcctccttcctcgtcggcaagacgctgctgaggcaggccgaggcagcccggccgtcgttcgccgtgcgcgccgcggcggattccgacaggccgatctggttccccggcagcacccctccgccgtggctcgacggcagccttcccggcgacttcggctttgatgcctggg

SEQ ID NO: 15609 - DNA, 310 bp, Zea mays
cctcaagatgggccgcatcgcctactggcgcaactccctcgtcgtccgcgtgctcaccatgctccgggtcgcgcccaagggcgtctccgaggtgcacgagatgctgtacgagaccgcgcacacctcacccgcagcggcgagaccggcatcttcacgcccatgcacatggtgctcctccgcaagcccgccgccgccgcctccaccgaggaggccaactagtgtaagactacacaccgccaccaatcagttactactcgcccaccgcaagggggagaaaatggggagggaggaaaaagatgcaagcagcagc

SEQ ID NO: 15610 - DNA, 300 bp, Zea mays
ggcggcgaaggcaaagccggcggcgagctccggcagcccgtggtacggccccgaccgcgtgctgtacctgggcgcgctgtccggcgcgcccccgaggtacgtgacgggcgagttcccgggcgactacgggtggtacaccgcggggctgtctgcggacccggagacgttcgccaagaaccgggagctggaggtcatcgagtcgcggtggggcatgctggacgggttggggtgcgtgttcgcggaggtgctcggccggaacggcgtcaagttcggcgaggccgtgtggttcaaggccgggtc

SEQ ID NO: 15611 - DNA, 316 bp, Zea mays
cccacgcgtccgagacgagtgtcaagtgaacctgaaacttgcggtgtcactggctggtagcctgagtgtgagtgagtgatcgagctagctgagctccgatcctcgctagctaggataccgccataccacaagtcttcttcacaagtttaggagtgacagcaacaagagatcgatggcctctgccaccgtgctcaagtcctccttccttcccaagaagtccgaatggggcgccaccaggcaggccgccgcgcccaggccgcccaccgtctccatggtcgtccgcgcctccgcctacgccgatgagctcgtgaagacc

SEQ ID NO: 15612 - DNA, 318 bp, Zea mays
ccaccgcgtccgccgccgacaacagcgtagtgtagtgtagttccggagagggttggggagagtagtagtgatccgcaatgtcgacgtaggaggctgttgtggctgaggtcccggtgaccgatgtgccagcagaggtcccggcggcccaggtggcacatgcgcccaatgcgaagaatgcgcccaaggagaagaaggcgcctaaggagaagaacccgtccgcggcgaagaagccggcgtggcaccctccctacgctgagatgattgtagaggcgatcgctgccctcaaggagaggaaggggtcgagctcggtggccatca

SEQ ID NO: 15613 - DNA, 304 bp, Zea mays
gacgagtgtcaagtgaacctgaaacttgcggtgtcagtggctggtagcctgagtgtgagtgagtgatggagctagctgagctccgatcctcgctaggtaggataccgccataccacaagtcttgttcacaagtttaggagtgacagcaacaagagatcggtggcctctgccaccgtgctcgagtcctccttccttcccaagaagtccgaatggggcgccaccaggcaggccgccgcgcccaggccgcccaccgtgtccatggtcgtccgcggctccgcctacgccgatgagctcgtgaagaccg

SEQ ID NO: 15614 - DNA, 302 bp, Zea mays
cccacgcgtccgcccacgcgtccgaacagaagcgtggttctgatcttttctgtactgcttgtgagatggctgttgtctggatacagaatcagctccgtgaaaacaagacaaaagaactcattttgaattatgctaatcagctctgtgagcgtctccctagccccaatagcgagtcaactgttgattgccatcagatctcaaagatgccaaatcttgcattcaccatagcaaacaagactttcaccttaacaccagagcagtacatagtgaagctggagcaagcaggacaaactatctgcatc

SEQ ID NO: 15615 - DNA, 302 bp, Zea mays
cttcacactcctcgccatcacataaaaccagtgcaagcagaagcagcgcaatggcgagcagcaccatggccgtgtggttcaaggccgggtcgcagatcttcagcgagggtgggctggactacctcggcaacccgagcctgatccacgcgcagagcatcctcgccatctgggcctgccaggtcgtgctcatgggcgccatcgaggggtaccgcgtcgccggcggcccgctcggagaggtcgtcgacccgctctaccccggcggcagcttcgacccgctcggcctcgccgacgaccccgaggcc

SEQ ID NO: 15616 - DNA, 290 bp, Zea mays
atcctctggtccgtggccatggcgtcgtccatgctctccgctaccaccgtgccactccagcaggggggcggcctgtccgagttctccgggctcaggagctccgcgtcgctgcccatgcgccggaatgccacctccgacgacttcatgtccgccgtctccttcaggacccacgcggtcggcacgagcggcgggtcgcggcgggcgccgacggaggcgaacgtgaaggtggccatcaacgggttcggccgcatcgggcgcaacttcctgcggtgctggcacgggcgcggcga

SEQ ID NO: 15617 - DNA, 302 bp, Zea mays
gttttccatgttcggcttcttcgtccaggccatcgtcaccggcaagggcccgctcgagaacctcgctgaccacatcgctgacccagtcaacaacaacgcatgggcctacgccaccaacttcgtccccggcaactaagctcaacggctatgctatgcaacttcattgtctttcggatcggagagggtgtacgtacgtggattgattgatgctgcgagatgcatgtgtgtcttttgtttcacgttgcattgcataggcaagtcgagatgatgagttggcgttgtacactaagatgaaccatgtt

SEQ ID NO: 15618 - DNA, 236 bp, Zea mays
agtcatcttcgtcaccagcaacaggaggagcggcggcggcaggaggcacggaggggcaaggagcttccaggtctcgtgctccgtcgacaagccggtggtgattggcctggcggcagactcagggtgcggcaagagcaccttcatgcgccggctcaccagcgtcttcggtggcgccgcggagccgcccaagggcgggaacccggactccaacacgctcatcagtgacaccacgacag

SEQ ID NO: 15619 - DNA, 302 bp, Zea mays
cggacgcgtgggcgtgcagcagtggaaaagagcagattttagcagagcagcgagggtcggagaagcctccccaagcttcgaatcgctatgcagcccgtcaaggtgtacgccgaccggcggtcgcaaccctcccgagctgtcatcatcttctgcagggtgaaccagatcgatttcgaggaggtcacggtggatctgttcaagtctcagcacctcacacccgaattcagaaaaataaacccaatgggacaggtacctgcaattgttgatggaagattcaaactatttgaaagtcatgcgatttt

SEQ ID NO: 15620 - DNA, 305 bp, Zea mays
ctcactaaacctttggatgaggaaagcatcaaggttaccatggatgattttgtgaatgcacttcatgaaattacccctgcatttggtgcttccaccgatgatctcgaaagatgcagattgcgcggtattgttgattgtggcaaggcacataagcacatttatcaaagagctatgctcctcgtagagcaagttaaagttagcaaaggtagcccactcgtgacttgcctattggaaggtcctgctggaagtgggaaaacggctatggcagcaagtgttggcattgacagtgattttgcatatgtgaa

SEQ ID NO: 15621 - DNA, 306 bp, Zea mays
cggacgcgtgggcggacgcgtgggctaattactgccgcaatattgggcaactacagaactcaaaatcttcaaatctgtccctcaaatcctgttccaggagacaaaagaagacatatgttacctgtgctagcgctgccgtacaaggacagacacaaacacctcttactggtagccagcaagcttatgagcattcatcctccaaacctaaaaaggtaatggttattggtggagatggatactgtgggtgggcaacagcacttcatctctcaaacaaaggttatgaggttgtgattgttgataatcttg

SEQ ID NO: 15622 - DNA, 306 bp, Zea mays
cttcctagcaacatggggatggggagccaactgataatgcagcacgattctacaaatggtttactgagggaaaagaaaaggaagtttggttgaaggatcttaaatatggtatttttggccttggaaacaggcaatacgaacattttaataaggttgcaaaggtggtagatgagctagtagaggagcagggtgggaaacgtcttgttcctgttggccttggagacgatgatcagtgcattgaggatgatttcactgcatggaaagaactagtgtggccagaattagatcaattgctccgcgacgagg

SEQ ID NO: 15623 - DNA, 306 bp, Zea mays
gtccagcactttcacgctcagctccagcaatggctgcctccaccatggcgatctcctccacggcgatggccggcacccccatcaaggtgggctccttcggcgagggccgcatcaccatgcgcaagaccgtgggcaagcccaaggtggcggcgtccggcagcccctggtacggccccgaccgcgtcaagtacctcggccccttctccggcgagcccccgagctacctcaccggcgagttccccggcgactacggctgggacaccgccgggctgtccgccgaccccgagaccttcgccaagaaccgcg

SEQ ID NO: 15624 - DNA, 304 bp, Zea mays
cataaaaccagtgcaagcagaagcagcgcaatggcgagcagcaccatggccctctcctccacagccttcgccggcaaggcagtgaacgtgccgtcgtctctcttcggcgaggcccgcgtgacgatgcgcaagacggcggcgaaggcaaagccggcggcgagctccggcagcccgtggtacggccccgaccgcgtgctctacctgggcccgctgtccggcgcgcccccgagctacctgacgggcgagttcccgggcgactacggctgggataccgcggggctgtcggcggacccggagacgttcg

SEQ ID NO: 15625 - DNA, 310 bp, Zea mays
cgcctccatttcggcctctgtcccttgcaagttcaatctcacctccaaccatgggtaaagagaagtcccacatcaacattgtggttattggccacgttgactctggcaagtcgaccaccacaggacacctgatctacaagcttggaggcattgacaagcgtgtgatcgagaggtttgagaaggaggctgctgaaatgaacaagcggtccttcaagtacgcatgggtgctcgacaagctcaaggctgagcgtgagagaggtatcaccattgatatcgctctgtggaagtttgagaccaccaagtactactg

SEQ ID NO: 15626 - DNA, 298 bp, Zea mays
cggacgcgtggggaagacgagtgtcaagtgaacctgaaacttgcggtgtcactggctggtagcctgagtgtgagtgagtgatcgagctagctgagctccgatcctcgctagctaggataccgccataccacaagtcttcttcacaagtttaggagtgacagcaacaagagattgatggcctctgccaccgtgctcaagtcctccttccttcccaagaagtccgaatggggcgccaccaggcaggccgccgcgcccaggccgcccaccgtctccatggtcgtccgcgcctccgcctacg

SEQ ID NO: 15627 - DNA, 298 bp, Zea mays
cttctcgtccgacgtgtatgtcgggccacccaagggcaatgactggtttgagaagcagacggcaggcacgctcgacatcctgtgctctccttggatggattggttccacggtggcctgcagttccagattgagcaccatctgtttccccgcctacctcggtgccaccttcgcaaggttgcaccggccgtccgcgacctttgcaagaagcatgggctcacttattctgcagccacattctggggtgcaaatgtgcttacatggaagacactcagggctgctgcattgcaggccaggacc

SEQ ID NO: 15628 - DNA, 299 bp, Zea mays
gtctccgagacgcgtacgagcgcctcaggaagaggggggtcccgctcgcctccaaccaggtgaactacagcctgatataccggaacccggaggagaacggggtgaaggcggcctgcgacgagctcggcgtcactctgatcgcgtactccccgatcgcccaaggtgctctgacgggaaagtacacgccggagagtcctcctaaaggccctcgaggacggatatacacgccggagttcctgacgaagctccagccacttatcaaccggatcaaggagatcggaggaagctacgggaggact

SEQ ID NO: 15629 - DNA, 298 bp, Zea mays
cgcgtcgccggcgggccgctcggagaggtggtcgacccgctgtaccctggcggcagcttcgacccgctcgggctcgccgacgacccggaggcgttcgcagagctcaaggtgaaggagatcaagaacggccgcctcgccatgttctccatgttcggcttcttcgtgcaggctatcgtcaccggcaagggccccctcgagaacctcgccgaccacatcgccgaccccgtcaacaacaacgcctgggcttacgccaccaacttcgtccccggcaagtgagcgagggcatgatgcttgcatg

SEQ ID NO: 15630 - DNA, 299 bp, Zea mays
ctcagcactctaatgctcttattgctgcagcaatatggggtccgtaagctagaatttctgattgcatttctggtgttcttaatagcaacatgtttcttagttgaacttgggtattctaaaccaaatgctccagaagttgttaggggcctttttattcctgaacttaaaggaaatggagctacaggccttgctatctcattacttggtgctatggtgatgccgcacaatctttttctgcactcagcattagtattgtcaagaaaagtgccacggtctgttcatgggattaaggaggcctg

SEQ ID NO: 15631 - DNA, 290 bp, Zea mays
caaattcctccaaacgagccctaccgggtgatactaggccatgtaagggacaagctgtacaacacacgcgagcgtgctcgccatctgctggcatctggagtttctgaaatttcagcggaatcgtcatttaccagtatcgaagagttccttgagccacttgagctgtgctacaaatcactgtgtgactgcggcgacaaggccatcgcggacgggagcctcctggacctcctgcgccaggtgttcacgttcgggctctccctggtgaagctggacatccggcaggagtcgga

SEQ ID NO: 15632 - DNA, 293 bp, Zea mays
gccgacgggcccatgccgcagaccaaagagcacatcctcctcgccaagcaagtcggtgttcccaagatcgttgtcttcctcaacaagaaggacatggtcgacgacgaggagctgctcgagctcgtcgagctcgaggtccgcgagctgctcagcaactacgagtacgacggcgacgacgtaccaatcgtcgctggctccgccctcaaggcgctcgaggctctcatggtcaaccctgccctgaagcgcggcgacgatgagtgggtcgactacatcttctcgttggttgataaagt

SEQ ID NO: 15633 - DNA, 291 bp, Zea mays
gggcgctcagggcgtccaagattcctgagagcgaattcaccaccctgcccaatggcctcaagtactacgacatcaaggtaggaagtagggctgaggctgttaaaggatcccgtgttgcggtacattatgtggccaagtggaagggcatcacattcatgacaagtaggcagggtcttggtgttggtggtggaacgccatatgggtttgacgtaggcaattctgagagaggcaatgttttaaaaggattggatcttggggttgagggaatgaaagtcggaggccagaggttga

SEQ ID NO: 15634 - DNA, 289 bp, Zea mays
ccaaatctttgctgaccaggggaaagcacttaatgcggtcgcctcgcggaaccaaagtcttagttgttggaaatccctgtaacactaatgcgctgatttgtttgaaaaatgccccaaacataccggcaaaaaactttcatgcattgacgaggttggatgaaaatagagcaaagtgccagctggcactaaaagcaggtgtattttatgacaaagtatcaaacgtgactatttgggggaaccattcgacgactcaggttcctgatttcttgaatgccaaaattgatggaag

SEQ ID NO: 15635 - DNA, 292 bp, Zea mays
ggaagtccccgagctccaggacatgggtggcccagtcgaaggtggtttcagcgttgcgttcgaccccctcgacggctccagcattgtcgacaccaacttcaccgtgggaaccatcttcggagtctggcccggcgacaagctgaccggagtgaccggcggcgaccaggtcgctgccgcgatgggcatctacggccctcgcacgacctacattgtcgccctcaaggactgccctgggacgcacgagttcctcctcctcgacgaaggtaaatggcagcatgtgaaggacaccacg

SEQ ID NO: 15636 - DNA, 291 bp, Zea mays
ctctggtccgtggccatggcgtcgtccatgctctccgctaccaccgtgccactccagcaggggggcggcctgtccgagttctccgggctcaggagctccgcgtcgctgcccatgcgccggaacgccacctccgacgacttcatgtccgccgtctccttcaggacccacgcggtcggcacgagcggcgggccgcggcgggcgccgacggaggcgaacctgcaggtggccatcaatgggttcggccgcatcgggcgcaacttcctgcggtgctggcacgggcgcggcgacgcc

SEQ ID NO: 15637 - DNA, 321 bp, Zea mays
ggacgagatcgacggcccgctcgaagtcggctccgacggcacgctcaagttcgaggagaaggacggcatcgactacgccgccgtcaccgtgcagctcccggggggcgagcgcgtgccgttcctcttcaccgtcaagcagctcgtcgccaccggcaagcccgagaccttcggcgggcccttcctcgtgcgcagctaccgcggctcctccttgctcgaccccaagggccgcggcggctccaccggctacgacaacgccgtcgcgctccccgccgggggcagaggtgacgaggaggagctgcagaaggagaacatcaagaacgc

SEQ ID NO: 15638 - DNA, 316 bp, Zea mays
ggcttccgtgggtgcaggcttggtatatcgtaccctgaattgacagagatgcaagcccgggccatttttgaagctgctatagcaatgaccaaccagggtgttcaagtgttcccagagataatggttcctcttgttggaacaccacaggaactggggcatcaagtgactcttatccgccaagttgctgagaaagtgttcgccaatgtgggcaagactatcgggtacaaagttggaacaatgattgagatccccagggcagctctggtggctgatgagatagcggacaggctgaattcttctccttcggaacgaacga

SEQ ID NO: 15639 - DNA, 319 bp, Zea mays
cggaccgtgggtgcggaaccatcttcaccataccagcatcaccattcttgaggagaccttttctgaatatcctcctcttggtcgctttgctgtccgtgacatagaggcaaacggtggctgtcggagtcatcaagagtgtggagaagaaggatccaactggagccaaggtgaccaaggctgccgcaaagaagaaatgatgtgtctggctggttctgtgtttgcttgagggatacctagtggaaacgtaaaatatctcgtcttgttcacgtcattgtctgaactatgctcgcaacgtttgcctggtcgatttagaactgtt

SEQ ID NO: 15640 - DNA, 319 bp, Zea mays
ccaagggcgcgtggagacggtgctgatcgagcggaagatggacaactgcaagccctgcggcggcgctatcccgctgtgcatggtgtcggagttcgacctgccgctcgacctcgtggaccgcaaggtgaggaagatgaagatgatttcgccgtccaacgtcgccgtcgacatcggccgcacgctcgcgccccacgagtacatcgggatggtcaggcgcgaggtgctcgacgcctacctccgctcacgggcacagtccgtcggcgcggaggtcgtcaacggcctcttcctaaggtacgaggcgcccaaagagccgaacggc

SEQ ID NO: 15641 - DNA, 320 bp, Zea mays
ggcttctccttctagggattcatcttcctctcgtcttccctcttcctctccgaggatacaaggcgccgtcccaggtagaggtagggtcgccaccatgctggaggagctgctcatcttcacccggggcggcctcatcctgtggtcgtcctgccgggcgctcggcgccgcagccctcaagggctcccccatcgacgccctcatccgctcctgtctcctcgaggagcgatccgccgacgccagcttctcccaggacaattacgccctcaagtggaccttccacaacgacctcggccttgtcttcgtcgccgtataccagaaga

SEQ ID NO: 15642 - DNA, 229 bp, Zea mays
cccgtcgtgcgtggtctcgttttgtgatgagtgggagacagaggatgacaagatcgatcctttgttaatggagatctcgttaattaggagagctaccgctgggacttggtggtttgtaatatatgatccaaccagtgatgaatcaatgcattcacttgtgtacacaaaaaaaaaaaagaaaaaaaaaaaagaagaggaaaaaagaaaaaagaaggagagaaagaagaaa

SEQ ID NO: 15643 - DNA, 314 bp, Zea mays
atcaggcgccaggcagctgagcttagatacattttagaggcacccaagttgaagatatcaaatgacgaggtggtcacaataccacaaattgggagcagctgggattggtatgctggaacatggagtgacaaaatcaaggaacaagaggacaagaaaaggaagatgagtgctgctagcaaccaagttcaaccttctccaaacatctttggagacctctctttcttgcgaccgccaaatgaatggaagaagagtgcatgggtggttgttaccttgtggatccttttgataggaacagcaatctatctgcaatcatg

SEQ ID NO: 15644 - DNA, 312 bp, Zea mays
attttgtaaacagacctgagtggattatagttgaccatgcttgttctgcatattcatatgtatctgtgccactttatgacacacttggcccagatgctgttcaattcattgtgaaccatgcagcggtggaagttatattctgtgtgcctcaaactctaagcactctgttaagttttatagttcaaatgccatgtgttcggcttatagtggtagttggtggagatgatgcaaatctgccatcaacggcagtaactactggagtgcaaatcataacttactccaggttgctcatccagggaaaggctagccctc

SEQ ID NO: 15645 - DNA, 315 bp, Zea mays
gccgatgatgatcctggttcttatttcattagtgctgtctgctggaagagtgatagccctacgatgttaactgctaacagtcaggggaccataaaagttcttgtacttgctccttgatgttatggagggcgttcaagaggttcacagtactgtccagttgtttcctttcgtgtcattatcttcccccaaaattggtaacgggggcataattaatttccggttagggaatgaagttttgcagatggtcagctgacgtagggttttgaggtatcagaatgtgcatagtcatgtttatgttgtataggtgtaattgtg

SEQ ID NO: 15646 - DNA, 312 bp, Zea mays
ggcaacgcctacttccagcgccgcccctacatcccgttggagcgcgatctagaggtgagcagcgtgcccaccgtcaaggactcgcaggccatctgcgacctcgtctactcgctcttcgtctccgaggaggtggacaaggtggagctgctctactccaagttcgtgtcgctggtgcgctccgaccccatcatccagacgctgctccccatgtcgcccaagggcgagatctgcgacgtcaacggcgtctgcgtggacgccaccgaggacgagctcttccgcctcaccaccaaggaggggaagctcaccgtggag

SEQ ID NO: 15647 - DNA, 313 bp, Zea mays
aaaccctgtagtagcctgccatgactacgcgctgctgcctggtcgtcgccactctcctcgcggcgctgctctcggtcagtgccagcctcgagttcggtttctacaacaagacgtgccccagcgccgagaccatcgtgcagcagaccgtggccgccgcgttcaccaacaactccggcgtcgctccggcgctcctccgcatgcacttccatgactgcttcgtcagaggctgcgacggctcggtgctgatcgactccacggccaacaacaaggcggagaaggactcgatccccaacagcccgagcctgaggttctt

SEQ ID NO: 15648 - DNA, 307 bp, Zea mays
cgcccgtatttctcttcgtcatcgacacctgcgtcatcgaggaggagctggagtacgttaagatggccatgcggaaggccgtcgcgctcctgccggagcacgcactcgtgggcctcgtgaccttcggcacgcaggtgcacctgcacgagctcggattctccgatctcagcaagatctacgtcttccgggggaccaaggagatctctaaggaccagattttggatcagcttggcctggcgggtgctgggcggccgggcttccccaagatgccacagcaaccgggcgggccacaggtgaatgggatgca

SEQ ID NO: 15649 - DNA, 307 bp, Zea mays
gcgagccatcgacacgatcgcgagcgcaacacgtacgttgtcggaagctcaagttagaagaagcaccagtgcctgatcgatggcggcccaggctctcctctccggccggcagctgctgggccgccccgtgcagtcggccgtctctaggtcgtcggcgaggaaggcgcccttcgtcgtcagggccagctccagccctccagccaagcaaggtgccgacaggcagctgtggttcgcgtccaagcagtccctctcctacctcgatggcacgctgcccggcgactatggcttcgacccgctgggcctctcg

SEQ ID NO: 15650 - DNA, 308 bp, Zea mays
gttgtcaacgacgacgtctgccggcagtgctcctgctcctcctcctcctccttcccggccgccgcgcgagcttggctgggttagtgtctcttcttcgcggagacctgtgagaggagccatcatcatggccgccgttgagactgttgtcctcaaggttgctatgtcatgcgagggttgcgcgggggcggtcagaagagtgctctccaagatggaaggagttgaaaccttcgacatagacctcaaggagcagaaggtgacagtcaaaggcaatgtcaagcctgaggacgtcttccagacggtttccaagt

SEQ ID NO: 15651 - DNA, 308 bp, Zea mays
acttggtgttgtaaaaggaattgcaggacagacacgattgaaggtaatagtagatggttcgcaagggcatgctggcacagttccaatgaaattgcgccgtgatccgatggttgcagctgcagagctcgttgtgactctggaacgcctctgtaaagagcccaacagtttgctgacctacgacgaggagtgcagctgcttcactgaggagtccctggccggcctggtgtgcaccgtcggcgagctgaacacgtggccaagcgcgagcaacgtgattccgggccaggtaaacttcacggtggacatccgcg

SEQ ID NO: 15652 - DNA, 309 bp, Zea mays
  unsure (1)..(309): unsure at all n locations
anacacacgtccgcggacgcgtgggcggacgcgtgggttcatggactgcataataaaggtgtttctgttgagaacatctcttctcatctctcaccttgggcatctgcactatttgaaattttgcctccgattattagaaagcagctgcttctccatcctggatctgacgattcagctcaactgtcccagattgaaattgagaagcttctagcacagttggttgagaccgaaatggacaaacgcctgaaggaaggcacttataatggaaagaagttcaatgctatctgccacttttttggataccaggcc

SEQ ID NO: 15653 - DNA, 310 bp, Zea mays
cggacgcgtgggcggacgcgtgggcgcacacattgatcttggatacctcctatcaaatgctggattgcctgaatggagcagctcccaaattaggagccaggacgaccacactaatggccctgttcttgatgagacaatccttgcagatcctgagatagctgatgctattgagaatgagaaggaagtttccaaggcatttcaaatctataatgttgacagagctgtctgtggtcgggtagcaggtgtgattgccaagaagtattgagacacaggttttgctggccagctcaacatcacgttcaatggaagt

SEQ ID NO: 15654 - DNA, 310 bp, Zea mays
cccacgcgtccgcaacggcgtcgcgcacccggtcgtgtgcaccgagagcaggcgcgccatggcgtcgcaccactccatgatcatcctcgagacgctctcggcgatcccggagccgcaggacgaggacacctccgagcagctgttgaacaggatccaggacctatcttacaagcagccgagagctccggttggcggcgccacggcggccgtttactctcacgccgcagacctcaagaagcacggcatcgagatgtacaagcttggcaagaagctcggcaagagggtcgtcgccgatgccaacaccgtctat

SEQ ID NO: 15655 - DNA, 306 bp, Zea mays
ctggtttcgctgccccgattcgccacgaagccgcactgtgagagagggacgcggcccgttgtcctcggcttgtacgcaatccttccgtcgctgcgaagtgatccctcgtgttcgccatggcccccagcgtcgccgtggaaaacctcaaccccaaggtcttgaaatgtgagtatgcagtccgtggcgagattgtcatccatgctcagcgcttgcagcaacaactacaaacacaaccagggtctcttccttttgatgagatcctgttctgcaacattgggaatcctcaatcccttggtcagcaacctg

SEQ ID NO: 15656 - DNA, 298 bp, Zea mays
tggtggccgccgccaaggtccggcgcgcgcaggaggccgtcgtctcctctcgccctttctcggaggcgctggtggaggtgctctacaacatgaaccaggagatccagacggaggacatcgacctgcccctcacccgcacccgccccgtcaagaaggtggccctcgtggtcctgaccggcgagcgcggcctctgcgggagcttcaacaacaacgtgctcaagaaggcggaaacccgcatcgatgagctcaagcagctgggcctccagtacaccgtcgtcagcgtggggaagaagggcaa

SEQ ID NO: 15657 - DNA, 306 bp, Zea mays
gccgcctcgccatgttctccatgttcggattcttcgtccaggccatcgtcaccgggaagggcccgctcgagaacctcgctgaccacattgccgaccccgtcaacaacaacgcttgggcctacgccaccaacttcgtccccggcaagtgagggatgcgccgccggtgacctttaggtgtccggatgcatgtgagcgcacgctggttttcggtttgtaccatgatgtaaactattgttcaatcgacaaggaataattgtgttcattgtcattatttttcccctctctttttcgttcctgccggatttt

SEQ ID NO: 15658 - DNA, 307 bp, Zea mays
gattctacaaggaagaggagaagaatgacccagagtttgcacagaagcttgcctccctagcagatctttatgttaacgatgcatttggaacagcccacagggcgcatgcatcgaccgagggagttaccaagtttttgcagccttctgttgcagggttccttctgcagaaggaactcgactaccttgtcggagctgtttcaagccctaaacgcccttttgctgccatcgtgggtggatcaaaggtgtcatccgagatcggggttattgagtccctgttggagaagtgtgatatccttctcttgggtgg

SEQ ID NO: 15659 - DNA, 307 bp, Zea mays
cccacgcgtccggtggtctacaatgcatcaaacaatgagcttgtgaggacacaaacccttgtgaagagtgccattgtgcaagttgatgctgccccattcaagcagtggtacctcactcactatggagttgacattggtaggaagaagaaaacccctgctgcaaagaaggataatgctgagggacaagaggttgaggcagcagctgaggaaacgaaaaagagcaaccatgtcacgaggaagcttgagaagcgcaaggagggacgtacccttgacccacacattgaggagcaatttggcagtggacggt

SEQ ID NO: 15660 - DNA, 306 bp, Zea mays
caactcgccgtctgccttctgcgcctccatttcggcctctgtccctcgcaagttcaatctcacctccaaccatgggtaaagagaagtcccacatcaacattgtggttattggtcatgtcgactctggcaagtcgaccaccacaggacaccttatctacaagcttggaggcattgacaagcgtgtgatcgagaggttcgagaaggaggctgctgaaatgaacaagcggtccttcaagtacgcgtgggtgctcgacaagctcaaggctgagcgtgagagaggtatcaccattgatatcgctctgtgga

SEQ ID NO: 15661 - DNA, 306 bp, Zea mays
ggacgaggagttcggaatcgtgaaggggaccatgacgacgacgcactcgtacaccggcgaccagaggctgctggacgcgtcccaccgcgacctccggcgggcccgcacagcggcgctgaacatcgtgccgacgagcacgggcgccgccaaggccgtggcgctggtgctgccgcagctcaaggggaagctgaacggcatcgcgctgcgggtgccgaccccgaacgtgtccgtggtggacctggtgatcaacaccgtgaagactggcatcacggccgacgacgtgaacgcggcgttccgcaatgacgc

SEQ ID NO: 15662 - DNA, 306 bp, Zea mays
ggatgaaatggctgcgccccagcacgtccgcgccgctcccctcgcacgcgcgctccggcgtaccgccaccgccaccgccaccgccaccgcctccgtccccgtacccgttcccgtccccgccggcatcaagtctcaggggacttcccgccgcgcactgctcggcctatcggagcctcagctccgccagcttgccatcgatctcggccagcaaagctaccggggcaagcagctgcacgacctcctctacaaatcaagagccaagcaaatccaagaattcaaccacgtgcccaaggcgttccgggaggc

SEQ ID NO: 15663 - DNA, 299 bp, Zea mays
cgccttctaggatactgtgtcgagggtatccacaggatgcttgtgtacgagtatgtgaataatgggaacttagaacagtggcttcatggtgcaatgcgtcacacggtgttcttacttgggaggcccggatgaaagtcgttcttggaattgccaaggcgcttgcttatttacatgaagccatagaaccaaaagttgtacaccgtgatatcaaatcgagcaatatcttaattgatgaagaattcaatggcaagctttctgattttggactggccaactcttgggtgctgggaagagccata

SEQ ID NO: 15664 - DNA, 303 bp, Zea mays
agaagacgagtgtcaagtgaacctgaaacttgcggtgtcactggctggtagcctgagtgtgagtgagtgatcgagctagctgagctccgatcctcgctagctaggataccgccataccacaagtcttcttcacaagtttaggagtgacagcaacaagagatcgatggcctctgccaccgtgctcaagtcctccttccttcccaagaagtccgaatggggcgccaccaggcaggccgccgcgcccaggccgcccacagtctccatggtcgtccgcgcctccgcctacgccgatgagctcgtgaa

SEQ ID NO: 15665 - DNA, 305 bp, Zea mays
gaagcaagtcatcttcgtcaccagcaacaggaggagcggcggcggcaggaggcacggaggggcaaggagcttccaggtctcgtgctccgtcgacaagccggtggtgattggcctggcggcagactcagggtgcggcaagagcaccttcatgcgccggctcaccagcgtcttcggtggcgccgcggagccgcccaagggcgggaacccggactccaacacgctcatcagtgacaccacgacagtgatatgcctcgacgactaccattccctggacaggaacggcaggaaggagaaaggtgtgaccg

SEQ ID NO: 15666 - DNA, 304 bp, Zea mays
ctctgcatcagcttcccgtgaacaaatgagctatacctatgatgcattgaagagctatacaccagaaatggttgaagttctcattgacagtgtgaggaatccagcattcctcgattgggaggtcaaagagcagctccagaacataaaatctgaaatagctgatgcgtctgctaatcctcaaggtctacttctggaggcccttcattcggttggatattccggggcactggcaaaacctttgatggcttcagaatctgctgtaaaccggttggatgttagcagcttggaggaatttgttgctgaa

SEQ ID NO: 15667 - DNA, 303 bp, Zea mays
ctttttcttccttaattgtaagaccacatgatctataaaggtcatatttacatgtgttgtttagataaatggatatgttctacttgtaaatatgacctttatagatcatgtggtcttaccgacaaggacgtcaggaacttccaggtcctcaaagagatgtacaacgagtggccattcttcagggtcaccctggacctgctggagatggttttcgccaagggagaccccggcattgccggcttgtatgacgagctgcttgtggcggaagaactcaagccctttgggaagcagctcagggacaaa

SEQ ID NO: 15668 - DNA, 299 bp, Zea mays
ggccgtggaagtgagcgaggaggcccgatgcttcatggctatggcggaggagacgatggagctcacgctgacggtgtgggacttcctgccgccactggcgcggtggctggacgtcgacgcggtgggccgccggttgcagcgactgcaagcaaacaggacggagtttttgcagaggttgatcgaggaacacaaggagatggagaagggcggtcaagtcacacgcaggacgttggtcggggtgatgctggagctgcaggacaaggatcccgaagcctacacggatcagctcatccgctcca

SEQ ID NO: 15669 - DNA, 299 bp, Zea mays
gctgaaatggctgggatgagccataggattcgtgagagaactgatgctctagatgctgcaggaaataccacggctgcaattgggaagggttttgccattggctctgcagccttggtttcccttgcactatttggtgcgtttgtaagccgggctgctatctccactgttgatgttctgactcctaaagtattcatcgggcttattgtcggtgctatgctcccgtactggttctcggcaatgaccatgaagagtgtgggcagtgctgcgctcaagatggtggaggaagttcgtcggcagtt

SEQ ID NO: 15670 - DNA, 296 bp, Zea mays
aggaaatgcaggatatcgagttcactgtccaggaaaacaagctgtggatgttgcagtgcaggacacggaaacgtacgggcaaaagtgccgtgaagatcgccgtggacatggataacgagggccttgttgagccccgctcagcgatcaagatggtagagccaggacacctggaacagcttctccatcctcagtttgagaacccgtcggcgtacaaggatcaagtcattggcactggtctgccagcactcacctggggctgctgtgggccaggttgtgttcagtgctgaggatgctga

SEQ ID NO: 15671 - DNA, 295 bp, Zea mays
gaggattaaggctgtcaggcagatgattatggctcccacgcttgagctgaggcagcaggcgctcgaccgtctcttgccgtatcagaggtctgacttcgaaggcattttccgtgctatggatggactcccggtgaccatccgactcctggaccctcccctccacgagttccttccagaagggaacatcgaggacattgtaagtgaattatgtgctgagacgggagccaaccaggaggatgccctcgcgcgaattgaaaagctttcagaagtaaacccgatgcttggcttccgtggg

SEQ ID NO: 15672 - DNA, 291 bp, Zea mays
aaaaaagaattttaccatgcttcagacatggcctgtgcgttcaccaaggcctgttgcgtcgaagcttgctgcggatacacctcttctgacagggcagcgtgtactggatgcactattcccctcagttctgggaggcacttgtgctattccaggggcatttggttgtggtaaaactgtcattagtcaggcactttccaagtactccaattctgaagctgtggtttatgtgggctgtggtgaacgaggaaatgagatggctgaggttctcatggacttcccccagttgacgat

SEQ ID NO: 15673 - DNA, 292 bp, Zea mays
gagcagcacacacgcagctagctaggagcagcagcagagcagcggcgatggcggcctccatgatctcctcgtcagctctggcggtggcgcctcagggcctgccgcccctcggccgccgcgcctcctccttcgccgtcgtctgctccaagaagaagatcaagaccgacaagccctacgggattgggggtggcctgaccgtcgacgtcgacgccaacgggagaaagggcaagggcaagggcgtgtaccagttcgtcgacaagtacggcgcgaacgtcgacggatacagcccaat

SEQ ID NO: 15674 - DNA, 293 bp, Zea mays
ctccaccggacagcggggacgacggcatcacggccgggaggttctcaacctgggaactggcaaaggtttacgcctctgccaacgacgcagccgagaacaacttcgtcactcactggctcaacacgcacgcatccatggagccgatcgtgatcgcggcgaaccggcagctgagcgtgctgcacccaatccacaggctcctcaagccgcacttccggaagacgctccacatcaacgccgtcgcacgccagatcatcgtcggctcgggtgaccagaggaaggacggcagcgtcttc

SEQ ID NO: 15675 - DNA, 313 bp, Zea mays
gggagatcaccaatgtcatggagtaccaggccatcgccaagcagaagcttccgaagatggcctacgactactacgcgtccggcgccgacgacgagtggacgctgcaggagaacagggaggccttctccaggatcttgttccgtccgcgcatactgatcgacgtgtccaagatcgacatgaccaccaccgtgctggggttcaagatctccatgcccatcatggtcgcccccactgctatgcagaagatggctcacccagatggggagaacgccactgcacgcgcagcggctgctgcaggcaccataatgacact

SEQ ID NO: 15676 - DNA, 312 bp, Zea mays
cacacactcgggtaaagctatctcgagctagctagctgctgtaagccgttgccatggccaaaatggtattgctctgcgtgctcgtctccttcctcctgatgcccttggcctccctagccctgacgcaggacttctgcctcgccgacctgacctgcagcgacacgccggctgggtacccgtgcaagtccagcgtcaccgccaacgacttgtagttccacggcctggccggccagggcaaaataaacccactcatcaaggccgccgtcaccccggccttcgtgggccagttcccgggcgtcaacgggcttggca

SEQ ID NO: 15677 - DNA, 314 bp, Zea mays
gcgcgatgctgggtgccctgggctgcatcaccccggacgtgctggagacgtgggtgcccgtggacttcaaggagcccgtgtcgttcaaggccggcgcgcagatcttctcggagggcgggctggactacctgggcaaccccaacctggtgcacgcgcagagcatcctggccgtgctcggcttccaggtcatcctcatgggcctcgtcgagggcttccgcatcaacggcctcgacggcgtcggcgagggcaacaacctgtagcccggcggccagtacttcgacccgctgggcgtcgccgacgaccccgtcaccttc

SEQ ID NO: 15678 - DNA, 298 bp, Zea mays
cacgacgaatcaggtcatgtcctcaaggttccattccggagagtccatttgactggagatcagaagcactttgatacatatgacaccagccgtcctcaaaatataagcccaaggattggactcccaaagataaggaaggaatggattgataggagggaaaagctgggtagtcgtcggtacacacaaatgtattatgctaaacagggaattgtaacagaggagatgttatactgtgccagccgtgagaaccttagtcctgaatttgttcggacagaagttgcccgtcgacgagccataa

SEQ ID NO: 15679 - DNA, 311 bp, Zea mays
gctcaatgtgatgactcttgacgaaagggaacgaccagagcttcttgctgaatcacgcgagacaaggaaacgagtggccaaggactctggaaagactgaacagcaggtgagccaattggtcgcgcaactcttccaaatgcgtgcaaaaatgcagaaaatgatgggcgctatgcaaggaaaagagtcaccagacatggacgagctcatggcatcgatgaaagctgaggagcaggctgctgccggtagtggacggcgtagaaggaagtatggcaacctgaggcagaggcaactggatgccatgcgtggtttcc

SEQ ID NO: 15680 - DNA, 309 bp, Zea mays
acgaacacagacacacatgtttggcccccagcatccaccacaaatgatgaataggtttgataattttgggatgcctgacttcagtgatccaagagcaagaccatcaatgcaccatggcaggcaaggtcaacattttcctctccatggctctgagtttggtattatgaagatgggtaatgggaggtcaaggtttagatccaagtatatgtccactgaagaacttgacaacattttaagaatacagcatgccgccactcatataaatgatgcatacatcgatgattattaccatcaagcttgtctggccag

SEQ ID NO: 15681 - DNA, 115 bp, Zea mays
cactcctcgccatcacataaaaccagtgcaagcagaagcagcgcaatggcgagcaccaccatggccgtctcctccacagccttcgccggcaaggcagtgaacgtgcagtcgtctc

SEQ ID NO: 15682 - DNA, 289 bp, Zea mays
ccgggcgctggaggtgatccactcccgctgggccatgctgggcgcgctcggctgcgtcttcccggagctgctcgcccgcaacggcgtcaagttcggcgaggccgtgtggttcaaggccggctcccagatcttcagcgagggtggactggagtacctcgggaacccgagcctcatccacgcgcagagcatcctcgccatctgggcctgccaggtcgtgctcatgggcgccgtcgagggctaccgcatcgccggcggcccgctcggcgaggtcgtcgacccgctctatgcc

SEQ ID NO: 15683 - DNA, 290 bp, Zea mays
ggcgtgccagctcgggaatcaggggtttcacacatagcttcgtcgatttgaatttgatgtactaatggagtctaagggtggcaaaaagtctagcagtagtcgttctatgatgtatgaacctccccttggctacagcattgaggacgttcgacctgccggacgcgtgaagaagttccagtctgctgcttactccaagtgcgcgaagaagccatcctgatatccgttttggcttcctcattctagtagtttaggatttcttttctgacactttgattctgaccaatctctct

SEQ ID NO: 15684 - DNA, 303 bp, Zea mays
acagacaaggggcaggaagacatcgagcctcactcgatccatcgcctcgccgcagcacacacgacgccggccgcgccatggccatgaagctggacatgtccgcgctcgagaccaacttcgccaacctgaccgcctccgccggcgacgacacgtacttctccgccgaggcccccgacgtgccgtccatggtgctccccatctgcgacgacttcgacggcttccaggcgcccaccaaggatatggtgaagaataagaaggggacgaccacgcttgccttcatgttcgacaagggcgtcatcgtcg

SEQ ID NO: 15685 - DNA, 299 bp, Zea mays
acgagagtacgtggaggcacagccatggcttcatcggtggccgccgcggcgagcacattcctgggcacccgcctggcggacccggcgccacagaacgggcgcatcgtggcccggttcgggttcgggttgggcggcaaggcgaactgcgtccgaagacggtggcgaagacatcgacctcctgtgaccggccgctgtggttccccggcgccgtggcgccgactatctggacggctcgctggtcggcgagtacgggttcgacccgttcggtctcgggaagcacgtggagtacctgcagttcg

SEQ ID NO: 15686 - DNA, 300 bp, Zea mays
ggtccacttgggctctttaagggcgcgatgccccgcttcttctggattgctcctcttggagcaatgaactttgcaggctatgagcttgtcaagaaggcaatgataaaagatgagaaaaattccagtgagtcaacacgagagatgttgccaagaaagcagtgatcaaccatgcaacttttttattttatttttgggtccatgttgcagagaagcaacagaacatctgcctttttttgatattgggaattacattcccgtacgccattgagatggctgtatagtatacattacatgagaaaa

SEQ ID NO: 15687 - DNA, 93 bp, Zea mays
gcgaccgtggcgacgcatactgcatacacaacgcagagcatcagaatcagctgcgatctggtcgacatggctgccgccaccatggctatcaac

SEQ ID NO: 15688 - DNA, 298 bp, Zea mays
ggagccagctgcgctactggatatcaatggccaaatctttgctgaccaggggaaagcacttaatgcggtcgcctcgccgaaccgaaagtcttagttgtcggaaatccctgtaacactaatgcgctgatttgtttgaaaaatgccccaaacataccggcaaaaaaaactttcatgcattgacgaggttggatgaaaatagagcaaagtgccagctggcactaaaagcaggtgtattttatgacaaagtatcaaacgtgactatttggcggaaccattcgacgactcaagttcctgattt

SEQ ID NO: 15689 - DNA, 308 bp, Zea mays
cacttatcggcgccaccatcgttactacattctccgggccattatcagactcgattggccgacgccctatgcttattctctcctcaattctgtagttcttcagcggcctcatcatgctatggtctcctaatgtctatgtcctgctgttggcacgcttcgtagatggatttggtattggcttggctgtcacgcttgtgcctttgtacatttcagaaatagccccttcggagattagaggtttgctgaatacactaccacgattcagtggatcaggaggaatgttcttgtcatactgcatggtgtttggg

SEQ ID NO: 15690 - DNA, 309 bp, Zea mays
ggccgccctgttcttttttttttttttttttttttttttttttttagtttctctaaaaggtcttccatccatttaaatactttaaataactagtttaacaaaactaaaatatgtacaatatatttgagagtatgacaaatacatatgtacaaaaaaataaaaaatgtctttaatataggtattttcatatagaggacgtgatttagaggacgttatgctgcagacaacgtcaacctccttcggtcgtgcccttcgttggcccagtattgcgagccccactggcctgctgcggcccagcgccctgcacgt

SEQ ID NO: 15691 - DNA, 315 bp, Zea mays
ccttcctccccctatctagctagccttcccgttcctgcatcgcggcggagatgggcgcctccaccacgccgctcgcctcggccgcggcgctgcttctgctgctgctcgccccgctcgccgcggcgcggacagcatgtcggtcgtctcctacggcgagcggacgcgggaggaggcgcggcggatgtacgccgagtggattgcggcgcacggccggacctacaacgccgtccgcgaggaggagcgcaggttcgaggtgttcagggacaacctccgctacgtcgacgcccacaacgccgccgccgacgcgggcgtcca

SEQ ID NO: 15692 - DNA, 306 bp, Zea mays
aacgccacagcttgcgcccgcaatggcactcgtctccgcctcctcgtcctccaccaccgccgtcacgggctccccaggaatgggcagcgggcgtcgtcctccttcctcggcggcaagacgctgctgagacacgccgaggcggcccggccgtcgttcgccgtgcgcgccgcggcggaccccaacaggccgatctggttccccggcagcacccctccgccgtggctcgacggcagccttcccggcgacttcggctttgatccctggggcctcggatctgacccggagagccatgcggtggaacgtgca

SEQ ID NO: 15693 - DNA, 306 bp, Zea mays
gacgatggagagcatcggaataccgacccgtgtccagactgccttccgtatgtcagaagttgcagaaccatacatacgccgaagagctgtcagacatttagagaaaggaagagttgtcatatttgctgctggaacagggaacccattcttcacgactgatacagctgctgctctccgttgtgccgaaatcaatgcagaggtagtgctgaaagaacaaatgttgatggtgtgtatgatgcggaccccaggcagaatccaaatgcccgccttctggagactgtgagctatcatgaagttacgacaaga

SEQ ID NO: 15694 - DNA, 312 bp, Zea mays
ggattacttggttcaaggtttctagcgtgccagcacttcttgggcttttagtaactccttatttgatttacaagatattcccccctgaaataaaggacactcctgaagccccagcattagctgccgagaagctaaagaacatgggtccagtaacaaaaaatgaatgggtcatgattgggacgatgcttcttgcagtctcactatggatttttggggaaactattggcgtatccagcgttgttgctgcaatgattggactctcaatacttcttgtgcttggagtgctgaactgggaggattgtttgaatgaga

SEQ ID NO: 15695 - DNA, 281 bp, Zea mays
ggccgcccttttttttttttatttttttcaataactctgtactttcaattactatcgaattccgcgtgacacaaatcctcgttaacgagcgagaaggatatgggagtaagatactatatagcactttacatcgacttgaggacagagacccacggacaagaaactctgatacaaaacacgttatcctacaatcttgtagcttgggttgacaaggttgtccaagcctgagacgacttggattgattcgatgacatctccaactttgacgtccggcaagtagt

SEQ ID NO: 15696 - DNA, 311 bp, Zea mays
gagaccgtggcggtctctagtcctcttgctgctctgtctagtctccaagttgtgttgtccgtcgaccgctctacacgtctcttgtcgaccatctgacaccgaggtggaagaaggaagcagtcagcagatggatccatggatcagcagccagccttctctgagccttgacctgcgcgtcggcctgccgccggtcagcctgcaccaccaggcgccggtggccgtcgccttgcccaggcccaagctgctcgtcgaggagaacttcctcctggcggctccaaagaaagaaccagaggtcgcggctctcgagacgg

SEQ ID NO: 15697 - DNA, 312 bp, Zea mays
cgagcgacgaagcgcgcagaaagagaagagacctcggagctgagatggcacaagccatggcgtcgatgaccggcgtctcgcagggcgtcgtgcccagcaggcgcgccgacagcagaaccaggacggccgtcgtcatcgtcagggcgtccgcagatggcgacgccgttgcgcaggcgggccgccgcgccgtgatcgggctggtggccactggcgtcgtcggcggcgccttgtcgcaggcggcgcgcgccgagaccgtcaagaccatcaagattggagccccgccgccgccgtccggtggagtccccgggactc

SEQ ID NO: 15698 - DNA, 312 bp, Zea mays
gcaggaggtccttcaccgtgcgtgcctctctccgcaaggccactgccaccgccgccgtggccgttgccgccagcgtcctgcttgccggcggcggcgccatggcccaggaggtgctgctgggcgcaggcgacggcgggctcgtcttcgagcccagccagttcaccgtcaaggccggcgacaccatcaccttcaagaacaacgccggcttcccgcacaacgtcgtgttcgacgaagacgaggtgccgatcggcgtcgacgcctccaagatctcgcaggaggagtacctcaacgcgccaggcgagacctactccg

SEQ ID NO: 15699 - DNA, 311 bp, Zea mays
cggacgcgtggcgctcaccgacgccacagcttgtgcgcgcgcaatggcactcgtgtccgcctcctcgtcctccaccaccgccgtcgcggcgatccccaggaatgggcagcagcgggcgtcgtcgtcgttgttctcctcctcctcgtgttcctccttcctcgtcggcaagacgctgctgaggcaggccgaggcagcccggccgtcgttcgccgtgcgcgccgcggcggggttccgacaggccgatctggttccccggcagcatccctccgccgtggctcgacggcagccttcccggcgacttcggctttgat

SEQ ID NO: 15700 - DNA, 315 bp, Zea mays
ctgcaacagaaatagagctggcaaagagattgaaggagttctctttgaaggaaacagggttggaccagtatgctgttgcgaaatttgctgaaagctttgaaatggttccaagaaccctggcagaaaatgccggacttagcgcaatggatgtaatatcctctctttatgctgagcatgctagtggcaatgtgaaagttggcattgacctggaggaaggtgcctgcaaggacatcacgaccttgaaaatatgggacctttatgtcacaaagttctttgccctaaaatattctgccgatgccgcatgcaccgtgctgc

SEQ ID NO: 15701 - DNA, 312 bp, Zea mays
  unsure (1)..(312): unsure at all n locations
ggcgtcccacctgctcaagtacgactccacgctcggcatcttcgacgccgacgtcaagcccgtcggcgacaacgccatctccgtcgacggcaaggtcatcaaggtcgtgtccgaccgcatacccagcaacctgccgtggggcgagctcggcatcgacctcgtcatcgagggcatcggcgtcttcgtcgaccgcgtaggcgcggggaagcacatccaggcgggggccaagaaggtgctcatcacggcgcccggcaanggcgacatccccagctacgtcgtcggcgtcaaatgctgacagtacaaccccgacga

SEQ ID NO: 15702 - DNA, 307 bp, Zea mays
cataaagcatcggttgggggatctattttatcgcctagtatcccataagatcgacgatggtgcaggattctaagatgctttggtcggcaagtttaagaaactgtacgacgaccttaccactgggtatcgcaacctagaagatgaggcacggtgaactgctgtagattttgtgtaagacaataatggctgccaaatggtttataaggtacggaagttgtagattgagaccatgtatgaggattttccccaccgctactcatttctttgccaccactattttagtcatcagtgctggatgggcaccctg

SEQ ID NO: 15703 - DNA, 305 bp, Zea mays
gctactagctagctagcagcactgcgggtacgtacccaactactacacattacgtacgtgagctagctagctagcagctagtgatagagaccagatcagctgcagcggcgacgatggctcctgagaagctgaagctgctcgtcggagtgctggccctgcagttccttctggcagggttccacatcgtctccagggcggcgctcaacatgggcatcagcgagatcgtgttcatggtgtacaggaacctcatctccctcgccttgctcgctccgttcgcctacttcctcgagaagaaagacaggccg

SEQ ID NO: 15704 - DNA, 125 bp, Zea mays
gccatcaacgacaccggcgggtcaagcaggcgtcccacctgctcaagtacgactccacgctcggcatcttcgacgccgacgtcaagcccgtcggcgacaacgccatctccgtcgacggcaaggtc

SEQ ID NO: 15705 - DNA, 292 bp, Zea mays
  unsure (1)..(292): unsure at all n locations
aggagagtacgtggaggagcagccatggcttcatcggtggccgccgcggcgagcacattcctgggcacccgcctggcggacccggcgccacagaacgggcgcatcgtggcccggttcgggttcgggttgggcggcaaggcgaagctgctccgaagaaggtggcgaagacatcgacctcctctgaccggccgctgtggttccccggcgccgtggcgccgnactacctggacggctcgctggtcggcgactacgggttcgacccgttcggtctcgggaagcccgtggagtacct

SEQ ID NO: 15706 - DNA, 288 bp, Zea mays
ggacgcggtgcttcgtgcagctcggcgcgaaggagcagcgggaccctacgtcctggatctgcgacaccggggcagccgaaccacatgacggggtctcgggcggcgttcgcggatctggacacgacggtgtctgggtcggtgcggttcggcgatgactccatggcggagattgaagggcgcgggaccgtgctgttcaagtgcaagaatggcgagcatcgctctttcaccgccgtttactacatcccgcgactcacggcgaatatcgtgagcctcggccagttggaggag

SEQ ID NO: 15707 - DNA, 288 bp, Zea mays
aattcgaggaactatgttcagaccttatagacaggcttaaaactcctgttaataatgccttaagagatgccaagttgtctgtcagtgatctagatgaagttattcttgtgggtggatccacccgaatccctgcagttcaagaacttgtgaggaagcttactgacaaagatcccaatgttacggtcaaccctgatgaggttgtttctcttggggcagctgtgcagggtggggttttggcaggagacgtgaaagatgtagttcttctggatgttactccattatctcttg

SEQ ID NO: 15708 - DNA, 291 bp, Zea mays
cccacgcgtccgcccacgcgtccgcacagggtcccacccacaagagaggcatggcggccacatcgtccctgaagagcagccttctcctcccgtctaccatctccgacttcagtggcgcagcgcagccgtctccatctcaacgcagaagaggagatcacggggggcgagggtgcaggtctcagcggctgcggactccaagaacattctggtcatgggggggactaggttcatcggggtcttcctgtccaggctccttgtcaaggagggccaccaggtcacattgttcaccag

SEQ ID NO: 15709 - DNA, 288 bp, Zea mays
gtcactggctggtatagcctgagtgtgagtgagtgatcgagctagctgagctccgatcctcgctagctagctaggataccgccataccacaagtcttcttcacaagtttaggagtgacagcaacaagagatctcgatggcctctgccaccgtgctcaagtcctccttccttcccaagaagtccgaatggggcgccaccaggcaggccgccgcgcccaggccgcccaccgtctccatggtcgtccgcgcctccgcctacgccgatgagctcgtgaagaccgcgaaaacg

SEQ ID NO: 15710 - DNA, 173 bp, Zea mays
caccatcgaccttcaagtctcgctacgtagcagtgcaataaaaaaagcagccgcaatggcgagcagcaccatggccctctcctccacggccttcgccggcaaggccgtgaacgtgccgtcgtcgtccgccttcggcgaggcccgcgtgacgatgcgcaagacggcagcgaagg

SEQ ID NO: 15711 - DNA, 286 bp, Zea mays
gcgactgtcgcgaggcaaggccatcgtccgccatgacgctctccctctccacctctttcctccccatccccgccgccgcgaggaccaccgcccgcaccctacgctccgtcgtcccctcccaggggatgcgctgctcgatgcgcaagaaggggttgcacccggagatctacgaggacgcgaaggtgtactgcaacggcgagctggtgctggtgacggggggcaccaagccggagtacacggtggacgtgtggtccggaaaccacccctactatgtcggcgacacctc

SEQ ID NO: 15712 - DNA, 286 bp, Zea mays
cccacgcgtccgcccacgcgtccggtaaatatgcagataaacttgaggacttcaaatatgaggagaactccaaaaaagcagtacaatgcttgaacaatatggtgactgatgcactgattcatgctgaagagtgccttcagtacatgtcagccttgaaggatcatgccattttccgtttttgtgcaataccccagataatggcaattggaacatgtgctctttgctacaataacgtgcatgtctttagaggagttgtgaagatgagacgtggtctcacggcacgaat

SEQ ID NO: 15713 - DNA, 285 bp, Zea mays
cgtgagtatccaattggaagaggaaaagccttgcagtttatctatggtagcaagcaagtggtaacaaaaggcggcatccttgccacaactgcaacaacaaacttgtaccggagggcacgatacaaggaggggatgaaggatatccagtctcaatgctgcagccctgatgaagttgtttttggctctgacttccaccagtccttgtattgtcacttgctctgtggtctaatatactctgatgaggtccatcaggtgttctcgacattcgctcacagcttagtccat

SEQ ID NO: 15714 - DNA, 98 bp, Zea mays
ctccttccgccgcttcctcgacatgttcggcaacgtcgtcatggacatcccccgctcactgttcgaagagaagcttgagcacatgaaagaatccaaag

SEQ ID NO: 15715 - DNA, 288 bp, Zea mays
gcgagtgagtgaacaccagccgtattgtcccgaccccgaccgatcctcgcctgctgcagccatggcgacctccgcggcgctctccaccgccgccaatcccacccagctctaccggtcccgcgctttgctgggcaagccggtgaaggggcttggcctgagcatgggccgcgagcgcgcccagcggagcattgtgtgccaggcggcgagcagcatctccgccgaccgcgtccccgacatggagaagcggaagctgatgaacctcctcctcctcggcgccatctcgttgcc

SEQ ID NO: 15716 - DNA, 291 bp, Zea mays
  unsure (1)..(291): unsure at all n locations
cagtctccactctggagtctggaactcccctcatcctccacatctccaccgcatcggaactaggaaggcgaacgntaggcgcgtgcgcggcgcggcacggatcgagcgatggcggtggcccctcctacggcggcggcgctggagcagctaagcagcagcaagatgttcgacggcttcaatctccgcttccgccaccagagcgccacccttggctgcgccatgactttctccatctacctgcccccgtccccggcgtccaaccttcccgtgctgtactggctctcgggtctc

SEQ ID NO: 15717 - DNA, 284 bp, Zea mays
agcaagcaagcaagcagcgagtacatacatactaggcagccaggcagccatggcgcccaccgtgatgatggcctcgtcggccaccgccgtcgctccgttccaggggctcaagtccaccgccagcctccccgtcgcccgccgctcctccagaagcctcggcaacgtcagcaacggcggaaggatccggtgcatgcaggtgtggccggcctacggcaacaagaagttcgagacgctgtcgtacctgccgccgctgtcgacggacgacctgctgaagcaggtggact

SEQ ID NO: 15718 - DNA, 283 bp, Zea mays
acagcaacaagagatcgatggcctctgccaccgtgctcaagtcctccttccttcccaagaagtccgaatggggcgccaccaggcaggccgccgcgcccaggccgcccaccgtctccatggtcgtccgcgcctccgcctacgccgatgagctcgtgaagaccgcgaaaacgatcgcgtcgccggggcggggcatcctggcgatggacgagtcgaacgcgacgtgcgggaagcggctggcgtccatcgggctggagaacacggaggccaaccggcaggcgtaccg

SEQ ID NO: 15719 - DNA, 277 bp, Zea mays
gcgaagtcccccctccctgcctccttccccggcgccccgctcttcctccttccgctccggcgatgggcactggccgccgggcggggcggcggcgtgttccaccgcctcctcgccctctcgtcgctgctgctcctcgcttccggcgaggtcgtcttcgaggagcgcttcgaagatggttgggagactcggtgggtggaatccgactggaaaaggagtcaagggaaagcaggaaggttcaagcacacagcggggagatactctgcagatcctgatgaca

SEQ ID NO: 15720 - DNA, 278 bp, Zea mays
cccggcagcacccctccgccgtggctcgacggcagccttcccggcgacttcggctttgatccctggggcctcggatctgacccggagagcctgcggtggaacgtgcagcggactggtgcactgccggtgggcgatgctcggcgcggcgggtatcttcatcccggagttcctgaccaagatcggcgtcctcaacacgcccttctggtacaccgccggcgagcagcagtacttcaccgacaccaccaccctcttcatcatcgagctcatcctcatcggct

SEQ ID NO: 15721 - DNA, 283 bp, Zea mays
ctcaacagcaacagctaagcctctcccacaagacagcaacatggctgaggaggaggccaagaaggtggaggtggaggtcaccaaggagcccgccgccgccgccggccgacgactccaaggccctggccatcgtcgagaaagttgcagatgaacctgctcccgagaagcctgcccctgcgaacaagggggctccaatgacagggatctcgctcttgcaagggtggaaacagagaagaggaactctttgatcaaagcttgggaagagaatgagaagacaaaagct

SEQ ID NO: 15722 - DNA, 282 bp, Zea mays
ggccctctcctccacggccttcgcggcaaggccgtgaacgtgccgtcgtcgtccgccttcgggaggcccgcgtgacgatgcgcaagacggcggcgaaggccaagccagcggcggcgtccgggagaacgtggtacggccccgaccgcgtgctgtacctgggcccactgtccggcgagccaccgagctacctgacgggcgagttcccgggcgactacggctgggacaccgcggggctgtcggcggacccggagacgttcgccaagaaccgggagctggaggtga

SEQ ID NO: 15723 - DNA, 284 bp, Zea mays
ggcaagaatggcagcaatcatggctaccacctatagaccgtatttgggtgttggtctaggacctttatcgtttttgaccaagttgcggataccacaccctggaaggttggtggcagattcttcatcaagtatggaatgcctgctatgctgagctgggtgcttggtggcaacagctcaaagctagaaggaagacctttaagctgccgactttctgacaaggcacatgacgagctttatcggtggtttgacgatgacgatgcgctggaacaagctatgggtggaga

SEQ ID NO: 15724 - DNA, 211 bp, Zea mays
ctatagcaaccggtccaacactttcacgctcaggcgctcagctctagcaatggctgcctccaccatggcgatctcctccacggcgatggccggtacccccatcaaggtgggctccttcggcgagggccgcatcaccatgcgcaagaccgtgggcaagcccaaggtggcggcgtccggcagcccctggtacggccccgaccgcgtcaagtac

SEQ ID NO: 15725 - DNA, 139 bp, Zea mays
gtacagggaagacgccactgtcgatatacctagctcaaaagggatacaaggtggcaaatgtcccaatcgtgatgggagtggaccttccaaagtccctttttgagatcaaccaggacaaggtttttggactgacaataaa

SEQ ID NO: 15726 - DNA, 330 bp, Zea mays
caacactggtgttacatttgatgatgttgctggtgtggatgaagcgaacaagacttcatggaggtggttgagttcttgaagaaacctgaagagttcactgctgttggtgctcgcattcctaaaggtgttctgcttgtcggtcctcctgggactggtaaaactttgcttgccaaggcaattgcaggagaggctggcgtaccatttttctcaatttcaggttctgagtttgtggagatgtttgttggtgttggtgcttccagagtacgtgaccttttcaagaaggccaaggagaacgctccttgcatagtgtttgtcgatgaaattgatgct

SEQ ID NO: 15727 - DNA, 199 bp, Zea mays
cccacgcgtccgcccacgcgtccggcactttgctgagcagctgacagcatgtggtttcggagtatacgcaatggattggatagggcatggtggaagcgatggcctgcacggctatgtgccttcactagattacgtcatcgaagacatcgaagtgcttgttgacagaattctgatggagaatccagggggtccttgtttc

SEQ ID NO: 15728 - DNA, 331 bp, Zea mays
cgcatactgcatacacaacacagagcatcagaaggagctgcgatctgatcgacatggctgccgccaccatggctatcacctcccgcgcgctcatcggcaagccggcggctggcacgagggacgtcttcggcgagggccgcatcaccatgcgcaagaccgccgccaagcccaagccggcggcgtccggcagcccctggtacggtgccgaccgcgtcctgtacctgggcccgctgtccggctcgcccccgagctacctgaccggcgagttccccggcgactacgggtgggacaccgcggggctgtcggcggacccggagaccttcgccaagaa

SEQ ID NO: 15729 - DNA, 325 bp, Zea mays
tagcaaccggtccagcactttcacgctcagctccagcaatggctgcctccaccatggcgatctcctccacggcgatggccggcacccccatcaaggtgggctccttcggcgagggccgcatcaccatgcgcaagaccgtgggcaagcccaaggtggcggcgtccggcagcccctggtacggccccgaccgcgtcaagtacctcggccccttctccggcgagcccccgagctacctcaccggcgagttccccggcgactacggctgggacaccgccgggctgtccgccgaccccgagaccttcgccaagaaccgcgagctggaggt

SEQ ID NO: 15730 - DNA, 329 bp, Zea mays
caacgccacagcttgcgcccgcaatggcactcgtctccgcctcctcgtcctccaccaccgccgtcacggcgctccccaggaatgggcagcgggcgtcgtcctccttcctcggcggcaagacgctgctgagacaggccgaggcggcccggccgtcgttcgccgtgcgcgccgcggcggaccccaacaggccgatctggttccccggcagcacccctccgccgtggctcgacggcagccttcccggcgacttcggctttgatccctggggcctcggatctgacccggagagcctgcggtggaacgtgcaggcggagctggtgcactgccgg

SEQ ID NO: 15731 - DNA, 329 bp, Zea mays
cccacgcgtccgcaaaaccatcagatctagcagaactctctcgacctcatcggcgttggcggacgcgtgttgaccggagatggcgccgagcgggtggaggaggagcgcggcggcgcgtggtcgcctggcgcccggccacggtttgcctgtggctcgcgctcgccgccgccgcactgacgctcgcccaggctaagaaggacctgacggaggttacccacaaggtctacttcgacatcgagatcgacggcaagcccgcatgccggattgtcatggggctttttgggaagactgttcctaagacggcagagaacttccgagctctttgcaca

SEQ ID NO: 15732 - DNA, 323 bp, Zea mays
cccacgcgtccgcggacgcgtgggcgcgggcgctcgcaccaccacaaccacgacccgatggctttcatgcgctcccgctcaaatgcatcttctggcatgggagttgctcctaacattagggagacattcgttgagcttcaaatgaagaaggcattccgatatgttatcttcaaaatcgaagagaagcaaaagcaggtggttgtggagaagacaggggctactactgaaagctatgatgattttttggcctctctcccagagaatgactgccgatatgcgctgtatgattttgattttgttactggggagaatgtgcagaaaag

SEQ ID NO: 15733 - DNA, 148 bp, Zea mays
gtctaagtgctggaaacaatacattagtctctaaaacaatgtactaagtctgagacacaatacattagtctctaaaacaatgtactaagtctgagaaacatacctttattcttgatttgtactttgtcttagagactaatgtattgtg

SEQ ID NO: 15734 - DNA, 322 bp, Zea mays
tgtttgagacattttttggagcaagcatgggtggtttttctggtatggaccagagcgcgtttaggacaagcaggcgaacactgctattcagggtgaagacatcagatatgatgtgattctggggttcacagaggcgatatttggaacagagaaagatattatattatctcatttggaaacatgtgatacatgtggtggttctggatcaaaggctggctccaagttgagaatatgttccacatgtggtgggcgagggcaagtaatgcgaactgagcaaacaccatttggtctgttctcccaggtttctatttgccccacttgt

SEQ ID NO: 15735 - DNA, 321 bp, Zea mays
ccctctcctctgccgccgtcaccgccccttccttcgccgcaccagcgccagcccgcgccgtggtcagaaggaggtccttcaccgtgcgcgcctctctccgcaaggccaccggcaccgccgccgtggcaatggctgccagcgccctgcttgccggcggtgccatggcccaggaggtgctgctgggcgcaggcgacggcgggctcgtcttcgagcccagccagttcaccgtcaaggccggcgacaccatcacattcaagaacaacgccggcttcccgcacaacgtcgtcttcgacgaagacgaggtgccgagcggcgtcgacg

SEQ ID NO: 15736 - DNA, 319 bp, Zea mays
gcctcagcttgcaggttgcagccgatgagaatcgagcgtgatctccacatggccacaggggacggagaaactagctacacgaaaaattctaggattcaagagaaaactatgtttcagatcaagcctgtccttgaggaggccacaagagcagtatacacagctctccaccctcaaaccatggttgttgctgacttaggctgctcatctgggcctaacacactacgcttcgtatccgaggtgattggcatcatagctcgccattgcaaagaatatggccgacaacatgaccacacacagcttcagttcttcctgaatgacc

SEQ ID NO: 15737 - DNA, 319 bp, Zea mays
caacggcgtctccgctttcgacgtcgtgctccacgacgggtcgcccaacgtcggtggtgcctgggcgcaggacgctacatcgcagtcggcgctcgtcatagacgcactgcgcctcgctaccatgttcctcgctcccaagggcgccttcatcacgaaggtttttaggtctcaagattacaacgctattatgtactgtcttaaacagttgtttgagaaggtcgaggcgactaaacctacggcaagtcggtctacatctgctgaaatttatatcatttgcctgaaatacaaggctcctgcaaagattcaaccagaacttctt

SEQ ID NO: 15738 - DNA, 173 bp, Zea mays
cacaattgatgttggtacaaataacgagaaactgcttaatgatgagttctacattggactccggcaaaaacgtgcgactggcgaggagtatgatgagcttattgaagagttcatgtctgctgttaacaattctatggtgagaaagtcctcattcagtttgaggactttgccaa

SEQ ID NO: 15739 - DNA, 272 bp, Zea mays
cccacgcgtccggaagacgagtgtcaagtgaacctgaaacttgcggtgtcactggctggtatagcctgagtgtgagtgagtgatcgagctagctgagctccgatcctcgctagctagctaggataccgccataccacaagtcttcttcacaagtctaggagtgacagcaacaagagatctcgatggcctctgccaccgtgctcaagtcctccttccttcccaagaagtccgaatggggcgccaccaggcaggccgccgcgcccaggccgccc

SEQ ID NO: 15740 - DNA, 154 bp, Zea mays
gtgttccaggcctacacgctgaagcggataagggaccccaacttcaaggtgacgccccagccgccgctgtccaaggagttcgccgacgagaacaagcccgccggactggtcaagctgaacccggcgagcgagtacccgcccggcctggaagaca

SEQ ID NO: 15741 - DNA, 276 bp, Zea mays
gggtccgtggccatggcgacgtccaagctctccgctaccaccgtgccactccagcaggggggcggcctgtccgagttctccgggctcaggagctccgcgtcgctgcccatgcgccggaatgccacctccgacgacttcatgtccgccgtctccttcaggacccacgcggtcggcacgagcggcgggccgcgtcgggcgccgacggaggcgaagctgaaggtggccatcaatgggttcggccgcatcgggcgcaacttcctgcggtgctggcacggg

SEQ ID NO: 15742 - DNA, 272 bp, Zea mays
gccaaacccaggtcccgcgcacccaatccgacccgccccctgtcgcatccggatccccccgaccccgcgcggcgcggaccagcagccatgtcgtgctcccacctctccagcgcctggtcctcctcggcggtcgccagcagcgcctccaccacccgacggcgctcccccccgcggtcgggtctcctggttcggtgttccctccgtgagctccggacccgcatcgactccgtcaggaacacgcagaagatcacggaggccatgaagctggtggc

SEQ ID NO: 15743 - DNA, 168 bp, Zea mays
accacgcgtccgtggcttcctgcttgctgccagcggtcttttggttctttacattgctatcaatttgtttggaatttattacggtgatgactgggaaggtctttttgaagctattactggttatggccttggtggttcttctatggctcttttcggccgcgttggtgg

SEQ ID NO: 15744 - DNA, 266 bp, Zea mays
caccatcgaccttcaagtctcgctacgtagcagtgcaataaaaaaagcagccgcaatggcgagcagcaccatggccctctcctccacggccttcgccggcaaggccgtgaacgtgccgtcgtcgtccgccttcggcgaggcccgcgtgacgatgcgcaagacggcggggaaggccaagccggcggcggcgtccgggagcccgtggtacggccccgaccgcgtgctgtaccagggcccactgtccggcgagccgccgagctacctga

SEQ ID NO: 15745 - DNA, 270 bp, Zea mays
agacaagtggtttccaaagccaagtgtgtgtactagcaaccagctagctcgggcggcagaggcagccatcatgtcggaggagaagcaccaccacttcttcaaccaccacaagaaggacgaggagcagcccgccggctagtacgggtactccgagaccgaggtggtcaccgccaccggcgagggcgagtacgagaggtacaagacggaggagaaggagcacaagcacaagcagcacctcggcgaggccggcgccatcgtcgccggcggcct

SEQ ID NO: 15746 - DNA, 273 bp, Zea mays
cagcgggcgggctccagtcgcaactcgcaacacagacgccgccgccgcccaaagaaagacgtcaactccaggagacaagatagtgagaactgaagagaaggatgggcttcgagaagcagatcctgagatccggcaccggccccaagccgataaagggccagaaggtcaccgttcactgcaccggctacgggaaggatcgtgatctgtccaagaaattttggagcaccaaggaccctgggcagcagccattcagtttcagcattggtcagggtt

SEQ ID NO: 15747 - DNA, 273 bp, Zea mays
cacgcacgcatacacagcacagagtgaggtaagcatccgaaaaaagctgtgatctgatcgacatggccgccgccaccatggctctcacctcccgcgcgctcgtcggcaagccggcgaccagcaccagggacgtcttcggcgaggtgcgcatcaccatgcgcaagactgctggcaagcccaagccagcggcgtccggcagcccctggtacggggccgaccgcgtcctgtacctgggcccgctgtccggccagcccccaagctacctgaccggcg

SEQ ID NO: 15748 - DNA, 265 bp, Zea mays
cccacgcgtccgcccacgcggccgaccggatcaagggcaagcagcaggacaagggcggccactccgactccggcaatgacgccggccgcctggccgcggcgtggcagctgtacagggcgcaggaggagatggcgcaggtggccaagcgctacggcgtcaagctcaccttgttccacggccgcggaggcaccgtgggcaggggtggcgggcccacgcaccttgccatcctgtcccagccgccggacaccatcaacgggtccatccg

SEQ ID NO: 15749 - DNA, 269 bp, Zea mays
agcagcctcatccccctgtccacttctacagcccctctgctgcagcaagaaggaaagaagctagcgcttatagcttgtcagccatggccaccgccgccgcgtctagcctcctcaagtcctccttcgcgggctcccggctcccggccgccacgctgaccacaccggcgtccctcgtggtggccaccggcccgcgcggcgccggcgcggggcccatctgcgcgtccatgtccatgtcctcctccaacccgccctacgacctgacgtccttc

SEQ ID NO: 15750 - DNA, 268 bp, Zea mays
agcaaccggtccaacactttcacgctcaggcgctcagctctagcaatggctgcctccaccatggcgatctcctccacggcgatggccggtacccccatcaaggtgggctccttcggcgagggccgcatcaccatgcgcaagaccgtgggcaagcccaaggtggcggcgtccggcagcccctggtacggccccgaccgcgtcaagtacctcggccccttctccggcgagcccccgagctacctcaccggcgagttccccggcgactacg

SEQ ID NO: 15751 - DNA, 252 bp, Zea mays
gctacggcgtcaagctcaccttgttccacggccgcggaggcaccgtgggcaggggtggcgggcccacgcaccttgccatcctgtcccagccgccggacaccatcaacgggtccatccgtgtgacggtgcagggcgaggtcatcgagttctgcttcggggaggagcacctgtgcttccagactctgcagcgcttcacggccgccacgctggagcacggcatgcacccgccggtctctcccaagcccgagtggc

SEQ ID NO: 15752 - DNA, 269 bp, Zea mays
ggcaaagaaagggtcgaacgcatatcgagacagctaagatgaaatggattcctgttaaacagaaattggttttcctcaagaaaaatgcagaaccttatgtacaaaaggtatcaacaagatcagtggagttttacgagtcatcaagggatgctgtgacacctcatgctgtcaaagttaaagtgtttgttcattcctactaccagaaaatcaagaagttttctaagccttacattgatcaaattgctgagattactaaaccacatgttgag

SEQ ID NO: 15753 - DNA, 329 bp, Zea mays
gtcttgagatttactcgtcagtagacacggtgcttccaatggacaaatgatgtggctgacagactggcattttcagtggtgctctcaagtgacacagttttctctgctccaatgaatgagacctaccagcttctcggggtggatgggaatgacatcctcagcttagagaagtatttacaagattattttactaacattttgaagaagttaaaggatctcaaggcacaatccaagcaaactgatatattcttttgatataagaaggatttctgtgacctagggacataattacaaatctgtgtctcaaatgacagatgagtgagcacaat

SEQ ID NO: 15754 - DNA, 323 bp, Zea mays
ggcaaaagtgccgtgaagatcgccgtggacatggttaacgagggccttgttgagccccgctcagcgatcaagatggtagagccaggccacctggaccagcttctccatcctcagtttgagaacccgtccgcgtacaaggatcaagtcattgccactggtctgccagcctcacctggggctgctgtgggccaggttgtgttcactgctgaggatgctgaagcatggcattccccagggaaagctgctattctggtaagggcagagaccagccctgaggacgttggtggcatgcacgcagctgtgggggatcttacagagagggg

SEQ ID NO: 15755 - DNA, 258 bp, Zea mays
  unsure (1)..(258): unsure at all n locations
tcatcctcccacttgctcctcctctcccgccagcaggcggcctccctacgatgccgcctctccttcctcggccagcccagaaggcccggcagggtcacggcccaggcgccggccgctaaggacgtgcggtgcatggcggccgtggacactannnnnnnnnnnnnnnnnnnnnnnnnnacgagccccaagtcgagcagctacgagatcgtgacgctcacgacgtggctgctgcagcaggagcggaccggcgcgatcgac

SEQ ID NO: 15756 - DNA, 320 bp, Zea mays
cgctgctgtggtcgcacgtgggtgggggaaatgctgcgtctcgggatgctcaggcattcgcgtaaacgatgcggagaagctcgtgacgatcggaggccatgtgctgcgcgaaggtgagtggctgtcgctgaatgggtcgactggtgaggtgatccttggaaagcagccgctttccccaccagcccttagtggcgatctgggaactttcatggcctgggtggatgatgttagaaagctcaaggtcctggctaacgccgatacccctgatgatgcattgactgcgcgaaacaatggggcacaaggaattggattatgccggc

SEQ ID NO: 15757 - DNA, 322 bp, Zea mays
gtcgtgccacgacgtgatcctcggcaactggacgccgtcgagcgccgacgcggcggcggggcgggttcccggctacggcgccatcaccaacatcatcaacggcgccaaagactgcggcgtggggcaaaacgccgccaacgtcgaccgcatcggctactacaagcgctactgcgacatgctcggcgtcggctacggcgacaacctcgactgctactcccagcagcacttctgatgaactgctgttcgacttgactgctagcactgttgctacagtataagatctgtgtccggacgtgttccatacatattttattattttaat

SEQ ID NO: 15758 - DNA, 248 bp, Zea mays
gcaactacacccagttccggtactcggaagccgtgaacgtgatcggtttcctgtactcggtgttccagttcgtcgcgctcgtcgagctcatgaggaggaacaagcatttgatcccccatcgcaagcgtggtctcttcgacttcaccatggaccaggtgctagcataccttctgatatcgtcgtcgtcgtccgcaaccggtcgagtgagcgacctgattgacaactgggggagcgaccctttccgacga

SEQ ID NO: 15759 - DNA, 323 bp, Zea mays
ggcacagaggaagcttgaggagaagcgtgccaaggcgatggagaaggcgcagaacgaggtggccaaggcgcggcggaaggcggaggagaagcgcgcgtccgcggaggccaagcggggcaccaaggtggcgcgagtgctggagctcgccaacttcatgagggccgtggggagggcgccctccaccaagcgctccttcttctgaacccaccggcctcttcttcaccagttcctctgtcttgccgccgccgcctgtgcagttcagttcagttcagttgtcctgtgggtcggaccgttcaccgcttcactccacgggatcaggcaca

SEQ ID NO: 15760 - DNA, 326 bp, Zea mays
gcccagcaggccattctgctcgccttactccctcacagaacccagtaaaatattgccagtcccgccgtcgagatggccccacgccgcctgctcgtcctcgccgtcctcgccctcgcggccaccggcgccgcggccaactccggcttcgcggactccaacccgattcggcctgtcaccgaccgcgcggcctccgcgctcgagtccacggtcttcgtcgcgctcggccgcacccgcgacgcgcttcgcttcgcacgcttcggcgtcaagtacggcaagagctacgagagcgcggcggaggtccataagcggttcaggatcttctccga

SEQ ID NO: 15761 - DNA, 325 bp, Zea mays
gtccgctactccgctccccctcagtcctcagttcctcacctagcggtacgtgcgcgcgggagacgtagatggcggcttcggaggcggcagcagcggcggcaacaccggtgacgccgacagaggggacggtgatcgcgatccacagcctggaggagtggagcatccagatcgaggaggccaacagcgccaagaagctggtggtgattgacttcactgcaacatggtgtcctccgtgccgcgccatggctccaatttttgctgatatggccaagaagtcgccaaatgttgttttcctgaaagttgatgtggatgaaatgaagaccat

SEQ ID NO: 15762 - DNA, 287 bp, Zea mays
caccaccattccttccccaactctgcaggctgctcgtcgccctccctccacgccggacgcgccccgatccagatccaggggcgtaacatggcatcaaaacgtatcctcaaggaattaaaggacctgcaaaaggaccctccaacgtcatgcagtgctggtcctgctggtgaggatatgttccactggcaggcaaccatcatgggtcctcctgatagtccatatgctggaggtgttttcttagtgaacattcatttccccccggactaccctttcaagcctccaaaggt

SEQ ID NO: 15763 - DNA, 315 bp, Zea mays
atccgatcccacccggcagcggcgctcgcaatggccacccacgcagctctcgccgcctcccgcatccccgccggcgcccggctgcacagcagggcgcggcgtcgtccaggcacggcgtgcagaggctggacttcgccgacttctccgggctcaggccggggtcgtgctccgtgagcgctgccgcgcgggaggcgtccttctccgacgtccttggcgcgcactcgtcgccaaggccaccggggagaacgccgtgagggcgcacgcagaggcgaactgtaaggtggcgatcaacggcttcggccgcatcggccggaa

SEQ ID NO: 15764 - DNA, 315 bp, Zea mays
tgaaactgcaaattctgctgttatgaggcttacaaaagaaatttcatcgatggaggaggttacagctgctgaacctaaattaagaactgggctgcccactacatatgctgaccgtgtgttttcaaacgagatgaacattgcaatcaaagaaactgagaagagctacaatgctttcatgttcagagacgccctgaagtctgggttctatgacctccaattggctagagatgagtacaggctctcttgtggtgcagcaggcatgaaccgtgatctgttgtggcgatttatggatgtccagaccaggcttatcacccc

SEQ ID NO: 15765 - DNA, 311 bp, Zea mays
ggacgcgtggcttcttcttcatgtggtacttcctcaacgtcatattcaacatcctcaacaagaagatctacaactacttcccatatccatactttgtgtacctgatccatctagtagtgggtgtcgtatactgcctcatcagctggagtgtcggtctccccaagcgagcgcctatcaatggcacgctcctcaagcttctctttccagtcgccctgtgccatggtattggtcacatcactagcaatgtgtccttcgctgctgttgcagtctcatttgctcacactatcaaagctctggagcccttcttcagc

SEQ ID NO: 15766 - DNA, 311 bp, Zea mays
cagaggaaaagggcaaaagccaaaaggcatcaccgccgcgacgacgatggcagcctcgctccaagccgcggccaccctgatgcagccggccaagatcggcggccgggcgccctttgcctcgctgccgtcccgcccgtcgtcgcaactcgcctgcagggcgttcggcgtcgacgccggcgccgccaggatcacgtgctccctgcaggacgtcgccagcaggtgcgtcgacgccgcgaactcgccggcttcgcgctcgccacctcggcgctcctcgtctcgggcgcgacgcggagggcacgcccaagaggctg

SEQ ID NO: 15767 - DNA, 309 bp, Zea mays
ggggtgagctcggcattgacatcgtcatcgagggcaccgtagtcttcgtcgacggccccggcgccggcaagcacatccaggccggcgcgaagaaggtgatcatcacggctcccgccaagggcgccgacatcccgacctatgtcgtcggcgtcaacgagggcgactacgaccacagcgtcgcggacatcatcagcaacgcgtcctgcacgaccaactgcctcgcgccattcgtcaagatcttggacgaggagttcggaattgtcaaggggaccatgacgacgacgcactcgtacaccggcgaccagaggc

SEQ ID NO: 15768 - DNA, 312 bp, Zea mays
cagctcccacgctcaccgacgccacagcttgtgcgcgcgcaatggcactcgtgtccgcctcctcgtcctccaccaccgccgtcgcggcgctccccaggaatgggcagcagcgggcgtcgtcgtcgttgttctcctcctcctcctcttcctccttcctcgtcggcaagacgctgctgaggcaggccgaggcagcccggccgtcgttcgccgtgcgcgccgcggcggattccgacaggccgatctggttccccggcagcacccctccgccgtggctcgacggcagccttcccggcgacttcggctttgatccct

SEQ ID NO: 15769 - DNA, 310 bp, Zea mays
tttaggtgtaaggagacgttacaaggtagctggacaggattcagaagttacttattttcactcttacattgatggagttgattttgtattcgtagaagcccctcccttccggcaccggcacaataatatttatgggggagaaagattggatattttgaagcgcatgattttgttctgcaaggccgctgttgaggttccatggtatgctccatgtggcggtactgtctatggtgatggcaacttagtttttattgctaatgattggcataccgcacttctgcctgtctatctaaaggcctattaccgggac

SEQ ID NO: 15770 - DNA, 314 bp, Zea mays
gagatccagacggaggacatcgacctgcccctcacccgcacccgccccgtcaagaaggtggccctcgtggtcctgaccggcgagcgcggcctctgcgggagcttcaacaacaacgtgctcaagaaggcggaaacccgcatcgatgagctcaagcagctgggcctccagtacaccgtcgtccacgttgggaagaagggcaacgcctacttccagcgcctgccctacatcccgttggagcgcgatctagaggtgagcagcgtgcccaccgtcaaggactcgcaggccatctgcgacctcgtctaatcgctcttcgt

SEQ ID NO: 15771 - DNA, 316 bp, Zea mays
accacgcgtccgcggacggtgggccgccagcctccccgtcgcccgccgctcctccagaagcctcggcaacgtcagcaacggcggaaggatccggtgcatgcaggtgtggccggcctacggcaacaagaagttcgagacgctgtcgtacctgccgccgctgtcgacggacgacctgctgaagcaggtggactacctgctgcgcaacggctggataccctgcctcgagttcagcaaggtcggcttcgtgtaccgcgagaactccacctccccgtgctactacgacggccgctactggaccatgtggaagctgcccatg

SEQ ID NO: 15772 - DNA, 315 bp, Zea mays
gccgccctttttttttttttttttctttttttctttttttttttttttttttttttttttttttttttttttttttgggaagcaaaacaaataaggccttgttcgcttattcccaatacacatggattgaatgggtttggaaaaaattatgaagaagtttgacttgcgtgggattcaaacccatccaatcccactcaatccacatggattgaaggctaaccaaacaagccctaagcagatcctcctgacaacggatctctacataggttcatttgccaacaaaagaattccagcaatgtctgaggccttcttcat

SEQ ID NO: 15773 - DNA, 275 bp, Zea mays
cccacgcgtccggcaaccggtccagcactttcacgctcagctccagcaatggctgcctccaccatggcgatctcctccacggcgatggccggcacccccatcaaggtgggctccttcggcgagggccgcatcaccatgcgcaagaccgtgggcaagcccaaggtggcggcgtccggcagcccctggtacggccccgaccgcgtcaagtacctcggccccttctccggcgagcccccgagctacctcaccggcgagttccccggcgactacggctg

SEQ ID NO: 15774 - DNA, 272 bp, Zea mays
atctgtttagccaagctgtggccaacctctgcgaggaatggagatggagtcgactcctctcttgacaccatacaagatgggcgatttcaacctggcacacagggttgtgctggcgccgctgacgaggtgccgggcgttcgggaacgtgccgcagccggagcacatggctctctactaccgccagcgggcgacgcccggcggcttcctcatcgccgaggcctgcgccgtgtcggagagcgcgcgcgggtacccggacgttccggggctgtgga

SEQ ID NO: 15775 - DNA, 271 bp, Zea mays
cccacgcgtccgtgctgggcacgtattcggcgggggcggtcgcgacgatggggaggccacgcggaagaagtacgcagacaccgtggcgcgtatcaactccatggagcccgaggtctccgcgctctcagacgctgatttgcgtgcacgcaccgctgcgctccaggaccgtgctcgctccggggaatccctggattcccttctccccgaagcatttgctgttgtgagggaggcttccaagagagttctaggcctccggccgtttgatgtgcag

SEQ ID NO: 15776 - DNA, 272 bp, Zea mays
agctgatgaaatgctttctcgtggtttcaaggatcagatttacgacatcttccagcttctcccagccaagattcaggttggagtcttctctgctaccatgccccctgaggcccttgagattacccgcaagttcatgaacaagccagtgagaatcctcgtgaagagagatgagctgactcttgagggtatcaagcagttctatgtgaatgtggataaggaagactggaagctggacacactgtgtgacctgtacgagacccttgccatcaccc

SEQ ID NO: 15777 - DNA, 105 bp, Zea mays
agccgacgatataataaagcgcgcgcgtgcacggtgacatgctcgtagactgattgagatggcacaagccatggcgtccatgaccggcctctcgcagggcgttct

SEQ ID NO: 15778 - DNA, 273 bp, Zea mays
ggacgctagctcaccaccaacctcagcacatcgaggagaagaggagtggccatggcttcgtcggtggccaccgcggcgagcacattcctgggcacccgcctggcggacccggcgccgcagaacgggcgcatcgtggcccggttcgggttcggcggcggaaagcccaaggctgccgtcccgaagaaggtggcgaagacgtcgatctcctctgaccggccgctgtggttccccggcgccgtggcgccgtactacctcgacggctcgctggtcggc

SEQ ID NO: 15779 - DNA, 271 bp, Zea mays
gcacgcatacacagcacagagtgaggtaagcatccgaaaaaagctgtgatctgatcgacatggccgccgccaccatggctctcacctcccgcgcgctcgtcggcaagccggcgaccagcaccagggacgtcttcggcgacgggcgcatcaccatgcgcaagactgctggcaagcccaagccagcggcgtccggcagcccctggtacggggccgaccgcgtcctgtacctgggcccgctgtccggccagcccccaagctacctgaccggcga

SEQ ID NO: 15780 - DNA, 269 bp, Zea mays
atctccactgtccagtgcgcgcgtcaagcttgcttagctagccgccatggcctccctcgccgccgtctccgtgaagcccgtggccatcaagggtctcgccggcagctccatctccggaaggaagctcgccgtcgccaggccgttggcccgctccatccgcagccccgcgcaccgccgtggtggccaagtacggcgacaagagcgtctactttgacctcgacgacatcggcaacaccaccggacagtgggacctctacggctctgacgcg

SEQ ID NO: 15781 - DNA, 272 bp, Zea mays
gcagctcctctgccagcgcttcgccttccccagcgacggcatcatcatgctcactgacgaccagaaggacccgttccgggtgcccaccaaggacaacatccggatggcgatgcagtggctggtgcaggggtgcagcagcggcgactccctggtgttccacttctctgggctgggcgcgcaggtcgccgacgcggactgcgacgagcaggacgggtacgacgaggccatctgcccggtggactcgttccagaagggccccatcctggacgacg

SEQ ID NO: 15782 - DNA, 265 bp, Zea mays
ggacgctggcaagaacgtcatcggcgcccgcagtctcgtggcggatcatctcctccatcgagcagaaggaggagggccgcgggaacgaggcgcacgccgcctccatccgcgcctaccgctccaagatcgagaccgagctcgcccgcatctgcgatggcatcctcgccctgctcgactcccacctcgtcccatccgccggcgggccgagtccaaggtcttctacctcaagatgaagggtgactaccacaggtaccttgctgagttc

SEQ ID NO: 15783 - DNA, 268 bp, Zea mays
ctgagaatctggcgcccgagaagcgccactccttcgtgcacaacgggcagaaggtgttcgagtgggaccagacgctggaggaggtcaacatgtacatcgagctcccgaaggtgtgccaaccaagctatttcactgcagcatccaggctagccacgtcgaggtcggcatccgcggcaacccgccatacctcaaccatgacctgacacacccagtgaagactgactcgtcgttctggacaatagaagacggtgagatgcatataacactg

SEQ ID NO: 15784 - DNA, 270 bp, Zea mays
ggtgagaccccggcaattgccggcttgtatgacgagctgcttgtggcggaagaactcaagccctttgggaagcagctcagggacaaatacgtggagacacagcagcttctcctccagatcgctgggcacaaggatattcttgaaggcgatccattcctgaagcaggggctggtgctgcgcaacccctacatcaccaccctgaacgtgttccaggcctacacgctgaagcggataagggaccccaacttcaaggtgacgccccagccgccg

SEQ ID NO: 15785 - DNA, 267 bp, Zea mays
acacacactcgggtaaagctatctcgagctagctagctgctgtaaccgttgccatggccaaaatggtgttgctctgcgtgctcgtctccttcctcctgatgcccttggcctccctagccctgacgcaggacttctgcgtcgccgacctgacctgcagcgacacgccggcggggtacccgtgcaagtccagcgtcaccgccaacgacttctacttccacggcctggccggccagggcaaaataaacccactcatcaaggccgccgtga

SEQ ID NO: 15786 - DNA, 266 bp, Zea mays
gcacagcacgagcagcacgccgtccgctccaaccgtctcgcttccctgcttagcttcccgccgcgccatggcgtcgaccaaggcacccggccccggcgagaagcaccactccatcgacgcgcagtccgtcagctggtcccaggcaaggtctccgaggacgacaagctcatcgagtacgatgcgctgctcgtcgaccgcttcctcaacatcctccaggacctccacgggcccagccttcgcgaatttgtccaggagtgctacgaggt

SEQ ID NO: 15787 - DNA, 266 bp, Zea mays
gctgctgtggtcgcacgtgggtgggggaaatgctgcgtctcgggatgctcaggcattcgcgtaaacgatgcggagaagctcgtgacgatcggaggccatgtgctgcgcgaaggtgagtggctgtcgctgaatgggtcgactggtgaggtgatccttgggaagcagccgctttccccaccagcccttagtggtgatctgggaactttcatggcctgggtggatgatgttagaaagctcaaggtcctggctaacgccgatacccctga

SEQ ID NO: 15788 - DNA, 266 bp, Zea mays
gcccttagtggtgatctgggaactttcatggcctgggtggatgatgttagaaagctcaaggtcctggctaacgccgatacccctgatgatgcattgactgcgcgaaacaatggggcacaaggaattggattatgccggacagagcacatgttctttgcttcagacgagaggattaaggctgtcaggcagatgattatggctcccacgcttgagctgaggcagcaggcgctcgaccgtctcttgccgtatcagaggtctgacttcga

SEQ ID NO: 15789 - DNA, 264 bp, Zea mays
atacagcgtccgggacgtggaacagactcagaaatatggtggatgttcgtgatgttgctgatgctcttgttctggcttacgaagatccagaagcatctggacgatacatctgcagctcgcatccattaaaagtttctgatatgataaacatattgaagaccttatatccatcttacccttatcctaaacactttgtggaaacggatggcaacatcacctgcagttctgagaaacttcagaagctagggtggaccttcagggcta

SEQ ID NO: 15790 - DNA, 262 bp, Zea mays
cagaggtgggctggcttctcctccccctcttaccaagtcctcctcgggttagggttccttagggttttgtggaggggcgatggcggcggctgatgtggagtaccgttgcttcgtcggctggcttgcctggtccaccagcaacgagtcgctggagaatgccttcgcctcctacggcgagatcctcgactccaaggtcatcaccgaccggtagacggggaggtctcgcggcttcggcttcgttaccttctcctccgagaactcc

SEQ ID NO: 15791 - DNA, 265 bp, Zea mays
cccacgcgtccgcccacgcgtccgcccacgcgtccgcccacgcgtccgcgcctgctgcacccgcacttccgctacaccatggagatcaacgcgctggccagggaggcgctcatcaacgccgacggcatcatcgaggagtccttctggccgggcaagtacgccgtcgagctcagctccgtggcgtacggcgcgacgtggcagttcgacacggaggcgctgcccaacgacctcatcaagcgcgggctggccgtgctcggggaggacg

SEQ ID NO: 15792 - DNA, 259 bp, Zea mays
tacgaggtccgggaccgtggaatggatcttgacttcaagctcatagagaccggctctctcttcgtctcagtaatagtgacagcattcgccctccaggatggttcgtcacactacctcaaggggatccttctgctgctgtgctacattgtgatcggtgcatgcttctttgttacgaggcaacctgcaagtaacaacaatggcgctgggctgtcgctgccaactggcactttgagtgcgcaagctgcatgatggttcaagg

SEQ ID NO: 15793 - DNA, 265 bp, Zea mays
cgcacgcatacacagcacagagtgaggtaagcatccgaaaaaagctgtgatctgatcgacatggccgccgccaccatggctctcacctcccgcgcgctcgtcggcaagccggcgaccagcaccagggacgtcttcggcgaggggcgcatcaccatgcgcaagactgctggcaagcccaagccagcggcgtccggcagcccctggtacggggccgaccgcgtcctgtacctgggcccgctgtccggccagcccccaagctacctga

SEQ ID NO: 15794 - DNA, 263 bp, Zea mays
gccaaaaggcatcaccgccgcgacgacgacggcagcctcgctccaagccgcggccaccctgatgcagccggccaagatcggcggccgggcgccctttgcctcgctgccgtcccgcccgtcgtcgcaactcgcctgcagggcgttcggcgtcgacgccggcgccgccagcatcacgtgctccctgcaggacgtcgccaccaggtgcgtcgacgccgcgaagtcgccggcttcgcgctcgccacctcggcgctcctcgtctcggg

SEQ ID NO: 15795 - DNA, 101 bp, Zea mays
ccatggcgtcgtccatgctctccgctaccaccgtgccactccagcaggggggcggcctgtccgagttctccgggctcaggagctccgcgtcgctgcccatg

SEQ ID NO: 15796 - DNA, 295 bp, Zea mays
ctctcctctgccgccatcaccgccccttccttcacggccgcgcccgctcgcgcagtggtcagcaggaggtccttcaccgtgcgtgcctctctccgcaaggccactgccaccgccgccgtggccgttgccgccagcgtcctgcttgccggcggcggcgccatggcccaggaggtgctgctgggcgcaggcgacggcgggctcgtcttcgagcccagccagttcaccgtcaaggccggcgacaccatcaccttcaagaacaacgccggcttcccgcacaacgtcgtgttcgacgaag

SEQ ID NO: 15797 - DNA, 289 bp, Zea mays
ggaccgtggctagagaagaagagtggcaaacatgcactcaggcattggacttcggatggatgcaaatggcgaacacgtgatgaatttatatacagaagcaactgatggatcctacattgaggccaaggaaagtgccttggtgtggcaccatcaggatgctgacctaggctttggatcctcacaggcaaaggagatgcttgatcacctggaaagtgtactagcaaatgaaccagtctctgtcaagagtggccagttcattgttgaagtcaaaccacagggaataagcaag

SEQ ID NO: 15798 - DNA, 288 bp, Zea mays
gcgagcggccgccctttttttttttttttttttttttttttttttttttttttttttttttttagggagggatggggtatatatatatagcatcaaaattatgtaatgaagagtagcactgattattgttacatgacgaaggttgagcatccatggaggctagattatagacagacaccctgattttacatgacgaatcgcaagaagcgcatgcattggatatccttagccggagagggcgctggtgttgtagacgaggagggcgccgccgccgaggatcccagcgag

SEQ ID NO: 15799 - DNA, 137 bp, Zea mays
cccacgcgtccgctcaaagagctcgtgggtcagtacaaggaggtctacctctcagccaagggagagccattcccctcagaccccaagaaacagctggagctagcagtgctggctgtgttcaactcgtgggagagccc

SEQ ID NO: 15800 - DNA, 289 bp, Zea mays
cccttttgagggatccacaccacaacaagggtcttgctttcacatatgaggaaagggatggacactacttgcgtggactgcttcctccggcagtactatctcaggaactccaaattaagaagttcatgaacaccctgcggcagtaccagacccctttgcagcggtatatagctatgatgaaccttcaggaaacggacgagaggcttttctacaagcttttaattgataatgtggtggagctgcttccttttgtttacacaccaactgtaggtgaggcctgccagaagta

SEQ ID NO: 15801 - DNA, 288 bp, Zea mays
cagagggcctcgcacagtcgcactctttattatagccacggccggccggtggacgacagcaccacaccacctccaactacccgagaccatcgacgagcatcttcctgcatctgcaatggctgccgctaccgtgtccgtcccccgcatcaagctgggctcccaggggctagaggtctccgcgcagggcctcggctgcatgggcatgtccgccttctacggtccgcccaaacccgagcctgacatgatcaagctcatccaccacgccgtcgccgccggggtcaccctcct

SEQ ID NO: 15802 - DNA, 71 bp, Zea mays
  unsure (1)..(71): unsure at all n locations
tncgcgacggangcgccggcgtcgcggaaggagtgcttcggagntcttctgcaccacctacgaactcaaag

SEQ ID NO: 15803 - DNA, 125 bp, Zea mays
  unsure (1)..(125): unsure at all n locations
gggcaccgcctggcggacccggcgccacagaacgggcgcatcgtggcccggttcgggttcgggttgggcggcaagacgaactgnctccgaagaaggtggcgaagacatcgacctcctctgaccgg

SEQ ID NO: 15804 - DNA, 288 bp, Zea mays
gaggatgatcaaagaattcgtcggcaaggaggtgatgataagatgaatcaacagggactcagtggagactatgatcggtaggatgttcgacaacatatcctctgtaaaatctgcatacattcagctgcaggaagaccgcagccgatatgaccctgacgagatccagggagctgataaacttgtcatagaggagcttacagatctttcagagctcgagcatgcttacagagaagaacatcctaagccaatagctgcatcccctcaagattcacgcttgctctctgaaat

SEQ ID NO: 15805 - DNA, 286 bp, Zea mays
gtgaacacttgcttgatcgtattgcaattaatttaagtgctgatcttccaatgagttttgatgaccgcgttgaagcagtggatattgcaacacggtttcaggagtctagcaaagaagttttcaaattggtggaagaaaaaactgaaactgcaaaaactcagataatttttgcaagagagtatctgaaggatgttactattagcacagagcagctcaaatatcttgtcatggaagctatacgaggtggctgtcaggggcatcgtgctgagttgtatgctgcccgagt

SEQ ID NO: 15806 - DNA, 284 bp, Zea mays
caaccggtccaacactttcacgctcaggcgctcagctctagcaatggctgcctccaccatggcgatctcctccacggcgatggccggtacccccatcaaggtgggctccttcggcgagggccgcatcaccatgcgcaagaccgtgggcaagcccaaggtggcggcgtccggcagcccctggtacggccccgaccgcgtcaagtacctcggccccttctccggcgagcccccgagctacctcaccggcgagttccccggcgactacggctgggacaccgccgggc

SEQ ID NO: 15807 - DNA, 284 bp, Zea mays
ggctgttccaaagaaaatattggatcttatgaatgttgagaacatcacaagggagaacgttgcaagtcatctgcagaagtatcggctgtatctgaaaagactcagcgcagatgcaagcaggcaggctaacctaactgctgcatttggaggaagaaaccctgcttatgtgaacatgggactagacgccttcaggcagtacaatgcatatgggagataccggccagttccaaccactaaccattcacagccaaacaacctccttgcaaggatgaactctcctgcat

SEQ ID NO: 15808 - DNA, 288 bp, Zea mays
gacgccctcaccaagaagatgaggagagccatcgaggagctgagcaccggcatcgttaacaagctcctccatggcccgctgcagcacctgatgctggacggcagcgacagccgcacccttgacgagacgctcgagaacatgcacgccctcaaccggatgttcagcctcgacatggagaaggcgatcatcgagcagaagatcaaggccaaggtggagaagacacaaaactgaggccaggaagcaatttttctaccaccattatctatatatatagcgtctccaatctca

SEQ ID NO: 15809 - DNA, 283 bp, Zea mays
cccgtccaagtggaaccccagcaaggagcgggagttccccgggcaggtgctccgctacgaggacaacttcgacgccaacagcaacgtgtccgtcatcatccagcccacgtccaagaagaccatcgccgactacggctctcccgaggagttcctctcccaggtcgactacctgctcggcaggcaggcctacggcggcaagaccgactccgagggcgggttcgagaccggcgccgtggccaccgccaacgtcctggagagctccacccccgtgatcgacggcaag

SEQ ID NO: 15810 - DNA, 228 bp, Zea mays
aatcgagcgaaagaataacaaacattggtacccaagattgtttgctttcacaacgttacaacatatatatatcatatatgcatggacaggtacaatgcctctccagcagcaccagcaacaagggtggttagcagcagggactataaacaacagagtaccatccgcgttgatagtagattttttattactgcaaaattgatccccgcagcactaccggtagttgcggta

SEQ ID NO: 15811 - DNA, 278 bp, Zea mays
gggaaatccggttgctggcaaagactgggaagcaaaacagggcattcattgccgagttgggtgcgataccattgctatgtaagttgctgctgtcgtcagattggatggcgcaggagaacacagtgacggcgctgctcaatctatcgatctatgagccgaacaaggcccggatcatggaacaagcggactgcttgcatcttatcgtcagtgtgttgaagaatggtcggacgacagaggccaaggagaatgctgcagctacgctcttcagtttatctgtg

SEQ ID NO: 15812 - DNA, 276 bp, Zea mays
ggggattcttacagagaggggtggcatgacttcccacgctgctgtggtcgcacgtgggtgggggaaatgctgcgtctcgggatgctcaggcattcgcgtaaacgatgcggagaagctcgtgacgatcggaggccatgtgctgcgcgaaggtgagtggctgtcgctgaatgggtcgactggtgaggtgatccttggaaagcagccgctttccccaccagcccttagtggcgatctgggaactttcatggcctgggtggatgatgttagaaagctcaa

SEQ ID NO: 15813 - DNA, 279 bp, Zea mays
  unsure (1)..(279): unsure at all n locations
catcgacacgatcgcgagcgcaacacgtacgttgtcggaagctcaagttagaagaagcaccagtgcctgatcgatggcggcccaggctctcctctccggccggcagctgctgggccgccccgtgcagtcggccgtctctaggtcgtcggcgaggaaggcgcccttcgtcgtcagggccagctccagccctccagccaagcaaggtgccgacaggangctgtggttcgcgtccaagcagtccctctcctacctcgatggcacgctgcccggcgactatgg

SEQ ID NO: 15814 - DNA, 279 bp, Zea mays
ggaccagatgggagtgggcgagctggtgaagtttgctacagagaggggccgcaaagctaggcctaacttgaaggtgggcatatgtggagaacacggtggagagccttcctctgtggccttcttcgcgaaggctgggctggattacgtttcttgctcccctttcagggttccgattgctaggctagctgcagctcaggtgcttgtctgaggctgcctcctcattggcaaccggattgcctgctgctggtggatgtggtgatcaacagtattattacagag

SEQ ID NO: 15815 - DNA, 310 bp, Zea mays
cgatcgcgagcgcacgcacgtaagcacgttgtcggaagctcaagttagaagaagcaccagtgcctgatcgatggcggcccaggctctcctctccggccggcagctgctgggccgccccgtgcagtcggccgtctctaggtcgtcggcgaggaaggcgcccttcgtcgtcagggccagctccagccctccagccaagcaaggtgccgacaggcagctgtggttcgcgtccaagcagtccctctcctacctcgatggcacgctgcccggcgactatggcttcgacccgctgggcctctcggacccggaggca

SEQ ID NO: 15816 - DNA, 307 bp, Zea mays
gagctatacgctcatgtgaagccagctcatggagggaccttcactgacattgcaatgtgggtgttctgcccgttcaacgggcctgccaccatcaaggttgggtttgcgagtttcgctctgcagaaggtcggtaggcacattggagactgggagcacttcaccctccgagtgagcaacttctcaggtcagctgtcgtctatctacttctcgcagcacagcgggggcgagtgggttgaagcttgcgatctggagttcatctctgggaacaaggcgatcatctactcgtccaggaacgggcacgcgagct

SEQ ID NO: 15817 - DNA, 308 bp, Zea mays
cagctgatgagctctgctgcagcttctatgcttctgcttggccctctcactgcatgtcccttatcatgccaattctctctccttcagctacagcttcttcaaccctgatgacttcaggccggaggacgacgcgcaggtcgtcgatggcaggatcgagctgctcggcgacgagttcagagggcgtgccagggggcgggtgtggcacaagcagccggtgcagctatgggacggcaccaccggcgaggctgccagcttcaccgcgaacttcagcttcagcatcgagtcagtggctggcaagggcgcggcaa

SEQ ID NO: 15818 - DNA, 311 bp, Zea mays
ccttgggcccgatccaccctgctccaatcccccggcgatggtcgtgtgcaaatgccgaaagcgacgagggtttactgcttcgtccatcaggtccccgtctgtggcgtgtgcatatgcttcccggaacatcagctatgtgtggtgaagaactatgctgaatgggttgttaattctgagtatgactggccacaacactgttcgtcttgcaattctgttctcgaaggtggaactgaagaaacaacacgattgggttgcttgcatgtggtacacaccaaatgcttgatatcacatatccaaagttttcctaccca

SEQ ID NO: 15819 - DNA, 271 bp, Zea mays
accacaaggcttggcttggtgggaagaagacaaacgccggcacgcgcacgcagacacgatggcgatctgcagcgcgcacactaccacctccctgcgctccccatgcacgaccgtctcgaacgcaggtctgaggcagaagcaagtcatcttcgtcaccagcaacaggaggagcggcggcggcaggaggcacggaggggcaaggagcttccaggtctcgtgctccgtcgacaagccggtggtgattggcctggcggcagactcagggtgcggc

SEQ ID NO: 15820 - DNA, 308 bp, Zea mays
cctcgaccccaagggccgcggcggctccaccggctacgacaacgccgtcgcgctccccgccgggggcagaggtgacgaggaggagctccagaaggagaacatcaagaacgccgcctcctccaccggcaacatcacgttgagcgtcaccaagagcaacccggagaccggcgaggtcatcggcgtcttcgagagcgtgcagccgtccgacaccgacctcggggccaaggcgcccaaggatgtcaagatccagggggtctggtacgctcagctcgagtgattcgagtgtctaactgctaggtgtccgaccg

SEQ ID NO: 15821 - DNA, 308 bp, Zea mays
tgaacattgatacaggaatgggccttgagcgtatggcacgcattcttcaaaaggttccaaacaactatgagacagacttgattttcccaattatagaaaaggcagctagcatggcgttggtgtcctatgcaaaagctgatgatgccacaaagataaatctcaagataattggagatcacatgagagcagttgtttatctcatatcagatggggtaattccctcaaatatcgggagaggatatgttgttcgaaggctaataagaagagtagttcggatgggtagattgataggaataagaggcgacggg

SEQ ID NO: 15822 - DNA, 306 bp, Zea mays
ggtggccaccggcccgcgcggcgccggcgcggggcccatctgcgcgtccatgtccatgtcctcctccaacccgccctacgacctgacgtccttccggttcagccccatcaaggagtccatcgtgtcccgcgagatgacacgtcgctacatgacggacatgatcacctacgccgacaccgacgtcgtcatcgtgggcgccggctccgcggggctgtcctgcgcgtacgagctctccaaggaccccgccgtgagcatcgccatcgtggagcagtcggtgtcgccgggcggcggcgcgtggctgggcgg

SEQ ID NO: 15823 - DNA, 306 bp, Zea mays
cccaagaggagaaactccggccggcgacgcgggggaaaatggggaagacgccggtgcggatgaaggcggtggtgtacgcgctgtcgcccttccagcagaaggtgatgccggggctgtggaatgacatcaccaccaagatccaccacaaggtcaccgagaactggatctccgccacgctcctcctcacccccgtcgtcggcacctaccaatacgccatgtggtacaaagagcaggagaagctttcccacagatactaaatgggatgtcctccaagttgctgcggcttgtcgcagttgaattttccat

SEQ ID NO: 15824 - DNA, 302 bp, Zea mays
gcgggagggaactcgcacgcgaaggcaaatacgctttagatcccccattgcttctggctactaggccagcgcgcctcgattttcttttccgttttggtctaattcgtgaggaatttgggttttctcggtggagcttggttccgctccgccttggagtggatttcggtgacttctttgttcagattgtttcgctcttgcaggctgaactcatggctcgcgtctacgttgggaacctggatccgcgtgtcacggcgcgggagatcgaggacgagttccggatgtttggggttctgaggagtgta

SEQ ID NO: 15825 - DNA, 310 bp, Zea mays
ctcatcacctacaacagcctgatggacatgtacgccaagtgcagcgagtcgtgggaggccgagaagatactgaaccagctcaagtgctcccagacgatgaagcccgacgtggtgtcctacaacacggtcataaacgggttctgcaagcaggggctggtgaaagatgcccagagggtcctctcggagatggtcgccgacggcatggccccctgcgccgtgacctaccacacgctcgtcgggggttactccagcctggagatgttcagcgaggccagggaggtcatcggctacatggtccagcacggcctca

SEQ ID NO: 15826 - DNA, 303 bp, Zea mays
caagttgggagaaaccagttgagttgatgacacctttggagagggctgatgcctcaactgaatggaaagaatttactacaccagaaggacggaagtactatttcaacaaagtgaccaagcaatcaaaatggactattcctgacgagttaaaggttgcacgtgaattggcagagaacacatcaaatcaacaacctgatcgagaatcaggaatagctactagtgctcttgtcagatctgctgcctttgaaccttctactgcacctgctaatcagtcgtcatctgctgttggtataattgcttcca

SEQ ID NO: 15827 - DNA, 302 bp, Zea mays
ggtcgatacagctctattcccagatcgagagggtaatcacggaggcggcaaagcagtcccgggaaggctggggttcgactggagattggaccgaagtcgagggatcatgggtgttgagaccgaagtccttggagccatcatttgttgtccactttgttggaggaatttttgtcggagccgctccccagatcacataccgcttcttcctcgagtgtctcgcgaacaggggagctttggtgattgctacaccttatgcgagcggctttgaccatttcttcattgcagatgaagttcaatttaag

SEQ ID NO: 15828 - DNA, 296 bp, Zea mays
gacatggaaaatctctgaagaaagtcagccttgagggttgcagcaagataacagatgctagcctcttcaccatgtctgagagctgcaccgagcttgccgagcttgatctttcaaactgcatggttagtgactatggtgttgccatgctggcatctgcaaggcacctcaagcttcgtgttctctcactgtctggttgctctaaggttactcagaagagtgtgccgttcttgggcaaccttggccagtctctagagggcctcaatcttcagttctgcaacatgattggcaaccacaac

SEQ ID NO: 15829 - DNA, 304 bp, Zea mays
ctcgactttacagtacctgctctcagctcctccctatctcaatggcatccgcgaatgccatctccaccgcctccctcctccggcccctctctcagggcagggcgacgaggtcacagcggttcgtggtgcgtgcgaacgccaaagacattgcctttgaccagaaatccagggcagcgctgcaggccggcgtcgagaatctggcaaacgccgtcggtgtcaccctcgggccacgagggaggaatgtggtgctcgatgagtacggcaaccccaaagttgtgaatgatggagtcactattgcccgtgc

SEQ ID NO: 15830 - DNA, 317 bp, Zea mays
aatggatcctaccaagttccgtccgtccagtagccacgacacgacggtgacgacgacgaacgctggcgctcctgtgtggaacgacaacgaggcgctgactgtggggcctcgcggtcccatcctgctggaggactaccacctgatcgagaaggtggcgcacttcgcgcgggagccatcccggagcgcgtggtgcacgcgcgcggggcctccgccaagggcttcttcgagtgcacccacgatgtgacgtcgctgacgtgcgccgacttcctgcgcgcgcccggcgtgcggacgcccgtgatcgtgcgcttctcgacggt

SEQ ID NO: 15831 - DNA, 324 bp, Zea mays
tgcgcggagaggcggtacacggtggtgatcctgcggtgcagggaccggccgaagctgctgttcgacacgctgtgcgcgctcgccgacctgcagtacgtcgtgttccacggcacggtcgacgccgagggagccagcaaggacaaggaggcctaccaagagtactacatccggcacgtcgacggccacccggtgcgctccgacgccgagcgggcccgcctcgtccggtgcctagaagccgccgtcgagaggcgcgcgtccaacgggctggagctagaagtgtggacggaggacagggttgggctgctgtcggagattacgcgcgtg

SEQ ID NO: 15832 - DNA, 328 bp, Zea mays
tttactttcaagaagggcacagggtggcctcggtggacccaatggtcctggctttccccttggttttggtcaatctagggccaagtttcagatggaacccaacactggtgttacatttgatgatgttgctggtgtcgatgaagcgaacaagacttcatggaagtggttgagttcttgaagaaacccgaaaggttcactgctgttggtgctcgcattcctaagggtgttctgcttgtcggtcctcctgggacgggtaaaactttgcttgccaaggcaattgcaggagaggctggcgtgccatttttctcaatttcaggttctgaatttg

SEQ ID NO: 15833 - DNA, 299 bp, Zea mays
gtttgcaggtaggcaggtctgagttatccggcggatccgatccgtgcgcgtgcgcagtgtgtgtgtgtgtgtgtgtgtgtgtgtgtgtcggtggagagatggccacagcttacggtcccatggcgaggcaggtgatgaagagcaggctcgtcgtgcactcgaggccgaggggcctgtcaggcgctgctgcggtcacgaggcggcccggccggttcaccgtcaaggccatccagcccgaggaggcaacgtagcaagtggtgcagcgcatcaacggggaccccttcatcggcagcctggag

SEQ ID NO: 15834 - DNA, 330 bp, Zea mays
catagagctaggtcattcgaagatgtttctgggaatccccttgtgaaggatgcctatgatgctgctcatgagactgagaggaagcgtgcattatcagcacttctctcccaaacaaagcagcaagaacgaaaggacgccgagactttagcagaagcaaaacgtatcatggaatctcgtgctgctagcaaaaatgttgatgtagctgtaatgcctccgaactctgataatgctatggtacctgttgatggtgtatctccttcaagcagtactcatccatctttagcacatccaaatacatcagctaacatcttgatacctaattcactacga

SEQ ID NO: 15835 - DNA, 330 bp, Zea mays
caaaactctagctagctaccaggggggaaaatggctccacttctcgccgcagccatgaaccacgctacccatccagtccttagaagccatctaggacccaacaatgagagtttctcacgacaccacctatcctcttcaccacaaagcagtaagcgaaggtttaaccttagctttacggcacgatctgcaagggtaggcaatgaaaatggagtccaattgttgagcccctcggaaatccctcgaaaggactggttcccctctgacttcatccttggtgccggcacttcaagggtaccaattgaaggtgcatggaacgaagatggaaagggg

SEQ ID NO: 15836 - DNA, 274 bp, Zea mays
gtccttaaagagtttcacctaggtgtcgacatgcgtggagtagggtttacagtcggacatgtcagcctgctccagaatgtcgaggacatactagcgctggtgaaggaagaggccttggggctgacgctccatgttgatctcgaggaagtggtggagaggggctaggtccctcatcgcgaactcgcgctgaagggcgacgatcttgtgctgaaggagggaaacactggacggcgtgaccacgatgtcgtaaacgtagagtaggaggtagatgata

SEQ ID NO: 15837 - DNA, 327 bp, Zea mays
gatctgtggaggaagcaagcaatgcaatggctttagatggcataatgtttgagggagcaccagtcaaggttagaagaccaacggactataatccttccctagcagctgctcttggcccgagccagccaaatccaaatctcaatcttgctgctgttggcttaacacctggctctgctggaggattagaaggtccagaccggatctttgtaggtggtctaccatattatttcactgaggctcaagtgcgggagttgctcgagtccttcggacctctgcgtggattcgatcttgtgaaggatagagaaactggtaactcgaagggatatg

SEQ ID NO: 15838 - DNA, 319 bp, Zea mays
ccacgcgtccgcaatttcagtactgaaagagcctgtggttgtaataccagactgtcttgctgatcatttcgggtcacttgttcctgggattgagaaggtttgaatgaccagtcctctacctccaacctgaagaatgaagcccttgtattaacaaggcttgttatggcttcacattcaccatctgtgtttcatccatacatcaaggctctttctgcacctatactgtctgctatcagagatagatattataaagtcactgctgaggctttgcgggtgtgtggagagctagtccgtgtccttcgtccagatctcgagacaa

SEQ ID NO: 15839 - DNA, 322 bp, Zea mays
  unsure (1)..(322): unsure at all n locations
atcccgtcgcatcccatcccactaccacccatctcgtcgtccgccgattcgatccggttcttccaacccagggtgagtctccggatccgtcgccgtctggtatccgtgtgctctcgtcgccgtcgccgtcgccgccgtctgactgcccccctcgcctcccgcggcgtcgggtctnnnnnnnnnnnnnnnnnnnnnnnnnnnnnnngtgcagggcagtgatggcgacgaagaggagcgtgggcaccctcggcgaggcggatctgaaggggaagaaggtgttcgtgcgcgccgacctcaacgtcccgctcgacgatgcccagaa

SEQ ID NO: 15840 - DNA, 320 bp, Zea mays
gccggacagagcacatgttctttgcttcagacgagaggattaaggctgtcaggcagatgattatggctcccacgcttgagctgaggcagcaggcgctcgaccgtctcttgccgtatcagaggtctgacttcgaaggcattttccgtgctatggatggactcccggtgaccatccgactcctggaccctcccctccacgagttccttccagaagggaacatcgaggacattgtaagtgaattatgtgctgagacgggagccaaccaggaggatgccctcgcgcgaattgaaaagctttcagaagtaaacccgatgcttggc

SEQ ID NO: 15841 - DNA, 314 bp, Zea mays
  unsure (1)..(314): unsure at all n locations
gcaaggcgaactcgctccgaagaaggtggcgaagacatcgacctcctctgaccggccgctgtggttccccggcgccgtggcgccgactacctggacggctcgctggtcggcgactacgggttcgacccgttcggtctcgggaagcccgtggagtacctgcagttcgagttggactcgctggaccagaacctggccaagaatgaggccggcggcatcatcggcacccggttcgagtcctccgaagtccaagtccacccgttgcagccctacagcgangtgttcggccctcagcggtttcgcgagtgcgagctcat

SEQ ID NO: 15842 - DNA, 323 bp, Zea mays
caagtccttctcctaagcaaagccccctcgcttttggcgtatgccccgctggcgcgcccatgattcccgccgattcctccgcccgttcagtccagcaacccttgctgctgcagtgctgcggctagttcggtggcggggaaggaggaggaggcgagatcttggagtggggcgaaccggagatgtcgttgccgtcgaacaaccggaggacgtgctcccggagcagctctgcgcggtccaagcacagcgcgcgggtggtggcacagacgcccgtggacgcgcactgcacgccgagttcgagggctcccagcgccacttcgactact

SEQ ID NO: 15843 - DNA, 210 bp, Zea mays
cccacgcgtccgagaagctagcgcttatagcttgtcagccatggccaccgccgccgcgtctagcctcctcaagtcctccttcgcgggctcccggctcccggccgccacgcggaccacaccggcgtccctcgtggtggcgaccggcgcgcgcggcgccggcgcggggcccatctgggcgtccatgtgcatgtcctcctccaagccgcccta

SEQ ID NO: 15844 - DNA, 324 bp, Zea mays
gccgccctttttttttttttttttttttttttttttttttatgtatgcatgtcctcgttcagctgcaattatatattacaaaactatccaagtaatatatatattcacctcctcgatcctatgccggcctcgcgcctagctagcaataacaaagagttgctttctacttgaagaaggagccagtcttcatggcgtcctcgttggcttcaccaagagcagcctcgttgaggtacttgtcagcaagctgcacacgcttgacgttctcctgctccgccaccagcatgtgtccgtactccaagagcttctcgatcgttatcttgggct

SEQ ID NO: 15845 - DNA, 315 bp, Zea mays
cccacgcgtccggagtacgtggaggagcagccatggcttcatcggtggccgccgcggcgagcacattcctgggcacccgcctggcggacccggcgccacagaacgggcgcatcgtggcccggttcgggttcgggttgggcggcaaggcgaacctgctccgaagaaggtggcgaagacatcgacctcctctgaccggccgctgtggttccccggcgccgtggcgccgactacctggacggctcgctggtcggcgactacgggttcgacccgttcggtctcgggaagcccgtggagtacctgcagttcgagttggac

SEQ ID NO: 15846 - DNA, 300 bp, Zea mays
gcaatgagaagatgaggctgcaggtgccagggataaaggtatttggaggatccctggacaatgtgaaaggctgcactgatcaggtggagaatggaatgaagttgtcacttgggaaggacattgagatactatgcctacacacgccttgccacactaaaggtcatatcagctactatgttactagtaaggagggtgaagatccagcggtcttcaccggagataccttgttcattgctgggtgtgggaagttttttgagggttctgcagagcaaatgtatcagtcccttattgttacactgg

SEQ ID NO: 15847 - DNA, 312 bp, Zea mays
cacgcacgcatacacagcacagagtgaggtaagcatccgacaaaagctgtgatctgatcgacatggccgccgccaccatggctctcacctcccgcgcgctcgtcggcaagccggcgaccagcaccagggacgtcttcggcgaggcgcgcatcaccatgcgcaagactgccggcaagcccaagccagcggcgtccggcagcccctggtacggggccgaccgcgtcctgtacctgggcccgccgtccggccagcccccaagccacctgaccggcgagctccccggcgactacggctgggacaccgcggggctgt

SEQ ID NO: 15848 - DNA, 312 bp, Zea mays
ctccactcgtccgctgacgctgggcgaccgtggtcggacgcgtgggggttgtgttcactgctgaggatgctgaagcatggcattcccaagggaaagctgctattctggtaagggccgagaccagccctcaggacgttactggcatgcacgcagctgtggggattcttacagagaggggtggcatgacttcccacgctgctgtggtcgcacgtaggtgggggaaatgctgcgtctcgggatgctcaggcattcgcgtaaacgatgcggagaagctcgtgacgatctgaggccatgtgctgcgcgaaggtgagt

SEQ ID NO: 15849 - DNA, 311 bp, Zea mays
gttttcttgatgggagaagaggttggcgagtaccaaggtgcatacaagatatccaagggtttgcttgacaagtatggcccggatagggttctcgatactccgatcactgaggcgggcttcactggcattggtgttggtgccgcttaccatggtcttcgacctattgtagagttcatgacatttaacttttcgatgcaggcaattgatcacataattaattcagctgccaagtcgaactacatgtctgctgggcagatatctgttcctattgtctttaggggtccaaatggtgctgctgctggagttggtgc

SEQ ID NO: 15850 - DNA, 314 bp, Zea mays
cgaaagaggactttggaggtggtcatccggatcctaaccttacctatgcaaaagagttggttgaacgcatgggtcctggaaagtcatcctcaaatgttgagcctcctgaatttggcgctgcagctgatggagatgctgaccgcaacatgattcttggtaaaagattctttgtgacaccgtcggactctgttgccattatcgcagccaatgctgttcaatcaattccttactttgcttctggcctgaagggagttgccaggagcatgccaacatctgctgctcttgatgttgttgcaaagaatttgaaccttaag

SEQ ID NO: 15851 - DNA, 312 bp, Zea mays
agaatttgagcattgtagaactgaacagcagttctttgtcctgcctctctcttgctggttgccgctcgatgacattgttaagactctcatgcccaaatctgcaacatgtcaatcttgatggctgtgatcaccttcaaagtgcagcattctgtccagtgggtctcgaatccctaaatctgggaatttgtccaaaactgagtgttcttcacattgaggctccaaatatgtctatattggagctgaagggttgtggtgtgctttccaaggcttccatcaattgccctcgcttgacttcgttggatgcctctttct

SEQ ID NO: 15852 - DNA, 314 bp, Zea mays
tccccatgtccccaaaattaatggagaaatcccatcaattgatgaagccactatggaccatgaaaggctgacagaaaggttgaggctgtatgagctggttgaaaacaaggtgaaaggagatggcaactgtcagttccgagcactatcagaccagctttaccaaagtccggatcaccatgaatttgtgaggtcgcagataattaaccagcttaaaactaaccgtgacgcctatgatggatacgttcccatggcatatgatgattacttggagaaagttgcacggaacggtgaatggggtgaccatgtgacgctgc

SEQ ID NO: 15853 - DNA, 297 bp, Zea mays
tctggttccaaagttaccaagtattacatagaattctggaagcaaattcctccaaacgagccctaccgggtgatactaggccatgtaagggacaagctgtacaacacacgcgagcgtgctgccatctgctggcatctggagtttctgaaatttcagcggaatcgtcatttaccagtatcgaagagttccttgagccacttgagctgtgctacaaatcactgtgtgactgcggcgacaaggccatcgcggacgggagcctcctggacctcctgcgccaggtgttcacgttcgggctct

SEQ ID NO: 15854 - DNA, 297 bp, Zea mays
gcccgctcggcgaggtcgtcgacccgctctaccccggcggcacttcgacccgctcggcctcgccgacgaccccgaggccttcgccgagctcaaggtcaaggagctcaagaacggccgcctcgccatgttctccatgttcggattcttcgtccaggccatcgtcaccgggaagggcccgctcgagaaactcgctgaccacattgccgaccccgtcaacaacaacgcttgggcctacgccaccaacttcgtccccggcaagtgagggaggcgccgccggtgacctttaggtgtccggat

SEQ ID NO: 15855 - DNA, 297 bp, Zea mays
ggaaagatgctactcaagttgttgcaaacttgcaaagacaacaagtatcctcaaagatagttgcatctgagtacctagagtcaaataaagatctcttggacattttaattttagggtatgagaatatggacattgctttacattatggtgctatgttgagggaatgtattcgccaccaaagcattgcaaggtatgttttagagtccgaacatatgaagaagttcttcgactatatacagcttccaaattttgacatagcttctgatgcttctgctacctttaaggaactattgacaa

SEQ ID NO: 15856 - DNA, 296 bp, Zea mays
gacgctgccaggagctaggctgcaccaaaagcgccgaaggaagacagagttctgtattgctcatggtggtgggcgccggtgtgggattgaggaatgcccaagagcggcaagggggaagtctggattctgcataaaacatggtggagggaaaaggtgcaggatagagggctgcactcgtagtgctgaaggccatcctgggttgtgcatctcacatggaggtggtcgccggtgccagtacccaaactgtgataagggggcccaaggaagcaccatcttttgcaagtcccatggtggag

SEQ ID NO: 15857 - DNA, 292 bp, Zea mays
cggacgcgtggccggacgcgtgggcggaccgtgggcggaccgtgggtgatgaggtgcggaatcaagattcattttacatcctagttggcattagactagaaggacgacaaattgcatggacctggttgaaggaaaactgggatcacgtgttgaagacatggaaatcgagttcactcatatcagacttcattgagtccattgtcccacggtttacctccgacgagaaagctgtcgaggttaccgagttctttgctggccaagttaagccatcattcgagagagcactgaagca

SEQ ID NO: 15858 - DNA, 294 bp, Zea mays
tgatttcaacttcacttatcagcttgagagtggaggtggcagtgatcttcctagttccgcacaagtatttcacttcccggttgcccccggtgatgttattgttgctggcacggacggactttttgacaatctatacaataatgagataagtggtgttatcgttgaagcgctcagggttggacttgaacctcaagttgcggcacaaaaaattgctgccctggctcgacaaagagccacagacaaaaataggcagtcaccatttgcatcggccgcccaagaagctgggtaccggta

SEQ ID NO: 15859 - DNA, 292 bp, Zea mays
tggcgtcgtccatgctctccgctaccaccgtgccactccagcaggggggcggcctgtccgagttctccgggctcaggagctccgcgtcgctgcccatgcgccggaatgccacctccgacgacttcatgtccgccgtctccttcaggacccacgcggtcggcacgagcggcgggccgctgcgggcgccgacggaggcgaactcgaaggtggccatcaatgggttcggccgcatcgggcgcaacttcctgcggtgctggcacgggcgcggcgacgctcgcccctcgacgtcatc

SEQ ID NO: 15860 - DNA, 294 bp, Zea mays
cacgcacgcatacacagcacagagtgaggtaagcatccgaaaaaagctgtgatctgatcgacatggccgccgccaccatggctctcacctcccgcgcgctcgtcggcaagccggcgaccagcaccagggacgtcttcggcgaggggcgcatcaccatgcgcaagactgctggcaagcccaagccagcggcgtccggcagcccctggtacggggccgaccgcgtcctgtacctgggcccgctgtccggccagcccccaagctacctgaccggcgagttccccggcgactacggct

SEQ ID NO: 15861 - DNA, 294 bp, Zea mays
cagcgactcagcgagcgagagcagcacacactgcacgcagctagctaggagcagcagcagcggcggcgatggcggcctccatgatctcctcgtcagctctggcggtggcgcctcagggcctgccgcccctcggccgccgcgcctcctccttcgccgtcgtctgctccaagaagaagatcaagaccgacaagccctacgggattgggggtggcctgaccgtcgacgtcgacgccaacgggagaaagggcaagggcaagggcgtgtaccagttcgtcgacaagtacggcgcgaacg

SEQ ID NO: 15862 - DNA, 290 bp, Zea mays
gttcaactaccccatggcctggtccatgaccatgctcagctggagtgtcatcgagtacagggcgaagtatgaggccatcggtgagctcgaccatatcaaggagctgatcaaatggggaacagactacatcctcaaaaccttcaattcatctgctgacacgatagacaggatcgtcgctcaggtgggtgtaggtgacacctctaaaggcagcagtcagcctaatgaccattactgctggatgagaccagaggacatcgactacaaaaggccagtcaccgagtgtcactctt

SEQ ID NO: 15863 - DNA, 291 bp, Zea mays
gtctgcaccgcgagtccgcgactccgcaccaagcaaatcccctgcccccaaaatattgctagggattcgaggggaggaaaatccaggcgcccaggcctggcaatccgttcgtcggagaggccatgagctcggcgcaggatccgttctacatcgtccgggaggagatccaggagtcgattgataaattgcaaagtaacttccaccgctgggagcaaactgcttcaaacacaggagaatatgttcatctgacaaaggagcttctgaccagctgtgaaagcatcgagtggcagg

SEQ ID NO: 15864 - DNA, 290 bp, Zea mays
gccatcgacacgatcgcgagcgcaacacgtacgttgtcggaagctcaagttagaagaagcaccagtgcctgatcgatggcggcccaggctctcctctccggccggcagctgctgggccgccccgtgcagtcggccgtctctaggtcgtcggcgaggaaggcgcccttcgtcgtcagggccagctccagccctccagccaagcaaggtgccgacaggcagctgtggttcgcgtccaagcagtccctctcctacctcgatggcacgctgcccggcgactatggcttcgaccc

SEQ ID NO: 15865 - DNA, 290 bp, Zea mays
gaagaagacgagtgtcaagtgaacctgaaacttgcggtgtcactggctggtatagcctgagtgtgagtgagtgatcgagctagctgagctccgatcctcgctagctagctaggataccgccataccacaagtcttcttcacaagtttaggagtgacagcaacaagagatctcgatggcctctgccaccgtgctcaagtcctccttccttcccaagaagtccgaatggggcgccaccaggcaggccgccgcgcccaggccgcccaccgtctccatggtcgtccgcgcctcc

SEQ ID NO: 15866 - DNA, 289 bp, Zea mays
cccacgcgtccgcagcgactcagcgagcgagagcagcacacactgcacgcagctagctaggagcagcagcagcggcggcgatggcggcctccatgatctcctcgtcagctctggcggtggcgcctcagggcctgccgcccctcggccgccgcgcctcctccttcgccgtcgtctgctccaagaagaagatcaagaccgacaagccctacgggattgggggtggcctgaccgtcgacgtcgacgccaacgggagaaagggcaagggcaagggcgtgtaccagttcgtcga

SEQ ID NO: 15867 - DNA, 289 bp, Zea mays
agtacaccgtcgtcagcgtggggaagaagggcaacgcctacttccagcgccgcccctacatcccgttggagcgcgatctggaggtgagcagcgtgcccaccgtctaggactcgcaggccatctgcgacctcgtctactcgctcttcgtctccgaggaggtggacaaggtggagctgctctactccaagttcgtgtcgctggtgcgctccgaccccatcatccagacgctgctccccatgtcgcccaagggcgagatctgcgacgtcaacggcgtctgcgtggacgccac

SEQ ID NO: 15868 - DNA, 303 bp, Zea mays
  unsure (1)..(303): unsure at all n locations
cggacgctgggnactgggaagatgcccacagtgaccatcgagcaggcacaaaggaactttatcaaagcagtaaaatcaggtctgctcaaaattctttcaacaatgggtatctcactgctctcaagctattgtggagctcagatctttgaaatttatggtcttggtcaagaagttgttgatcttgccttctgtggaagtgtatcgaaaattggaggtctcacacttgatgagctgggtagggagaccttatcattctgggtgaaggcgttctctgaagatactgcaaagaggctagaaaacttt

SEQ ID NO: 15869 - DNA, 107 bp, Zea mays
cacagcacagagtgaggtaagcatccgaaaaaagctgtgatctgatcgacatggccgccgccaccatggctctcacctcccgcgcgctcgtcggcaagccggcgacc

SEQ ID NO: 15870 - DNA, 292 bp, Zea mays
tgcatggctacttcgcttggtctctgctggataactttgaatggtacgccggctacaccgaacgttatggcattgtctacgtcgaccgcaaaaataactacacgcgctacatgaaggagtcagccaagtggttaaaagagttcaatactgcgaagaagcctagcaagaagattattacgccagcttaaaaacatgggacctcgtgatgtgggtacggtgccacccatgaaataaaaacctagtgtgtggtttgaaacctaaatttttctttttcttttttgcaccatgagag

SEQ ID NO: 15871 - DNA, 289 bp, Zea mays
aacgagggcgactacgaccacagcgtcgccgacatcatcagcaacgcgtcctgcacgaccaactgcctcgcgccattcgtcaagatcttggacgaggagttcggaatcgtgaaggggaccatgacgacgacgcactcgtacaccggcgaccagaggctgctggacgcgtcccaccgcgacctccggcgggcccgcgcagcggcgctgaacatcgtgccgacgagcacgggcgcctgcaaggccgtggcgctggtgctgccgcagctcaaggggaagctgaacggcatcg

SEQ ID NO: 15872 - DNA, 282 bp, Zea mays
gcaaccggtccagcactttcacgctcagctccagcaatggctgcctccaccatggcgatctcctccacggcgatggccggcacccccatcaaggtgggctccttcggcgagggccgcatcaccatgcgcaagaccgtgggcaagcccaaggtggcggcgtccggcagcccctggtacggccccgaccgcgtcaagtacctcggccccttctccggcgagcccccgagctacctcaccggcgagttccccggcgactacggctgggacaccccgggctgtccg

SEQ ID NO: 15873 - DNA, 286 bp, Zea mays
cgcaagctgaaaccaaacgacctgttcctgatatttgcttcagatggcctttgggagcacctcagcgacgatgctgcggtgcagattgtcttcaagaatccgagaactgggatagccagcagactggtgaaggctgccttgaaggaagcgaccaggaagagggaggtcaggtaccgtgatctgaggacgatcgagagaggggtgaggcggcatttccacgacgacatcagcgtcgtcgtggtctacctcgatggccaccgcgagcgtcgccacaccagggtcgttg

SEQ ID NO: 15874 - DNA, 289 bp, Zea mays
cccatccaccacaaggcttggcttcgtgggaagaagacaaacgccggcacgcgcacgcagacacgatggcgatctgcagcgcgcacactaccacctccctgcgctccccatgcacgaccgtctcgaacgcaggtctgaggcagaagcaagtcatcttcgtcaccagcaacaggaggagcggcggcggcaggaggcacggaggggcaaggagcttccaggtctcgtgctccgtcgacaagccggtggtgattggcctggcggcagactcagggtgcggcaagagcacctt

SEQ ID NO: 15875 - DNA, 289 bp, Zea mays
gccagggatctactactcggacgacaagatgctgcagtgccgggtgttcgcctacgccgacacgcagcgctacaggctgggaccaaactacctgatgctgcccgtcaacgcgccggctgcgcgcaccacaacaaccactacgacggcgccatgaacttcatgcaccgcgacgaggaggtggactactacccgtccaggcacgcgccgctgcggcaggcggcgccgcccacgccactgccgcccaggccggtcgcggggaggagggagaaggcaaccatacgcaagccca

SEQ ID NO: 15876 - DNA, 291 bp, Zea mays
cgccgaccccgagaccttcgccaagaaccgcgagctggaggtgatccactcccgctgggccatgctcggcgcgctcggctgcgtcttccccgagctgctctcccgcaacggcgtcaagttcggcgaggccgtctggttcaaggccggctcccagatcttcagcgagggcgggctggactacctcggcaaccccagcctgatccacgcgcagagcatcctcgccatctgggcctgccaggtcgtgctcatgggtgccgtcgagggctaccgcattgccggcgggccgctcgg

SEQ ID NO: 15877 - DNA, 285 bp, Zea mays
ataagcttgtcactgttgaagatattgtccgtcagcattgggccacatatggtcgccattattacacacgctatgactatgagaatgtcgatgctggggctgctaaggagctgatggcaaacctagtaagcatgcagtcatcactttctgatgttaacaagttgatcaaggagatccggtctgatgtttctgaagtagttgcagctgacgagtttgagtacaaggatccagttgatggctctgtgtccaagcaccagggcatccgatacctcttcggagatggtt

SEQ ID NO: 15878 - DNA, 283 bp, Zea mays
caccaaggagagtacgtggaggagcagccatggcttcatcggtggccgccgcggcgagcacattcctgggcacccgcctggcggacccggcgccacagaacgggcgcatcgtggcccggttcgggttcgggttgggcggcaaggcgaactgcgtccgaagaaggtggcgaagacatcgacctcctctgaccggccgctgtggttccccggcgccgtggcgccgactacctggacggctcgctggtcggcgactacgggttcgacccgttcggtctcgggaagc

SEQ ID NO: 15879 - DNA, 282 bp, Zea mays
gaaccgacattgttttctccccccttctcgccttctccttctcccccctagtctagaggcgtttgctccccaatcccttcggcccgcccgctcgacgtgatcccaccggcagccatggatccatacaagcaccgcccgtctagtgggagcaactccagcttctggaccaccaactccggcgcccccgtctggaacaacaactctgccctcaccgtcggacagcgaggtccaatcctccttgaggattatcatctaatcgaaaagcttgctcagttcgacaga

SEQ ID NO: 15880 - DNA, 282 bp, Zea mays
cccacgcgtccggcaaccggtccagcactttcacgctcagctccagcaatggctgcctccaccatggcgatctcctccacggcgatggccggcacccccatcaaggtgggctccttcggcgagggccgcatcaccatgcgcaagaccgtgggcaagcccaaggtggcggcgtccggcagcccctggtacggccccgaccgcgtcaagtacctcggccccttctccggcgagcccccgagctacctcaccggcgagttccccggcgactacggctgggacacg

SEQ ID NO: 15881 - DNA, 272 bp, Zea mays
gctacggcgtcaagctcaccttgttccacggccgcggaggcaccgtgggcaggggtggcgggcccacgcaccttgccatcctgtcccagccgccggacaccatcaacgggtccatccgtgtgacggtgcagggcgaggtcatcgagttctgcttcggggaggagcacctgtgcttccagactctgcagcgcttcacggccgccacgctggagcacggcatgcatccgccgtctcttccaagcccgagtggcgcaactcatggacgagatggc

SEQ ID NO: 15882 - DNA, 101 bp, Zea mays
gtaaaacatccaaacattgtccaatatgtatgaggttatggctaccaaaaccaagatatattttgtgatagagtatgtcaagggaagagagttgttcaaaa

SEQ ID NO: 15883 - DNA, 301 bp, Zea mays
  unsure (1)..(301): unsure at all n locations
cggacgtggncgcaacgccggtagctcgacaaggacgaccgacgacgcacgcggagatccggcgtactgcaaattttgaaaaagctactgtaagatggcatcagcagagctttcccgtgaggaaaatgtgtacatggcgaactcgctgagcaggcggagaggtacgacgagatggttgagttcatggagaaggtagccaagactgttgactcggaggagctcactgtggaggagcgaaacctcttgtctgttgcatacaagaacgtcattggagcccgccagcgctcatggccatcatctc

SEQ ID NO: 15884 - DNA, 298 bp, Zea mays
cgccactctcacgtctcgcccatcccgccactgctgctctccagagtccaggcgacccaggctgcgcggtcgctcggtgttgttagtcccgatcgcagccagccatggcatccaacggcatcgctcccagagatgtatgtgttgttggtgttgcacgcacccctttgggtggtttccttggtgccttgtcttccttgcccgcaacaaagcttggctctatagcaattgaagctgctctgaaaagagcaaatgtggatccagccctcgtgcaggaggtctttttcggaaacgtcttgag

SEQ ID NO: 15885 - DNA, 294 bp, Zea mays
ctgttctggagctgacgtacaactatggagtcacagaatacagcaagggcaatgcatatgctcaggttgccattggcaccaatgatgtgtacaagagcgccgaggcggttgatctggcgaccaaagaactaggtggcaagattttgcggcaccagggcctctacctgggatcaacactaagatcgcctcttttgttgatccagatggctggaaagtggttctggttgacaacaccgacttcctcaaggaactccactgaaggctcgggatacccaggtgctgtgctaggatgta

SEQ ID NO: 15886 - DNA, 300 bp, Zea mays
agcggttctacctgcagccgctgccgccggcggaggcggtggcgagggtgaagacgtcggcgcaggacatcatcaacctcaagccactcatcgacaagaaggcgtggccgtacgtccagaacgacctccgcctccgggcctcctacctgcgctacgacctcaagaccgtcatcgcttccaagcccaaggaggagaagcagagcctcaaggagctcaccggcaagctcttcagcaccatcgacgatcttgaccatgccgcaaagatcaagagcaccccggaggccgagaaatacttcgcag

SEQ ID NO: 15887 - DNA, 305 bp, Zea mays
cacagctcccacgctcaccgacgccacagcttgtgcgcgcgcaatggcactcgtgtccgcctcctcgtcctccaccaccgccgtcgcggcgctccccaggaatgggcagcagcgggcgtcgtcgtcgttgttctcctcctcctcctcttcctccttcctcgtcggcaagacgctgctgaggcaggccgaggcagcccggccgtcgttcgccgtgcgcgccgcggcggattccgacaggccgatctggttccccggcagcacccctccgccgtggctcgacggcagccttcccggcgacttcggct

SEQ ID NO: 15888 - DNA, 305 bp, Zea mays
caccaacaaaatggggatatcgagatagcttatgttagcaccaaagaacaattaaccgacatctttatcaagtctttagatgagaaaacctttagcaaacttaggaatgagctaaatattcatgattcttggaactttgattgaaacattgcacacatagctcatttatatacctttgatcatatctctttcatgactacgactaatgtaagggaaatggagtttttcggcgaagacaaggcttccactccactctatcggtatcatttaaccttcgccgtcactccacatcactctcacattgg

SEQ ID NO: 15889 - DNA, 301 bp, Zea mays
aatctttgaggtcaaggccacagctggtgacacccatcttggtggtgaggactttgacaacaggatggtcaaccacttcgtccaggagttcaagaggaagaacaagaaggatatcactggcaaccccagggctctccggacgctgaggaccgcttgtgagagggcgaagaggactctgtcttccactgcccagaccacgattgagattgactcgctgtatgagggcatcgacttctactccaccatcacccgtgccaggtttgaggagctcaacatggacctgttcaggaagtgcatggag

SEQ ID NO: 15890 - DNA, 290 bp, Zea mays
aacccatttccctcgctcccatcccgtcccgccccttgtctcttccgcttccccccgaccccgcgcgccgcgaccagcagccatgtcgtgctcccacctctccaccgcctggtcctcctcggcgctcgccagcagcgcctccaccacccgacggcgctcccccccgcgctcgggtctcctggtgcggtgttccctccgtgagctccgcacccgcatcgactccgtcaggaacacgcagaagatcacggaggccatgaagctggtggccgccgccaaggtccggcgcgcgc

SEQ ID NO: 15891 - DNA, 295 bp, Zea mays
cccaggcgtccgcgccgggcacaccccccgagctcagcttagctccgctccagctccagtcgcagtcgtgaccagagcgcgagagctagctagagggccgtgagaatgccggtcaataggatcgccctggggagccaccaggaggtgtaccacccgggcgccctcaaggcggcgttcgctgagttcatctccaccctcatcttcgtcttcgccggccagggctccggcatggccttcagcaagctgaccggcggcggcccgacgaccccggcgggcctgatcgcggcggcggtgg

SEQ ID NO: 15892 - DNA, 285 bp, Zea mays
tgtcaagtgaacctgaaacttgcggtgtcactggctggtatagcctgagtgtgagtgagtgatcgagctagctgagctccgatcctcgctagctagctaggataccgccataccacaagtcttcttcacaagtttaggagtgacagcaacaagagatctcgatggcctctgccaccgtgctcaagtcctccttccttcccaagaagtccgaatggggcgccaccaggcaggccgcacgcgccaggccgcccaccgtctccatggtcgtccgcgcctccgcctacg

SEQ ID NO: 15893 - DNA, 304 bp, Zea mays
gaagattccgaatctttcagaccctgcagaatattcaagacttggactagtgccaagaagagctgacctggacatgaaccaacatgtcaataatgttacttacataggttgggtcctcgaaagtatacctcaagatataattgatacacacgagttacaaacaatcactctcgactacagaagggagtgtcaacaggatgatatagttgattctcttacttgcatagaggaaggagaggagaaaagcatgaacggctctgcttctgcagcagcgcctcacaaagaagagcggcagcagttcctg

SEQ ID NO: 15894 - DNA, 254 bp, Zea mays
cttctcctccccctccggttcgggttcgggttcgtgaggttctccggggttaggtttcgtgggtgagcggatcgagatggcggcgtcggatgttgagtacagctgcatcgtcggcggcctcgcatggaccacggacgaccactccctccacaacgccttcagcacctacggcgaggtcctcgagtccaagatcatcctcgatcggtagacgcagaggtcccgcagcttcggcttcgtcaccttctccacggagg

SEQ ID NO: 15895 - DNA, 308 bp, Zea mays
cccacgcgtccgtttttctctctcctgcgccgcgacgtccctcgcattcgccgccgaatccgagactccgatctcgggttcaccgcagcgcacagagcagccccgactcccggcccgatccgcgctctcctctccgtagcttcagtcatggcaggaatggcacctgagggttctcagttcgatgctaagcactatgattctaagatgcaggagctgctgagcaccggtgagactgaggagttcttcacttcatatgatgaagttcttgagagctttgatgatatgggcctccaagagaatcttctgag

SEQ ID NO: 15896 - DNA, 289 bp, Zea mays
gctcaacaactgggccacccacctgagcgacccgctccacaccaccatcttcgacacgttcggagggtcctcttaagcccgccattgctccgccccgtccatcgaccggccggaacgtgttcttggattaattaactacgatctctatgagcctggggatggatcaacccgtcgtgcgtggtctcgttttgtgatgagtgggagagagaggatggcaagatcgatcctttgttaatggagatctcgttaattaggagagctaccgctgggacttggtggtttgtaatat

SEQ ID NO: 15897 - DNA, 294 bp, Zea mays
catcaatgagcgccttccctacaatgtttctctcattcggttctcttcttggatgggtggtgaccgcgatggaaatccaagagttaccccggaggtgacaagagatgtatgcttgctggccagaatgatggctgcaaacttgtacatcgatcagattgaagagctgatgtttgagctctctatgtggcgctgcaacgatgagcttcgcgttcgtgccgaagagctccacagttcgtctggttccaaagttaccaagtattacatagaattctggaagcaaattcctccaaacga

SEQ ID NO: 15898 - DNA, 295 bp, Zea mays
gaaggcttcaagtaccaccacgcggaggaagcgtatttgatgatgacgtactggatccccgatgaaccgaatatgctcccagcaaatgcttctcatcaggtcggggttgggggttttgtgatcaacgaccaaatggaggttctagtggtgcaagagaagtaccgcgggtcgtcgctggatggcgtatggaaactccccacaggcttcattcttgcgtctgaggaaatctacacgggggccagcagagaggtgaaggaggaaaccggggtcgacaccgagttcgttgacgtcgttg

SEQ ID NO: 15899 - DNA, 294 bp, Zea mays
cccacgcgtccggaggaataatctagcagcttctgttgcatccaaattgtccggagaaaggagttgaagcagtgtgagagggccctgagacgatggcgaacctgttcctcaagcaggcaaagcagtacgtggcgacgcggccggtctacccgccggagctcttcgacttcatcgcctccaagacccctcgccgcgacatggcctgggatgtcggcaccggcaacggccaggccgcagcgtcgctggcgaacatgtacaagcacgtggtgggcacggacactagcgcgcacagct

SEQ ID NO: 15900 - DNA, 307 bp, Zea mays
gcgggatgttgctgcggtcacacggctgctgagggcttaccttgcgaggttcgtggtggcaccggattttgatgaggtggatgtggagcactggctgctgccgcaagaggatgtcgtggacagctaccttgtggagagccctgagacgcatgaggtcacggatttctgcagcttttacacgctgccctcgtcggtgctgaacaatgctaactatgcaacgctcaaagccgcatactcatattacaacgtctctaccaaaactgcactgcagcagctgatgaatgatgctctgattgttgccaagcag

SEQ ID NO: 15901 - DNA, 230 bp, Zea mays
ggccgtgaacgtgccgtcgtcgtccgccttcggcgaggcccgcgtgacgatgcgcaagacggcggggaaggccaagccggcggcggcgtccgggagcccgtggtacggccccgaccgcgtgctgtacctgggcccactgtccggcgagccgccgagctacctgacgggcgagttcccgggcgactacggctgggacaccgcggggctgtcggcggacccggagacgttcg

SEQ ID NO: 15902 - DNA, 301 bp, Zea mays
actgcggatagagcagcgagccatcgacacgatcgcgagcgcaacacgtacgttgtcggaagctcaagttagaagaagcaccagtgcctgatcgatggcggcccaggctctcctctccggccggcagctgctgggccgccccgtgcagtcggccgtctctaggtcgtcggcgagcaaggcgcccttcgtcgtcagggccagctccagccctccagccaagcaaggtgccgacagcagctgtggttcgcgtccaagcagtccctctcctacctcgatggcacgctgcccggcgactatggct

SEQ ID NO: 15903 - DNA, 291 bp, Zea mays
ccactactggtggcaagaatggtcaaccaaaacagacagtgagctacatggctgagcgcattgtaggtcaaggttcttttgggattgtcttccaggctaagtgtttggagacgggtgagactgttgccataaagaaggttcttcaggataagcgttacaagaaccgtgagttgcagaccatgcgccttcttgaccaccctaatgttgttgctttgaagcattgcttcttttcaactactgagaaggatgagctttatctgaacttggtccttgagtatgtgccggagacag

SEQ ID NO: 15904 - DNA, 303 bp, Zea mays
cgccgctcccggcgccgccagcgtgcgacgaggcggcgctcgtgccgccgctcaacttcgccatggtcgacgacggcatattccgctccggcttcccggagaccgccaatttccggttcctcaagtccctcaacctccgctccatcgtgtacctgtgcccggagccgtacccagagacgaacacggagttcctcgagaagaacgggatcaggctccaccagttcggaatcgaggggcgaaaggaaccatttgtcaatatacccgatgacaaaataagggaggcgctcaaagttgtcttagacc

SEQ ID NO: 15905 - DNA, 309 bp, Zea mays
gattaagatcggaatcaacggcttcggaaggatcggcaggctcgtggccagggtcgccctccagagcgaggatgtcgagctcgtcgccgtcaacgaccccttcatcaccacggactacatgacctacatgttcaagtacgacaccgtccacggccactggaagcacagcgacatcacactcaaggactccaagacccttctcttcggtgacaagccggtcaccgtctttggcatcaggaaccctgaggaaatcccgtggggtgaggctggcgctgagtatgtcgtggagtccaccggcgtcttcactga

SEQ ID NO: 15906 - DNA, 291 bp, Zea mays
aaaacgcgaggatccggaattgtctgacccagctgaatgtcaaggacatcactgacgacgacaagcaggagctcgatgaggctctgcagagagagatccaagcagccttcagaactgatgaaatcaggagggcacaacccaccccacaggacgaaatgcgctatgggatgagctacatccatgagactgtatggaagggcgtgcctaagttcttgcgccgtgtggatacagccctgaagaatatcggcatcaatgagcgccttccctacaatgtttctctcattcggttct

SEQ ID NO: 15907 - DNA, 164 bp, Zea mays
agcctcatccccttgcccacttctacagcccctctgctgcagcaagaaggaaagaagctagcgcttatagcttgtcagccatggccaccgccgccgcgtctagcctcctcaagtcctccttcgcgggctcccggctcccggccgccacgcggaccacaccggcg

SEQ ID NO: 15908 - DNA, 221 bp, Zea mays
acactacacagcgagcatcgacatcgcggacaggggccgctagtggacgccatcacgctggcggcgttcgcggcgccggcgctaggcctgccgccgttcgcgacggccagcatggactggaaggagacgccgacggcgcacgtgttcatggccgacctccccgggctgcgccgcgacgaggtgaaggttgacgtggaggatgagaggctgctccggatcag

SEQ ID NO: 15909 - DNA, 143 bp, Zea mays
cccacgcgtccgcaaaccctaaccggccggcccaattctcacgcgctcgccgcctaggagcattcacgttggcggcgggcggcggctcggttcctctcctccaccgcacctccaagaatccacctccacgactgagctgacgg

SEQ ID NO: 15910 - DNA, 97 bp, Zea mays
gctaagccgaatcgagcagcagtagccaccttgccatggcgatgcaggctgctttcctcgcggggttctcgcagctcgccgcgcaccgagctgcgac

SEQ ID NO: 15911 - DNA, 297 bp, Zea mays
atccttgggaagcagccgctttccccaccagcccttagtggtgatctgggaactttcatggcctgggtggatgatgttagaaagctcaaggtcctggctaacgccgatacccctgatgatgcattgactgcgcgaaacaatggggcacaaggaattggattatgccggacagagcacatgttctttgcttcagacgagaggattaaggctgtcaggcagatgattatggctcccacgcttgagctgaggcagcaggcgctcgaccgtctcttgccgtatcagaggtctgacttcgaa

SEQ ID NO: 15912 - DNA, 303 bp, Zea mays
  unsure (1)..(303): unsure at all n locations
cccacgcgtccggattgatcatgtaaaggcaaaggagcacatggatgcctattttagtatgatgcagataatgtcaacaaatcagaagttgtcttctcgtgtaaggtttatgttgagagattcaatcgacctgaggagaaataaatggcagcaaaggcgtaaagtcgaaggtcncaagaagattgaggaggttcacagagatgcagcacaagaaagacatgcccagtcgagtaggttgggacgtggtccagctgttagttctgttccaagaagagcacatcctatggattatggccctcgtgg

SEQ ID NO: 15913 - DNA, 166 bp, Zea mays
ataaaaggaccagttattaaagtattgtcggcgcctcggcagttttgtatatatatctattacacattacacatgtatggtagccggagcttgcattcacatatatggtcctcacccaacgaatcgacagtcgttgcactacgtacgtaattgtagatggatgatg

SEQ ID NO: 15914 - DNA, 168 bp, Zea mays
gcatacacaacacagagcatcagaaggagctgcgatctgatcgacatggctgccgccaccatggctatcacctcccgcgcgctcatcggcaagccggcggctggcacgagggacgtcttcggcgagggccgcatcaccatgcgcaagaccgccgccaagcccaagccg

SEQ ID NO: 15915 - DNA, 292 bp, Zea mays
cccacgcgtccggaagaagacgagtgtcaagtgaacctgaaacttgcggtgtcactggctggtatagcctgagtgtgagtgagtgatcgagctagctgagctccgatcctcgctagctagctaggataccgccataccacaagtcttcttcacaagtttaggagtgacagcaacaagagatctcgatggcctctgccaccgtgctcaagtcctccttccttcccaagaagtccgaatggggcgccaccaggcaggccgccgcgcccaggccgcccaccgtctccatggtcgt

SEQ ID NO: 15916 - DNA, 291 bp, Zea mays
gagcactattgaactaaggattccaaatagttctttggggtctatcgtcggtgctggtggggtcaatctagcagagatccgtcaggtttctggtgcaagactgaggctacatgaggctcatgctggttcttctgagtctgtggtggagatccagggcacactggaccaagcaaaagctgcccagagcctcctgcaaggctttattagtgcaaacagccggcagcaacagcagccctattcttctcgcatgccactttacccaagctggggatagcctctggtctcatggtc

SEQ ID NO: 15917 - DNA, 111 bp, Zea mays
ggttggcttctcctccccctccggttcgggttcgggttcgtgaggttctccggggttcggtttcgtgggtgagcggatcgagatggcggcgtcggatgttgagtaccgctg

SEQ ID NO: 15918 - DNA, 290 bp, Zea mays
cagaagggaacatcgaggacattgtaagtgaattatgtgctgagacgggagccaaccaggaggatgccctcgcgcgaattgaaaagctttcagaagtaaacccgatgcttggcttccgtgggtgcaggcttggtatatcgtaccctgaattgacagagatgcaagcccgggccatttttgaagctgctatagcaatgaccaaccagggtgttcaagtgttcccagagataatggttcctcttgttggaacaccacaggaactggggcatcaagtgactcttatccgccaa

SEQ ID NO: 15919 - DNA, 296 bp, Zea mays
cccacgcgtccgcgacgagatccagagcaagacgtacctggaggtgaagggcacgggcacggcgaaccagtgcccgaccatcgacggcggcgtggactcgttcccgttcaagcccggcaagtaccagatgaagaagctgtgcctggagccgacgtccttcaccgtcaaggcggagggcatcgccaagaacgcgccgcccgagttccagaagaccaagctcatgacccgcctcacctacacgctggacgagatcgagggcccgctcgaggtcgcctccgacggcaccctcaagttcg

SEQ ID NO: 15920 - DNA, 297 bp, Zea mays
gccaggcagccatggcgcccaccgtgatgatggcctcgtcggccaccgccgtcgctccgttccaggggctcaagtccaccgccagcctccccgtcgcccgccgctcctccagaagcctcggcaacgtcagcaacggcggaaggatccggtgcatgcaggtgtggccggcctacggcaacaagaagttcgagacgctgtcgtacctgccgccgctgtcgacggacgacctgctgaagcaggtggactacctgctgcgcaacggctggataccctgcctcgagttcagcaaggtcggct

SEQ ID NO: 15921 - DNA, 331 bp, Zea mays
cgaagacatcgacctcctctgaccggccgctgtggttccccggcgccgtggcgccgactacctggacggctcgctggtcggcgactacgggttcgacccgttcggtctcgggaagcccgtggagtacctgcagttcgagttggactcgctggaccagaacctggccaagaatgaggccggcggcatcatcggcacccggttcgagtcctccgaagtcaagtccaccccgttgcagccctacagcgaggtgttcggcctccagcggttccgcgagtgcgagctcatccacggccgctgggccatgctcgccaccctcggcgccctctccgtc

SEQ ID NO: 15922 - DNA, 328 bp, Zea mays
cttcggcacattggtggagccacttgctagcaaccggccttggatggtgacagaaggcaaccatgagaaggagcacattccattttttgagtcaggatttcaatcttataatgcacgattggaaatgccttatgaagagagcggatctagatcaaatttgtactactcttttgaagttgctggtgcacacatcataatgctaggttcatacacagattatgatgatagctcagatcagtatgcttggctaaaggctgatcttgccaaggttgatagaaagaggacaccctggctcattgtgttgttgcacgtaccatggtacaatagc

SEQ ID NO: 15923 - DNA, 329 bp, Zea mays
gttgtaggatcttggcggatcactgggcagggatgcagcaacagggcgaggcgtaatgtatgctaccgaggccctactcgctgaatatggaaaatgcatttctggatcaacttttgtgatccaaggttttggcaatgttggttcatgggctgctcgacttattcacgagaaaggtggtaagaattattgcaattggggatgtgacaggttcaattagaaacacagctggtatagacatacctgctttggtgaagcataggaatgaaggtcatgcgatgaaagacttcgatggtgcggaagttttggattcaaccgagttgttagtgcat

SEQ ID NO: 15924 - DNA, 329 bp, Zea mays
ctcgagctagctagctgctgtaaccgttgccatggccaaaatggtgttgctctgcgtgctcgtctccttcctcctgatgcccttggcctccctagccctgacgcaggacttctgcgtcgccgacctgacctgcagcgacacgccggcggggtacccgtgcaagtccagcgtcaccgccaacgacttctacttccacggcctggccggccagggcaaaataaacccactcatcaaggccgccgtgaccccggccttcgtgggccagttcccgggcgtcaacgggcttggcatctctgcggccaggctcgacatcgaggtgggcggcgtcg

SEQ ID NO: 15925 - DNA, 313 bp, Zea mays
gctccgccacgcttaccggcaaccaccggatgcgcgccgccgccgttgcgctgccggagacgaaagactggagggaggatgggattgtgagcccagtgaaaaaccagggccactgtggatcatgctggaccttcagcactactggtgcacttgaggctgcatatacccaggcaactggcaagcccatctctctctctgagcaacagcttattgactgtggttttgcattcaacaatttcggatgcaacggaggccttccatcgcaggcctttgaatacatccaatacaatggtggccttgacactgaggaatc

SEQ ID NO: 15926 - DNA, 308 bp, Zea mays
gcgacacgatcgcgagcgcacgcacgtaagcacgttgtcggaagctcaagttagaagaagcaccagtgcctgatcgatggcggcccaggctctcctctccggccggcagctgctgggccgccccgtgcagtcggccgtctctaggtcgtcggcgaggaaggcgcccttcgtcgtcagggccagctccagccctccagccaagcaaggtgccgactagagctgtggttcgcgtccaagcagtccctctcctacctcgatggcacgctgcccggcgactatggcttcgacacgctgggcctctcggaccc

SEQ ID NO: 15927 - DNA, 329 bp, Zea mays
acccacgcgtccggacaaacgccggcacgcgcacgcagacacgatggcgatctgcagcgcgcacactaccacctccctgcgctccccatgcacgaccgtctcgaacgcaggtctgaggcagaagcaagtcatcttcgtcaccagcaacaggaagagcggcggcggcaggaggcacggaagggcaaggagcttccaggtctcgtgctccgtcgacaagccggtggtgattggcctggcggcagactcagggtgcggcaagagcaccttcatgcgccggctcaccagcgtcttcggtggcgccgcggagccgcccaagggcgggaacacgg

SEQ ID NO: 15928 - DNA, 327 bp, Zea mays
cccacgcgtccgatcaaagacccccaaaaggtgaaaacggtcgatgagatgagggagcggctgaggatgcgtggtctccgctgccacatcatgtactgcaggaactcgacaaggcttcaggttgtccctctgctagcatcaaggtcacaggcactcaggtatctttccgtgcgctggggcgtatctgtggggaacatgtatctgatcaccggggaacatggcgacaccgatctagaggagatgctatccgggctacacaagaccgtgatcgtccgtggcgtcaccgagaagggttcggaagcactggtgaggagcccaggaagctac

SEQ ID NO: 15929 - DNA, 327 bp, Zea mays
cccacgcgtccgcactcctcgccatcacataaaaccagtgcaagcagaagcagcgcaatggcgagcagcaccatggccctctcctccacagccttcgccggcaaggcagtgaacgtgccgtcgtctctcttcggcgaggcccgcgtgacgatgcgcaagacggcggcgaaggcaaagccggcggcgagctccggcagcccgtggtacggccccgaccgcgtgctctacctgggcccgctgtccggcgcgcccccgagctacctgacgggcgagttcccgggcgactacggctgggacaccgaggggctgtcggcggacccggagacg

SEQ ID NO: 15930 - DNA, 323 bp, Zea mays
cacgcatactgcatacacaacgcagagcatcagaagcagctgcgatctgatcgacatggctgccgccaccatggctatcacctcccgcgcgctcgtcggcaagccggcggctggcacgagggacgtcttcggcgagggccgcatcaccatgcgcaagaccgccgccaagcccaagccggcggcgtccggcagcccatggtacggtgccgaccgcgtcctgtacctgggcccgctgtccggctcgctcccgagctacctgaccggcgagttccccggcgactacgggtgggatactgcggggctgtcggcggacccggagacct

SEQ ID NO: 15931 - DNA, 327 bp, Zea mays
ggcgtgggctacgacgaggccgaggactacgtggtggtcaagcacgcggcgctgttcacgtccaccgtgatgagccggctcctggcgcggcccaacgtgaagctgttcaacgccgtggcggtggaggacctgatcgtgcggcgggggcgcgtcggcggcgtggtcaccaactgggcgctcgtgtccatgaaccacgacacgcagtcgtgcatggaccccaacgtcatggaggccaaggtggtggtcagctcctgcggccacgacgggcccttcggcgccaccggcgtcaagaggctccaggacatcggcatgatcagcgccgtgccc

SEQ ID NO: 15932 - DNA, 328 bp, Zea mays
cccacgcgtccggtgacgaggaggagctccagaaggagaacatcaagaacgccgcctcctccaccggcaacatcacgttgagcgtcaccaagagcaacccggagaccggcgaggtcatcggcgtcttcgagagcgtgcagccgtccgacaccgacctcggggccaaggcgcccaaggatgtcaagatccagggggtctggtacgctcagctcgagtgattcgagtgtctaactgctaggtgtccgaccgccgtcatggatcttgggaaggtgtatgtataccatggaaaactttggagagcagaggaggaatcgtgtatgtaatgtac

SEQ ID NO: 15933 - DNA, 329 bp, Zea mays
caaaagacaaagcggccaacacaatagagcatgaggacattgaagatcttgatggatgtgtggttgagcatttttctgaagaccatgttcttcataatgatcaggaaaaggagctaataaagatatcagaagctaaaattcgcgaatggtctaggggaaaagaaggaaatattaggtcattgctttcaacactgcaatatgtcttatggcctgagagtggatggaaaccagttccacttgttgatataattgaaggagcagcagttaagaaggcttaccagaaagcattattgtgccttcatccagataagttgcagcaacgaggtgct

SEQ ID NO: 15934 - DNA, 324 bp, Zea mays
cggacgcgtgggcctttatgcgccttcatttgttaacctttgtgaagctgctgactttatccacagaaacgcttcatgtgggaaattgacgtatgtgcaatgcaaagctggacgagggcgtacactacagttgtcatttgctatttggtgcaatataaaaatatgactcctgctgaagcttatgaacatgtccgcttgcgtcggcctagggtattattagcttctgcacagtggcaagctgtgcaagagttctaccaactaacagtgaagaaaacggggaggtctacttggctggacaatcctttaatcaaaccaccgttgttc

SEQ ID NO: 15935 - DNA, 324 bp, Zea mays
ccggagtccgtcgactggagggccaagggcgccgtcgccgaggtcaaggaccagggcagctgcgggagctgttgggctttctcaacaatagcagctgtggaaggcatcaaccagattgttacaggcgacttgatctccttgtctgaacaagagcttgtcgactgtgacacttcgtacaatcaggggtgcaatggaggtctgatggactatgcatttgagttcatcatcaacaatggcggaatcgacaccgagaaggattacccttacaagggcacggacggacggtgtgatgtcaacaggaaaaacgcgaaggttgtcactatt

SEQ ID NO: 15936 - DNA, 324 bp, Zea mays
gttttccaagacttggatttctcatttcttgagatgaacccattcaccttggtaaatggtgaaccgtatcctctggatatgagaggagaactagatgacacagctgctttcaaaaacttcaataagtggggcaatattgtgtttcccctaccatttggaagagttctcagtccctccgaaagttttatccatgaactggatgagaagacaagtgcttctctgaaattcacggtactgaacccaaaaggacgcatctggacaatggttgcaggtggtggtgctagtgtcatatacgcagacactgttggtgatttgggatatgct

SEQ ID NO: 15937 - DNA, 325 bp, Zea mays
ggacgacaacggcaacgtcaagctcgattgcccggcgattggcaagcagttcgcagctgaggagatttccgcacaggtgctgaaaaagctggtggatgatgcatcaaagtttttgaatgacagagtcacaaatgcagtgatcacagtcgctgcttacttcaacgattcacaaaggacagcaaccagagatgctggccgcattgctgggctggaggttctgcgtattataaatgagcccaccgcagcaatcactagcatatggttttgagagaaaagacaatgaaacaattctggtttttgacctcggaagtggcacatttgacgt

SEQ ID NO: 15938 - DNA, 321 bp, Zea mays
tgctaataaaacactagtttatgatgatacatctgatggaactagaacatggaggcatgctgttaatgtgaaccttgttgctgtcattgatggtactcgcattgcaagtcaaataatgcgagaccaaaagaagcccggtgtcataataaacattggttcagcggcaggtctttatcctatgttcctcgatcccgtatatagtgcggcaaaagggggtgtggttatgtttacaagatcactttctccattgaaacgccatggtgttcgtgtcaatgtgctctgcccagagtttgtccaaaccaatatggcggaacaaatgag

SEQ ID NO: 15939 - DNA, 323 bp, Zea mays
gggcgcggtgctggtggagaacgagcaccacaaggaggtcttcatcaaggagatcaagctcgtcaccggcggcgacagcagcaccgccgtcaccttcgactgcaactcctgcgtgcactccaagttcgacaacccggagaagcgcatcttcttcaccctcaagtcatacctgccgtccgacacgcccaaggggctggaggacctgaggaagaaggacctgcaggcgctgcgcggcgacgggcacggcgagcgcaaggtgttcgagcgcgtctacgactacgacgtgtacaacgacctgggcgacccggacaagaacccggccc

SEQ ID NO: 15940 - DNA, 319 bp, Zea mays
ggcgggcagtcggaggtggaggcgacgcagaacctcaacgccatgaaccaggggcccaacccgtggcacgtgtccttctcctacgcgcgggcgctgcagaacacctgcctcaagacctggggcggccagccggacaaggtcaaggcggcgcaggacgcgctgctgctgcgcgccaaggccaactccctggcgcagtcggcaagtacacctccgacggcgaggccgccgaggccaaggagggaatgttcgtcaagaactacagctactagttaatcgcccggccatcacccgggataccgccgcccctccgagagatacg

SEQ ID NO: 15941 - DNA, 318 bp, Zea mays
gctgtaccctgtatcggtggtcaagacccggatgcaggttgcctctggggatgccatggggaggaacgcgctggctaccttcaagaacatccttaaggtggacggcgtgccagggctgtaccgggggtttcctactgttataattggggctgtaccaactaggattatcttcctcacggcgcttgagacaaccaaagcagcctctctcaagcttgttgagcccttcaagctgtcagagccggtgcaggccgcctttgccaatggccttgccggtctgtcggcatccacatgttcgcaggctatttttgtcccaattga

SEQ ID NO: 15942 - DNA, 214 bp, Zea mays
gcgccgcagcgtccgggactgggagtggtgagcctggagatggatcaacccgtcgtgcgttgtttcattttgtgatgaatgggagagagggtatggggcaagattgagcgacccgtcgtgcttacgtctcgttaattaggagagctaccgctcggatttggtgatttgtaatatatgaaccagtgatgaataaatgcattcacttgtacacatc

SEQ ID NO: 15943 - DNA, 297 bp, Zea mays
cggacgcgtggcgtgacgcgtggggcaaataatgcacaactgccaaactttttacaatggtactctcaagcaggtacgcctatagtcaaggtagtatcttcatatgatcctagttctcagacattctctttgaaacttagccaagaagtaccacccactcctggccagccggttaaggagcctatgttcatacctgttgctgttggacttgttgactctactggaaaagatatgcccctcacttccgtttacagtgatggaagtctccaaacagtctctactgatggccagccagtc

SEQ ID NO: 15944 - DNA, 296 bp, Zea mays
cccacgcgtccgcccacgcgtccgcccacgcgtccggtccgttccgctccttcctccccctatctagctagccttcccgttcctgcatcgcggcggagatgggcgcctccaccacgccgctcgcgtcggcggcggcgctgcttctgctgctgctcgcgccgctcgccgcggcggtggacagcatgtcgatcgtctcctacggcgagcggacattgaggaggcgcggcggatgtacgccgagtggatggcggcgcacggccggacctacaacgccgtcggcgaggaggagcgcaggt

SEQ ID NO: 15945 - DNA, 295 bp, Zea mays
cacagctcacacaggcacacagctcctcttggcggcgcctctgacttcgtcgcccttctcctttttcgtcgcccttctcctttttcgtcgccttcgatcggcggctgcctccttcctccacttccgtcccttcaccgagccgccgccgccactatgaagggacccggcctcttctccgacatcggcaagaaggccaaggatctactcagtaaggactacacttacgaccagaagctgaccatctccaccgccagcgcctctggactgggcctgacttccacagctgtgaagaaag

SEQ ID NO: 15946 - DNA, 295 bp, Zea mays
atctgcatggtcccgttgcagcacaattgggaacatacttgatcaaggtcactgtggctcttgttgggcttttggtgctgtggagtgcctccaggaccgtttttgcattcacctcaacatgagcattttactttcagtcaatgacctactggcatgctgcggttttatgtgcggcgatgggtgtgatggaggctatcctatagaggcatggcgctactttgttcaaaatggtgttgttacggatgagtgtgatccatacttcgacccggtcggttgcaagcatcctggatgcgaa

SEQ ID NO: 15947 - DNA, 292 bp, Zea mays
cggacgcgtggtgtagattggctcgctgggaacttcaagaatgatgagggtattgatttgctaaaagataagcaagcactgcagcgattgacagaagcagctgagaaggcaaagatggaactgtcatctttgacccaaacaaacatgagcttgccttttattacagctactgcagatggtcccaagcatattgagactactcttaccaggggtaaatttgaagagctatgctcagatctccttgacaggctgaggacccctgtggacaatgcccttagagatgcaaagttgc

SEQ ID NO: 15948 - DNA, 296 bp, Zea mays
gttggactctaacaaagagttatttggtctgggaatagcaaatatctgtggttcattcttctctgcatatcctgccacaggctccttttctaggtcagcagtgaatcatgaaagtggggcaaaaactgggttatctggaatcataatgggcataatcattggtggtgctctcttatttatgaccccattatttactgatataccccagtgtgcattggctgcaattgtgatttctgctgttactggcctggtagattatgaagaggccatcttcttgtgggctattgataagaaag

SEQ ID NO: 15949 - DNA, 297 bp, Zea mays
caagcattgaagccgtagccgccgccgccggacgagacaggttgaggcggggcggcaatggccgccggggaccttgaggtgctcaccgcgctcgacaccgcgaagacgcaatggtaccacttcaccgccatcgtggtcgccggcatgggattcttcaccgacgcctacgacctcttctgcatctccctcgtgactaagctcctcggccgcatctactacaccgtggaggggtccgcgacgcccggcaccctcccgccgcacgtgtccgcgtccgtcaacggcgtggccttcgtgggc

SEQ ID NO: 15950 - DNA, 306 bp, Zea mays
atgtccgcggtacggtggtcggtacgcgtgggctggacgcgtgggcggacgcgtgggcgacgtcaagatcgtggacgacacgaccatcagcgtcgacggcagtcccatcacggacgtctccagcaaggacccgctcaagctcccatggggtgagctcggcattgacatcgtcatcgagggcaccggagtcttcgtcgacggccccggcgccggcaagcacatccaggccggcgcgaagaaggtgatcatcacggctcccgccaagggcgccgacatcccgacctatgtcgtcggcgtcaacgaggg

SEQ ID NO: 15951 - DNA, 290 bp, Zea mays
cccacgcgtccggagcgagtgagggacctcttagatttcagtatctacttggacatcagtgatgaagttaagtttgcatggaaaatccagcgggacatggcagagcgtgggcacagccttgaaagcatcaaggccagtatcgaggccaggaaaccagattttgatgcctttattgatccgcagaagcagtatgctgatgctgtgattgaagttctgccgacccagttgattcccgacgacaacgaaggaaaggtgctgcgtgttaagctcatcatgaaagaaggggtgaa

SEQ ID NO: 15952 - DNA, 291 bp, Zea mays
cgctcacctacatctccgtccgcaagcgtcaccaggctgccccgggaggccgggaggaagcagatcggagaaggtgatctgttgtaatggctcgattgtacatcggcaacctggatccccgggtgaccgctcgggagctggaggacgagttccgcacgttcggggttcttcgcagtgtctgggttgctcggaaaccacctggctttgcgtttattgattttgatgataagagggacgcagaggatgcaatccgtgacctagatggcaagaatggatggagagttgagttat

SEQ ID NO: 15953 - DNA, 96 bp, Zea mays
ctcccgtgcgctcatcggcaagccggcggctggcacgagggacgtcttcggtgagggctgcatcaccatgcgcaagaacgccgccaagcccaagcc

SEQ ID NO: 15954 - DNA, 293 bp, Zea mays
cgtcgccaagaaccacagccaccgcgatggcgcagatcatcgatggcaaggccatcgccgccgacgtccgccgcgaggtcgccgccgatgtggccgcgctctcgtcggcccacggactcgtgccggggctggccgtggtcatcgtggggagcaggaaggactcgcagacgtacgtgaacatgaagcgcaaggcgtgcgccgaggtcggcatctgctccatcgacgtcgacctcccggaggacatctccgagaccgcgctcgtcgccgaggttcatcgcctcaacgctgacccc

SEQ ID NO: 15955 - DNA, 292 bp, Zea mays
ccggtgaagcgcgagagcggtgaggcatggcgatgcagacgggggtcgcgacctccaaggtcctcatcctcgtcggtgcagggatgacgggctcgatcctgctgcggaatggccgcttatctgatgtgttgggagaactccaggagattatgaagggtgtaaatcaaggaacttcttcgggtccctatgacattgcacttattcaagctcagattcggaatttagcccaagaagtcagagatttgacattgtcaaagcccattaccatactgaatggcaaatctgactcggg

SEQ ID NO: 15956 - DNA, 288 bp, Zea mays
atagctatgatgaaccttcaggaaacggacgagaggcttttctacaagcttttaattgataatgtggtggagctgcttccttttgtttacacaccaactgtaggtgaggcctgccagaagtatgggtccatctttggacgaccacagggtctgtatgtcagcctgaaggacaaggggaaggtcctagaagttctaaggaactggccacataggaacattcaagttatctgtgttactgatggtgagcgaatcttgggacttggagacttgggttgtcagggaatggga

SEQ ID NO: 15957 - DNA, 292 bp, Zea mays
atccagagcaaaacgtacatggaggtgaagggcacgggcacggcgaaccagtgcccgaccatcgacggcggcgtggagtcgttcccgttcaaggccggcaagtaccagatgaagaagctgtgcctggagccgacgtccttcaccgtcaaggcggagggcatcgccaagaacgccccgcccgagttccagaagaccaagctcatgacccgcctcacgtacacgctggacgagatcgagggcccgctcgaggtcggctccgacggcacgctcaagttcgaggagaaggacggca

SEQ ID NO: 15958 - DNA, 284 bp, Zea mays
cccgaggccttcgccgagctcaaggtgaaggagctcaagaacggccgcctcgccatgttttccatgttcggcttcttcgtccaggccatcgtcaccggcaagggcccgctcgagaacctcgctgaccacatcgctgacccagtcaacaacaacgcatgggcctacgccaccaacttcgtccccggcaactaagctcaacggctatgctatgcaacttcattgtctttcggatcggagagggtgtacgtacgtggattgattgatgctgcgagatgcatgtgtgt

SEQ ID NO: 15959 - DNA, 288 bp, Zea mays
gtttaaagaagattgcaacacagagaaaaagattattgtaaagattaaaacaagtgctgaaaagtcactgtgggtagagaaagaggacaatatccgccgtggccttttcgatttactacagaatattgtccttatcagagatccagaggactccacaaaattctatccccgtttcaacctggaagacacatcaagttttagggaccttgatgaacacagcaaaaatgtcctcagaagattgtattatgactattattttgttcgccaagaaaatctctggcgccaaaa

SEQ ID NO: 15960 - DNA, 283 bp, Zea mays
ctcaagttagaagaagcaccagtgcctgatcgatggcggcccaggctctcctctccggccggcagctgctgggccgccccgtgcagtcggccgtctctaggtcgtcggcgaggaaggcgcccttcgtcgtcagggccagctccagccctccagccaagcaaggtgccgacaggagtctgtggttcgcgtccaagcagtccctctcctacctcgatggcacgctgcccggcgactatggcttcgacccgctgggcctctcggacccggaggcaccgggggcttc

SEQ ID NO: 15961 - DNA, 286 bp, Zea mays
gggaagatgaaggagagagcgccggagaacttccgggtcgactacgccgtcagccgggagcagacgaacgcggcgggggagaggatgtacatccagacccgtatggcggagtacaaagaggagctgtgggagctcctgaagaaggacaacacctacgtctacatgtgtgggttgaaaggcatggagaagggtatcgatgacattatggtgtcactggctgaaaaagacggaatcgactggttcgactacaagaagcagctgaagaggggagatcaatggaatgtgg

SEQ ID NO: 15962 - DNA, 286 bp, Zea mays
gcgtcgtccatgctctccgctaccaccgtgccactccagcaggggggcggcctgtccgagttctccgggctcaggagctccgcgtcgctgcccatgcgccggaatgccacctccgacgacttcatgtccgccgtctccttcaggacccacgcggtcggcacgagcggcgggccgcggcgggcgccgacggaggcgaactgaaggtggccatcaatgggttcggccgcatcgggcgcaacttcctgcggtgctggcacgggcgcggcgacgcctcgcccctcgacgt

SEQ ID NO: 15963 - DNA, 287 bp, Zea mays
cggacggtggtcgcttccagaagggaacatcgaggacattgtaagtgaattatgtgctgagacgggagccaaccaggaggatgccctcgcgcgaattgacaagctttcagaagtaaacccgatgcttggcttccgtgggtgcaggcttggtatatcgtaccctgaattgacagagatgcaagcccgggccatttttgaagctgctatagcaatgaccaaccagggtgttcaagtgttcccagagataatggttcctcttgttggaacaccacaggaactggggcatc

SEQ ID NO: 15964 - DNA, 286 bp, Zea mays
aagaaagaaggatgatgtgcggagggctttccgtggagtggactgtgttttccaccttgcttcttatggcatgtcagggaaggagatggtgcagactgcgagatctgatgaggttaatataaatgggacctgcaatgtactggacgcttgccatgagcaaggtgtcagaaggcttgtgtatgtaagcacatacaatgtggtatttggaggaaagccgattgtcaacggaaatgaggcgttgccttattttccgattgaagaccatgttgatgcttatgggcgcaca

SEQ ID NO: 15965 - DNA, 285 bp, Zea mays
gttggactctaacaaagagttatttggtctgggaatagcaaatatctgtggttcattcttctctgcatatcctgccacaggctccttttctaggtcagcagtgaatcatgaaagtggggcaaaaactgggttatctggaatcataatgggcataatcattggtggtgctctcttatttatgaccccattatttactgatataccccagtgtgcattggctgcaattgtgatttctgctgttactggcctggtagattatgaagaggccatcttcttgtgggctat

SEQ ID NO: 15966 - DNA, 284 bp, Zea mays
cccacgcgtccggtgaacctgaaacttgcggtgtcactggctggtagcctgagtgtgagtgagtgatcgagctagctgagctccgatcctcgctagctaggataccgccataccacaagtcttcttcacaagtttaggagtgacagcaacaagagatcgatggcctctgccaccgtgctcaagtcctccttccttcccaagaagtccgaatggggcgccaccaggcaggccgccgcgcccaggccgcccaccgtctccatggtcgtccgcgcctccgcctacgc

SEQ ID NO: 15967 - DNA, 287 bp, Zea mays
aagaagacgagtgtcaagtgaacctgaaacttgcggtgtcactggctggtagcctgagtgtgagtgagtgatcgagctagctgagctccgatcctcgctagctaggataccgccataccacaagtcttcttcacaagtttaggagtgacagcaacaagagatcgatggcctctgccaccgtgctcaagtcctccttccttcccaagaagtccgaatggggcgccaccaggcaggccgccgcgcccaggccgcccaccgtctccatggtcgtccgcgcctccgcctac

SEQ ID NO: 15968 - DNA, 123 bp, Zea mays
atcacattcaagaacaacgccggcttcccgcacaacgtcgtcttcgagaagacgaggtgccgagcggcgtcgacgccaccaagatttcgcaagaggagtaactcaaaggggcaagccgagact

SEQ ID NO: 15969 - DNA, 233 bp, Zea mays
caaagtctcaaacgtgcctcttgttgcattgacacacatgtacaatacaatcgtacatatagtacgttttattcgacaagcagcctctgcatgcaataatagtacaacccccgatttaattaattggactaatgcatgctgaggatggatcagatggagatgctgctggggatgcccctcccggtgactcccggcttggagaagggcttgagcagctcgtacggcacgattcc

SEQ ID NO: 15970 - DNA, 298 bp, Zea mays
catcgcagcagcacgagcagcacgtcgtgccgctccaaccatctcgcttccgtgcttagcttcccgccgcgccatggcgtcgaccaaggctcccggccccggcgagaagcaccactccatcgacgcggagtccgtcagctggtcccaggcaaggtctccgaggacgacaagctcatcgagtacgatgcgctgctcgtcgaccgcttcctcaacatccttcaggacatctacgggcctagccttcgcgaatttgtccaggagtgctacgaggtatcggccgactacgagggcaaaggag

SEQ ID NO: 15971 - DNA, 291 bp, Zea mays
ggaccgtggtttttccatggatgtgacttgtgagtcattttcgtaaaccaacaccaaagatgagtccatgtttcttacttagtcacctcgaacaaacaccactggcaagaggtactcgcgttggcgtcgctcatcgacgacgagaagaagcttggcgactgtcagttcgacttcttgaagcaatcctacgtggccgcatgcgccgctatgttcggcaagctccgacgcagccgccgcttggacgcggtccagagcggctgcaccgcgctatccatcttcaaacaaggggac

SEQ ID NO: 15972 - DNA, 306 bp, Zea mays
cacaaggaatcatcatggatatcaactaccatttggattgtcttgctgatatgctttggaagcatcacaacatgcggctacattgtcatccaacttttcaaagtatcatatcaagatccaatctaccacgtgctattgaactcccacagtaagtatggaattccaacttcactgtgataattcatcttctatgatcctggaagatttgaaaatttattgaagttttatgtgcagcttggctggtaatattaaaatgttccttctatctatatgtaaggtaccacaattaaggggacaggaggatag

SEQ ID NO: 15973 - DNA, 150 bp, Zea mays
gccttgtcccgctcgccggctccaacaacgagtcgtggtgccagggcctggacagcctggcgtcccgcgaggccgcctactaccagcagggcgcgcggttcgccaagtggcgcaccgtcgtcagcatcggtaacggcggctccgatctcg

SEQ ID NO: 15974 - DNA, 277 bp, Zea mays
ggacgtgggccgcggcggagggatcgagcatggagatggggatgctgccaaggatgccggtgcgtgtgctgctcgccgaagctacgactccacgcgccacgtcatttccggctgctccggaagtgcggctaccgagttgctgcagcctcagatggtgtgaaggcgtgggacctattaaaggaaaaatctttcaaggtagaccttgttttaactgaagttgaactgcctttgatgtctgggttcctcctgttatccacgatcatggaacatgatgcgt

SEQ ID NO: 15975 - DNA, 251 bp, Zea mays
aactccatgaatgatgcatccaaggtaaaaaaatttaacaggttacatcccaatccatccatgtgcagagcagaggaattacatttatacacggtgctgatcaccgctggagtgaaatgaaacaagaaccacaccacctacataccatgcagctagagaggaggatcggccggagctatgtatacgcatcttcgatgatatctacttgaagaagtaggggaggtcgagcacgtagaggagaaagtaggccc

SEQ ID NO: 15976 - DNA, 294 bp, Zea mays
cccacgcgtccgctcctcgccatcacataaaaccagtgcaagcagaagcagcgcaatggcgagcagcaccatggccctctcctccacagccttcgccggcaaggcagtgaacgtgccgtcgtctctcttcggcgaggcccgcgtgacgatgcgcaagacggcggcgaaggcaaagccggcggcgagctccggcagcccgtggtacggccccgaccgcgtgctctacctgggcccgctgtccggcgcgcacccgagctagctgacgggcgagttcccgggcgactacggctggga

SEQ ID NO: 15977 - DNA, 295 bp, Zea mays
caaaaagaaacaaaagcctacggcgatcgatcgagaagctggtcatcgtcaggatgtcatcgccgcagtcagcagcgccgcccgtgaagctgatcacggcgttcggcagcccgttcgcccaccgcgtggaggtggcgctcgctctcaagggggtgccgtacgagctggtcgtggaggacctagccaacaagagcgagctgctgctcacgcacaacccagtccaccagtcggtccctgtcctcctccacggtgaccgcgctgtctgcgagtccctcgtcatcgtcgagtacgtcga

SEQ ID NO: 15978 - DNA, 287 bp, Zea mays
ggaccgggcgctcctcaagcttctctttccagtcgccctgtgccatggtattggtcacatcactagcaatgtgtccttcgactctgttgcagtctcatttgctcacactatcaaagctctggagcccttcttcagcgcacggctactcagtttatccttggacagcaagttcccttctctctgtggctttctcttgcccctgtggtcattggtgtttcaatggcatcccttactgagctttcattcaactggactggcttcatcaatgccatgatatcaaacatctc

SEQ ID NO: 15979 - DNA, 292 bp, Zea mays
gcgatacaggggagccgccggctcgcgcacaccgatcagttcaggttcctggacaaggcagcgtcggtggagccatcggacgacaagtcgcgtccggcgagtgcgtggcgtctgtgcacggtgacgcaggtggaggagctcaagtgcgtgctccggctgctgccggtgtgggcgagcgggatcgtgttcgctgcggcgtacacgcagatgaccaccaccttcgtcctgcatggctacacgctggacccgtacgtgagcggcttccgcgtgcccggcgccgtgctctccgtct

SEQ ID NO: 15980 - DNA, 295 bp, Zea mays
gcagatgaatgcttcccaagcgccatccatgcaggatcgacaccggttgattcccatcttcacagctacatccgcgggaaggtgtaccccgcgccaagaatgtggtatgtgagagtcaatgtgattgagggacaggacatatacccaatggagaaccgcatacctgatgtgctggtaaaagtgaggctgggccatcaactgctgaggacaaggcaggttcgctcgccgaccagaaacttcatgtggaacgaggagctgatgttcgtggcagcagagccgtttgaggacgacttgc

SEQ ID NO: 15981 - DNA, 288 bp, Zea mays
agatcatacaacgctataacaaggttattgtctgtgtggaagatggggcgagttttgtcgcagcgctgctatagtaaccgtccctctcggggtactcaaggcaaacatcatcaagtttgagcctcagctaccgaaagagaagctctcggcgatcgccgaccttggcgtcggtatcgagaacaagatagctctcaagttcgacactgtgttttggcccgacgttgaagtgataggtagggtggccccgacgtcaaacgcctgtggctactttctcaaccttaacaaagc

SEQ ID NO: 15982 - DNA, 290 bp, Zea mays
agcccggtccccgatctccgatcccctcgtcgatccaaccccccatcttcgtcaagaccctcactggaaagactatcaccctcgaggtggagtcttctgacaccattgacaacgtcaaggccaagatccaggacaaggagggcattcccccggaccagcagcggctcatcttcgctggcaagcagctcgaggacgggcgcacacttgccgactacaacatccagaaggagagcaccctccaccttgttctccgcctcaggggaggcatgcagatcttcgtcaagaccctc

SEQ ID NO: 15983 - DNA, 233 bp, Zea mays
cgaccttcaagtctcgctacgtagcagtgcaataaaaaaagcagccgcaatggcgagctgcaccatggccctctcctccacggccttcgccggcaaggccgtgaacgtgccgtcgtcgtccgccttcggcgaggtccgcttgacgatgcgcaagatggcggggattgccaagccgtctgcggcgtccggtgacccgtggtacggccccgaccgcgtgctgtatctgggcccac

SEQ ID NO: 15984 - DNA, 288 bp, Zea mays
gccgcgacgacgatggcagcctcgctccaagccgcggccaccctgatgcagccggccaagatcggcggccgggcgccctttgcctcgctgccgtcccgcgcgtcgtcgcaactcgcctgcagggcgttcggcgtcgacgccggcgccgccaggatcacgtgctccctgcaggacgtcgccagcaggtgcgtcgacgccgcgaactcgccggcttcgcgctcgccacctcggcgctcctcgtctcgggcgcgactcggagggcacgcccaataagctgacctacgacga

SEQ ID NO: 15985 - DNA, 277 bp, Zea mays
ggaaatgatatcagtcactgggtaccaaagcacgtgaatggaccattagagggcatacatgtttcatcaatttcacgtggaccttggcatacagccgtagtaacttccgctggacagcttttcacatttggtgatggatcttttggggttctgggccatggagatcgtgagagtatctcggtccccagggaagttgaatctctcaaagggctacgcacggtgcgggcagcttgtggtgtttggcacactgctgcagttgtagaagtcatggctggga

SEQ ID NO: 15986 - DNA, 290 bp, Zea mays
  unsure (1)..(290): unsure at all n locations
caagtacgactcgatgctcggcaccttcaaggccgacgtcaagatcgtggacgacactaccatcagcgtcgacggcaagcccatcacggtcggctccaccanggagacgctcaagctcccatggggtgagctcggcattgacatcgtcatcgagggcaccggagtcttcgtcgacggcccaagcgccggcaagcacatccaggccggcgcgaagaaggtgatcatcacggctcccgcaaatggcgccgacatcccgacctatgtcgtcggcgtcaacgagggcgactacg

SEQ ID NO: 15987 - DNA, 291 bp, Zea mays
aatggctccacttctcgccgcagccatgaaccacgctacccatccagtccttagaagccatctaggacccaacaatgagagtttctcacgacaccacctatcttcttcaccacaaagcagtaagcgaaggtttaaccttagctttacgccacgatctgcaagggtaggcaatgaaaatggagtccaattgttgagcccctcggaaatccctcgaagggactggttcccctctgacttcatctttggtgccgccacttcagcgtaccaaattgaaggtgcatggaacgaaga

SEQ ID NO: 15988 - DNA, 296 bp, Zea mays
atttgggctctagattatataatctggttgtttgtttgctagctagattatttacactggattatataatctggctagattataatcccaaacaaacatgctcataatctactattggcagttgccactcaaaaaatttaaccgactttaaatgaacgctgacaaaattgattgtttctattactggcatcaattaatactagaaaactaacatcaaaatttgagttgcatacaagttcattttctctacgttaggttacgctgaaagccctaagattctggatgctccggtgtct

SEQ ID NO: 15989 - DNA, 301 bp, Zea mays
ccttcagaaccgatgaaatcaggagggcacaacccacccgcagacgaaatgcgctatgggatgagctacatccatgagactgtatggaagggcgtgcctaagttcttgcgccgtgtggatacagcctgaagaatatcggcatcaatgagcgccttccctacaatgtttctctcattcggttctcttcttggatgggtggtgaccgcgatggaaatccaagagttaccccggaggtgacaagagatgtatgcttgctggccagaatgatggctgcaaacttgtacatcgatcagattgaaga

SEQ ID NO: 15990 - DNA, 310 bp, Zea mays
ctcagccgctagtaccagtagtcgtcgcgtttgcagctaggcagatctgagttagccggcggattcgatccgtgcgcgtgcgcagtcgtgtgtgtgtgtgtgtgtgtgtgtgtgtgtcggtggagagatggccacatcttacgctcccatggcgagccaggtgatgaagagcagcctcgtcgtgcactcgaggccgatgggcctgtcaggcgctgctgcgctcacgaggcggcccggccggttcaccgtcaaggccatccagcccgataaggcaacgtaccaggtggtgcacccatcaacggcgacccct

SEQ ID NO: 15991 - DNA, 307 bp, Zea mays
cccacgcgtccgagaccttcctgacatcagatgttgtggtcgtcgatatcaaggagccggagtgcacctgtcgcaaacccgatggacaactctggctatggatactgatgagatgctatggccatgccccatgggacgaaggtgatcaccatattaattttttggtaggcgaggagtcgggtcgaggtagctttttagacgaccgaaaggcgaaaataagttgaggatctgcatcccaaatttgtgatgtaaactgagacagaacagcagccaaatgaagcagagatttgctgaaagattctgtaac

SEQ ID NO: 15992 - DNA, 315 bp, Zea mays
cccacgcgtccggctcgatctccatctcgaccgtcgctcaccgggaagctacgctacgacgaagcatggcgtccgtcaccgcccgcgccccggtcgcggccctgcgcccgtcggcgtctctcaagtcgtcgtcgtcgtcggcggcggccttccttggccactctagccgcctcggccgcactgctaccgcgtcgccgacgaggcgcagcttaaaggcggaggccaagggcgagtggctcccgggccttccctcccccgcctacctcgacggcagcctgccgggtgacaatggcttcgacccgttgggcctggcgg

SEQ ID NO: 15993 - DNA, 316 bp, Zea mays
cggcggcggtttccagggccatctgcgtccagaaaccgggctccaaatgcagcagggacagggaagcgacctccttcgcccgccgaacggtcgcggcgccgaggcccccgcgcgccaaagccgccggcgtcatccgctccgactccggcgcgggacggggccagcagtgctcgccgctgagggccgtcgttgacgccgcgtcgatacagacgaccaaaaaggctgcagcagctgccacccccgcgccacatggacgcacggtggacggtgctctgcctctcccgcgaacgccgtgaccgggtactagctagcttag

SEQ ID NO: 15994 - DNA, 125 bp, Zea mays
aaagttcggcatcatcaagggcaccatgaccaccacccactcctacaccggcgaccagaggctgctggacgcgagccaccgcgacctgcgccgcgcccgcgccgccgcgctcaacatcgtgccca

SEQ ID NO: 15995 - DNA, 307 bp, Zea mays
acacagcacaggcagctcgagagagagagagagagaaagatgtcgtggttcgggcaccaccaccacaaccagccggctcccccggcgtcgggccccaaccaggtgttcaagatcttctgccgcgccaacgagaactactgcctggccgtccgcgacgcgccgtcgtgctggccccggtcaaccccaaggacgaccaccagcactggtacaaggacatgcgcttcagcacccgggtcaaggacgaggaaggcatgccggcgttcgcgctcgtcaacaaggccacggggctcgccatcaagcactccct

SEQ ID NO: 15996 - DNA, 223 bp, Zea mays
cccagatcttcagcgagggcgggctggactacctcggcaaccccagcctgatccacgcgcagagcatcctcgccatctgggcctgccaggtcgtgctcatgggtgccgtcgagggctaccgcattgccggcggccgctcggcgaggtcgtcgacccgctgtaccctggcggcagttcgaccccctcggcctggccgacgaccccgaggccttcgccgagctca

SEQ ID NO: 15997 - DNA, 309 bp, Zea mays
caccaaacccgcgttcatcgacggacgagctcgccggcgagagagcgactgagatggaggcggcggcacggcggccggcgtggagctgggctcttcgaagccccagatcgcgacgcaggcggagatggcggaggcccgggtgccgctcgccaacgcgaccagtgcgcgcacctcctcatcccgctcaacaagtgccgcgtcgccgagttctacctcccctggaagtgcagcccgagcgccacgcctacgagaagtgccagtacgagctcgtcatggagcggatgctccagatgcagaagatccgcgagg

SEQ ID NO: 15998 - DNA, 135 bp, Zea mays
catcccggaggtgctgaccaaagccgggctgatcaacgcgccgcagtggtacgacgccggcaagtcggagtacttcgcgtcgtcgtccacgctgttcgtggtcgagttcatcctgttccactacgtggagatccg

SEQ ID NO: 15999 - DNA, 88 bp, Zea mays
catcccggaggtgctgaccaaatccgggctgatcaacgcgccgcagtggtacgacgccggcaagtcggagtacttcgcgtcgtcgtcc

SEQ ID NO: 16000 - DNA, 204 bp, Zea mays
ctctccttttgctcggaacgcacacaccgcccgtccccgatctccgatcccctcgtcgatccaaagatgcagatcttcgtcaagaccctcactggaaagactatcaccctcgaggtggagtcttctgacaccattgacaacgtcaaggccaagatccaggacaaggagggcatccccccggaccagcagcggctcatctttgct

SEQ ID NO: 16001 - DNA, 300 bp, Zea mays
cataaaaccagtgcaagcagaagcagcgcaatggcgagcagcaccatggccctctcctccacagccttcgccggcaaggcagtgaacgtgccgtcgtctctcttcggcgaggcccgcgtgacgatgcgcaagatggcggcgaaggcaaagccggcggcgagctccggcagcccgtggtacggccccgaccgcgtgctctacctgggcccgctgtccggcgcgctcccgagctacctgacgggcgagttcccgggcgactacggctgggacaccgcggggctgtcggcggacccggatacg

SEQ ID NO: 16002 - DNA, 297 bp, Zea mays
gtggatgatggtagtccagatggaactcaggacattgtaaaacagctgcagcaagtatatggtgaagattttgttttactgcgagctaggccaaggaagctagggcttggtaccgcatatttacatggactaaagcatgcctcaggggaatttgtcattatcatggacgcggacctatctcaccatccaaaatacttgccaagctttattaggaagcaaaaggaaactggagctgacattgtaactggcacacgttatgttaagaatggtggtgtccaggttggaatctcatgcgca

SEQ ID NO: 16003 - DNA, 292 bp, Zea mays
cccacgcgtccgcttaaggctgtcagcaacgtaaacaacattattggaccagcgattgttggaaaggaccccactgagcaggttgagattgacaacttcatggtccaacagcttgatggaacctccaatgagtggggctggtgcaaacagaagcttggagcaaatgccatccttgcggtttcacttgctgtgtgcaaagctggagctatggtgaagaagattcctctttaccagcacatcgcaaatcttgctgggaacaaaactcttgtgctccctgtacctgcctttaatg

SEQ ID NO: 16004 - DNA, 304 bp, Zea mays
catctaccagcgactcagcgagcgagagcagcacacactgcacgcagctagctaggagcagcagcagcggcggcgatggcggcctccatgatctcctcgtcagctctggcggtggcgcctcagggcctgccgcccctcggccgccgcgcctcctccttcgccgtcgtctgctccaagaagaagatcaagaccgacaagccctacgggattgggggtggcctgaccgtcgacgtcgacgccaacgggagaaagggcaagggcaagggcgtgtaccagttcgtcgacaagtacggcgcgaacgtcg

SEQ ID NO: 16005 - DNA, 300 bp, Zea mays
cagaggtccttcaccgtgcgtgcctctctccgcaaggccactgccaccgccgccgtggccgttgccgccagcgtcctgcttgccggcggcggcgccatggcccaggaggtgctgctgggcgcaggcgacggcgggctcgtcttcgagcccagccagttcaccgtcaaggccggcgacaccatcaccttcaagaacaacgccggcttcccgcacaacgtcgtgttcgacgaagacgaggtgccgagcggcgtcgacgcctccaagatctcgcaggaggagtacctcaacgcgccaggcgag

SEQ ID NO: 16006 - DNA, 293 bp, Zea mays
gtggcgatctgggaactttcatggcctgggtggatgatgttagaaagctcaaggtcctggctaacgccgatacccctgatgatgcattgactgcgcgaaacaatggggcacaaggaattggattatgccggacagagcacatgttctttgcttcagacgagaggattaaggctgtcaggcagatgattatggctcccacgcttgagctgaggcagcaggcgctcgaccgtctcttgccgtatcagaggtctgacttcgaaggcattttccgtgctatggatggactcccggtg

SEQ ID NO: 16007 - DNA, 296 bp, Zea mays
cccacgcgtccggcacatctgtttagccaagctgtggccaacctctgcgaggaatggagatggagtcgactcctctcttgacaccatacaagatgggcgatttcaacctggcacacagggttgtgctggcgccgctgacgaggtgccgggcgttcgggaacgtgccgcagccggagcacatggctctctactaccgccagcgggcgacgcccggcggcttcctcatcgccgaggcctgcgccgtgtcggagagcgcgcgcgggtacccggacgttccggggctgtggacccaccaa

SEQ ID NO: 16008 - DNA, 291 bp, Zea mays
caccaaggagagtacgtggaggagcagccatggcttcatcggtggccgccgcggcgagcacattcctgggcacccgcctggcggacccggcgccacagaacgggcgcatcgtggcccggttcgggttcgggttgggcggcaaggcgaacctgctccgaagaaggtggcgaagacatcgacctcctctgaccggccgctgtggttccccggcgccgtggcgccgactacctggacggctcgctggtcggcgactacgggttcgacccgttcggtctcgggaagcccgtggag

SEQ ID NO: 16009 - DNA, 296 bp, Zea mays
atgaggatggcgactttgctgagctatatgtgttcaagtggaccagtttgctcattcctccgaccactgttcttgtcattaacctggtcggaatggtggctggaatttcttatgccattaacagtggctaccaatcctggggtccgctctttggaaagctgttcttctcgatctgggtgatcctccatctctaccccttcctcaagggtctcatgggaaggcagaaccgcacaccaacaatcgtcattgtctggtccatccttcttgcatctatcttctccttgctgtgggtgaag

SEQ ID NO: 16010 - DNA, 290 bp, Zea mays
cggacgcgtgggggcaaaccaaggagcttctcagcctaggccagagcaagaaagcatcctgctgcaggcacagcagcaggtgcaaatgcagaaagccgtataccaagtcggaggtgccctgccgacaaaagttgtctgcctgacacaggtagtgacagcagatgaactgagagatgatgaggaatacaatgacattgtggaggacatgagggaagaaggacgcaaatatggtaaaccgcacgaggcccatcgagttctcttataccttctttgttttaaaagctcttaca

SEQ ID NO: 16011 - DNA, 289 bp, Zea mays
cccggagctgctcgcccgcaacggcgtcaagttcggcgaggcggtgtggttcaaggcgggctcccagatcttcagcgagggcgggctggactacctcggcaacccgagcctggtccacgcgcagagcatcctggccatctgggcgtgccaggtggtgctcatgggcgccgtcgaggggtaccgcgtcgccggcggcccgctcggagaggtggtcgacccgctgtaccctggcggcagcttcgacccgctcgggctcgccgacgacccggaggcgttcgccgagctcaag

SEQ ID NO: 16012 - DNA, 289 bp, Zea mays
acctcgtcttcaccgcgcatcccacgcagtccgcccgccgctcgctcctgcagaaaaacgcgaggatccggaattgtctgacccagctgaatgccaaggacatcactgacgacgacaagcaggagctcgatgaggctctgcagagagagatccaagcagccttcagaactgatgaaatcaggagggcacaacccaccccacaggacgaaatgcgctatgggatgagctacatccatgagactgtatggaagggcgtgcctaagttcttgcgccgtgtggatacagccct

SEQ ID NO: 16013 - DNA, 290 bp, Zea mays
agttaacccaaaaataagcgcattccagaaagcacaggattgtcttctgcccatgggaattacttctgaaaatgttgcccatcgatatggtgtaacaggcaagagcaagatcaggccgccgctgagtctcataggagagctgctgcagccacggcctctggaaaattcaaggatgagatcgtcccggtcccaacaaagatcgttgatcctaaaactggagaggagaaggaagttgtgatatcagttgatgatgggattaggccagggaccacagcatctggattggcgaa

SEQ ID NO: 16014 - DNA, 290 bp, Zea mays
cccacgcgtccgcacactcgggtaaagctatctcgagctagctagctgctgtaaccgttgccatggccaaaatggtattgctctgcgtgctcgtctccttcctcctgatgcccttggcctccctagccctgacgcaggacttctgcgtcgccgacctgacctgcagcgacacgccggctgggtaaccgtgcaagtccagcgtcaccgccaacgacttctacttccacggcctggccggccagggcaaaataaacccactcatcaaggccgccgtcaacccggccttcgtg

SEQ ID NO: 16015 - DNA, 291 bp, Zea mays
ggcccaaagacaagatcaaagatgagaactgctggtcagataaagagttctgcaggaacgaagagaactggtattctgtcgccaagatctcgtcagaagaggccgcacttgaatacgcgaagagaccgggctggatgttgtgacggtcaatccagctgtggtctttggccctcttctgcagccgacgctcaacacgagctgccagttcctcgtctacttcctgaaaggaggacctgatcgaatgagggacaagctttggcacatcgtcgacgtcagggacactgccgatgc

SEQ ID NO: 16016 - DNA, 291 bp, Zea mays
tgtcgtccgaggcggtgaaggtggcggtgccggagtcggtactccgcaagcggaacgcgaggagcagtgggccgccgagaagaaggagaagtccctggccgagaggaagaagtccatcgagagccggaagctcatcttcacccgcgccaagcagtacgccgaggagtacgatgcccaggagaaggaactggtacagcttaagcgtgaggcccgtttgaagggtggtttctatgtcagccctgaggcaaagctgctatttgtggtccgcatccgtggtatcaatgccatgca

SEQ ID NO: 16017 - DNA, 290 bp, Zea mays
tctacattggactccggcaaaaacgtgcgactggcgaggagtatgatgagcttattgaagagttcatgtctgctgttaagcaattctatggtgagaaagtcctcattcagtttgaggactttgccaatcacaatgcctttgatttgcttgaaaaatatagcaagagccatcttgttttcaatgatgatatccagggcacagcatcagtggtccttgcaggtttgttagcagcactcaagatggttggtgggaccctggcagagcagacgtatttgttccttggtgctggg

SEQ ID NO: 16018 - DNA, 282 bp, Zea mays
gaaaatggttggcttttggacgggtaccaagaagctattcacaggccatggccttggaaactcttgaaatccggcctgatactttcattctgttagatgttccagatgaactccttgttgaaagggtggttggaaggcggcttgatcctgtaacagggaaaatatatcatttgaagtattctccgccagagaatgaagaaatcgcttcaaggcttacacaaagatttgacgatacagaagaaaaggttaagttgaggctggagacttattaccaaaatatcg

SEQ ID NO: 16019 - DNA, 268 bp, Zea mays
gatgcatcggttgctgatgtgaagaggatcattgagaccactcaaggtcagagtacctaccgggcggaccagcaaatgctcatataccaagggaaaattctcaaggatgaaaccactttggaaagcaacggagttgctgagaacagcttccttgttataatgttgtccaaggctaaggcatcatcgagtggagcttctaccgctactactgcaaaagctcctgcaactctggcccaacctgctgcccctgtggcccctgctgcatcag

SEQ ID NO: 16020 - DNA, 285 bp, Zea mays
ctccgatcgtcgtcgacgacgcatccaccccaacccttctccgcgaaataaccgtcgccgcagctccggctatgtcaatcttcgagtacaacgggtccgccgtggtggcgatggtggggaagaactgcttcgcgattgccagcgaccggcggctcggcgtgcagcttcagaccatcgcaacagacttccagcgggtgttcaagatccacgacaagctctacatcggcctctcagggctcgccaccgacgcccagacgctgtaccagcggttggtcttcaggcaca

SEQ ID NO: 16021 - DNA, 285 bp, Zea mays
gctgcctcaagtgcgcgctccacgcgtcccggaccttcgccgtcgagtccgtctacggccgcgcccgcgccgtcgcgcagtgggccgacgacgaggacaggatcgtcgacgccatcaacacctgccccgtcgactgcatctcgatggtggagaggtcggacctggcggctctcgagttcttgatgtccaagcaaccgcgcggcagagtccgcgtctccgaaggcaacgcggtgggagctcgcgcgcccaacatcttcaacgaagtcgccaagttcaagaaaaggt

SEQ ID NO: 16022 - DNA, 287 bp, Zea mays
actaatccagcccatttcgaactctctctagacgcttcctcggtctctctgttcaccgccgccccgtaccatactcctcttcgcgccgtagaaatggcgctgccgaatcagcagggcgtggattaccccagcttcaagctcgtcatcgttggcgacggtggaactggtaaaaccacatttgtgaaaaggcatcttactggcgagtttgagaagaaatatgagcccaccattggtgttgaagttcaccctctggattttagcactaactgtggcaaaattcgctttta

SEQ ID NO: 16023 - DNA, 284 bp, Zea mays
ctgtctgcaaactttgcgaacgttggtgatcaggtaaaagctgtggaggtggcaggatgcgactggattcatgtcgatgtcatggacgggcgctttgtgccaaacatcacaattggacccttggttgttgatgctctgcgtccagtgactgatcttccgttggatgtacatctgatgattgtggaacctgagcagcgagtccccgattttatcaaggcaggtgctgatattgttagtgtccactgtgaacagacatcgaccatccatttgcaccgaacagtcaa

SEQ ID NO: 16024 - DNA, 284 bp, Zea mays
tgctgttaagcaattctatggtgagaaagtcctcattcagtttgaggactttgccaatcataatgcctttgatttgcttgaaaaatatagcaagagccatcttgttttcaatgatgatatccagggcacagcatcagtggtccttgcaggtttgttagcagcactcaagatggttggtgggaccctggcagagcagacttatttgttccttggtgctggggaggctggaactggtattgcagaacttattgctcttgagatttcgaaacagacgaatgctccaa

SEQ ID NO: 16025 - DNA, 315 bp, Zea mays
cccacgcgtccgccaccatcgaccttcaagtctcgctacgtagcagtgcaataaaaaaagcagccgcaatggcgagcagcaccatggccctctcctccacggccttcgccggcaaggccgtgaacgtgccgtcgtcgtccgccttcggcgaggcccgcgtgacgatgcgcaagacggcggcgaaggccaagccagctgcggcgtccgggagcccgtggtacggccccgaccgcgtgctgtacctgggcccactgtccggcgagccaccgagctacctgacgggcgagttcccgggcgactacggctgggacaccg

SEQ ID NO: 16026 - DNA, 307 bp, Zea mays
cccacgcgtccgcaacaatggccaccgtcctgggcagcccccgcgcgccggccttcttcttttcgtcgtcctccctccgcgccgcgccggcgcctaccgccgtggcgctgcctgcggccaaggtgggcatcatgggccgtagcgccagccgcaggcgcaggctgcgcgcgcaggccacctacaacgtgaagctgatcacgccggatggggaggtggagctgcaggtgcccgacgacgtgtacatcctggaccaggccgaggaggacggcatcgacctgccctactcctgccgcgcggggtcctgctc

SEQ ID NO: 16027 - DNA, 307 bp, Zea mays
tggccatggcgtcgtccatgctctccgctaccaccgtgccactccagcaggggggcggcctgtccgagttctccgggctcaggagctccgcgtcgctgcccatgcgccggaatgccacctccgacgacttcatgtccgccgtctccttcaggacccacgcggtcggcacgagctgcgggtcgcggcgggcgccgacggaggcgaagctgaaggtggccatcaacgggttcggccgcatcgggcgcaacttcctgcggtgctggcacgggcgcggcgacgcctcgcccctcgacgtcatcgccatcaa

SEQ ID NO: 16028 - DNA, 307 bp, Zea mays
ggaagcggctggcgtccatcgggctggagaacacggaggccaaccggcaggcgtaccgcacgctgctggtcacggcgccgggcctgggccagtacatctccggcgccatccttttcgaggagacgctgtaccagtccgccgtcgacggccgcaagatcgtggacatcctggtggagcagggcatcgtgccggggatcaaggtggacaagggccttgtcccgctcgccggctccaacaacgagtcgtggtgccagggcctggacggcctagcgtcccgcgaggccgcctactaccagcagggcgcgcg

SEQ ID NO: 16029 - DNA, 319 bp, Zea mays
gtgacatgagacagacggttgctgttggagttatcaagagtgtggagaagaaggacccgaccggcgccaaggtgaccaaggcggctgccaagaagaaatgatgcgatcctgcgcctgctttagcaatacctagttttcatcatcacaagttttgtttgtgatcgttgctgttatcgtgtgaactgttgagatctgttagcatgtgcacttttatctatttatttggtaccatcttgctatttcaccttttgcaatacaagaatgctctaagacctatatgttaaccttttggcattgttaaattgattttaggaagtcg

SEQ ID NO: 16030 - DNA, 311 bp, Zea mays
cccacgcgtccgcctcgttcccctctcgccgctcgcctccccgccgagatcgaggaggcgccaatagcgagagggtttcctcttccctccacggctccaactgagaccccggcccctccgcctcaaatcccacgcgcccggttggccgccgcccccgccatggatgtggatctgtggatctccaaggtcaaggcacggccagcacctcgccgagcacgagcttcagtctctctgcgaatacgtaaaggagatcctcatcgaagagtcgaacgttcaaccggtgaatagccctgtgacggtttgcggtgaca

SEQ ID NO: 16031 - DNA, 311 bp, Zea mays
cgaccccctcaacctggccgacgaccccgaggccttcgccgagctcaaggtgaaggagctcaagaacggccgcctcgccatgttttccatgttcggcttcttcgtccaggccatcgtcaccggcaagggcccgctcgagaacctcgctgaccacatcgctgacccagtcaacaacaacgcatgggcctacgccaccaacttcgtccccggcaactaagctcaacggctatgctatgcaacttcattgtctttcggatcggagagggtgtacgtacgtggattgattgatgctgcgagatgcatgtgtgtct

SEQ ID NO: 16032 - DNA, 305 bp, Zea mays
cccacgcgtccgaccacgcgtccgcggacgcgtgggtttgtgtccttgatccatctagtagtgggtgtcgtatactgcctcatcagctggagtgtcggtctccccaagcgagcgcctatcaatggaacgctcctcaagcttctctttccagtcgccctgtgccatggtattggtcacatcactagcaatgtgtccttcgctgctgttgcagtctcatttgctcacactatcaaagctctggagcccttcttcagcgcacggctactcagtttatccttggacagcaagttcccttctctctgtgg

SEQ ID NO: 16033 - DNA, 294 bp, Zea mays
aaaaccagtgcaagcagaagcagcgcaatggcgagcagcaccatggccctttcctccacagccttcgccggcaaggcagtgaacgtgccgtcgtctctcttcggcgaggcccgcgtgacgatgcgcaagacggcggcgaaggcaaagccggcggcgagctccggcagcccgtggtacggccccgaccgcgtgctctacctgggcccgctgtccggcgcgcccccgagctacctgacgggcgagttcccgggcgtctacggctgggataccgcggggctgtcggcggacccgaaa

SEQ ID NO: 16034 - DNA, 300 bp, Zea mays
ccgcgctctcctctacgacgcttcagtcatggcaggaatggcacccgagggttctcagtttgatgctaagcactatgattctaaaatgcaggagctgctgagcactggtgagactgaggagttcttcacttcatatgatgaagtttttgaaagttttgatgacatgggccttcaagagaatcttttgagaggcatttatgcatatggttttgagaaaccatctgcaattcagcagagaggaattgttcccttctgcaaggggcttgatgtcattcagcaagcacaatctggtacaggaaa

SEQ ID NO: 16035 - DNA, 299 bp, Zea mays
tgcgatctgatcgacatggctgccgccaccatggctatcacctcccgcgcgctcatcggcaagccggcggctggcacgagggacgtcttcggcgagggccgcatcaccatgcgcaagaccgccgccaagcccaagccggcggcgtccggcagcccctggtacggtgccgaccgcgtcctgtacctgggcccgctgtccggctcgcccccgagctacctgaccggcgagttccccggcgactacgggtgggacaccgcggggctgtcggcggacccggagaccttcgccaagaaccgcga

SEQ ID NO: 16036 - DNA, 301 bp, Zea mays
ctgctcttcctcctcctcctcctcccgctcctcgccgccggacaccagcacccgtcctcctacggctcctccgcgctttccgagtggcgccccgccaaggcatcctactacgccgccgaccccgaagacgccatcggtggggcgtgcgggttcggggatctgggaaagcacgggtacgggatggcgacggtggggctgagcacggcgctgttcgagcgcggcgcggcgtgcggcggctgctacgaggtcaagtgcgtcgaggatctcaagtactgcctccccggcacctccatagtcgtca

SEQ ID NO: 16037 - DNA, 303 bp, Zea mays
cggaccgtgggctgctgggcaacaacttccccgtcttcttcatccgcgacggcatcaagttccccgacgtgatccacgcgttcaagcccaacccgcggtcgcccgtgcaggagtactggcgcgtgttcgacttcctgtcgcacctccccgagagcctgcacaccttcttcttcctcttcgacgacgtgggcgtgccgtccgactaccgccacatggaagggttcggcgtgaacacgtacacgttcgtgagcgcggcggggaaggcgcagtacgtcaagttccactggaagccgacgtgcggcg

SEQ ID NO: 16038 - DNA, 304 bp, Zea mays
gtcgcgaggcaaggccatcgtccgccatgacgctctccctctccacctctttcctccccatccccgccgccgcgaggaccaccgcccgcaccctacgctccgtcgtcccctcccaggggatgcgctgctcgatgcgcaagaaggggttgcacccggagatctacgaggacgcgaaggtgtactgcaacggcgagctggtgctggtgacggggggcaccaagccggagtacacggtggacgtgtggtccggaaaccacccctactatgtcggcgacacctcggcgctcgtggtcatggacagcca

SEQ ID NO: 16039 - DNA, 292 bp, Zea mays
gttcctctccggcgggcagtcggaggtggaggcgacgcagaacctcaacgccatgaaccaggggcccaacccgtggcacgtgtccttctcctacgcgcgggcgctgcagaacacctgcctcaagacctggggcggccagccggacaaggtcaaggcggcgcaggacgcgctgctgctgcgcgccaaggccaactccctggcgcactcggcaagtacacctccgacggcgaggccgccgaggccaaggagggaatgttcgtcaagaactacagctactaattaatcgcccggc

SEQ ID NO: 16040 - DNA, 214 bp, Zea mays
ctttgtgcccggcaagtaagggggtggaggcgccaccgcccaccggccaccgctgcggatatctaggtgttcggatgcacgtgagcgcgcactggttccagtttgtaccatgatgtaaattacttaccgtaccagggttcaatcggcaaggaagaattgttgtgttcactgtcttgggcagtctcttggtccaatatgaatcaacttacacagc

SEQ ID NO: 16041 - DNA, 294 bp, Zea mays
cccacgcgtccgtgaaagtctagttagctttgttcaccaggagatggatgcatatcggctttacacggttgtgccgtatttggtaaaatacattgactatcttactaacatatatgtgcgtttgaaccgcaaacggttcaaagggcgtactggagaagaagactgcagaatttctctttcaacactctaccatgttcttgtaacaacttgcgtggtgatggctccatttacaccattctttactgaagttctttatcaaaatttgcggaaggtatcaagtaattctgaggagag

SEQ ID NO: 16042 - DNA, 296 bp, Zea mays
ctaccgccacatggaagggttcggcgtgaacacgtacacgttcgtgagcgcggcggggaaggcgcagtacgtcaaattccactggaagccgacgtgcggcgtgcggtgcatcctgacggacgaggaggcggcgctggtcgggggacggaaccacagccacgcgacgcaggacctgtacgactccatcgcggcggggagcttcccggagtggacgctgtacgtgcaggtgatggacccggacacggaggagcagtacgacttcgacccgctggacgacaccaagatgtggccggagg

SEQ ID NO: 16043 - DNA, 296 bp, Zea mays
aggaaatgacaattatccactttcaacagcaggtgcaaataatttgtttttgggtattgagcaaggagctggaagcaacaatggccaggctgctttttcgaaatttgactatgggagctcaatgtcattaccatctgggcagggaatgtctggtcttatcgtaaaaggggcaaaatggcgcgacggggactggttgtgcaacaactgcaacaaccacaactacgcatctcgtgcgttttgcaacaggtgcaaaactcagaaagaatctgcagttcaccctggtgtgctatagcttg

SEQ ID NO: 16044 - DNA, 295 bp, Zea mays
cacactcgggtaaagctatctcgagctagctagctgctgtaagccgttgccatggccaaaatggtgttgctctgcgtgctcgtctccttcctcctgatgcccttggcctccctagccctgacgcaggacttctgcgtcgccgacctgacctgcagcgacacgccggcggggtacccgtgcaagtccagcgtcaccgccaacgacttctacttccacggcctggccggccagggcaaaataaacccactcatcaaggccgccgtgaccccggccttcgtgggccagttcccgggcg

SEQ ID NO: 16045 - DNA, 295 bp, Zea mays
gccaccatcgaccttcaagtctcgctacgtagcagtgcaataaaaaaagcagccgcaatggcgagcagcaccatggccctctcctccacggccttcgccggcaaggccgtgaacgtgccgtcgtcgtccgccttcggcgaggcccgcgtgacgatgcgcaagacggcggcgaaggccaagccagcggcggcgtccgggagcccgtggtacggccccgaccgcgtgctgtacctgggcccactgtccggcgagccaccgagctacctgacgggcgagttcccgggcgactacggct

SEQ ID NO: 16046 - DNA, 291 bp, Zea mays
cacgcatactgcatacacaacacagagcatcagaaggagctgcgatctgatcgacatggctgccgccaccatggctatcacctcccgcgcgctcatcggcaagccggcggctggcacgagggacgtcttcggcgagggccgcatcaccatgcgcaagaccgccgccaagcccaagccggcggcgtccggcagcccctggtacggtgccgaccgcgtcctgtacctgggcccgctgtccggctcgcccccgagctacctgaccggcgagttccccggcgactacgggtggga

SEQ ID NO: 16047 - DNA, 222 bp, Zea mays
gaccgacgagcgacgaacgcgcacaaagagaagaacctcggagctgagatggcacaagccatggcgtcgatgacaggcctctcgcagggcgtcctgcccagcaggcgcgccgacagcagaaccaggacggccgtcgtcgtcgtcagggcgtccgcagagggcgacgccgttgcgcaggcgggccgccgcgccgtgatcgggcttgtggcgactggcatcgtc

SEQ ID NO: 16048 - DNA, 307 bp, Zea mays
cccacgcgtccgagctggtacacatactagccagcctgccagccagcttgccatggcgcccaccgtgatgatggcctcgtcggcaaccgccgtcgccccgttccagggtctcaagtccgccgccagcctccccgtcgcccgccgcagcaccaggagcctcggcaacgtcagcaacggcggaaggatccggtgcatgcaggtgtggccggcctacggcaacaagaagttcgagacgctgtcgtacctgccgccggtgtcgacggacgacctgctgaagcaggtggactacctgctgcgcaacggctgg

SEQ ID NO: 16049 - DNA, 306 bp, Zea mays
cacctgtgcttccagactctgcagcgcttcacggccgccacgctggagcacggcatgcacccgccggtctctcccaagcccgagtggcgcaagtcatggacgagatggcggtcgtggccacggaggagtaccgctcggtcgtcgtcaaggagccgcgcttcgtcgagtacttcagatcggctacaccggagaccgagtacgggaggatgaacatcggcagccggccagccaagaggaggcccggcggcggcatcacgaccctgcgcgcaatcccctggatcttctcgtggactcagaccaggttcc

SEQ ID NO: 16050 - DNA, 302 bp, Zea mays
ggacgctggcggacgcgtggggctgtggttcgcgtccaagcagtccctctcctacctcgatggcacgcactcggcgacagctggcttcgacccgctgggcctctcggacccggaggtcaccgggggcttcatcgagcccaagtggctggcctacggcgaggtgatcaacggccgctacgccatgctgggcgcggtgggcgcatcgccccggagatcttcggcaagatgggcatcatcccgccggagaccgcgctgccgtggttcaagacgggcgtcatcccgcccgcgggcacctacaacta

SEQ ID NO: 16051 - DNA, 306 bp, Zea mays
cccacgcgtccgcccacgcgtccgcccacgcgtccggaagaagacgagtgtcaagtgaacctgaaacgtgcggtgtcactggctggtagcctgagtgtgagtgagtgatcgagctagctgagctccgatcctcgctagctaggataccgccataccacaagtcttcttcacaagtttaggagtgacagcaacaagagatcgatggcctctgccaccgtgctcaagtcgtccttccttcccaagaagtccgaatggggcgccaccaggcaggccgccgcgcccaggccgcccaccgtctccatggtc

SEQ ID NO: 16052 - DNA, 306 bp, Zea mays
gaaaatgggagtggcaggtcacaacgatccattgttaggtgaaacgacatgtgggtctttgctgcagcaacttcagctgatatgggatgaggttggcgaaagtgatgaagatcgtgacaagatgttacttcagctagagcaagagtgcttagatgtttataggagaaaggttgatcaggcttctagctccaggtcatgtctcctccaacagctttccaactccaaatcggaactgactagactcctttctgcattaggagagtcatctatttctggtgctcctgacaagacatctggtacaatcaa

SEQ ID NO: 16053 - DNA, 279 bp, Zea mays
agccgcccgacccaatccgtgcgtgtgttggtcgagatgggtacaacagcttgcgctcccatggcgagccaggtggtgaagagcagcacggtgcagtcgaggccgaggggcgtgtcaggcgctgcgctcacgcggccccggccccggttcagcgtcgtcaaggccgccatgcagcccgagaaggcaacgtaccaggtggtgcagcccatcaacggcgacccgttcatcggcagcctggagacgcccgtcacgtgcagcccggtcatcgcgtggtgcgtg

SEQ ID NO: 16054 - DNA, 302 bp, Zea mays
ggacgtggcgtgacgcgtggggctgtggttcgcgtccaagcagtccctctcctacctcgatggcacgctagctggcgactatggcttcgacccgctgggcctctcggacccggaggcaccgagggcttcatcgagcccaagtggctggcctacggcgaggtgatcaacggccgctacgccatgctgggcgcggtgggcgccatcgccccggagatcttcggcaagatgggcatcatcccgccggagaccgcgctgccgtggttcaagacgggcgtcatcccgcccgcgggcacctacaacta

SEQ ID NO: 16055 - DNA, 307 bp, Zea mays
atcaaactgagcacctctcatacttcaaatttgttggacgagtggttggcaaagctctcttcgatggtcagcttttagatgcccacttcactagatctttctacaaacacatacttggtgtcaaggttacataccatgacattgaagccatcgatccttcgtactacaaaaacttgaaatggatgcttgagaatgacataagtgatgttttggatctcacctttagcatggatgcagacgaagagaaactgatattgtacgagaaggcagaggtcactgattgtgagttgattcctggagggcgtaa

SEQ ID NO: 16056 - DNA, 307 bp, Zea mays
gggatactgatgtcggcgagttcattgtaccgattccacatgtcaatcaagtgaagctcccaaatactggtggaagactaataattgcatcagatggaatatgggacgctctgtcctcagagagtgctgctcaggcgtgccggggattacgtgcagaactggctgcaaaacttgttgttaagcaagctctgaagacaagtgggctgaaagatgacaccacatgtgtggttgtcgacatcatcccatctgatcattgttcaacaccaccagcattgtctccaaagaaaaatcagaacaagttgaagca

SEQ ID NO: 16057 - DNA, 306 bp, Zea mays
aggagagtacgtggaggagcagccatggcttcatcggtggccgccgcggcgagcacattcctgggcacccgcctggcggacccggcgccacagaacgggcgcatcgtggcccggttcgggttcgggttgggcggcaaggcgaactgcgtccgaagaaggtggcgaagacatcgacctcctctgaccggccgctgtggttccccggcgccgtggcgccgtactacctggacggctcgctggtcggcgactacgggttcgacccgttcggtctcgggaagcccgtggagtacctgcagttcgagttgg

SEQ ID NO: 16058 - DNA, 307 bp, Zea mays
agcaaccggtccagcactttcacgctcagctccagcaatggctgcctccaccatggcgatctcctccacggcgatggccggcacccccatcaaggtgggctccttcggcgagggccgcatcaccatgcgcaagaccgtgggcaagcccaaggtggcggcgtccggcagcccctggtacggccccgaccgcgtcaagtacctcggccccttctccggcgagcccccgagctacctcaccggcgagttccccggcgactacggctgggacaccgccgggctgtccgccgaccccgagaccttcgccaag

SEQ ID NO: 16059 - DNA, 305 bp, Zea mays
cctcaaaagctccgatggcgaggagttcgaggtggaagaggcggtggcgatggagtcgcagaccatccgccacatgatcgaggatgactgcgccgacaacggtatccctcttcctaacgtcaactccaagatcctatccaaggtaatcgagtactgcaacaagcacgtacatgccgccgccgccgccgccgccgcctcgaaggccggttccgacgacgtgggtgccgcctccgccaacagcaccgccgcctccggtgaggacctcaagaactgggatgcggacttcgtcaaggtcgaccaggcca

SEQ ID NO: 16060 - DNA, 302 bp, Zea mays
gcagatggcgtcgacgatcatggccgccacctcccgcatcgtcgcggccaagacgccgtttcttggccagggtcgcgccgccgccgccgccgccaatgccagccccctccgcgacgtcgccgccgccgctgctggcgccggatcaccatgggcaacgacctgtggtacggcccggaccgcgtcaagtacctgggccccttgtccgcccagacgccgtcgtacctgaccggcgagttccccggcgactacggctgggacaccgccgggctgtccgcggacccggatgcgttcgcgcggaacag

SEQ ID NO: 16061 - DNA, 302 bp, Zea mays
ggccatcgtccgccatgacgctctccctctccacctctttcctccccatccccgccgccgcgaggaccaccgcccgcaccctacgctccgtcgtcccctcccaggggatgcgctgctcgatgcgcaagaaggggttgcacccggagatctacgaggacgcgaaggtgtactgcaacggcgagctggtgctggtgacggggggcaccaagccggagtacacggtggacgtgtggtccggaaaccacccctactacgtcggcgacacctcggcgctcgtggtcatggacagccagatcgagaag

SEQ ID NO: 16062 - DNA, 301 bp, Zea mays
agcgcgccgtcgacgacatcggcgacctcctcggcaagacgctgctgctcgagctcgtcagctccgagctcgacgcaaagtcgggcgtggagaagacgcgggtgacggcgtacgcgcacaagacgctgcgggagggccactacgaggcggagttcaaggtgccggcgtcgttcgcgccggtgggcgcggtgctggtggagaacgagcaccacaaggaggtcttcatcaaggagatcaagctcgtcaccggcggcgacacagcaccgccgtcaccttcgactgcaactcctgggtgcactcc

SEQ ID NO: 16063 - DNA, 303 bp, Zea mays
gcgaccgtggcgcgacgcgtgggcgagacgcgtgggcgagacgcgatgggcgacacgcgtcgactcccgccgccggagtgcgggtgagctgctcgcctagtgcgtgcgggcggacctccagcatggccccgaagaaggagaaggccccgccgccatcgtccaagccggccaagtccggaggcgggaagcagaagaagaagaagtggagcaagggtaagcagaaggagaaggtcaacaacgctgtgctcttcgaccaggccacctacgataagctgctctccgaggtgcccaagtacaagcagg

SEQ ID NO: 16064 - DNA, 300 bp, Zea mays
gccaccatcgaccttcaagtctcgctacgtagcagtgcagtgaaaaaagcagccgcaatggcgagcagcaccatggccctctgctccacggccttcgccggcaaggccgtgaacgtgccgtcgtcgtccgccttcgggaggcccgcgtgacgatgcgcaagacggcggcgaaggccaagccagcagcggcgtccgggagcccgtggtacggccccgaccgcgtgctgtacctgggcccagtgtccggcgagccaccgagctacctgacgggcgagttcccgggcgagtacggctgggaca

SEQ ID NO: 16065 - DNA, 297 bp, Zea mays
aagacatcgacctcctctgaccggccgctgtggttccccggcgccgtggcgccgactacctggacggctcgctggtcggcgactacgggttcgacccgttcggtctcgggaagcccgtggagtacctgcagttcgagttggactcgctggaccagaacctggccaagaatgaggccggcggcatcatcggcacccggttcgagtcctccgaagtcaagtccaccccgttgcagccctacagcgaggtgttcggcctccagcggttccgcgagtgcgagctcatccacggccgctggg

SEQ ID NO: 16066 - DNA, 298 bp, Zea mays
  unsure (1)..(298): unsure at all n locations
cccacgcgtccggcgtcgtccatgctctccgctaccaccgtgccactccagcaggggggcggcctgtccgagttctccgggctcaggagctccgcgtcgctgcccatgcgccggaatgccacctccgacgacttcatgtccgccgtctccttcaggacccacgcggtcggcacgagcggcgggtcgcggcgggcgccgacggaggcgaactgnaaggtggccatcaacgggttcggccgcatcgggcgcaacttcctgcggtgctggcacgggcgcggcgacgcctcgccctcgacgt

SEQ ID NO: 16067 - DNA, 295 bp, Zea mays
accagaagaagctcgatgtcgtctccaacgaggtgttctccaactgcctcaagtcgagcgggcgcaccggcgtgatcgcctcggaggaggaggacgtgcccgtagcggtggagcagagctactccggcaactacatcgtcgtgttcgaccctctcgacggctcctccaacatcgacgccgccgtctccactggctccatcttcggcatctacaaccccaacgacgagtgcctcgccgacgtcgacgacaatgacacccttgattcggtggagcagaggtgcatcgtgaacgtgtg

SEQ ID NO: 16068 - DNA, 297 bp, Zea mays
gcaatgaccaaccagggtgttcaagtgttcccagagataatggttcctcttgttggaacaccacaggaactggggcatcaagtgactcttatccgccaagttgctgagaaagtgttcgccaatgtgggcaagactatcgggtacaaagttggaacaatgattgagatccccagggcagctctggtggctgatgagatagcggacagagctgaattcttctccttcggaacgaacgacctgacgcagatgacctttgggtacagcagggatgatgtggggaagttcattcccgtctat

SEQ ID NO: 16069 - DNA, 318 bp, Zea mays
agaagaagacgagtgtcaagtgaacctgaaacttgcggtgtcactggctggtatagcctgagtgtgagtgagtgatcgagctagctgagctccgatcctcgctagctagctaggataccgccataccacaagtcttcttcacaagtttaggagtgacagcaacaagagatctcgatggcctctgccaccgtgctcaagtcctccttccttcccaagaagtccgaatggggcgccaccaggcaggccgccgcgcccagggcgcccaccgtcttcatggacagtcgcgccttcgcctacgccgatgagctcgtgaagacc

SEQ ID NO: 16070 - DNA, 267 bp, Zea mays
cccacgcgtccgactttcccaagacaaggagtacttcgctgaacttgcggttgatgctgtcttgaggcttaagggtagcaccaacttggaatctattcaaattctgaagaaacctggaggatctcctaaggattcctttttggacgaagggttcattcctgacaagaaaattggcattgggcagcccaagcgcattgagaatgccaaaattttggttgcaaacactgctatggacacagataaagttaagatatatggagcacgggt

SEQ ID NO: 16071 - DNA, 317 bp, Zea mays
ggacgcgtggtttggttgagagttccggccatgagcgagaagagattcatgcatggcgcaaatttcatgtgtgttttgcagacaaggatcgtgaagtaattaatataatgacaaagtcgtcaggggcgctagatcttgctcggagcaccggagggtcgcttagcaaggaccaagtcaaatccgccgttgatcagtatgtgaagtaccacgacctccacggaggcgaacaagaatcaaggaagtcaaattacgctgatttggcaaacaagtactatgatcttgtcactggcttctacgaatatggatggggcgactca

SEQ ID NO: 16072 - DNA, 284 bp, Zea mays
cacgcggtcggcacgagcggcgggtcgcggcgggcgccgacggaggcgaactcgaaggtggccatcaacgggttcggccgcatcgggcgcaacttcctgcagtgctggcacgggcgcggcgacgcctcgcccctcgacgtcatcgccatcaacgacaccggcggtgtcaagcaggcgtcccacctgctcaagtacgactccacgctcggcatcttcgacgccgacgtcaagcccgtcggcgacaacgccatctccgtcgacggcaaggtcatcaaggtcgtgtc

SEQ ID NO: 16073 - DNA, 315 bp, Zea mays
tggactcgctggaccagaacctggccaagaatgaggccggcggcatcatcggcacccggttcgagtcctccgaagtcaagtccaccccgttgcagccctacagcgaggtgttcggcctccagcggttccgcgagtgcgagctcatccacggccgctgggccatgctcgccaccctcggcgccctctccgtcgagtggctcaccggcgtcacctggcaggacgccggcaaggtggagctggtggacgggtcctcctacctgggccagccgctgccgttctccatctcgacgctcatctggatcgaggtgctcgtga

SEQ ID NO: 16074 - DNA, 317 bp, Zea mays
gcggcggcggtttccagggccatctgcgtccagaaaccgggctccaaatgcagcagggacagggaagcgacctccttcgcccgccgaacggtcgcggcgccgaggcccccgcgcgccaaagccgccggcgtcatccgctccgactccggcgcgggacggggccagcagtgctcgccgctgagggccgtcgttgacgccgcctcgatacagacgaccaaaaagagcaaatggcgcctcagtctcccgcgcgcaagctacaacggttcagggtccggtgctgcggcggctgagccgtctaccgtgggagacaccttgga

SEQ ID NO: 16075 - DNA, 316 bp, Zea mays
caggcaaccaagaagggcaaccttcgatactacccgtacaacattaactggaactatgggttacttcctcaaacatgggaggacccaacttctgcaaattctgaggttgaaggagcgtttggggataatgatcctgttgatgttgttgagataggtgaaagacgtgccaatgtcggggatgttcttaaggttaagccattggcagctttagcaatgattgatgagggagagcttgactggaaaattgtggccatttctttggatgacccgaaagcatctcttgtgaacgacgtagatgatgttgagaagcattttc

SEQ ID NO: 16076 - DNA, 315 bp, Zea mays
ccaagacggtcatctggaacgggcccatgggcgttttcgaatttgacaagttcgccgtaggaaccgaggctgtggcaaagaagctggcagaactcagcggcaagggcgtcacaactatcatcggaggcggagactccgtcgccgccgtcgagaaggtgggagttgctgacgttatgagccacatttccacgggaggtggcgctaccctggaattgttggaaggaaaggagcttccgggagttgttgcgttgaatgaagtcgccactgtgactgtatgaagcatgctttcattttgtttcgtcttcgtcttcacgt

SEQ ID NO: 16077 - DNA, 299 bp, Zea mays
gtagtttgcccggcaagcaaacatctccggcagccatggcgtccactgtaacagccgccaatagcagccatggaagcgccctgcgtacccgtaccgcctccccaaggccggtcgcgggctggagctgcagacgcacgctttccacgcctgcacaccaccaccacgggcggtcgtcacccagagctcgggttgtcgccgtccgagccgccggcactcagcgggcgacctggttgcccggactggacccgcccccatacctcgacggcacactaccaggtgacttcggcttcgaccccctg

SEQ ID NO: 16078 - DNA, 317 bp, Zea mays
cggggcaacaatggatgcgggggaccaggaggccgtgagcgcacgggtgcttaagggctccaacatcgtgctgggcccatacgcgcgcggcgacgcacaggtggtcaacgcagatcttgtaaagagcagcgtgcgtcccgatgactgccctcgggacggccttccggagtttgcactcgttggccggtccaacgtcggcaaatcgtcgctgctcaactcgcttgtccgccgcaagcgccttgcccttacctccaagaagcctgggaagacccaatgtatcaatcatttcaaagtaaatgacagctggtatcttgttg

SEQ ID NO: 16079 - DNA, 318 bp, Zea mays
agcagcctcatccccttgcccacttctacagcccctctgctgcagcaagaaggaaagaagctagcgcttatagcttgtcagccatggccaccgccgccgcgtctagcctcctcaagtcctccttcgcgggctcccggctcccggccgccacgcggaccacaccggcgtccctcgtggtggccaccggcccgcgcggcgccggcgcggggcccatctgcgcgtccatgtccatgtcctcctccaacccgccctacgacctgacgtccttccggttcagccccatcaaggagtccatcgtgtcccgcgagatgacccgtc

SEQ ID NO: 16080 - DNA, 316 bp, Zea mays
cgacgaggcgaagaggctcgtgggcgaggagggctacacggtgctggacatcagggacagggcgcacgcgagagggcacacatcaagtcctccacacacgtgcctctcttcattgagaaccaagacaacgacattgggaccatcgtgaagcgccactgcacaacaacttcgcggggctcttcttcgggctgcccttcaccaagctcaacccggacttcgccctgacagtcaaggacaagttctcgccggaaagcaagctgctggttgtctgccaggaaggtctcaggtcagcagctgctgcagatgcactggagaa

SEQ ID NO: 16081 - DNA, 318 bp, Zea mays
caaaaagacccgttggaattctacttgtgaaggttgtaagagcccaaaatctgcggaagaaggatctgctgggtaaatctgacccatacgtgaaacttaagatgtcagatgataaacttccatccaagaagacaactgtaaagcgcagcaatctcaatccagagtggaatgaagatttcaaatttgttgtgacagatccagagaaccaggctcttgaagttgatgtcttcgactgggaacaggttgggaaacatgaaaagatgggaatgaacatgatcacacttagagaactcccaccagaggagactaaagttacta

SEQ ID NO: 16082 - DNA, 311 bp, Zea mays
cccacgcgtccgcctgattggtctcagttccaggcatactataatgctgctgggacagctccagtgaccccacctttttttcatccatctgtagctccaagccatcaggggcacccatatatgtggggtccacagggccagggtattaccccatgacctggtgaaagggaccactgagccgtaatgcaaccattgtaactctggagataatccgtcatctaacatttgattattcaactggatagatgatgtctccttatgggacaccaccgccatatgcagcaatgtatgcacaaggtacaccatatcag

SEQ ID NO: 16083 - DNA, 92 bp, Zea mays
acaagagcgaggccgcactcccccacgagtcgactctccgaccgcacgctccgcgacgcgatggccgcggtccgcatcggatccttcaaaat

SEQ ID NO: 16084 - DNA, 311 bp, Zea mays
cggagatcctgctggacggcgagcacggcatcgagcgcacgttcgaggtggcgcagaaggtgtgggccgaaaccttctacgccatggcggagaacaacgtcatgttcgagggcatcctgctgaagccgtccatggtgacgcccggcgcggaggccaaggacagggccaccccggagcaggtggccgcgtacaccctcaagctcctccaccgccggatccccccctccgtgccagggatcatgttcctctccggcgggcagtcggaggtggaggcgacgcagaacctcaacgccatgaaccaggggcccaac

SEQ ID NO: 16085 - DNA, 312 bp, Zea mays
gcgttatctatggcaagggcttgggcagaggaggaagccaaaaaggcccgcgagcatgcacgcgcccttgaggaggcccggaaccaatgggagcgtcaaggaatcagagttgttgtcgaaggagaactgaaggatgacgcctcagctggggtgacatgggctaacgctggcaaagaaaacgcagtcgacgagtctatcaaccaggcagaagctctgctggagaagctcaagacaatgtctggtgagatggaggtgaggtctcggggtgcggtggagagagtgatgcagcatgtgaggtccttcatcgcaatc

SEQ ID NO: 16086 - DNA, 312 bp, Zea mays
cattaccacgcctcctcacaggcacacctcacacgagcagcagcggacgataagagatgtgctgaagctgaacggtggccatgtccaccggacgcacagaggaggccgccgggagcgcggagacggcgtgcgtgacgggcgccggcgggtacatcgcctcgtggctcgtcaagctcctcctctcccgtggctacaccgtccacggcaccgtccgcgacctcagtgacaataaaaccgctcatctgaagcggttagagaatgcttccgaaaacctcaagcttttcaaggctgatgtccttgactacgacgcta

SEQ ID NO: 16087 - DNA, 307 bp, Zea mays
tttattttttttttttttttttttcttttttttttaccggcaaccggatttacttaaagaagccaaatttgtatcgctgccaattccacaaacagaatttgcagacttttaatcaccagactgggaacaaacaatggaccgactgactcaagatgaaaacaaaacaagatatagaagtaggtcgtgattgtcgacgatgttgtgtccgaggaaggtctcgataatattattcacagcagtcatgcgctctttttccttttctcctcttcaatcttagccttaatgtaagagtacatagcaacaccag

SEQ ID NO: 16088 - DNA, 306 bp, Zea mays
cgcatccccgccggcgcccggctgcacagcagggcggcggcgtcgtccaggcacggcgtgcagaggctggacttcgccgacttctccgggctcaggccggggtcgtgctccgtgagcgctgccgcgcgggacgcgtccttctccgacgtccttgccgcgcagtcgtcgccaaggccaccggggagaacgccgtgagggcggccgccgaggcgaactacaaggtggcgatcaacggcttcggccgcatcggccggaacttcctccggtgctggcacggccgcgacgactcgccgatcgacgtcgtcg

SEQ ID NO: 16089 - DNA, 316 bp, Zea mays
cccgccacgaaattctccacgctccgatccaatcgcaacaatgaagttcggcaagagcctcaacaaccagatcgtggagacgctcccggactggcgcgacaagttcctgtcctacaaggacctcaagaagcggctgaagcagatcggcgccggctctggcgagcggcggacaagcgccacgggtgggggacgggcgcggcggatcctcgccgcctgcgatgaccccggaggaggccggattcgtcgcgctcctcgacgccgagctcgacaagttcaacgccttcttcctcgagaaggaggaggactacgtcatccg

SEQ ID NO: 16090 - DNA, 311 bp, Zea mays
tgcgatctgatcgacatggctgctgccaccatggctatcacctcccgctcgctcatcggcaagccggctgctggcacgatggacgtcttctgcgaggtccgcatcaccatgcgcaagaccgctgccaagcccaagccggctgcgttcggcagcccctggtacggtgccgaccgcgtcctgtacctgggcccgctgtccggctcgcccccgatctacctgaccggcgagttccccggcgactacgggtgggacaccgcggggctgtcggcggacccggagaccttcgccaagaaccgcgtgctggaggtgat

SEQ ID NO: 16091 - DNA, 312 bp, Zea mays
agcgactccactcactgcaattgattatgttcttgatgttgttgacctggtgctgattatgtctgtgaatcctgggtttggtggccagagctttatcgagagtcaagtaaagaaaattgcagaactgagaaggttatgtgcagagaagggagtgaacccctggattgaggttgatggtggtgttggtccgaaaaatgcctacaaggttattgaagctggcgcaaatgccattgtcgcaggttctgcagtttttggggctccagactacgctgaagctatcaaaggaataaagaccagccaaagacctctagc

SEQ ID NO: 16092 - DNA, 109 bp, Zea mays
cacaaagagaagaacctcggagctgagatggcacaagccatggcgtcgatgacaggtctctcgcagggcgtcctgctcagcaggcgctctgacagcagaaccaggacgg

SEQ ID NO: 16093 - DNA, 322 bp, Zea mays
tgctgtcaaagtacaaagacctggagttcaagcagcaatttcattagacatatatatcttgaggttcctagctagtcttgcaaggaaggctgccaagttgaacacagaccttccagctgtgcttgacgaatgggcatcaagcctattccgggagatggattatagagaagaagcaagaaatggacttaagttcagagaattgtttgggaaatttagagatgtgtcggttcctgaaatgtatctggaccagacaagaaggcgagtccttatcatggaatggatcgagggggaaaagttatcagaagtcagagatcaatatttg

SEQ ID NO: 16094 - DNA, 315 bp, Zea mays
cccacgcgtccgattcctccaaacgagccctaccgggtgatactaggccatgtaagggacaagctgtacaacacacgcgagcgtgctcgccatctgctggcatctggagtttctgaaatttcagcggaatcgtcatttaccagtatcgaagagttccttgagccacttgagctgtgctacaaatcactgtgtgactgcggcgacaaggccatcgcggacgggagcctcctggacctcctgcgccaggtgttcacgttcgggctctccctggtgaagctggacatccggcatgagtcggagcggcacaccgacgtg

SEQ ID NO: 16095 - DNA, 315 bp, Zea mays
ccggatcaagggcaagcagcaggtcatggtcggctactccgactccggcaaggacgccggccgcctgtccgcggcgtggcagctgtacagggcgcaggaggagatggcgcaggtggccaagcgctacggcgtcaagctcaccttgttccacggccgcggaggcaccgtgggcaggggtggcgggcccacgcaccttgccatcctgtcccagccgccggacaccatcaacgggtccatccgtgtgacggtgcagggcgaggtcatcgagttctgcttcggggaggagcacctgtgcttccagactctgcagcgctt

SEQ ID NO: 16096 - DNA, 123 bp, Zea mays
tcgaccttcaagtctcgctacgtagcagtgcaataaaaaaagcagccgcaatggcgagctgcaccatggccctctcctccacggccttcgctggcaaggccgtgaacgtgccgtcgtcgtccg

SEQ ID NO: 16097 - DNA, 311 bp, Zea mays
cttaattaattattaagggagagccatctcgaaacatgcatatatagaaattatttttcctcagatctcgccgtcaagcatacatgcattcggacgagaggcttttctacaagcttttaattgataatgtggtggagctgcttccttttgtttacacaccaactgtaggtgaggcctgccagaagtatgggtccatctttggacgaccacagggtctgtatgtcagcctgaaggacaaggggaaggtcctagaagttctaaggaactggccacataggaacattcaagttatctgtgttactgatggtgag

SEQ ID NO: 16098 - DNA, 309 bp, Zea mays
cccacgcgtccgatcaggtatagaagcagtcatcgttgctccttcgagagaattaggaatgcagattgtgcgagaagtggagaagattttgggtcctaatgacaaaagactggtccagcaacttgttggcggactaatcgttccaggcaggaagaagcattgaagaagaacaaaccaatcattgttgtcggaacacctggccgtatttctgaaatttctgcagcaggtaagctacacactcatggctgccgttttcttgtactggatgaagtcgaccagcttctgtcttttaattaccgtgaagatatg

SEQ ID NO: 16099 - DNA, 115 bp, Zea mays
cccacgcgtccgcccacgcgtccgtggcaatgatccagggggagatgcaattgatcaagaaaaggaggatgaggaagaaccaaggccgccacacccaagagtacaccaagcaatc

SEQ ID NO: 16100 - DNA, 107 bp, Zea mays
ggccattcttctcgccttactccctcacagaacccagtaaaatattgccagttccgctgtctagatggccccacgccgcctgctcgtcctctgcgtcgtcgccctcg

SEQ ID NO: 16101 - DNA, 309 bp, Zea mays
aatatttcccccatcattgtttgatgttatgctccacttgtcggtacatttacctgatgaggcaatacttagaggaccagtccaatatggatggatgtaccctgtagaaagaaggttatacactttgaaacattctgtgaggaacatggcacgacctgagggttcaattgcagaagcatatgttgctaatgaatgtttgcatacatgttcgaggtattttgacgatcttgagacaagacacaattacgagggaaggaatagagagcatgttgatatgagtaagggtgacttatctgttttccagcatgg

SEQ ID NO: 16102 - DNA, 307 bp, Zea mays
cggacgcgtgggcggacgcgtgggttctagatcgcgagcggccgccctttttttttttttttggtacccaagattgtttgctttcacaacgttacaacatatatatatcatatagtcatggacaggtacaatgcctctccagcagcaccagcaacaagggtggttagcagcagggactataaacaacagagtaccatccgcgttgatagtagattttttattactgcaaaattgatccccgcagcactaccggtagttgcggtagacgggagtgtacatgcagttctctgcatatttcaccaggtcg

SEQ ID NO: 16103 - DNA, 305 bp, Zea mays
gttctagatcgcgagcggccgccctttttttttttttttttttttatcttcactaatacgcctgaaatttactgccaatacagaacagataatttgtttatacactaaaatagctaggagaaatccacgcctcaagaaccaccagcaccaccacctaggccctcgttagccggtttgcggttcaagtatcttataacggcgtcttcaacccatggttggttatagaagtcggcacgtctttctttctcaatgttcctattcgcctcgccagcaaccagctttaaatctttgctctgagaagctat

SEQ ID NO: 16104 - DNA, 303 bp, Zea mays
caagcccgccggactggtcaagctgaacccggcgagcgagtacccgcccggcctggaagacacgctcatcctcaccatgaagggcatcgccgcaggcatgcagaacactggctaggcggcttctcttcactcacctgcagagtgcaccgcaataatcagcttccggatggtggcgttttgtcagttttggatggaaatgccgaactggcagcgtctgttttccctatgcatatgtaatttcctgcctctttatattcactcttgttgtcaagtccaagtggaaaatcttggcatattatacat

SEQ ID NO: 16105 - DNA, 302 bp, Zea mays
ctgctgtccgagtacgcgctctccggcggcaagcagggcgaccacaactctgaagacttcgtgcacctcttgctgtcgctgcagaaagactacggtctcaccacggataacatcaagggcatacttgtgaacatgttcgaagcagccatcgagacatcattcctggtgctggagtactccatgagcgagctgatgaacaaccgccacgtcctggccaagctccagaaggaggtgaggacggcgacgcccgacggccgcatggtgatggaggaggacctgagccggatgccatacctgaaggc

SEQ ID NO: 16106 - DNA, 303 bp, Zea mays
gttcggcgaggccgtctggttcaaggccggctcccagatcttcagcgagggcgggctggactacctcggcaaccccagcctgatccacgcgcagagcatcctcgccatctgggcctgccaggtcgtgctcatgggtgccgtcgagggctaccgcattgccggcgggccgctcggcgaggtcgtcgacccgctgtaccctggcggcagcttcgaccccctcggcctggccgacgaccccgaggccttcgccgagctcaaggtgaaggagctcaagaacggccgcctcgccatgttttccatgtt

SEQ ID NO: 16107 - DNA, 231 bp, Zea mays
aagaaccgcgagctggaggtgatccactgccgctgggccatgctgggcgcgctcgggtgcgtgttcccggagctgctcgcccgcaacggcgtcaagttcggcgaggccgtgtggttcaaggccgggtcccagatcttcagcgagggcgggcttgactacctcggcaacccgagcctgatccacgcgcagagcatcctggccatcttgggcgtgcaggtggtgctcatgggc

SEQ ID NO: 16108 - DNA, 307 bp, Zea mays
gaagaagacgagtgtcaagtgaacctgaaacttgcggtgtcactggctggtagcctgagtgtgagtgagtgatcgagctagctgagctccgatcctcgctagctaggataccgccataccacaagtcttcttcacaagtttaggagtgacagcaacaagagatcgatggcctctgccaccgtgctcaagtcctccttccttcccaagaagtccgaatggggcgccaccaggcaggccgccgcgcccaggccgcccaccgtctccatggtcgtcagcgcctccgcctacgccgatgagctcgtgaaga

SEQ ID NO: 16109 - DNA, 96 bp, Zea mays
gaagctagcgcttatagcttgtcagccatggccaccgccgccgcgtctagcctcctcaagtcctccttcgcggggtcccggctcccggccgccacg

SEQ ID NO: 16110 - DNA, 296 bp, Zea mays
cacaagcgcactctagcaatggcttctgaggttgtccgccctagcgacgccgagctactaaaggcacaagccgacatatggcggctcagcctctcctacctcacgcccctgtcactgaggtgcgccgtggagcttggcatccccacggcgatctaccgccatggcggggctgcctcagccgctgagctggtcacggcgctgtctctcccctccactaagctgccgttcctccgccgcctgcatgggctcctcgccgcgtcgggcgtgttcaccgtcgacaagcagagcacggagga

SEQ ID NO: 16111 - DNA, 289 bp, Zea mays
aagacccgccgtgagcatcgccatcgtggagcagtcggtgtcgccgggcggcggcgcgtggctgggcgggcagctgttctcggccatggtggtgcgcaaccggcgcacctgttcctggacgagctgggcgtggcgtacgacgaggccgaggactacgtggtcatcaagcacgccgcgctcttcacgtccacggtcatgagcctgctcctggcgcgccccaacgtcaagctgttcaacgccgtggccgtggaggacctcatcgtcaggggagggcgcgtcggcggcgtcg

SEQ ID NO: 16112 - DNA, 295 bp, Zea mays
tgaagagctgatgtttgagctctctatgtggcgctgcaacgatgagcttcgcgttcgtgccgaagagctccacagttcgtctggttccaaagttaccaagtattacatagaattctggaagcaaattcctccaaacgagccctaccgggtgatactaggccatgtaagggacaagctgtacaacacacgcgagcgtgctcgccatctgctggcatctggagtttctgaaatttcagcggaatcgtcatttaccagtatcgaagagttccttgagccacttgagctgtgctacaaa

SEQ ID NO: 16113 - DNA, 283 bp, Zea mays
ggaagatggacaactgcaagccctgcggcggcgctatcccgctgtgcatggtgtcggagttcgacctgccgctcgacctcgtggaccgcaagtgaggaagatgaagatgatttcgccgtccaacgtcgccgtcgacatcggccgcacgctcgcgccccacgagtacatcgggatggtcaggcgcgaggtgctcgacgcctacctccgctcacgggcacagtccgtcggcgcggaggtcgtcaacggcctcttcctaaggtacgaggcgcccaaagagccgaac

SEQ ID NO: 16114 - DNA, 302 bp, Zea mays
ttatttttttgtttttgaacacaattattccttgtcgattgaacaatagtttacatcatggtacaaaccgaaaaccagcgtgcgctcacatgcatccggacacctaaaggtcaccggcggcgcctccctcacttgccggggacgaagttgtgtggcgtaggcccaagcgttgttgttgacggggtcggcaatgtggtcagcgaggttctcgagcgggcccttcccggtgacgatggcctggacgaagaatccgaacatggagaacatggcgaggcggccgttcttgagctccttgaccttga

SEQ ID NO: 16115 - DNA, 307 bp, Zea mays
gtgacagcaacaagagatcgatggcctctgccaccgtgctcaagtcctccttccttcccaagaagtccgaatggggcgccaccaggcaggccgccgcgcccaggccgcccaccgtctccatggtcgtccgcgcctccgcctacgccgatgagctcgtgaagaccgcgaaaacgatcgcgtcgccggggcggggcatcctggcgatggacgagtcgaacgcgacgtgcgggaagcggctggcgtccatcgggctggagaacacggaggccaaccggcaggcgtaccgcacgctgctggtcacggcgcc

SEQ ID NO: 16116 - DNA, 297 bp, Zea mays
attcagtttgaggactttgccaatcacaatgcctttgatttgcttgaaaaatatagcaagagccatcttgttttcaatgatgatatccagggcacagcatcagtggtccttgcaggtttgttagcagcactcaagatggttggtgggaccctggcagagcagacgtatttgttccttggtgctggggaggctggaactggtattgcagaacttattgctcttgagatttcgaaacagacgaatgctccaattgaagagtgccgcaagaaggtttggctggtggactcaaagggtttg

SEQ ID NO: 16117 - DNA, 291 bp, Zea mays
gctccctctcgcggaggcctcgctctggttggaaggtttggagaaactccccggctcgaggagatcgtgacattgagaggacgatgggagggcgcgcgctcctcctcctcctcctggtctcggcgttggtctttcagatccacgcctccgacccgctgctgtacgagccgttcgatgaggactttgaggggagatgggtcgtctccaagaaggatgaataccaaggtgtgtggaggcatgccaagagtgatggtcatgaggactatggcctccttgttagtgagaaggcaa

SEQ ID NO: 16118 - DNA, 290 bp, Zea mays
cggacgctggtcggtagcagcctagcaggagcgcaccagcaagctcagccccccaggccccagccctactgccaccgcgccgaacgacatggccgagccggcggagcaccgtccagctgaggaggaggaggccgcggcggccggcgaggatgaggacaccggcgcccaggtcgcgcccatcgtgaagctggaggaggtcgccgttaccaccggagatgaggacgaggacgcgctcctggacatgaaggcgaactctaccggttcgacaaggaggggaacagtggaaagag

SEQ ID NO: 16119 - DNA, 296 bp, Zea mays
cccacgcgtccgagcaagcaagcaagcagcgagtacatacatactaggcagccaggcagccatggcgcccaccgtgatgatggcctcgtcggccaccgccgtcgctccgttccaggggctcaagtccaccgccagcctccccatcgcccgccgctcctccagaagcctcggcaacgtcagcaacggcggaaggatccggtgcatgcaggtgtggccggcctacggcaacaagaagttcgagacgctgtcgtacctgccgccgctgtcgacggacgacctgctgaagcaggtggact

SEQ ID NO: 16120 - DNA, 294 bp, Zea mays
cccacgcgtccggacgtcgaagctgtcgatgggcatcaagcgcgcgtcgcggtcgcacgcgtaccaccgccgtgggctctgggccatcaaggccaagaacggcggcgtcttccccaaggccgagaagcccgccgccgccgcggaacccaagttctaccccgccgacgacgtcaagcctcgcgttcccagcacccgcaagcctaatcccaccaagctcaggtcgagcatcacgcctgggacggtgctgatcctcctcgcggggcgcttcatggggaagagagtggtgttcctcaa

SEQ ID NO: 16121 - DNA, 98 bp, Zea mays
cccatgcgtccgcacgcatactgcatacacaacacagagcatcagaaggtgctgcgatctgatcgacatggctgctgccaccatggctatcacctccc

SEQ ID NO: 16122 - DNA, 293 bp, Zea mays
cccacgcgtccgctccacttggtgttgcgtctcaggggcggcatgcagatatttgtgaagactctgactggcaagactatcacccttgaggtcgagtcttctgataccatcgacaatgtcaaggccaagatccaggacaaggagggcatccctccggaccagcagcggctcatttttgccggcaagcagctcgaggacgggcgcacgctggccgactacaacattcagaaggagagcaccctccacttggtgctgcgtctcatgggtggcatgcagatcttcgtgaagacact

SEQ ID NO: 16123 - DNA, 293 bp, Zea mays
cccacgcgtccgctcctcgccatcacataaaaccagtgcaagcagaagcagcgcaatggcgagcagcaccatggccctctcctccacagccttcgccggcaaggcagtgaacgtgccgtcgtctctcttcggcgatgcccgcgtgacgatgcgcaagacggcggcgaaggcaaagccggcggcgagctccggcagcccgtggtacggccccgaccgcgtgctctacctgggcccgctgtgccgcgcggccccgagctacctgatcggcgaggtcccgggcgactacggctggg

SEQ ID NO: 16124 - DNA, 292 bp, Zea mays
cggaggccttccatcccaggcctttgaatacatcaaatacaatggtggccttgacactgaggaatcttacccttaccaaggtgtcaatggaatctgcaagtttaagaatgagaatgttggagtcaaggttttggactcggttaacatcaccctgggtgctgaggatgaactgaaggatgctgttggtctggttcgcccagttagcgttgccttcgaggtgatcactggtttcaggctgtacaagagcggagtttacactagcgaccattgtggaactacaccgatggatgtg

SEQ ID NO: 16125 - DNA, 288 bp, Zea mays
gaacacttgattgattcagtaggtagctagctagctgaatcacaatggatcctaccaagttccgtccgtccagtagccacgacacgacggtgacgacgacgaacgctggcgctcctgtgtggaacgacaacgaggcgctgactgtggggcctcgcggtcccatcctgctggaggactaccacctgatcgagaaggtggcgcacttcgcgcgcgagcgatctccggagcgcgtggtgcaccgcgcggcgcctcggccaagggcttcttcgagtgcacccacgacgtgac

SEQ ID NO: 16126 - DNA, 291 bp, Zea mays
tagcaaccggtccaacactttcacgctcaggcgctcagctctagcaatggctgcctccaccatggcgatctcctccacggcgatggccggtacccccatcaaggtgggctccttcggcgagggccgcatcaccatgcgcaagaccgtgggcaagcccaaggtggcggcgtccggcagcccctggtacggccccgaccgcgtcaagtacctcggccccttctccggcgagcccccgagctacctcaccggcgagttccccggcgactacggctgggacaccgccgggctgtc

SEQ ID NO: 16127 - DNA, 318 bp, Zea mays
ggtgttgcaggtcagatcatcccatggaactttcctcttctgatgtatgcctggaaagttggccctgctttggcatgtggaaatactctcgtgctcaagactgctgaacaaacccctctatcggctttgtatatctccaaattgttgcatgaggctggactacctgagggtgttgtgaatgtcgtttctggttttggccctactgctggtgctgctcttgctagtcacatggatgttgataagatcgcatttactggatctaccgatactggaaaaattattctcgagttggctgcaaagagcaaccttaagacagtg

SEQ ID NO: 16128 - DNA, 317 bp, Zea mays
gcgactacaaggtggagatggtgaacgacgggatgcaggaattcttcgtcgaattcaagggcccggccgaaagtatctaccaaggtggtgtctggaaggttcgggtagaactgcctgatgcatacccttacaaatccccgtccatcggcttcatcaacaagatttatcacccgaatgtcgatgagatgtctggctctgtctgtttggatgtcataaaccagacatggagcccaatgtttgatctagtaaatgtttttgaagtattccttccacagctgttgctgtacccaaatccttctgatccattaaatggggag

SEQ ID NO: 16129 - DNA, 317 bp, Zea mays
ccgccgtgaacgtgcagtgcatggtgttcggcaacatggggaacacttctggcaccggcgtgctcttcactaggaaccccaacaccggagagaagaagctgtatggcgagttcctggtgaacgctcagggtgaagatgtggttgccggaataagaaccccagaggaccttgacgccatgaagaacctcatgccacaggcctacgacgagcttgttgagaactgcaacatcctggagagccactataaggaaatgcaggatatcgagttcactgtccaggaaaacaggctgtggatgttgcagtgcaggacagggaaa

SEQ ID NO: 16130 - DNA, 318 bp, Zea mays
gtgagtgaacaccagccgtattgtcccgactcctgacccctaccgatcctcgcctgctgcagccatggcgacctccgcggcgctctccaccgccgccaatcccacccagctctaccggtcccgcgcttcgctgggcaagccggtgaaggggcttggcctgagcatgggccgcgagcgcgcccagcggagcattgtgtgccaggcggcgagcagcatctccgccgaccgcgtccccgacatggagaagcggaagctgatgaacctcctcctcctcggcgccatctcgttgcccaccgtcggcatggtcgtcccctacgg

SEQ ID NO: 16131 - DNA, 318 bp, Zea mays
tgcttcctcccaccacagtccactccactcgccggccctgcagctcagtatttgactgagactggtggtggagctgctagcagcgagcctgctacttcctggtcctgacggtgcgttcagacctcagaccagtgccgacgacgagctgtgaggagagggcaaggaagccagcctgtgaggaaggcggcgatggagaggtacgaggtgatcaaggacataggatcgggcaacttcggggtggccaagctggtccgggacgtcaggaccaaggagctcttcgcggtcaagttcatcgaacgggggatgaagattgatgag

SEQ ID NO: 16132 - DNA, 319 bp, Zea mays
gaagaagacgagtgtcaagtgaacctgaaacttgcggtgtcactggctggtatagcctgagtgtgagtgagtgatcgagctagctgagctccgatcctcgctagctagctaggataccgccataccacaagtcttcttcacaagtttaggagtgacagcaacaagagatctcgatggcctctgccaccgtgctcaagtcctccttccttcccaagaagtccgaatggggcgccaccaggcaggccgccgcgcccaggcctgccaccgtctccatggtcgtccgcagcctcggctacggcgatgagctcgtgaagaccgc

SEQ ID NO: 16133 - DNA, 303 bp, Zea mays
cccacgcgtccgccccgaccccgcgcgccgcgaccagcagccatgtcgtgctcgcacctctccaccgggtggtcctcctcggcgatcgccagcagcgcgtcgaccacccgacggcggtcccccccgcggtcgggtctcctggtgcggtgttccctccgtgagctccgcacccgcatcgactccgtcaggaacacgcagaagatcacggagccatggagcttgttgccgccgccaaggtccggcgcgcgcaggaggccgtcgtctcgtctcgggctttctcggaggcgctggtggaggtgctct

SEQ ID NO: 16134 - DNA, 308 bp, Zea mays
gcaaccggtccaacactttcacgctcaggcgctcagctctagcaatggctgcctccaccatggcgatctcctccacggcgatggccggtagccccatcaaggtgggctccttcggcgagggccgcatcaccatgcgcaagaccgtgggcaagcccaaggtggcggcgtccggcagcccctggtacggccccgaccgcgtcaagtacctcggccccttctgcggcgagcccccgagctacctcaccggcgagttccccggcgactacggctgggacaccgccgggctgtccgccgaccccgagaccttc

SEQ ID NO: 16135 - DNA, 310 bp, Zea mays
gctactagctagctagcagcactgcgggtacgtacccaactactacacattacgtacgtgagctagctagctagcagctagtgatagagaccagatcagctgcagcggcgacgatggctcctgagaagctgaagctgctcgtcggagtgctggccctgcagttccttctggcagggttccacatcgtctccagggcggcgctcaacatgggcatcagcgagatcgtgttcatggtgtacaggaacctcatctccctcgccttgctcgctccgttcgcctacttcctcgagaagaaagacaggccgccact

SEQ ID NO: 16136 - DNA, 311 bp, Zea mays
cccacgcgtccgcccacgcgtccgacggactgctcgttgacccacacgaccagaacgccatcgctgatgcactgctgaagcttgtggcagacaagaacctgtggcaggaatgccggagaaacgggctgcgcaacatccacctctactcatggccggagcactgccgcacttacctcaccagggtggccgggtgccggttaaggaacccgaggtggctgaaggacacaccagcagatgccggagccgatgaggaggagttcctggaggattccatggacgctcaggacctgtcactccgtctgtccatcgac

SEQ ID NO: 16137 - DNA, 312 bp, Zea mays
ctctcctacggtactgctgcctaccgcgcgtctcgtcccttcgctgccgctctatctatctcggccggagccatgggcggcggtggcgcggcgctgctgctgctggtgatgtgggcgggcgtggcgtcggcggccgtgtacgaggtgggcggcacgattgggtggaccgtcatgggcaaccccgactacgccgcctgggccagctccaagcagatcgtcatcggcgacaccgttgtgttcacgtataacaagcagttccacaacgtgctggcggtgagcaaggcggactacaagaagtgcatcgccaccaag

SEQ ID NO: 16138 - DNA, 273 bp, Zea mays
acaaaaagcagccgcaatggcgagcagcaccatgggcctctcctccacgggcttcgccggcaaagccgtgaacgtgacgtcgtcgtccggcttcggcgaggcccgcgtgacgatgcgcaacacggcggcagagccaagccagcggcggcgtccgggaggccgtggtacggccccgaccgcgtggtgtacctggggccactgtgcggcgagccaccgagctacctgacgggcgagttcgccggcgactacgggtgggacaacgcggggctgtcg

SEQ ID NO: 16139 - DNA, 319 bp, Zea mays
tggagggagggagacgggagaaccagggagcggaggcgtgcgtgctgcggcctgcggctgcaggaccagagatcagctgactgagctagggtctgggactgggaggcggagatgtcgacgccggcgaggaagcgcctgatgcgggacttcaagcggttgcagcaggacccgcccgccggcatcagcggcgcgccgcacgacaacaacatcatgctctggaacgccgtcatattcgggccggatgacacgccgtgggacggaggcacgttcaagctgactctgcaatttacagaagattaccccaacaaacctccgactg

SEQ ID NO: 16140 - DNA, 307 bp, Zea mays
cagcgccactgtccagtgcgcgcgtcaagcttgcttagctagccgccatggcctccctcgccgccgtctccgtgaagcccgtggccatcaagggtctcgccggcagctccatctccggaaggaagctcgccgtcgccaggccgtcggccgctccatccgcaggccccgcgcagcgccgtggtggccaagtacggcgacaagagcgtctactttgacctcgacgacatcggcaacaccaccggacagtgggacctctacggctctgacgcgccctcgccctacaacccgctacagagcaagttcttcg

SEQ ID NO: 16141 - DNA, 306 bp, Zea mays
tgagtacaagatggtgagctcctcgtcgccggtggtcaacgtgtacccgctcgccaactacacgttcggcaccaaggagcccaagatggagaaggacacctccgtcgccgaccgcctcgaccgtatgaaggtcaactacatgaaagaaggaatgcgtacaagtgttgaagcaatcctattggagcaagagcacaaccatcctcacatactgctcctgcaaatcggtaatacattctgcaaacttcctggtggacggttgaagcctggagaaaatgaaatcgagggtttgaaaagacagttatgcag

SEQ ID NO: 16142 - DNA, 299 bp, Zea mays
aatttattacggtgatgactgggaaggtctttttgaagctattactggttatggccttggtggttcttctatggctcttttcggccgcgttggtggtggtatttataccaaggctgctgatgttggtgctgaccttgtggggaaggtagaaagaaacattcctgaggacgatccaagaaacccagctgttattgctgacaatgttggtgataatgttggagatattgctggaatgggatcagatccctttggctcatatgctgaatcatcatgtgctgctcttgttgtggcctctatct

SEQ ID NO: 16143 - DNA, 298 bp, Zea mays
atcttaacaaggctatctgcagaactgcacaggatatcgcgaaccaattattgctgagaacactgcaaagtataagatagactctgttgagtttgaatcacttactttgggtagcttaccacccacctttcaagggatgaaagtctatgtcacagaggagcaagagctgataatggaaccatctcttaaatgggctgcaaacccaaatattactgttgctgtaaaagcctatggtttgaaagctactatccagattgtggatctacaagtctttgcatcacctcgcattactctgaag

SEQ ID NO: 16144 - DNA, 302 bp, Zea mays
cccacgcgtccgggagcagtcggtgtcgccgggcggcggcgcgtggctgggcgggcagctgttctcggccatggtggtgcgcaaccggcgcacctgttcctggacgagctgggcgtggcgtacgacgaggccgaggactacgtggtcatcaagcacgccgcgctcttcacgtccacggtcatgagcctgctcctggcgcgccccaacgtgaagctgttcaacgccgtggccgtggaggacctcatcgtcaggggagggcgcgtcggcggcgtcgtcaccaactgggcgctcgtgtccatgaa

SEQ ID NO: 16145 - DNA, 304 bp, Zea mays
cccacgcgtccgccactcccacgacgacggcgcgtcgtcagctggctctgaccgcgtggacggcatagagctcgccgcggcggcgccggcgccggcgcgtcgttaagaagcaggtgaggttcgcggtggctccgcccaggagccccggtgtggacgagaccgtgctggaggagctgcacgagctgtgcgaggcgcgcgaggccggcacgcgttcatcctgggccactcgcacgtgaagaccaagcccgggtcgtcgatactcaagaggctggccgtcggcgtcggctacaacttcttgcgacgg

SEQ ID NO: 16146 - DNA, 306 bp, Zea mays
cccacgcgtccgcaacacagcacaggcagctcgagagagagagagagagaaagatgtcgtggttcgggcaccaccaccacaaccagccggctcccccggcgtcgggccccaaccaggtgttcaagatcttctgccgcgccaacgagaactactgcctggccgtccgcgacggcgccgtcgtgctggccccggtcaaccccaaggacgaccaccagcactggtacaaggacatgcgcttcagcacccgggtcaaggacgaggaaggcatgccggcgttcgcgctcgtcaacaaggccacggggctcg

SEQ ID NO: 16147 - DNA, 313 bp, Zea mays
gccaccatcgaccttcaagtctcgctacgtagcagtgcaataaaaaaagcagccgcaatggcgagcagcaccatggccctctcctccacggccttcgccggcaaggccgtgaacgtgccgtcgtcgtccgccttcggcgaggcccgcgtgacgatgcgcaagacggcggcgaaggccaagccagcggcggcgtccgggagcccgtggtacggccccgaccgcgtgctgtacctgggcccactgtccggcgagccaccgagctacctgacgggcgagttcccgggcgactacggctgggacaccgcggggctgt

SEQ ID NO: 16148 - DNA, 317 bp, Zea mays
aacacgcagaagatcacggaggccatgaagctggtggccgccgccaaggtccggcgcgcgcaggaggccgtcgtctcctctcgccctttctcggaggcgctggtggaggtgctctacaacatgaaccaggagatccagacggaggacatcgacctgcccctcacccgcacccgccccgtcaagaaggtggccctcgtggtcctgaccggcgagcgcggcctctgcgggagcttcaacaacaacgtgctcaagaaggcggaaacccgcatcgatgagctcaagcagctgggcctccagtacaccgtcgtcagcgtggg

SEQ ID NO: 16149 - DNA, 316 bp, Zea mays
ccatagcatacatagcagagcaggcgcacggcgcaccgcacacctcactgccgctcccttctcgtctcgtctcctctcctctcctcggcggatccggcaccgacccaccgcccctctgctcgctccttccgccggaatcgctgctcctctctgtgtgctgtcgatttgtgcggcgactgttagtttggttcggtcccatccttctgttgatcaatggctgacggtgaggatatccagccacttgtgtgtgacaatggcactggaatggtcaaggctggctttgctggcgatgatgcgcccagagcagtgttcccta

SEQ ID NO: 16150 - DNA, 314 bp, Zea mays
gcgacgtcgccgccgccgctgctggcggccggatcaccatgggcaacgacctgtggtacggcccggaccgcgtcaagtacctgggccccttctccgcccagacgccctcgtacctgaccggcgagttccccggcgactacggctgggacaccgccgggctgtccgcggacccggatgcgttcgcgctgaacagggcgctggaggtgatccacgggcggtgggcgatgctgggtgcgctgggctgcatcaccccggaggtgctggagaagtgggtgcgcgtggacttcaaggagcccgtgtggttcaaggccggc

SEQ ID NO: 16151 - DNA, 316 bp, Zea mays
aagagagtacgtggaggagcagccatggcttcatcggtggccgccgcggcgagcacattcctgggcacccgcctggcggacccggcgccacagaacgggcgcatcgtggcccggttcgggttcgggttgggcggcaaggcgaacctgctccgaagaaggtggcgaagacatcgacctcctctgaccggccgctgtggttccccggcgccgtggcgctcgactacctggacggctcgctggtcggcgactacgggttcgacccgttcggtctcgggaagcccgtggagtacctgcagttcgagttggactcgctgga

SEQ ID NO: 16152 - DNA, 310 bp, Zea mays
  unsure (1)..(310): unsure at all n locations
ccggcagcccgtggtacggccccgaccgcgtgctctacctgggcccgctgtccggcgcgcccccgagctacctgacgggcgagttcccgggcgactacggctgggataccgcggggctgtcggcggacccggagacgttcgccaagaaccgggagctggaggtcatccactcccgctgggccatgctgggcgcgttgggctgcgtgttcccggagctgctcgcccgcaacggggtcaagttcggcgaggccgtgtggttcaaggccgggtcccagatcttcagcgagggtgngctggactacctcggcaa

SEQ ID NO: 16153 - DNA, 310 bp, Zea mays
agcaagcaagctcgatctactactactactagctggtacacatactagccagcctgccagccagcttgccatggcgcccaccgtgatgatggcctcgtcggcaaccgccgtcgccccgttccagggtctcaagtccgccgccagcctccccgtcgcccgccgcagcaccaggagcctcggcaacgtcagcaacggcggaaggatccggtgcatgcaggtgtggccggcctacggcaacaagaagttcgagacgctgtcgtacctgccgccgctgtcgacggacgacctgctgaagcaggtggactacctg

SEQ ID NO: 16154 - DNA, 309 bp, Zea mays
gtcatctcttctccggcgaagaacccccagtcgcccaccagatcacttgttaaactttgttgaggggtgatggcggtttctttcgcaaacctcagctccgaggcagggcttaaaaagcttgatgagtaccttctcactcgcagctacatcactggctaccaagcttccaaggatgacttggctgtctacacttcgttttcgtctgctccctcgtccaagtatatcaacgtagcaaggtggtttaatcacattgatgcgctcgtgaggctgagcggaattactgcagagggccaaggtgtgaaggttgaa

SEQ ID NO: 16155 - DNA, 310 bp, Zea mays
cccacgcgtccgacgagatcctcagctcgccggaccgcgcctgctcgctggccaagcaggccttcgacgaagctatttcagagctggatagtcttggggaagagtcgtacaaggatagcaccctcatcatgcagcttcttcgtgacaacctcaccttgtggacttctgacatgcaggaggatggtggcgatgaaatgcgggatgcaaacaagcctgacgaggagcagtagtagtcgtcatgccatgccatgccatgcttgtacaaggaccattttcgtgtgtcctttccttcaatcgtcgacctttcgtt

SEQ ID NO: 16156 - DNA, 308 bp, Zea mays
cggaccgtgggggagatctgtcctgtgcggaggctcgacaggcatattcatattcttctactgcatctactactaccacgcgcggtcggacatgtcggggattatgcagacgtccttcttcttcggctacatgacctgcgtgtgctacggcttcttcctcatgctgggaacggtcggcttccgcgcgtcgctcttcttcgtgcgccacatctaccgctccatcaagtgcgagtaagcgccggacgtgcgcacgcggtctggcatgctcatggctgttgttccgggtggcttgggatccaattgcagaa

SEQ ID NO: 16157 - DNA, 310 bp, Zea mays
gagcagcactgatatcggtgggggatggcagcttgcttggaaatggtcagataaggaaggtgagaatggtaggaaggaaggtggtttcaaaagagtctacttgcaccaagagggagttcctggctcaagaaggggctcaattgtttcacttcccggtggtggcgatgttcttgagggtagtgagtttgtacatgctgctgctttagtaagtcagtcagcacttttctcaaagggtcttgctgaaccacgcatgtcagatgctgccatggttcacccatctgaggtagctgccaaaggttcacgttggaaa
